United States Patent Application Publication US 2020/0163878 A1 - sequence listing, part 2

SEQ ID NO: 5279 - protein, 566 aa, Artificial Sequence
  derived and/or modified protein sequence (wt) from hemagglutinin__InfluenzaA__ADK33811
MKAILVVLLYTFATANADTLCIGYHANNSTDTVDTVLEKNVTVTHSVNLLEDKHNGKLCKLRGVAPLHLGKCNIAGWILGNPECESLSTASSWSYIVETSSSDNGTCYPGDFIDYEELREQLSSVSSFERFEIFPKTSSWPNHDSNKGVTAACPHAGAKSFYKNLIWLVKKGNSYPKLSKSYINDKGKEVLVLWGIHHPSTSADQQSLYQNADAYVFVGTSRYSKKFKPEIAIRPKVRDQEGRMNYYWTLVEPGDKITFEATGNLVVPRYAFAMERNAGSGIIISDTPVHDCNTTCQTPKGAINTSLPFQNIHPITIGKCPKYVKSTKLRLATGLRNVPSIQSRGLFGAIAGFIEGGWTGMVDGWYGYHHQNEQGSGYAADLKSTQHAIDEITNKVNSVIEKMNTQFTAVGKEFNHLEKRIENLNKKVDDGFLDIWTYNAELLVLLENERTLDYHDSNVKNLYEKVRSQLKNNAKEIGNGCFEFYHKCDNTCMESVKNGTYDYPKYSEEAKLNREEIDGIKLESTRIYQILAIYSTVASSLVLVVSLGAISFWMCSNGSLQCRICI

SEQ ID NO: 5280 - protein, 566 aa, Artificial Sequence
  derived and/or modified protein sequence (wt) from hemagglutinin__InfluenzaA__ADK33821
MKAILVVLLYTFATANADTLCIGYHANNSTDTVDTVLEKNVTVTHSVNLLEDKHNGKLCKLRGVAPLHLGKCNIAGWILGNPECESLSTASSWSYIVETSSSDNGTCYPGDFIDYEELREQLSSVSSFERFEIFPKTSSWPNHDSNKGVTAACPHAGAKSFYKNLIWLVKKGNSYPKLSKSYINDKGKEVLVLWGIHHPSTSADQQSLYQNADAYVFVGTSRYSKKFKPEIAIRPKVRDQEGRMNYYWTLVEPGDKITFEATGNLVVPRYAFTMERNAGSGIIISDTPVHDCNTTCQTPKGAINTSLPFQNIHPITIGKCPKYVKSTKLRLATGLRNVPSIQSRGLFGAIAGFIEGGWTGMVDGWYGYHHQNEQGSGYAADLKSTQNAIDEITNKVNSVIEKMNTQFTAVGKEFNHLEKRIENLNKKVDDGFLDIWTYNAELLVLLENERTLDYHDSNVKNLYEKVRNQLKNNAKEIGNGCFEFYHKCDNTCMESVKNGTYDYPKYSEEAKLNREEIDGVKLESTRIYQILAIYSTVASSLVLAVSLGAISFWMCSNGSLQCRICI

SEQ ID NO: 5281 - protein, 566 aa, Artificial Sequence
  derived and/or modified protein sequence (wt) from hemagglutinin__InfluenzaA__ADK33831
MKAILVVLLYTFATANADTLCIGYHANNSTDTVDTVLEKNVTVTHSVNLLEDKHNGKLCKLRGIAPLHLGKCNIAGWILGNPECESLSTASSWSYIVETSSSDNGTCYPGDFIDYEELREQLSSVSSFERFEIFPNTSSWPNHDSNKGVTAACPHAGAKSFYKNLIWLVKKGNSYPKLSKSYINDKGKEVLVLWGIHHPSTSADQQSLYQNADAYVFVGTSRYSKKFKPEIAIRPKVRDQEGRMNYYWTLVEPGDKITFEATGNLVVPRYAFAMERNAGSGIIISDTPVHDCNTTCQTPKGAINTSLPFQNIHPITIGKCPKYVKSTKLRLATGLRNVPSIQSRGLFGAIAGFIEGGWTGMVDGWYGYHHQNEQGSGYAADLKSTQNAIDEITNKVNSVIEKMNTQFTAVGKEFNHLEKRIENLNKKVDDGFLDIWTYNAELLVLLENERTLDYHDSNVKNLYEKVRSQLKNNAKEIGNGCFEFYHKCDNTCMESVKNGTYDYPKYSEEAKLNREEIDGVKLESTRIYQILAIYSTVASSLVLVVSLGAISFWMCSNGSLQCRICI

SEQ ID NO: 5282 - protein, 566 aa, Artificial Sequence; identical to SEQ ID NO: 4089
  derived and/or modified protein sequence (wt) from hemagglutinin__InfluenzaA__ADK33841

SEQ ID NO: 5283 - protein, 566 aa, Artificial Sequence; identical to SEQ ID NO: 4836
  derived and/or modified protein sequence (wt) from hemagglutinin__InfluenzaA__ADK33851

SEQ ID NO: 5284 - protein, 566 aa, Artificial Sequence; identical to SEQ ID NO: 2669
  derived and/or modified protein sequence (wt) from hemagglutinin__InfluenzaA__ADK33861

SEQ ID NO: 5285 - protein, 566 aa, Artificial Sequence
  derived and/or modified protein sequence (wt) from hemagglutinin__InfluenzaA__ADK33871
MKAILVVLLYTFATANADTLCIGYHANNSTDTVDTVLEKNVTVTHSVNLLEDKHNGKLCKLRGVAPLHLGKCNIAGWILGNPECESLSTASSWSYIVETSSSDNGTCYPGDFIDYEELREQLSSVSSFERFEIFPKTSSWPNHDSNKGVTAACPHAGAKSFYKNLIWLVKKGNSYPKLSKSYINDKGKEVLVLWGIHHPSTSADQQSLYQNADAYVFVGTSRYSKKFKPEIAIRPKVREQEGRMNYYWTLVEPGDKITFEATGNLVIPRYAFAMERNAGSGIIISDTPVHDCNTTCQTPKGAINTSLPFQNIHPITIGKCPKYVKSTKLRLATGLRNVPSIQSRGLFGAIAGFIEGGWTGMVDGWYGYHHQNEQGSGYAADLKSTQNAIDEITNKVNSVIEKMNTQFTAVGKEFNHLEKRIENLNKKVDDGFLDIWTYNAELLVLLENERTLDYHDSNVKNLYEKVRSQLKNNAKEIGNGCFEFYHKCDNTCMESVKNGTYDYPKYSEEAKLNREEIDGVKLESTRIYQILAIYSTVASSLVLLVSLGAISFWMCSNGSLQCRICI

SEQ ID NO: 5286 - protein, 566 aa, Artificial Sequence
  derived and/or modified protein sequence (wt) from hemagglutinin__InfluenzaA__ADK33881
MKAILVVLLYTFATANADTLCIGYHANNSTDTVDTVLEKNVTVTHSVNILEDKHNGKLCKLRGVAPLHLGKCNIAGWILGNPECESLSTASSWSYIVETSSSDNGTCYPGDFIDYEELREQLSSVSSFERFEIFPKTSSWPNHDSNKGVTAACPHAGAKSFYKNLIWLVKKGNSYPKLSKSYINDKGKEVLVLWGIHHPSTSADQQSLYQNADAYVFVGTSRYSKKFKPEIAIRPKVRDQEGRMNYYWTLVEPGDKITFEATGNLVVPRYAFAMERNAGSGIIISDTPVHDCNTTCQTPKGAINTSLPFQNIHPITIGKCPKYVKSTKLRLATGLRNVPSIQSRGLFGAIAGFIEGGWTGMVDGWYGYHHQNEQGSGYAADLKSTQNAIDEITNKVNSVIEKMNTQFTAVGKEFNHLEKRIENLNKKVDDGFLDIWTYNAELLVLLENERTLDYHDSNVKNLYEKVRSQLKNNAKEIGNGCFEFYHKCDNTCMESVKNGTYDYPKYSEEAKLNREEIDGVKLESTKIYQILAIYSTVASSLVLVVSLGAISFWMCSNGSLQCRICI

SEQ ID NO: 5287 - protein, 566 aa, Artificial Sequence
  derived and/or modified protein sequence (wt) from hemagglutinin__InfluenzaA__ADK33891
MKAILVVLLYTFATANADTLCIGYHANNSTDTVDTVLEKNVTVTHSVNLLEDKHNGKLCKLRGIAPLHLGKCNIAGWILGNPECESLSTASSWSYIVETSSSDNGTCYPGDFIDYEELREQLSSVSSFERFEIFPKTSSWPNHDSNKGVTAACPHAGAKSFYKNLIWLVKKGNSYPKLSKSYINDKGKEVLVLWGIHHPSTSADQQSLYQNADAYVFVGTSRYSKKFKPEIAIRPKVRDQEGRMNYYWTLVEPGDKITFEATGNLVVPRYAFAMERNAGSGIIISDTPVHDCNTTCQTPKGAINTSLPFQNIHPITIGKCPKYVKSTKLRLATGLRNVPSIQSRGLFGAIAGFIEGGWTGMVDGWYGYHHQNEQGSGYAADLKSTQNAIDEITNKVNSVIEKMNTQFTAVGKEFNHLEKRIENLNKKVDDGFLDIWTYNAELLVLLENERTLDYHDSNVKNLYEKVRNQLKNNAKEIGNGCFEFYHKCDNTCMESVKNGTYDYPKYSEEAKLNREEIDGVKLESTRIYQILAIYSTVASSLVLVVSLGAISFWMCSNGSLQCRICI

SEQ ID NO: 5288 - protein, 566 aa, Artificial Sequence; identical to SEQ ID NO: 4836
  derived and/or modified protein sequence (wt) from hemagglutinin__InfluenzaA__ADK33901

SEQ ID NO: 5289 - protein, 566 aa, Artificial Sequence
  derived and/or modified protein sequence (wt) from hemagglutinin__InfluenzaA__ADK33911
MKAILVVLLYTFATANADTLCIGYHANNSTDTVDTVLEKNVTVTHSVNLLEGKHNGKLCKLRGVAPLHLGKCNIAGWILGNPECESLSTASSWSYIVETSSSDNGTCYPGDFIDYEELREQLSSVSSFERFEIFPKTSSWPNHDSNKGVTAACPHAGAKSFYKNLIWLIKKGNSYPKLSKSYINDKGKEVLVLWGIHHPSTSADQQSLYQNADAYVFVGTSRYSKKFKPEIAIRPKVRDQEGRMNYYWTLVEPGDKITFEATGNLVVPRYAFAMERNAGSGIIISDTPVHDCNTTCQTPKGAINTSLPFQNIHPITIGKCPKYVKSTKLRLATGLRNIPSIQSRGLFGAIAGFIEGGWTGMVDGWYGYHHQNEQGSGYAADLKSTQNAIDEITNKVNSVIEKMNTQFTAVGKEFNHLEKRIENLNKKVDDGFLDIWTYNAELLVLLENERTLDYHDSNVKNLYEKVRSQLKNNAKEIGNGCFEFYHKCDNTCMESVKNGTYDYPKYSEEAKLNREEIDGVKLESTRIYQILAIYSTVASSLVLVVSLGAISFWMCSNGSLQCRICI

SEQ ID NO: 5290 - protein, 566 aa, Artificial Sequence
  derived and/or modified protein sequence (wt) from hemagglutinin__InfluenzaA__ADK33931
MKAILVVLLYTFATANADTLCIGYHANNSTDTVDTVLEKNVTVTHSVNLLEDKHNGKLCKLRGVAPLHLGKCNIAGWILGNPECESLSTASSWSYIVETSSSDNGTCYPGDFIDYEELREQLSSVSSFERFEIFPKTSSWPNHDSNKGVTAACPHAGAKSFYKNLIWLVKKGNSYPKLSKSYINDKGKEVLVLWGIHHPSTSADQQSLYQNADAYVFVGTSRYSKKFKPEIAIRPKVREQEGRMNYYWTLVEPGDKITFEATGNLVVPRYAFAMERNAGSGIIISDTPVHDCNTTCQTPKGAINTSLPFQNIHPITIGKCPKYVKSTKLRLATGLRNVPSIQSRGLFGAIAGFIEGGWTGMVDGWYGYHHQNEQGSGYAADLKSTQNAIDEITNKVNSVIEKMNTQFTAVGKEFNHLEKRIENLNKKVDDGFLDIWTYNAELLVLLENERTLDYHDSNVKNLYEKVRSQLKNNAKEIGNGCFEFYHKCDNTCMESVKNGTYDYPKYSEEAKLNREEIDGVKLESTRIYQILAIYSTVASSLVLLVSLGAISFWMCSNGSLQCRICI

SEQ ID NO: 5291 - protein, 566 aa, Artificial Sequence
  derived and/or modified protein sequence (wt) from hemagglutinin__InfluenzaA__ADK33941
MKAILVVLLYTFATANADTLCIGYHANNSTDTVDTVLEKNVTVTHSVNLLEDKHNGKLCKLRGVAPLHLGKCNIAGWILGNPECESLSTASSWSYIVETSSSDNGTCYPGDFIDYEELREQLSSVSSFERFEIFPKTSSWPNHDSNKGVTAACPHAGAKSFYKNLIWLVKKGNSYPKLSKSYINDKGKEVLVLWGIHHPSTSADQQSLYQNADAYVFVGTSRYSKKFKPEIAIRPKVRDQEGRMNYYWTLVEPGDKITFEATGNLVVPRYAFAMERNAGSGIVISDTPVHDCNTTCQTPKGAINTSLPFQNIHPITIGKCPKYVKSTKLRLATGLRNIPSIQSRGLFGAIAGFIEGGWTGMVDGWYGYHHQNEQGSGYAADLKSTQNAIDKITNKVNSVIEKMNTQFTAVGKEFNHLEKRIENLNKKVDDGFLDIWTYNAELLVLLENERTLDYHDSNVKNLYEKVRSQLKNNAKEIGNGCFEFYHKCDNTCMESVKNGTYDYPKYSEEAKLNREEIDGVKLESTRIYQILAIYSTVASSLVLVVSLGAISFWMCSNGSLQCRICI

SEQ ID NO: 5292 - protein, 566 aa, Artificial Sequence; identical to SEQ ID NO: 5289
  derived and/or modified protein sequence (wt) from hemagglutinin__InfluenzaA__ADK33951

SEQ ID NO: 5293 - protein, 566 aa, Artificial Sequence; identical to SEQ ID NO: 3833
  derived and/or modified protein sequence (wt) from hemagglutinin__InfluenzaA__ADK33961

SEQ ID NO: 5294 - protein, 566 aa, Artificial Sequence; identical to SEQ ID NO: 3613
  derived and/or modified protein sequence (wt) from hemagglutinin__InfluenzaA__ADK45312

SEQ ID NO: 5295 - protein, 566 aa, Artificial Sequence
  derived and/or modified protein sequence (wt) from hemagglutinin__InfluenzaA__ADK45410
MKTIIALSYILCLVFAQKLPGNDNSTATLCLGHHAVPNGTIVKTITNDQIEVTNATELVQSSSTGEICDSPHQILDGENCTLIDALLGDPQCDGFQNKKWDLFVERSKAHSNCYPYDVPDYASLRSLVASSGTLEFNNESFNWTGVTQNGTSSACIRRSNNSFFSRLNWLTHLKFKYPALNVTMPNNEQFDKLYIWGVHHPGTDNDQIFLYAQASGRITVSTKRSQQTVIPNIGSRPRVRNIPSRISIYWTIVKPGDILLINSTGNLIAPRGYFKIRSGKSSIMRSDAPIGKCNSECITPNGSIPNDKPFQNVNRITYGACPRYVKQNTLKLATGMRNVPEKQTRGIFGAIAGFIENGWEGMVDGWYGFRHQNSEGRGQAADLKSTQAAIDQINGKLNRLIGKTNEKFHQIEKEFSEVEGRIQDLEKYVEDTKIDLWSYNAELLVALENQHTIDLTDSEMNKLFEKTKKQLRENAEDMGNGCFKIYHKCDNTCIGSIRNGTYDHDVYRDEALNNRFQIKGVELKSGYKDWILWISFAISCFLLCVALLGFIMWACQKGNIRCNICI

SEQ ID NO: 5296 - protein, 566 aa, Artificial Sequence
  derived and/or modified protein sequence (wt) from hemagglutinin__InfluenzaA__ADK45421
MKTIIALSYILCLVFAQKLPGNDNSTATLCLGHHAVPNGTIVKTITNDQIEVTNATELVQSSSTGEICDSPHQILDGKNCTLIDALLGDPQCDGFQNKKWDLFVERSKAYSNCYPYDVPDYASLRSLVASSGTLEFNNESFNWTGVTQNGTSSACIRRSKNSFFSRLNWLTHLNFKYPALNVTMPNNEQFDKLYIWGVHHPGTDKDQIFLYAQASGRITVSTKRSQQTVIPNIGSRPRIRNIPSRISIYWTIVKPGDILLINSTGNLIAPRGYFKIRSGKSSIMRSDAPIGKCNSECITPNGSIPNDKPFQNVNRITYGACPRYVKQSTLKLATGMRNVPEKQTRGIFGAIAGFIENGWEGMVDGWYGFRHQNSEGRGQAADLKSTQAAIDQINGKLNRLIGKTNEKFHQIEKEFSEVEGRIQDLEKYVEDTKIDLWSYNAELLVALENQHTIDLTDSEMNKLFEKTKKQLRENAEDMGNGCFKIYHKCDNACIGSIRNGTYDHDVYRDEALNNRFQIKGVELKSGYKDWILWISFAISCFLLCVALLGFIMWACQKGNIRCNICI

SEQ ID NO: 5297 - protein, 566 aa, Artificial Sequence
  derived and/or modified protein sequence (wt) from hemagglutinin__InfluenzaA__ADK45432
MKTIIALSYTLCLVFAQKLPRNDNSTATLCLGHHAVPNGTIVKTITNDQIEVTNATELVQSSSTGEICDNPHQILDGENCTLIDALLGDPQCDGFQNKKWDLFVERSKAYSNCYPYDVPDYASLRSLVASSGTLEFNNESFNWTGVTQNGTSSACIRRSNNSFFSRLNWLTHLKFKYPALNVTMPNNEQFDKLYIWGVHHPGTDNDQIFLYAQASGRITVSTKRSQQTVIPNIGSRPRVRNIPSRISIYWTIVKPGDILLINSTGNLIAPRGYFKIRSGKSSIMRSDAPIGKCNSECITPNGSIPNDKPFQNVNRITYGACPRYVKQNTLKLATGMRNVPEKQTRGIFGAIAGFIENGWEGMVDGWYGFRHQNSEGRGQAADLKSTQAAIDQINGKLNRLIGKTNEKFHQIEKEFSEVEGRIQDLEKYVEDTKIDLWSYNAELLVALENQHTIDLTDSEMNKLFEKTKKQLRENAEDMGNGCFKIYHKCDNACIGSIRNGTYDHDVYRDEALNNRFQIKGVELKSGYKDWILWISFAISCFLLCVALLGFIMWACQKGNIRCNICI

SEQ ID NO: 5298 - protein, 566 aa, Artificial Sequence; identical to SEQ ID NO: 2434
  derived and/or modified protein sequence (wt) from hemagglutinin__InfluenzaA__ADK45443

SEQ ID NO: 5299 - protein, 566 aa, Artificial Sequence; identical to SEQ ID NO: 4833
  derived and/or modified protein sequence (wt) from hemagglutinin__InfluenzaA__ADK48798

SEQ ID NO: 5300 - protein, 566 aa, Artificial Sequence; identical to SEQ ID NO: 3833
  derived and/or modified protein sequence (wt) from hemagglutinin__InfluenzaA__ADK62683

SEQ ID NO: 5301 - protein, 566 aa, Artificial Sequence
  derived and/or modified protein sequence (wt) from hemagglutinin__InfluenzaA__ADK62693
MKAILVVLLYTFATANADTLCIGYHANNSTDTVDTVLEKNVTVTHSVNLLEDKHNGKLCKLRGVAPLHLGKCNIAGWILGNPECGSLSTASSWSYIVETSSSDNGTCYPGDFIDYEELREQLSSVSSFERFEIFPKTSSWPNHDSNKGVTAACPHAGAKSFYKNLIWLVKKGNSYPKLSKSYINDKGKEVLVLWGIHHPSTSADQQSLYQNADAYVFVGTSRYSKKFKPEIAIRPKVREQEGRMNYYWTLVEPGDKITFEATGNLVVPRYAFAMERNAGSGIIISDTPVHDCNTTCQTPKGAINTSLPFQNVHPITIGKCPKYVKSTKLRLATGLRNVPSIQSRGLFGAIAGFIEGGWTGMVDGWYGYHHQNEQGSGYAADLKSTQNAIDEITNKVNSVIEKMNTQFTAVGKEFNHLEKRIENLNKKVDDGFLDIWTYNAELLVLLENERTLDYHDSNVKNLYEKVRSQLKNNAKEIGNGCFEFYHKCDNTCMESVKNGTYDYPKYSEEAKLNREEIDGVKLESTRIYQILAIYSTVASSLVLVVSLGAISFWMCSNGSLQCRICI

SEQ ID NO: 5302 - protein, 566 aa, Artificial Sequence; identical to SEQ ID NO: 3770
  derived and/or modified protein sequence (wt) from hemagglutinin__InfluenzaA__ADK62703

SEQ ID NO: 5303 - protein, 566 aa, Artificial Sequence
  derived and/or modified protein sequence (wt) from hemagglutinin__InfluenzaA__ADK64992
MKAILVVLLYTFATANADTLCIGYHANNSTDTVDTVLEKNVTVTHSVNLLEDKHNGKLCKLRGVAPLHLGKCNIAGWILGNPECESLSTASSWSYIVETSSSDNGTCYPGDFIDYEELREQLSSVSSFERFEIFPKTSSWPNHDSNKGVTAACPHAGAKSFYKNLIWLVKKGNSYPKLSKSYINDKGKEVLVLWGIHHPSTSADQQSLYQNADAYVFVGTSRYSKKFKPEIAIRPKVRDQEGRMNYYWTLVEPGDKITFEATGNLVVPRYAFAMERNAGSGIIISDTPVHDCNTTCQTPKGAINTSLPFQNIHPITIGKCPKYVKSTKLRLATGLRNVPSIQSRGLFGAIAGFIEGGWTGMVDGWYGYHHQNEQGSGYAADLKSTQNAIDEITNKVNSVIEKMNTQFTAVGKEFNHLEKRIENLNKKVDDGFLDIWTYNAELLVLLENERTLDYHDSNVKNLYEKVRSQLKNNAKEIGNGCFEFYHKCDNTCMESVKNGTYDYPKYSEEAKLNREEIDGIKLESTRIYQILAIYSTVASSLVLVVSLGAISFWMCSNGSLQYRICI

SEQ ID NO: 5304 - protein, 566 aa, Artificial Sequence
  derived and/or modified protein sequence (wt) from hemagglutinin__InfluenzaA__ADK65001
MKAILVVLLYTFATANADTLCIGYHANNSTDTVDTVLEKNVTVTHSVNLLEDKHNGKLCKLGGVAPLHLGKCNIAGWILGNPECESLSTASSWSYIVETSSSDNGTCYPGDFIDYEELREQLSSVSSFERFEIFPKTSSWPNHDSNKGVTAACPHAGAKSFYKNLIWLVKKGNSYPKLSKSYINDKGKEVLVLWGIHHPSTSADQQSLYQNADAYVFVGTSRYSKKFKPEIAIRPKVRDQEGRMNYYWTLVEPGDKITFEATGNLVVPRYAFAMERNAGSGIIISDTPVHDCNTTCQTPKGAINTSLPFQNIHPITIGKCPKYVKSTKLRLATGLRNVPSIQSRGLFGAIAGFIEGGWTGMVDGWYGYHHQNEQGSGYAADLKSTQNAIDEITNKVNSVIEKMNTQFTAVGKEFNHLEKRIENLNKKVDDGFLDIWTYNAELLVLLENERTLDYHDSNVKNLYEKVRSQLKNNAKEIGNGCFEFYHKCDNTCLESVKNGTYDYPKYSEEAKLNREEIDGVKLESTRIYQILAIYSTVASSLVLVVSLGAISFWMCSNGSLQCRICI

SEQ ID NO: 5305 - protein, 566 aa, Artificial Sequence
  derived and/or modified protein sequence (wt) from hemagglutinin__InfluenzaA__ADK65009
MKAILVVLLYTFATANADTLCIGYHANNSTDTVDTVLEKNVTVTHSVNLLEDKHNGKLCKLRGVAPLHLGKCNIAGWILGNPECESLSTASSWSYIVETSSSDNGTCYPGDFIDYEELREQLSSVSSFERFEIFPKTSSWPNHDPNKGVTAACPHAGAKSFYKNLIWLVKKGNSYPKLSKSYINDKGKEVLVLWGIHHPSTSADQQSLYQNADAYVFVGTSRYSKKFKPEIAIRPKVRDQEGRMNYYWTLVEPGDKITFGATGNLVVPRYAFAMERNAGSGIIISDTPVHDCNTTCQTPKGAINTSLPFQNIHPITIGKCPKYVKSTKLRLATGLRNVPSIQSRGLFGAIAGFIEGGWTGMVDGWYGYHHQNEQGSGYAADLKSTQNAIDEITNKVNSVIEKMNTQFTAVGKEFNHLEKRIENLNKKVDDGFLDIWTYNAELLVLLENERTLDYHDSNVKNLYEKVRSQLKNNAKEIGNGCFEFYHKCDNTCMESVKNGTYDYPKYSEEAKLNREEIDGVKLESTRIYQILAIYSTVASSLVLVVSLGAISFWMCSNGSLQCRICI

SEQ ID NO: 5306 - protein, 566 aa, Artificial Sequence
  derived and/or modified protein sequence (wt) from hemagglutinin__InfluenzaA__ADK87287
MKTIIALSYILCLVFAQKLPGNDNSTATLCLGHHAVPNGTIVKTITNDQIEVTNATELVQSSSTGEICDSPHQILDGKNCTLIDALLGDPQCDGFQNKKWDLFVERSKAYSNCYPYDVPDYASLRSLVASSGTLEFNNESFNWTGVTQNGTSSACIRRSKNSFFSRLNWLTHLNFKYPALNVTMPNNEQFDKLYIWGVHHPGTDKDQIFLYAQASGRITVSTKRSQQTAIPNIGSRPRVRNIPSRISIYWTIVKPGDILLINSTGNLIAPRGYFKIRSGKSSIMRSDALIGKCNSECITPNGSIPNDKPFQNVNRITYGACPRYVKQNTLKLATGMRNVPEKQTRGIFGAIAGFIENGWEGMVDGWYGFRHQNSEGRGQAADLKSTQAAIDQINGKLNRLIGKTNEKFHQIEKEFSEVEGRIQDLEKYVEDTKIDLWSYNAELLVALENQHTIDLTDSEMNKLFEKTKKQLRENAEDMGNGCFKIYHKCDNACIGSIRNGTYDHDVYRDEALNNRFQIKGVELKSGYKDWILWISFAISCFLLCVALLGFIMWACQKGNIRCNICI

SEQ ID NO: 5307 - protein, 566 aa, Artificial Sequence
  derived and/or modified protein sequence (wt) from hemagglutinin__InfluenzaA__ADK87288
MKTIIALSYILCLVFAQKLPGNDNSTATLCLGHHAVPNGTIVKTITNDQIEVTNATELVQSSSTGEICDSPHQILDGKNCTLIDALLGDPQCDGFQNKKWDLFVERSKAYSNCYPYDVPDYASLRSLVASSGTLEFNNESFNWTGVTQNGTSSACIRRSKNSFFSRLNWLTHLNFKYPALNVTMPNNEQFDKLYIWGVHHPGTDKDQIFLYAQATGRITVSTKRSQQTAIPNIGSRPRVRNIPSRISIYWTIVKPGDILLINSTGNLIAPRGYFKIRSGKSSIMRSDAPIGKCNSECITPNGSIPNDKPFQNVNRITYGACPRYVKQNTLKLATGMRNVPEKQTRGIFGAIAGFIENGWEGMVDGWYGFRHQNSEGRGQAADLKSTQAAIDQINGKLNRLIGKTNEKFHQIEKEFSEVEGRIQDLEKYVEDTKIDLWSYNAELLVALENQHTIDLTDSEMNKLFEKTKKQLRENAEDMGNGCFKIYHKCDNACIGSIRNGTYDHDVYRDEALNNRFQIKGVELKSGYKDWILWISFAISCFLLCVALLGFIMWACQKGNIRCNICI

SEQ ID NO: 5308 - protein, 566 aa, Artificial Sequence
  derived and/or modified protein sequence (wt) from hemagglutinin__InfluenzaA__ADK87289
MKTIIALSYILCLVFAQKLPGNDNSTATLCLGHHAVPNGTIVKTITNDQIEVTNATELVQSSSTGEICDSPHQILDGKNCTLIDALLGDPQCDGFQNKKWDLFVERSKAYSNCYPYDVPDYASLRSLVASSGTLGFNNESFNWTGVTQNGTSSACIRRSKNSFFSRLNWLTHLNFKYPALNVTMPNNEQFDKLYIWGVHHPGTDKDQIFLYAQASGRITVSTKRSQQTAIPNIGSRPRVRNIPSRISIYWTIVKPGDILLINSTGNLIAPRGYFKIRSGKSSIMRSDAPIGKCNSECITPNGSIPNDKPFQNVNRITYGACPRYVKQNTLKLATGMRNVPEKQTRGIFGAIAGFIENGWEGMVDGWYGFRHQNSEGRGQAADLKSTQAAIDQINGKLNRLIGKTNEKFHQIEKEFSEVEGRIQDLGKYVEDTKIDLWSYNAELLVALENQHTIDLTDSEMNKLFEKTKKQLRENAEDMGNGCFKIYHKCDNACIGSIRNGTYDHDVYRDEALNNRFQIKGVELKSGYKDWILWISFAISCFLLCVALLGFIMWACQKGNIRCNICI

SEQ ID NO: 5309 - protein, 566 aa, Artificial Sequence
  derived and/or modified protein sequence (wt) from hemagglutinin__InfluenzaA__ADK87291
MKTIIALSYIQCLVFAQKLPGNDNSTATLCLGHHAVPNGTIVKTITNDQIEVTNATELVQSSSTGEICDSPHQILDGKNCTLIDALLGDPQCDGFQNKKWDLFVERSKAYSNCYPYDVPDYASLRSLVASSGTLEFNNESFNWTGVTQNGTSSACIRRSKNSFFSRLNWLTHLNFKYPALNVTMPNNEQFDKLYIWGVHHPGTDKDQISLYAQASGRITVSTKRSQQTAIPNIGSRPRVRNIPSRISIYWTIVKPGDILLINSTGNLIAPRGYFKIRSGKSSIMRSDAPIGKCNSECITPNGSIPNDKPFQNVNRITYGACPRYVKQNTLKLATGMRNVPEKQTRGIFGAIAGFIENGWEGMVDGWYGFRHQNSEGRGQAADLKSTQAAIDQINGKLNRLIGKTNEKFHQIEKEFSEVEGRIQDLGKYVEDTKIDLWSYNAELLVALENQHTIDLTDSEMNKLFEKTKKQLRENAEDMGNGCFKIYHKCDNACIGSIRNGTYDHDVYRDEALNNRFQIKGVELKSGYKDWILWISFAISCFLLCVALLGFIMWACQKGNIRCNICI

SEQ ID NO: 5310 - protein, 566 aa, Artificial Sequence
  derived and/or modified protein sequence (wt) from hemagglutinin__InfluenzaA__ADK87293
MKTIIALSYILCLVFAQKLPGNDNSTATLCLGHHAVPNGTIVKTITNDQIEVTNATELVQSSSTGEICDSPHQILDGKNCTLIDALLGDPQCDGFQNKKWDLFVERSKAYSNCYPYDVPDYASLRSLVASSGTLEFNNESFNWTGVTQDGTSSACIRRSKNSFFSKLNWLTHLNFKYPALNVTMPNNEQFDKLYIWGVHHPGTDKDQTFLYAQASGRITVSTKRSQQTAIPNIGSRPRVRNIPSRISIYWTIVKPGDILLINSTGNLIAPRGYFKIRSGKSSIMRSDAPIGKCNSECITPNGSIPNDKPFQNVNRITYGACPRYVKQNTLKLATGMRNVPEKQTRGIFGAIAGFIENGWEGMVDGWYGFRHQNSEGRGQAADLKSTQAAIDQINGKLNRLIGKTNEKFHQIEKEFSEVEGRIQDLEKYVEDTKIDLWSYNAELLVALENQHTIDLTDSEMSKLFEKTKKQLRENAEDMGNGCFKIYHKCDNACIGSIRNGTYDHDVYRDEALNNRFQIKGVELKSGYKDWILWISFAISCFLLCVALLGFIMWACQKGNIRCNICI

SEQ ID NO: 5311 - protein, 566 aa, Artificial Sequence
  derived and/or modified protein sequence (wt) from hemagglutinin__InfluenzaA__ADK87295
MKTIIALSYILCLVFAQKLPGNDNSTATLCLGHHAVPNGTIVKTITNDQIEVTNATELVQSSSTGEICDSPHQILDGKNCTLIDALLGDPQCDGFQNKKWDLFVERSKAYSNCYPYDVPDYASLRSLVASSGSLEFNNESFNWTGVTQNGTSSACIRRSKNSFFSRLNWLTHLNFKYPALNVTMPNNEQFDKLYIWGVHHPGTDKDQIFLYAQASGRITVSTKRSQQTAIPNIGSRPRVRNIPSRISIYWTIVKPGDILLINSTGNLIAPRGYFKIRSGKSSIMRSDAPIGKCNSECITPNGSIPNDKPFQNVNRITYGACPRYVKQNTLKLATGMRNVPEKQTRGIFGAIAGFIENGWEGMVDGWYGFRHQNSEGRGQAADLKSTQAAIDQINGKLNRLIGKTNEKFHQIEKEFSEVEGRIQDLEKYVEDTKIDLWSYNAELLVALENQHTIDLTDSEMNKLFEKTKKQLRENAEDMGNGCFKIYHKCDNACIGSIRNGTYDHDVYRDEALNNRFQIKGVELKSGYKDWILWISFAISCFLLCVALLGFIMWACQKGNIRRNICI

SEQ ID NO: 5312 - protein, 566 aa, Artificial Sequence
  derived and/or modified protein sequence (wt) from hemagglutinin__InfluenzaA__ADK87296
MKAILVVLLYTFATANADTLCIGYHANNSTDTVDTVLEKNVTVTHSVNLLEDKHNGKLCKLRGVAPLHLGKCNIAGWILGNPECESLSTASSWSYIVETSSSDNGTCYPGDFIDYEELREQLSSVSSFERFEIFPKTSSWPNHDPNKGVTAACPHAGAKSFYKNLIWLVKKGNSYPKLSKSYINDKGKEVLVLWGIHHPSTSADQQSLYQNADAYVFVGTSRYSKKFKPEIAIRPKVRDQEGRMNYYWTLVEPGDKITFEATGNLVVPRCAFAMERNAGSGIIISDTPVHDCNTTCQTPKGAINTSLPFQNIHPITIGKCPKYVKSTKLRLATGLRNVPSIQSRGLFGAIAGFIEGGWTGMVDGWYGYHHQNEQGSGYAADLKSTQNAIDEITNKVNSVIEKMNTQFTAVGKEFNHLEKRIENLNKKVDDGFLDIWTYNAELLVLLENERTLDYHDSNVKNLYEKVRSQLKNNAKEIGNGCFEFYHKCDNTCMESVKNGTYDYPKYSEEAKLNREEIDGVKLESTRIYQILAIYSTVASSLVLVVSLGAISFWMCSNGSLQCRICI

SEQ ID NO: 5313 - protein, 566 aa, Artificial Sequence
  derived and/or modified protein sequence (wt) from hemagglutinin__InfluenzaA__ADK87298
MKAILVVLLYTFATANADTLCIGYHANNSTDTVDTVLEKNVTVTHSVNLLEDKHNGKLCKLRGVAPLHLGKCNIAGWILGNPECESLSTASSWSYIVETSSSDSGTCYPGDFIDYEELREQLSSVSSFERFEIFPKTSSWPNHDPNKGVTAACPHAGAKSFYKNLIWLVKKGNSYPKLSKSYINDKGKEVLVLWGIHHPSTSADQQSLYQNADAYVFVGTSRYSKKFKPEIAIRPKVRDQEGRMNYYWTLVEPGDKITFEATGNLVVPRYAFAMERNAGSGNIISDTPVHDCNTTCQTPKGAINTSLPFQNIHPITIGKCPKYVKSTKLRLATGLRNVPSIQSRGLFGAIAGFIEGGWTGMVDGWYGYHHQNEQGSGYAADLKSTQNAIDEITNKVNPVIEKMNTQFTAVGKEFNHLEKRIENLNKKVDDGFLDIWTYNAELLVLLENERTLDYHDSNVKNLYEKVRSQLKNNAKEIGNGCFEFYHKCDNTCMESVKNGTYDYPKYSEEAKLNREEIDGVKLESTRIYQILAIYSTVASSLVLVVSLGAISFWMCSNGSLQCRICI

SEQ ID NO: 5314 - protein, 566 aa, Artificial Sequence
  derived and/or modified protein sequence (wt) from hemagglutinin__InfluenzaA__ADK87300
MKTIIALSYILCMVFAQKLPGNDNSTATLCLGHHAVPNGTIVKTITNDQIEVTNATELVQSSSTGEICDSPHQILDGKNCTLIDALLGDPQCDGFQNKKWDLFVERSKAYSNCYPYDVPDYASLRSLVASSGTLEFNNESFNWTGVTQNGTSSACIRRSKNSLFSRLNWLTHLNFKYPALNVTMPNNEQFDKLYIWGVHHPGTDKDQIFLYAQASGRITVSTKRSQQTAIPNIGSRPRVRNIPSRISIYWTIVKPGDILLINSTGNLIAPRGYFKIRSGKSSIMRSDAPIGKCNSECIAPNGSIPNDKSFQNVNRITYGACPRYVKQNTLKLATGMRNVPEKQTRGIFGAIAGFIENGWEGMVDGWYGFRHQNSEGRGQAADLKSTQAAIDQINGKLNRLIGKTNEKFHQIEKEFSEVEGRIQDLEKYVEDTKIDLWSYNAELLVALENQHTIDLTDSEMNKLFEKTKKQLRENAEDMGNGCFKIYHKCDNACIGSIRNGTYDHDVYRDEALNNRFQIKGVELKSGYKDWILWISFAISCFLLCVALLGFIMWACQKGNIRCNICI

SEQ ID NO: 5315 - protein, 566 aa, Artificial Sequence
  derived and/or modified protein sequence (wt) from hemagglutinin__InfluenzaA__ADK87302
MKTIIALSYILCMVFAQKLPGNDNSTATLCLGHHAVPNGTIVKTITNDQIEVTNATELVQSSSTGEICDSPHQILDGKNCTLIDALLGDPQCDGFQNKKWDLFVERSKAYSNCYPYDVPDYASLRSLVASSGTLEFNNESFNWTGVTQNGTSSACIRRSKNSFFSRLNWLTHLNFKYPALNVTMPNNEQFDKLYIWGVHHPGTDKDQIFLYAQASGRITVSTKRSQQTAIPNIGSRPRVRNIPSRISIYWTIVKPGDILLINSTGNLIAPRGYFKIRSGKSSIMRSDAPIGKCNSECITPNGSIPNDKPFQNVNRITYGACPRYVKQNTLKLATGMRNVPEKQTRGIFGAIAGFIENGWEGMVDGWYGFRHQNSEGRGQAADLKSTQAAIDQINGKLNRLIGKTNEKFHQIEKEFSEVEGRIQDLEKYVEDTKIDLWSYNAELLVALENQHTIDLTDSEMNKLFEKTKKQLRENAEDMGNGCFKIYHKCDNACIGSIRNGTYDHDVYRDEALNNRFQIKGVELKSGYKDWILWISFAISCFLLCVALLGFIMWACQKGNIRCDICI

SEQ ID NO: 5316 - protein, 566 aa, Artificial Sequence
  derived and/or modified protein sequence (wt) from hemagglutinin__InfluenzaA__ADK87304
MKTIIALSYILCLVFAQKIPGNDNSTATLCLGHHAVPNGTIVKTITNDQIEVTNATELVQSSSTGEICDSPHQILDGKNCTLIDALLGDPQCDGFQNKKWDLFVERSKAYSNCYPYDVPDYASLRSLVASSGTLEFNNESFNWTGVTQNGTSSACIRRSKNSFFSRLNWLTHLNFKYPALNVTMPNNEQFDKLYIWGVHHPGTDKDQIFLYAQASGRITVSTKRSQQTAIPNIGSRPRVRNIPSRISIYWTIVKPGDILLINSTGNLIAPRGYFKIRSGKSSIMRSDAPIGKCNSGCITPNGSIPNDKPFQNVNRITYGACPRYVKQNTLKLATGMRNVPEKQTRGIFGAIAGFIENGWEGMVDGWYGFRHQNSEGRGQAADLKSTQAAIDQINGKLNRLIGKTNEKFHQIEKEFSEVEGRIQDLEKYVEDTKIDLWSYNAELLVALENQHTIDLTDSEMNKLFEKTKKQLRENAEDMGNGCFKIYHKCDNACIGSIRNGTYGHDVYRDEALNNRFQIKGVELKSGYKDWFLWISFAISCFLLCVALLGFIMWACQKGNIRCNICI

SEQ ID NO: 5317 - protein, 566 aa, Artificial Sequence
  derived and/or modified protein sequence (wt) from hemagglutinin__InfluenzaA__ADK87306
MKTIIALSYILCLVFAQKLPGNDNSTATLCLGHHAVPNGTIVKTITNDQIEVTNAAELVQSSSTGEICDSPHQILDGKNCTLIDALLGDPQCDGFQNKKWDLFVGRSKAYSNCYPYDVPDYASLRSLVASSGTLEFNNESFNWTGVTQNGTSSACIRRSKNSFFSRLNWLTHLNFKYPALNVTMPNNEQFDKLYIWGVHHPGTDKDQIFLYAQASGRITVSTKRSQQTAIPNIGSRPRVRNIPSRISIYWTIVKPGDILLINSTGNLIAPRGYFKIRSGKSSIMRSDAPIGKCNSECITPNGSIPNDKPFQNVNRITYGACPRYVKQNTLKLATGVRNVPEKQTRGIFGAIAGFIENGWEGMVDGWYGFRHQNSEGRGQAADLKSTQAAMDQINGKLNRLIGKTNEKLHQTEKEFSEVEGRIQDLEKYVEDTKIDLWSYNAELLVALESQHTIDLTDSEMNKLFEKTKKQLRENAEDMGNGCFKIYHKCDNACIGSIRNGTYDHDVYRDEALNNRFQIKGVELKSGYKDWILWISFAISCFLLCVALLGFIMWACQKGNIRCNICI

SEQ ID NO: 5318 - protein, 566 aa, Artificial Sequence
  derived and/or modified protein sequence (wt) from hemagglutinin__InfluenzaA__ADK87308
MKTIIALSYILCMVFAQKLPGNDNSTATLCLGHHAVPNGTIVKTITNDQIEVTNATELVQSSSTGEICDSPHQILDGKNCTLIDALLGDPQCDGFQNKKWDLFVERSKAYSNCYPYDVPDYASLRSLVASSGTLEFNNESFNWTGVTQNGTSSACIRRSKNSFFSRLNWLTHLNFKYPALNVTMPNNEQFDKLYIWGVHHPGTDKDQIFLYAQASGRITVSTKRSQQTAIPNIGSRPRVRNIPSRISIYWTIVKPGDILLINSTGNLIAPRGYFKIRSGKSSIMRSDAPIGKCNSECITPNGSIPNDKPFQNVNRITYGACPRYVKQNTLKLATGMRNVPEKQTRGIFGAIAGFIENGWEGMVDGWYGFRHQNSEGRGQAADLKSTQAAIDQINGKLNRLIGKTNEKFHQIEKEFSEVEGRIQDLEKYVEDTKIDLWSYNAELLVALENQHTIDLTDSEMNKLFEKTKKQLRENAEDMGNGCFKIYHKCDNACIGSIRNGTYDHDVYRDEALNNRFQIKGVELKSGYKDWILWISFAISCFLLRVALLGFIMWACQKGNIRCNICI

SEQ ID NO: 5319 - protein, 566 aa, Artificial Sequence
  derived and/or modified protein sequence (wt) from hemagglutinin__InfluenzaA__ADK87309
MKTIIALSYILCLVFAQKLPGNDNSTATLCLGHHAVPNGTIVKTITNDQIEVTNATELVQSSSTGEICDSPHQILDGKNCTLIDALLGDPQCDGFQNKKWDLFVERSKAYSNCYPYDVPDYASLRSLVASSGTLEFNNESFNWTGVTQNGTSSACIRRSKNSFFSRLNWLTHLNFKYPALNVTMPNNEQFDKLYIWGVHHPGTDKDQIFLYAQASGRITVSTKRSQQTAIPNIGSRPRVRNIPSRISIYWTIVKPGDILLINSTGNLIAPRGYFKIRSGKSSIMRSDAPIGKCNSECITPNGSIPNDKPFQNVNRITYGACPRYVKQNTLKLATGMRNVPEKQTRGIFGAIAGFIENGWEGMVDGWYGFRHQNSEGRGQAADLKSTQAAIDQINGKLNRLIGKTNEKFHQIEKEFSEVEGRIQDLEKYVEDTKIDLWSYNAELLVALENQHTIDLTDSEMNKLFEKTKKQLRENAEDMGNGCFKIYHKCDNACIGSIRNGTYDHDVYRDEALNNRFQIKGVELKSGYKDWILWISFAISCFLLCVALSGFIMWACQKGNIRCNICI

SEQ ID NO: 5320 - protein, 566 aa, Artificial Sequence
  derived and/or modified protein sequence (wt) from hemagglutinin__InfluenzaA__ADK87310
MKAILVVLLYTFATANADTLCIGYHANNSTDTVDTVLEKNVTVTHSVNLLEDKHNGKLCKLRGVAPLHLGKCNIAGWILGNPECESLSTASSWSYIVETSSSDNGTCYPGDFIDYEELREQLSSVSSFERFEIFPKTGSWPNHDPNKGVTAACPHAGAKSFYKNLIWLVKKGNSYPKLSKSYINDKGKEVLVLWGIHHPSTSADQQSLYQNADAYVFVGTSRYSKKFKPEIAIRPKVRDQEGRMNYYWTLVEPGDKITFEATGNLVVPRYAFAMERNAGSGIIISDTPVHDCNTTCQTPKGAINTSLPFQNIHPITIGKCPKYVKSTKLRLATGLRNVPSIQSRGLFGAIAGFIEGGWTGMVDGWYGYHHQNEQGSGYAADLKSTQNAIDEITNKVNSVIEKMNTQFTAVGKEFNHLEKRIENLNKKVDDGFLDIWTYNAELLVLLENERTLDYHDSNVKNLYEKVRSQLKNNAKEIGNGCFEFYHKCDNTCMESVKNGTYDYPKYSEEAKLNREEIDGVKLESTRIYQILAIYSTVASSLVLVVSLGAISFWMCSNGSLQCRICI

SEQ ID NO: 5321 - protein, 566 aa, Artificial Sequence
  derived and/or modified protein sequence (wt) from hemagglutinin__InfluenzaA__ADK87311
MKAILVVLLYTFATANADTLCIGYHADNSTDTVDTVLERNVTVTHSVNLLEDKHNGKLCKLRGVAPLHLGKCNIAGWILGNPECESLSTASSWSYIVETSSSDNGTCYPGDFIDYEELREQLSSVSSFERFEIFPKTSSWPNHDSNKGVTAACPHAGAKSFYKNLIWLVKKGNSYPKLSKSYINDKGKEVLVLWGIHHPSTSAGQQSLYQNADAYVFVGTSRYSKKFKPEIAIRPKVRDQEGRMNYYWTLVEPGDKITFEATGNLVVPRYAFAMERNAGSGIIISDTPVHDCNTTCQTPKGAINTSPPFQNIHPITIGKCPKYVKSTKLRLATGLRNVPSIQSRGLFGAIAGFIEGGWTGMVDGWYGYHHQNEQGSGYAADLKSTQNAIDEITNKVNSVIEKMNTQFTAVGKEFNHLEKRIENLNKKVDDGFLDIWTYNAELLVLLENERTLDYHDSNVKNLYEKVRSQLKNNAKEIGNGCFEFYHKCDNTCMESVKNGTYDYPKYSEEAKLNREEIDGVKLESTRIYQILAIYSTVASSLVLVVSLGAISFWMCSNGSLQCRICI

SEQ ID NO: 5322 - protein, 566 aa, Artificial Sequence
  derived and/or modified protein sequence (wt) from hemagglutinin__InfluenzaA__ADK87313
MKTIIALSYILCLVFAQKIPGNDNSTATLCLGHHAVPNGTIVKTITNDQIEVTNATELVQSSSTGEICDSPHQILDGKNCTLIDALLGDPQCDGFQNKKWDLFVERSKAYSNCYPYDVPDYASLRSLVASSGTLEFNNESFNWTGVTQNGTSSACIRRSKNSFFSRLNWLTHLNFKYPALNVTMPNNEQFDKLYIWGVHHPGTDKDQIFLYAQASGRIAVSTKRSQQTAIPNIGSRPRVRNIPSRISIYWTIVKPGDILLINSTGNLIAPRGYFKIRSGKSSIMRSDAPIGKCNSGCITPNGSIPNDKPFQNVNRITYGACPRYVKQNTLKLATGMRNVPEKQTRGIFGAIAGFIENGWEGMVDGWYGFRHQNSEGRGQAADLKSTQAAIDQINGKLNRLIGKTNEKFHQIEKEFSEVEGRIQDLEKYVEDTKIDLWSYNAELLVALENQHTIDLTDSEMNKLFEKTKKQLRENAEDMGNGCFKIYHKCDNACIGSIRNGTYDHDVYRDEALNNRFQIKGVELKSGYKDWFLWISFAISCFLLCVALLGFIMWACQKGNIRCNICI

SEQ ID NO: 5323 - protein, 566 aa, Artificial Sequence
  derived and/or modified protein sequence (wt) from hemagglutinin__InfluenzaA__ADK87315
MKAILVVLLYTFATANADTLCIGYHANNSTDTVDTVLEKNVTVTHSVNLLEDKHNGKLCKLRGVAPLHLGKCNIAGWILGNPECESLSTASSWSYIVETSSSDNGTCYPGDFIDYEELREQLSSVSSFERFEIFPKTSPWPNHDPNKGVTAACPHAGAKSFYKNLIWLVKKGNSYPKLSKSYINDKGKEVLVLWGIHHPSTSADQQSLYQNADAYVFVGTSRYSKKFKPEIAIRPKVRDQEGRMNYYWTLVEPGDKITFEATGNLVVPRYAFAMERNAGSGIIISDTPVHDCNTTCQTPKGAINTSLPFQNIHPITIGKCPKYVKSTKLRLATGLRNVPSIQSRGLFGAIAGFIEGGWTGMVDGWYGYHHQNEQGSGYAADLKSTQNAIDEITNKVNSVIEKMNTQFTAVGKESNHLETRIENLNKKVDDGFLDIWTYNAELLVLLENERTLDYHDSNVKNLYEKVRSQLKNNAKEIGNGCFEFYHKCDSTCMESVKNGTYDYPKYSEEAKLNREEIDGVKLESTRIYQILAIYSTVASSLVLVVSLGAISFWMCSNGSLQCRICI

SEQ ID NO: 5324 - protein, 566 aa, Artificial Sequence; identical to SEQ ID NO: 3467
  derived and/or modified protein sequence (wt) from hemagglutinin__InfluenzaA__ADK87317

SEQ ID NO: 5325 - protein, 566 aa, Artificial Sequence
  derived and/or modified protein sequence (wt) from hemagglutinin__InfluenzaA__ADK87319
MKAILVVLLYTFATANADTLCIGYHANNSTDTVDTVLEKNVTVTHSVNLLEDKHNGKLCKLRGVAPLHLGKCNIAGWILGNPECESLSTASSWSYIVETSSSDNGTCYPGDFIDYEELREQLSSVSSFERFEIFPKTSSWPNHDPNKGVTAACPHAGAKSFYKNLIWLVKKGNSYPKLSKSYINDKGKEVLVLWGIHHPSTSADQQSLYQNADAYVFVGTSRYSKKFKPEIAIRPKVRDQEGRMNYYWTLVEPGDKITFEATGNLVVPRYAFAMERNAGSGIIISDTPVHDCNTTCQTPKGAINTSLPFQNIHPITIGKCPKYVKSTELRLATGLRNVPSIQSRGLFGAIAGFIEGGWTGMVDGWYGYHHQNEQGSGYAADLKSTQNAIDEITNKVNSVIEKMNTQFTAVGKEFNHLEKRIENLNKKVDDGFLDIWTYNAELLVLLENERTLDYHDSNVKNLYEKVRSQLKNNAKEIGNGCFEFYHKCDNTCMESVKNGTYDYPKYSEEAKLNREEIDGVKLESTRIYRILAIYSTVASSLVLVVSLGAISFWMCSNGSLQCRICI

SEQ ID NO: 5326 - protein, 566 aa, Artificial Sequence
  derived and/or modified protein sequence (wt) from hemagglutinin__InfluenzaA__ADK87321
MKTIIALSYILCLVFAQKIPGNDNSTATLCLGHHAVPNGTIVKTITNDQIEVTNATELVQSSSTGEICDSPHQILDGKNCTLIDALLGDPQCDGFQNKKWDLFVERSKAYSNCYPYDVPDYASLRSLVASSGTLEFNNESFNWTGVTQNGTSSACMRRSKNSFFSRLNWLTHLNFKYPALNVTMPNNEQFDKLYIWGVHHPGTDKDQIFLYAQASGRITVSTKRSQQTAIPNIGSRPRVRNIPSRISVYWTIVKPGDILLINSTGNLIAPRGYFKIRSGKSSIMRSDASIGKCNSGCITPNGSIPNDKPFQNVNRITYGACPRYVKQNTLKLATGMRNVPEKQTRGIFGAIAGFIENGWEGMVDGWYGFRHQNSEGRGQAADLKSTQAAIDQINGKLNRLIGKTNEKFHQIEKEFPEVEGRIQDLEKYVEDTKIDLWSYNAEPLVALENQHTIDLTDSEMNKLFEKTKKQLRENAEDMGNGCFKIYHKCDNACIGSIRNGTYDHDVYRDEALNNRFQIKGVELKSGYKDWFLWISFAISCFLLCVALLGFIMWACQKGNIRCNICI

SEQ ID NO: 5327 - protein, 566 aa, Artificial Sequence
  derived and/or modified protein sequence (wt) from hemagglutinin__InfluenzaA__ADK87323
MKTIIALSYILCLVFAQKLPGNDNSTATLCLGHHAVPNGTIVKTITNDQIEVTNATELVQSSSTGEICDSPHQILDGKNCTLIDALLGDPQCDGFQNKKWDLFVERSKAYSNCYPYDVPDYASLRSLVASSGTLEFNNESFNWTGVTQNGTSSACIRRSKNSFFSRLNWLTHLNFKYPALNVTMPNNEQFDKLYIWGVHHPGTDKDQIFLYAQASGRITVSTKRSQQTAIPNIGSRPRVGNIPSRISIYWTIVKPGDILLINSTGNLIAPRGYFKIRSGKSSIMRSDAPIGKCNSECITPNGSIPNDKPFQNVNRITYGACPRYVKQNTLKLATGMRNVPEKQTRGIFGAIAGFIENGWEGMVDGWYGFRHQNSEGRGQAADLKSTQAAIDQINGKLNRLIGKTNEKFHQIEKEFSEVEGRIQDLEKYVEDTKIDLWSYNAELLVALENQHTIDLTDSEMNKLFEKTKKQLRENAEDMGNGCFKIYHKCDNACIGSIRNGTYDHDVYRDEALNNRFQIKGVELKSGYKDWILWISFAISCFLLCVALLGFIMWACQKGNIRCNICI

SEQ ID NO: 5328 - protein, 566 aa, Artificial Sequence
  derived and/or modified protein sequence (wt) from hemagglutinin__InfluenzaA__ADK87325
MKTIIALSYILCLVFAQKLPGNDNSTATLCLGHHAVPNGTIVKTITNDQIEVTNATELVQSSSTGEICDSPHQILDGKNCTLIDALLGDPQCDGFQNKKWDLFVERSKAYSNCYPYDVPDYASLRSLVASSGTLEFNNESFNWTGVTQNGTSSACIRRSKNSFFSRLNWLTHLNFKYPALNVTMPNNEQFDKLYIWGVHHPGTDKDQIFLYAQASGRITVSTKRSQQTAIPNIGSRPRVRNIPSRISIYWTIVKPGDILLINSTGNLIAPRGYFKIRSGKSSIMRSDAPIGKCNSECITPNGSIPNDKPFQNVNRITYGACPRHVKQNTLKLATGMRNVPEKQTRGIFGAIAGFIENGWEGMVDGWYGFRHQNSEGRGQAADLKSTQAAIDQINGKLNRLIGKTNEKFHQIEKEFSEVEGRIQDLEKYVEDTKIDLWSYNAELLVALENQHTIDLTDSEMNKLFEKTKKQLRENAEDMGNGCFKIYHKCDNACIGSIRNGTYDHDVYRDEALNNRFQIKGVELKSGYKDWILWISFAISCFLLCVALLGFIMWACQKGNIRCNICI

SEQ ID NO: 5329 - protein, 566 aa, Artificial Sequence
  derived and/or modified protein sequence (wt) from hemagglutinin__InfluenzaA__ADK87326
MKTIIALSYILCLVFAQKLPGNDNSTATLCLGHHAVPNGTIVKTITNDQIEVTNATELVQSSSTGEICDSPHQILDGKNCTLIDALLGDPQCDGFQNKKWDLFVERSKAYSNCYPYDVPDYASLRSLVASSGTLEFNNESFNWTGVTQNGTSSACIRRSKNSFFSRLNWLTHLNFKYPALNVTMPNNEQFDKLYIWGVHHPGTDKDQIFLYAQASGRITVSTKRSQQTAIPNIGSRPRVRNIPSRISIYWTIVKPGDILLINSTGNLIAPRGYFKIRSGKSSIMRSDAPIGKCNSECITPNGSIPNDKPFQNVNRITYGACPRYVKQNTLKLATGMRNVPEKQTRGIFGAIAGFIENGWEGMVDGWYGFRHQNSEGRGQAADLKSTQAAIDQINGKLNRLIGKTNEKFHQIEKEFSEVEGRIQDLEKYVEDTKIDLWSYNAELLVALENQHTIDLTDSEMNKLFEKTKKQLRENAEDMGNGCFKIYHKCDNACIGSIRNGTYDHDVYRDEALNNRFQIKGVELKSGCKDWILWISFAISCFLLCVALLGFTMWACQKGNIRCNICI

SEQ ID NO: 5330 - protein, 566 aa, Artificial Sequence
  derived and/or modified protein sequence (wt) from hemagglutinin__InfluenzaA__ADK87328
MKAILVVLLYTFATANADTLCIGYHANNSTDTVDTVLEKNVTVTHSVNLLEDKHNGKLCKLRGVAPLHLGKCNIAGWILGNPECESLSTASSWSYIVETSSSDNGTCYPGDFIDYEELREQLSSVSSFERFEIFPKTSSWPNHDPNKGVTAACPHAGAKSFYKNLIWLVKKGNSYPKLSKSYINDKGKEVLVLWGIHHPSTSADQQSLYQNADAYVFVGTSRYSKKFKPEIAIRPKVRDQEGRMNYYWTLVEPGDKITFEATGNLVVPRYAFAMERNAGSGIIISDTPVHDCNTTCQTPKSAINTSLPFQNIHPITIGKCPKYVKSTKLRLATGLRNVPSIQSRGLFGAIAGFIEGGWTGMVDGWYGYHHQNEQGSGYAADLKSTQNAIDEITNKVNSVIEKMNTQFTAVGKEFNHLEKRIENLNKKVDDGFLDIWTYNAELLVLLENERTLDYHDSNVKNLYEKVRSQLKNNAKEIGNGCFEFYHKCDNTCMESVKNGTYDYPKYSEEAKLNREEIDGVKLESTRIYQILAIYSTVASSLVLVVSLGAISFWMCSNGSLQCRICI

SEQ ID NO: 5331 - protein, 566 aa, Artificial Sequence
  derived and/or modified protein sequence (wt) from hemagglutinin__InfluenzaA__ADK87334
MKTIIALSYILCLVFAQKLPGNDNSTATLCLGHHAVPNGTIVKTITSDQIEVTNATELVQSSSTGEICDSPHQILDGKNCTLIDALLGDPQCDGFQNKKWDLFVERSKAYSNCYPYDVPDYASLRSLVASSGTLEFNNESFNWTGVTQNGTSSACIRRSKNSFFSKLNWLTHLNFKYPALNVTMPNNEQFDKLYIWGVRHPGTDKDQIFLYAQASGRITVSTKRSQQTVIPNIGSRPRVRNIPSRISTYWTIVKPGDILLINSTGNLIAPRGYFKIRSGKSSIMRSDTPIGKCNSECITPNGSIPNDKPFQNVNRITYGACPRYVKQNTLKLATGMRNVPEKQTRGIFGAIAGFIENGWEGMVDGWYGFRHQNSEGRGQAADLKSTQAAIDQINGKLNRLIGKTNEKFHQIEKEFSEVEGRIQDLEKYVEDTKIDLWSYNAELLVALENQHTIDLTDSEMNKLFEKTKKQLRENAEDMGNGCFKIYHKCDNACIGSIRNGTYDHDVYRDEALNNRFQIKGVELKSGYKDWILWISFAISCFLLCVALLGFIMWACQKGNIRCNICI

SEQ ID NO: 5332 - protein, 566 aa, Artificial Sequence
  derived and/or modified protein sequence (wt) from hemagglutinin__InfluenzaA__ADK87336
MKTIIALSYILCLVFAQKLPGNDNSTATLCLGHHAVPNGTIVKTITNDQIEVTNATELVQSSSTGEICDSPHQILDGKNCTLIDALLGDPQCDGFQNKKWDLFVERSKAYSNCYPYDVPDYASLRSLVASSGTLEFNNESFNWTGVTQNGTSSACIRRSKNSFFSKLNWLTHLNFKYPALNVTMPNNEQFDKLYIWGVHHPGTDRDQIFLYAQASGRITVSTKRSQQTVIPNIGSRPRVRNIPSRISIYWTIVKPGDILLINSTGNLIAPRGYFKIRSGKSSIMRSDTPIGKSNSECITPNGSIPNDKPFQNVNRITYGACPRYVKQNTLKLATGMRNVPEKQTRGIFGAIAGFIENGWEGMVDGWYGFRHQNSEGRGQAADLKSTQAAIDQINGKLNRLIGKTNEKFHQIEKEFSEVEGRIQDLEKYVEDTKIDLWSYNAELLVALENQHTIDLTDSEMNKLFEKTKKQLREDAEDMGNGCFKIYHKCDNACIGSIRNGTYDHDVYRDEALNNRFQIKGVELKSGYKDWILWISFAISCFLLCVALLGFIMWACQKGNIRCNICI

SEQ ID NO: 5333 - protein, 566 aa, Artificial Sequence; identical to SEQ ID NO: 2669
  derived and/or modified protein sequence (wt) from hemagglutinin__InfluenzaA__ADK87338

SEQ ID NO: 5334 - protein, 566 aa, Artificial Sequence
  derived and/or modified protein sequence (wt) from hemagglutinin__InfluenzaA__ADK90193
MKAILVVLLYTFATANADTLCIGYHANNSTDTVDTVLEKNVTVTHSVNLLEDKHNGKLCKLRGVAPLHLGKCNIAGWILGNPECESLSTASSWSYIVETSSSDNGTCYPGDFIDYEELREQLSSVSSFERFEIFPKTSSWPNHDSNKGVTAACPHAGAKSFYKNLIWLVKKGNSYPKLSKSYINDKGKVVLVLWGIHHPSTSADQQSLYQNADAYVFVGTSRYSKKFKPEIAIRPKVRDQEGRMNYYWTLVEPGDKITFEATGNLVVPRYAFAMERNAGSGIIISDTPVHDCNTTCQTPKGAINTSLPFQNIHPITIGKCPKYVKSTKLRLATGLRNVPSIQSRGLFGAIAGFIEGGWTGMVDGWYGYHHQNEQGSGYAADLKSTQNAIDEITNKVNSVIEKMNTQFTAVGKEFNHLEKRIENLNKKVDDGFLDIWTYNAELLVLLENERTLDYHDSNVKNLYEKVRSQLKNNAKEIGNGCFEFYHKCDNTCMESVKNGTYDYPKYSEEAKLNREEIDGVKLESTRIYQILAIYSTVASSLVLVVSLGAISFWMCSNGSLQCRICI

SEQ ID NO: 5335 - protein, 566 aa, Artificial Sequence
  derived and/or modified protein sequence (wt) from hemagglutinin__InfluenzaA__ADK90194
MKAILVVLLYTFATANADTLCIGYHANNSTDTVDTVLEKNVTVTHSVNLLEDKHNGKLCKLRGVAPLHLGKCNIAGWILGNPECESLSTASSWSYIVETSSSDNGTCYPGDFIDYEELREQLSSVSSFERFEIFPKTSSWPNHDSNKGVTAACPHAGAKSFYKNLIWLVKKGNSYPKLSKSYINDKGKEVLVLWGIHHPSTSADQQSLYQNADAYVFVGTSKYSKKFKPEIAIRPKVRDQEGRMNYYWTLVEPGDKITFEATGNLVVPRYAFAMERNAGSGIIISDTPVHDCNTTCQTPKGAINTSLPFQNIHPITIGKCPKYVKSTKLRLATGLRNVPSIQSRGLFGAIAGFIEGGWTGMVDGWYGYHHQNEQGSGYAADLKSTQNAIDEITNKVNSVIEKMNTQFTAVGKEFNHLEKRIENLNKKIDDGFLDIWTYNAELLVLLENERTLDYHDSNVKNLYEKVRSQLKNNAKEIGNGCFEFYHKCDNTCMESVKNGTYDYPKYSEEAKLNREEIDGVKLESTRIYQILAIYSTVASSLVLVVSLGAISFWMCSNGSLQCRICI

SEQ ID NO: 5336 - protein, 566 aa, Artificial Sequence
  derived and/or modified protein sequence (wt) from hemagglutinin__InfluenzaA__ADK90195
MKAILVVLLYTFATANADTLCIGYHANNSTDTVDTVLEKNVTVTHSVNLLEDKHNGKLCKLRGVAPLHLGKCNIAGWILGNPECESLSTASSWSYIVETSSSDNGTCYPGDFIDYEELREQLSSVSSFERFEIFPKTSSWPNHDSNKGVTAACPHAGAKSFYKNLIWLVKKGNSYPKLSKSYINDKGKEVLVLWGIHHPSTSADQQSLYQNADAYVFVGTSRYSKKFKPEIAIRPKVRDQEGRMNYYWTLVEPGDKITFEATGNLVVPRYAFAMERNAGSGIVISDTPVHDCNTTCQTPKGAINTSLPFQNIHPITIGKCPKYVKSTKLRLATGLRNVPSIQSRGLFGAIAGFIEGGWTGMVDGWYGYHHQNEQGSGYAADLKSTQNAIDEITNKVNSVIEKMNTQFTAVGKEFNHLEKRIENLNKKIDDGFLDIWTYNAELLVLLENERTLDYHDSNVKNLYEKVRSQLKNNAKEIGNGCFEFYHKCDNTCMESVKNGTYDYPKYSEEAKLNREEIDGVKLESTRIYQILAIYSTVASSLVLVVSLGAISFWMCSNGSLQCRICI

SEQ ID NO: 5337 - protein, 566 aa, Artificial Sequence; identical to SEQ ID NO: 2656
  derived and/or modified protein sequence (wt) from hemagglutinin__InfluenzaA__ADK90196

SEQ ID NO: 5338 - protein, 566 aa, Artificial Sequence
  derived and/or modified protein sequence (wt) from hemagglutinin__InfluenzaA__ADK90197
MRAILGVLLYTFATANADTLCIGYHANNSTDTVDTVLEKNVTVTHSVNLLEDKHNGKLCKLRGVAPLHLGKCNIAGWILGNPECESLSTASSWSYIVETSSSDNGTCYPGDFIDYEELREQLSSVSSFERFEIFPKTSSWPNHDSNKGVTAACPHAGAKSFYKNLIWLVKKGNSYPKLSKSYINDKGKEVLVLWGIHHPSTSADQQSLYQNADAYVFVGTSRYSKKFKPEIAIRPKVRDQEGRMNYYWTLVEPGDKITFEATGNLVVPRYAFAMERNAGSGIIISDTPVHDCNTTCQTPKGAINTSLPFQNIHPITIGKCPKYVKSTKLRLATGLRNVPSIQSRGLFGAIAGFIEGGWTGMVDGWYGYHHQNEQGSGYAADLKSTQNAIDEITNKVNSVIEKMNTQFTAVGKEFNHLEKRIENLNKKVDDGFLDIWTYNAELLVLLENERTLDYHDSNVKNLYEKVRSQLKNNAKEIGNGCFEFYHKCDNTCMESVKNGTYDYPKYSEEAKLNREEIDGVKLESTRIYQILAIYSTVASSLVLVVSLGAISFWMCSNGSLQCRICI

SEQ ID NO: 5339 - protein, 566 aa, Artificial Sequence
  derived and/or modified protein sequence (wt) from hemagglutinin__InfluenzaA__ADK90198
MKAILGVLLYTFATANADTLCIGYHANNSTDTVDTVLEKNVTVTHSVNLLEDKHNGKLCKLRGVAPLHLGKCNIAGWILGNPECESLSTASSWSYIVETSSSDNGTCYPGDFIDYEELREQLSSVSSFERFEIFPKTSSWPNHDSNKGVTAACPHAGAKSFYKNLIWLVKKGNSYPKLSKSYINDKGKEVLVLWGIHHPSTSADQQSLYQNADAYVFVGTSRYSKKFKPEIAIRPKVRDQEGRMNYYWTLVEPGDKITFEATGNLVVPRYAFAMERNAGSGIIISDTPVHDCNTTCQTPKGAINTSLPFQNIHPITIGKCPKYVKSTKLRLATGLRNVPSIQSRGLFGAIAGFIEGGWTGMVDGWYGYHHQNEQGSGYAADLKSTQNAIDEITNKVNSVIEKMNTQFTAVGKEFNHLEKRIENLNKKVDDGFLDIWTYNAELLVLLENERTLDYHDSNVKNLYEKVRSQLKNNAKEIGNGCFEFYHKCDNTCMESVKNGTYDYPKYSEEAKLNREEIDGVKLESTRIYQILAIYSTVASSLVLVVSLGAISFWMCSNGSLQCRICI

SEQ ID NO: 5340 - protein, 566 aa, Artificial Sequence; identical to SEQ ID NO: 2669
  derived and/or modified protein sequence (wt) from hemagglutinin__InfluenzaA__ADK90199

SEQ ID NO: 5341 - protein, 566 aa, Artificial Sequence
  derived and/or modified protein sequence (wt) from hemagglutinin__InfluenzaA__ADK90200
MKAILVVLLYTFATANADTLCIGYHANNSTDTVDTVLEKNVTVTHSVNLLEDKHNGKLCKLRGVAPLHLGKCNIAGWILGNPECESLSTASSWSYIVETSSSDNGTCYPGDFIDYEELREQLSSVSSFERFEIFPKTSSWPNHDSNKGVTAACPHAGAKSFYKNLIWLVKKGNSYPKLSKSYINDKGKEVLVLWGIHHPSTSADQQSLYQNADAYVFVGTSRYSKKFKPEIAIRPKVRDQEGRMNYYWTLVEPGDKIAFEATGNLVVPRYAFAMERNAGSGIIISDTPVHDCNTTCQTPKGAINTSLPFQNIHPITIGKCPKYVKSTKLRLATGLRNVPSIQSRGLFGAIAGFIEGGWTGMVDGWYGYHHQNEQGSGYAADLKSTQNAIDEITNKVNSVIEKMNTQFTAVGKEFNHLEKRIENLNKKVDDGFLDIWTYNAELLVLLENERTLDYHDSNVKNLYEKVRSQLKNNAKEIGNGCFEFYHKCDNTCMESVKNGTYDYPKYSEEAKLNREEIDGVKLESTRIYQILAVYSTVASSLVLVVSLGAISFWMCSNGSLQCRICI

SEQ ID NO: 5342 - protein, 566 aa, Artificial Sequence
  derived and/or modified protein sequence (wt) from hemagglutinin__InfluenzaA__ADK90201
MKAILVVLLYTFATANADTLCIGYHANNSTDTVDTVLEKNVTVTHSVNLLEDKHNGKLCKLRGVAPLHLGKCNIAGWILGNPECESLSTASSWSYIVETSSSDNGTCYPGDFIDYEELREQLSSVSSFERFEIFPKTSSWPNHDSNKGVTAACPHAGAKSFYKNLIWLVKKGNSYPKLSKSYINDKGKEVLVLWGIHHPSTSADQQSLYQNADAYVFVGTSRYSKKFKPEIAVRPKVRDQEGRMNYYWTLVEPGDKITFEATGNLVVPRYAFAMERNAGSGIIISDTPVHDCNTTCQTPKGAINTSLPFQNIHPITIGKCPKYVKSTKLRLATGLRNVPSIQSRGLFGAIAGFIEGGWTGMVDGWYGYHHQNEQGSGYAADLKSTQNAIDEITNKVNSVIEKMNTQFTAVGKEFNHLEKRIENLNKKVDDGFLDIWTYNAELLVLLENERTLDYHDSNVKNLYEKVRSQLKNNAKEIGNGCFEFYHKCDNTCMESVKNGTYDYPKYSEEAKLNREEIDGVKLESTRIYQILAIYSTVASSLVLVVSLGAISFWMCSNGSLQCRICI

SEQ ID NO: 5343 - protein, 566 aa, Artificial Sequence
  derived and/or modified protein sequence (wt) from hemagglutinin__InfluenzaA__ADK90202
MKAILVVLLYTFATANADTLCIGYHANNSTDTVDTVLEKNVTVTHSVNLLEDKHNGKLCKLRGVAPLHLGKCNIAGWILGNPECEPLSTASSWSYIVETSSSDNGTCYPGDFIDYEELREQLSSVSSFERLEIFPKTSSWPNHDSNKGVTAACPHAGAKSFYKNLIWLVKKGNSYPKLSKSYINDKGKEVLVLWGIHHPSTSADQQSLYQNADAYVFVGTSRYSKKFKPEIAIRPKVRDQEGRMNYYWTLVEPGDKITFEATGNLVVPRYAFAMERNAGSGIIISDTPVHDCNTTCQTPNGAINTSLPFQNIHPITIGKCPKYVKSTKLRLATGLRNVPSIQSRGLFGAIAGFIEGGWTGMVDGWYGYHHQNEQGSGYAADLKSTQNAIDEITNKVNSVIEKMNTQFTAVGKEFNHLEKRIENLNKKVDDGFLDIWTYNAELLVLLENERTLDYHDSNVKNLYEKVRSQLKNNAKEIGNGCFEFYHKCDNTCMESVKNGTYDYPKYSEEAKLNREEIDGVKLESTRIYQILAIYSTVASSLVLVVSLGAISFWMCSNGSLQCRICI

SEQ ID NO: 5344 - protein, 566 aa, Artificial Sequence; identical to SEQ ID NO: 2849
  derived and/or modified protein sequence (wt) from hemagglutinin__InfluenzaA__ADK90203

SEQ ID NO: 5345 - protein, 566 aa, Artificial Sequence; identical to SEQ ID NO: 3770
  derived and/or modified protein sequence (wt) from hemagglutinin__InfluenzaA__ADK90204

SEQ ID NO: 5346 - protein, 566 aa, Artificial Sequence
  derived and/or modified protein sequence (wt) from hemagglutinin__InfluenzaA__ADK94191
MKTIIALSYILCLVFAQKLPGNDNSTATLCLGHHAVPNGTVVKTITNDQIEVTNATELVQSSSTGEICDSPHQILDGKNCTLIDALLGDPQCDGFQNKKWDLFVERSKAYSNCYPYDVPDYASLRSLVASSGTLEFNNESFNWTGVTQNGTSSACIRRSKNSFFSRLNWLTHLNFKYPALNVTMPNNEQFDKLYIWGVHHPGTDKDQIFLYAQASGRITVSTKRSQQTVIPNIGSRPRVRNIPSRVSIYWTIVKPGDILLINSTGNLIAPRGYFKIRSGKSSIMRSDAPIGKCNSECITPNGSIPNDKPFQNVNRITYGACPRYVKQNTLKLATGMRNVPEKQTRGIFGAIAGFIENGWEGMVDGWYGFRHQNSEGRGQAADLKSTQAAIDQINGKLNRLIGKTNEKFHQIEKEFSEVEGRIQDLEKYVEDTKIDLWSYNAELLVALENQHTIDLTDSEMNKLFEKTKKQLRENAEDMGNGCFKIYHKCDNACIGSIRNGTYDHDVYRDEALNNRFQIKGVELKSGYKDWILWISFAISCFLLCVALLGFIMWACQKGNIRCNICI

SEQ ID NO: 5347 - protein, 566 aa, Artificial Sequence
  derived and/or modified protein sequence (wt) from hemagglutinin__InfluenzaA__ADK94202
MKTIIALSYILCLVFAQKLPGNDNSTATLCLGHHAVPNGTIVKTITNDQIEVTNATELVQSSSTGEICDSPHQILDGENCTLIDALLGDPQCDGFQNKKWDLFVERSKAYSNCYPYDVPDYASLRSLIASSGTLEFNNESFNWTGVTQNGTSSACIRRSNNSFFSRLNWLTHLKFKYPALNVTMPNNEQFDKLYIWGVHHPGTDNDQIFLYAQASGRITVSTKRSQQTVIPNIGSRPRVRNIPSRISIYWTIVKPGDILLINSTGNLIAPRGYFKIRSGKSSIMRSDAPIGKCNSECITPNGSIPNDKPFQNVNRITYGACPRYVKQNTLKLATGMRNVPEKQTRGIFGAIAGFIENGWEGMVDGWYGFRHQNSEGRGQAADLKSTQAAIDQINGKLNRLIGKTNEKFHQIEKEFSEVEGRIQDLEKYVEDTKIDLWSYNAELLVALENQHTIDLTDSEMNKLFEKTKKQLRENAEDMGNGCFKIYHKCDNACIGSIRNGTYDHDVYRDEALNNRFQIKGVELKSGYKDWILWISFAISCFLLCVALLGFIMWACQKGNIRCNICI

SEQ ID NO: 5348 - protein, 566 aa, Artificial Sequence; identical to SEQ ID NO: 2434
  derived and/or modified protein sequence (wt) from hemagglutinin__InfluenzaA__ADK94213

SEQ ID NO: 5349 - protein, 566 aa, Artificial Sequence; identical to SEQ ID NO: 3613
  derived and/or modified protein sequence (wt) from hemagglutinin__InfluenzaA__ADK94224

SEQ ID NO: 5350 - protein, 566 aa, Artificial Sequence
  derived and/or modified protein sequence (wt) from hemagglutinin__InfluenzaA__ADK94257
METIIALSYILCLVFAQKLPGNDNSTATLCLGHHAVPNGTIVKTITNDQIEVTNATELVQSSSTGEICDSPHQILDGKNCTLIDALLGDPQCDGFQNKKWDLFVERSKAYSNCYPYDVPDYASLRSLVASSGTLEFNNESFNWTGVTQNGTSSACIRRSKNSFFSRLNWLTHLNFKYPALNVTMPNNEQFDKLYIWGVHHPGTDKDQIFLYAQASGRITVSTKRSQQTVIPNIGSRPRVRNIPSRISIYWTIVKPGDILLINSTGNLIAPRGYFKIRSGKSSIMRSDAPIGKCNSECITPNGSIPNDKPFQNVNRITYGACPRYVKQSTLKLATGMRNVPEKQTRGIFGAIAGFIENGWEGMVDGWYGFRHQNSEGRGQAADLKSTQAAIDQINGKLNRLIGKTNEKFHQIEKEFSEVEGRIQDLEKYVEDTKIDLWSYNAELLVALENQHTIDLTDSEMNKLFEKTKKQLRENAEDMGNGCFKIYHKCDNACIGSIRNGTYDHDVYRDEALNNRFQIKGVELKSGYKDWILWISFAISCFLLCVALLGFIMWACQKGNIRCNICI

SEQ ID NO: 5351 - protein, 566 aa, Artificial Sequence
  derived and/or modified protein sequence (wt) from hemagglutinin__InfluenzaA__ADK94268
MKTIIALSYILCLVFAQKLPGNDNSTATLCLGHHAVPNGTIVKTITNDQIEVTNATELVQSSSTGEICDSPHQILDGKNCTLIDALLGDPQCDGFQNKKWDLFVERSKAYSNCYPYDVPDYASLRSLVASSGTLEFNNESFNWTGVTQNGTSSACIRRSKNSFFSRLNWLTHLNFKYPALNVTMPNNEQFDKLYIWGVHHPGTDKDQIFLYAQASGRITVSTKRSQQTVIPNIGSRPRVRNIPSRISIYWTIVKPGDILLINSTGNLIAPRGYFKIRSGKSSIMRSDAPIGKCNSECITPNGSIPNDKPFQNVNRITYGACPRYVKQSTLKLATGMRNVPEKQTRGIFGAIAGFIENGWEGMVDGWYGFRHQNSEGRGQAADLKSTQAAIDQINGKLNRLIGKTNEKFHQIEKEFSEVEGRIQDLEKYVEDTKIDLWSYNAELLVALENQHTIDLTDSEMNKLFEKTKKQLRENAEDMGNGCFKIYHKCDNACIGSIRNGTYDHDVYRDEALNNRFQIKGVELKSGYKDWILWISFAISCFLLCVALLGFIMWACQKGNIRCNICI

SEQ ID NO: 5352 - protein, 566 aa, Artificial Sequence
  derived and/or modified protein sequence (wt) from hemagglutinin__InfluenzaA__ADK94279
MKTIIALSYILCLVFAQKLPGNDNSTATLCLGHHAVPNGTIVKTITNDQIEVTNATELVQSSSTGEICNSPHQILDGENCTLIDALLGDPQCDGFQNKKWDLFVERSKAYSNCYPYDVPDYASLRSLVASSGTLEFNNESFNWTGVTQNGTSSACIRRSNNSFFSRLNWLTHLKFKYPALNVTMPNNEQFDKLYIWGVHHPGTDNDQIFLYAQASGRITVSTKRSQQTVIPNIGSRPRVRNIPSRISIYWTIVKPGDILLINSTGNLIAPRGYFKIRSGKSSIMRSDAPIGKCNSECITPNGSIPNDKPFQNVNRITYGACPRYVKQNTLKLATGMRNVPEKQTRGIFGAIAGFIENGWEGMVDGWYGFRHQNSEGRGQAADLKSTQAAIDQINGKLNRLIGKTNEKFHQIEKEFSEVEGRIQDLEKYVEDTKIDLWSYNAELLVALENQHTIDLTDSEMNKLFEKTKKQLRENAEDMGNGCFKIYHKCDNACIGSIRNGTYDHDVYRDEALNNRFQIKGVELKSGYKDWILWISFAISCFLLCVALLGFIMWACQKGNIRCNICI

SEQ ID NO: 5353 - protein, 566 aa, Artificial Sequence; identical to SEQ ID NO: 3613
  derived and/or modified protein sequence (wt) from hemagglutinin__InfluenzaA__ADK94290

SEQ ID NO: 5354 - protein, 566 aa, Artificial Sequence; identical to SEQ ID NO: 3613
  derived and/or modified protein sequence (wt) from hemagglutinin__InfluenzaA__ADK94301

SEQ ID NO: 5355 - protein, 566 aa, Artificial Sequence
  derived and/or modified protein sequence (wt) from hemagglutinin__InfluenzaA__ADK94323
MKTIIALSYILCLVFAQKLPGNDNSTATLCLGHHAVPNGTIVKTITNDQIEVTNATELVQSSSTGEICDSPHQILDGKNCTLIDALLGDPQCDGFQNKKWDLFVERSKAYSNCYPYDVPDYASLRSLVASSGTLEFNNESFNWTGVTQNGTSSACIRRSKNSFFSRLNWLTHLNFKYPALNVTMPNNEQFDKLYIWGVHHPGTDKDQIFLYAQASGRITVSTKRSQQTVIPNIGSRPRIRNIPSRISIYWTIVKPGDILLINSTGNLIAPRGYFKIRSGKSSIMRSDAPIGKCNSECITPNGSIPNDKPFQNVNRITYGACPRYVKQNTLKLATGMRNVPEKQTRGIFGAIAGFIENGWEGMVDGWYGFRHQNSEGRGQAADLKSTQAAIDQINGKLNRLIGKTNEKFHQIEKEFSEVEGRIQDLEKYVEDTKIDLWSYNAELLVALENQHTIDLTDSEMNKLFEKTKKQLRENAEDMGNGCFKIYHKCDNACIGSIRNGTYDHDVYRDEALNNRFQIKGVELKSGYKDWILWISFAISCFLLCVALLGFIMWACQKGNIRCNICI

SEQ ID NO: 5356 - protein, 566 aa, Artificial Sequence; identical to SEQ ID NO: 5346
  derived and/or modified protein sequence (wt) from hemagglutinin__InfluenzaA__ADK94441

SEQ ID NO: 5357 - protein, 566 aa, Artificial Sequence
  derived and/or modified protein sequence (wt) from hemagglutinin__InfluenzaA__ADK94476
MKTIIALSYILCLVFAQKLPGNDNSTATLCLGHHAVPNGTIVKTITNDQIEVTNATELVQSSSTGEICDSPHQILDGKNCTLIDALLGDPQCDGFQNKKWDLFVERSKAHSNCYPYDVPDYASLRSLVASSGTLEFNNESFNWTGVTQNGTSSACIRRSKNSFFSRLNWLTHLNFKYPALNVTMPNNEQFDKLYIWGAHHPGTDKDQIFLYAQASGRITVSTKRSQQTVIPNIGSRPRVRNIPSRISIYWTIVKPGDILLINSTGNLIAPRGYFKIRSGKSSIMRSDAPIGKCNSECITPNGSIPNDKPFQNVNRITYGACPRYVKQNTLKLATGMRNVPEKQTRGIFGAIAGFIENGWEGMVDGWYGFRHQNSEGRGQAADLKSTQAAIDQINGKLNRLIGKTNEKFHQIEKEFSEVEGRIQDLEKYVEDTKIDLWSYNAELLVALENQHTIDLTDSEMNKLFEKTKKQLRENAEDMGNGCFKIYHKCDNACIGSIRNGTYDHDVYRDEALNNRFQIKGVELKSGYKDWILWISFAISCFLLCVALLGFIMWACQKGNIRCNICI

SEQ ID NO: 5358 - protein, 566 aa, Artificial Sequence; identical to SEQ ID NO: 3613
  derived and/or modified protein sequence (wt) from hemagglutinin__InfluenzaA__ADK94487

SEQ ID NO: 5359 - protein, 566 aa, Artificial Sequence
  derived and/or modified protein sequence (wt) from hemagglutinin__InfluenzaA__ADK94498
MKTIIALSYILCLVFAQKLPGNDNSTATLCLGHHAVPNGTVVKTITNDQIEVTNATELVQSSSTGEICDSPHQILDGKNCTLIDALLGDPQCDGFQNKKWDLFVERSKAYSNCYPYDVPDYASLRSLVASSGTLEFNNESFNWTGVTQNGTSSACIRRSKNSFFSRLNWLTHLNFKYPALNVTMPNNEQFDKLYIWGVHHPGTDKDQIFLYAQASGRITVSTKRSQQTVIPNIGSRPRVRNIPSRISIYWTIVKPGDILLINSTGNLIAPRGYFKIRSGKSSIMRSDAPIGKCNSECITPNGSIPNDKPFQNVNRITYGACPRYVKQNTLKLATGMRNVPEKQTRGIFGAIAGFIENGWEGMVDGWYGFRHQNSEGRGQAADLKSTQAAIDQINGKLNRLIGKTNEKFHQIEKEFSEVEGRIQDLEKYVEDTKIDLWSYNAELLVALENQHTIDLTDSEMNKLFEKTKKQLRENAEDMGNGCFKIYHKCDNACIGSIRNGTYNHDVYRDEALNNRFQIKGVELKSGYKDWILWISFAISCFLLCVALLGFIMWACQKGNIRCNICI

SEQ ID NO: 5360 - protein, 566 aa, Artificial Sequence
  derived and/or modified protein sequence (wt) from hemagglutinin__InfluenzaA__ADK94509
MKTIIALSYILCLVFAQKLPGNDNSTATLCLGHHAVPNGTIVKTITNDQIEVTNATELVQSSSTGEICDSPHQILDGKNCTLIDALLGDPQCDGFQNKKWDLFVERSKAYSNCYPYDVPDYASLRSLVASSGTLEFNNESFNWTGVTQNGTSSACIRRSKNSFFSRLNWLTHLNFKYPALNVTMPNNEQFDKLYIWGVHHPGTDKDQIFLYAQASGRITVSTKRSQQTAIPNIGSRPRVRNIPSRISIYWTIVKPGDILLINSTGNLIAPRGYFKIRSGKSSIMRSDAPIGKCNSECITPNGSIPNDKPFQNVNRITYGACPRYIKQNTLKLATGMRNVPEKQTRGIFGAIAGFIENGWEGMVDGWYGFRHQNSEGRGQAADLKSTQAAIDQINGKLNRLIGKTNEKFHQIEKEFSEVEGRIQDLEKYVEDTKIDLWSYNAELLVALENQHTIDLTDSEMNKLFEKTKKQLRENAEDMGNGCFKIYHKCDNACIGSIRNGTYDHDVYRDEALNNRFQIKGVELKSGYKDWILWISFAISCFLLCVALLGFIMWACQKGNIRCNICI

SEQ ID NO: 5361 - protein, 566 aa, Artificial Sequence
  derived and/or modified protein sequence (wt) from hemagglutinin__InfluenzaA__ADK94520
MKTIIALSYILCLVFAQKLPGNDNSTATLCLGHHAVPNGTIVKTITNDQIEVTNATELVQSSSTGEICDSPHQILDGENCTLIDALLGDPQCDGFQNKKWDLFVERSKAYSNCYPYDVPDYASLRSLIASSGTLEFNNESFNWTGVTQNGTSSACIRRSNNSFFSRLNWLTHLRFKYPALNVTMPNNEQFDKLYIWGVHHPGTDNDQIFLYAQASGRITVSTKRSQQTVIPNIGSRPRVRNIPSRISIYWTIVKPGDILLINSTGNLIAPRGYFKIRSGKSSIMRSDAPIGKCNSECITPNGSIPNDKPFQNVNRITYGACPRYVKQNTLKLATGMRNVPEKQTRGIFGAIAGFIENGWEGMVDGWYGFRHQNSEGRGQAADLKSTQAAIDQINGKLNRLIGKTNEKFHQIEKEFSEVEGRIQDLEKYVEDTKIDLWSYNAELLVALENQHTIDLTDSEMNKLFEKTKKQLRENAEDMGNGCFKIYHKCDNACIGSIRNGTYDHDVYRDEALNNRFQIKGVELKSGYKDWILWISFAISCFLLCVALLGFIMWACQKGNIKCNICI

SEQ ID NO: 5362 - protein, 566 aa, Artificial Sequence; identical to SEQ ID NO: 3613
  derived and/or modified protein sequence (wt) from hemagglutinin__InfluenzaA__ADK94531

SEQ ID NO: 5363 - protein, 566 aa, Artificial Sequence; identical to SEQ ID NO: 2434
  derived and/or modified protein sequence (wt) from hemagglutinin__InfluenzaA__ADK94542

SEQ ID NO: 5364 - protein, 566 aa, Artificial Sequence
  derived and/or modified protein sequence (wt) from hemagglutinin__InfluenzaA__ADK94553
MKTIIALSYILCLVFAQKLPGNDNSTATLCLGHHAVPNGTIVKTITNDQIEVTNATELVQSSSTGEICDSPHQILDGKNCTLIDALLGDPQCDGFQNKKWDLFVERSKAYSNCYPYDVPDYASLRSLVASSGTLEFNNESFNWTGVTQNGTSSACIRRSKNSFFSRLNWLTHLNFKYPALNVTMPNNEQFDKLYIWGVHHPGTDKDQIFLYAQASGRITVSTKRSQQTVIPNIGSRPRVRNIPSRISIYWTIVKPGDILLINSTGNLIAPRGYFKIRSGKSSIMRSDAPIGKCNSECITPNGSIPNDKPFQNVNRITYGACPRYVKQSTLKLATGMRNVPEKQTRGIFGAIAGFIENGWEGMVDGWYGFRHQNSEGRGQAADLKSTQAAIDQINGKLNRLIGKTNEKFHQIEKEFSEVEGRIQDLEKYVEDTKIDLWSYNAELLVALENQHTIDLTDSEMNKLFEKTKKQLRENAEDMGNGCFKIYHKCNNACIGSIRNGTYDHDVYRDEALNNRFQIKGVELKSGYKDWILWISFAISCFLLCVALLGFIMWACQKGNIRCNICI

SEQ ID NO: 5365 - protein, 566 aa, Artificial Sequence; identical to SEQ ID NO: 3613
  derived and/or modified protein sequence (wt) from hemagglutinin__InfluenzaA__ADK94564

SEQ ID NO: 5366 - protein, 566 aa, Artificial Sequence
  derived and/or modified protein sequence (wt) from hemagglutinin__InfluenzaA__ADK98501
MKAILVVLLYTFATANADTLCIGYHANNSTDTVDTVLEKNVTVTHSVNLLEDKHNGKLCKLRGVAPLHLGKCNIAGWILGNPECESLSTASSWSYIVETSSSGNGTCYPGDFIDYEELREQLSSVSSFERFEIFPKTSSWPNHDSNKGVTAACPHAGAKSFYKNLIWLVKKGNSYPKLSKSYINDKGKEVLVLWGIHHPSTSADQQSLYQNADAYVFVGTSRYSKKFKPEIAIRPKVRDQEGRMNYYWTLVEPGDKITFETTGNLVVPRYAFAMERNAGSGIIISDTPVHDCNTTCQTPKGAINTSLPFQNIHPITIGKCPKYVKSTKLRLATGLRNVPSIQSRGLFGAIAGFIEGGWTGMVDGWYGYHHQNEQGSGYAADLKSTQNAIDEITNKVNSVIEKMNTQFTAVGKEFNHLEKRIENLNKKVDDGFLDIWTYNAELLVLLENERTLDYHDSNVKNLYEKVRSQLKNNAKEIGNGCFEFYHKCDNTCMESVKNGTYDYPKYSEEAKLNREEIDGVKLESTRIYQILAIYSTVASSLVLVVSLGAISFWMCSNGSLQCRICI

SEQ ID NO: 5367 - protein, 566 aa, Artificial Sequence
  derived and/or modified protein sequence (wt) from hemagglutinin__InfluenzaA__ADK98503
MKAILVVLLYTFATANADTLCIGYHANNSTDTVDTVLEKNVTVTHSVNLLEDKHNGKLCKLRGVAPLHLGKCNIAGWILGNPECESLSTASSWSYIVETSSSDNGTCYPGDFIDYEELREQLSSVSSFERFEIFPKTSSWPNHDPNKGVTAACPHAGAKSFYKNLIWLVKKGNSYPKLSKSYINDKGKEVLVLWGIHHPSTSADQQSLYQNVDAYVFVGTSRYSKKFKPEIAIRPKVRDQEGRMNYYWTLVEPGDKITFEATGNLVVPRYAFAMERNAGSGIIISDTPVHDCNTTCQTPKGAINTSLPFQNIHPITIGKCPKYVKSTKLRLATGLRNVPSIQSRGLFGAIAGFIEGGWTGMVDGWYGYHHQNEQGSGYAADLKSTQNAIDEITNKVNSVIEKMNTQFTAVGKEFNHLEKRIENLNKKVDDGFLDIWTYNAELLVLLENERTLDYHDSNVKNLYEKVRSQLKNNAKEIGNGCFEFYHKCDNTCMESVKNGTYDYPKYSEEAKLNREEIDGVKLESTRIYQILAIYSTVASSLVLVVSLGAISFWMCSNGSLQCRICI

SEQ ID NO: 5368 - protein, 566 aa, Artificial Sequence; identical to SEQ ID NO: 5351
  derived and/or modified protein sequence (wt) from hemagglutinin__InfluenzaA__ADK98623

SEQ ID NO: 5369 - protein, 566 aa, Artificial Sequence; identical to SEQ ID NO: 2434
  derived and/or modified protein sequence (wt) from hemagglutinin__InfluenzaA__ADK98634

SEQ ID NO: 5370 - protein, 566 aa, Artificial Sequence; identical to SEQ ID NO: 2434
  derived and/or modified protein sequence (wt) from hemagglutinin__InfluenzaA__ADK98645

SEQ ID NO: 5371 - protein, 566 aa, Artificial Sequence; identical to SEQ ID NO: 5297
  derived and/or modified protein sequence (wt) from hemagglutinin__InfluenzaA__ADK98656

SEQ ID NO: 5372 - protein, 566 aa, Artificial Sequence; identical to SEQ ID NO: 5364
  derived and/or modified protein sequence (wt) from hemagglutinin__InfluenzaA__ADK98667

SEQ ID NO: 5373 - protein, 566 aa, Artificial Sequence
  derived and/or modified protein sequence (wt) from hemagglutinin__InfluenzaA__ADK98678
MKTIIALSYILCLVFAQKLPGNDNSTATLCLGHHAVPNGTIVKTITNDQIEVTNATELVQSSSTGEICDSPHQILDGENCTLIDALLGDPQCDGFQNKKWDLFVERSKAYSNCYPYDVPDYASLRSLVASSGTLEFNNESFNWTGVTQNGTSSACIRRSNNSFFSRLNWLTHLKFKYPALNVTMPNNEQFDKLYIWGVHHPGTDNDQIFLYAQASGRITVSTKRSQQTVIPNIGSRPRVRNIPSRISIYWTIVKPGDILLINSTGNLIAPRGYFKIRSGKSSIMRSDAPIGKCNSECITQNGSIPNDKPFQNVNRITYGACPRYVKQNTLKLATGMRNVPEKQTRGIFGAIAGFIENGWEGMVDGWYGFRHQNSEGRGQAADLKSTQAAIDQINGKLNRLIGKTNEKFHQIEKEFSEVEGRIQDLEKYVEDTKIDLWSYNAELLVALENQHTIDLTDSEMNKLFEKTKKQLRENAEDMGNGCFKIYHKCDNACIGSIRNGTYDHDVYRDEALNNRFQIKGVELKSGYKDWILWISFAISCFLLCVALLGFIMWACQKGNIRCNICI

SEQ ID NO: 5374 - protein, 566 aa, Artificial Sequence; identical to SEQ ID NO: 2434
  derived and/or modified protein sequence (wt) from hemagglutinin__InfluenzaA__ADK98689

SEQ ID NO: 5375 - protein, 566 aa, Artificial Sequence; identical to SEQ ID NO: 2434
  derived and/or modified protein sequence (wt) from hemagglutinin__InfluenzaA__ADK98700

SEQ ID NO: 5376 - protein, 566 aa, Artificial Sequence; identical to SEQ ID NO: 2434
  derived and/or modified protein sequence (wt) from hemagglutinin__InfluenzaA__ADK98711

SEQ ID NO: 5377 - protein, 566 aa, Artificial Sequence
  derived and/or modified protein sequence (wt) from hemagglutinin__InfluenzaA__ADK98722
MKTIIALSYILCLVFAQKLPGNDNSTATLCLGHHAVPNGTIVKTITNDQIEVTNATELVQSSSTGEICDSPHQILDGENCTLIDALLGDPQCDGFQNKKWDLFVERSKAYSNCYPYDVPDYASLRSLVASSGTLEFNNESFNWTGVTQNGTSSACIRRSNNSFFSRLNWLTHLKFKYPALNVTMPNNEQFDKLYIWGVHHPGTDNDQIFLYAQASGRITVSTKGSQQTVIPNIGSRPRVRNIPSRISIYWTIVKPGDILLINSTGNLIAPRGYFKIRSGKSSIMRSDAPIGKCNSECITPNGSIPNDKPFQNVNRITYGACPRYVKQNTLKLATGMRNVPEKQTRGIFGAIAGFIENGWEGMVDGWYGFRHQNSEGRGQAADLKSTQAAIDQINGKLNRLIGKTNEKFHQIEKEFSEVEGRIQDLEKYVEDTKIDLWSYNAELLVALENQHTIDLTDSEMNKLFEKTKKQLRENAEDMGNGCFKIYHKCDNACIGSIRNGTYDHDVYRDEALNNRFQIKGVELKSGYKDWILWISFAISCFLLCVALLGFIMWACQKGNIRCNICI

SEQ ID NO: 5378 - protein, 566 aa, Artificial Sequence; identical to SEQ ID NO: 5351
  derived and/or modified protein sequence (wt) from hemagglutinin__InfluenzaA__ADK98733

SEQ ID NO: 5379 - protein, 566 aa, Artificial Sequence; identical to SEQ ID NO: 2434
  derived and/or modified protein sequence (wt) from hemagglutinin__InfluenzaA__ADK98744

SEQ ID NO: 5380 - protein, 566 aa, Artificial Sequence; identical to SEQ ID NO: 2434
  derived and/or modified protein sequence (wt) from hemagglutinin__InfluenzaA__ADK98777

SEQ ID NO: 5381 - protein, 566 aa, Artificial Sequence; identical to SEQ ID NO: 2434
  derived and/or modified protein sequence (wt) from hemagglutinin__InfluenzaA__ADK98788

SEQ ID NO: 5382 - protein, 566 aa, Artificial Sequence; identical to SEQ ID NO: 3613
  derived and/or modified protein sequence (wt) from hemagglutinin__InfluenzaA__ADK98799

SEQ ID NO: 5383 - protein, 566 aa, Artificial Sequence
  derived and/or modified protein sequence (wt) from hemagglutinin__InfluenzaA__ADK98810
MKTIIALSYILCLVFAQKLPGNDNSTATLCLGHHAVPNGTIVKTITNDQIEVTNATELVQSSSTGEICDSPHQILDGENCTLIDALLGDPQCDGFQNKKWDLFVERSKAYSNCYPYDVPDYASLRSLVASSGTLEFNNESFNWTGVTQNGTSSACIRRSNNSFFSRLNWLTHLKFKYPALNVTMPNNEQFDKLYIWGVHHPGTDNDQTFLYAQASGRITVSTKRSQQTVIPNIGSRPRVRNIPSRISIYWTIVKPGDILLINSTGNLIAPRGYFKIRSGKSSIMRSDAPIGKCNSECITPNGSIPNDKPFQNVNRITYGACPRYVKQNTLKLATGMRNVPEKQTRGIFGAIAGFIENGWEGMVDGWYGFRHQNSEGRGQAADLKSTQAAIDQINGKLNRLIGKTNEKFHQIEKEFSEVEGRIQDLEKYVEDTKIDLWSYNAELLVALENQHTIDLTDSEMNKLFEKTKKQLRENAEDMGNGCFKIYHKCDNACIGSIRNGTYDHNVYRDEALNNRFQIKEVELKSGYKDWILWISFAISCFLLCVALLGFIMWACQKGNIRCNICI

SEQ ID NO: 5384 - protein, 566 aa, Artificial Sequence
  derived and/or modified protein sequence (wt) from hemagglutinin__InfluenzaA__ADK98821
MKTIIALSYILCLVFAQKLPGNDNSTATLCLGHHAVPNGTIVKTITNDQIEVTNATELVQSSSTGEICDSPHQILDGKNCTLIDALLGDPQCDGFQNKKWDLFVERSKAYSNCYPYDVPDYASLRSLVASSGTLEFNNESFNWTGVTQNGTSSACIRRSKNSFFSRLNWLTHLNFKYPALNVTMPNNEQFDKLYIWGVHHPGTDKDQIFLYAQASGRITVSTKRSQQTAIPNIGSRPRVRNIPSRISIYWTIVKPGDILLINSTGNLIAPRGYFKIRSGKSSIMRSDAPIGKCNSECITPNGSIPNDKPFQNVNRITYGACPRYVKQNTLKLATGMRNVPEKQTRGIFGAIAGFIENGWEGMVDGWYGFRHQNSEGRGQAADLKSTQAAIDQINGKLNRLIGKTNEKFHQIEKEFSEVEGRIQDLEKYVEDTKIDLWSYNAELLVALENQHTIDLTDSEMNKLFEKTRKQLRENAEDMGNGCFKIYHKCDNACIGSIRNGTYDHDVYRDEALNNRFQIKGVELKSGYKDWILWISFAISCFLLCVALLGFIMWACQKGNIRCNICI

SEQ ID NO: 5385 - protein, 566 aa, Artificial Sequence; identical to SEQ ID NO: 2434
  derived and/or modified protein sequence (wt) from hemagglutinin__InfluenzaA__ADK98832

SEQ ID NO: 5386 - protein, 566 aa, Artificial Sequence; identical to SEQ ID NO: 5364
  derived and/or modified protein sequence (wt) from hemagglutinin__InfluenzaA__ADK98843

SEQ ID NO: 5387 - protein, 566 aa, Artificial Sequence
  derived and/or modified protein sequence (wt) from hemagglutinin__InfluenzaA__ADK98854
MKTIIALSYILCLVFTQKLPGNDNSTATLCLGHHAVPNGTIVKTITNDQIEVTNATELVQSSSTGEICDSPHQILDGENCTLIDALLGDPQCDGFQNKKWDLFVERSKAYSNCYPYDVPDYASLRSLVASSGTLEFNNESFNWTGVTQNGTSSACIRRSNNSFFSRLNWLTHLKFKYPALNVTMPNNEQFDKLYIWGVHHPGTDNDQIFLYAQASGRITVSTKRSQQTVIPNIGSRPRVRNIPSRISIYWTIVKPGDILLINSTGNLIAPRGYFKIRSGKSSIMRSDAPIGKCNSECITPNGSIPNDKPFQNVNRITYGACPRYVKQNTLKLATGMRNVPEKQTRGIFGAIAGFIENGWEGMVDGWYGFRHQNSEGRGQAADLKSTQAAIDQINGKLNRLIGKTNEKFHQIEKEFSEVEGRIQDLEKYVEDTKIDLWSYNAELLVALENQHTIDLTDSEMNKLFEKTKKQLRENAEDMGNGCFKIYHKCDNACIGSIRNGTYDHDVYRDEALNNRFQIKGVELKPGYKDWILWISFAISCFLLCVALLGFIMWACQKGNIRCNICI

SEQ ID NO: 5388 - protein, 566 aa, Artificial Sequence
  derived and/or modified protein sequence (wt) from hemagglutinin__InfluenzaA__ADK98865
MKTIIALSYILCLVFAQKLPGSDNSTATLCLGHHAVPNGTIVKTITNDQIEVTNATELVQSSSTGEICDSPHQILDGENCTLIDALLGDPQCDDFQNKKWDLFVERSKAYSNCYPYDVPDYASLRSLVASSGTLEFNNESFNWTGVTQNGTSSACIRRSSNSFFSRLNWLTHLRFKYPALNVTMPNNEQFDKLYIWGVHHPGTDNDQIFLYAQASGRITVSTKRSQQTVIPNIGSRPRVRNIPSRISIYWTIVKPGDILLINSTGNLIAPRGYFKIRSGKSSIMRSDAPIGKCNSECITPNGSIPNDKPFQNVNRITYGACPRYVKQNTLKLATGMRNVPEKQTRGIFGAIAGFIENGWEGMVDGWYGFRHQNSEGRGQAADLKSTQAAIDQINGKLNRLIGKTNEKFHQIEKEFSEVEGRIQDLEKYVEDTKIDLWSYNAELLVALENQHTIDLTDSEMNKLFEKTKKQLRENAEDMGNGCFKIYHKCDNACIGSIRNGTYDHDVYRDEALNNRFQIKGVELKSGYKDWILWISFAISCFLLCVALLGFIMWACQKGNIRCNICI

SEQ ID NO: 5389 - protein, 566 aa, Artificial Sequence
  derived and/or modified protein sequence (wt) from hemagglutinin__InfluenzaA__ADK98876
MKTIIALSYILCLVFAQKLPGNDNSTATLCLGHHAVPNGTIVKTITNDQIEVTNATELVQNSSTGEICDSPHQILDGKNCTLIDALLGDPQCDGFQNKKWDLFVERSKAYSNCYPYDVPDYASLRSLVASSGTLEFNNESFNWTGVTQNGTSSACIRRSKNSFFSRLNWLTHLNFKYPALNVTMPNNGQFDKLYIWGVHHPGTDKDQIFLYAQASGRITVSTKRSQQTVIPNIGSRPRVRNIPSRISIYWTIVKPGDILLINSTGNLIAPRGYFKIRSGKSSIMRSDAPIGKCNSECITPNGSIPNDKPFQNVNRITYGACPRYVKQNTLKLATGMRNVPEKQTRGIFGAIAGFIENGWEGMVDGWYGFRHQNSEGRGQAADLKSTQAAIDQINGKLNRLIGKTNEKFHQIEKEFSEVEGRIQDLEKYVEDTKIDLWSYNAELLVALENQHTIDLTDSEMNKLFEKTKKQLRENAEDMGNGCFKIYHKCDNACIGSIRNGTYDHDVYRDEALNNRFQIKGVELKSGYKDWILWISFAISCFLLCVALLGFIMWACQKGNIRCNICI

SEQ ID NO: 5390 - protein, 566 aa, Artificial Sequence; identical to SEQ ID NO: 5364
  derived and/or modified protein sequence (wt) from hemagglutinin__InfluenzaA__ADK98887

SEQ ID NO: 5391 - protein, 566 aa, Artificial Sequence; identical to SEQ ID NO: 2434
  derived and/or modified protein sequence (wt) from hemagglutinin__InfluenzaA__ADK98898

SEQ ID NO: 5392 - protein, 566 aa, Artificial Sequence
  derived and/or modified protein sequence (wt) from hemagglutinin__InfluenzaA__ADK98909
MKTIIALSYILCLVFAQKLPGNDNSTATLCLGHHAVPNGTIVKTITNDQIEVTNATELVQISSTGEICDSPHQILDGENCTLIDALLGDPQCDGFQNKKWDLFVERSKAYSNCYPYDVPDYASLRSLVASSGTLEFNNESFNWTGVTQNGTSSACIRRSNNSFFSRLNWLTHLKFKYPALNVTMPNNEQFDKLYIWGVHHPGTDNDQIFLYAQASGRITVSTKRSQQTVIPNIGSRPRVRNIPSRISIYWTIVKPGDILLINSTGNLIAPRGYFKIRSGKSSIMRSDAPIGKCNSECITPNGSIPNDKPFQNVNRITYGACPRYVKQNTLKLATGMRNVPEKQTRGIFGAIAGFIENGWEGMVDGWYGFRHQNSEGRGQAADLKSTQAAIDQINGKLNRLIGKTNEKFHQIEKEFSEVEGRIQDLEKYVEDTKIDLWSYNAELLVALENQHTIDLTDSEMNKLFEKTKKQLRENAEDMGNGCFKIYHKCDNACIGSIRNGTYDHDVYRDEALNNRFQIKGVELKSGYKDWILWISFAISCFLLCVALLGFIMWACQKGNIRCNICI

SEQ ID NO: 5393 - protein, 566 aa, Artificial Sequence
  derived and/or modified protein sequence (wt) from hemagglutinin__InfluenzaA__ADK98920
MKTIIALSYILCLVFAQKLPGNDNSTATLCLGHHAVPNGTIVKTITNDQIEVTNATELVQSSSTGEICDSPHQILDGKNCTLIDALLGDPQCDGFQNKKWDLFVERGKAYSNCYPYDVPDYASLRSLVASSGTLEFNNESFNWTGVTQNGTSSACIRRSKNSFFSRLNWLTHLNFKYPALNVTMPNNEQFDKLYIWGVHHPGTDKDQIFLYAQASGRITVSTKRSQQTVIPNIGSRPRVRNIPSRISIYWTIVKPGDILLINSTGNLIAPRGYFKIRSGKSSIMRSDAPIGKCNSECITPNGSIPNDKPFQNVNRITYGACPRYVKQSTLKLATGMRNVPEKQTRGIFGAIAGFIENGWEGMVDGWYGFRHQNSEGRGQAADLKSTQAAIDQINGKLNRLIGKTNEKFHQIEKEFSEVEGRIQDLEKYVEDTKIDLWSYNAELLVALENQHTIDLTDSEMNKLFEKTKKQLRENAEDMGNGCFKIYHKCDNACIGSIRNGTYDHDVYRDEALNNRFQIKGVELKSGYKDWILWISFAISCFLLCVALLGFIMWACQKGNIRCNICI

SEQ ID NO: 5394 - protein, 566 aa, Artificial Sequence; identical to SEQ ID NO: 2434
  derived and/or modified protein sequence (wt) from hemagglutinin__InfluenzaA__ADK98931

SEQ ID NO: 5395 - protein, 566 aa, Artificial Sequence
  derived and/or modified protein sequence (wt) from hemagglutinin__InfluenzaA__ADK98942
MKTIIALSYILCLVFAQKLPGNDNSTATLCLGHHAVPNGTIVKTITNDQIEVTNATELVQSSSTGEICDSPHQILDGENCTLIDALLGDPQCDGFQNKKWDLFVERSKAYSNCYPYDVPDYASLRSLVASSGTLEFNNESFNWTGVTQNGTSSACIRRSNNSFFSRLNWLTHLKFKYPALNVTMPNNEQFDKLYIWGVHHPGTDNDQIFLYAQASGRITVSTKRSQQTVISNIGSRPRVRNIPSRISIYWTIVKPGDILLINSTGNLIAPRGYFKIRSGKSSIMRSDAPIGKCNSECITPNGSIPNDKPFQNVNRITYGACPRYVKQNTLKLATGMRNVPEKQTRGIFGAIAGFIENGWEGMVDGWYGFRHQNSEGRGQAADLKSTQAAIDQINGKLNRLIGKTNEKFHQIEKEFSEVEGRIQDLEKYVEDTKIDLWSYNAELLVALENQHTIDLTDSEMNKLFEKTKKQLRENAEDMGNGCFKIYHKCDNACIGSIRNGTYDHNVYRDEALNNRFQIKGVELKSGYKDWILWISFAISCFLLCVALLGFIMWACQKGNIRCNICI

SEQ ID NO: 5396 - protein, 566 aa, Artificial Sequence
  derived and/or modified protein sequence (wt) from hemagglutinin__InfluenzaA__ADK98953
MKTIIALSYMLCLVFAQKLPGNDNSTATLCLGHHAVPNGTIVKTITNDQIEVTNATELVQSSSTGEICDSPHQILDGENCTLIDALLGDPQCDGFQNKKWDLFVERSKAYSNCYPYDVPDYASLRSLIASSGTLEFNNESFNWTGVTQNGTSSACIRRSNNSFFSRLNWLTHLKFKYPALNVTMPNNEQFDKLYIWGVHHPGTDNDQIFLYAQASGRITVSTKRSQQTVIPNIGSRPRVRNIPSRISIYWTIVKPGDILLINSTGNLIAPRGYFKIRSGKSSIMRSDAPIGKCNSECITPNGSIPNDKPFQNVNRITYGACPRYVKQNTLKLATGMRNVPEKQTRGIFGAIAGFIENGWEGMVDGWYGFRHQNSEGRGQAADLKSTQAAIDQINGKLNRLIGKTNEKFHQIEKEFSEVEGRIQDLEKYVEDTKIDLWSYNAELLVALENQHTIDLTDSEMNKLFEKTKKQLRENAEDMGNGCFKIYHKCDNACIGSIRNGTYDHDVYRDEALNNRFQIKGVELKSGYKDWILWISFAISCFLLCVALLGFIMWACQKGNIRCNICI

SEQ ID NO: 5397 - protein, 566 aa, Artificial Sequence; identical to SEQ ID NO: 2434
  derived and/or modified protein sequence (wt) from hemagglutinin__InfluenzaA__ADK98964

SEQ ID NO: 5398 - protein, 566 aa, Artificial Sequence; identical to SEQ ID NO: 5351
  derived and/or modified protein sequence (wt) from hemagglutinin__InfluenzaA__ADK98975

SEQ ID NO: 5399 - protein, 566 aa, Artificial Sequence; identical to SEQ ID NO: 5396
  derived and/or modified protein sequence (wt) from hemagglutinin__InfluenzaA__ADK98986

SEQ ID NO: 5400 - protein, 566 aa, Artificial Sequence; identical to SEQ ID NO: 3613
  derived and/or modified protein sequence (wt) from hemagglutinin__InfluenzaA__ADK98997

SEQ ID NO: 5401 - protein, 566 aa, Artificial Sequence; identical to SEQ ID NO: 5396
  derived and/or modified protein sequence (wt) from hemagglutinin__InfluenzaA__ADK99008

SEQ ID NO: 5402 - protein, 566 aa, Artificial Sequence
  derived and/or modified protein sequence (wt) from hemagglutinin__InfluenzaA__ADK99030
MKTIIALSYILCLVFAQKLPGNDNSTATLCLGHHAVPNGTIVKTITNDQIEVTNATELVQSSSTGEICDSPHQILDGKNCTLIDALLGDPQCDGFQNKKWDLFVERSKAYSNCYPYDVPDYASLRSLVASSGTLEFNNESFNWTGVTQNGTSSACIRRSKNSFFSRLNWLTHLNFKYPALNVTMPNNERFDKLYIWGVHHPGTDKDQIFLYAQASGRITVSTKRSQQTVIPNIGSRPRVRNIPSRISIYWTIVKPGDILLINSTGNLIAPRGYFKIRSGKSSIMRSDAPIGKCNSECITPNGSIPNDKPFQNVNRITYGACPRYVKQNTLKLATGMRNVPEKQTRGIFGAIAGFIENGWEGMVDGWYGFRHQNSEGRGQAADLKSTQAAIDQINGKLNRLIGKTNEKFHQIEKEFSEVEGRIQDLEKYVEDTKIDLWSYNAELLVALENQHTIDLTDSEMNKLFEKTKKQLRENAEDMGNGCFKIYHKCDNACIGSIRNGTYDHDVYRDEALNNRFQIKGVELKSGYKDWILWISFAISCFLLCVALLGFIMWACQKGNIRCNICI

SEQ ID NO: 5403 - protein, 566 aa, Artificial Sequence
  derived and/or modified protein sequence (wt) from hemagglutinin__InfluenzaA__ADK99041
MKTIIALSYILCLVFAQKLPGNDNSTATLCLGHHAVPNGTIVKTIANDQIEVTNATELVQSSSTGEICDSPHQILDGENCTLIDALLGDPQCDGFQNKKWDLFVERSKAYSNCYPYDVPDYASLRSLVASSGTLEFNNESFNWTGVTQNGTSSACIRRSNNSFFSRLNWLTHLKFKYPALNVTMPNNEQFDKLYIWGVHHPGTDNDQIFLYAQASGRITVSTKRSQQTVIPNIGSRPRVRNIPSRISIYWTIVKPGDILLINSTGNLIAPRGYFKIRSGKSSIMRSDAPIGKCNSECITPNGSIPNDKPFQNVNRITYGACPRYVKQNTLKLATGMRNVPEKQTRGIFGAIAGFIENGWEGMVDGWYGFRHQNSEGRGQAADLKSTQAAIDQINGKLNRLIGKTNEKFHQIEKEFSEVEGRIQDLEKYVEDTKIDLWSYNAELLVALENQHTIDLTDSEMNKLFEKTKKQLRENAEDMGNGCFKIYHKCDNACIGSIRNGTYDHDVYRDEALNNRFQIKGVELKSGYKDWILWISFAISCFLLCVALLGFIMWACQKGNIRCNICI

SEQ ID NO: 5404 - protein, 566 aa, Artificial Sequence; identical to SEQ ID NO: 5351
  derived and/or modified protein sequence (wt) from hemagglutinin__InfluenzaA__ADK99063

SEQ ID NO: 5405 - protein, 566 aa, Artificial Sequence; identical to SEQ ID NO: 2434
  derived and/or modified protein sequence (wt) from hemagglutinin__InfluenzaA__ADK99085

SEQ ID NO: 5406 - protein, 566 aa, Artificial Sequence; identical to SEQ ID NO: 2434
  derived and/or modified protein sequence (wt) from hemagglutinin__InfluenzaA__ADK99096

SEQ ID NO: 5407 - protein, 566 aa, Artificial Sequence; identical to SEQ ID NO: 2434
  derived and/or modified protein sequence (wt) from hemagglutinin__InfluenzaA__ADK99107

SEQ ID NO: 5408 - protein, 566 aa, Artificial Sequence
  derived and/or modified protein sequence (wt) from hemagglutinin__InfluenzaA__ADK99118
MKTIIALSYILCLVFAQKLPGNDNSTATLCLGHHAVPNGTIVKTITNDQIEVTNATELVQSSSTGEICDIPHQILDGKNCTLIDALLGDPQCDGFQNKKWDLFVERSKAYSNCYPYDVPDYASLRSLVASSGTLEFNNESFNWTGVTQNGTSSACIRRSKNSFFSRLNWLTHLNFKYPALNVTMPNNEQFDKLYIWGVHHPGTDKDQIFLYAQASGRITVSTKRSQQTVIPNIGSRPRVRNIPSRISIYWTIVKPGDILLINSTGNLIAPRGYFKIRSGKSSIMRSDAPIGKCNSECITPNGSIPNDKPFQNVNRITYGACPRYVKQSTLKLATGMRNVPEKQTRGIFGAIAGFIENGWEGMVDGWYGFRHQNSEGRGQAADLKSTQAAIDQINGKLNRLIGKTNEKFHQIEKEFSEVEGRIQDLEKYVEDTKIDLWSYNAELLVALENQHTIDLTDSEMNKLFEKTKKQLRENAEDMGNGCFKIYHKCNNACIGSIRNGTYDHDVYRDEALNNRFQIKGVELKSGYKDWILWISFAISCFLLCVALLGFIMWACQKGNIRCNICI

SEQ ID NO: 5409 - protein, 566 aa, Artificial Sequence
  derived and/or modified protein sequence (wt) from hemagglutinin__InfluenzaA__ADK99129
MKTIIALSYILCLVFAQKLPGNDNSTATLCLGHHAVPNGTIVKTITNDQIEVTNATELVQSSSTGEICDSPHQILDGKNCTLIDALLGDPQCDGFQNKKWDLFVERSKAYSNCYPYDVPDYASLRSLVASSGTLEFNNESFNWTGVTQNGTSSACIRRSKNSFFSRLNWLTHLNFKYPALNMTMPNNEQFDKLYIWGVHHPGTDKDQIFLYAQASGRITVSTKRSQQTVIPNIGSRPRVRNIPSRISIYWTIVKPGDILLINSTGNLIAPRGYFKIRSGKSSIMRSDAPIGKCNSECITPNGSIPNDKPFQNVNRITYGACPRYVKQSTLKLATGMRNVPEKQTRGIFGAIAGFIENGWEGMVDGWYGFRHQNSEGRGQAADLKSTQAAIDQINGKLNRLIGKTNEKFHQIEKEFSEVEGRIQDLEKYVEDTKIDLWSYNAELLVALENQHTIDLTDSEMNKLFEKTKKQLRENAEDMGNGCFKIYHKCNNACIGSIRNGTYDHDVYRDEALNNRFQIKGVELKSGYKDWILWISFAISCFLLCVALLGFIMWACQKGNIRCNICI

SEQ ID NO: 5410 - protein, 566 aa, Artificial Sequence; identical to SEQ ID NO: 5351
  derived and/or modified protein sequence (wt) from hemagglutinin__InfluenzaA__ADK99140

SEQ ID NO: 5411 - protein, 566 aa, Artificial Sequence
  derived and/or modified protein sequence (wt) from hemagglutinin__InfluenzaA__ADK99151
MKTIIALSYILCLVFAQKLPGNDNSTATLCLGHHAVPNGTIVKTITNDQIEVTNATELVQSSSTGEICDSPHQILDGKNCTLIDALLGDPQCDGLQNKKWDLFVERSKAYSNCYPYDVPDYASLRSLVASSGTLEFNNESFNWTGVTQNGTSSACIRRSKNSFFSRLNWLTHLNFKYPALNVTMPNNEQFDKLYIWGVHHPGTDKDQIFLYAQASGRITVSTKRSQQTAIPNIGSRPRVRNIPSRISIYWTIVKPGDILLINSTGNLIAPRGYFKIRSGKSSIMRSDAPIGKCNSKCITPNGSIPNDKPFQNVNRITYGACPRYVKQNTLKLATGMRNVPEKQTRGIFGAIAGFIENGWEGMVDGWYGFRHQNSEGRGQAADLKSTQAAIDQINGKLNRLIGKTNEKFHQIEKEFSEVEGRIQDLEKYVEDTKIDLWSYNAELLVALENQHTIDLTDSEMNKLFEKTKKQLRENAEDMGNGCFKIYHKCDNACIGSIRNGTYDHDVYRDEALNNRFQIKGVELKSGYKDWILWISFAISCFLLCVALLGFIMWACQKGNIRCNICI

SEQ ID NO: 5412 - protein, 566 aa, Artificial Sequence; identical to SEQ ID NO: 5351
  derived and/or modified protein sequence (wt) from hemagglutinin__InfluenzaA__ADK99162

SEQ ID NO: 5413 - protein, 566 aa, Artificial Sequence
  derived and/or modified protein sequence (wt) from hemagglutinin__InfluenzaA__ADK99173
MKTIIALSYILCLVFAQKLPGNDNSTATLCLGHHAVPNGTIVKTITNDQIEVTNATELIQSSSTGEICDSPHQILDGENCTLIDALLGDPQCDGLQNKKWDLFVERSKAYSNCYPYDVPDYASLRSLVASSGTLEFNNESFNWTGVTQNGTSSACIRRSNNSFFSRLNWLTHLKFKYPALNVTMPNNEQFDKLYIWGVHHPGTDNDQIFLYAQASGRITVSTKRSQQTVIPNIGSRPRVRNIPSRISIYWTIVKPGDILLINSTGNLIAPRGYFKIRSGKSSIMRSDAPIGKCNSECITPNGSIPNDKPFQNVNRITYGACPRYVKQNTLKLATGMRNVPEKQTRGIFGAIAGFIENGWEGMVDGWYGFRHQNSEGRGQAADLKSTQAAIDQINGKLNRLIGKTNEKFHQIEKEFSEVEGRIQDLEKYVEDTKIDLWSYNAELLVALENQHTIDLTDSEMNKLFEKTKKQLRENAEDMGNGCFKIYHKCDNACIGSIRNGTYDHDVYRDEALNNRFQIKGVELKSGYKDWILWISFAISCFLLCVALLGFIMWACQKGNIRCNICI

SEQ ID NO: 5414 - protein, 566 aa, Artificial Sequence
  derived and/or modified protein sequence (wt) from hemagglutinin__InfluenzaA__ADK99184
MKTIIALSYILCLVSAQKLPGNDNSTATLCLGHHAVPNGTIVKTITNDQIEVTNATELVQSSSTGEICNSPHQILDGENCTLIDALLGDPQCDGFQNKKWDLFVERSKAYSNCYPYDVPDYASLRSLVASSGTLEFNNESFNWTGVTQNGTSSACIRRSNNSFFSRLNWLTHLKFKYPALNVTMPNNEQFDKLYIWGVHHPGTDNDQIFLYAQASGRITVSTKRSQQTVIPNIGSRPRVRNIPSRISIYWTIVKPGDILLINSTGNLIAPRGYFKIRSGKSSIMRSDAPIGKCNSECITPNGSIPNDKPFQNVNRITYGACPRYVKQNTLKLATGMRNVPEKQTRGIFGAIAGFIENGWEGMVDGWYGFRHQNSEGRGQAADLKSTQAAIDQINGKLNRLIGKTNEKFHQIEKEFSEVEGRIQDLEKYVEDTKIDLWSYNAELLVALENQHTIDLTDSEMNKLFEKTKKQLRENAEDMGNGCFKIYHKCDNACIGSIRNGTYDHDVYRDEALNNRFQIKGVELKSGYKDWILWISFAISCFLLCVALLGFIMWACQKGNIRCNICI

SEQ ID NO: 5415 - protein, 566 aa, Artificial Sequence; identical to SEQ ID NO: 2434
  derived and/or modified protein sequence (wt) from hemagglutinin__InfluenzaA__ADK99195

SEQ ID NO: 5416 - protein, 566 aa, Artificial Sequence
  derived and/or modified protein sequence (wt) from hemagglutinin__InfluenzaA__ADK99206
MKTIIALSYILCLVFAQKLPGNDNSTATLCLGHHAVPNGTVVKTITNDQIEVTNATELVQSSSTGEICDSPHQILDGKNCTLIDALLGDPQCDGFQNKKWDLFVERSKAYSNCYPYDVPDYASLRSLVASSGTLEFNNESFNWTGVTQNGTSSACIRRSKNSFFSRLNWLTHLNFKYPALNVTMPNNEQFDKLYIWGVHHPGTDKDQIFLYAQASGRITVSTKRSQQTVIPNIGSRPRVRNIPSRVSIYWTIVKPGDILLINSTGNLIAPRGYFKIRSGKSSIMRSDAPIGKCNSECITPNGSIPNDKPFQNVNRITYGACPRYVKQNTLKLATGMRNVPEKQTRGIFGAIAGFIENGWEGMVDGWYGFRHQNSEGRGQAADLKSTQAAIDQINGKLNRLIGKTNEKFHQIEKEFSEVEGRIQDLEKYVEDTKIDLWSYNAELLVSLENQHTIDLTDSEMNKLFEKTKKQLRENAEDMGNGCFKIYHKCDNACIGSIRNGTYDHDVYRDEALNNRFQIKGVELKSGYKDWILWISFAISCFLLCVALLGFIMWACQKGNIRCNICI

SEQ ID NO: 5417 - protein, 566 aa, Artificial Sequence; identical to SEQ ID NO: 5351
  derived and/or modified protein sequence (wt) from hemagglutinin__InfluenzaA__ADK99217

SEQ ID NO: 5418 - protein, 566 aa, Artificial Sequence; identical to SEQ ID NO: 5351
  derived and/or modified protein sequence (wt) from hemagglutinin__InfluenzaA__ADK99228

SEQ ID NO: 5419 - protein, 566 aa, Artificial Sequence
  derived and/or modified protein sequence (wt) from hemagglutinin__InfluenzaA__ADK99239
MKTIIALSYILCLVFAQKLPGNDNSTATLCLGHHAVPNGTIVKTITNDQIEVTNATELVQSSSTGEICDSPHQILDGKNCTLIDALLGDPQCDGFQNKKWDLFVERSKAYSNCYPYDVPDYASLRSLVASSGTLEFNNESFNWTGVTQNGTSSACIRRSKNSFFSRLNWLTHLNFKYPALNVTMPNNEQFDKLYIWGVHHPGTDKDQIFLYAQASGRITVSTKRSQQTVIPNIGSRPRVRNIPSRISIYWTIVKPGDILLINSTGNLIAPRGYFKIRSGKSSIMRSDAPIGKCNSECITPNGSIPNDKPFQNVNRITYGACPRYVKQNTLKLATGMRNVPEKQTRGIFGAIAGFIENGWEGMVDGWYGFRHQNSEGRGQAADLKSTQAAIDQINGKLNRLIGKTNEKFHQIEKEFSEVEGRIQDLEKYVEDTKIDLWSYNAELLVALENQHTIDLTDSEMNKLFEKTKKQLRENAEDMGNGCFKIYHKCDNACIGSIRNGTYDHDVYRDEALNNRFQIKGVELKSGYKDWILWISFAISCFLLCVALLGFIMWACQKGNIRCNICI

SEQ ID NO: 5420 - protein, 566 aa, Artificial Sequence
  derived and/or modified protein sequence (wt) from hemagglutinin__InfluenzaA__ADK99250
MKTIIALSYILCLVFAQKLPGNDNSTATLCLGHHAVPNGTIVKTITNDQIEVTNATELVQSSSTGEICDSPHQILDGENCTLIDALLGDPQCDGFQNKKWDLFVERSKAYSNCYPYDVPDYASLRSLVASSGTLEFNNESFNWTGVTQNGTSSACIRRSNNSFFSRLNWLTHLKFKYPALNVTMPNNEQFDKLYIWGVHHPGTDNDQIFLYAQASGRITVSTKRSQQTVIPNIGSRPRVRNIPSRISIYWTIVKPGDILLINSTGNLIAPRGYFKIRSGKSSIMRSDAPIGKCNSECITPNGSIPNDKPFQNVNRITYGACPRYVKQNTLKLATGMRNVPEKQTRGIFGAIAGFIENGWEGMVDGWYGFRHQNSEGRGQAADLKSTQAAIDQINGKLNRLIGKTNEKFHQIEKEFSEVEGRIQDIEKYVEDTKIDLWSYNAELLVALENQHTIDLTDSEMNKLFEKTKKQLRENAEDMGNGCFKIYHKCDNACIGSIRNGTYDHDVYRDEALNNRFQIKGVELKSGYKDWILWISFAISCFLLCVALLGFIMWACQKGNIRCNICI

SEQ ID NO: 5421 - protein, 566 aa, Artificial Sequence; identical to SEQ ID NO: 5351
  derived and/or modified protein sequence (wt) from hemagglutinin__InfluenzaA__ADK99261

SEQ ID NO: 5422 - protein, 566 aa, Artificial Sequence
  derived and/or modified protein sequence (wt) from hemagglutinin__InfluenzaA__ADK99283
MKTIIALSYILCLVFAQKLPGNDNSTATLCLGHHAVPNGTIVKTITNDQIEVTNATELVQSSSTGEICDSPHQILDGKNCTLIDALLGDPQCDGFQNKKWDLFVERSKAYSNCYPYDVPDYASLRSLVASSGTLEFNNESFNWTGVTQNGTSSACIRRSKNSFFSRLNWLTHLNFKYPALNVTMPNNEQFDKLYIWGVHHPGTDKDQIFLYAQASGRITVSTKRSQQTVIPNIGSRPRVRNIPSRISIYWTIVKPGDILLINSTGNLIAPRGYFKIRSGKSSIMRSDAPIGKCNSECITPNGSIPNDKPFQNVNRITYGACPRYVKQNTLKLATGMRNVPEKQTRGIFGAIAGFIENGWEGMVDGWYGFRHQNSEGRGQAADLKSTQAAIDQINGKLNRLIGKTNEKFHQIEKEFSEVEGRIQDLERYVEDTKIDLWSYNAELLVALENQHTIDLTDSEMNKLFEKTKKQLRENAEDMGNGCFKIYHKCDNACIGSIRNGTYDHDVYRDEALNNRFQIKGVELKSGYKDWILWISFAISCFLLCVALLGFIMWACQKGNIRCNICI

SEQ ID NO: 5423 - protein, 566 aa, Artificial Sequence
  derived and/or modified protein sequence (wt) from hemagglutinin__InfluenzaA__ADK99294
MKTIIALSYILCLVFAQKLPGNDNSTATLCLGHHAVPNGTIVKTITNDQIEVTNATELVQSSSTGEICDSPHQILDGENCTLIDALLGDPQCDGFQDKKWDLFVERSKAYSNCYPYDVPDYASLRSLVASSGTLEFNNESFNWTGVTQNGTSSACIRRSNNSFFSRLNWLTHLNFKYPALNVTMPNNEQFDKLYIWGVHHPGTDKDQIFLYAQASGRITVSTKRSQQAVIPNIGSRPRVRNIPSRISIYWTIVKPGDILLINSTGNLIAPRGYFKIRSGKSSIMRSDAPIGKCNSECITPNGSIPNDKPFQNVNRITYGACPRYVKQNTLKLATGMRNVPEKQTRGIFGAIAGFIENGWEGMVDGWYGFRHQNSEGRGQAADLKSTQAAIDQINGKLNRLIGKTNEKFHQIEKEFSEVEGRIQDLEKYVEDTKIDLWSYNAELLVALENQHTIDLTDSEMNKLFEKTKKQLRENAEDMGNGCFKIYHKCDNACIGSIRNGTYDHDVYRDEALNNRFQIKGVELKSGYKDWILWISFAISCFLLCVALLGFIMWACQKGNIRCNICI

SEQ ID NO: 5424 - protein, 566 aa, Artificial Sequence; identical to SEQ ID NO: 2434
  derived and/or modified protein sequence (wt) from hemagglutinin__InfluenzaA__ADK99305

SEQ ID NO: 5425 - protein, 566 aa, Artificial Sequence; identical to SEQ ID NO: 2434
  derived and/or modified protein sequence (wt) from hemagglutinin__InfluenzaA__ADL27989

SEQ ID NO: 5426 - protein, 566 aa, Artificial Sequence
  derived and/or modified protein sequence (wt) from hemagglutinin__InfluenzaA__ADL28000
MKTIIALSYILCLVFAQKLPGNDNSTATLCLGHHAVPNGTMVKTITNDQIEVTNATELVQSSSTGEICDSPHQILDGKNCTLIDALLGDPQCDGFQNKKWDLFVERSKAYSNCYPYDVPDYASLRSLVASSGTLEFNNESFNWTGVTQNGTSSACIRRSKNSFFSRLNWLTHLNFKYPALNVTMPNNEQFDKLYIWGVHHPGTDKDQIFLYAQASERITVSTKRSQQTVIPNIGSRPRVRNIPSRISIYWTIVKPGDILLINSTGNLIAPRGYFKIRSGKSSIMRSDAPIGKCNSECITPNGSIPNDKPFQNVNRITYGACPRYVKQSTLKLATGMRNVPEKQTRGIFGAIAGFIENGWEGMVDGWYGFRHQNSEGRGQAADLKSTQAAIDQINGKLNRLIGKTNEKFHQIEKEFSEVEGRIQDLEKYVEDTKIDLWSYNAELLVALENQHTIDLTDSEMNKLFEKTKKQLRENAEDMGNGCFKIYHKCDNACIGSIRNGTYDHDVYRDEALNNRFQIKGVELKSGYKDWILWISFAISCFLLCVALLGFIMWACQKGNIRCNICI

SEQ ID NO: 5427 - protein, 566 aa, Artificial Sequence
  derived and/or modified protein sequence (wt) from hemagglutinin__InfluenzaA__ADL28011
MKTIIALSYILCLVFAQKLPGNDNSTATLCLGHHAVPNGTIVKTITNDQIEVTNATELVQSSSTGEICDSPHQILDGENCTLIDALLGDPQCDGFQNKKWDLFVERSKAYSNCYPYDVPDYASLRSLVASSGTLEFNNESFNWTGVTQNGTSSACIRRSNNSFFSRLNWLTHLKFKYPALNVTMPNNEQFDKLYIWGVHHPGTDNDQIFLYAQASGRITVSTRRSQQTVIPNIGSRPRVRNIPSRISIYWTIVKPGDILLINSTGNLIAPRGYFKIRSGKSSIMRSDAPIGKCNSECITPNGSIPNDKPFQNVNRITYGACPRYVKQNTLKLATGMRNVPEKQTRGIFGAIAGFIENGWEGMVDGWYGFRHQNSEGRGQAADLKSTQAAIDQINGKLNRLIGKTNEKFHQIEKEFSEVEGRIQDLEKYVEDTKIDLWSYNAELLVALENQHTIDLTDSEMNKLFEKTKKQLRENAEDMGNGCFKIYHKCDNACIGSIRNGTYDHDVYRDEALNNRFQIKGVELKSGYKDWILWISFAISCFLLCVALLGFIMWACQKGNIRCNICI

SEQ ID NO: 5428 - protein, 566 aa, Artificial Sequence; identical to SEQ ID NO: 5351
  derived and/or modified protein sequence (wt) from hemagglutinin__InfluenzaA__ADL28022

SEQ ID NO: 5429 - protein, 566 aa, Artificial Sequence; identical to SEQ ID NO: 2434
  derived and/or modified protein sequence (wt) from hemagglutinin__InfluenzaA__ADL28033

SEQ ID NO: 5430 - protein, 566 aa, Artificial Sequence; identical to SEQ ID NO: 3613
  derived and/or modified protein sequence (wt) from hemagglutinin__InfluenzaA__ADL28044

SEQ ID NO: 5431 - protein, 566 aa, Artificial Sequence
  derived and/or modified protein sequence (wt) from hemagglutinin__InfluenzaA__ADL28055
MKTIVALSYILCLVFAQKLPGNDNSTATLCLGHHAVPNGTIVKTITNDQIEVTNATELVQSSSTGEICDSPHQILDGENCTLIDALLGDPQCDGFQNKKWDLFVERSKAYSNCYPYDVPDYASLRSLVASSGTLEFNNESFNWTGVTQNGTSSACIRRSNNSFFSRLNWLTHLKFKYPALNVTMPNNEQFDKLYIWGVHHPGTDNDQIFLYAQASGRITVSTKRSQQTVIPNIGSRPRVRNIPSRISIYWTIVKPGDILLINSTGNLIAPRGYFKIRSGKSSIMRSDAPIGKCNSECITPNGSIPNDKPFQNVNRITYGACPRYVKQNTLKLATGMRNVPEKQTRGIFGAIAGFIENGWEGMVDGWYGFRHQNSEGRGQAADLKSTQAAIDQINGKLNRLIGKTNEKFHQIEKEFSEVEGRIQDLEKYVEDTKIDLWSYNAELLVALENQHTIDLTDSEMNKLFEKTKKQLRENAEDMGNGCFKIYHKCDNACIGSIRNGTYDHDVYRDEALNNRFQIKGVELKSGYKDWILWISFAISCFLLCVALLGFIMWACQKGNIRCNICI

SEQ ID NO: 5432 - protein, 566 aa, Artificial Sequence; identical to SEQ ID NO: 2434
  derived and/or modified protein sequence (wt) from hemagglutinin__InfluenzaA__ADL28066

SEQ ID NO: 5433 - protein, 566 aa, Artificial Sequence; identical to SEQ ID NO: 5351
  derived and/or modified protein sequence (wt) from hemagglutinin__InfluenzaA__ADL28077

SEQ ID NO: 5434 - protein, 566 aa, Artificial Sequence
  derived and/or modified protein sequence (wt) from hemagglutinin__InfluenzaA__ADL28088
MKTIIALSYILCLVFAQKLPGNDNSTATLCLGHHAVPNGTIVKTITNDQIEVTNATELVQSSSTGEICDSPHQILDGENCTLIDALLGDPQCDGFQNKKWDLFVERSKAYSNCYPYDVPDYASLRSLVASSGTLEFNNESFNWTGVTQNGTSSACIRRSNNSFFSRLNWLTHLKFKYPALNVTMPNNEQFDKLYIWGVHHPGTDNDQIFLYSQASGRITVSTKRSQQTVIPNIGSRPRVRNIPSRISIYWTIVKPGDILLINSTGNLIAPRGYFKIRSGKSSIMRSDAPIGKCNSECITPNGSIPNDKPFQNVNRITYGACPRYVKQNTLKLATGMRNVPEKQTRGIFGAIAGFIENGWEGMVDGWYGFRHQNSEGRGQAADLKSTQAAIDQINGKLNRLIGKTNEKFHQIEKEFSEVEGRIQDLEKYVEDTKIDLWSYNAELLVALENQHTIDLTDSEMNKLFEKTKKQLRENAEDMGNGCFKIYHKCDNACIGSIRNGTYDHDVYRDEALNNRFQIKGVELKSGYKDWILWISFAISCFLLCVALLGFIMWACQKGNIRCNICI

SEQ ID NO: 5435 - protein, 566 aa, Artificial Sequence; identical to SEQ ID NO: 2434
  derived and/or modified protein sequence (wt) from hemagglutinin__InfluenzaA__ADL28099

SEQ ID NO: 5436 - protein, 566 aa, Artificial Sequence
  derived and/or modified protein sequence (wt) from hemagglutinin__InfluenzaA__ADL28110
MKTIIALSYILCLVFAQKLPGNDNSTATLCIGHHAVPNGTIVKTITNDQIEVTNATELVQNSSTGEICDSPHQILDGKNCTLIDALLGDPQCDGFQNKKWDLFVERSKAYSNCYPYDVPDYASLRSLVASSGTLEFNNESFNWTGVTQNGTSSACIRRSKNSFFSRLNWLTHLNFKYPALNVTMPNNEQFDKLYIWGVHHPGTDKDQIFLYAQASGRITVSTKRSQQTAIPNIGSRPRVRNIPSRISIYWTIVKPGDILLINSTGNLIAPRGYFKIRSGKSSIMRSDAPIDKCNSECITPNGSIPNDKPFQNVNRITYGACPRYVKQNTLKLATGMRNVPEKQTRGIFGAIAGFIENGWEGMVDGWYGFRHQNSEGRGQAADLKSTQAAIDQINGKLNRLIGKTNEKFHQIEKEFSEVEGRIQDLEKYVEDTKIDLWSYNAELLVALENQHTIDLTDSEMNKLFEKTKKQLRENAEDMGNGCFKIYHKCDNACIGSIRNGTYDHDVYRDEALNNRFQIKGVELKSGYKDWILWISFAISCFLLCVALLGFIMWACQKGNIRCNICI

SEQ ID NO: 5437 - protein, 566 aa, Artificial Sequence
  derived and/or modified protein sequence (wt) from hemagglutinin__InfluenzaA__ADL28126
MKTIIALSYILCLVFAQKLPGNDNSTATLCLGHHAVPNGTIVKTITNDQIEVTNATELVQSSSTGEICDSPHQILDGENCTLIDALLGDPQCDGFQNKKWDLFVERSKAYSNCYPYDVPDYASLRSLVASSGTLEFNNESFNWTGVNQNGTSSACIRRSNNSFFSRLNWLTHLKFKYPALNVTMPNNEQFDKLYIWGVHHPGTDNDQIFLYAQASGRITVSTKRSQQTVIPNIGSRPRVRNIPSRISIYWTIVKPGDILLINSTGNLIAPRGYFKIRSGKSSIMRSDAPIGKCNSECITPNGSIPNDKPFQNVNRITYGACPRYVKQNTLKLATGMRNVPEKQTRGIFGAIAGFIENGWEGMVDGWYGFRHQNSEGRGQAADLKSTQAAIDQINGKLNRLIGKTNEKFHQIEKEFSEVEGRIQDLEKYVEDTKIDLWSYNAELLVALENQHTIDLTDSEMNKLFEKTKKQLRENAEDMGNGCFKIYHKCDNACIGSIRNGTYDHDVYRDEALNNRFQIKGVELKSGYKDWILWISFAISCFLLCVALLGFIMWACQKGNIRCNICI

SEQ ID NO: 5438 - protein, 566 aa, Artificial Sequence
  derived and/or modified protein sequence (wt) from hemagglutinin__InfluenzaA__ADL28137
MKTIIALSYILCLVSAQKLPGNDNSTATLCLGHHAVPNGTIVKTITNDQIEVTNATELVQSSSTGEICDGPHQILDGENCTLIDALLGDPQCDGFQNKKWDLFVERSKAYSNCYPYDVPDYASLRSLVASSGTLEFNNESFNWTGVTQNGTSSACIRRSNNSFFSRLNWLTHLKFKYPALNVTMPNNEQFDKLYIWGVHHPGTDNDQIFLYAQASGRITVSTKRSQQTVIPNIGSRPRVRNIPSRISIYWTIVKPGDILLINSTGNLIAPRGYFKIRSGKSSIMRSDAPIGKCNSECITPNGSIPNDKPFQNVNRITYGACPRYVKQNTLKLATGMRNVPEKQTRGIFGAIAGFIENGWEGMVDGWYGFRHQNSEGRGQAADLKSTQAAIDQINGKLNRLIGKTNEKFHQIEKEFSEVEGRIQDLEKYVEDTKIDLWSYNAELLVALENQHTIDLTDSEMNKLFEKTKKQLRENAEDMGNGCFKIYHKCDNACIGSIRNGTYDHDVYRDEALNNRFQIKGVELKSGYKDWILWISFAISCFLLCVALLGFIMWACQKGNIRCNICI

SEQ ID NO: 5439 - protein, 566 aa, Artificial Sequence; identical to SEQ ID NO: 2434
  derived and/or modified protein sequence (wt) from hemagglutinin__InfluenzaA__ADL28148

SEQ ID NO: 5440 - protein, 566 aa, Artificial Sequence; identical to SEQ ID NO: 5351
  derived and/or modified protein sequence (wt) from hemagglutinin__InfluenzaA__ADL28170

SEQ ID NO: 5441 - protein, 566 aa, Artificial Sequence; identical to SEQ ID NO: 2434
  derived and/or modified protein sequence (wt) from hemagglutinin__InfluenzaA__ADL28181

SEQ ID NO: 5442 - protein, 566 aa, Artificial Sequence; identical to SEQ ID NO: 5346
  derived and/or modified protein sequence (wt) from hemagglutinin__InfluenzaA__ADL28192

SEQ ID NO: 5443 - protein, 566 aa, Artificial Sequence; identical to SEQ ID NO: 5352
  derived and/or modified protein sequence (wt) from hemagglutinin__InfluenzaA__ADL28203

SEQ ID NO: 5444 - protein, 566 aa, Artificial Sequence; identical to SEQ ID NO: 3411
  derived and/or modified protein sequence (wt) from hemagglutinin__InfluenzaA__ADL28214

SEQ ID NO: 5445 - protein, 566 aa, Artificial Sequence
  derived and/or modified protein sequence (wt) from hemagglutinin__InfluenzaA__ADL28225
MKTIIALSYILCLVFAQKLPGNDNSTATLCLGHHAVPNGTIVKTITNDQIEVTNATELVQSSSTGEICDSPHQILDGENCTLIDALLGDPQCDGFQNKKWDLFVERSKAYSNCYPYDVPDYASLRSLVASSGTLEFNNESFNWTGVTQNGTSSACIRRSNNSFFSRLNWLTHLKFKYPALNVTMPNNEQFDKLYIWGVHHPGTDNDQIFLYSQASGRITVSTKRSQQTVIPNIGSRPRVRNIPSRISIYWTIVKPGDILLINSTGNLIAPRGYFKIRSGKSSIMRSDAPIGKCNSECITPNGSIPNDKPFQNVNRITYGACPRYVKQNTLKLATGMRNVPEKQTRGIFGAIAGFIENGWEGMVDGWYGFRHQNSEGRGQAADLKSTQAAIDQINGKLNRLIGKTNEKFHQIEKEFSEVEGRIQDLEKYVEDTKTDLWSYNAELLVALENQHTIDLTDSEMNKLFEKTKKQLRENAEDMGNGCFKIYHKCDNACIGSIRNGTYDHDVYRDEALNNRFQIKGVELKSGYKDWILWISFAISCFLLCVALLGFIMWACQKGNIRCNICI

SEQ ID NO: 5446 - protein, 566 aa, Artificial Sequence; identical to SEQ ID NO: 5351
  derived and/or modified protein sequence (wt) from hemagglutinin__InfluenzaA__ADL28236

SEQ ID NO: 5447 - protein, 566 aa, Artificial Sequence; identical to SEQ ID NO: 2434
  derived and/or modified protein sequence (wt) from hemagglutinin__InfluenzaA__ADL28247

SEQ ID NO: 5448 - protein, 566 aa, Artificial Sequence; identical to SEQ ID NO: 5364
  derived and/or modified protein sequence (wt) from hemagglutinin__InfluenzaA__ADL28258

SEQ ID NO: 5449 - protein, 566 aa, Artificial Sequence; identical to SEQ ID NO: 2434
  derived and/or modified protein sequence (wt) from hemagglutinin__InfluenzaA__ADL28370

SEQ ID NO: 5450 - protein, 566 aa, Artificial Sequence; identical to SEQ ID NO: 2669
  derived and/or modified protein sequence (wt) from hemagglutinin__InfluenzaA__ADL29672

SEQ ID NO: 5451 - protein, 566 aa, Artificial Sequence; identical to SEQ ID NO: 2911
  derived and/or modified protein sequence (wt) from hemagglutinin__InfluenzaA__ADL29682

SEQ ID NO: 5452 - protein, 566 aa, Artificial Sequence; identical to SEQ ID NO: 2669
  derived and/or modified protein sequence (wt) from hemagglutinin__InfluenzaA__ADL29692

SEQ ID NO: 5453 - protein, 566 aa, Artificial Sequence
  derived and/or modified protein sequence (wt) from hemagglutinin__InfluenzaA__ADL29702
MKAILVVLLYTFATANADTLCIGYHANNSTDTVDTVLEKNVTVTHSVNLLEDKHNGKLCKLRGVAPLHLGKCNIAGWILGNPECESLSTASSWSYIVETSSSDNGTCYPGDFIDYEELREQLSSVSSFERFEIFPKTSSWPNHDSNKGVTAACPHAGAKSFYKNLIWLVKKGNSYPKLSKSYINDKGKEVLVLWGIHHPSTSADQQSLYQNADTYVFVGTSRYSKKFKPEIAIRPKVRDQEGRMNYYWTLVEPGDKITFEATGNLVVPRYAFAMERNAGSGIIISDTPVHDCNTTCQTPKGAINTSLPFQNIHPITIGKCPKYVKSTKLRLATGLRNVPSIQSRGLFGAIAGFIEGGWTGMVDGWYGYHHQNEQGSGYAADLKSTQNAIDEITNKVNSVIEKMNTQFTAVGKEFNHLEKRIENLNKKIDDGFLDIWTYNAELLVLLENERTLDYHDSNVKNLYEKVRNQLKNNAKEIGNGCFEFYHKCDNTCMESVKNGTYDYPKYSEEAKLNREEIDGVKLESTRIYQILAIYSTVASSLVLVVSLGAISFWMCSNGSLQCRICI

SEQ ID NO: 5454 - protein, 566 aa, Artificial Sequence; identical to SEQ ID NO: 2669
  derived and/or modified protein sequence (wt) from hemagglutinin__InfluenzaA__ADL29730

SEQ ID NO: 5455 - protein, 566 aa, Artificial Sequence; identical to SEQ ID NO: 2669
  derived and/or modified protein sequence (wt) from hemagglutinin__InfluenzaA__ADL29740

SEQ ID NO: 5456 - protein, 566 aa, Artificial Sequence; identical to SEQ ID NO: 2669
  derived and/or modified protein sequence (wt) from hemagglutinin__InfluenzaA__ADL29750

SEQ ID NO: 5457 - protein, 566 aa, Artificial Sequence
  derived and/or modified protein sequence (wt) from hemagglutinin__InfluenzaA__ADL29760
MKAILVVLLYTFATANADTLCIGYHANNSTDTVDTVLEKNVTVTHSVNLLEYKHNGKLCKLRGVAPLHLGKCNIAGWILGNPECESLSTASSWSYIVETSSSDNGTCYPGDFIDYEELREQLSSVSSFERFEIFPKTSSWPNHDSNKGVTAACPHAGAKSFYKNLIWLVKKGNSYPKLSKSYINDKGKEVLVLWGIHHPSTSADQQSLYQNADAYVFVGTSRYSKKFKPEIAIRPKVRDQEGRMNYYWTLVEPGDKITFEATGNLVVPRYAFAMERNAGSGIIISDTPVHDCNTTCQTPKGAINTSLPFQNIHPITIGKCPKYVKSTKLRLATGLRNVPSIQSRGLFGAIAGFIEGGWTGMVDGWYGYHHQNEQGSGYAADLKSTQNAIDEITNKVNSVIEKMNTQFTAVGKEFNHLEKRIENLNKKVDDGFLDIWTYNAELLVLLENERTLDYHDSNVKNLYEKVRSQLKNNAKEIGNGCFEFYHKCDNTCMESVKNGTYDYPKYSEEAKLNREEIDGVKLESTRIYQILAIYSTVASSLVLVVSLGAISFWMCSNGSLQCRICI

SEQ ID NO: 5458 - protein, 566 aa, Artificial Sequence; identical to SEQ ID NO: 2669
  derived and/or modified protein sequence (wt) from hemagglutinin__InfluenzaA__ADL29770

SEQ ID NO: 5459 - protein, 566 aa, Artificial Sequence; identical to SEQ ID NO: 4169
  derived and/or modified protein sequence (wt) from hemagglutinin__InfluenzaA__ADL29780

SEQ ID NO: 5460 - protein, 566 aa, Artificial Sequence
  derived and/or modified protein sequence (wt) from hemagglutinin__InfluenzaA__ADL29879
MKAILVVLLYTFATANADTLCIGYHANNSTDTVDTVLEKNVTVTHSVNLLEDKHNGKLCKLRGVAPLHLGKCNIAGWILGNPECESLSTASSWSYIVETSSSDNGTCYPGDFIDYEELREQLSSVSSFERFEIFPKTSSWPNHDSNKGVTAACPHAGAKSFYKNLIWLVKKGNSYPKLSKSYINDKGKEVLVLWGIHHPSTSADQQSLYQNADSYVFVGTSKYSKKFKPEIAIRPKVRDQEGRMNYYWTLVEPGDKITFEATGNLVVPRYAFAMERNAGSGIIISDTPVHDCNTTCQTPKGAINTSLPFQNIHPITIGKCPKYVKSTKLRLATGLRNVPSIQSRGLFGAIAGFIEGGWTGMVDGWYGYHHQNEQGSGYAADLKSTQNAIDEITNKVNSVIEKMNTQFTAVGKEFNHLEKRIENLNKKVDDGFLDIWTYNAELLVLLENERTLDYHDSNVKNLYEKVRSQLKNNAKEIGNGCFEFYHKCDNTCMESVKNGTYDYPKYSEEAKLNREEIDGVKLESTRIYQILAIYSTVASSLVLVVSLGAISFWMCSNGSLQCRICI

SEQ ID NO: 5461 - protein, 566 aa, Artificial Sequence
  derived and/or modified protein sequence (wt) from hemagglutinin__InfluenzaA__ADL32017
MKAILVVLLYTFATANADTLCIGYHANNSTDTVDTVLEKNVTVTHSVNLLEDKHNGKLCQLRGVAPLHLGKCNIAGWILGNPECESLSTASSWSYIVETSSSDNGTCYPGDFIDYEELREQLSSVSSFERFEIFPKTSSWPNHDSNKGVTAACPHAGAKSFYKNLIWLVKKGNSYPKLSKSYINDKGKEVLVLWGIHHPSTSADQQSLYQNADTYVFVGTSRYSKKFKPEIAIRPKVRDQEGRMNYYWTLVEPGDKITFEATGNLVVPRYAFAMERNAGSGIIISDTPVHDCNTTCQTPKGAINTSLPFQNIHPITIGKCPKYVKSTKLRLATGLRNVPSIQSRGLFGAIAGFIEGGWTGMVDGWYGYHHQNEQGSGYAADLKSTQNAIDEITNKVNSVIEKMNTQFTAVGKEFNHLEKRIENLNKKIDDGFLDIWTYNAELLVLLENERTLDYHDSNVKNLYEKVRSQLKNNAKEIGNGCFEFYHKCDNTCMESVKNGTYDYPKYSEEAKLNREEIDGVKLESTRIYQILAIYSTVASSLVLVVSLGAISFWMCSNGSLQCRICI

SEQ ID NO: 5462 - protein, 566 aa, Artificial Sequence
  derived and/or modified protein sequence (wt) from hemagglutinin__InfluenzaA__ADL32037
MKAILVVLLYTFATANADTLCIGYHANNSTDTVDTVLEKNVTVTHSVNLLEDKHNGKLCKLRGVAPLHLGKCNIAGWILGNPECESLSTASSWSYIVETSSSDNGTCYPGDFIDYEELREQLSSVSSFERFEIFPKTSSWPNHDSNKGVTAACPHAGAKSFYKNLIWLVKKGNSYPKLSKSYINDKGKEVLVLWGIHHPSTSVDQQSLYQNADAYVFVGTSRYSKKFKPEIAIRPKVRDQEGRMNYYWTLVEPGDKITFEATGNLVVPRYAFAMERNAGSGIIISDTPVHDCNTTCQTPKGAINTSLPFQNIHPITIGKCPKYVKSTKLRLATGLRNVPSIQSRGLFGAIAGFIEGGWTGMVDGWYGYHHQNEQGSGYAADLKSTQNAIDEITNKVNSVIEKMNTQFTAVGKEFNHLEKRIENLNKKVDDGFLDIWTYNAELLVLLENERTLDYHDSNVKNLYEKVRSQLKNNAKEIGNGCFEFYHKCDNTCMESVKNGTYDYPKYSEEAKLNREEIDGVKLESTRIYQILAIYSTVASSLVLVVSLGAISFWMCSNGSLQCRICI

SEQ ID NO: 5463 - protein, 566 aa, Artificial Sequence; identical to SEQ ID NO: 2669
  derived and/or modified protein sequence (wt) from hemagglutinin__InfluenzaA__ADL32047

SEQ ID NO: 5464 - protein, 566 aa, Artificial Sequence
  derived and/or modified protein sequence (wt) from hemagglutinin__InfluenzaA__ADL32057
MKAILVVLLYTFATANADTLCIGYHANNSTDTVDTVLEKNVTVTHSVNLLEDKHNGKLCKLRGVAPLHLGKCNIAGWILGNPECESLSTASSWSYIVETSSSDNGTCYPGDFIDYEELREQLSSVSSFERFEIFPKTSSWPNHDSNKGVTAACPHAGAKSFYKNLIWLVKKGNSYPKLSKSYINDKGKEVLVLWGIHHPSTSADQQGLYQNADAYVFVGTSRYSKKFKPEIAIRPKVRDQEGRMNYYWTLVEPGDKITFEATGNLVVPRYAFAMERNAGSGIIISDTPVHDCNTTCQTPKGAINTSLPFQNIHPITIGKCPKYVKGTKLRLATGLRNVPSIQSRGLFGAIAGFIEGGWTGMVDGWYGYHHQNEQGSGYAADLKSTQNAIDEITNKVNSVIEKMNTQFTAVGKEFNHLEKRIENLNKKVDDGFLDIWTYNAELLVLLENERTLDYHDSNVKNLYEKVRSQLKNNAKEIGNGCFEFYHKCDNTCMESVKNGTYDYPKYSEEAKLNREEIDGVKLESTRIYQILAIYSTVASSLVLVVSLGAISFWMCSNGSLQCRICI

SEQ ID NO: 5465 - protein, 566 aa, Artificial Sequence; identical to SEQ ID NO: 2669
  derived and/or modified protein sequence (wt) from hemagglutinin__InfluenzaA__ADL32090

SEQ ID NO: 5466 - protein, 566 aa, Artificial Sequence; identical to SEQ ID NO: 2669
  derived and/or modified protein sequence (wt) from hemagglutinin__InfluenzaA__ADL32114

SEQ ID NO: 5467 - protein, 566 aa, Artificial Sequence; identical to SEQ ID NO: 2669
  derived and/or modified protein sequence (wt) from hemagglutinin__InfluenzaA__ADL32344

SEQ ID NO: 5468 - protein, 566 aa, Artificial Sequence; identical to SEQ ID NO: 3116
  derived and/or modified protein sequence (wt) from hemagglutinin__InfluenzaA__ADL32354

SEQ ID NO: 5469 - protein, 566 aa, Artificial Sequence
  derived and/or modified protein sequence (wt) from hemagglutinin__InfluenzaA__ADL32364
MKAILVVLLYTFATANADTLCIGYHANNSTDTVDTVLEKNVTVTHSVNLLEDKHNGKLCKLRGVAPLHLGKCNIAGWILGNPECESLSTAISWSYIVETSSSDNGTCYPGDFIDYEELREQLSSVSSFERFEIFPKTSSWPNHDSNKGVTAACPHAGAKSFYKNLIWLVKKGNSYPKLSKSYINDKGKEVLVLWGIHHPSTSADQQSLYQNADTYVFVGTSRYSKKFKPEIAIRPKVRDQEGRMNYYWTLVEPGDKITFEATGNLVVPRYAFAMERNAGSGIIISDTPVHDCNTTCQTPKGAINTSLPFQNIHPITIGKCPKYVKSTKLRLATGLRNVPSIQSRGLFGAIAGFIEGGWTGMVDGWYGYHHQNEQGSGYAADLKSTQNAIDEITNKVNSVIEKMNTQFTAVGKEFNHLEKRIENLNKKIDDGFLDIWTYNAELLVLLENERTLDYHDSNVKNLYEKVRSQLKNNAKEIGNGCFEFYHKCDNTCMESVKNGTYDYPKYSEEAKLNREEIDGVKLESTRIYQILAIYSTVASSLVLVVSLGAISFWMCSNGSLQCRICI

SEQ ID NO: 5470 - protein, 566 aa, Artificial Sequence; identical to SEQ ID NO: 2669
  derived and/or modified protein sequence (wt) from hemagglutinin__InfluenzaA__ADL32374

SEQ ID NO: 5471 - protein, 566 aa, Artificial Sequence
  derived and/or modified protein sequence (wt) from hemagglutinin__InfluenzaA__ADL32384
MKAILVVLLYTFATATADTLCIGYHANNSTDTVDTVLEKNVTVTHSVNLLEDKHNGKLCKLRGVAPLHLGKCNIAGWILGNPECESLSTASSWSYIVETSSSDNGTCYPGDFIDYEELREQLSSVSSFERFEIFPKTSSWPNHDSNKGVTAACPHAGAKSFYKNLIWLVKKGNSYPKLSKSYINDKGKEVLVLWGIHHPSTSADQQSLYQNADAYVFVGTSRYSKKFKPEIAIRPKVRDQEGRMNYYWTLVEPGDKITFEATGNLVVPRYAFAMERNAGSGIIISDTPVHDCNTTCQTPKGAINTSLPFQNIHPITIGKCPKYVKSTKLRLATGLRNVPSIQSRGLFGAIAGFIEGGWTGMVDGWYGYHHQNEQGSGYAADLKSTQNAIDEITNKVNSVIEKMNTQFTAVGKEFNHLEKRIENLNKKVDDGFLDIWTYNAELLVLLENERTLDYHDSNVKNLYEKVRSQLKNNAKEIGNGCFEFYHKCDNTCMESVKNGTYDYPKYSEEAKLNREEIDGVKLESTRIYQILAIYSTVASSLVLVVSLGAISFWMCSNGSLQCRICI

SEQ ID NO: 5472 - protein, 566 aa, Artificial Sequence
  derived and/or modified protein sequence (wt) from hemagglutinin__InfluenzaA__ADL32394
MKAILVVLLYTFATANADTLCIGYHANNSTDTVDTVLEKNVTVTHSVNLLEDKHNGKLCKLRGVAPLHLGKCNIAGWILGNPECESFSTTSSWSYIVETSSSDNGTCYPGDFIDYEELREQLSSVSSFERFEIFPKTSSWPNHDSNKGVTAACPHAGAKSFYKNLIWLVKKGNSYPKLSKSYINDKGKEVLVLWGIHHPSTSADQQSLYQNADTYVFVGTSRYSKKFKPEIAIRPKVRDQEGRMNYYWTLVEPGDKITFEATGNLVVPRYAFAMERNAGSGIIISDTPVHDCNTTCQTPKGAINTSLPFQNIHPITIGKCPKYVKSTKLRLATGLRNVPSIQSRGLFGAIAGFIEGGWTGMVDGWYGYHHQNEQGSGYAADLKSTQNAIDEITNKVNSVIEKMNTQFTAVGKEFNHLEKRIENLNKKIDDGFLDIWTYNAELLVLLENERTLDYHDSNVKNLYEKVRSQLKNNAKEIGNGCFEFYHKCDNTCMESVKNGTYDYPKYSEEAKLNREEIDGVKLESTRIYQILAIYSTVASSLVLVVSLGAISFWMCSNGSLQCRICI

SEQ ID NO: 5473 - protein, 566 aa, Artificial Sequence; identical to SEQ ID NO: 2669
  derived and/or modified protein sequence (wt) from hemagglutinin__InfluenzaA__ADL32404

SEQ ID NO: 5474 - protein, 566 aa, Artificial Sequence
  derived and/or modified protein sequence (wt) from hemagglutinin__InfluenzaA__ADL32414
MKAILVVLLYTFATANADTLCIGYHANNSTDTVDTVLEKNVTVTHSVNLLEDKHNGKLCKLRGVAPLHLGKCNIAGWILGNPECESLSTASSWSYIVETSSSDNGTCYPGDFIDYEELREQLSSVSSFERFEIFPKTSSWPNHDSNKGVTAACPHAGAKSFYKNLIWLVKKGNSYPKLSKSYINDKGKEVLVLWGIHHPSTSADQQSLYQNADAYVFVGTSRYSKKFKPEIAIRPKVRAQEGRMNYYWTLVEPGDKITFEATGNLVVPRYAFAMERNAGSGIIISDTPVHDCNTTCQTPKGAINTSLPFQNIHPITIGKCPKYVKSTKLRLATGLRNVPSIQSRGLFGAIAGFIEGGWTGMVDGWYGYHHQNEQGSGYAADLKSTQHAIDEITNKVNSVIEKMNTQFTAVGKEFNHLEKRIENLNKKVDDGFLDIWTYNAELLVLLENERTLDYHDSNVKNLYEKVRSQLKNNAKEIGNGCFEFYHKCDNTCMESVKNGTYDYPKYSEEAKLNREEIDGVKLESTRIYQILAIYSTVASSLVLVVSLGAISFWMCSNGSLQCRICI

SEQ ID NO: 5475 - protein, 566 aa, Artificial Sequence
  derived and/or modified protein sequence (wt) from hemagglutinin__InfluenzaA__ADL32424
MKAILVVLLYTFAIANADTLCIGYHANNSTDTVDTVLEKNVTVTHSVNLLEDKHNGKLCKLRGVAPLHLGKCNIAGWILGNPECESLSTASSWSYIVETSSSDNGTCYPGDFIDYEELREQLSSVSSFERFEIFPKTSSWPNHDSNKGVTAACPHAGAKSFYKNLIWLVKKGNSYPKLSKSYINDKGKEVLVLWGIHHPSTSADQQSLYQNADAYVFVGTSRYSKKFKPEIAIRPKVRDQEGRMNYHWTLVEPGDKITFEATGNLVVPRYAFAMERNAGSGIIISDTPVHDCNTTCQTPKGAINTSLPFQNIHPITIGKCPKYVKSTKLRLATGLRNVPSIQSRGLFGAIAGFIEGGWTGMVDGWYGYHHQNEQGSGYAADLKSTQHAIDEITNKVNSVIEKMNTQFTAVGKEFNHLEKRIENLNKKVDDGFLDIWTYNAELLVLLENERTLDYHDSNVKNLYEKVRSQLKNNAKEIGNGCFEFYHKCDNTCMESVKNGTYDYPKYSEEAKLNREEINGVKLESTRIYQILAIYSTVASSLVLVVSLGAISFWMCSNGSLQCRICI

SEQ ID NO: 5476 - protein, 566 aa, Artificial Sequence
  derived and/or modified protein sequence (wt) from hemagglutinin__InfluenzaA__ADL32434
MKAILVVLLYTFATANADTLCIGYHANNSTDTVDTVLEKNVTVTHSVNLLEDKHNGKLCKLRGVAPLHLGKCNIAGWILGNPECESLSTASSWSYIVETSSSDNGTCYPGDFIDYEELREQLSSVSSFERFEIFPKTSSWPIHDSNKGVTAACPHAGAKSFYKNLIWLVKKGNSYPKLSKSYINDKGKEVLVLWGIHHPSTSADQQSLYQNADAYVFVGTSRYSKKFKPEIAIRPKVRDQEGRMNYYWILVEPGDKITFEATGNLVVPRYAFAMERNAGSGIIISDTPVHDCNTTCQTPKGAINTSLPFQNIHPITIGKCPKYVKSTKLRLATGLRNVPSIQSRGLFGAIAGFIEGGWTGMVDGWYGYHHQNEQGSGYAADLKSTQHAIDEITNKVNSVIEKMNTQFTAVGKEFNHLEKRIENLNKKVDDGFLDIWTYNAELLVLLENERTLDYHDSNVKNLYEKVRSQLKNNAKEIGNGCFEFYHKCDNTCMESVKNGTYDYPKYSEEAKLNREEIDGVKLESTRIYQILAIYSTVASSLVLVVSLGAISFWMCSNGSLQCRICI

SEQ ID NO: 5477 - protein, 566 aa, Artificial Sequence; identical to SEQ ID NO: 4089
  derived and/or modified protein sequence (wt) from hemagglutinin__InfluenzaA__ADL32444

SEQ ID NO: 5478 - protein, 566 aa, Artificial Sequence
  derived and/or modified protein sequence (wt) from hemagglutinin__InfluenzaA__ADL32454
MEAILVVLLYTFATANADTLCIGYHANNSTDTVDTVLEKNVTVTHSVNLLEDKHNGKLCKLRGVAPLHLGKCNIAGWILGNPECESLSTASSWSYIVETSSSDNGTCYPGDFIDYEELREQLSSVSSFERFEIFPKTSSWPNHDSNKGVTAACPHAGAKSFYKNLIWLVKKGNSYPKLSKSYINDKGKEVLVLWGIHHPSTSADQQSLYQNADAYVFVGSSRYSKKFKPEIAIRPKVRDQEGRMNYYWTLVEPGDKITFEATGNLVVPRYAFAMERNAGSGIIISDTPVHDCNTTCQTPKGAINTSLPFHNIHPITIGKCPKYVKSTKLRLATGLRNVPSIQSRGLFGAIAGFIEGGWTGMVDGWYGYHHQNEQGSGYAADLKSTQNAIDEITNKVNSVIEKMNTQFTAVGKEFNHLEKRIENLNKKVDDGFLDIWTYNAELLVLLENERTLDYHDSNVKNLYEKVRSQLKNNAKELGNGCFEFYHKCDNTCMESVKNGTYDYPKYSEEAKLNREEIDGVKLESTRIYQILAIYSTVASSLVLVVSLGAISFWMCSNGSLQCRICI

SEQ ID NO: 5479 - protein, 566 aa, Artificial Sequence; identical to SEQ ID NO: 4836
  derived and/or modified protein sequence (wt) from hemagglutinin__InfluenzaA__ADL32464

SEQ ID NO: 5480 - protein, 566 aa, Artificial Sequence; identical to SEQ ID NO: 4836
  derived and/or modified protein sequence (wt) from hemagglutinin__InfluenzaA__ADL32484

SEQ ID NO: 5481 - protein, 566 aa, Artificial Sequence
  derived and/or modified protein sequence (wt) from hemagglutinin__InfluenzaA__ADL32504
MKAILVVLLYTFATANADTLCIGYHANNSTDTVDTVLEKNVTVTHSVNLLEDKHNGKLCKLRGVAPLHLGKCNIAGWILGNPECESLSTASSWSYIVETSSSDNGMCYPGDFIDYEELREQLSSVSSFERFEIFPKTSSWPNHDSNKGVTAACPHAGAKSFYKNLIWLVKKGNSYPKLSKSYINDKGKEVLVLWGIHHPSTSADQQSLYQNADAYVFVGTSRYSKKFKPEIAIRPKVRDQEGRMNYYWTLVEPGDKITFEATGNLVVPRYAFAMERNAGSGIIISDTPVHDCNTTCQTPKGAINTSLPFQNIHPITIGKCPKYVKSTKLRLATGLRNVPSIQSRGLFGAIAGFIEGGWTGMVDGWYGYHHQNEQGSGYAADLKSTQHAIDEITNKVNSVIEKMNTQFTAVGKEFNHLEKRIENLNKKVDDGFLDIWTYNAELLVLLENERTLDYHDSNVKNLYEKVRSQLKNNAKEIGNGCFEFYHKCDNTCMESVKNGTYDYPKYSEEAKLNREEIDGVKLESTRIYQILAIYSTVASSLVLVVSLGAISFWMCSNGSLQCRICI

SEQ ID NO: 5482 - protein, 566 aa, Artificial Sequence; identical to SEQ ID NO: 4089
  derived and/or modified protein sequence (wt) from hemagglutinin__InfluenzaA__ADL32514

SEQ ID NO: 5483 - protein, 566 aa, Artificial Sequence; identical to SEQ ID NO: 4836
  derived and/or modified protein sequence (wt) from hemagglutinin__InfluenzaA__ADL32524

SEQ ID NO: 5484 - protein, 566 aa, Artificial Sequence
  derived and/or modified protein sequence (wt) from hemagglutinin__InfluenzaA__ADL32544
MKAILVVLLYTFATSNADTLCIGYHANNSTDTVDTVLEKNVTVTHSVNLLEDKHNGKLCKLRGVAPLHLGKCNIAGWILGNPECESLSTASSWSYIVETSSSDNGTCYPGDFIDYEELREQLSSVSSFERFEIFPKTSSWPNHDSNKGVTAACPHAGAKSFYKNLIWLVKKGNSYPKLRKSYINDKGKEVLVLWGIHHPSTSADQQSLYQNADAYVFVGTSRYSKKFKPEIAIRPKVRDQEGRMNYYWTLVEPGDKITFEATGNLVVPRYAFAMERNAGSGIIISDTPVHDCNTTCQTPKGAINTSLPFQNIHPITIGKCPKYVKSTKLRLATGLRNVPSIQSRGLFGAIAGFIEGGWTGMVDGWYGYHHQNEQGSGYAADLKSTQHAIDEITNKVNSVIEKMNTQFTAVGKEFNHLEKRIENLNKKVDDGFLDIWTYNAELLVLLENERTLDYHDSNVKNLYEKVRSQLKNNAKEIGNGCFEFYHKCDNTCMESVKNGTYDYPKYSEEAKLNREEIDGVKLESTRIYQILAIYSTVASSLVLVVSLGAISFWMCSNGSLQCRICI

SEQ ID NO: 5485 - protein, 566 aa, Artificial Sequence; identical to SEQ ID NO: 5270
  derived and/or modified protein sequence (wt) from hemagglutinin__InfluenzaA__ADL32554

SEQ ID NO: 5486 - protein, 566 aa, Artificial Sequence; identical to SEQ ID NO: 4282
  derived and/or modified protein sequence (wt) from hemagglutinin__InfluenzaA__ADL32670

SEQ ID NO: 5487 - protein, 566 aa, Artificial Sequence
  derived and/or modified protein sequence (wt) from hemagglutinin__InfluenzaA__ADL32690
MKAILVVLLYTFATANADTLCIGYHANNSTDTVDTVLEKNVTVTHSVNILEDKHNGKLCKLRGVAPLHLGKCNIAGWILGNPECESLSTASSWSYIVETSSSDNGTCYPGDFIDYEELREQLSSVSSFERFEIFPKTSSWPNHDSNKGVTAACPHAGAKSFYKNLMWLVKKGNSYPKLSKSYINDKGKEVLVLWGIHHPSTSADQQSLYQNADAYVFVGSSRYSKKFKPEIAIRPKVRDQEGRMNYYWTLVEPGDKITFEATGNLVVPRYAFAMERNAGSGIIISDTPVHDCNTTCQTPKGAINTSLPFQNIHPITIGKCPKYVKSTKLRLATGLRNVPSIQSRGLFGAIAGFIEGGWTGMVDGWYGYHHQNEQGSGYAADLKSTQNAIDEITNKVNSVIEKMNTQFTAVGKEFNHLEKRIENLNKKVDDGFLDIWTYNAELLVLLENERTLDYHDSNVKNLYEKVRSQLKNNAKEIGNGCFEFYHKCDNTCMESVKNGTYDYPKYSEEAKLNREEIDGVKLESTRIYQILAIYSTVASSLVLVVSLGAISFWMCSNGSLQCRICI

SEQ ID NO: 5488 - protein, 566 aa, Artificial Sequence; identical to SEQ ID NO: 2849
  derived and/or modified protein sequence (wt) from hemagglutinin__InfluenzaA__ADL32710

SEQ ID NO: 5489 - protein, 566 aa, Artificial Sequence; identical to SEQ ID NO: 2669
  derived and/or modified protein sequence (wt) from hemagglutinin__InfluenzaA__ADL32720

SEQ ID NO: 5490 - protein, 566 aa, Artificial Sequence; identical to SEQ ID NO: 4441
  derived and/or modified protein sequence (wt) from hemagglutinin__InfluenzaA__ADL32730

SEQ ID NO: 5491 - protein, 566 aa, Artificial Sequence; identical to SEQ ID NO: 4441
  derived and/or modified protein sequence (wt) from hemagglutinin__InfluenzaA__ADL32740

SEQ ID NO: 5492 - protein, 566 aa, Artificial Sequence; identical to SEQ ID NO: 3613
  derived and/or modified protein sequence (wt) from hemagglutinin__InfluenzaA__ADL39137

SEQ ID NO: 5493 - protein, 565 aa, Artificial Sequence
  derived and/or modified protein sequence (wt) from hemagglutinin__InfluenzaA__ADL39148
MKVKLLVLLCTFTATYADTICIGYHANNSTDTVDTVLEKNVTVTHSVNLLENSHNGKLCLLKGIAPLQLGNCSVAGWILGNPECELLISKESWSYIVEKPNPENGTCYPGHFADYEELREQLSSVSSFERFEIFPKESSWPNHTVTGVSASCSHNGESSFYRNLLWLTGKNGLYPNLSKSYANNKEKEVLVLWGVHHPPNIVDQKTLYRTENAYVSVVSSHYSRKFTPEIAKRPKVRDQEGRINYYWTLLEPGDTIIFEANGNLIAPRYAFALSRDFGSGIINSNAPMDKCDAKCQTPQGAINSSLPFQNVHPVTIGECPKYVRSAKLRMVTGLRNIPSIQSRGLFGAIAGFIEGGWTGMVDGWYGYHHQNEQGSGYAADQKSTQNAINGITNKVNSVIEKMNTQFTAVGKEFNKLERRMENLNKKVDDGFIDIWTYNAELLVLLENERTLDFHDSNVKNLYEKVKSQLKNNAKEIGNGCFEFYHKCNDECMESVKNGTYDYPKYSEESKLNREKIDGVKLESMGVYQILAIYSTVASSLVLLVSLGAISFWMCSNGSLQCRICI

SEQ ID NO: 5494 - protein, 566 aa, Artificial Sequence
  derived and/or modified protein sequence (wt) from hemagglutinin__InfluenzaA__ADL39159
MKTIIALSYILCLVFAQKLPGNDNSTATLCLGHHAVPNGTIVKTITNDQIEVTNATELVQSSSTGEICDSPHQIIDGENCTLIDALLGDPQCDGFQNKKWDLFVERSKAYSNCYPYDVPDYASLRSLVASSGTLEFNNESFNWTGVTQNGTSSACIRRSNNSFFSRLNWLTHLKFKYPALNVTMPNNEQFDKLYIWGVHHPGTDNDQIFLYAQASGRITVSTKRSQQTVIPNIGSRPRVRNIPSRISIYWTIVKPGDILLINSTGNLIAPRGYFKIRSGKSSIMRSDAPIGKCNSECITPNGSIPNDKPFQNVNRITYGACPRYVKQNTLKLATGMRNVPEKQTRGIFGAIAGFIENGWEGMVDGWYGFRHQNSEGRGQAADLKSTQAAIDQINGKLNRLIGKTNEKFHQIEKEFSEVEGRIQDLEKYVEDTKIDLWSYNAELLVALENQHTIDLTDSEMNKLFEKTKKQLRENAEDMGNGCFKIYHKCDNACIRSIRNGTYDHDVYRDEALNNRFQIKGVELKSGYKDWILWISFAISCFLLCFALLGFIMWACQKGNIRCNICI

SEQ ID NO: 5495 - protein, 566 aa, Artificial Sequence
  derived and/or modified protein sequence (wt) from hemagglutinin__InfluenzaA__ADL39170
MKTIIALSYILCLVFAQKLPGNDNSTATLCLGHHAVPNGTIVKTITNDQIEVTNATELVQSSSTGEICDSPHQILDGKNCTLIDALLGDPQCDGFQNKKWDLFVERSKAYSNCYPYDVPDYASLRSLVASSGTLEFNNESFNWTGVTQNGTSSACIRRSKNSFFSRLNWLTHLNFKYPALNVTVPNNEQFDKLYIWGVHHPGTDKDQIFLYAQASGRITVSTKRSQQTVIPNIGSRPRVRNIPSRISIYWTIVKPGDVLLINSTGNLIAPRGYFKIRSGKSSIMRSDAPIGKCNSECITPNGSIPNDKPFQNVNRITYGACPRYVKQNTLKLATGMRNVPEKQTRGIFGAIAGFIENGWEGMVDGWYGFRHQNSEGRGQAADLKSTQAAIDQINGKLNRLIGKTNEKFHQIEKEFSEVEGRIQDLEKYVEDTKIDLWSYNAELLVALENQHTIDLTDSEMNKLFEKTKKQLRENAEDMGNGCFKIYHKCDNACIGSIRNGTYDHDVYRDEALNNRFQIKGVELKSGYKDWILWISFAISCFLLCVALLGFIMWACQKGNIRCNICI

SEQ ID NO: 5496 - protein, 566 aa, Artificial Sequence; identical to SEQ ID NO: 3613
  derived and/or modified protein sequence (wt) from hemagglutinin__InfluenzaA__ADL39203

SEQ ID NO: 5497 - protein, 566 aa, Artificial Sequence; identical to SEQ ID NO: 2434
  derived and/or modified protein sequence (wt) from hemagglutinin__InfluenzaA__ADL39214

SEQ ID NO: 5498 - protein, 565 aa, Artificial Sequence
  derived and/or modified protein sequence (wt) from hemagglutinin__InfluenzaA__ADL39225
MKVKLLVLLCTFTATYADTICIGYHANNSTDTVDTVLEKNVTVTHSVNLLENSHNGKLCLLKGIAPLQLGNCSVAGWILGNPECELLISKESWSYIVEKPNPENGTCYPGYFADYEELREQLSSVSSFERFEIFPKESSWPNHTVTGASASCSHNGENSFYRNLLWLTGKNGLYPNLSKSYANNKEKEVLVLWGVHHPPNIADQKTLYHTENAYVSVVSSHYSRKFTPEIAKRPKVRDQEGRINYYWTLLEPGDTIIFEANGNLIAPRYAFALSRGFGSGIINSNAPMDKCDAKCQTPQGAINSSLPFQNVHPVTIGECPKYVRSAKLRMVTGLRNIPSIQSRGLFGAIAGFIEGGWTGMVDGWYGYHHQNEQGSGYAADQKSTQNAINGITNKVNSVIEKMNTQFTAVGKEFNKLERRMENLNKKVDDGFIDIWTYNAELLVLLENERTLDFHDSNVKNLYEKVKSQLKNNAKEIGNGCFEFYHKCNDECMESVKNGTYDYPKYSEESKLNREKIDGVKLESMGVYQILAIYSTVASSLVLLVSLGAISFWMCSNGSLQCRICI

SEQ ID NO: 5499 - protein, 565 aa, Artificial Sequence
  derived and/or modified protein sequence (wt) from hemagglutinin__InfluenzaA__ADL39236
MKVKLLVLLCTFTATYADTICIGYHANNSTDTVDTVLEKNVTVTHSVNLLENSHNGKLCLLKGIAPLQLGNCSVAGWILGNPECELLISKESWSYIVEKPNPENGTCYPGYFADYEELREQLSSVSSFERFEIFPKESSWPNHTVTGVSASCSHNGESSFYRNLLWLTGKNGLYPNLSKSYTNNKEKEVLVLWGVHHPPNIVDQKTLYRTENAYVSVVSSHYSRKFTPEIAKRPKVRDQEGRINYYWTLLEPGDTIIFEANGNLIAPRYAFALSRGFGSGIINSNAPMGKCDAKCQTPQGAINSSLPFQNVHPVTIGECPKYVRSAKLRMVTGLRNIPSIQSRGLFGAIAGFIEGGWTGMVDGWYGYHHQNEQGSGYAADQKSTQNAINGITNKVNSVIEKMNTQFTAVGKEFNKLERRMENLNKKVDDGFIDIWTYNAELLVLLENERTLDFHDSNVKNLYEKVKSQLKNNAKEIGNGCFEFYHKCNDECMESVKNGTYDYPKYSEESKLNREKIDGVKLESMGVYQILAIYSTVASSLVLLVSLGAISFWMCSNGSLQCRICI

SEQ ID NO: 5500 - protein, 566 aa, Artificial Sequence
  derived and/or modified protein sequence (wt) from hemagglutinin__InfluenzaA__ADL39280
MKTIIALSYILCLVFAQKLPGNDNSTATLCLGHHAVPNGTIVKTITNDQIEVTNATELVQSSSTGEICDSPHQILDGENCTLIDALLGDPQCDGFQNKKWDLFVERSKAYSNCYPYDVPDYASLRSLVASSGTLEFNNESFNWTGVTQNGTSSACIRRSNNSFFSRLNWLTHLRFKYPALNVTMPNNEQFDKLYIWGVHHPGTDNDQIFLYAQASGRITVSTKRSQQTVIPNIGSRPRVRNIPSRISIYWTIVKPGDILLINSTGNLIAPRGYFKIRSGKSSIMRSDAPIGKCNSECITPNGSIPNDKPFQNVNRITYGACPRYVKQNTLKLATGMRNVPEKQTRGIFGAIAGFIENGWEGMVDGWYGFRHQNSEGRGQAADLKSTQAAIDQINGKLNRLIGKTNEKFHQIEKEFSEVEGRIQDLEKYVEDTKIDLWSYNAELLVALENQHTIDLTDSEMNKLFEKTKKQLRENAEDMGNGCFKIYHKCDNACIGSIRNGTYDHDVYRDEALNNRFQIKGVELKSGYKDWILWISFAISCFLLCVALLGFIMWACQKGNIRCNICI

SEQ ID NO: 5501 - protein, 565 aa, Artificial Sequence
  derived and/or modified protein sequence (wt) from hemagglutinin__InfluenzaA__ADL39291
MKVKLLVLLCTFTATYADTICIGYHANNSTDTVDTVLEKNVTVTHSVNLLENSHNGKLCLLKGIAPLQLGNCSVAGWILGNPECELLISKESWSYIVEKPNPENGTCYPGHFADYEELREQLSSVSSFERFEIFPKESSWPNHTVTGVSASCSHNGESSFYRNLLWLTEKNGLYPNLSKSYANNKEKEVLVLWGVHHPPNMGDQKTLYHTENAYVSVVSSHYSRKFTPEIAKRPKVRDQEGRINYYWTLLEPGDTIIFEANGNLIAPRYAFALSRGFGSGIINSNAPMDKCDAKCQTPQGAINSSLPFQNVHPVTIGECPKYVRSAKLRMVTGLRNIPSIQSRGLFGAIAGFIEGGWTGMVDGWYGYHHQNEQGSGYAADQKSTQNAINGITNKVNSVIEKMNTQFTAVGKEFNKLERRMENLNKKVDDGFIDIWTYNAELLVLLENERTLDFHDSNVKNLYEKVKSQLKNNAKEIGNGCFEFYHKCNDECMESVKNGTYDYPKYSEESKLNREKIDGVKLESMGVYQILAIYSTVASSLVLLVSLGAISFWMCSNGSLQCRICI

SEQ ID NO: 5502 - protein, 566 aa, Artificial Sequence; identical to SEQ ID NO: 2434
  derived and/or modified protein sequence (wt) from hemagglutinin__InfluenzaA__ADL39302

SEQ ID NO: 5503 - protein, 566 aa, Artificial Sequence; identical to SEQ ID NO: 5500
  derived and/or modified protein sequence (wt) from hemagglutinin__InfluenzaA__ADL39313

SEQ ID NO: 5504 - protein, 566 aa, Artificial Sequence
  derived and/or modified protein sequence (wt) from hemagglutinin__InfluenzaA__ADL39335
MKTIIALSYILCLVFAQKLPGNDNSTATLCLGHHAVPNGTIVKTITNDQIEVTNATELVQSSSTGEICDSPHQILDGENCTLIDALLGDPQCDGFQNKKWDLFVERSKAYSNCYPYDVPDYASLRSLVASSGTLEFNNESFNWTGVTQNGTSSACIRRSNNSFFSRLNWLTHLRFKYPALNVTMPNNEQFDKLYIWGVHHPGTDNDQIFLYAQASGRITVSTKRSQQTVIPNIGSRPRVRNIPSRISIYWTIVKPGDILLINSTGNLIAPRGYFKIRSGKSSIMRSDAPIGKCNSECITPNGSIPNDKPFQNVNRITYGACPRYVKQNTLKLATGMRNVPEKQTRGIFGAIAGFIENGWEGMVDGWYGFRHQNSEGRGQAADLKSTQAAIDQINGKLNRLIGKTNEKFHQIEKEFSEVEGRIQDLEKYVEDTKIDLWSYNAELLVALENQHTIHLTDSEMNKLFEKTKKQLRENAEDMGNGCFKIYHKCDNACIGSIRNGTYDHDVYRDEALNNRFQIKGVELKSGYKDWILWISFAISCFLLCVALLGFIMWACQKGNIRCNICI

SEQ ID NO: 5505 - protein, 566 aa, Artificial Sequence; identical to SEQ ID NO: 2434
  derived and/or modified protein sequence (wt) from hemagglutinin__InfluenzaA__ADL39368

SEQ ID NO: 5506 - protein, 565 aa, Artificial Sequence
  derived and/or modified protein sequence (wt) from hemagglutinin__InfluenzaA__ADL39390
MKVKLLVLLCTFTATYADTICIGYHANNSTDTVDTVLEKNVTVTHSVNLLENSHNGKLCLLKGIAPLQLGNCSVAGWILGNPECELLISKESWSYIVEKPNPENGTCYPGHFADYEELREQLSSVSSFERFEIFPKESSWPNHTVTGVSASCSHNGESSFYRNLLWLTGKNGLYPSLSKSYANNKEKEVLVLWGVHHPPNIVDQKTLYRTENAYVSVVSSHYSRKFTPEIAKRPKVRDQEGRINYYWTLLEPGDTIIFEANGNLIAPRYAFALSRGFGSGIINSNAPMGKCDAKCQTPQGAINSSLPFQNVHPVTIGECPKYVRSAKLRMVTGLRNIPSIQSRGLFGAIAGFIEGGWTGMVDGWYGYHHQNEQGSGYAADQKSTQNAINGITNKVNSVIEKMNTQFTAVGKEFNKLERRMENLNKKVDDGFIDIWTYNAELLVLLENERTLDFHDSNVKNLYEKVKSQLKNNAKEIGNGCFEFYHKCNDECMESVKNGTYDYPKYSEESKLNREKIDGVKLESMGVYQILAIYSTVASSLVLLVSLGAISFWMCSNGSLQCRICI

SEQ ID NO: 5507 - protein, 566 aa, Artificial Sequence
  derived and/or modified protein sequence (wt) from hemagglutinin__InfluenzaA__ADL39401
MKTIIALSYILCLVFAQKLPGNDNSTATLCLGHHAVPNGTIVKTITNDQIEVTNATELVQSSSTGEICDSPHQILDGENCTLIDALLGDPQCDGFQNKKWDLFVERSKAYSNCYPYDVPDYASLRSLVASSGTLEFNNESFNWTGVTQNGTSSSCMRRSNNSFFSRLNWLTHLKFKYPALNVTMPNNEQFDKLYIWGVHHPGTDNDQIFLYAQASGRITVSTKRSQQTVIPNIGSRPRVRNIPSRISIYWTIVKPGDILLINSTGNLIAPRGYFKIRSGKSSIMRSDAPIGKCNSECITPNGSIPNDKPFQNVNRITYGACPRYVKQNTLKLATGMRNVPEKQTRGIFGAIAGFIENGWEGMVDGWYGFRHQNSEGRGQAADLKSTQAAIDQINGKLNRLIGKTNEKFHQIEKEFSEVEGRIQDLEKYVEDTKIDLWSYNAELLVALENQHTIDLTDSEMNKLFEKTKKQLRENAEDMGNGCFKIYHKCDNACIGSIRNGTYDHDVYRDEALNNRFQIKGVELKSGYKDWILWISFAISCFLLCVALLGFIMWACQKGNIRCNICI

SEQ ID NO: 5508 - protein, 566 aa, Artificial Sequence
  derived and/or modified protein sequence (wt) from hemagglutinin__InfluenzaA__ADL39412
MKTIIALSYILCLVFAQKLPGNDNSTATLCLGHHAVPNGTIVKTITNDQIEVTNATELVQSSSTGEICDSPHQILDGENCTLIDALLGDPQCDGFQNKKWDLFVERSKAYSNCYPYDVPDYASLRSLVASSGTLEFNNESFNWTGVTQNGTSSACIRRSNNSFFSRLNWLTHLKFKYPALNVTMPNNEQFDKLYIWGVHHPGTDNDQIFLYAQASGRITVSTKRSQQTVIPNIGSRPRVRNIPSRISIYWTIVKPGDILLINSTGNLIAPRGYFKIRSEKSSIMRSDAPIGKCNSECITPNGSIPNDKPFQNVNRITYGACPRYVKQNTLKLATGMRNVPEKQTRGIFGAIAGFIENGWEGMVDGWYGFRHQNSEGRGQAADLKSTQAAIDQINGKLNRLIGKTNEKFHQIEKEFSEVEGRIQDLEKYVEDTKIDLWSYNAELLVALENQHTIDLTDSEMNKLFEKTKKQLRENAEDMGNGCFKIYHKCDNACIGSIRNGTYDHDVYRDEALNNRFQIKGVELKSGYKDWILWISFAISCFLLCVALLGFIMWACQKGNIRCNICI

SEQ ID NO: 5509 - protein, 565 aa, Artificial Sequence
  derived and/or modified protein sequence (wt) from hemagglutinin__InfluenzaA__ADL39423
MKVKLLVLLCTFTATYADTICIGYHANNSTDTVDTVLEKNVTVTHSVNLLENSHNGKLCLLKGIAPLQLGNCSVAGWILGNPECELLISKESWSYIVEKPNPENGTCYPGHFADYEELREQLSSVSSFERFEIFPKESSWPSHTVTGVSASCSHNGENSFYRNLLWLTGKNGLYPNLSKSYANNKEKEVLVLWGVHHPPNIADQKTLYHTENAYVSVVSSHYSRKFTPEIAKRPKVRDQEGRINYYWTLLEPGDTIIFEANGNLIAPRYAFALSRGFGSGIINSNAPMDKCDAKCQTPQGAINSSLPFQNVHPVTIGECPKYVRSAKLRMVTGLRNIPSIQSRGLFGAIAGFIEGGWTGMVDGWYGYHHQNEQGSGYAADQKSTQNAINGITNKVNSVIEKMNTQFTAVGKEFNKLERRMENLNKKVDDGFIDIWTYNAELLVLLENERTLDFHDSNVKNLYEKVKNQLKNNAKEIGNGCFEFYHKCNDECMESVKNGTYDYPKYSEESKLNREKIDGVKLESMGVYQILAIYSTVASSLVLLVSLGAISFWMCSNGSLQCRICI

SEQ ID NO: 5510 - protein, 566 aa, Artificial Sequence
  derived and/or modified protein sequence (wt) from hemagglutinin__InfluenzaA__ADL39434
MKTIIALSYILCLVFAQKLPGNDNSTATLCLGHHAVPNGTIVKTITNDQIEVTNATELVQSSSTGEICDSPHQILDGENCTLIDALLGDPQCDGFQNKKWDLFVERSKAYSNCYPYDVPDYASLRSLVASSGTLEFNNESFNWTGVTQNGTSSACIRRSNNSFFSRLNWLTHLRFKYPALNVTMPNNEQFDKLYIWGVHHPGTDNDQIFLYAQASGRITVSTKRSQQTVIPNIGSRPRVRDIPSRISIYWTIVKPGDILLINSTGNLIAPRGYFKIRSGKSSIMRSDAPIGKCNSECITPNGSIPNDKPFQNVNRITYGACPRYVKQNTLKLATGMRNVPEKQTRGIFGAIAGFIENGWEGMVDGWYGFRHQNSEGRGQAADLKSTQAAIDQINGKLNRLIGKTNEKFHQIEKEFSEVEGRIQDLEKYVEDTKIDLWSYNAELLVALENQHTIDLTDSEMNKLFEKTKKQLRENAEDMGNGCFKIYHKCDNACIGSIRNGTYDHDVYRDEALNNRFQIKGVELKSGYKDWILWISFAISCFLLCVALLGFIMWACQKGNIRCNICI

SEQ ID NO: 5511 - protein, 565 aa, Artificial Sequence
  derived and/or modified protein sequence (wt) from hemagglutinin__InfluenzaA__ADL39445
MKVKLLVLLCTFTATYADTICIGYHANNSTDTVDTVLEKNVTVTHSVNLLENSHNGKLCLLKGIAPLQLGNCSVAGWILGNPECELLISKESWSYIVEKPNPENGTCYPGHFADYEELREQLSSVSSFERFEIFPKESSWPNHTVTGVSASCSHNGESSFYRNLLWLTGKNGLYPTLSKSYANNKEKEVLVLWGVHHPPNIVDQKTLYRTENAYVSVVSSHYSRKFTPEIAKRPKVRDQEGRINYYWTLLEPGDTIIFEANGNLIAPRYAFALSRGFGSGIINSNAPMDKCDAKCQTPQGAINSSLPFQNVHPVTIGECPKYVRSAKLRMVTGLRNIPSIQSRGLFGAIAGFIEGGWTGMVDGWYGYHHQNEQGSGYAADQKSTQNAINGITNKVNSVIEKMNTQFTAVGKEFNKLERRMENLNKKVDDGFIDIWTYNAELLVLLENERTLDFHDSNVKNLYEKVKSQLKNNAKEIGNGCFEFYHKCNDECMESVKNGTYDYPKYSEESKLNREKIDGVKLESMGVYQILAIYSTVASSLVLLVSLGAISFWMCSNGSLQCRICI

SEQ ID NO: 5512 - protein, 565 aa, Artificial Sequence
  derived and/or modified protein sequence (wt) from hemagglutinin__InfluenzaA__ADL39456
MKVKLLVLLCTFTATYADTICIGYHANNSTDTVDTVLEKNVTVTHSVNLLENSHNGKLCLLKGIAPLQLGNCSVAGWILGNPECELLISKESWSYIVEKPNPENGTCYPGHFADYEELREQLSSVSSFERFEIFPKESSWPSHTVTGVSASCSHNGENSFYRNLLWLTGKNGLYPNLSKSYANNKEKEVLVLWGVHHPPNIADQKTLYHTENAYVSVVSSHYSRKFTPEIAKRPKVRDQEGRINYYWTLLEPGDTIIFEANGNLIAPRYAFALSRGFGSGIINSNAPMDKCDAKCQTPQGAINSSLPFQNVHPVTIGECPKYVRSAKLRMVTGLRNIPSIQSRGLFGAIAGFIEGGWTGMVDGWYGYHHQNEQGSGYAADQKSTQNAINGITNKVNSVIEKMNTQFTAVGKEFNKLERRMENLNKKVDDGFIDIWTYNAELLVLLENERTLDFHDSNVKNLYEKVKSQLKNNAKEIGNGCFEFYHKCNDECMESVKNGTYDYPKYSEESKLNREKIDGVKLESMGVYQILAIYSTVASSLVLLVSLGAISFWMCSNGSLQCRICI

SEQ ID NO: 5513 - protein, 565 aa, Artificial Sequence
  derived and/or modified protein sequence (wt) from hemagglutinin__InfluenzaA__ADL39467
MKVKLLVLLCTFTATYADTICIGYHANNSTDTVDTVLEKNVTVTHSVNLLENSHNGKLCLLKGIAPLQLGNCSVAGWILGNPECELLISKESWSYIVEKPNPENGTCYPGHFADYEELREQLSSVSSFERFEIFPKESSWPNHTVTGVSASCSHNGESSFYRNLLWLTGKNGLYPNLSKSYANNKEKEVLVLWGVHHPPNIVDQKTLYRTENAYVSVVSSHYSRKFTPEIAKRPKVRDQEGRINYYWTLLEPGDTIIFEANGNLIAPRYAFALSRGFGSGIINSNAPMGKCDAKCQTPQGAINSSLPFQNVHPVTIGECPKYVRSAKLRMVTGLRNIPSIQSRGLFGAIAGFIEGGWTGMVDGWYGYHHQNEQGSGYAADQKSTQNAINGITNKVNSVIEKMNTQFTAVGKEFNKLERRMENLNKKVDDGFIDIWTYNAELLVLLENERTLDFHDSNVKNLYEKVKSQLKNNAKEIGNGCFEFYHKCNDECMESVKNGTYDYPKYSEESKLNREKIDGVKLESMGVYQILAIYSTVASSLVLLVSLGAISFWMCSNGSLQCRICI

SEQ ID NO: 5514 - protein, 566 aa, Artificial Sequence; identical to SEQ ID NO: 2669
  derived and/or modified protein sequence (wt) from hemagglutinin__InfluenzaA__ADL41164

SEQ ID NO: 5515 - protein, 566 aa, Artificial Sequence; identical to SEQ ID NO: 2762
  derived and/or modified protein sequence (wt) from hemagglutinin__InfluenzaA__ADL41173

SEQ ID NO: 5516 - protein, 565 aa, Artificial Sequence
  derived and/or modified protein sequence (wt) from hemagglutinin__InfluenzaA__ADL60242
MKVKLLVLLCTFTATYADTICIGYHANNSTDTVDTVLEKNVTVTHSVNLLENSHNGKLCLLKGIAPLQLGNCSVAGWILGNPECELLISKESWSYIVEKPNPENGTCYPGHFADYEELREQLSSVSSFERFEIFPKESSWPNHTVTGVSASCSHNGERSFYRNLLWLTGKNGLYPNLSKSYANNKEKEVLVLWGVHHPPDIGNQKTLYHTENAYVSVVSSHYSRKFTPEIAKRPKVRDQEGRINYYWTLLEPGDTIIFEANGNLIAPRYAFALSRGFGSGIINSNAPMDKCDAKCQTPQGAINSSLPFQNVHPVTIGECPKYVRSAKLRMVTGLRNIPSIQSRGLFGAIAGFIEGGWTGMVDGWYGYHHQNEQGSGYAADQKSTQNAINGITNKVNSVIEKMNTQFTAVGKEFNKLERRMENLNKKVDDGFIDIWTYNAELLVLLENERTLDFHDSNVKNLYEKVKSQLKNNAKEIGNGCFEFYHKCNDECMESVKNGTYDYPKYSEESKLNREKIDGVKLESMGVYQILAIYSTVASSLVLLVSLGAISFWMCSNGSLQCRICI

SEQ ID NO: 5517 - protein, 565 aa, Artificial Sequence
  derived and/or modified protein sequence (wt) from hemagglutinin__InfluenzaA__ADL60253
MKVKLLVLLCTFTATYADTICIGYHANNSTDTVDTVLEKNVTVTHSVNLLENSHNGKLCLLKGIAPLQLGNCSVAGWILGNPECGLLISKESWSYIVEKPNPENGTCYPGYFADYEELREQLSSVSSFERFEIFPKESSWPNHTVTGVSASCSHNGESSFYRNLLWLTGKNGLYPNLSKSYANNKEKEVLVLWGVHHPPNIGNQKALYHTENAYVSVVSSHYSRKFTPEIAKRPKVRDQEGRINYYWTLLEPGDTIIFEANGNLIAPRYAFALSRGFGSGIINSNAPMDKCDAKCQTPQGAINSSLPFQNVHPVTIGECPKYVRSAKLRMVTGLRNIPSIQSRGLFGAIAGFIEGGWTGMVDGWYGYHHQNEQGSGYAADQKSTQNAINGITNKVNSVIEKMNTQFTAVGKEFNKLERRMENLNKKVDDGFIDIWTYNAELLVLLENERTLDFHDSNVKNLYEKVKSQLKNNAKEIGNGCFEFYHKCNDECMESVKNGTYDYPKYSEESKLNREKIDGVKLESMGVYQILAIYSTVASSLVLLVSLGAISFWMCSNGSLQCRICI

SEQ ID NO: 5518 - protein, 565 aa, Artificial Sequence; identical to SEQ ID NO: 5516
  derived and/or modified protein sequence (wt) from hemagglutinin__InfluenzaA__ADL60264

SEQ ID NO: 5519 - protein, 565 aa, Artificial Sequence; identical to SEQ ID NO: 5516
  derived and/or modified protein sequence (wt) from hemagglutinin__InfluenzaA__ADL60275

SEQ ID NO: 5520 - protein, 565 aa, Artificial Sequence
  derived and/or modified protein sequence (wt) from hemagglutinin__InfluenzaA__ADL60286
MKVKLLVLLCTFTATYADTICIGYHANNSTDTVDTVLEKNVTVTHSVNLLENSHNGKLCLLKGIAPLQLGNCSVAGWILGNPECELLISKESWSYIVEKPNPENGTCYPGHFADYEELREQLSSVSSFERFEIFPKESSWPNHTVTGVSASCSHNGESSFYRNLLWLTGKNGLYPNLSKSYANNKEKEVLVLWGVHHPPSISNQKTLYHTENAYVSVVSSHYSRKFTPEVAKRPKVRDQEGRINYYWTLLEPGDTIIFEANGNLIAPRYAFALSRGFGSGIINSNAPMDKCDAKCQTPQGAINSSLPFQNVHPVTIGECPKYVRSAKLRMVTGLRNIPSIQSRGLFGAIAGFIEGGWTGMVDGWYGYHHQNEQGSGYAADQKSTQNAINGITNKVNSVIEKMNTQFTAVGKEFNKLERRMENLNKKVDDGFIDIWTYNAELLVLLENERTLDFHDSNVKNLYEKVKSQLKNNAKEIGNGCFEFYHKCNDECMESVKNGTYDYPKYSEESKLNREKIDGVKLESMGVYQILAIYSTVASSLVLLVSLGAISFWMCSNGSLQCRICI

SEQ ID NO: 5521 - protein, 565 aa, Artificial Sequence
  derived and/or modified protein sequence (wt) from hemagglutinin__InfluenzaA__ADL60297
MKVKLLVLLCTFTATYADTICIGYHANNSTDTVDTVLEKNVTVTHSVNLLENSHNGKLCLLKGIAPLQLGNCSVAGWILGNPECELLISKESWSYIVEKPNPENGTCYPGHFADYEELREQLSSVSSFERFEIFPKESSWPNHTVTGVSASCSHNGESSFYRNLLWLTRKNGLYPNLSKSYANNKEKEVLVLWGVHHPPNIGDQKTLYHTENAYVSVVSSHYSRKFTPEIAKRPKVRDQEGRINYYWTLLEPGDTIIFEANGNLIAPRYAFALSRGFGSGIINSNAPMDKCDAKCQTPQGAINSSLPFQNVHPVTIGECPKYVRSAKLRMVTGLRNIPSIQSRGLFGAIAGFIEGGWTGMVDGWYGYHHQNEQGSGYAADQKSTQNAINGITNKVNSVIEKMNTQFTAVGKEFNKLERRMENLNKKVDDGFIDIWTYNAELLVLLENERTLDSHDSNVKNLYEKVKSQLKNNAKEIGNGCFEFYHKCNDECMESVKNGTYDYPKYSEESKLNREKIDGVKLESMGVYQILAIYSTVASSLVLLVSLGAISFWMCSNGSLQCRICI

SEQ ID NO: 5522 - protein, 565 aa, Artificial Sequence
  derived and/or modified protein sequence (wt) from hemagglutinin__InfluenzaA__ADL60308
MKVKLLVLLCTFAATYADTICIGYHANNSTDTVDTVLEKNVTVTHSVNLLENSHNGKLCLLKGIAPLQLGNCSVAGWILGNPECELLISKESWSYIVEKPNPENGTCYPGHFADYEELREQLSSVSSFERFEIFPKESSWPNHTVTGVSASCSHNGESSFYRNLLWLTGKNGLYPNLSKSYANNKEKEVLVLWGVHHPPNIGVQKALYHTENAYVSVVSSHYSRKFTPEIAKRPKVRDQEGRINYYWTLLEPGDTIIFEANGNLIAPRYAFALSRGFGSGIINSNAPMDKCDAKCQTPQGAINSSLPFQNVHPVTIGECPKYVRSAKLRMVTGLRNIPSIQSRGLFGAIAGFIEGGWTGMVDGWYGYHHQNEQGSGYAADQKSTQNAINGITNKVNSVIEKMNTQFTAVGKEFNKLERRMENLNKKVDDGFIDIWTYNAELLVLLENERTLDFHDSNVKNLYEKVKSQLKNNAKEIGNGCFEFYHKCNDECMESVKNGTYDYPKYSEESKLNREKIDGVKLESMGVYQILAIYSTVASSLVLLVSLGAISFWMCSNGSLQCRICI

SEQ ID NO: 5523 - protein, 565 aa, Artificial Sequence
  derived and/or modified protein sequence (wt) from hemagglutinin__InfluenzaA__ADL60341
MKVKLLVLLCTFTATYADTICIGYHANNSTDTVDTVLEKNVTVTHSVNLLENSHNGKLCLLKGIAPLQLGNCSVAGWILGNPECELLISKESWSYIVEKPNPENGTCYPGHFADYEELREQLSSVSSFERFEIFPKESSWPNHTVTGVSASCSHNGESSFYRNLLWLTGKNGLYPNLSKSYANNKEKEVLVLWGVHHPPNIGVQKALYHTEIAYVSVVSSHYSRKFTPEIAKRPKVRDQEGRINYYWTILEPGDTIIFEANGNLIAPRYAFALSRGFGSGIINSNAPMDKCDAKCQTPQGAINSSLPFQNVHPVTIGECPKYVRSAKLRMVTGLRNIPSIQSRGLFGAIAGFIEGGWTGMVDGWYGYHHQNEQGSGYAADQKSTQNAINGITNKVNSVIEKMNTQFTAVGKEFNKLERRMENLNKKVDDGFIDIWTYNAELLVLLENERTLDFHDSNVKNLYEKVKSQLKNNAKEIGNGCFEFYHKCNDECMESVKNGTYDYPKYSEESKLNREKIDGVKLESMGVYQILAIYSTVASSLVLLVSLGAISFWMCSNGSLQCRICI

SEQ ID NO: 5524 - protein, 565 aa, Artificial Sequence
  derived and/or modified protein sequence (wt) from hemagglutinin__InfluenzaA__ADL60352
MKVKLLVLLCTFTATYADTICIGYHANNSTDTVDTVLEKNVTVTHSVNLLENSHNGKLCLLKGIAPLQLGNCSVAGWILGNPECELLISKESWSYIVEKPNPENGTCYPGHFAGYEELREQLSSVSSFERFEIFPKESSWPNHTVTGVSASCSHNGERSFYRNLLWLTGKNGLYPNLSKSYANNKEKEVLVLWGVHHPPDIGNQKTLYHTENAYVSVVSSHYSRKFTPEIAKRPKVRDQEGRINYYWTLLEPGDTIIFEANGNLIAPRYAFALSRGFGSGIINSNAPMDKCDAKCQTPQGAINSSLPFQNVHPVTIGECPKYVRSAKLRMVTGLRNIPSIQSRGLFGAIAGFIEGGWTGMVDGWYGYHHQNEQGSGYAADQKSTQNAINGITNKVNSVIEKMNTQFTAVGKEFNKLERRMENLNKKVDDGFIDIWTYNAELLVLLENERTLDFHDSNVKNLYEKVKSQLKNNAKEIGNGCFEFYHKCNDECMESVKNGTYDYPKYSEESKLNREKIDGVKLESMGVYQILAIYSTVASSLVLLVSLGAISFWMCSNGSLQCRICI

SEQ ID NO: 5525 - protein, 566 aa, Artificial Sequence
  derived and/or modified protein sequence (wt) from hemagglutinin__InfluenzaA__ADL60363
MKTIIALSYILCLVFAQKFPGNDNSTATLCLGHHAVPNGTIVKTITNDQIEVTNATELVQSSSTGEICDSPHQILDGENCTLIDALLGDPQCDGFQNKNWDLFVERSKAYSNCYPYDVPDYASLRSLIASSGTLEFNNESFNWTGVTQNGTSSACIRRSNNSFFSRLNWLTHSKFKYPALNVTMPNNENFDKLYIWGVHHPGTDNDQIFLYAQASGRITISTKRSQQTVIPNIGSRPRVRDIPSRISIYWTIVKPGDILLINSTGNLIAPRGYFKIRSGKSSIMRSDAPIGKCNSECITPNGSIPNDKPFQNVNRITYGACPRYVKQNTLKLATGMRNVPEKQTRGIFGAIAGFIENGWEGMVDGWYGFRHQNSEGVGQAADLKSTQAAIDQINGKLNRLIGKTNEKFHQIEKEFSEVEGRIQDLEKYVEDTKIDLWSYNAELLVALENQHTIDLTDSEMNKLFEKTKKQLRENAEDMGNGCFKIYHKCDNACIGSIRNGTYDHDVYRDEALNNRFQIKGVELKSGYKDWILWISFAISCFLLCIALLGFIMWACQKGNIRCNICI

SEQ ID NO: 5526 - protein, 565 aa, Artificial Sequence
  derived and/or modified protein sequence (wt) from hemagglutinin__InfluenzaA__ADL60374
MKVKLLVLLCTFTATYADTICIGYHANNSTDTVDTVLEKNVTVTHSVNLLENSHNGKLCLLKGIAPLQLGNCSVAGWILGNPECELLISKESWSYIVEKPNPENGTCYPGHFADYEELREQLSSVSSFERFEIFPKESSWPNHTVTGVSASCSHDGESSFYRNLLWLTGKNGLYPNLSKSYANNKEKEVLVLWGVHHPPNIGDQKALYHTENAYVSVVSSHYSRKFTPEIAKRPKVRDQEGRINYYWTLLEPGDTIIFEANGNLIAPRYAFALSRGFGSGIINSNAPMDKCDAKCQTPQGAINSSLPFQNVHPVTIGECPKYVRSAKLRVVTGLRNIPSIQSRGLFGAIAGFIEGGWTGMVDGWYGYHHQNEQGSGYAADQKSTQNAINGITNKVNSVIEKMNTQFTAVGKEFNKLERRMENLNKKVDDGFIDIWTYNAELLVLLENERTLDFHDSNVKNLYEKVKSQLKNNAKEIGNGCFEFYHKCNDECMESVKNGTYDYPKYSEESKLNREKIDGVKLESMGVYQILAIYSTVASSLVLLVSLGAISFWMCSNGSLQCRICI

SEQ ID NO: 5527 - protein, 566 aa, Artificial Sequence
  derived and/or modified protein sequence (wt) from hemagglutinin__InfluenzaA__ADM07135
MKAILVVLLYTFATANADTLCIGYHANNSTDTVDTVLEKNVTVTHSVNLLEDKHNGKLCKLRGVAPLHLGKCNIAGWILGNPECESLSTASSWSYIVETSSSDNGTCYPGDFIDYEELREQLSSVSSFERFEIFPKTSSWPNHESNKGVTAACPHAGAKSFYKNLIWLVKKGNSYPKLSKSYINDKGKEVLVLWGIHHPSTSADQQSLYQNADAYVFVGTSRYSKKFKPEIAIRPKVRDQEGRMNYYWTLVEPGDKITFEATGNLVVPRYAFAMERNAGSGIIISDTPVHDCNTTCQTPKGAINTSLPFQNIHPITIGKCPKYVKSTKLRLATGLRNVPSIQSRGLFGAIAGFIEGGWTGMVDGWYGYHHQNEQGSGYAADLKSTQNAIDEITNKVNSVIEKMNTQFTAVGKEFNHLEKRIENLNKKVDDGFLDIWTYNAELLVLLENERTLDYHDSNVKNLYEKVRSQLKNNAKEIGNGCFEFYHKCDNTCMESVKNGTYDYPKYSEEAKLNREEIDGVKLESTRIYQILAIYSTVASSLVLVVSLGAISFWMCSNGSLQCRICI

SEQ ID NO: 5528 - protein, 566 aa, Artificial Sequence; identical to SEQ ID NO: 3154
  derived and/or modified protein sequence (wt) from hemagglutinin__InfluenzaA__ADM07144

SEQ ID NO: 5529 - protein, 566 aa, Artificial Sequence
  derived and/or modified protein sequence (wt) from hemagglutinin__InfluenzaA__ADM07154
MKAILVVLLYTFATANADTLCIGYHANNSTDTVDTVLEKNVTVTHSVNLLEDKHNGKLCKLRGVAPLHLGKCNIAGWILGNPECESLSTASSWSYIVETSSSDNGTCYPGDFIDYEELREQLSSVSSFERFEIFPKTSSWPNHDSNKGVTAACPHAGAKSFYKNLIWLVKKGNSYPKLSKSYINDKGKEVLVLWGIHHPPTSADQQSLYQNADAYVFVGTSRYSKKFKPEIAIRPKVRDQEGRMNYYWTLVEPGDKITFEATGNLVVPRYAFAMVRNAGSGIIISDTPVHDCNTTCQTPKGAINTSLPFQNIHPITIGKCPKYVKSTKLRLATGLRNVPSIQSRGLFGAIAGFIEGGWTGMVDGWYGYHHQNEQGSGYAADLKSTQNAIDEITNKVNSVIEKMNTQFTAVGKEFNHLEKRIENLNKKVDDGFLDIWTYNAELLVLLENERTLDYHDSNVKNLYEKVRSQLKNNAKEIGNGCFEFYHKCDNTCMESVKNGTYDYPKYSEEAKLNREEIDGVKLESTRIYQILAIYSTVASSLVLVVSLGAISFWMCSNGSLQCRICI

SEQ ID NO: 5530 - protein, 566 aa, Artificial Sequence; identical to SEQ ID NO: 3154
  derived and/or modified protein sequence (wt) from hemagglutinin__InfluenzaA__ADM07163

SEQ ID NO: 5531 - protein, 565 aa, Artificial Sequence; identical to SEQ ID NO: 5513
  derived and/or modified protein sequence (wt) from hemagglutinin__InfluenzaA__ADM07460

SEQ ID NO: 5532 - protein, 566 aa, Artificial Sequence
  derived and/or modified protein sequence (wt) from hemagglutinin__InfluenzaA__ADM07504
MKTIIALSYILCLVFAQKLPGNDNSTATLCLGHHAVPNGTIVKTITNDQIEVTNATELVQSSSTGEICDSPHQILDGENCTLIDALLGDPQCDGFQNKKWDLFVERSKAYSNCYPYDVPDYASLRSLVASSGTLEFNNESFNWTGVTQNGTSSACIRRSNNSFFSRLNWLTHLNFKYPALNVTMPNNEQFDKLYIWGVHHPGTDKDQIFLYAQASGRITVSTKRSQQAVIPNIGSRPRVRNIPSRISIYWTIVKPGDILLINSTGNLIAPRGYFKIRNGKSSIMRSDAPIGKCNSECITPNGSIPNDKPFQNVNRITYGACPRYVKQNTLKLATGMRNVPEKQTRGIFGAIAGFIENGWEGMVDGWYGFRHQNSEGRGQAADLKSTQAAIDQINGKLNRLIGKTNEKFHQIEKEFSEVEGRIQDLEKYVEDTKIDLWSYNAELLVALENQHTIDLTDSEMNKLFEKTKKQLRENAEDMGNGCFKIYHKCDNACIGSIRNGTYDHDVYRDEALNNRFQIKGVELKSGYKDWILWISFAISCFLLCVALLGFIMWACQKGNIRCNICI

SEQ ID NO: 5533 - protein, 566 aa, Artificial Sequence
  derived and/or modified protein sequence (wt) from hemagglutinin__InfluenzaA__ADM12806
MKTIIALSYILCLVFAQKLPGNDNSTATLCLGHHAVPNGTIVKTITNDQIEVTNATELVQSSSTGEICDSPHQILDGENCTLIDALLGDPQCDGFQNKKWDLFVERSKAYSNCYPYDVPDYASLRSLVASSGTLEFNNESFNWTGVTQNGTSSACIRRSNNSFFSRLNWLTHLNFKYPALNVTMPNNEQFDKLYIWGVHHPGTDKDQIFLYAQASGRITVSTKRSQQAVIPNIGSRPRVRNIPSRISIYWTIVKPGDILLINSTGNLIAPRGYFKIRSGKSSIMRSDAPIGKCNSECITPNGSIPNDKPFQNVNRITYGACPRYVKQSTLKLATGMRNVPEKQTRGIFGAIAGFIENGWEGMVDGWYGFRHQNSEGRGQAADLKSTQAAIDQINGKLNRLIGKTNEKFHQIEKEFSEVEGRIQDLEKYVEDTKIDLWSYNAELLVALENQHTIDLTDSEMNKLFEKTKKQLRENAEDMGNGCFTIYHKCDNACIGSIRNGTYDHNVYRDEALNNRFQIKGVELKSGYKDWILWISFAISCFLLCVALLGFIMWACQKGNIRCNICI

SEQ ID NO: 5534 - protein, 566 aa, Artificial Sequence; identical to SEQ ID NO: 5533
  derived and/or modified protein sequence (wt) from hemagglutinin__InfluenzaA__ADM12817

SEQ ID NO: 5535 - protein, 566 aa, Artificial Sequence; identical to SEQ ID NO: 5533
  derived and/or modified protein sequence (wt) from hemagglutinin__InfluenzaA__ADM12828

SEQ ID NO: 5536 - protein, 566 aa, Artificial Sequence; identical to SEQ ID NO: 5533
  derived and/or modified protein sequence (wt) from hemagglutinin__InfluenzaA__ADM12839

SEQ ID NO: 5537 - protein, 566 aa, Artificial Sequence
  derived and/or modified protein sequence (wt) from hemagglutinin__InfluenzaA__ADM12850
MKAIIALSYILCLVFAQKLPGNDNSTATLCLGHHAVPNGTIVKTITNDQIEVTNATELVQSSSTGEICDSPHQILDGENCTLIDALLGDPQCDGFQNKKWDLFVERSKAYSNCYPYDVPDYASLRSLVASSGTLEFNNESFNWTGVTQNGTSSACIRRSNNSFFSRLNWLTHLNFKYPALNVTMPNNEQFDKLYIWGVHHPGTDKDQIFLYAQASGRITVSTKRSQQAVIPNIGSRPRVRNIPSRISIYWTIVKPGDILLINSTGNLIAPRGYFKIRSGKSSIMRSDAPIGKCNSECITPNGSIPNDKPFQNVNRITYGACPRYVKQSTLKLATGMRNVPEKQTRGIFGAIAGFIENGWEGMVDGWYGFRHQNSEGRGQAADLKSTQAAIDQINGKLNRLIGKTNEKFHQIEKEFSEVEGRIQDLEKYVEDTKIDLWSYNAELLVALENQHTIDLTDSEMNKLFEKTKKQLRENAEDMGNGCFTIYHKCDNACIGSIRNGTYDHNVYRDEALNNRFQIKGVELKSGYKDWILWISFAISCFLLCVALLGFIMWACQKGNIRCNICI

SEQ ID NO: 5538 - protein, 566 aa, Artificial Sequence; identical to SEQ ID NO: 2669
  derived and/or modified protein sequence (wt) from hemagglutinin__InfluenzaA__ADM12861

SEQ ID NO: 5539 - protein, 566 aa, Artificial Sequence; identical to SEQ ID NO: 2669
  derived and/or modified protein sequence (wt) from hemagglutinin__InfluenzaA__ADM12871

SEQ ID NO: 5540 - protein, 566 aa, Artificial Sequence; identical to SEQ ID NO: 2669
  derived and/or modified protein sequence (wt) from hemagglutinin__InfluenzaA__ADM12881

SEQ ID NO: 5541 - protein, 566 aa, Artificial Sequence; identical to SEQ ID NO: 2669
  derived and/or modified protein sequence (wt) from hemagglutinin__InfluenzaA__ADM12891

SEQ ID NO: 5542 - protein, 566 aa, Artificial Sequence; identical to SEQ ID NO: 2669
  derived and/or modified protein sequence (wt) from hemagglutinin__InfluenzaA__ADM12901

SEQ ID NO: 5543 - protein, 566 aa, Artificial Sequence; identical to SEQ ID NO: 3771
  derived and/or modified protein sequence (wt) from hemagglutinin__InfluenzaA__ADM12911

SEQ ID NO: 5544 - protein, 566 aa, Artificial Sequence; identical to SEQ ID NO: 2669
  derived and/or modified protein sequence (wt) from hemagglutinin__InfluenzaA__ADM12921

SEQ ID NO: 5545 - protein, 566 aa, Artificial Sequence; identical to SEQ ID NO: 2669
  derived and/or modified protein sequence (wt) from hemagglutinin__InfluenzaA__ADM12931

SEQ ID NO: 5546 - protein, 566 aa, Artificial Sequence; identical to SEQ ID NO: 2669
  derived and/or modified protein sequence (wt) from hemagglutinin__InfluenzaA__ADM12941

SEQ ID NO: 5547 - protein, 566 aa, Artificial Sequence; identical to SEQ ID NO: 2669
  derived and/or modified protein sequence (wt) from hemagglutinin__InfluenzaA__ADM12951

SEQ ID NO: 5548 - protein, 566 aa, Artificial Sequence
  derived and/or modified protein sequence (wt) from hemagglutinin__InfluenzaA__ADM12961
MKAVLVVLLYTFATANADTLCIGYHANNSTDTVDTVLEKNVTVTHSVNILEDKHNGKLCKLGGVAPLHLGKCNIAGWILGNPECESLSTASSWSYIVETSSSDNGTCYPGDFIDYEELREQLSSVSSFERFEIFPKTSSWPNHDSNKGVTAACPHAGAKSFYKNLIWLVKKGNSYPKLSKSYINDKGKEVLVLWGIHHPSTSADQQSLYQNADAYVFVGTSRYSKKFKPEIAIRPKVRDQEGRMNYYWTLVEPGDKITFEATGNLVVPRYAFAMERNAGSGIIISDTPVHDCNTTCQTPKGAINTSLPFQNIHPITIGKCPKYVKSTKLRLATGLRNVPSIQSRGLFGAIAGFIEGGWTGMVDGWYGYHHQNEQGSGYAADLKSTQNAIDEITNKVNSVIEKMNTQFTAVGKEFNHLEKRIENLNKKVDDGFLDIWTYNAELLVLLENERTLDYHDSNVKNLYEKVRSQLKNNAKEIGNGCFEFYHKCDNTCMESVKNGTYDYPKYSEEAKLNREEIDGVKLESTRIYQILAIYSTVASSLVLVVSLGAISFWMCSNGSLQCRICI

SEQ ID NO: 5549 - protein, 566 aa, Artificial Sequence; identical to SEQ ID NO: 4318
  derived and/or modified protein sequence (wt) from hemagglutinin__InfluenzaA__ADM12971

SEQ ID NO: 5550 - protein, 566 aa, Artificial Sequence; identical to SEQ ID NO: 3770
  derived and/or modified protein sequence (wt) from hemagglutinin__InfluenzaA__ADM12981

SEQ ID NO: 5551 - protein, 566 aa, Artificial Sequence
  derived and/or modified protein sequence (wt) from hemagglutinin__InfluenzaA__ADM12991
MKAILVVLLYTFETANADTLCIGYHANNSTDTVDTVLEKNVTVTHSVNLLEDKHNGKLCKLRGVAPLHLGKCNIAGWILGNPECESLSTASSWSYIVETSSSDNGTCYPGDFIDYEELREQLSSVSSFERFEIFPKTSSWPNHDSNKGVTAACPHAGAKSFYKNLIWLVKKGNSYPKLSKSYINDKGKEVLVLWGIHHPSTSADQQSLYQNADAYVFVGTSRYSKKFKPEIAIRPKVRDQEGRMNYYWTLVEPGDKITFEATGNLVVPRYAFAMERNAGSGIIISDTPVHDCNTTCQTPKGAINTSLPFQNIHPITIGKCPKYVKSTKLRLATGLRNVPSIQSRGLFGAIAGFIEGGWTGMVDGWYGYHHQNEQGSGYAADLKSTQHAIDEITNKVNSVIEKMNTQFTAVGKEFNHLEKRIENLNKKVDDGFLDIWTYNAELLVLLENERTLDYHDSNVKNLYEKVRSQLKNNAKEIGNGCFEFYHKCDNTCMESVKNGTYDYPKYSEEAKLNREEIDGVKLESTRIYQILAIYSTVASSLVLVVSLGAISFWMCSNGSLQCRICI

SEQ ID NO: 5552 - protein, 566 aa, Artificial Sequence
  derived and/or modified protein sequence (wt) from hemagglutinin__InfluenzaA__ADM13001
MKAILVVLLYTFATANADTLCIGYHANNSTDTVDTVLEKNVTVTHSVNLLEDKHNGKLCKLRGVAPLHLGKCNIAGWILGNPECESLSTASSWSYIVETSSSDNGTCYPGDFIDYEELREQLSSVSSFERFEIFPKTSSWPNHDSNKGVTAACPHAGAKSFYKNLIWLVKKGNSYPKLSKSYINDKGKEVLVLWGIHHPSTSADQQSLYQNADAYVFVGTSRYSKKFKPEIAIRPKVRDQEGRMNYYWTLVEPGDKITFEATGNLVVPRYAFAMERNAGSGIIISDTPVHDCNTTCQTPKGAINTSLPFQNIHPITIGKCPKYVKSTKLRLATGLRNIPSIQSRGLFGAIAGFIEGGWTGMVDGWYGYHHQNEQGSGYAADLKSTQHAIDEITNKVNSVIEKMNTQFTAVGKEFNHLEKRIENLNKKVDDGFLDIWTYNAELLVLLENERTLDYHDSNVKNLYEKVRSQLKNNAKEIGNGCFEFYHKCDNTCMESVKNGTYDYPKYSEEAKLNREEIDGVKLESTRIYQILAIYSTVASSLVLVVSLGAISFWMCSNGSLQCRICI

SEQ ID NO: 5553 - protein, 566 aa, Artificial Sequence; identical to SEQ ID NO: 3833
  derived and/or modified protein sequence (wt) from hemagglutinin__InfluenzaA__ADM13011

SEQ ID NO: 5554 - protein, 566 aa, Artificial Sequence
  derived and/or modified protein sequence (wt) from hemagglutinin__InfluenzaA__ADM13021
MKAILVVLLYTFATANADTLCIGYHANNSTDTIDTVLEKNVTVTHSVNLLEDKHNGKLCKLRGVAPLHLGKCNIAGWILGNPECESLSTASSWSYIVETSSSDNGTCYPGDFIDYEELREQLSSVSSFERFEIFPKTSSWPNHDSNKGVTAACPHAGAKSFYKNLIWLVKKGNSYPKLSKSYINDKGKEVLVLWGIHHPSTSADQQSLYQNADAYVFVGTSRYSKKFKPEIAIRPKVRDQEGRMNYYWTLVEPGDKITFEATGNLVVPRYAFAMERNAGSGIIISDTPVHDCNTTCQTPKGAINTSLPFQNIHPITIGKCPKYVKSTKLRLATGLRNVPSIQSRGLFGAIAGFIEGGWTGMVDGWYGYHHQNEQGSGYAADLKSTQNAIDKITNKVNSVIEKMNTQFTAVGKEFNHLEKRIENLNKKVDDGFLDIWTYNAELLVLLENERTLDYHDSNVKNLYEKVRSQLKNNAKEIGNGCFEFYHKCDNTCMESVKNGTYDYPKYSEEAKLNREEIDGVKLESTRIYQILAIYSTVASSLVLVVSLGAISFWMCSNGSLQCRICI

SEQ ID NO: 5555 - protein, 566 aa, Artificial Sequence; identical to SEQ ID NO: 4015
  derived and/or modified protein sequence (wt) from hemagglutinin__InfluenzaA__ADM13031

SEQ ID NO: 5556 - protein, 566 aa, Artificial Sequence
  derived and/or modified protein sequence (wt) from hemagglutinin__InfluenzaA__ADM13041
MKAILVVLLYTFATANADTLCIGYHANNSTDTVDTVLEKNVTVTHSVNLLEDKHNGKLCKLRGVAPLHLGKCNIAGWILGNPECESLSTASSWSYIVETSSSDNGTCYPGDFIDYEELREQLSSVSSFERFEIFPKTSSWPNHDSNKGVTAACPHAGAKSFYKNLIWLVKKGNSYPKLSKSYINDKGKEVLVLWGIHHPSTSADQQSLYQNADAYVFVGTSRYSKKFKPEIAIRPKVREQEGRMNYYWTLVEPGDKITFEATGNLVVPRYAFAMERNAGSGIIISDTPVHDCNTTCQTPKGAINTSLPFQNVHPITIGKCPKYVKSTKLRLATGLRNVPSIQSRGLFGAIAGFIEGGWTGMVDGWYGYHHQNEQGSGYAADLKSTQNAIDEITNKVNSVIEKMNTQFTAVGKEFNHLEKRIENLNKKVDDGFLDIWTYNAELLVLLENERTLDYHDSNVKNLYEKVRSQLKNNAKEIGNGCFEFYHKCDNTCMESVKNGTYDYPKYSEEAKLNREEIDGVKLESTRIYQILAIYSTVASSLVLVVSLGAISFWMCSNGSLQCRICI

SEQ ID NO: 5557 - protein, 566 aa, Artificial Sequence
  derived and/or modified protein sequence (wt) from hemagglutinin__InfluenzaA__ADM13051
MKAILVVLLYTFATTNADTLCIGYHANNSTDTVDTVLEKNVTVTHSVNLLEDKHNGKLCKLRGVAPLHLGKCNIAGWILGNPECESLSTASSWSYIVETSSSDNGTCYPGDFIDYEELREQLSSVSSFERFEIFPKTSSWPNHDSNKGVTAACPHAGAKSFYKNLIWLVKKGNSYPKLSKSYINDKGKEVLVLWGIHHPSTSADQQSLYQNADAYVFVGTSRYSKKFKPEIAIRPKVRDQEGRMNYYWTLVEPGDKITFEATGNLVVPRYAFAMERNAGSGIIISDTPVHDCNTTCQTPKGAINTSLPFQNIHPITIGKCPKYVKSTKLRLATGLRNVPSIQSRGLFGAIAGFIEGGWTGMVDGWYGYHHQNEQGSGYAADLKSTQNAIDKITNKVNSVIEKMNTQFTAVGKEFNHLEKRIENLNKKVDDGFLDIWTYNAELLVLLENERTLDYHDSNVKNLYEKVRSQLKNNAKEIGNGCFEFYHKCDNTCMESVKNGTYDYPKYSEEAKLNREEIDGVKLESTRIYQILAIYSTVASSLVLVVSLGAISFWMCSNGSLQCRICI

SEQ ID NO: 5558 - protein, 566 aa, Artificial Sequence
  derived and/or modified protein sequence (wt) from hemagglutinin__InfluenzaA__ADM13061
MKAILVVLLYTFATANADTLCIGYHANNSTDTVDTVLEKNVTVTHSVNLLEDKHNGKLCKLRGIAPLHLGKCNIAGWILGNPECESLSTASSWSYIVETSSSDNGTCYPGDFIDYEELREQLSSVSSFERFEIFPKTSSWPNHDSNKGVTAACPHAGAKSFYKNLIWLVKKGNSYPKLSKSYINDKGKEVLVLWGIHHPSTSADQQSLYQNADAYVFVGTSRYSKKFKPEIAIRPKVRDQEGRMNYYWTLVEPGDKITFEATGNLVVPRYAFAMERNAGSGIIISDTPVHDCNTSCQTPKGAINTSLPFQNIHPITIGKCPKYVKSTKLRLATGLRNVPSIQSRGLFGAIAGFIEGGWTGMVDGWYGYHHQNEQGSGYAADLKSTQNAIDEITNKVNSVIEKMNTQFTAVGKEFNHLEKRIENLNKKVDDGFLDIWTYNAELLVLLENERTLDYHDSNVKNLYEKVRSQLKNNAKEIGNGCFEFYHKCDNTCMESVKNGTYDYPKYSEEAKLNREEIDGVKLESTRIYQILAIYSTVASSLVLVVSLGAISFWMCSNGSLQCRICI

SEQ ID NO: 5559 - protein, 566 aa, Artificial Sequence; identical to SEQ ID NO: 4836
  derived and/or modified protein sequence (wt) from hemagglutinin__InfluenzaA__ADM13071

SEQ ID NO: 5560 - protein, 566 aa, Artificial Sequence
  derived and/or modified protein sequence (wt) from hemagglutinin__InfluenzaA__ADM13081
MKAILVVLLYTFATANADTLCIGYHANNSTDTVDTVLEKNVTVTHSVNLLEDKHNGKLCKLRGIAPLHLGKCNIAGWILGNPECESLSTASSWSYIVETSGSDNGTCYPGDFIDYEELREQLSSVSSFERFEIFPKTSSWPNHDSNKGVTAACPHAGAKSFYKNLIWLVKKGNSYPKLSKSYINDKEKEVLVLWGIHHPSTSADQQSLYQNADAYVFVGTSRYSKKFKPEIAIRPKVRDQEGRMNYYWTLVEPGDKITFEATGNLVVPRYAFAMERNAGSGIIISDTPVHDCNTTCQTPKGAINTSLPFQNIHPITIGKCPKYVKSTKLRLATGLRNVPSIQSRGLFGAIAGFIEGGWTGMVDGWYGYHHQNEQGSGYAADLKSTQNAIDEITNKVNSVIEKMNTQFTAVGKEFNHLEKRIENLNKKVDDGFLDIWTYNAELLVLLENERTLDYHDSNVKNLYEKVRSQLKNNAKEIGNGCFEFYHKCDNTCMESVKNGTYDYPKYSEEAKLNREEIDGVKLESTRIYQILAIYSTVASSLVLVVSLGAISFWMCSNGSLQCRICI

SEQ ID NO: 5561 - protein, 566 aa, Artificial Sequence; identical to SEQ ID NO: 4089
  derived and/or modified protein sequence (wt) from hemagglutinin__InfluenzaA__ADM13091

SEQ ID NO: 5562 - protein, 566 aa, Artificial Sequence; identical to SEQ ID NO: 3833
  derived and/or modified protein sequence (wt) from hemagglutinin__InfluenzaA__ADM13101

SEQ ID NO: 5563 - protein, 566 aa, Artificial Sequence
  derived and/or modified protein sequence (wt) from hemagglutinin__InfluenzaA__ADM13111
MKAILVVLLYTFETANADTLCIGYHANNSTDTVDTVLEKNVTVTHSVNLLEDKHNGKLCKLRGVAPLHLGKCNIAGWILGNPECESLSTASSWSYIVETSSSDNGTCYPGDFINYEELREQLSSVSSFERFEIFPKTSSWPNHDSNKGVTAACPHAGAKSFYKNLIWLVKKGNSYPKLSKSYINDKGKEVLVLWGIHHPSTSADQQSLYQNADAYVFVGTSRYSKKFKPEIAIRPKVRDQEGRMNYYWTLVDPGDKITFEATGNLVVPRYAFAMERNAGSGIIISDTPVHDCNTTCQTPNGAINTSLPFQNIHPITIGKCPKYVKSTKLRLATGLRNVPSIQSRGLFGAIAGFIEGGWTGMVDGWYGYHHQNEQGSGYAADLKSTQNAIDKITNKVNSVIEKMNTQFTAVGKEFNHLEKRIENLNKKVDDGFLDIWTYNAELLVLLENERTLDYHDSNVKNLYEKVRSQLKNNAKEIGNGCFEFYHKCDNTCMESVKNGTYDYPKYSEEAKLNREEIDGVKLESTRIYQILAIYSTVASSLVLVVSLGAISFWMCSNGSLQCRICI

SEQ ID NO: 5564 - protein, 566 aa, Artificial Sequence; identical to SEQ ID NO: 2669
  derived and/or modified protein sequence (wt) from hemagglutinin__InfluenzaA__ADM13121

SEQ ID NO: 5565 - protein, 566 aa, Artificial Sequence; identical to SEQ ID NO: 3833
  derived and/or modified protein sequence (wt) from hemagglutinin__InfluenzaA__ADM13131

SEQ ID NO: 5566 - protein, 566 aa, Artificial Sequence; identical to SEQ ID NO: 3997
  derived and/or modified protein sequence (wt) from hemagglutinin__InfluenzaA__ADM13141

SEQ ID NO: 5567 - protein, 566 aa, Artificial Sequence; identical to SEQ ID NO: 3997
  derived and/or modified protein sequence (wt) from hemagglutinin__InfluenzaA__ADM13151

SEQ ID NO: 5568 - protein, 566 aa, Artificial Sequence; identical to SEQ ID NO: 3770
  derived and/or modified protein sequence (wt) from hemagglutinin__InfluenzaA__ADM13161

SEQ ID NO: 5569 - protein, 566 aa, Artificial Sequence; identical to SEQ ID NO: 4318
  derived and/or modified protein sequence (wt) from hemagglutinin__InfluenzaA__ADM13171

SEQ ID NO: 5570 - protein, 566 aa, Artificial Sequence; identical to SEQ ID NO: 4318
  derived and/or modified protein sequence (wt) from hemagglutinin__InfluenzaA__ADM13181

SEQ ID NO: 5571 - protein, 566 aa, Artificial Sequence
  derived and/or modified protein sequence (wt) from hemagglutinin__InfluenzaA__ADM13191
MKAILVVLLYTLATANADTLCIGYHANNSTDTVDTVLEKNVTVTHSVNLLEDKHNGKLCKLRGVAPLHLGKCNIAGWILGNPECESLSTASSWSYIVETSSSDNGTCYPGDFIDYEELREQLSSVSSFERFEIFPKTSSWPNHDSNKGVTAACPHAGAKSFYKNLIWLVKKGNSYPKLSKSYINDKGKEVLVLWGIHHPSTSADQQSLYQNADAYVFVGTSRYSKKFKPEIAIRPKVRDQEGRMNYYWTLVEPGDKITFEATGNLVVPRYAFAMERNAGSGIIISDTPVHDCNTTCQTPKGAINTSLPFQNIHPITIGKCPKYVKSTKLRLATGLRNVPSIQSRGLFGAIAGFIEGGWTGMVDGWYGYHHQNEQGSGYAADLKSTQHAIDEITNKVNSVIEKMNTQFTAVGKEFNHLEKRIENLNKKVDDGFLDIWTYNAELLVLLENERTLDYHDSNVKNLYEKVRSQLKNNAKEIGNGCFEFYHKCDNTCMESVKNGTYDYPKYSEEAKLNREEIDGVKLESTRIYQILAIYSTVASSLVLVVSLGAISFWMCSNGSLQCRICI

SEQ ID NO: 5572 - protein, 566 aa, Artificial Sequence
  derived and/or modified protein sequence (wt) from hemagglutinin__InfluenzaA__ADM13211
MKAILVVLLYTLATANADTLCIGYHANNSTDTVDTVLEKNVTVTHSVNLLEDKHNGKLCKLRGIAPLHLGKCNIAGWILGNPECESLSTASSWSYIVETSSSDNGTCYPGDFIDYEELREQLSSVSSFERFEIFPKTSSWPNHDSNKGVTAACPHAGAKSFYKNLIWLVKKGNSYPKLSKSYINDKGKEVLVLWGIHHPSTSADQQSLYQNADAYVFVGTSRYSKKFKPEIAIRPKVRDQEGRMNYYWTLVEPGDKITFEATGNLVVPRYAFAMERNAGSGIIISDTPVHDCNTTCQTPKGAINTSLPFQNIHPITIGKCPKYVKSTKLRLATGLRNVPSIQSRGLFGAIAGFIEGGWTGMVDGWYGYHHQNEQGSGYAADLKSTQNAIDEITNKVNSVIEKMNTQFTAVGKEFNHLEKRIENLNKKVDDGFLDIWTYNAELLVLLENERTLDYHDSNVKNLYEKVRSQLKNNAKEIGNGCFEFYHKCDNTCMESVKNGTYDYPKYSEEAKLNREEIDGVKLESTRIYQILAIYSTVASSLVLVVSLGAISFWMCSNGSLQCRICI

SEQ ID NO: 5573 - protein, 566 aa, Artificial Sequence; identical to SEQ ID NO: 5572
  derived and/or modified protein sequence (wt) from hemagglutinin__InfluenzaA__ADM13221

SEQ ID NO: 5574 - protein, 566 aa, Artificial Sequence
  derived and/or modified protein sequence (wt) from hemagglutinin__InfluenzaA__ADM13231
MKAILVVLLYTFETANADTLCIGYHANNSTDTVDTVLEKNVTVTHSVNLLEDKHNGKLCKLRGVAPLHLGKCNIAGWILGNPECESLSTASSWSYIVETSSSDNGTCYPGDFINYEELREQLSSVSSFERFEIFPKTSSWPNHDSNKGVTAACPHAGAKSFYKNLIWLVKKGNSYPKLSKSYINDKGKEVLVLWGIHHPSTSADQQSLYQNADAYVFVGTSRYSKKFKPEIAIRPKVRDQEGRMNYYWTLVEPGDKITFEATGNLVVPRYAFAMERNAGSGIIISDTPVHDCNTTCQTPNGAINTSLPFQNIHPITIGKCPKYVKSTKLRLATGLRNVPSIQSRGLFGAIAGFIEGGWTGMVDGWYGYHHQNEQGSGYAADLKSTQNAIDKITNKVNSVIEKMNTQFTAVGKEFNHLEKRIENLNKKVDDGFLDIWTYNAELLVLLENERTLDYHDSNVKNLYEKVRSQLKNNAKEIGNGCFEFYHKCDNTCMESVKNGTYDYPKYSEEAKLNREEIDGVKLESTRIYQILAIYSTVASSLVLVVSLGAISFWMCSNGSLQCRICI

SEQ ID NO: 5575 - protein, 566 aa, Artificial Sequence; identical to SEQ ID NO: 3833
  derived and/or modified protein sequence (wt) from hemagglutinin__InfluenzaA__ADM13241

SEQ ID NO: 5576 - protein, 566 aa, Artificial Sequence
  derived and/or modified protein sequence (wt) from hemagglutinin__InfluenzaA__ADM13251
MKAILVVLLYTFATTNADTLCIGYHANNSTDTVDTVLEKNVTVTHSVNLLEDKHNGKLCKLRGVAPLHLGKCNIAGWILGNPECESLSTASSWSYIVETSSSDNGTCYPGDFIDYEELREQLSSVSSFERFEIFPKTSSWPNHDSNKGVTAACPHAGAKSFYKNLIWLVKKGNSYPKLSKSYINDKGKEVLVLWGIHHPSTSADQQSLYQNADAYVFVGTSRYSKKFKPEIAIRPKVRDQEGRMNYYWTLVEPGDKITFEATGNLVVPRYAFAMERDAGSGIIISDTPVHDCNTTCQTPKGAINTSLPFQNIHPITIGKCPKYVKSTKLRLATGLRNVPSIQSRGLFGAIAGFIEGGWTGMVDGWYGYHHQNEQGSGYAADLKSTQNAIDKITNKVNSVIEKMNTQFTAVGKEFNHLEKRIENLNKKVDDGFLDIWTYNAELLVLLENERTLDYHDSNVKNLYEKVRSQLKNNAKEIGNGCFEFYHKCDNTCMESVKNGTYDYPKYSEEAKLNREEIDGVKLESTRIYQILAIYSTVASSLVLVVSLGAISFWMCSNGSLQCRICI

SEQ ID NO: 5577 - protein, 566 aa, Artificial Sequence
  derived and/or modified protein sequence (wt) from hemagglutinin__InfluenzaA__ADM13261
MKAILVVLLYTFATANADTLCIGYHANNSTDTVDTVLEKNVTVTHSVNLLEDKHNGKLCKLRGIAPLHLGKCNIAGWILGNPECESLSTASSWSYIVETSGSDNGTCYPGDFIDYEELREQLSSVSSFERFEIFPKTSSWPNHDSNKGVTAACPHAGAKSFYKNLIWLVKKGNSYPKLSKSYINDKGKEVLVLWGIHHPSTSADQQSLYQNADAYVFVGTSRYSKKFKPEIAIRPKVRDQEGRMNYYWTLVEPGDKITFEATGNLVVPRYAFAMERNAGSGIIISDTPVHDCNTTCQTPKGAINTSLPFQNIHPITIGKCPKYVKSTKLRLATGLRNVPSIQSRGLFGAIAGFIEGGWTGMVDGWYGYHHQNEQGSGYAADLKSTQNAIDEITNKVNSVIEKMNTQFTAVGKEFNHLEKRIENLNKKVDDGFLDIWTYNAELLVLLENERTLDYHDSNVKNLYEKVRSQLKNNAKEIGNGCFEFYHKCDNTCMESVKNGTYDYPKYSEEAKLNREEIDGVKLESTRIYQILAIYSTVASSLVLVVSLGAISFWMCSNGSLQCRICI

SEQ ID NO: 5578 - protein, 566 aa, Artificial Sequence
  derived and/or modified protein sequence (wt) from hemagglutinin__InfluenzaA__ADM13271
MKAILVVLLYTFATANADTLCIGYHANNSTDTVDTVLEKNVTVTHSVNLLEDKHNGKLCKLRGVAPLHLGKCNIAGWILGNPECESLSTASSWSYIVETSSSDNGTCYPGDFIDYEELREQLSSVSSFERFEIFPKTSSWPNHDSNKGVTAACPHAGAKSFYKNLIWLVKKGNSYPKLSKSYINDKGKEVLVLWGIHHPSTSADQQSLYQNADAYVFVGTSRYSKKFKPEIAIRPKVRDQEGRMNYYWTLVEPGDKITFEATGNLVVPRYAFAMERNAGSGIIISDTPVHDCNTTCQTPKGAINTSLPFQNIHPITIGKCPKYVKSTKLRLATGLRNVPSIQSRGLFGAIAGFIEGGWTGMVDGWYGYHHQNEQGSGYAADLKSTQNAIDKITNKVNSVIEKMNTQFTAVGKEFNHLEKRIENLNKKVDDGFLDIWTYNAELLVLLENERTLDYHDSNVKNLYEKVRSQLKNNAKEIGNGCFEFYHKCDNTCMESVKNGTYDYPKYSEEAKLNREEIDGVKLESTRIHQILAIYSTVASSLVLVVSLGAISFWMCSNGSLQCRICI

SEQ ID NO: 5579 - protein, 566 aa, Artificial Sequence; identical to SEQ ID NO: 5574
  derived and/or modified protein sequence (wt) from hemagglutinin__InfluenzaA__ADM13281

SEQ ID NO: 5580 - protein, 566 aa, Artificial Sequence; identical to SEQ ID NO: 3770
  derived and/or modified protein sequence (wt) from hemagglutinin__InfluenzaA__ADM13291

SEQ ID NO: 5581 - protein, 566 aa, Artificial Sequence
  derived and/or modified protein sequence (wt) from hemagglutinin__InfluenzaA__ADM13301
MKAILVVLLYTFATANADTLCIGYHANNSTDTVDTILEKNVTVTHSVNLLEDKHNGKLCKLRGVAPLHLGKCNIAGWILGNPECESLSTASSWSYIVETSSSDNGTCYPGDFIDYEELREQLSSVSSFERFEIFPKTSSWPNHDSNKGVTAACPHAGAKSFYKNLIWLVKKENSYPKLSKSYINDKGKEVLVLWGIHHPSTSADQQSLYQNVDAYVFVGTSRYSKKFKPEIAIRPKVRDQEGRMNYYWTLVEPGDKITFEATGNLVVPRYAFAMERNAGSGIIISDTPVHDCNTTCQTPKGAINTSLPFQNIHPITIGKCPKYVKSTKLRLATGLRNVPSIQSRGLFGAIAGFIEGGWTGMVDGWYGYHHQNEQGSGYAADLKSTQNAIDEITNKVNSVIEKMNTQFTAVGKEFNHLEKRIENLNKKVDDGFLDIWTYNAELLVLLENERTLDYHDSNVKNLYEKVRSQLKNNAKEIGNGCFEFYHKCDNTCMESVKNGTYDYPKYSEEAKLNREEIDGVKLESTRIYQILAIYSTVASSLVLVVSLGAISFWMCSNGSLQCRICI

SEQ ID NO: 5582 - protein, 566 aa, Artificial Sequence
  derived and/or modified protein sequence (wt) from hemagglutinin__InfluenzaA__ADM13311
MKAILVVLLYTFATANADTLCIGYHANNSTDTVDTILEKNVTVTHSVNLLENKHNGKLCKLRGVSPLHLGKCNIAGWILGNPECESLSTASSWSYIVETSSSDNGTCYPGDFIDYEELREQLSSVSSFERFEIFPKTSSWPNHDSNKGVTAACPHAGAKSFYKNLIWLVKKGNSYPKLSKSYINDKGKEVLVLWGIHHPSTSADQQSLYQNADAYVFVGTSRYSKKFKPEIAIRPKVRDQEGRMNYYWTLVEPGDKITFEATGNLVVPRYAFAMERNAGSGIIISDTPVHDCNTTCQTPKGAINTSLPFQNIHPITIGKCPKYVKSTKLRLATGLRNVPSIQSRGLFGAIAGFIEGGWTGMVDGWYGYHHQNEQGSGYAADLKSTQNAIDEITNKVNSVIEKMNTQFTAVGKEFNHLEKRIENLNKKVDDGFLDIWTYNAELLVLLENERTLDYHDSNVKNLYEKVRSQLKNNAKEIGNGCFEFYHKCDNTCMESVKNGTYDYPKYSEEAKLNREEIDGVKLESTRIYQILAIYSTAASSLVLVVSLGAISFWMCSNGSLQCRICI

SEQ ID NO: 5583 - protein, 566 aa, Artificial Sequence; identical to SEQ ID NO: 3833
  derived and/or modified protein sequence (wt) from hemagglutinin__InfluenzaA__ADM13321

SEQ ID NO: 5584 - protein, 566 aa, Artificial Sequence
  derived and/or modified protein sequence (wt) from hemagglutinin__InfluenzaA__ADM13331
MKAILVVLLYTFATANADTLCIGYHANNSTDTVDTVLEKNVTVTHSVNLLEDKHNGKLCKLRGVAPLHLGKCNIAGWILGNPECESLSTASSWSYIVETSSSDNGTCYPGDFIDYEELREQLSSVSSFERFEIFPKTSSWPDHDSNKGVTAACPHAGAKSFYKNLIWLVKKGNSYPKLSKSYINDKGKEVLVLWGIHHPSTSADQQSLYQNADAYVFVGTSRYSKKFKPEIAIRPKVRDQEGRMNYYWTLVEPGDKITFEATGNLVVPRYAFAMERNAGSGIIISDTPVHDCNTTCQTPKGAINTSLPFQNIHPITIGKCPKYVKSTKLRLATGLRNVPSIQSRGLFGAIAGFIEGGWTGMVDGWYGYHHQNEQGSGYAADLKSTQNAIDKITNKVNSVIEKMNTQFTAVGKEFNHLEKRIENLNKKVDDGFLDIWTYNAELLVLLENERTLDYHDSNVKNLYEKVRSQLKNNAKEIGNGCFEFYHKCDNTCMESVKNGTYDYPKYSEEAKLNREEIDGVKLESTRIYQILAIYSTVASSLVLVVSLGAISFWMCSNGSLQCRICI

SEQ ID NO: 5585 - protein, 566 aa, Artificial Sequence; identical to SEQ ID NO: 4282
  derived and/or modified protein sequence (wt) from hemagglutinin__InfluenzaA__ADM13341

SEQ ID NO: 5586 - protein, 566 aa, Artificial Sequence; identical to SEQ ID NO: 5248
  derived and/or modified protein sequence (wt) from hemagglutinin__InfluenzaA__ADM13351

SEQ ID NO: 5587 - protein, 566 aa, Artificial Sequence; identical to SEQ ID NO: 2329
  derived and/or modified protein sequence (wt) from hemagglutinin__InfluenzaA__ADM13442

SEQ ID NO: 5588 - protein, 566 aa, Artificial Sequence; identical to SEQ ID NO: 2329
  derived and/or modified protein sequence (wt) from hemagglutinin__InfluenzaA__ADM13443

SEQ ID NO: 5589 - protein, 566 aa, Artificial Sequence; identical to SEQ ID NO: 2329
  derived and/or modified protein sequence (wt) from hemagglutinin__InfluenzaA__ADM13444

SEQ ID NO: 5590 - protein, 566 aa, Artificial Sequence; identical to SEQ ID NO: 3276
  derived and/or modified protein sequence (wt) from hemagglutinin__InfluenzaA__ADM13445

SEQ ID NO: 5591 - protein, 566 aa, Artificial Sequence; identical to SEQ ID NO: 2329
  derived and/or modified protein sequence (wt) from hemagglutinin__InfluenzaA__ADM13446

SEQ ID NO: 5592 - protein, 566 aa, Artificial Sequence
  derived and/or modified protein sequence (wt) from hemagglutinin__InfluenzaA__ADM13447
MKTIIALSYIFCLALGQDLPGNDNSTATLCLGHHAVPNGTLVKTITDDQIEVTNATELVQSSSTGKICNNPHRILDGIDCTLIDALLGDPHCDVFQNETWDLFVERSKAFSNCYPYDVPDYASLRSLVASSGTLEFITEGFTWTGVTQNGGSNACKRGPGSGFFSRLNWLTKSGSTYSVLNVTMPNNDNFDKLYIWGVHHPSTNQEQTSLYVQASGRVTVSTRRSQQTIIPNIGSRPWVRGLSSRISIYWTIVKPGDVLVINSNGNLIAPRGYFKMRTGKSSIMRSDAPIDTCISECITPNGSIPNDKPFQNVNKITYGACPKYVKQNTLKLATGMRNVPEKQTRGLFGAIAGFIENGWEGMIDGWYGFRHQNSEGTGQAADLKSTQAAIDQINGKLNRVIEKTNEKFHQIEKEFSEVEGRIQDLEKYVEDTKIDLWSYNAELLVALENQHTIDLTDSEMNKLFEKTRRQLRENAEDMGNGCFKIYHKCDNACIESIRNGTYDHDVYRDEALNNRFQIKGVELKSGYKDWILWISFAISCFLLCVVLLGFIMWACQRGNIRCNICI

SEQ ID NO: 5593 - protein, 566 aa, Artificial Sequence; identical to SEQ ID NO: 2399
  derived and/or modified protein sequence (wt) from hemagglutinin__InfluenzaA__ADM13448

SEQ ID NO: 5594 - protein, 566 aa, Artificial Sequence
  derived and/or modified protein sequence (wt) from hemagglutinin__InfluenzaA__ADM13449
MKTIIALSYIFCLAFGQDLPGNDNSTATLCLGHHAVPNGTLVKTITDDQIEVTNATELVQSSSTGKICNNPHRILDGIDCTLIDALLGDPHCDVFQNETWDLFVERSKAFSNCYPYDVPDYASLRSLVASSGTLEFITEGFTWTGVTQNGGSNACKRGPGSGFFSRLNWLTKSGSTYPVLNVTMPNNDNFDKLYIWGVHHPSTNQEQTSLYVQASGRVTVSTRRSQQTIIPNIESRPWVRGLSSRISIYWTIVNPGDVLVINSNGNLIAPRGYFKMRTGKSSIMRSDAPIDTCISECITPNGSIPNDKPFQNVNKITYGACPKYVKQNTLKLATGMRNVPEKQTRGLFGAIAGFIENGWEGMIDGWYGFRHQNSEGTGQAADLKSTQAAIDQINGKLNRVIEKTNEKFHQIEKEFSEVEGRIQDLEKYVEDTKIDLWSYNAELLVALENQHTIDLTDSEMNKLFEKTRRQLRENAEDMGNGCFKIYHKCDNACIESIRNGTYDHDVYRDEALNNRFQIKGVELKSGYKDWILWISFAISCFLLCVVLLGFIMWACQRGNIRCNICI

SEQ ID NO: 5595 - protein, 566 aa, Artificial Sequence; identical to SEQ ID NO: 2431
  derived and/or modified protein sequence (wt) from hemagglutinin__InfluenzaA__ADM13450

SEQ ID NO: 5596 - protein, 566 aa, Artificial Sequence
  derived and/or modified protein sequence (wt) from hemagglutinin__InfluenzaA__ADM13451
MKTIIALSYIFCLALGQDLPGNDNRTATLCLGHHAVPNGTLVKTITDDQIEVTNATELVQSSSTGKICNNPHRILDGIDCTLIDALLGDPHCDVFQNETWDLFVERSKAFSNCYPYDVPDYASLRSLVASSGTLEFITEGFTWTGVTQNGGSNACKRGPGSGFFSRLNWLTKSGSTYPVLNVTMPNNDNFDKLYIWGVHHPSTNQEQTSLYVQASGRVTVSTRRSQQTIIPNIGSRPWVRGLSSRISIYWTIVKPGDVLVINSNGNLIAPRGYFKMRTGKSSIMRSDAPIDTCISECITPNGSIPNDKPFQNVNKITYGACPKYVKQNTLKLATGMRNVPEKQTRGLFGAIAGFIENGWEGMIDGWYGFRHQNSEGTGQAADLKSTQATIDQINGKLNRVIEKTNEKFHQIEKEFSEVEGRIQDLEKYVEDTKIDLWSYNAELLVALENQHTIDLTDSEMNKLFEKTRRQLRENAEDMGNGCFKIYHKCDNACIESIRNGTYDHDVYRDEALNNRFQIKGVELKSGYKDWILWISFAISCFLLCVVLLGFIMWACQRGNIRCNICI

SEQ ID NO: 5597 - protein, 566 aa, Artificial Sequence; identical to SEQ ID NO: 2316
  derived and/or modified protein sequence (wt) from hemagglutinin__InfluenzaA__ADM13452

SEQ ID NO: 5598 - protein, 566 aa, Artificial Sequence
  derived and/or modified protein sequence (wt) from hemagglutinin__InfluenzaA__ADM14467
MKAILVVLLYTFATANADTLCIGYHANNSTDTVDTVLEKNVTVTHSVNLLEDKHNGKLCKLRGVAPLHLGKCNIAGWILGNPECESLSTASSWSYIVETSSSDNGTCYPGDFIDYEELREQLSSVSSFERFEIFPKTSSWPNHDSNKGVTAACSHAGAKSFYKNLIWLVKKGNSYPKLSKSYINDKGKEVLVLWGIHHPSTSADQQSLYQNADAYVFVGTSRYSKKFKPEIAIRPKVRDQEGRMNYYWTLVEPGDKITFEATGNLVVPRYAFAMERNAGSGIIISDTPVHDCNTTCQTPKGAINTSLPFQSIHPITIGKCPKYVKSTKLRLATGLRNVPSIQSRGLFGAIAGFIEGGWTGMVDGWYGYHHQNEQGSGYAADLKSTQNAIDKITNKVNSVIEKMNTQFTAVGKEFNHLEKRIENLNKKVDDGFLDIWTYNAELLVLLENERTLDYHDSNVKNLYEKVRSQLKNNAKEIGNGCFEFYHKCDNTCMESVKNGTYDYPKYSEEAKLNREEIDGVKLESTRIYQILAIYSTVASSLVLVVSLGAISFWMCSNGSLQCRICI

SEQ ID NO: 5599 - protein, 564 aa, Artificial Sequence
  derived and/or modified protein sequence (wt) from hemagglutinin__InfluenzaA__ADM14516
MKAILVVLLYTFATANADTLCIGYHANNSTDTVNTVLEKNVTVTHSVNLLEDKHNGKLCKLRGVAPLHLGKCNIAGWILGNPECESLSTASSWSYIVETSSSDNGTCYPGDFIDYEELREQLSSVSSFERFEIFPKTSSWPNHDSNKGVTAACPHAGAKSFYKNLIWLVKKGNSYPKLSKSYINDKGKEVLVLWGIHHPSTSTDQQSLYQNADAYVFVGTSRYSKKFKPEIAIRPKVRDQEGRMNYYWTLVEPGDKITFEATGNLVVPRYAFAMERNAGSGIIISDTPVHDCNTTCQTPKGAINTSLPFQNIHPITIGKCPKYVKSTKLRLATGLRNVPSIQSRGLFGAIAGFIEGGWTGMVDGWYGYHHQNEQGSGYAADLKSTQNAIDEITNKVNSVIEKMNTQFTAVGKEFNHLEKRIENLNKKVDDGFLDIWTYNAELLVLLENERTLDYHDSNVKNLYEKVRSQLKNNAKEIGNGCFEFYHKCDNTCMESVKNGTYDYPKYSEEAKLNREEIDGVKLESTRIYQILAIYSTVASSLVLVVSLGAISFWMCSGHSCRICI

SEQ ID NO: 5600 - protein, 566 aa, Artificial Sequence
  derived and/or modified protein sequence (wt) from hemagglutinin__InfluenzaA__ADM14525
MKATLVVLLYTFATANADTLCIGYHANNSTDTVDTVLEKNVTVTHSVNLLEDKHNGKLCKLRGVAPLHLGKCNIAGWILGNPECESLSTASSWSYIVETSSSDNGTCYPGDFIDYEELREQLSSLSSFERFEIFPKTSSWPNHDSNKGVTAACPHAGAKSFYKNLIWLVKKGNSYPKLSKSYINDKGKDVLVLWGIHHPSTSADQQSLYQNADAYVFVGTSRYSKKFKPEIAIRPKVRDQEGRMNYYWTLVEPGDKITFEATGNLVVPRYAFAMERNAGSGIIISDTPVHDCNTTCQTPKGAINTSLPFQNIHPITIGKCPKYVKSTKLRLATGLRNVPSIQSRGLFGAIAGFIEGGWTGMVDGWYGYHHQNEQGSGYAADLKSTQNAIDEITNKVNSVIEKMNTQFTAVGKEFNHLEKRIENLNKKVDDGFLDIWTYNAELLVLLENERTLDYHDSNVKNLYEKVRSQLKNNAKEIGNGCFEFYHKCDNTCMESVKNGTYDYPKYSEEAKLNREEIDGVKLESTRIYQILAIYSTVASSLVLVVSLGAISFWMCSNGSLQCRICI

SEQ ID NO: 5601 - protein, 564 aa, Artificial Sequence
  derived and/or modified protein sequence (wt) from hemagglutinin__InfluenzaA__ADM14553
MKAILVVLLYTFATANADTLCIGYHANNSTDTVDTILEKNVTVTHSVNLLEDKHNGKLCKLRGVAPLHLGKCNIAGWILGNPECESLSTASSWSYIVETSSSDNGTCYPGDFIDYEELREQLSSVSSFERFEIFPKTSSWPNHDSNKGVTAACPHAGAKSFYKNLIWLVKKGNSYPKLSKSYINDKGKEVLVLWGIHHPSTSADQQSLYQNADAYVFVETSRYSKKFKPEIAIRPKVRDQEGRMNYYWTLVEPGDKITFEATGNLVVPRYAFAMERNAGSGIIISDTSVHDCNTTCQTPKGAINTSLPFQNIHPITIGKCPKYVKSTKLRLATGLRNVPSIQSRGLFGAIAGFIEGGWTGMVDGWYGYHHQNEQGSGYAADLKSTQNAIDEITNKVNSVIEKMNTQFTAVGKEFNHLEKRIENLNKKVDDGFLDIWTYNAELLVLLENERTLDYHDSNVKNLYEKVRSQLKNNAKEIGNGCFEFYHKCDNTCMESVKNGTYDYPKYSEEAKLNREEIDGVKLESTRIYQILAIYSTVASSLVLVVSLGAISFWMCSGHSCRICI

SEQ ID NO: 5602 - protein, 566 aa, Artificial Sequence; identical to SEQ ID NO: 3116
  derived and/or modified protein sequence (wt) from hemagglutinin__InfluenzaA__ADM14562

SEQ ID NO: 5603 - protein, 566 aa, Artificial Sequence; identical to SEQ ID NO: 2669
  derived and/or modified protein sequence (wt) from hemagglutinin__InfluenzaA__ADM14571

SEQ ID NO: 5604 - protein, 566 aa, Artificial Sequence
  derived and/or modified protein sequence (wt) from hemagglutinin__InfluenzaA__ADM14580
MKAILVVLLYTFATANADTLCIGYHANNSTDTVDTVLEKNVTVTHSVNLLEDKHNGKLCKLRGVAPLHLGKCNIAGWILGNPECESLSTASSWSYIVETSSSDNGTCYPGDFIDYEELREQLSSVSSFERFEIFPKTSSWPNHDSNKGVTAACPHAGAKSFYKNLIWLVKKGNSYPKLSKSYINDKGKEVLVLWGIHHPSTSADQQSLYQNADAYVFVGTSRYSKKFKPEIAIRPKVRDQEGRMNYYWTLVEPGDKITFEATGNLVVPRYAFAMEKNAGSGIIISDTPVHDCNTTCQTPKGAINTSLPFQNIHPITIGKCPKYVKSTKLRLATGLRNVPSIQSRGLFGAIAGFIEGGWTGMVDGWYGYHHQNEQGSGYAADLKSTQNAIDEITNKVNSVIEKMNTQFTAVGKEFNHLEKRIENLNKKVDDGFLDIWTYNAELLVLLENERTLDYHDSNVKNLYEKVRSQLKNNAKEIGNGCFEFYHKCDNTCMESVKNGTYDYPKYSEEAKLNREEINGVKLESTRIYQILAIYSTVASSLVLVVSLGAISFWMCSNGSLQCRICI

SEQ ID NO: 5605 - protein, 566 aa, Artificial Sequence
  derived and/or modified protein sequence (wt) from hemagglutinin__InfluenzaA__ADM14589
MKAILVVLLYTFATANADTLCIGYHANNSTDTVDTVLEKNVTVTHSVNLLEDKHNGKLCKLRGVAPLHLGKCNIAGWILGNPECESLSTASSWSYIVETSSSDNGTCYPGDFIDYEELREQLSSVSSFERFEIFPKTSSWPNHDSNKGVTAACPHAGAKSFYKNLIWLVKKGNSYPKLSKSYINDKGKEVLVLWGIHHPSTSADQQSLYQNADAYVFVGTSRYSKKFKPEIAIRPKVRDQEGRMNYYWTLVEPGDKITFEATGNLVVPRYAFAMEKNAGSGIIISDTPVHDCNTTCQTPKGAINTSLPFQNIHPITIGKCPKYVKSTKLRLATGLRNVPSIQSRGLFGAIAGFIEGGWTGMVDGWYGYHHQNGQGSGYAADLKSTQNAIDEITNKVNSVIEKMNTQFTAVGKEFNHLEKRIENLNKKVDDGFLDIWTYNAELLVLLENERTLDYHDSNVKNLYEKVRSQLKNNAKEIGNGCFEFYHKCDNTCMESVKNGTYDYPKYSEEAKLNREEINGVKLESTRIYQILAIYSTVASSLVLVVSLGAISFWMCSNGSLQCRICI

SEQ ID NO: 5606 - protein, 566 aa, Artificial Sequence
  derived and/or modified protein sequence (wt) from hemagglutinin__InfluenzaA__ADM14599
MKAILVVLLYTFATANADTLCIGYHANNSTDTVDTVLEKNVTVTHSVNLLEDKHNGKLCKLRGVAPLHLGKCNIAGWILGNPECESLSTASSWSYIVETSSSDNGTCYPGDFIDYEELREQLSSVSSFERFEIFPKTSSWPNHDSNKGVTAACPHAGAKSFYKNLIWLVKKGNSYPKLSKSYINDKGKEVLVLWGIHHPSTSADQQSLYQNADAYVFVGTSRYSKKFKPEIVIRPKVRDQEGRMNYYWTLVEPGDKITFEATGNLVVPRYAFAMERNAGSGIIISDTPVHDCNTTCQTPKGAINTSLPFQNIHPITIGKCPKYVKSTKLRLATGLRNVPSIQSRGLFGAIAGFIEGGWTGMVDGWYGYHHQNEQGSGYAADLKSTQNAIDEITNKVNSVIEKMNTQFTAVGKEFNHLEKRIENLNKKVDDGFLDIWTYNAELLVLLENERTLDYHDSNVKNLYEKVRSQLKNNAKEIGNGCFEFYHKCDNTCMESVKNGTYDYPKYSEEAKLNREEIDGVKLESTRIYQILAIYSTVASSLVLVVSLGAISFWMCSNGSLQCRICI

SEQ ID NO: 5607 - protein, 566 aa, Artificial Sequence; identical to SEQ ID NO: 3829
  derived and/or modified protein sequence (wt) from hemagglutinin__InfluenzaA__ADM14609

SEQ ID NO: 5608 - protein, 566 aa, Artificial Sequence
  derived and/or modified protein sequence (wt) from hemagglutinin__InfluenzaA__ADM14618
MKAILVVLLYTFATANADTLCIGYHANNSTDTVDTVLEKNVTVTHSVNLLEDKHNGKLCKLRGVAPLHLGKCNIAGWILGNPECESLSTASSWSYIVETSSSDNGTCYPGDFIDYEELREQLSSVSSFERFEIFPKTSSWPNHDSNKGVTAACPHAGAKSFYKNLIWLVKKGNSYPKLSKSYINDKGKEVLVLWGIHHPSTSADQQSLYQNADAYVFVGTSRYSKKFKPEIAIRPKVRDQEGRMNYYWTLVEPGDKITFEATGNLVVPRYAFAMERNAGSGIIISDTPVHDCNTTCQTPKGAINTSLPFQNNHPITIGKCPKYVKSTKLRLATGLRNVPSIQSRGLFGAIAGFIEGGWTGMVDGWYGYHHQNEQGSGYAADLKSTQNAIDEITNKVNSVIEKMNTQFTAVGKEFNHLEKRIENLNKKVDDGFLDIWTYNAELLVLLENERTLDYHDSNVKNLYEKVRSQLKNNAKEIGNGCFEFYHKCDNTCMESVKNGTYDYPKYSEEAKLNREEIDGVKLESTRIYQILAIYSTVASSLVLVVSLGAISFWMCSNGSLQCRICI

SEQ ID NO: 5609 - protein, 566 aa, Artificial Sequence; identical to SEQ ID NO: 2669
  derived and/or modified protein sequence (wt) from hemagglutinin__InfluenzaA__ADM14627

SEQ ID NO: 5610 - protein, 566 aa, Artificial Sequence
  derived and/or modified protein sequence (wt) from hemagglutinin__InfluenzaA__ADM14655
MKAILVVLLYTFATANADTLCIGYHANNSTDTVDTVLEKNVTVTHSVNLLEDKHNGKLCKLRGVAPLHLGKCNIAGWILGNPECESLSTASSWSYIVETSSSDNGTCYPGDFIDYEELREQLSSVSSFERFEIFPKTSSWPNHDSNKGVTAACPHAGAKSFYKNLIWLVKKGNSYPKLSKSYINDKGKEVLVLWGIHHPSTSADQQSLYQNADAYVFVGTSRYSKKFKPEIAIRPKVRDQEGRMNYYWTLVEPGDKITFEATGNLVVPRYAFAMERNAGSGIIISDTPVHDCNTTCQTPKGAINTSLPFQNIHPITIGKCPKYVRSTKLRLATGLRNVPSIQSRGLFGAIAGFIEGGWTGMVDGWYGYHHQNEQGSGYAADLKSTQNAIDEITNKVNSVIEKMNTQFTAVGKEFNHLEKRIENLNKKVDDGFLDIWTYNAELLVLLENERTLDYHDSNVKNLYEKVRSQLKNNAKEIGNGCFEFYHKCDNTCMESVKNGTYDYPKYSEEAKLNREEIDGVKLESTRIYQILAIYSTVASSLVLVVSLGAISFWMCSNGSLQCRICI

SEQ ID NO: 5611 - protein, 566 aa, Artificial Sequence
  derived and/or modified protein sequence (wt) from hemagglutinin__InfluenzaA__ADM14664
MKAILVVLLYTFATANADTLCIGYHANNSTDTVDTVLEKNVTVTHSVNLLEDKHNGKLCKLRGVAPLHLGKCNIAGWILGNPECESLSTASSWSYIVETSSSDNGTCYPGDFIDYEELREQLSSVSSFERFEIFPKTSSWPNHDSNKGVTAACPHAGAKSFYKNLIWLVKKGNSYPKLSKSYINDKGKEVLVLWGIHHPSTSADQQSLYQNADAYVFVGTSRYSKKFKPEIAIRPKVRDQEGRMNYYWTLVEPGDKITFEATGNLVVPRYAFAMERNAGSGIIISDTPVHDCNTTCQTPNGAINTSLPFQNIHPITIGKCPKYVKSTKLRLATGLRNIPSIQSRGLFGAIAGFIEGGWTGMVDGWYGYHHQNEQGSGYAADLKSTQNAIDEITNKVNSVIEKMNTQFTAVGKEFNHLEKRIENLNKKVDDGFLDIWTYNAELLVLLENERTLDYHDSNVKNLYEKVRSQLKNNAKEIGNGCFEFYHKCDNTCMESVKNGTYDYPKYSEEAKLNREEIDGVKLESTRIYQILAIYSTVASSLVLVVSLGAISFWMCSNGSLQCRICI

SEQ ID NO: 5612 - protein, 566 aa, Artificial Sequence; identical to SEQ ID NO: 2669
  derived and/or modified protein sequence (wt) from hemagglutinin__InfluenzaA__ADM14673

SEQ ID NO: 5613 - protein, 566 aa, Artificial Sequence; identical to SEQ ID NO: 2669
  derived and/or modified protein sequence (wt) from hemagglutinin__InfluenzaA__ADM14682

SEQ ID NO: 5614 - protein, 566 aa, Artificial Sequence; identical to SEQ ID NO: 2669
  derived and/or modified protein sequence (wt) from hemagglutinin__InfluenzaA__ADM14691

SEQ ID NO: 5615 - protein, 566 aa, Artificial Sequence; identical to SEQ ID NO: 3833
  derived and/or modified protein sequence (wt) from hemagglutinin__InfluenzaA__ADM14700

SEQ ID NO: 5616 - protein, 564 aa, Artificial Sequence
  derived and/or modified protein sequence (wt) from hemagglutinin__InfluenzaA__ADM14709
MKAILVVLLYTFATANADTLCIGYHANNSTDTVDTVLEKNVTVTHSVNLLEDKHNGKLCKLRGVAPLHLGKCNIAGWILGNPECESLSTASSWSYIVETSSSDNGTCYPGDFIDYEELREQLSSVSSFERFEIFPKTNSWPNHDSNKGVTAACPHAGAKSFYKNLIWLVKKGNSYPKLSKSYINDKGKEVLVLWGIHHPSTSADQQSLYQNADAYVFVGTSKYSKKFKPEIAIRPKVRDQEGRMNYYWTLVEPGDKITFEATGNLVVPRYAFAMERNAGSGIIISDTPVHDCNTTCQTPKGAINTSLPFQNIHPITIGKCPKYVKSTKLRLATGLRNVPSIQSRGLFGAIAGFIEGGWTGMVDGWYGYHHQNEQGSGYAADLKSTQNAIDGITNKINSVIEKMNTQFTAVGKEFNHLEKRIENLNKKVDDGFLDIWTYNAELLVLLENERTLNYHDSNVKNLYEKVRSQLKNNAKEIGNGCFEFYHKCDNTCMESVKNGTYDYPKYSEEAKLNREEIDGVKLESTRIYQILAIYSTVASSLVLVVSLGAISFWMCSGHSCRICI

SEQ ID NO: 5617 - protein, 566 aa, Artificial Sequence
  derived and/or modified protein sequence (wt) from hemagglutinin__InfluenzaA__ADM14718
MKAILVVLLYTFATANADTLCIGYHANNSTDTVDTVLEKNVTVTHSVNLLEDKHNGKLCKLRGVAPLHLGKCNIAGWILGNPECESLSTASSWSYIVETSSSDNGTCYPGDFIDYEELREQLSSMSSFERFEIFPKTSSWPNHDSNKGVTAACPHAGAKSFYKNLIWLVKKGNSYPKLSKSYINDKGKEVLVLWGIHHPSTSADQQSLYQNADAYVFVGTSRYSKKFKPEIAIRPKVRDQEGRMNYYWTLVEPGDKITFEATGNLVVPRYAFAMERNAGSGIIISDTPVHDCNTTCQTPKGAINTSLPFQNIHPITIGKCPKYVKSTKLRLATGLRNVPSIQSRGLFGAIAGFIEGGWTGMVDGWYGYHHQNEQGSGYAADLKSTQNAIDKITNKVNSVIEKMNTQFTAVGKEFNHLEKRIENLNKKVDDGFLDIWTYNAELLVLLENERTLDYHDSNVKNLYEKVRSQLKNNAKEIGNGCFEFYHKCDNTCMESVKNGTYDYPKYSEEAKLNREEIDGVKLESTRIYQILAIYSTVASSLVLVVSLGAISFWMCSNGSLQCRICI

SEQ ID NO: 5618 - protein, 564 aa, Artificial Sequence
  derived and/or modified protein sequence (wt) from hemagglutinin__InfluenzaA__ADM14728
MKAILVVLLYTFATANADTLCIGYHANNSTDTVDTVLEKNVTVTHSVNLLEDKHNGKLCKLRGVAPLHLGKCNIAGWILGNPECESLSTASSWSYIVETSSSDNGTCYPGDFIDYEELREQLSSVSSFERFEIFPKTSSWPNHDSNKGVTAACPHAGAKSFYKNLIWLVKKGNSYPKLSNSYINDKGKEVLVLWGIHHPSTSADQQSLYQNADAYVFVGTSRYSKKFKPEIAIRPKVRDQEGRMNYYWTLVEPGDKITFEATGNLVVPRYAFAMERNAGSGIIISDTPAHDCNTTCQTPKGAINTSLPFQNIHPITIGKCPKYVKSTKLRLATGLRNVPSIQSRGLFGAIAGFIEGGWTGMVDGWYGYHHQNEQGSGYAADLKSTQNAIDEITNKVNSVIEKMNTQFTAVGKEFNHLEKRIENLNKKVDDGFLDIWTYNAELLVLLENERTLDYHDSNVKNLYEKVRSQLKNNAKEIGNGCFEFYHKCDNTCMESVKNGTYDYPKYSEEAKLNREEIDGVKLESTRIYQILAIYSTVASSLVLVVSLGAISFWMCSGHSCRICI

SEQ ID NO: 5619 - protein, 566 aa, Artificial Sequence
  derived and/or modified protein sequence (wt) from hemagglutinin__InfluenzaA__ADM14737
MKAILVVLLYTFATANADTLCIGYHANNSTDTVNTVLEKNVTVTHSVNLLEDKHNGKLCKLRGVAPLHLGKCNIAGWILGNPECESLSTASSWSYIVETSSSDNGTCYPGDFIDYEELREQLSSVSSFERFEIFPKTSSWPNHDSNKGVTAACPHAGAKSFYKNLIWLVKKGNSYPKLSKSYINDKGKEVLVLWGIHHPSTSADQQSLYQNADAYVFVGTSRYSKKFKPEIAIRPKVRDQEGRMNYYWTLVEPGDKITFEATGNLVVPRYAFAMEKNAGSGIIISDTPVHDCNTTCQTPKGAINTSLPFQNIHPITIGKCPKYVKSTKLRLATGLRNVPSIQSRGLFGAIAGFIEGGWTGMVDGWYGYHHQNEQGSGYAADLKSTQNAIDEITNKVNSVIEKMNTQFTAVGKEFNHLEKRIENLNKKVDDGFLDIWTYNAELLVLLENERTLDYHDSNVKNLYEKVRSQLKNNAKEIGNGCFEFYHKCDNTCMESVKNGTYDYPKYSEEAKLNREEIDGVKLESTRIYQILAIYSTVASSLVLVVSLGAISFWMCSNGSLQCRICI

SEQ ID NO: 5620 - protein, 566 aa, Artificial Sequence
  derived and/or modified protein sequence (wt) from hemagglutinin__InfluenzaA__ADM14746
MKAILVVLLYTFATANADTLCIGYHANNSTDTVDTVLEKNVTVTHSVNLLEDKHNGKLCKLRGVAPLHLGKCNIAGWVLGNPECESLSTASSWSYIVETPSSDNGTCYPGDFIDYEELREQLSSVSSFERFEIFPKTSSWPNHDSNKGVTAACPHAGAKSFYKNLIWLVKKGNSYPKLSKSYINDKGKEVLVLWGIHHPSTSADQQSLYQNADAYVFVGTSRYSKKFKPEIAIRPKVRDQEGRMNYYWTLVEPGDKITFEATGNLVVPRYAFAMERNAGSGIIISDTPVHDCNTTCQTPKGAINTSLPFQNIHPITIGKCPKYVKSKKLRLATGLRNVPSIQSRGLFGAIAGFIEGGWTGMVDGWYGYHHQNEQGSGYAADLKSTQNAIDEITNKVNSVIEKMNTQFTAVGKEFNHLEKRIENLNKKVDDGFLDIWTYNAELLVLLENERTLDYHDSNVKNLYEKVRSQLKNNAKEIGNGCFEFYHKCDNTCMESVKNGTYDYPKYSEEAKLNREEIDGVKLESTRIYQILAIYSTVASSLVLVVSLGAISFWMCSNGSLQCRICI

SEQ ID NO: 5621 - protein, 564 aa, Artificial Sequence
  derived and/or modified protein sequence (wt) from hemagglutinin__InfluenzaA__ADM14756
MKAILVVLLYTFATANADTLCVGYHANNSTDTVDTVLEKNVTVTHSVNLLEDKHNGKLCKLRGVAPLHLGKCNIAGWILGNPECESLSTASSWSYIVETSSSDNGTCYPGDFIDYEELREQLSSVSSFERFEIFPKTSSWPNHDSNKGVTAACPHAGAKSFYKNLIWLVKKGNSYPKLSKSYINDKGKEVLVLWGIHHPSTSADQQSLYQNADAYVFVGTSRYSKKFKPEIAIRPKVRDQEGRMNYYWTLVEPGDKITFEATGNLVVPRYAFAMERNAGSGIIISDTPVHDCNTTCQTPKGAINTSLPFQNIHPITIGKCPKYVKSTKLRLATGLRNVPSIQSRGLFGAIAGFIEGGWTGMVDGWYGYHHQNEQGSGYAADLKSTQNAIDKITNKVNSVIEKMNTQFTAVGKEFNHLEKRIENLNKKVDDGFLDIWTYNAELLVLLENERTLDYHDSNVKNLYEKVRSQLKNNAKEIGNGCFEFYHKCDNTCMESVKNGTYDYPKYSEEAKLNREEIDGVKLESTRIYQILAIYSTVASSLVLVVSLGAISFWMCSGHSCRICI

SEQ ID NO: 5622 - protein, 566 aa, Artificial Sequence; identical to SEQ ID NO: 3833
  derived and/or modified protein sequence (wt) from hemagglutinin__InfluenzaA__ADM14765

SEQ ID NO: 5623 - protein, 564 aa, Artificial Sequence
  derived and/or modified protein sequence (wt) from hemagglutinin__InfluenzaA__ADM14775
MKAILVVLLYTFATANADTLCIGYHANNSTDTVDTVLEKNVTVTHSVNLLEDKHNGKLCKLRGVAPLHLGKCNIAGWILGNPECESLSTASSWSYIVETSSSDNGTCYPGDFIDYEELREQLSSVSSFERFEIFPKTSSWPNHDSNKGVTAACPHAGAKSFYKNLIWLVKKGNSYPKLNKSYINDKGKEVLVLWGIHHPSTSADQQSLYQNADAYVFVGTSRYSKKFKPEIAIRPKVRDQEGRMNYYWTLVEPGDKITFEATGNLVVPRYAFAMERNAGSGIIISDTPVHDCNTTCQTPKGAINTSLPFQNIHPITIGECPKYVKSTKLRLATGLRNVPSIQSRGLFGAIAGFIEGGWTGMVDGWYGYHHQNEQGSGYAADLKSTQNAIDKITNKVNSVIEKMNTQFTAVGKEFNHLEKRIENLNKKVDDGFLDIWTYNAELLVLLENERTLDYHDSNVKNLYEKVRSQLKNNAKEIGNGCFEFYHKCDNTCMESVKNGTYDYPKYSEEAKLNREEIDGVKLESTRIYQILAIYSTVASSLVLVVSLGAISFWMCSGHSCRICI

SEQ ID NO: 5624 - protein, 564 aa, Artificial Sequence
  derived and/or modified protein sequence (wt) from hemagglutinin__InfluenzaA__ADM14802
MKAILVVLLYTFATANADTLCIGYHANNSTDTVDTVLEKNVTVTHSVNLLEDKHNGKLCKIRGVAPLHLGKCNIAGWILGNPECESLSTASSWSYIVETSSSDNGTCYPGDFIDYEELREQLSSVSSFERFEIFPKTSSWPNHDSNKGVTAACPHAGAKSFYKNLIWLVKKGNSYPKLSKSYINDKGKEVLVLWGIHHPSTSADQQSLYQNADAYVFVGTSRYSKKFKPEIAIRPKVRDQEGRMNYYWTLVEPGDKITFEATGNLVVPRYAFAMERNAGSGIIISDTPVHDCNTTCQTPKGAINTSLPFQNIHPITIGKCPKYVKSTKLRLATGLRNVPSIQSRGLFGAIAGFIEGGWTGMVDGWYGYHHQNEQGSGYAADLKSTQNAIDEITNKVNSVIEKMNTQFTAVGKEFNHLEKRIENLNKKVDDGFLDIWTYNAELLVLLENERTLDYHDSNVKNLYEKVRSQLKNNAKEIGNGCFEFYHKCDNTCMESVKNGTYDYPKYSEEAKLNREEIDGVKLESTRIYQILAIYSTVASSLVLVVSLGAISFWMCSGHSCRICI

SEQ ID NO: 5625 - protein, 567 aa, Artificial Sequence
  derived and/or modified protein sequence (wt) from hemagglutinin__InfluenzaA__ADM14830
MKAILVVLLYTFATANADTLCIGYHANNSTDTVDTVLEKNVTVTHSVNLLEDKHNGKLCKLRGVAPLHLGKCNIAGWILGNPECELLSTASSWSYIVETSSSDNGTCYPGDFIDYEELREQLSSVSSFERFEIFPKTSSWPNHDSNKGVTAACPHAGAKSFYKNLIWLVKKGNSYPKLSKSYINDKGKEVLVLWGIHHPSTSADQQSLYQNADAYVFVGTSRYSKKFKPEIAIRPKVRDQEGRMNYYWTLVEPGDKITFEATGNLVVPRYAFAMERNAESGIIISDTPVHDCNTTCQTPKGAINTSLPFQNIHPITIGKCPKYVKSTKLRLATGLRNVPSIQSRGLFGAIAGFIEGGWTGMVDGWYGYHHQNEQGSGYAADLKSTQNAIDEITNKVNSVIEKMNTQFTAVGKEFNHLEKRIENLNKKVDDGFLDIWTYNAELLVLLENERTLDYHDSNVKKLYEKVRSQLKNNAKEIGNGCFEFYHKCDNTCMESVKNGTYDYPKYSEEAKLNREEIDGVKLESTRIYQILAIYSTVASSLVLVVSLGAISFWMCSGHSCLQCRICI

SEQ ID NO: 5626 - protein, 564 aa, Artificial Sequence
  derived and/or modified protein sequence (wt) from hemagglutinin__InfluenzaA__ADM14848
MKAILVVLLYTFATANADTLCIGYHANNSTDTVDTVLEKNVTVTHSVNLLEDKHNGKLCKLRGVAPLHLGKCNIAGWILGNPECESLSTASSWSYIVETSSSDNGTCYPGDFIDYEELREQLSSVSSFERFEIFPKTSSWPNHDSNKGVTAACPHAGAKSFYKNLIWLVKKGNSYPKLSKSYINDKGKEVLVLWGIHHPSTSADQQSLYQNADAYVFVGSSRYSKKFKPEIAIRPKVRDQEGRMNYYWTLVEPGDKITFEATGNLVVPRYAFAMERNAGSGIIISDTPVHDCNTTCQTPKGAINTSLPFQNIHPITIGKCPKYVKSTKLRLATGLRNVPSIQSRGLFGAIAGFIEGGWTGMVDGWYGYHHQNEQGSGYAADLKSTQNAIDEITNKVNSVIEKMNTQFTAVGKEFNHLEKRIENLNKKVDDGFLDIWTYNAELLVLLENERTLDYHDSNVKNLYEKVRSQLKNNAKEIGNGCFEFYHKCDNTCMESVKNGTYDYPKYSEEAKLNREEIDGVKLESTRIYQILAIYSTVASSLVLVVSLGAISFWMCSGHSCRICI

SEQ ID NO: 5627 - protein, 564 aa, Artificial Sequence
  derived and/or modified protein sequence (wt) from hemagglutinin__InfluenzaA__ADM14866
MKAILVVLLYTFATANADTLCIGYHANNSTDTVDTVLEKNVTVTHSVNLLEDKHNGKLCKLRGVAPLHLGKCNIAGWILGNPECESLSTASSWSYIVETSSSDNGTCYPGDFIDYEELREQLSSVSSFERFEIFPKTSSWPNHDSDKGVTAACPHAGAKSFYKNLIWLVKKGNSYPKLSKSYINDKGKEVLVLWGIHHPSTSADQQSLYQNADAYVFVGTSRYSKKFKPEIAIRPKVRDQEGRMNYYWTLVEPGDKITFEATGNLVVPRYAFAMERNAGSGIIISDTPVHDCNTTCQTPKGAINTSLPFQNIHPITIGKCPKYVKSIKLRLATGLRNVPSIQSRGLFGAIAGFIEGGWTGMVDGWYGYHHQNEQGSGYAADLKSTQNAIDEITNKVNSVIEKMNTQFTAVGKEFNHLEKRIENLNKKVDDGFLDIWTYNAELLVLLENERTLDYHDSNVKNLYEKVRSQLKNNAKEIGNGCFEFYHKCDNTCMESVKNGTYDYPKYSEEAKLNREEIDGVKLESTRIYQILAIYSTVASSLVLVVSLGAISFWMCSGHSCRICI

SEQ ID NO: 5628 - protein, 564 aa, Artificial Sequence
  derived and/or modified protein sequence (wt) from hemagglutinin__InfluenzaA__ADM14876
MKAILVVLLYTFATANADTLCIGYHANNSTDTVDTVLEKNVTVTHSVNLLEDKHNGKLCKLRGVAPLHLGKCNIAGWILGNPECESLSTASSWSYIVETSSSDNGTCYPGDFIDYEELREQLSSVSSFERFEIFPKTSSWPNHDSNKGVTAACPHAGAKSFYKNLIWLVKKGNSYPKLSKSYINDKEKEVLVLWGIHHPSTSADQQSLYQNADAYVFVGTSRYSKKFKPEIAIRPKVRDQEGRMNYYWTLVEPGDKITFEATGNLVVPRYAFAMERNAGSGIIISDTPVHDCNTTCQTPKGAINTSLPFQNIHPITIGKCPKYVKSTKLRLATGLRNVPSIQSRGLFGAIAGFIEGGWTGMVDGWYGYHHQNEQGSGYAADLKSTQNAIDEITNKVNSVIEKMNTQFTAVGKEFNHLEKRIENLNKKVDDGFLDIWTYNAELLVLLENERTLDYHDSNVKNLYEKVRSQLKNNAKEIGNGCFEFYHKCDNTCMESVKNGTYDYPKYSEEAKLNREEIDGVKLESTRIYQILAIYSTVASSLVLVVSLGAISFWMCSGHSCRICI

SEQ ID NO: 5629 - protein, 567 aa, Artificial Sequence
  derived and/or modified protein sequence (wt) from hemagglutinin__InfluenzaA__ADM14885
MKAILVVLLYTFATANADTLCIGYHANNSTDTVDTVLEKNVTVTHSVNLLEDKHNGKLCKLRGVAPLHLGKCNIAGWILGNPECELLSTASSWSYIVETSSSDNGTCYPGDFIDYEELREQLSSVSSFERFEIFPKTSSWPNHDSNKGVTAACPHAGAKSFYKNLIWLVKKGNSYPKLSKSYINDKEKEVLVLWGIHHPSTSADQQSLYQNADAYVFVGTSRYSKKFKPEIVIRPKVRDQEGRMNYYWTLVEPGDKITFEATGNLVVPRYAFAMERNAESGIIISDTPVHDCNTTCQTPKGAINTSLPFQNIHPITIGKCPKYVKSTKLRLATGLRNVPSIQSRGLFGAIAGFIEGGWTGMVDGWYGYHHQNEQGSGYAADLKSTQNAIDEITNKVNSVIEKMNTQFTAVGKEFNHLEKRIENLNKKVDDGFLDIWTYNAELLVLLENERTLDYHDSNVKKLYEKVRSQLKNNAKEIGNGCFEFYHKCDNTCMESVKNGTYDYPKYSEEAKLNREEIDGVKLESTRIYQILAIYSTVASSLVLVVSLGAISFWMCSGHGSLQCRICI

SEQ ID NO: 5630 - protein, 564 aa, Artificial Sequence
  derived and/or modified protein sequence (wt) from hemagglutinin__InfluenzaA__ADM14894
MKAILVVLLYTFATANADTLCIGYHANNSTDTVDTVLEKNVTVTHSVNLLEDKHNGKLCKLRGVAPLHLGKCNIAGWILGNPECESLSTASSWSYIVETSSSDNGTCYPGDFIDYEELREQLSSVSSFERFEIFPKTSSWPNHDSNKGVTAACPHAGAKSFYKNLIWLVKKGNSYPKLSKSYINDKEKEVLVLWGIHHPSTSADQQSLYQNADAYVFVGTSRYSKKFKPEIVIRPKVRDQEGRMNYYWTLVEPGDKITFEATGNLVVPRYAFAMERNAGSGIVISDTPVHDCNTTCQTPKGAINTSLPFQNIHPITIGKCPKYVKSTKLRLATGLRNVPSIQSRGLFGAIAGFIEGGWTGMVDGWYGYHHQNEQGSGYAADLKSTQNAIDEITNKVNSVIEKMNTQFTAVGKEFNHLEKRIENLNKKVDDGFLDIWTYNAELLVLLENERTLDYHDSNVKKLYEKVRSQLKNNAKEIGNGCFEFYHKCDNTCMKSVKNGTYDYPKYSEEAKLNREEIDGVKLESTRIYQILAIYSTVASSLVLVVSLGAISFWMCSGHSCRICI

SEQ ID NO: 5631 - protein, 564 aa, Artificial Sequence
  derived and/or modified protein sequence (wt) from hemagglutinin__InfluenzaA__ADM14903
MKAILVVLLCTFATANADTLCIGYHANNSTDTVDTVLEKNVTVTHSVNLLEDKHNGKLCKLRGVAPLHLGKCNIAGWILGNPECESLSTASSWSYIVETSSSDNGTCYPGDFIDYEELREQLSSVSSFERFEIFPKTSSWPNHDSNKGVTAACPHAGAKSFYKNLIWLVKKGNSYPKLSKSYINDKGKEVLVLWGIHHPSTSADQQSLYQNADAYVFVGTSRYSKKFKPEIAIRPKVRDQEGRMNYYWTLVEPGDKITFEATGNLVVPRYAFAMERNAGSGIIISDTPVHDCNTTCQTPKGAINTSLPFQNIHPITIGKCPKYVKSTKLRLATGLRNVPSIQSRGLFGAIAGFIEGGWTGMVDGWYGYHHQNEQGSGYAADLKSTQNAIDKITNKVNSVIEKMNTQFTAVGKEFNHLEKRIENLNKKVDDGFLDIWTYNAELLVLLENERTLDYHDSNVKNLYEKVRSQLKNNAKEIGNGCFEFYHKCDNTCMESVKNGTYDYPKYSEEAKLNREEIDGVKLESTRIYQILAIYSTVASSLVLVVSLGAISFWMCSGHSCRICI

SEQ ID NO: 5632 - protein, 564 aa, Artificial Sequence
  derived and/or modified protein sequence (wt) from hemagglutinin__InfluenzaA__ADM14912
MKAILVVLLYTFATANADTLCIGYHANNSTDTVDTVLEKNVTVTHSVNLLEDKHNGKLCKLRGVAPLHLGKCNIAGWILGNPECESLSTASSWSYIVETSSSDNGTCYPGDFIDYEELREQLSSVSSFERFEIFPKTSSWPNHDSNKGVTAACPHAGAKSFYKNLIWLVKKGNSYPKLSKSYINDKGKEVLVLWGIHHPSTSADQQSLYQNADAYVFVGTSRYSKKFKPEIAIRPKVRDQEGRMNYYWTLVEPGDKITFEATGNLVVPRYAFAMERNAGSGIIISDTPVHDCNTTCQTPEGAINTSLPFQNIHPITIGKCPKYVKSTKLRLATGLRNVPSIQSRGLFGAIAGFIEGGWTGMVDGWYGYHHQNEQGSGYAADLKSTQNAIDEITNKVNSVIEKMNTQFTAVGKEFNHLEKRIENLNKKVDDGFLDIWTYNAELLVLLENERTLDYHDSNVKNLYEKVRSQLKNNAKEIGNGCFEFYHKCDNTCMESVKNGTYDYPKYSEEAKLNREEIDGVKLESTRIYQILAIYSTVASSLVLVVSLGAISFWMCSGHSCRICI

SEQ ID NO: 5633 - protein, 564 aa, Artificial Sequence
  derived and/or modified protein sequence (wt) from hemagglutinin__InfluenzaA__ADM14921
MKAILVVLLYTFATANADTLCIGYHANNSTDTVDTVLEKNVTVTHSVNLLEDKHNGKLCKLRGVAPLHLGKCNIAGWILGNPECESLSTASSWSYIVETSSSDNGTCYPGDFIDYEELREQLSSVSSFERFEIFPKTSSWPNHDSNKGVTAACPHAGAKSFYKNLIWLVKKGNSYPKLSKSYINDKGKEVLVLWGIHHPSTSADQQSLYQNADAYVFVGTSRYSKKFKPEIAIRPKVRDQEGRMNYYWTLVEPGDKITFEATGNLVVPRYAFAMERNAGSGIIISDTPVHDCNTTCQTPKGAINTSLPFQNIHPITIGKCPKYVKSTKLRLATGLRNVPSIQSRGLFGAIAGFIEGGWTGMVDGWYGYHHQNEQGSGYAADLKSTQNAIDEITNKVNSVIEKMNTQFTAVGKEFNHLEKRIENLNKKVDDGFLDIWTYNAELLVLLENERTLDYHDSNVKNLYEKVRSQLKNNAKEIGNGCFEFYHKCDNTCMESVKNGTYDYPKYSEEAKLNREEIDGVKLESTRIYQILAIYSTVASSLVLVVSLGAISFWMCSGHSCRICI

SEQ ID NO: 5634 - protein, 566 aa, Artificial Sequence; identical to SEQ ID NO: 3833
  derived and/or modified protein sequence (wt) from hemagglutinin__InfluenzaA__ADM14930

SEQ ID NO: 5635 - protein, 566 aa, Artificial Sequence
  derived and/or modified protein sequence (wt) from hemagglutinin__InfluenzaA__ADM14948
MKAILVVLLYTFATANADTLCIGYHANNSTDTVDTVLEKNVTVTHSVNLLEDKHNGKLCKLRGVAPLHLGKCNIAGWILGNPECESLSTASSWSYIVETSSSDNGTCYPGDFIDYEELREQLSSVSSFERFEIFPKTSSWPNHDSNKGVTAACPHAGAKGFYKNLIWLVKKGNSYPKLSKSYINDKGKEVLVLWGIHHPSTSADQQSLYQNADAYVFVGTSRYSRKFKPEIAIRPKVRDQEGRMNYYWTLVEPGDKITFEATGNLVVPRYAFAMERNAGSGIIISDTPVHDCNTTCQTPEGAINTSLPFQNIHPITIGKCPKYVKSTKLRLATGLRNVPSIQSRGLFGAIAGFIEGGWTGMVDGWYGYHHQNEQGSGYAADLKSTQNAIDEITNKVNSVIEKMNTQFTAVGKEFNHLEKRIENLNKKVDDGFLDIWTYNAELLVLLENERTLDYHDSNVKNLYEKVRSQLKNNAKEIGNGCFEFYHKCDNTCMESVKNGTYDYPKYSEEAKLNREEIDGVKLESTRIYQILAIYSTVASSLVLVVSLGAISFWMCSNGSLQCRICI

SEQ ID NO: 5636 - protein, 564 aa, Artificial Sequence
  derived and/or modified protein sequence (wt) from hemagglutinin__InfluenzaA__ADM14966
MKAILVVLLYTFATANADTLCIGYHANNSTDTVDTVLEKNVTVTHSVNILEDKHNGKLCKLRGVAPLHLGKCNIAGWILGNPECESLSTASSWSYIVETSSSDNGTCYPGDFIDYEELREQLSSVSSFERFEIFPKTSSWPNHDSNKGVTAACPHAGAKSFYKNLIWLVKKGNSYPKLSKSYINDKGKEVLVLWGIHHPSTSADQQSLYQNADAYVFVGSSRYSKKFKPEIAIRPKVRDQEGRMNYYWTLVEPGDKITFEATGNLVVPRYAFAMERNAGSGIIISDTPVHDCNTTCQTPKGAINTSLPFQNIHPITIGKCPKYVKSTKLRLATGLRNVPSIQSRGLFGAIAGFIEGGWTGMVDGWYGYHHQNEQGSGYAADLKSTQNAIDEITNKVNSVIEKMNTQFTAVGKEFNHLEKRIENLNKKVDDGFLDIWTYNAELLVLLENERTLDYHDSNVKNLYEKVRSQLKNNAKEIGNGCFEFYHKCDNTCMESVKNGTYDYPKYSEEAKLNREEIDGVKLESTRIYQILAIYSTVASSLVLVVSLGAISFWMCSGHSCRICI

SEQ ID NO: 5637 - protein, 566 aa, Artificial Sequence; identical to SEQ ID NO: 2849
  derived and/or modified protein sequence (wt) from hemagglutinin__InfluenzaA__ADM14975

SEQ ID NO: 5638 - protein, 566 aa, Artificial Sequence
  derived and/or modified protein sequence (wt) from hemagglutinin__InfluenzaA__ADM14985
MKAILVVLLYTFATANADTLCIGYHANNSTDTVDTVLEKNVTVTHSVNLLEDKHNGKLCKLRGVAPLHLGKCNIAGWILGNPECESLSTASSWSYIVETSSSDNGTCYPGDFIDYEELREQLSSVSSFERFEIFPKTSSWPNHDSNKGVTAACPHAGAKSFYKNLIWLVKKGNSYPKLSKSYINDKEKEVLVLWGIHHPSTSADQQSLYQNADAYVFVGTSRYSKKFKPEIAIRPKVRGQEGRMNYYWTLVEPGDKITFEATGNLVVPRYAFAMERNAGSGIVISDTPVHDCNTTCQTPKGAINTSLPFQNIHSITIGKCPKYVKSTKLRLATGLRNVPSIQSRGLFGAIAGFIEGGWTGMVDGWYGYHHQNEQGSGYAADLKSTQNAIDEITNKVNSVIEKMNTQFTAVGKEFNHLEKRIENLNKKVDDGFLDIWTYNAELLVLLENERTLDYHDSNVKNLYEKVRSQLKNNAKEIGNGCFEFYHKCDNTCMESVKNGTYDYPKYSEEAKLNREEIDGVKLESTRIYQILAIYSTVASSLVLVVSLGAISFWMCSNGSLQCRICI

SEQ ID NO: 5639 - protein, 566 aa, Artificial Sequence
  derived and/or modified protein sequence (wt) from hemagglutinin__InfluenzaA__ADM23841
MKAILVVLLYTFATANADTLCIGYHANNSTDTVDTVLEKNVTVTHSVNLLEDKHNGKLCKLRGVAPLHLGKCNIAGWILGNPECESLSTASSWSYIVETSSSDNGTCYPGDFIDYEELREQLSSVSSFERFEIFPKTSSWPNHDSNKGVTAACPHAGAKSFYKNLIWLVKKGNSYPKLSKSYINDKGKEVLVLWGIHHQSTSADQQSLYQNADAYVFVGTSRYSKKFKPEIAIRPKVRDQEGRMNYYWTLVEPGDKITFEATGNLVVPRYAFAMERNAGSGIIISDTPVHDCNTTCQTPKGAINTSLPFQNIHPITIGKCPKYVKSTKLRLATGLRNVPSIQSRGLFGAIAGFIEGGWTGMVDGWYGYHHQNEQGSGYAADLKSTQNAIDEITNKVNSVIEKMNTQFTAVGKEFNHLEKRIENLNKKVDDGFLDIWTYNAELLVLLENERTLDYHDSNVKNLYEKVRSQLKNNAKEIGNGCFEFYHKCDNTCMESVKNGTYDYPKYSEEAKLNREEIDGVKLESTRIYQILAIYSTVASSLVLVVSLGAISFWMCSNGSLQCRICI

SEQ ID NO: 5640 - protein, 566 aa, Artificial Sequence; identical to SEQ ID NO: 3833
  derived and/or modified protein sequence (wt) from hemagglutinin__InfluenzaA__ADM23843

SEQ ID NO: 5641 - protein, 566 aa, Artificial Sequence
  derived and/or modified protein sequence (wt) from hemagglutinin__InfluenzaA__ADM23844
MKAILVVLLYTFATANADTLCIGYHANNSTDTVDTVLEKNVTVTHSVNLLEDKHNGKLCKLRGVAPLHLGKCNIAGWILGNPECESLSTASSWSYIVETSISDNGTCYPGDFIDYEELREQLSSVSSFERFEIFPKTSSWPNHDSNKGVTTACPHAGAKGFYKNLIWLVKKGNSYPKLSKSYINDKGKEVLVLWGIHHQSTSADQQSLYQNADAYVFVGTSRYSKKFKPEIAIRPKVRDQEGRMNYYWTLVEPGDKITFEATGNLVVPRYAFAMERNAGSGIIISDTPVHDCNTTCQTPKGAINTSLPFQNIHPITIGKCPKYVKSTKLRLATGLRNVPSIQSRGLFGAIAGFIEGGWTGMVDGWYGYHHQNEQGSGYAADLKSTQNAIDKITNKVNSVIEKMNTQFTAVGKEFNHLEKRIENLNKKVDDGFLDIWTYNAELLVLLENERTLDYHDSNVKNLYEKVRSQLKNNAKEIGNGCFEFYHKCDNTCMESVKNGTYDYPKYSEEAKLNREEIDGVKLESTRIYQILAIYSTVASSLVLVVSLGAISFWMCSNGSLQCRICI

SEQ ID NO: 5642 - protein, 566 aa, Artificial Sequence
  derived and/or modified protein sequence (wt) from hemagglutinin__InfluenzaA__ADM23845
MKAILVVLLYTFATANADTLCIGYHANNSTDTVDTVLEKNVTVTHSVNLLEDKHNGKLCKLRGVAPLHLGKCNIAGWILGNPECESLSTASSWSYIVETSISDNGTCYPGDFIDYEELREQLSSVSSFERFEIFPKTSSWPNHDSNKGVTTACPHAGAKSFYKNLIWLVKKGNSYPKLSKSYINDKGKEVLVLWGIHHQSTSADQQSLYQNADAYVFVGTSRYSKKFKPEIAIRPKVRDQEGRMNYYWTLVEPGDKITFEATGNLVVPRYAFAMERNAGSGIIISDTPVHDCNTTCQTPKGAINTSLPFQNIHPITIGKCPKYVKSTKLRLATGLRNVPSIQSRGLFGAIAGFIEGGWTGMVDGWYGYHHQNEQGSGYAADLKSTQNAIDKITNKVNSVIEKMNTQFTAVGKEFNHLEKRIENLNKKVDDGFLDIWTYNAELLVLLENERTLDYHDSNVKNLYEKVRSQLKNNAKEIGNGCFEFYHKCDNTCMESVKNGTYDYPKYSEEAKLNREEIDGVKLESTRIYQILAIYSTVASSLVLVVSLGAISFWMCSNGSLQCRICI

SEQ ID NO: 5643 - protein, 566 aa, Artificial Sequence
  derived and/or modified protein sequence (wt) from hemagglutinin__InfluenzaA__ADM23846
MKAILVVLLYTFATANADTLCIGYHANNSTDTVDTVLEKNVTVTHSVNLLEDKHNGKLCKLRGVAPLHLGKCNIAGWILGNPECESLSTASSWSYIVETSISDNGTCYPGDFIDYEELREQLSSVSSFERFEIFPKTSSWPNHDSNKGVTTACPHAGAKSFYKNLIWLVKKGNSYPKLSKSYINDKGKEVLVLWGIHHPSTSADQQSLYQNADAYVFVGTSRYSKKFKPEIAIRPKVRDQEGRMNYYWTLVEPGDKITFEATGNLVVPRYAFAMERNAGSGIIISDTPVHDCNTTCQTPKGAINTSLPFQNIHPITIGKCPKYVKSTKLRLATGLRNVPSIQSRGLFGAIAGFIEGGWTGMVDGWYGYHHQNEQGSGYAADLKSTQNAIDKITNKVNSVIEKMNTQFTAVGKEFNHLEKRIENLNKKVDDGFLDIWTYNAELLVLLENERTLDYHDSNVKNLYEKVRSQLKNNAKEIGNGCFEFYHKCDNTCMESVKNGTYDYPKYSEEAKLNREEIDGVKLESTRIYQILAIYSTVASSLVLVVSLGAISFWMCSNGSLQCRICI

SEQ ID NO: 5644 - protein, 566 aa, Artificial Sequence
  derived and/or modified protein sequence (wt) from hemagglutinin__InfluenzaA__ADM23847
MKAILVVLLYTFATANADTLCIGYHANNSTDTVDTVLEKNVTVTHSVNLLEDKHNGKLCKLRGVAPLHLGKCNIAGWILGNPECESLSTASSWSYIVETSISDNGTCYPGDFIDYEELREQLSSVSSFERFEIFPKTSSWPNHDSNKGVTTACPHAGAKGFYKNLIWLVKKGNSYPKLSKSYINDKGKEVLVLWGIHHQSTSADQQSLYQNADAYVFVGTSRYSKKFKPEIAIRPKVRDQEGRMNYYWTLVEPGDKITFEATGNLVVPRYAFAMERNVGSGIIISDTPVHDCNTTCQTPKGAINTSLPFQNIHPITIGKCPKYVKSTKLRLATGLRNVPSIQSRGLFGAIAGFIEGGWTGMVDGWYGYHHQNEQGSGYAADLKSTQNAIDKITNKVNSVIEKMNTQFTAVGKEFNHLEKRIENLNKKVDDGFLDIWTYNAELLVLLENERTLDYHDSNVKNLYEKVRSQLKNNAKEIGNGCFEFYHKCDNTCMESVKNGTYDYPKYSEEAKLNREEIDGVKLESTRIYQILAIYSTVASSLVLVVSLGAISFWMCSNGSLQCRICI

SEQ ID NO: 5645 - protein, 566 aa, Artificial Sequence
  derived and/or modified protein sequence (wt) from hemagglutinin__InfluenzaA__ADM23849
MKAILVVLLYTFATANADTLCIGYHANNSTDTVDTVLEKNVTVTHSVNLLEDKHNGKLCKLRGVAPLHLGKCNIAGWILGNPECESLSTASSWSYIVETSSSDNGTCYPGDFIDYEELREQLSSVSSFERFEIFPKTSSWPNHDSNKGVTAACPHAGAKSFYKNLIWLVKKGNSYPKLSKSYINDKGKEVLVLWGIHHQSTSADQQSLYQNADAYVFVGTSRYSKKFKPEIAIRPKVRDQEGRMNYYWTLVEPGDKITFEATGNLVVPRYAFAMERNAGSGIIISDTPVHDCNTTCQTPKGAINTSLPFQNIHPITIGKCPKYVKSTKLRLATGLRNVPSIQSRGLFGAIAGFIEGGWTGMVDGWYGYHHQNEQGSGYAADLKSTQNAIDKITNKVNSVIEKMNTQFTAVGKEFNHLEKRIENLNKKVDDGFLDIWTYNAELLVLLENERTLDYHDSNVKNLYEKVRSQLKNNAKEIGNGCFEFYHKCDNTCMESVKNGTYDYPKYSEEAKLNREEIDGVKLESTRIYQILAIYSTVASSLVLVVSLGAISFWMCSNGSLQCRICI

SEQ ID NO: 5646 - protein, 566 aa, Artificial Sequence
  derived and/or modified protein sequence (wt) from hemagglutinin__InfluenzaA__ADM23851
MEAILVVLLYTFATANADTLCIGYHANNSTDTVDTVLEKNVTVTHSVNLLEDKHNGKLCKLRGVAPLHLGKCNIAGWILGNPECESLSTASSWSYIVETSSSDNGTCYPGDFIDYEELREQLSSVSSFERFEIFPKTSSWPNHDSNKGVTAACPHAGAKSFYKNLIWLVKKGNSYPKLSKSYINDKGKEVLVLWGIHHQSTSADQQSLYQNADAYVFVGSSRYSKKFKPEIAIRPKVRDQEGRMNYYWTLVEPGDKITFEATGNLVVPRYAFAMERNAGSGIIISDTPVHDCNTTCQTPKGAINTSLPFHNIHPITIGKCPKYVKSTKLRLATGLRNVPSIQSRGLFGAIAGFIEGGWTGMVDGWYGYHHQNEQGSGYAADLKSTQNAIDEITNKVNSVIEKMNTQFTAVGKEFNHLEKRIENLNKKVDDGFLDIWTYNAELLVLLENERTLDYHDSNVKNLYEKVRSQLKNNAKEIGNGCFEFYHKCDNTCMESVKNGTYDYPKYSEEAKLNREKIDGVKLESTRIYQILAIYSTVASSLVLVVSLGAISFWMCSNGSLQCRICI

SEQ ID NO: 5647 - protein, 566 aa, Artificial Sequence
  derived and/or modified protein sequence (wt) from hemagglutinin__InfluenzaA__ADM23852
MEAILVVLLYTFATANADTLCIGYHANNSTDTVDTVLEKNVTVTHSVNLLEDKHNGKLCKLRGVAPLHLGKCNIAGWILGNPECESLSTASSWSYIVETSSSDNGTCYPGDFIDYEELREQLSSVSSFERFEIFPKTSSWPNHDSNKGVTAACPHAGAKSFYKNLIWLVKKGNSYPKLSKSYINDKGKEVLVLWGIHHPSTSADQQSLYQNADAYVFVGSSRYSKKFKPEIAIRPKVRDQEGRMNYYWTLVEPGDKITFEATGNLVVPRYAFAMERNAGSGIIISDTPVHDCNTTCQTPKGAINTSLPFHNIHPITIGKCPKYVKSTKLRLATGLRNVPSIQSRGLFGAIAGFIEGGWTGMVDGWYGYHHQNEQGSGYAADLKSTQNAIDEITNKVNSVIEKMNTQFTAVGKEFNHLEKRIENLNKKVDDGFLDIWTYNAELLVLLENERTLDYHDSNVKNLYEKVRSQLKNNAKEIGNGCFEFYHKCDNTCMESVKNGTYDYPKYSEEAKLNREKIDGVKLESTRIYQILAIYSTVASSLVLVVSLGAISFWMCSNGSLQCRICI

SEQ ID NO: 5648 - protein, 566 aa, Artificial Sequence; identical to SEQ ID NO: 5647
  derived and/or modified protein sequence (wt) from hemagglutinin__InfluenzaA__ADM23853

SEQ ID NO: 5649 - protein, 566 aa, Artificial Sequence; identical to SEQ ID NO: 2911
  derived and/or modified protein sequence (wt) from hemagglutinin__InfluenzaA__ADM23855

SEQ ID NO: 5650 - protein, 566 aa, Artificial Sequence
  derived and/or modified protein sequence (wt) from hemagglutinin__InfluenzaA__ADM23856
MKAILVVLLYTFATVNADTLCIGYHANNSTDTVDTVLEKNVTVTHSVNLLEDKHNGKLCKLRGVAPLHLGKCNIAGWILGNPECESLSTASSWSYIVETSSSDNGTCYPGDFIDYEELREQLSSVSSFERFEIFPKTSSWPNHDSNKGVTAACPHAGAKSFYKNLIWLVKKGNSYPKLSKSYINDKRKEVLVLWGIHHQSTSADQQSLYQNADAYVFVGTSRYSKKFKPEIAIRPKVRDQEGRMNYYWTLVEPGDKITFEATGNLVVPRYAFAMERNAGSGIIISDTPVHDCNTTCQTPKGAINTSLPFQNIHPITIGKCPKYVKSTKLRLATGLRNVPSIQSRGLFGAIAGFIEGGWTGMVDGWYGYHHQNEQGSGYAADLKSTQNAIDKITNKVNSVIEKMNTQFTAVGKEFNHLEKRIENLNKKVDDGFLDIWTYNAELLVLLENERTLDYHDSNVKNLYEKVRSQLKNNAKEIGNGCFEFYHKCDNTCMESVKNGTYDYPKYSEEAKLNREEIDGVKLESTRIYQILAIYSTVASSLVLVVSLGAISFWMCSNGSLQCRICI

SEQ ID NO: 5651 - protein, 566 aa, Artificial Sequence; identical to SEQ ID NO: 2669
  derived and/or modified protein sequence (wt) from hemagglutinin__InfluenzaA__ADM25945

SEQ ID NO: 5652 - protein, 566 aa, Artificial Sequence; identical to SEQ ID NO: 2911
  derived and/or modified protein sequence (wt) from hemagglutinin__InfluenzaA__ADM25948

SEQ ID NO: 5653 - protein, 566 aa, Artificial Sequence; identical to SEQ ID NO: 4698
  derived and/or modified protein sequence (wt) from hemagglutinin__InfluenzaA__ADM26264

SEQ ID NO: 5654 - protein, 566 aa, Artificial Sequence; identical to SEQ ID NO: 4698
  derived and/or modified protein sequence (wt) from hemagglutinin__InfluenzaA__ADM26265

SEQ ID NO: 5655 - protein, 566 aa, Artificial Sequence; identical to SEQ ID NO: 4698
  derived and/or modified protein sequence (wt) from hemagglutinin__InfluenzaA__ADM26266

SEQ ID NO: 5656 - protein, 566 aa, Artificial Sequence; identical to SEQ ID NO: 4698
  derived and/or modified protein sequence (wt) from hemagglutinin__InfluenzaA__ADM26267

SEQ ID NO: 5657 - protein, 566 aa, Artificial Sequence
  derived and/or modified protein sequence (wt) from hemagglutinin__InfluenzaA__ADM26268
MKAILVVLLYTFTTANADTLCIGYHANNSTDTVDTVLEKNVTVTHSVNLLEDKHNGKLCKLRGVAPLHLGKCNIAGWILGNPECESLSTASSWSYIVETSSSDNGTCYPGDFIDYEELREQLSSVSSFERFEIFPKTSSWPNHDSNKGVTAACPHAGAKSFYKNLIWLVKKGNSYPKLSKSYINDKGKEVLVLWGIHHPSTSADQQSLYQNADAYVFVGTSRYSKKFKPEIAIRPKVREQEGRMNYYWTLVEPGDKITFEATGNLVVPRYAFAMERNAGSGIIISDTPVHDCNTTCQTPKGAINTSLPFQNIHSITIGKCPKYVKSTKLRLATGLRNVPSIQSRGLFGAIAGFIEGGWTGMVDGWYGYHHQNEQGSGYAADLKSTQNAIDEITNKVNSVIEKMNTQFTAVGKEFNHLEKRIENLNKKVDDGFLDIWTYNAELLVLLENERTLDYHDSNVKNLYEKVRSQLKNNAKEIGNGCFEFYHKCDNTCMESVKNGTYDYPKYSEEAKLKREEIDGVKLESTRIYQILAIYSTVASSLVLVVSLGAISFWMCSNGSLQCRICI

SEQ ID NO: 5658 - protein, 566 aa, Artificial Sequence
  derived and/or modified protein sequence (wt) from hemagglutinin__InfluenzaA__ADM26269
MKTILVVLLYTFTTANADTLCIGYHANNSTDTVDTVLEKNVTVTHSVNLLEDKHNGKLCKLRGVAPLHLGKCNIAGWILGNPECESLSTASSWSYIVETSSSDNGTCYPGDFIDYEELREQLSSVSSFERFEIFPKTSSWPNHDSNKGVTAACPHAGAKSFYKNLIWLVKKGNSYPKLSKSYINDKGKEVLVLWGIHHPSTSADQQSLYQNADAYVFVGTSRYSKKFKPEIAIRPKVREQEGRMNYYWTLVEPGDKITFEATGNLVVPRYAFAMERNAGSGIIISDTPVHDCNTTCQTPKGAINTSLPFQNIHSITIGKCPKYVKSTKLRLATGLRNVPSIQSRGLFGAIAGFIEGGWTGMVDGWYGYHHQNEQGSGYAADLKSTQNAIDEITNKVNSVIEKMNTQFTAVGKEFNHLEKRIENLNKKVDDGFLDIWTYNAELLVLLENERTLDYHDSNVKNLYEKVRSQLKNNAKEIGNGCFEFYHKCDNTCMESVKNGTYDYPKYSEEAKLKREEIDGVKLESTRIYQILAIYSTVASSLVLVVSLGAISFWMCSNGSLQCRICI

SEQ ID NO: 5659 - protein, 566 aa, Artificial Sequence
  derived and/or modified protein sequence (wt) from hemagglutinin__InfluenzaA__ADM26270
MKAILVVLLYTFTTANADTLCIGYHANNSTDTVDTVLEKNVTVTHSVNLLEDKHNGKLCKLRGVAPLHLGKCNIAGWILGNPECESLSTASSWSYIVETSSSDNGTCYPGDFIDYEELREQLSSVSSFERFEIFPKTSSWPNHDSNKGVTAACPHAGAKSFYKNLIWLVKKGNSYPKLSKSYINDKGKEVLVLWGIHHPSTSADQQSLYQNADAYVFVGTSRYSKKFKPEIAIRPKVREQEGRMNYYWTLVEPGDKITFEATGNLVVPRYAFAMERNAGSGIIISDTPVHDCNTTCQTPKGAINTSLPFQNIHSITIGRCPKYVKSTKLRLATGLRNVPSIQSRGLFGAIAGFIEGGWTGMVDGWYGYHHQNEQGSGYAADLKSTQNAIDEITNKVNSVIEKMNTQFTAVGKEFNHLEKRIENLNKKVDDGFLDIWTYNAELLVLLENERTLDHHDSNVKNLYEKVRSQLKNNAKEIGNGCFEFYHKCDNTCMESVKNGTYDYPKYSEEAKLNREEIDGVKLESTRIYQILAIYSTVASSLVLVVSLGAISFWMCSNGSLQCRICI

SEQ ID NO: 5660 - protein, 566 aa, Artificial Sequence; identical to SEQ ID NO: 4698
  derived and/or modified protein sequence (wt) from hemagglutinin__InfluenzaA__ADM26271

SEQ ID NO: 5661 - protein, 566 aa, Artificial Sequence
  derived and/or modified protein sequence (wt) from hemagglutinin__InfluenzaA__ADM26272
MKAILVVLLYTFTTANADTLCIGYHANNSTDTVDTVLEKNVTVTHSVNLLEDKHNGKLCKLRGVAPLHLGKCNIAGWILGNPECESLSTASSWSYIVETSSSDNGTCYPGDFIDYEELREQLSSVSSFERFEIFPKTSSWPNHDSNKGVTAACPHAGAKSFYKNLIWLVKKGNSYPKLSKSYINDKGKEVLVLWGIHHPSTSADQQSLYQNADAYVFVGTSRYSKKFKPEIAIRPKVREQEGRMNYYWTLVEPGDKITFEATGNLVVPRYAFAMERNAGSGIIISDTPVHDCNTTCQTPKGAINTSLPFQNIHSITIGRCPKYVKSTKLRLATGLRNVPSIQSRGLFGAIAGFIEGGWTGMVDGWYGYHHQNEQGSGYAADLKSTQNAIDEITNKVNSVIEKMNTQFTAVGKEFNHLEKRIENLNKKVDDGFLDIWTYNAELLVLLENERTLDYHDSNVKNLYEKVRSQLKNNAKEIGNGCFEFYHKCDNTCMESVKNGTYDYPKYSEEAKLNREEIDGVKLESTRIYQILAIYSTVASSLVLVVSLGAISFWMCSNGSLQCRICI

SEQ ID NO: 5662 - protein, 566 aa, Artificial Sequence
  derived and/or modified protein sequence (wt) from hemagglutinin__InfluenzaA__ADM26274
MKAILVVLLYTFTTANADTLCIGYHANNSTDTVDTVLEKNVTVTHSVNLLEDKHNGKLCKLRGVAPLHLGKCNIAGWILGNPECESLSTASSWSYIVETSSSDNGTCYPGDFIDYEELREQLSSVSSFERFEIFPKTSSWPNHDSNKGVTAACPHAGAKSFYKNLIWLVKKGNSYPKLSKSYINDKGKEVLVLWGIHHPSTSADQQSLYQNADAYVFVGTSRYSKKFKPEIAIRPKVREQEGRMNYYWTLVEPGDKITFEATGNLVVPRYAFAMERNAGSGIIISDTPVHDCNTTCQTPKGAINTSLPFQNIHSITIGKCPKYVKSTKLRLATGLRNVPSIQSRGLFGAIAGFIEGGWTGMVDGWYGYHHQNEQGSGYAADLKSTQNAIDEITNKVNSVIEKMNTQFTAVGKEFNHLEKRIENLNKKVDDGFLDIWTYNAELLVLLENERTLDYHDSNVKDLYEKVRSQLKNNAKEIGNGCFEFYHKCDNTCMESVKNGTYDYPKYSEEAKLNREEIDGVKLESTRIYQILAIYSTVASSLVLVVSLGAISFWMCSNGSLQCRICI

SEQ ID NO: 5663 - protein, 566 aa, Artificial Sequence; identical to SEQ ID NO: 4698
  derived and/or modified protein sequence (wt) from hemagglutinin__InfluenzaA__ADM26276

SEQ ID NO: 5664 - protein, 566 aa, Artificial Sequence
  derived and/or modified protein sequence (wt) from hemagglutinin__InfluenzaA__ADM26277
MKAILVVLLYTFTTANADTLCIGYHANNSTDTVDTVLEKNVTVTHSVNLLEDKHNGKLCKLRGVAPLHLGKCNIAGWILGNPECESLSTASSWSYIVETSSSDNGTCYPGDFIDYEELREQLSSVSSFERFEIFPKTSSWPNHDSNKGVTAACPHAGAKSFYKNLIWLVKKGNSYPKLSKSYINDKGKEVLVLWGIHHPSTSADQQSLYQNADAYVFVGTSRYSKKFKPEIAIRPKVREQEGRMNYYWTLVEPGDKITFEATGNLVVPRYAFAMERNAGSGIIISDTPVHDCNTTCQTPKGAINTSLPFQNIHSITIGKCPKYVKSTKLRLATGLRNVPSIQSRGLFGAIAGFIEGGWTGMVDGWYGYHHQNEQGSGYAADLKSTQNAIDEITNKVNSVIEKMNTQFTAVGKEFNHLEKRIENLNKKVDDGFLDIWTYNAELLVLLENERTLDYHDSNVKNLYEKVRSQLKNNAKEIGNGCFEFYHKCDNTCMESVKNGTYDYPKYSEEAKLNREEIDGVKLESTRIYQILAIYSTVASSLVLIVSLGAISFWMCSNGSLQCRICI

SEQ ID NO: 5665 - protein, 566 aa, Artificial Sequence
  derived and/or modified protein sequence (wt) from hemagglutinin__InfluenzaA__ADM26278
MKAILVVLLYTFTTANADTLCIGYHANNSTDTVDTVLEKNVTVTHSVNLLEDKHNGKLCKLRGVAPLHLGKCNIAGWILGNPECESLSTASSWSYIVETSSSDNGTCYPGDFIDYEELREQLSSVSSFERFEIFPKTSSWPNHDSNKGVTAACPHAGAKSFYKNLIWLVKKGNSYPKLSKSYINDKGKEVLVLWGIHHPSTSADQQSLYQNADAYVSVGTSRYSKKFKPEIAIRPKVREQEGRMNYYWTLVEPGDKITFEATGNLVVPRFAFAMERNAGSGIIISDTPVHDCNTTCQTPKGAINTSLPFQNIHSITIGKCPKYVKSTKLRLATGLRNVPSIQSRGLFGAIAGFIEGGWTGMVDGWYGYHHQNEQGSGYAADLKSTQNAIDEITNKVNSVIEKMNTQFTAVGKEFNHLEKRIENLNKKVDDGFLDIWTYNAELLVLLENERTLDYHDSNVKNLYEKVRSQLKNNAKEIGNGCFEFYHKCDNTCMESVKNGTYDYPKYSEEAKLKREEIDGVKLESTRIYQILAIYSTVASSLVLVVSLGAISFWMCSNGSLQCRICI

SEQ ID NO: 5666 - protein, 566 aa, Artificial Sequence
  derived and/or modified protein sequence (wt) from hemagglutinin__InfluenzaA__ADM26279
MKAILVVLLYTFTTANADTLCIGYHANNSTDTVDTVLEKNVTVTHSVNLLEDKHNGKLCKLRGVAPLHLGKCNIAGWILGNPECESLSTASSWSYIVETSSSDNGTCYPGDFIDYEELREQLSSVSSFERFEIFPKTSSWPNHDSNKGVTAACPHAGAKSFYKNLIWLVKKGNSYPKLSKSYINDKGKEVLVLWGIHHPSTSADQQSLYQNADAYVFVGTSRYSKKFKPEIAIRPKVRGQEGRMNYYWTLVEPGDKITFEATGNLVVPRYAFAMERNAGSGIIISDTPVHDCNTTCQTPKGAINTSLPFQNIHSITIGKCPKYVKSTKLRLATGLRNVPSIQSRGLFGAIAGFIEGGWTGMVDGWYGYHHQNEQGSGYAADLKSTQNAIDEITNKVNSVIEKMNTQFTAVGKEFNHLEKRIENLNKKVDDGFLDIWTYNAELLVLLENERTLDYHDSNVKNLYEKVRSQLKNNAKEIGNGCFEFYHKCDNTCMESVKNGTYDYPKYSEEAKLNREEIDGVKLESTRIYQILAIYSTVASSLVLVVSLGAISFWMCSNGSLQCRICI

SEQ ID NO: 5667 - protein, 566 aa, Artificial Sequence; identical to SEQ ID NO: 4698
  derived and/or modified protein sequence (wt) from hemagglutinin__InfluenzaA__ADM26280

SEQ ID NO: 5668 - protein, 566 aa, Artificial Sequence
  derived and/or modified protein sequence (wt) from hemagglutinin__InfluenzaA__ADM26281
MKAILVVLLYTFATANADTLCIGYHANNSTDTVDTVLEKNVTVTHSVNLLEDKHNGKLCKLRGVAPLHLGKCNIAGWILGNPECESLSTASSWSYIVETSSSDNGTCYPGDFIDYEELREQLSSVSSFERFEIFPKTSSWPNHDSNKGVTAACPHAGAKSFYKNLIWLVKKGNSYPKLSKSYINDKGKEVLVLWGIHHPSTSADQQSLYQNADAYVFVGTSRYSKKFKPEIAIRPKVRDQEGRMNYYWTLVEPGDKITFEATGNLVVPRYAFAMERNAGSGIIISDTPVHDCNTTCQTPKGAINTSLPFQSIHPITIGKCPKYVKSTKLRLATGLRNVPSIQSRGLFGAIAGFIEGGWTGMVDGWYGYHHQNEQGSGYAADLKSTQNAIDKITNKVNSVIEKMNTQFTAVGKEFNHLERRIENLNKKVDDGFLDIWTYNAELLVLLENERTLDYHDSNVKNLYEKVRSQLKNNAKEIGNGCFEFYHKCDNTCMESVKNGTYDYPKYSEEAKLNREEIDGVKLESTRVYQILAIYSTVASSLVLVVSLGAISFWMCSNGSLQCRICI

SEQ ID NO: 5669 - protein, 566 aa, Artificial Sequence
  derived and/or modified protein sequence (wt) from hemagglutinin__InfluenzaA__ADM26282
MKAILVVLLYTFTTANADTLCIGYHANNSTDTVDTVLEKNVTVTHSVNLLEDKHNGKLCKLRGVAPLHLGKCNIAGWILGNPECESLSTASSWSYIVETSSSDNGTCYPGDFIDYEELREQLSSVSSFERFEIFPKTSSWPNHDSNKGVTAACPHAGAKSFYKNLIWLVKKGNSYPKLSKSYINDKGKEVLVLWGIHHPSTSADQQSLYQNADAYVFVGTSRYSKKFKPEIAIRPKVREQEGRMNYYWTLVEPGDKITFEATGNLVVPRYAFAMERNAGSGIIISDTPVHDCNTTCQTPKGAINTSLPFQNIHSITIGKCPKYVKSTKLRLATGLRNVPSIQSRGLFGAIAGFIEGGWTGMVDGWYGYHHQNEQGSGYAADLKSTQNAIDEITNKVNSVIEKMNTQFTAVGKEFNHLERRIENLNKKVDDGFLDIWTYNAELLVLLENERTLDYHDSNVKNLYEKVRSQLKNNAKEIGNGCFEFYHKCDNTCMESVKNGTYDYPKYSEEAKLNREEIDGVKLESTRIYQILAIYSTVASSLVLVVSLGAISFWMCSNGSLQCRICI

SEQ ID NO: 5670 - protein, 566 aa, Artificial Sequence
  derived and/or modified protein sequence (wt) from hemagglutinin__InfluenzaA__ADM26283
MKAILVVLLYTFTTANADTLCIGYHANNSTDTVDTVLEKNVTVTHSVNLLEDKHNGKLCKLRGVAPLHLGKCNIAGWILGNPECESLSTASSWSYIVETSSSDNGTCYPGDFIDYEELREQLSSVSSFERFEIFPKTSSWPNHDSNKGVTAACPHAGAKSFYKNLIWLVKKGNSYPKLSKSYINDKGKEVLVLWGIHHPSTSADQQSLYQNADAYVFVGTSRYSKKFKPEIAIRPKVREQEGRMNYYWTLVEPGDKITFEATGNLVVPRYAFAMERNAGSGIIISDTPVHDCNTTCQTPKGAINTSLPFQNIHSITIGKCPKYVKSTKLRLATGLRNVPSIQSRGLFGAIAGFIEGGWTGMVDGWYGYHHQNEQGSGYAADLKSTQNAIDEITNKVNSVIEKMNTQFTAVGKEFNHLEKRIENLNKKVDDGFLDIWTYNAELLVLLENERTLDYHDSNVKNLYEKVRSQLKNNAKEIGNGCFEFYHKCDNTCMESVKNGTYDYPKYSEEAKLNREKIDGVKLESTRIYQILAIYSTVASSLVLVVSLGAISFWMCSNGSLQCRICI

SEQ ID NO: 5671 - protein, 566 aa, Artificial Sequence; identical to SEQ ID NO: 4698
  derived and/or modified protein sequence (wt) from hemagglutinin__InfluenzaA__ADM26284

SEQ ID NO: 5672 - protein, 566 aa, Artificial Sequence; identical to SEQ ID NO: 4698
  derived and/or modified protein sequence (wt) from hemagglutinin__InfluenzaA__ADM26285

SEQ ID NO: 5673 - protein, 566 aa, Artificial Sequence
  derived and/or modified protein sequence (wt) from hemagglutinin__InfluenzaA__ADM26784
MKTIIALSYILCLVFAQKLPGNDNSTATLCLGHHAVPNGTIVKTITNDQIEVTNATELVQSSSTGEICDSPHQILDGENCTLIDALLGDPQCDGFQNKKWDLFVERSKAYSNCYPYDVPDYASLRSLVASSGTLEFNNESFNWTGVTQNGTSSACMRRSNNSFFSRLNWLTHLKFKYPALNVTMPNNEQFDKLYIWGVHHPGTDNDQIFLYAQASGRITVSTKRSQQTVIPNIGSRPRVRNIPSRISIYWTIVKPGDILLINSTGNLIAPRGYFKIRSGKSSIMRSDAPIGKCNSECITPNGSIPNDKPFQNVNRITYGACPRYVKQNTLKLATGMRNVPEKQTRGIFGAIAGFIENGWEGMVDGWYGFRHQNSEGRGQAADLKSTQAAIDQINGKLNRLIGKTNEKFHQIEKEFSEVEGRIQDLEKYVEDTKIDLWSYNAELLVALENQHTIDLTDSEMNKLFEKTKKQLRENAEDMGNGCFKIYHKCDNACIGSIRNGTYDHDVYRDEALNNRFQIKGVELKSGYKDWILWISFAISCFLLCVALLGFIMWACQKGNIRCNICI

SEQ ID NO: 5674 - protein, 566 aa, Artificial Sequence; identical to SEQ ID NO: 2434
  derived and/or modified protein sequence (wt) from hemagglutinin__InfluenzaA__ADM26795

SEQ ID NO: 5675 - protein, 566 aa, Artificial Sequence
  derived and/or modified protein sequence (wt) from hemagglutinin__InfluenzaA__ADM26817
MKTTIALSHILCLVFAQKLPGNDNSTATLCLGHHAVPNGTIVKTITNDQIEVTNATELVQSSSAGEICDSPHQILDGENCTLIDALLGDPQCDGFQNKKWDLFVERRRAYSNCYPYDVPDYASLRSLVASSGTLEFNNESFNWTGVTQNGTSSACIRRSNNSFFSRLNWLTHLNFKYPALNVTMPNNEQFDKLYIWGVHHPGTDKDQIFLYAQASGRITVSTKRSQQAVIPNIGSRPRVRNIPSRISIYWTIVKPGDILLINSTGNLIAPRGYFKIRSGKSSIMRSDAPIGKCNSECITPNGSIPNDKPFQNVNRITYGACPRYVKQSTLKLATGMRNVPEKQTRGIFGAIAGFIENGWEGMVDGWYGFRHQNSEGRGQAADLKSTQAAIDQINGKLNRLIGKTNEKFHQIEKEFSEVEGRIQDLEKYVEDTKIDLWSYNAELLVALENQHTIDLTDSEMNKLFEKTKKQLRENAEDMGNGCFKIYHKCDNACIGSIRNGTYDHDVYRDEALNNRFQIKGVELKSGYKDWILWISFAISCFLLCVALLGFIMWACQKGNIRCNICI

SEQ ID NO: 5676 - protein, 567 aa, Artificial Sequence
  derived and/or modified protein sequence (wt) from hemagglutinin__InfluenzaA__ADM31424
MEKIVLLFTTISLVKSDHICIGYHANNSTEQVDTIMEKNVTVTHAQDILEKTHNGKLCDLNGVKPLILKDCSVAGWLLGNPLCDEFINVPEWSYIVEKANPANDLCYPGNFNDYEELKHLLSRINHFEKIQIIPKDSWSDHEASLGVSAACSYQGNSSFFRNVVWLIKKDNAYPTIKKDYNNTNQEDLLVLWGIHHPNDEAEQTRLYQNPTTYISIGTSTLNQRLVPKIATRSKINGQSGRIDFFWTILKPNDAIHFESNGNFIAPEYAYKIVKKGDSTIMKSEVEYGNCNTRCQTPIGAINSSMPFHNIHPLTIGECPKYVKSNKLVLATGLRNSPQRERRRKRGLFGAIAGFIEGGWQGMVDGWYGYHHSNEQGSGYAADKESTQKAIDGVTNKVNSIIDKMNTQFEAVGREFNNLERRIENLNKKMEDGFLDVWTYNAELLVLMENERTLDFHDSNVKNLYDKVRLQLKDNAKELGNGCFEFYHKCNNECMESVRNGTYDYPQYSEEARLKREEISGVKLESIGIYQILSIYSTVASSLVLAIMMAGLSLWMCSNGSLQCRICI

SEQ ID NO: 5677 - protein, 566 aa, Artificial Sequence; identical to SEQ ID NO: 5270
  derived and/or modified protein sequence (wt) from hemagglutinin__InfluenzaA__ADM31478

SEQ ID NO: 5678 - protein, 566 aa, Artificial Sequence
  derived and/or modified protein sequence (wt) from hemagglutinin__InfluenzaA__ADM31488
MKAILVVLLYTFATANADTLCIGYHANNSTDTVDTVLEKNVTVTHSVNILEDKHNGKLCKLRGVAPLHLGKCNIAGWILGNPECESLSTASSWSYIVETSSSDNGTCYPGDFIDYEELREQLSSVSSFERFEIFPKTSSWPNHDSNKGVTAACPHAGAKSFYKNLIWLVKKGNSYPKLSKSYINDKGKEVLVLWGIHHPSTSADQQSLYQNADAYVFVGSSKYSKKFKPEIAIRPKVRDQEGRMNYYWTLVEPGDKITFEATGNLVVPRYAFAMERNAGSGIIISDTPVHDCNTTCQTPKGAINTSLPFQNIHPITIGKCPKYVKSTKLRLATGLRNVPSIQSRGLFGAIAGFIEGGWTGMVDGWYGYHHQNEQGSGYAADLKSTQNAIDEITNKVNSVIEKMNTQFTAVGKEFNHLEKRIENLNKKVDDGFLDIWTYNAELLVLLENERTLDYHDSNVKNLYEKVRSQLKNNAKEVGNGCFEFYHKCDNTCMESVKNGTYDYPKYSEEAKLNREEIDGVKLESTRIYQILAIYSTAASSLVLVVSLGAISFWMCSNGSLQCRICI

SEQ ID NO: 5679 - protein, 566 aa, Artificial Sequence
  derived and/or modified protein sequence (wt) from hemagglutinin__InfluenzaA__ADM31498
MKAILVVLLYTFATANADTLCIGYHANNSTDTVDTVLEKNVTVTHSVNLLEDKHNGKLCKLRGVAPLHLGKCNIAGWILGNPECESLSTASSWSYIVETSSSDNGTCYPGDFIDYEELREQLSSVSSFERFEIFPKTSSWPNHDSNKGVTAACPHAGAKSFYKNLIWLVKKGNSYPKLSKSYINDKGKEVLVLWGIHHPSTSADQQSLYQNADAYVFVGTSRYSKKFKPEIAIRPKVRDQEGRMNYYWTLVKPGDKITFEATGNLVVPRYAFAMERNAGSGIIISDTPVHDCNTTCQTPKGAINTSLPFQNIHPITIGKCPKYVKSTKLRLATGLRNVPSIQSRGLFGAIAGFIEGGWTGMVDGWYGYHHQNEQGSGYAADLKSTQHAIDEITNKVNSVIEKMNTQFTAVGKEFNHLEKRIENLNKKVDDGFLDIWTYNAELLVLLENERTLDYHDSNVKNLYEKVRSQLKNNAKEIGNGCFEFYHKCDNTCMESVKNGTYDYPKYSEEAKLNREEIDGVKLESTRIYQILAIYSTVASSLVLVVSLGAISFWMCSNGSLQCRICI

SEQ ID NO: 5680 - protein, 566 aa, Artificial Sequence
  derived and/or modified protein sequence (wt) from hemagglutinin__InfluenzaA__ADM31508
MKAILVVLLYTFATANADTLCIGYHANNSTDTVDTVLEKNVTVTHSVNLLEDKHNGKLCKLRGVAPLHLGKCNIAGWILGNPECESLSTASSWSYIVETSSSDNGTCYPGDFIDYEELREQLSSVSSFERFEIFPKTRSWPNHDSNKGVTAACPHAGAKSFYKSLIWLVKKGNSYPKLSKSYINDKGKEVLVLWGIHHPSTSADQQSLYQNADAYVFVGTSRYSKKFKPEIAIRPKVRDQEGRMNYYWTLVEPGDKITFEATGNLVVPRYAFAMERNAGSGIIISDTPVHDCNTTCQTPKGAINTSLPFQNIHPITIGKCPKYVKSTKLRLATGLRNVPSIQSRGLFGAIAGFIEGGWTGMVDGWYGYHHQNEQGSGYAADLKSTQHAIDEITNKVNSVIEKMNTQFTAVGKEFNHLEKRIENLNKKVDDGFLDIWTYNAELLVLLENERTLDYHDSNVKNLYEKVRSQLKNNAKEIGNGCFEFYHKCDNTCMESVKNGTYDYPKYSEEAKLNREEIDGVKLESTRIYQILAIYSTVASSLVLVVSLGAISFWMCSNGSLQCRICI

SEQ ID NO: 5681 - protein, 566 aa, Artificial Sequence
  derived and/or modified protein sequence (wt) from hemagglutinin__InfluenzaA__ADM31518
MKAILVVLLYTFATANADTLCIGYHANNSTDTVDTVLEKNVTVTHSVNLLEDKHNGKLCKLRGVAPLHLGKCNIAGWILGNPECESLSTASSWSYIVETSSSDNGTCYPGDFIDYEELREQLSSVSSFERFEIFPKTSSWPNHDSNKGVTAACPHAGAKSFYKNLIWLVKKGNSYPKLSKSYVNDKGKEVLVLWGIHHPSTSADQQSLYQNADAYVFVGTSRYSKKFKPEIAIRPKVRDQEGRMNYYWTLVEPGDKITFEATGNLVVPRYAFAMERNAGSGIIISDTPVHDCNTTCQTPKGAINTSLPFQNIHPITIGKCPKYVKSTKLRLATGLRNIPSIQSRGLFGAIAGFIEGGWTGMVDGWYGYHHQNEQGSGYAADLKSTQNAIDEITNKVNSVIEKMNTQFTAVGKEFNHLEKRIENLNKKVDDGFLDIWTYNAELLVLLENERTLDYHDSNVKNLYEKVRSQLKNNAKEIGNGCFEFYHKCDNTCMESVKNGTYDYPKYSEEAKLNREEIDGVKLESTRIYQILAIYSTVASSLVLVVSLGAISFWMCSNGSLQCRICI

SEQ ID NO: 5682 - protein, 566 aa, Artificial Sequence
  derived and/or modified protein sequence (wt) from hemagglutinin__InfluenzaA__ADM31528
MKAILVVLLYTFATANADTLCIGYHANNSTDTVDTVLEKNVTVTHSVNLLEDKHNGKLCKLRGVAPLHLGKCNIAGWILGNPECESLSTASSWSYIVETSSSDNGTCYPGDFIDYEELREQLSSVSSFERFEMFPKTSSWPNHDSNKGVTAACPHAGAKSFYKNLIWLVKKGNSYPKLSKSYINDKGKEVLVLWGIHHPSTSADQQSLYQNADAYVFVGTSRYSKKFKPEIAIRPKVRDQEGRMNYYWTLVEPGDKITFEATGNLVVPRYAFAMERNAGSGIIISDTPVHDCNTTCQTPKGAINTSLPFQNIHPITIGKCPKYVKSTKLRLATGLRNVPSIQSRGLFGAIAGFIEGGWTGMVDGWYGYHHQNEQGSGYAADLKSTQNAIDKITNKVNSVIEKMNTQFTAVGKEFNHLEKRIENLNKKVDDGFLDIWTYNAELLVLLENERTLDYHDSNVKNLYEKVRSQLKNNAKEVGNGCFEFYHKCDNTCMESVKNGTYDYPKYSEEAKLNREEIDGVKLESTRIYQILAIYSTVASSLVLVVSLGAISFWMCSNGSLQCRICI

SEQ ID NO: 5683 - protein, 566 aa, Artificial Sequence
  derived and/or modified protein sequence (wt) from hemagglutinin__InfluenzaA__ADM31538
MKAILVVLLYTFATANADTLCIGYHANNSTDTVDTVLEKNVTVTHSVNLLEDKHDGKLCKLRGVAPLHLGKCNIAGWILGNPECESLSTASSWSYIVETSSSDNGTCYPGDFIDYEELREQLSSVSSFERFEIFPKTSSWPNHDSNKGVTAACPHAGAKSFYKNLIWLVKKGNSYPKLSKSYINDKGKEVLVLWGIHHPSTSADQQSLYQNADAYVFVGTSRYSKKFKPEIAIRPKVRDQEGRMNYYWTLVEPGDKITFEATGNLVVPRYAFAMERNAGSGIIISDTPVHDCNTTCQTPKGAINTSLPFQNIHPITIGKCPKYVKSTKLRLATGLRNIPSIQSRGLFGAIAGFIEGGWTGMVDGWYGYHHQNEQGSGYAADLKSTQNAIDKITNKVNSVIEKMNTQFTAVGKEFNHLEKRIENLNKKVDDGFLDIWTYNAELLVLLENERTLDYHDSNVKNLYEKVRSQLKNNAKEIGNGCFEFYHKCDNTCMESVKNGTYDYPKYSEEAKLNREEIDGVKLESTRIYQILAIYSTVASSLVLVVSLGAISFWMCSNGSLQCRICI

SEQ ID NO: 5684 - protein, 566 aa, Artificial Sequence
  derived and/or modified protein sequence (wt) from hemagglutinin__InfluenzaA__ADM31548
MKAILVVLLYTFATANADTLCIGYHANNSTDTVDTVLEKNVTVTHSVNLLEDKHNGKLCKLRGVAPLHLGKCNIAGWILGNPECESLSTASSWSYIVETSSSDNGTCYPGDFIDYEELREQLSSVSSFERFEIFPKTSSWPNHDSNKGVTAACPHAGAKSFYKNLIWLVKKGNSYPKLSKSYINDKGKEVLVLWGIHHPSTSADQQSLYQNADAYVFVGTSRYSKKFKPEVAIRPKVRDQEGRMNYYWTLVEPGDKITFEATGNLVVPRYAFAMERNAGSGIIISDTPVHDCNTTCQTPKGAINTSLPFQNIHPITIGKCPKYVKSTKLRLATGLRNIPSIQSRGLFGAIAGFIEGGWTGMVDGWYGYHHQNEQGSGYAADLKSTQNAIDEITNKVNSVIEKMNTQFTAVGKEFNHLEKRIENLNKKVDDGFLDIWTYNAELLVLLENERTLDYHDSNVKNLYEKVRSQLKNNAKEIGNGCFEFYHKCDNTCMESVKNGTYDYPKYSEEAKLNREEIDGVKLESTRIYQILAIYSTVASSLVLVVSLGAISFWMCSNGSLQCRICI

SEQ ID NO: 5685 - protein, 566 aa, Artificial Sequence
  derived and/or modified protein sequence (wt) from hemagglutinin__InfluenzaA__ADM31558
MKAILVVLLYTFATANADTLCIGYHANNSTDTVDTVLEKNVTVTHSVNLLEDKHNGKLCKLRGVAPLHLGKCNIAGWILGNPECESLSTASSWSYIVETSSSDNGTCYPGDFIDYEELREQLSSVSSFERFEIFPKTSSWPNHDSNKGVTAACPHAGAKSFYKNLIWLVKKGNSYPKLSKSYINDKGKEVLVLWGIHHPSTSADQQSLYQNADAYVFVGTSRYSKKFKPEIAIRPKVRDQEGRMNYYWTLVEPGDKITFEATGNLVVPRYAFAMERNAGSGIIISDTPVHDCNTTCQTPKGAINTSLPFQNIHPITIGKCPKYVKSTKLRLATGLRNIPSIQSRGLFGAIAGFIEGGWTGMVDGWYGYHHQNEQGSGYAADLKSTQNAIDKITNKVNSVIEKMNTQFTAVGKEFNHLEKRIENLNKKVDDGFLDIWTYNAELLVLLENERTLDYHDSNVKNLYEKVRSQLKNNAKEIRNGCFEFYHKCDNTCMESVKNGTYDYPKYSEEAKLNREEIDGVKLESTRIYQILAIYSTVASSLVLVVSLGAISFWMCSNGSLQCRICI

SEQ ID NO: 5686 - protein, 566 aa, Artificial Sequence; identical to SEQ ID NO: 4266
  derived and/or modified protein sequence (wt) from hemagglutinin__InfluenzaA__ADM31568

SEQ ID NO: 5687 - protein, 566 aa, Artificial Sequence; identical to SEQ ID NO: 2669
  derived and/or modified protein sequence (wt) from hemagglutinin__InfluenzaA__ADM31578

SEQ ID NO: 5688 - protein, 566 aa, Artificial Sequence
  derived and/or modified protein sequence (wt) from hemagglutinin__InfluenzaA__ADM31588
MKAILVVLLYTFATANADTLCIGYHANNSTDTVDTILEKNVTVTHSVNLLEDKHNGKLCKLRGVAPLHLGKCNIAGWILGNPECESLSTASSWSYIVETSSSDNGTCYPGDFIDYEELREQLSSVSSFERFEMFPKTSSWPNHDSNKGVTAACPHAGAKSFYKNLIWLVKKGNSYPKLNKSYINDKGKEVLVLWGIHHPSTSADQQSLYQNADAYVFVGTSRYSKKFKTEIAIRPKVRDQEGRMNYYWTLVEPGDKITFEATGNLVVPRYAFAMERNAGSGIIISDTPVHDCNTTCQTPKGAINTSLPFQNIHPITIGKCPKYVKSTKLRLATGLRNVPSIQSRGLFGAIAGFIEGGWTGMVDGWYGYHHQNEQGSGYAADLKSTQNAIDEITNKVNSVIEKMNTQFTAVGKEFNHLEKRIENLNKKVDDGFLDIWTYNAELLVLLENERTLDYHDSNVKNLYEKVRSQLKNNAKEVGNGCFEFYHKCDNTCMESVKNGTYDYPKYSEEAKLNREEIDGVKLESTRIYQILAIYSTVASSLVLVVSLGAISFWMCSNGSLQCRICI

SEQ ID NO: 5689 - protein, 566 aa, Artificial Sequence
  derived and/or modified protein sequence (wt) from hemagglutinin__InfluenzaA__ADM31598
MNAILVVLLYTFATANADTLCIGYHANNSTDTVDTLLEKNVTVTHSVNLLEDKHNGKLCKLRGVAPLHLGKCDIAGWILGNPECESLSTASSWSYIVETSSSDNGTCYPGDFIDYEELREQLSSVSSFERFEIFPKTSSWPDHDSNKGVTAACPHAGAKSFYKNLIWLVKKGNSYPKLSKSYINDKGKEVLVLWGIHHPSTSADQQSLYQNADAYVFVGTSRYSKKFKPEIAIRPKVRDQEGRMNYHWTLVEPGDKITFEATGNLVVPRYAFAMERNAGSGIIISDAPVHDCNTTCQTPKGAINTSLPFQNIHPITIGKCPKYVKSTKLRLATGLRNVPSIQSRGLFGAIAGFIEGGWTGMVDGWYGYHHQNEQGSGYAADLKSTQNAIDEITNKINSVIEKMNTQFTAVGKEFNHLEKRIENLNKKVDDGFLDIWTYNAELLVLLENERTLDYHDSNVKNLYEKVRSQLKNNAKEIGNGCFEFYHKCDNTCMESVKNGTYDYPKYSEEAKLNREEIDGVKLESTRIYQILAIYSTVASSLVLVVSLGAISFWMCSNGSLQCRICI

SEQ ID NO: 5690 - protein, 566 aa, Artificial Sequence
  derived and/or modified protein sequence (wt) from hemagglutinin__InfluenzaA__ADM31608
MKAILVVLLYTFATVNADTLCIGYHANNSTDTVDTVLEKNVTVTHSVNLLEDKHNGKLCKLRGVAPLHLGKCNIAGWILGNPECESLSTASSWSYIVETSSSDNGTCYPGDFIDYEELREQLSSVSSFERFEIFPKTSSWPNHDSNKGVTAACPHAGAKSFYKNLIWLVKKGNSYPKLSKSYINDKGKEVLVLWGIHHPSTSADQQSLYQNADAYVFVGTSRYSKKFKPEIAIRPKVRDQEGRMNYYWTLVEPGDKITFEATGNLVVPRYAFAMERNAGSGIIISDTPVHDCNTTCQTPKGAINTSLPFQNIHPITIGKCPKYVKSTKLRLATGLRNVPSIQSRGLFGAIAGFIEGGWTGMVDGWYGYHHQNEQGSGYAADLKSTQNAIDKITNKVNSVIEKMNTQFTAVGKEFNHLEKRIENLNKKVDDGFLDIWTYNAELLVLLENERTLDYHDSNVKNLYEKVRSQLKNNAKEIGNGCFEFYHKCDNTCMESVKNGTYDYPKYSEEAKLNREEIDGVKLESTRIYQILAIYSTVASSLVLVVSLGAISFWMCSNGSLQCRICI

SEQ ID NO: 5691 - protein, 566 aa, Artificial Sequence; identical to SEQ ID NO: 4221
  derived and/or modified protein sequence (wt) from hemagglutinin__InfluenzaA__ADM31618

SEQ ID NO: 5692 - protein, 566 aa, Artificial Sequence; identical to SEQ ID NO: 3833
  derived and/or modified protein sequence (wt) from hemagglutinin__InfluenzaA__ADM31628

SEQ ID NO: 5693 - protein, 566 aa, Artificial Sequence; identical to SEQ ID NO: 5572
  derived and/or modified protein sequence (wt) from hemagglutinin__InfluenzaA__ADM31638

SEQ ID NO: 5694 - protein, 566 aa, Artificial Sequence; identical to SEQ ID NO: 4089
  derived and/or modified protein sequence (wt) from hemagglutinin__InfluenzaA__ADM31648

SEQ ID NO: 5695 - protein, 566 aa, Artificial Sequence; identical to SEQ ID NO: 4836
  derived and/or modified protein sequence (wt) from hemagglutinin__InfluenzaA__ADM31658

SEQ ID NO: 5696 - protein, 566 aa, Artificial Sequence; identical to SEQ ID NO: 4089
  derived and/or modified protein sequence (wt) from hemagglutinin__InfluenzaA__ADM31668

SEQ ID NO: 5697 - protein, 566 aa, Artificial Sequence; identical to SEQ ID NO: 2669
  derived and/or modified protein sequence (wt) from hemagglutinin__InfluenzaA__ADM31688

SEQ ID NO: 5698 - protein, 566 aa, Artificial Sequence
  derived and/or modified protein sequence (wt) from hemagglutinin__InfluenzaA__ADM31698
MKAILVVLLYTFATANADTLCIGYHANNSTDTVDTVLEKNVTVTHSVNLLEDKHNGKLCKLRGVAPLHLGKCNIAGWILGNPECESLSTASSWSYIVETSSSDNGTCYPGDFIDYEELREQLSSVSSFERFEIFPKTSSWPNHDSNKGVTAACPHAGAKSFYKNLIWLVKKGNSYPKLSKSYINDKGKEVLVLWGIHHPSTSADQQSLYQNADAYVFVGTSRYSKKFKPEIAIRPKVRDQEGRMNYYWTLVEPGDKITFEATGNLVVPRYAFAMERNAGSGIIISDTPVHDCNTTCQTPKGAINTSLPFQNIHPITIGKCPKYVKSTKLRLATGLRNIPSIQSRGLFGAIAGFIEGGWTGMVDGWYGYHHQNEQGSGYAADLKSTQNAIDKITNKVNSVIEKMNTQFTAVGKEFNHLEKRIENLNKKVDDGFLDIWTYNAELLVLLENERTLDYHDSNVKNLYEKVRSQLKNNAKEIGNGCFEFYHKCDNTCMESVKNGTYDYPKYSEEAKLNREEIDGVKLESTRIYQILAIYSTVASSLILVVSLGAISFWMCSNGSLQCRICI

SEQ ID NO: 5699 - protein, 566 aa, Artificial Sequence; identical to SEQ ID NO: 5574
  derived and/or modified protein sequence (wt) from hemagglutinin__InfluenzaA__ADM31708

SEQ ID NO: 5700 - protein, 566 aa, Artificial Sequence
  derived and/or modified protein sequence (wt) from hemagglutinin__InfluenzaA__ADM31718
MKAILVVLLYTFATANADTLCIGYHANNSTDTVDTVLEKNVTVTHSVNLLEDKHNGKLCKLRGVAPLHLGKCNIAGWILGNPECESLSTASSWSYIVETSSSDNGTCYPGDFIDYEELREQLSSVSSFERFEIFPKTSSWPNHDSNKGVTAACPHAGAKSFYKNLIWLVKKGNSYPKLSKSYINDKGKEVLVLWGIHHPSTSADQQSLYQNADTYVFVGTSRYSKKFKPEIAIRPKVRDQEGRMNYYWTLVEPGDKITFEATGNLVVPRYAFAMERNAGSGIIISDTPVHDCNTTCQTPKGAINTSLPFQNIHPITIGKCPKYVKSTKLRLATGLRNVPSIQSRGLFGAIAGFIEGGWTGMVDGWYGYHHQNEQGSGYAADLKSTQNAIDKITNKVNSVIEKMNTQFTAVGKEFNHLEKRIENLNKKVDDGFLDIWTYNAELLVLLENERTLDYHDSNVKNLYEKVRSQLKNNAKEIGNGCFEFYHKCDNTCMESVKNGTYDYPKYSEEAKLNREEIDGVKLESTRIYQILAIYSTVASSLVLVVSLGAISFWMCSNGSLQCRICI

SEQ ID NO: 5701 - protein, 566 aa, Artificial Sequence
  derived and/or modified protein sequence (wt) from hemagglutinin__InfluenzaA__ADM31728
MKAILIVLLYTFATANADTLCIGYHANNSTDTVDTVLEKNVTVTHSVNLLEDKHNGKLCKLRGVAPLHLGKCNIAGWILGNPECESLSTASSWSYIVETSSSGNGTCYPGDFIDYEELREQLSSVSSFERFEIFPKTSSWPNHDSNKGVTAACPHAGAKSFYKNLIWLVKKGNSYPKLSKSYINDKGKEVLVLWGIHHPSTSADQQSLYQNADAYVFVGTSRYSKKFKPEIAIRPKVRDQEGRMNYYWTLVEPGDKITFEATGNLVVPRYAFAMERNAGSGIITSDTPVHDCNTTCQTPKGAINTSLPFQNIHPITIGKCPKYVKSTKLRLATGLRNVPSIQSRGLFGAIAGFIEGGWTGMVDGWYGYHHQNEQGSGYAADLKSTQNAIDEITNKVNSVIEKMNTQFTAVGKEFNHLEKRIENLNKKVDDGFLDIWTYNAELLVLLENERTLDYHDSNVKNLYEKVRSQLKNNAKEIGNGCFEFYHKCDNTCMESVKNGTYDYPKYSEEAKLNREEIDGVKLESTRIYQILAIYSTVASSLVLVVSLGAISFWMCSNGSLQCRICI

SEQ ID NO: 5702 - protein, 566 aa, Artificial Sequence
  derived and/or modified protein sequence (wt) from hemagglutinin__InfluenzaA__ADM31738
MKAILVVLLYTFATANADTLCIGYHANNSTDTVDTVLEKNVTVTHSVNILEDKHNGKLCKLRGVAPLHLGKCNIAGWILGNPECESLSTASSWSYIVETSSSDNGTCYPGDFIDYEELREQLSSVSSFERFEIFPKTSSWPNHDSNKGVTAACPHAGARSFYKNLIWLVKKGNSYPKLSKSYINDKGKEVLVLWGIHHPSTSADQQSLYQNADAYVFVGTSRYSKKFKPEIAIRPKVRDQEGRMNYYWTLVEPGDKITFEATGNLVVPRYAFAMERNAGSGIIISDTPVHDCNTTCQTPKGAINTSLPFQNIHPITIGKCPKYVKSTKLRLATGLRNVPSIQSRGLFGAIAGFIEGGWTGMVDGWYGYHHQNEQGSGYAADLKSTQNAIDEITNKVNSVIEKMNTQFTAVGKEFNHLEKRIENLNKKVDDGFLDIWTYNAELLVLLENERTLDYHDSNVKNLYEKVRSQLKNNAKEIGNGCFEFYHKCDNTCMESVKNGTYDYPKYSEEAKLNREEIDGVKLESTRIYQILAIYSTVASSLVLVVSLGAISFWMCSNGSLQCRICI

SEQ ID NO: 5703 - protein, 566 aa, Artificial Sequence; identical to SEQ ID NO: 4318
  derived and/or modified protein sequence (wt) from hemagglutinin__InfluenzaA__ADM31748

SEQ ID NO: 5704 - protein, 566 aa, Artificial Sequence
  derived and/or modified protein sequence (wt) from hemagglutinin__InfluenzaA__ADM31758
MKAILVVLLYTFATANADTLCIGYHANNSTDTVDTVLEKNVTVTHSVNLLEDKHNGKLCKLRGIAPLHLGKCNIAGWILGNPECESLSTASSWSYIVETSSSDNGTCYPGDFIDYEELREQLSSVSSFERFEIFPKTSSWPNHDSNKGVTAACPHAGAKSFYKNLIWLVKKGNSYPKLSKSYINDKGKEVLVLWGIHHPSTSADQQSLYQNADAYVFVGTSRYSKKFKPEIAIRPKVRDQEGRMNYYWTLIDPGDKITFEATGNLVVPRYAFAMERNAGSGIIISDTPVHDCNTTCQTPKGAINTSLPFQNIHPITIGKCPKYVKSTKLRMATGLRNVPSIQSRGLFGAIAGFIEGGWTGMVDGWYGYHHQNEQGSGYAADLKSTQNAIDEITNKVNSVIEKMNTQFTAVGKEFNHLEKRIENLNKKVDDGFLDIWTYNAELLVLLENERTLDYHDSNVKNLYEKVRSQLKNNAKEIGNGCFEFYHKCDNTCMESVKNGTYDYPKYSEEAKLNREEIDGVKLESTRIYQILAIYSTVASSLVLVVSLGAISFWMCSNGSLQCRICI

SEQ ID NO: 5705 - protein, 566 aa, Artificial Sequence; identical to SEQ ID NO: 3029
  derived and/or modified protein sequence (wt) from hemagglutinin__InfluenzaA__ADM31768

SEQ ID NO: 5706 - protein, 566 aa, Artificial Sequence; identical to SEQ ID NO: 2669
  derived and/or modified protein sequence (wt) from hemagglutinin__InfluenzaA__ADM31778

SEQ ID NO: 5707 - protein, 566 aa, Artificial Sequence; identical to SEQ ID NO: 4836
  derived and/or modified protein sequence (wt) from hemagglutinin__InfluenzaA__ADM31798

SEQ ID NO: 5708 - protein, 566 aa, Artificial Sequence
  derived and/or modified protein sequence (wt) from hemagglutinin__InfluenzaA__ADM31808
MKAILVVLLYTFATANADTLCIGYHANNSTDTVDTVLEKNVTVTHSVNLLEDKHNGKLCKLRGVAPLHLGKCNIAGWILGNPECESLSTASSWSYIVETSSSGNGTCYPGDFIDYEELREQLSSVSSFERFEIFPKTSSWPNHDSNKGVTAACPHAGAKSFYKNLLWLVKKGNSYPKLSKSYINDKGKEVLVLWGIHHPSTSADQQSLYQNADAYVFVGTSRYSKKFKPEIAIRPKVRDQEGRMNYYWTLVGPGDKITFEATGNLVVPRYAFAMERNAGSGIIISDTPVHDCNTTCQTPKGAINTSLPFQNIHPITIGKCPKYVKSTKLRLATGLRNVPSIQSRGLFGAIAGFIEGGWTGMVDGWYGYHHQNEQGSGYAADLKSTQNAIDEITNKVNSVIEKMNTQFTAVGKEFNHLEKRIENLNKKVDDGFLDIWTYNAELLVLLENERTLDYHDSNVKNLYEKVRSQLKNNAKEIGNGCFEFYHKCDNTCMESVKNGTYDYPKYSEEAKLNREEIDGVKLESTRIYQILAIYSTVASSLVLVVSLGAISFWMCSNGSLQCRICI

SEQ ID NO: 5709 - protein, 566 aa, Artificial Sequence; identical to SEQ ID NO: 4836
  derived and/or modified protein sequence (wt) from hemagglutinin__InfluenzaA__ADM31818

SEQ ID NO: 5710 - protein, 566 aa, Artificial Sequence
  derived and/or modified protein sequence (wt) from hemagglutinin__InfluenzaA__ADM31828
MKAILVVLLYTFATANADTLCIGYHANNSTDTVDTVLERNVTVTHSVNLLEDKHNGKLCKLRGVAPLHLGKCNIAGWILGNPECESLSTASSWSYIVETSSSDNGTCYPGDFIDYEELREQLSSVSSFERFEIFPKTSSWPNHDSNKGVTAACPHAGAKSFYKNLIWLVKKGKSYPKLSKSYINDKGKEVLVLWGIHHPSTSADQQSLYQNADAYVFVGTSRYSKKFKPEIAIRPKVREQEGRMNYYWTLVEPGDKITFEATGNLVVPRYAFAMERNAGSGIIISDTPVHDCNTTCQTPKGAINTSLPFQNIHPITIGKCPKYVKSTKLRLATGLRNVPSIQSRGLFGAIAGFIEGGWTGMVDGWYGYHHQNEQGSGYAADLKSTQNAIDEITNKVNSVIEKMNTQFTAVGKEFNHLEKRIENLNKKVDDGFLDIWTYNAELLVLLENERTLDYHDSNVKNLYEKVRSQLKNNAKEIGNGCFEFYHKCDNTCMESVKNGTYDYPKYSEEAKLNREEIDGVKLESTRIYQILAIYSTVASSLVLLVSLGAISFWMCSNGSLQCRICI

SEQ ID NO: 5711 - protein, 566 aa, Artificial Sequence; identical to SEQ ID NO: 5710
  derived and/or modified protein sequence (wt) from hemagglutinin__InfluenzaA__ADM31838

SEQ ID NO: 5712 - protein, 566 aa, Artificial Sequence; identical to SEQ ID NO: 2669
  derived and/or modified protein sequence (wt) from hemagglutinin__InfluenzaA__ADM31848

SEQ ID NO: 5713 - protein, 566 aa, Artificial Sequence
  derived and/or modified protein sequence (wt) from hemagglutinin__InfluenzaA__ADM31858
MKAILVVLLYTFATANADTLCIGYHANNSTDTVDTVLEKNVTVTHSVNLLEDKHNGKLCKLRGVAPLHLGKCNIAGWILGNPECESLSTASSWSYIVETSSSDNGTCYPGDFIDYEELREQLSSVSSFERFEIFPKTSSWPNHDSNKGVTAACSHAGAKSFYKNLIWLVKKGNSYPKLNKSYINDKGKEVLVLWGIHHPSTSADQQSLYQNADAYVFVGTSRYSKKFKPEIAIRPKVREQEGRMNYYWTLVEPGDKITFEATGNLVVPRYAFAMERNAGSGIIISDTPVHDCNTTCQTPKGAINTSLPFQNIHPITIGKCPKYVKSTKLRLATGLRNVPSIQSRGLFGAIAGFIEGGWTGMVDGWYGYHHQNEQGSGYAADLKSTQNAIDEITNKVNSVIEKMNTQFTAVGKEFNHLEKRIENLNKKVDDGFLDIWTYNAELLVLLENERTLDYHDSNVKNLYEKVRSQLKNNAKEIGNGCFEFYHKCDNTCMESVKNGTYDYPKYSEEAKLNREEIDGVELESTRIYQILAIYSTVASSLVLVVSLGAISFWMCSNGSLQCRICI

SEQ ID NO: 5714 - protein, 566 aa, Artificial Sequence
  derived and/or modified protein sequence (wt) from hemagglutinin__InfluenzaA__ADM31868
MKAILVVLLYTFATANADTLCIGYHANNSTDTVDTVLEKNVTVTHSVNLLEDKHNGKLCKLRGVAPLHLGKCNIAGWILGNPECELLSTASSWSYIVETSSSDNGTCYPGDFINYEELREQLSSVSSFERFEIFPKTSSWPNHDSNKGVTAACPHAGAKSFYKNLIWLVKKGNSYPKLSKSYINDKGKEVLVLWGVHHPSTSADQQSLYQNADAYVFVGTSRYSKKFKPEIAIRPKVRDQEGRMNYYWTLVEPGDKITFEATGNLVVPRYAFSMERNAGSGIIISDTPVHDCNTTCQTPKGAINTSLPFQNIHPITIGKCPKYVKSTKLRLATGLRNVPSIQSRGLFGAIAGFIEGGWTGMVDGWYGYHHQNEQGSGYAADLKSTQNAIDKITNKVNSVIEKMNTQFTAVGKEFNHLEKRIENLNKKVDDGFLDIWTYNAELLVLLENERTLDYHDSNVKNLYEKVRSQLKNNAKEIGNGCFEFYHKCDNTCMESVKNGTYDYPKYSEEAKLNREKIDGVKLESTRIYQILAIYSTVASSLVLVVSLGAISFWMCSNGSLQCRICI

SEQ ID NO: 5715 - protein, 566 aa, Artificial Sequence
  derived and/or modified protein sequence (wt) from hemagglutinin__InfluenzaA__ADM31878
MKAILVVLLYTFATANADTLCIGYHANNSTDTVDTVLEKNVTVTHSVNILEDKHNGKLCKLRGVAPLHLGKCNIAGWILGNPECESLSTASSWSYIVETSSSDNGTCYPGDFIDYEELREQLSSVSSFERFEIFPKASSWPNHDSNKGVTAACPHAGAKSFYKNLIWLVKKGNSYPKLSKSYINDKGKEVLVLWGIHHPSTSADQQSLYQNADAYVFVGTSRYSKKFKPEIAIRPKVRDQEGRMNYYWTLVEPGDKITFEATGNLVVPRYAFAMERNAGSGIIISDTPVHDCNTTCQTPKGAINTSLPFQNIHPITIGKCPKYVKSTKLRLATGLRNVPSIQSRGLFGAIAGFIEGGWTGMVDGWYGYHHQNEQGSGYAADLKSTQNAIDEITNKVNSVIEKMNTQFTAVGKEFNHLEKRIENLNKKVDDGFLDIWTYNAELLVLLENERTLDYHDSNVKNLYEKVRSQLKNNAKEIGNGCFEFYHKCDNTCMESVKNGTYDYPKYSEEAKLNREEIDGVKLESTRIYQILAIYSTVASSLVLVVSLGAISFWMCSNGSLQCRICI

SEQ ID NO: 5716 - protein, 566 aa, Artificial Sequence; identical to SEQ ID NO: 4318
  derived and/or modified protein sequence (wt) from hemagglutinin__InfluenzaA__ADM31888

SEQ ID NO: 5717 - protein, 566 aa, Artificial Sequence; identical to SEQ ID NO: 2849
  derived and/or modified protein sequence (wt) from hemagglutinin__InfluenzaA__ADM31898

SEQ ID NO: 5718 - protein, 566 aa, Artificial Sequence
  derived and/or modified protein sequence (wt) from hemagglutinin__InfluenzaA__ADM31908
MKAILVVLLYTFATANADTLCIGYHANNSTDTVDTVLEKNVTVTHSVNILEDKHNGKLCKLRGVAPLHLGKCNIAGWILGNPECESLSTASSWSYIVETSSSDNGTCYPGDFIDHEELREQLSSVSSFERFEIFPKTSSWPNHDSNKGVTAACPHAGAKSFYKNLIWLVKKGNSYPKLSKSYINDKGKEVLVLWGIHHPSTSADQQSLYQNADAYVFVGSSRYSKKFKPEIAIRPKVRDQEGRMNYYWTLVEPGDKITFEATGNLVVPRYAFAMERNAGSGIIISDTPVHDCNTTCQTPKGAINTSLPFQNIHPITIGKCPKYVKSTKLRLATGLRNVPSIQSRGLFGAIAGFIEGGWTGMVDGWYGYHHQNEQGSGYAADLKSTQNAIDEITNKVNSVIEKMNTQFTAVGKEFNHLEKRIENLNKKVDDGFLDIWTYNAELLVLLENERTLDYHDSNVKNLYEKVRSQLKNNAKEIGNGCFEFYHKCDNTCMESVKNGTYDYPKYSEEAKLNREEIDGVKLESTRIYQILAIYSTVASSLVLVVSLGAISFWMCSNGSLQCRICI

SEQ ID NO: 5719 - protein, 566 aa, Artificial Sequence; identical to SEQ ID NO: 2849
  derived and/or modified protein sequence (wt) from hemagglutinin__InfluenzaA__ADM31918

SEQ ID NO: 5720 - protein, 566 aa, Artificial Sequence; identical to SEQ ID NO: 4441
  derived and/or modified protein sequence (wt) from hemagglutinin__InfluenzaA__ADM31928

SEQ ID NO: 5721 - protein, 566 aa, Artificial Sequence; identical to SEQ ID NO: 4441
  derived and/or modified protein sequence (wt) from hemagglutinin__InfluenzaA__ADM31948

SEQ ID NO: 5722 - protein, 566 aa, Artificial Sequence; identical to SEQ ID NO: 2669
  derived and/or modified protein sequence (wt) from hemagglutinin__InfluenzaA__ADM31958

SEQ ID NO: 5723 - protein, 566 aa, Artificial Sequence; identical to SEQ ID NO: 4441
  derived and/or modified protein sequence (wt) from hemagglutinin__InfluenzaA__ADM31968

SEQ ID NO: 5724 - protein, 566 aa, Artificial Sequence; identical to SEQ ID NO: 4257
  derived and/or modified protein sequence (wt) from hemagglutinin__InfluenzaA__ADM31978

SEQ ID NO: 5725 - protein, 566 aa, Artificial Sequence; identical to SEQ ID NO: 2849
  derived and/or modified protein sequence (wt) from hemagglutinin__InfluenzaA__ADM31998

SEQ ID NO: 5726 - protein, 566 aa, Artificial Sequence; identical to SEQ ID NO: 2849
  derived and/or modified protein sequence (wt) from hemagglutinin__InfluenzaA__ADM32008

SEQ ID NO: 5727 - protein, 566 aa, Artificial Sequence
  derived and/or modified protein sequence (wt) from hemagglutinin__InfluenzaA__ADM32018
MKAILVVLLYTFAIANADTLCIGYHANNSTDTVDTVLEKNVTVTHSVNLLEDKHNGKLCKLRGVAPLHLGKCDIAGWILGNPECESLSTASSWSYIVETSSSDNGTCYPGDFIDYEELREQLSSVSSFERFEIFPKTSSWPNHDSNKGVTAACPHAGAKSFYKNLIWLVKKGNSYPKLSKSYINDKGKEVLVLWGIHHPSTSADQQSLYQNADAYVFVGTSRYSKKFKPEIAIRPKVRDQEGRMNYYWTLVEPGDKITFEATGNLVVPRYAFAMERNAGSGIIISDTPVHDCNTTCQTPKGAINTSLPFQNIHPITIGKCPKYVKSTKLRLATGLRNVPSIQSRGLFGAIAGFIEGGWTGMVDGWYGYHHQNEQGSGYAADLKSTQNAIDEITNKVNSVIEKMNTQFTAVGKEFNHLEKRIENLNKKVDDGFLDIWTYNAELLVLLENERTLDYHDSNVKNLYEKVRSQLKNNAKEIGNGCFEFYHKCDNTCMESVKNGTYDYPKYSEEAKLNREEIDGVKLESTRIYQILAIYSTVASSLVLVVSLGAISFWMCSNGSLQCRICI

SEQ ID NO: 5728 - protein, 566 aa, Artificial Sequence
  derived and/or modified protein sequence (wt) from hemagglutinin__InfluenzaA__ADM32028
MKAILVVLLYTFATANADTLCIGYHANNSTDTVDTVLEKNVTVTHSVDLLEDKHNGKLCKLRGVAPLHLGKCNIAGWILGNPECESLSTASSWSYIVETSSSDNGTCYPGDFIDYEELREQLSSVSSFERFEIFPKTSSWPNHDSNKGVTAACPHAGAKSFYKNLIWLVKKGNSYPKLSKSYINDKGKEVLVLWGIHHPSTSADQQSLYQNADAYVFVGTSRYSKKFKPEIAIRPKVRDQEGRMNYYWTLVEPGDKITFEATGNLVVPRYAFAMERNAGSGIIISDTPVHDCNTTCQTPKGAINTSLPFQNVHPITIGKCPKYVKSTKLRLATGLRNVPSIQSRGLFGAIAGFIEGGWTGMVDGWYGYHHQNEQGSGYAADLKSTQNAIDEITNKVNSVIEKMNTQFTAVGKEFNHLEKRIENLNKKVDDGFLDIWTYNAELLVLLENERTLDYHDSNVKNLYEKVRSQLKNNAKEIGNGCFEFYHKCDNTCMESVKNGTYDYPKYSEEAKLNREEIDGVKLESTRIYQILAIYSTVASSLVLVVSLGAISFWMCSNGSLQCRICI

SEQ ID NO: 5729 - protein, 566 aa, Artificial Sequence; identical to SEQ ID NO: 4441
  derived and/or modified protein sequence (wt) from hemagglutinin__InfluenzaA__ADM32038

SEQ ID NO: 5730 - protein, 566 aa, Artificial Sequence; identical to SEQ ID NO: 2849
  derived and/or modified protein sequence (wt) from hemagglutinin__InfluenzaA__ADM32048

SEQ ID NO: 5731 - protein, 566 aa, Artificial Sequence; identical to SEQ ID NO: 3833
  derived and/or modified protein sequence (wt) from hemagglutinin__InfluenzaA__ADM32058

SEQ ID NO: 5732 - protein, 566 aa, Artificial Sequence; identical to SEQ ID NO: 3833
  derived and/or modified protein sequence (wt) from hemagglutinin__InfluenzaA__ADM32068

SEQ ID NO: 5733 - protein, 566 aa, Artificial Sequence; identical to SEQ ID NO: 2669
  derived and/or modified protein sequence (wt) from hemagglutinin__InfluenzaA__ADM32078

SEQ ID NO: 5734 - protein, 566 aa, Artificial Sequence; identical to SEQ ID NO: 4257
  derived and/or modified protein sequence (wt) from hemagglutinin__InfluenzaA__ADM32088

SEQ ID NO: 5735 - protein, 566 aa, Artificial Sequence
  derived and/or modified protein sequence (wt) from hemagglutinin__InfluenzaA__ADM32098
MKAILVVLLYTFAIANADTLCIGYHANNSTDTVDTVLEKNVTVTHSVNLLEDKHNGKLCKLRGVAPLHLGKCNIAGWILGNPECESLSTASSWSYIVETSSSDNGTCYPGDFIDYEELREQLSSVSSFERFEIFPKTSSWPNHDSNKGVTAACPHAGAKSFYKNLIWLVKKGNSYPKLSKSYINDKGKEVLVLWGIHHPSTSADQQSLYQNADAYVFVGTSRYSKKFKPEIAIRPKVRDQEGRMNYYWTLVEPGDKITFEATGNLVVPRYAFAMERNAGSGIIISDTPVHDCNTTCQTPKGAINTSLPFQNIHPITIGKCPKYVKSTKLRLATGLRNVPSIQSRGLFGAIAGFIEGGWTGMVDGWYGYHHQNEQGSGYAADLKSTQNAIDEITNKVNSVIEKMNTQFTAVGKEFNHLEKRIENLNKKVDDGFLDIWTYNAELLVLLENERTLDYHDSNVKNLYEKVRSQLKNNAKEIGNGCFEFYHKCDNTCMESVKNGTYDYPKYSEEAKLNREEIDGVKLESTRIYQILAIYSTVASSLVLVVSLGAISFWMCSNGSLQCRICI

SEQ ID NO: 5736 - protein, 566 aa, Artificial Sequence; identical to SEQ ID NO: 2669
  derived and/or modified protein sequence (wt) from hemagglutinin__InfluenzaA__ADM32108

SEQ ID NO: 5737 - protein, 566 aa, Artificial Sequence; identical to SEQ ID NO: 4441
  derived and/or modified protein sequence (wt) from hemagglutinin__InfluenzaA__ADM32551

SEQ ID NO: 5738 - protein, 566 aa, Artificial Sequence; identical to SEQ ID NO: 2849
  derived and/or modified protein sequence (wt) from hemagglutinin__InfluenzaA__ADM32561

SEQ ID NO: 5739 - protein, 566 aa, Artificial Sequence; identical to SEQ ID NO: 2849
  derived and/or modified protein sequence (wt) from hemagglutinin__InfluenzaA__ADM32571

SEQ ID NO: 5740 - protein, 566 aa, Artificial Sequence; identical to SEQ ID NO: 2669
  derived and/or modified protein sequence (wt) from hemagglutinin__InfluenzaA__ADM32581

SEQ ID NO: 5741 - protein, 566 aa, Artificial Sequence; identical to SEQ ID NO: 4441
  derived and/or modified protein sequence (wt) from hemagglutinin__InfluenzaA__ADM32591

SEQ ID NO: 5742 - protein, 566 aa, Artificial Sequence; identical to SEQ ID NO: 2669
  derived and/or modified protein sequence (wt) from hemagglutinin__InfluenzaA__ADM32601

SEQ ID NO: 5743 - protein, 566 aa, Artificial Sequence; identical to SEQ ID NO: 2669
  derived and/or modified protein sequence (wt) from hemagglutinin__InfluenzaA__ADM32611

SEQ ID NO: 5744 - protein, 566 aa, Artificial Sequence; identical to SEQ ID NO: 3833
  derived and/or modified protein sequence (wt) from hemagglutinin__InfluenzaA__ADM32621

SEQ ID NO: 5745 - protein, 566 aa, Artificial Sequence
  derived and/or modified protein sequence (wt) from hemagglutinin__InfluenzaA__ADM32631
MKAILVVLLYTFATANADTLCIGYHANNSTDTVDTVLEKNVTVTHSVNILEDKHNGKLCKLKGVAPLHLGKCNIAGWILGNPECESLSTASSWSYIVETSSSDNGTCYPGDFIDYEELREQLSSVSSFERFEIFPKTSSWPNHDSNKGVTAACPHAGAKSFYKNLIWLVKKGNLYPKLSKSYINDKGKEVLVLWGIHHPSTSADQQSLYQNADAYVFVGSSKYSKKFKPEIAIRPKVRDQEGRMNYYWTLVEPGDKITFEATGNLVVPRYAFAMERNAGSGIIISDTPVHNCNTTCQTPKGAINTSLPFQNIHPITIGKCPKYVKSTKLRLATGLRNVPSIQSRGLFGAIAGFIEGGWTGMVDGWYGYHHQNEQGSGYAADLKSTQNAIDEITNKVNSVIEKMNTQFTAVGKEFNHLEKRIENLNKKVDDGFLDIWTYNAELLVLLENERTLDYHDSNVKNLYEKVRSQLKNNAKEIGNGCFEFYHKCDNTCMESVKNGTYDYPKYSEEAKLNREEIDGVKLESTRIYQILAIYSTVASSLVLVVSLGAISFWMCSNGSLQCRICI

SEQ ID NO: 5746 - protein, 566 aa, Artificial Sequence; identical to SEQ ID NO: 3833
  derived and/or modified protein sequence (wt) from hemagglutinin__InfluenzaA__ADM32641

SEQ ID NO: 5747 - protein, 566 aa, Artificial Sequence; identical to SEQ ID NO: 2669
  derived and/or modified protein sequence (wt) from hemagglutinin__InfluenzaA__ADM32651

SEQ ID NO: 5748 - protein, 566 aa, Artificial Sequence
  derived and/or modified protein sequence (wt) from hemagglutinin__InfluenzaA__ADM32661
MKAILVVLLYTFAIANADTLCIGYHANNSTDTVDTVLEKNVTVTHSVNLLEDKHNGKLCKLRGVAPLHLGKCNIAGWILGNPECESLSTASSWSYIVETSSSDNGTCYPGDFNDYEELREQLSSVSSFERFEIFPKTSSWPNHDSNKGVTAACPHAGAKSFYKNLIWLVKKGNSYPKLSKSYINDKGKEVLVLWGIHHPSTSADQQSLYQNADAYVFVGTSRYSKKFKPEIAIRPKVRDQEGRMNYYWTLVEPGDKITFEATGNLVVPRYAFAMERNAGSGIIISDTPVHDCNTTCQTPKGAINTSLPFQNIHPITIGKCPKYVKSTKLRLATGLRNVPSIQSRGLFGAIAGFIEGGWTGMVDGWYGYHHQNEQGSGYAADLKSTQNAIDEITNKVNSVIEKMNTQFTAVGKEFNHLEKRIENLNKKVDDGFLDIWTYNAELLVLLENERTLDYHDSNVKNLYEKVRSQLKNNAKEIGNGCFEFYHKCDNTCMESVKNGTYDYPKYSEEAKLNREEIDGVKLESTRIYQILAIYSTVASSLVLVVSLGAISFWMCSNGSLQCRICI

SEQ ID NO: 5749 - protein, 566 aa, Artificial Sequence; identical to SEQ ID NO: 4257
  derived and/or modified protein sequence (wt) from hemagglutinin__InfluenzaA__ADM32671

SEQ ID NO: 5750 - protein, 566 aa, Artificial Sequence; identical to SEQ ID NO: 2669
  derived and/or modified protein sequence (wt) from hemagglutinin__InfluenzaA__ADM32681

SEQ ID NO: 5751 - protein, 566 aa, Artificial Sequence; identical to SEQ ID NO: 2849
  derived and/or modified protein sequence (wt) from hemagglutinin__InfluenzaA__ADM32691

SEQ ID NO: 5752 - protein, 566 aa, Artificial Sequence; identical to SEQ ID NO: 2669
  derived and/or modified protein sequence (wt) from hemagglutinin__InfluenzaA__ADM32701

SEQ ID NO: 5753 - protein, 566 aa, Artificial Sequence; identical to SEQ ID NO: 2849
  derived and/or modified protein sequence (wt) from hemagglutinin__InfluenzaA__ADM32711

SEQ ID NO: 5754 - protein, 566 aa, Artificial Sequence; identical to SEQ ID NO: 2849
  derived and/or modified protein sequence (wt) from hemagglutinin__InfluenzaA__ADM32721

SEQ ID NO: 5755 - protein, 566 aa, Artificial Sequence; identical to SEQ ID NO: 2849
  derived and/or modified protein sequence (wt) from hemagglutinin__InfluenzaA__ADM32741

SEQ ID NO: 5756 - protein, 566 aa, Artificial Sequence; identical to SEQ ID NO: 2849
  derived and/or modified protein sequence (wt) from hemagglutinin__InfluenzaA__ADM32751

SEQ ID NO: 5757 - protein, 566 aa, Artificial Sequence; identical to SEQ ID NO: 4257
  derived and/or modified protein sequence (wt) from hemagglutinin__InfluenzaA__ADM32761

SEQ ID NO: 5758 - protein, 566 aa, Artificial Sequence
  derived and/or modified protein sequence (wt) from hemagglutinin__InfluenzaA__ADM32771
MKAILVVLLYTFATANADTLCIGYHANNSTDTVDTVLEKNVTVTHSVNLLEDKHNGKLCKLRGVAPLHLGKCNIAGWILGNPECESLSTASSWSYIVETSSSDNGTCYPGDFIDYEELREQLSSVSSFERFEIFPKTSSWPNHDSNKGVTAACPHAGAKSFYKNLIWLVKKGNSYPKLSESYINDKGKEVLVLWGIHHPSTSADQQSLYQNADAYVFVGTSRYSKKFKPEIAIRPKVRDQEGRMNYYWTLVEPGDKITFEATGNLVVPRYAFAMERNAGSGIIISDTPVHDCNTTCQTPKGAINTSLPFQNIHPITIGKCPKYVKSTKLRLATGLRNVPSIQSKGLFGAIAGFIEGGWTGMVDGWYGYHHQNEQGSGYAADLKSTQNAIDEITNKVNSVIEKMNTQFTAVGKEFNHLEKRIENLNKKVDDGFLDIWTYNAELLVLLENERTLDYHDSNVKNLYEKVRSQLKNNAKEIGNGCFEFYHKCDNTCMESVKNGTYDYPKYSEEAKLNREEIDGVKLESTRIYQILAIYSTVASSLVLVVSLGAISFWMCSNGSLQCRICI

SEQ ID NO: 5759 - protein, 566 aa, Artificial Sequence
  derived and/or modified protein sequence (wt) from hemagglutinin__InfluenzaA__ADM32781
MKAILVVLLYTFATANADTLCIGYHANNSTDTVDTVLEKNVTVTHSVDLLEDKHNGKLCKLRGVAPLHLGKCNIAGWILGNPECESLSTASSWSYIVETSSSDNGTCYPGDFIDYEELREQLSSVSSFERFEIFPKTSSWPNHDSNKGVTAACPHAGAKSFYKNLIWLVKKGNSYPKLSKSYINDKGKEVLVLWGIHHPSTSADQQSLYQNADAYVFVGTSRYSKKFKPEIAIRPKVRDQEGRMNYYWTLVEPGDKITFEATGNLVVPRYAFAMERNAGSGIIISDTPVHDCNTTCQTPKGAINTSFPFQNIHPITIGKCPKYVKSTKLRLATGLRNVPSIQSRGLFGAIAGFIEGGWTGMVDGWYGYHHQNEQGSGYAADLKSTQNAIDEITNKVNSVIEKMNTQFTAVGKEFNHLEKRIENLNKKVDDGFLDIWTYNAELLVLLENERTLDYHDSNVKNLYEKVRSQLKNNAKEIGNGCFEFYHKCDNTCMESVKNGTYDYPKYSEEAKLNREEIDGVKLESTRIYQILAIYSTVASSLVLVVSLGAISFWMCSNGSLQCRICI

SEQ ID NO: 5760 - protein, 566 aa, Artificial Sequence; identical to SEQ ID NO: 2849
  derived and/or modified protein sequence (wt) from hemagglutinin__InfluenzaA__ADM32791

SEQ ID NO: 5761 - protein, 566 aa, Artificial Sequence
  derived and/or modified protein sequence (wt) from hemagglutinin__InfluenzaA__ADM32801
MKAILVVLLYTFATANADTLCIGYHANNSTDTVDTVLEKNVTVTHSVNILENKHNGKLCKLRGVAPLHLGKCNIAGWILGNPECESLSTASSWSYIVETSSSDNGTCYPGDFIDYEELREQLSSVSSFERFEIFPKTSSWPNHDSNKGVTAACPHAGAKSFYKNLIWLVKKGNSYPKLSKSYINDKGKEVLVLWGIHHPSTSADQQSLYQNADAYVFVGSSRYSKKFKPEIAIRPKVRDQEGRMNYYWTLVEPGDKITFEATGNLVVPRYAFAMERNAGSGIIISDTPVHDCNTTCQTPKGAINTSLPFQNIHPITIGKCPKYVKSTKLRLATGLRNVPSIQSRGLFGAIAGFIEGGWTGMVDGWYGYHHQNEQGSGYAADLKSTQNAIDEITNKVNSVIEKMNTQFTAVGKEFNHLEKRIENLNKKVDDGFLDIWTYNAELLVLLENERTLDYHDSNVKNLYEKVRSQLKNNAKEIGNGCFEFYHKCDNTCMESVKNGTYDYPKYSEEAKLNREEIDGVKLESTRIYQILAIYSTVASSLVLVVSLGAISFWMCSNGSLQCRICI

SEQ ID NO: 5762 - protein, 566 aa, Artificial Sequence
  derived and/or modified protein sequence (wt) from hemagglutinin__InfluenzaA__ADM32811
MKAILVVLLYTFATANADTLCIGYHANNSTDTVDTVLEKNVTVTHSVNLLEDKHNGKLCKLRGVAPLHLGKCNIAGWILGNPECESLSTASSWSYIVETSSSDNGTCYPGDFIDYEELREQLSSVSSFERFEIFPKTSSWPNHDSNKGVTAACPHAGAKSFYKNLIWLVKKGNSYPKLSKSYINDKGKEVLVLWGIHHPSTSADQQSLYQNADAYVFVGTSRYSKKFKPEIAIRPKVRDQEGRMNYYWTLVEPGDKITFEATGNLVVPRYAFAMERNAGSGIIISDTPVHDCNTTCQTPKGAINTSLPFHNIHPITIGKCPKYVKSTKLRLATGLRNVPSIQSRGLFGAIAGFIEGGWTGMVDGWYGYHHQNEQGSGYAADLKSTQNAIDEITNKVNSVIEKMNTQFTAVGKEFNHLEKRIENLNKKVDDGFLDIWTYNAELLVLLENERTLDYHDSNVKNLYEKVRSQLKNNAKEIGNGCFEFYHKCDNTCMESVKNGTYDYPKYSEEAKLNREEIDGVKLESTRIYQILAIYSTVASSLVLVVSLGAISFWMCSNGSLQCRICI

SEQ ID NO: 5763 - protein, 566 aa, Artificial Sequence; identical to SEQ ID NO: 2669
  derived and/or modified protein sequence (wt) from hemagglutinin__InfluenzaA__ADM32821

SEQ ID NO: 5764 - protein, 566 aa, Artificial Sequence; identical to SEQ ID NO: 4257
  derived and/or modified protein sequence (wt) from hemagglutinin__InfluenzaA__ADM32831

SEQ ID NO: 5765 - protein, 566 aa, Artificial Sequence; identical to SEQ ID NO: 2849
  derived and/or modified protein sequence (wt) from hemagglutinin__InfluenzaA__ADM32841

SEQ ID NO: 5766 - protein, 566 aa, Artificial Sequence; identical to SEQ ID NO: 4257
  derived and/or modified protein sequence (wt) from hemagglutinin__InfluenzaA__ADM32851

SEQ ID NO: 5767 - protein, 566 aa, Artificial Sequence; identical to SEQ ID NO: 2849
  derived and/or modified protein sequence (wt) from hemagglutinin__InfluenzaA__ADM32861

SEQ ID NO: 5768 - protein, 566 aa, Artificial Sequence; identical to SEQ ID NO: 3833
  derived and/or modified protein sequence (wt) from hemagglutinin__InfluenzaA__ADM32871

SEQ ID NO: 5769 - protein, 566 aa, Artificial Sequence; identical to SEQ ID NO: 4836
  derived and/or modified protein sequence (wt) from hemagglutinin__InfluenzaA__ADM32881

SEQ ID NO: 5770 - protein, 566 aa, Artificial Sequence
  derived and/or modified protein sequence (wt) from hemagglutinin__InfluenzaA__ADM32929
MKAILVVLLYTFATANADTLCIGYHANNSTDTVDTVLEKNVTVTHSVNLLEDKHNGKLCKLRGVAPLHLGKCNIAGWILGNPECESLSTASSWSYIVETSSSDNGTCYPGDFIDYEELREQLSSVSSFERFEIFPKTSSWPNHDSNKGVTAACPHAGAKSFYKNLIWLVKKGNSYPKLSKSYINDKGKEVLVLWGIHHPSTSADQQSLYQNADAYVFVGTSRYSKKFKPEIAIRPKVRDQEGRMNYYWTLVEPGDKITFEATGNLVVPRYAFAMERNAGSGIIISDTPVHDCNTTCQTPKGAINTSLPFQNIHPITIGKCPKYVKSTKLRLATGLRNVPSIQSRGLFGAIAGFIEGGWTGMVDGWYGYHHQNEQGSGYAADLKSTQNAIDKITNKVNSVIEKMNTQFTAVGKEFNHLEKRIENLNKKVDDGFLDIWTYNAELLVLLENERTLDYHDSNVKNLYEKVRSQLKNNAKEIGNGCFEFYHKCDNTCMESVKNGTYDYPKYSEEAKLNREEIDGVKLESTRIYQILAIYSTVASSLVLVVSLGAISFWMCSNGSLRCRICI

SEQ ID NO: 5771 - protein, 566 aa, Artificial Sequence
  derived and/or modified protein sequence (wt) from hemagglutinin__InfluenzaA__ADM32939
MEAILVVLLYTFATANADTLCIGYHANNSTDTVDTVLEKNVTVTHSVNLLEDKHNGKLCKLRGVAPLHLGKCNIAGWILGNPECESLSTASSWSYIVETSSSDNGTCYPGDFIDYEELREQLSSVSSFERFEIFPKTSSWPNHDSNKGVTAACPHAGAKSFYKNLIWLVKKGNSYPKLSKSYINDKGKEVLVLWGIHHPSTSADQQSLYQNADAYVFVGSSRYSKKFKPEIAIRPKVRDQEGRMNYYWTLVEPGDKITFEATGNLVVPRYAFAMERNAGSGIIISDTPVHDCNTTCQTPKGAINTSLPFHNIHPITIGKCPKYVKSTKLRLATGLRNIPSIQSRGLFGAIAGFIEGGWTGMVDGWYGYHHQNEQGSGYAADLKSTQNAIDEITNKVNSVIEKMNTQFTAVGKEFNHLEKRIENLNKKVDDGFLDIWTYNAELLVLLENERTLDYHDSNVKNLYEKVRSQLKNNAKEIGNGCFEFYHKCDNTCMESVKNGTYDYPKYSEEAKLNREEIDGVKLESTRIYQILAIYSTVASSLVLVVSLGAISFWMCSNGSLRCRICI

SEQ ID NO: 5772 - protein, 566 aa, Artificial Sequence
  derived and/or modified protein sequence (wt) from hemagglutinin__InfluenzaA__ADM32949
MKAILVVLLYTFATANADTLCIGYHANNSTDTVDTVLEKNVTVTHSVNLLEDKHNGKLCKLRGVAPLHLGKCNIAGWILGNPECESLSTASSWSYIVETSSSDNGTCYPGDFIDYEELREQLSSVSSFERFEIFPKTSSWPNHDSNKGVTAACPHAGAKSFYKNLIWLVKKGNSYPKLSKSYINDKGKEVLVLWGIHHPSTSADQQSLYQNADAYVFVGTSRYSKKFKPEIAIRPKVRDQEGRMNYYWTLVEPGDKITFEATGNLVVPRYAFAMERNAGSGIIISDTPVHDCNTTCQTPNGAINTSLPFQNIHPITIGKCPKYVKSTKLRLATGLRNIPSIQSRGLFGAIAGFIEGGWTGMVDGWYGYHHQNEQGSGYAADLKSTQNAIDEITNKVNSVIEKMNTQFTAVGKEFNHLEKRIENLNKKVDDGFLDIWTYNAELLVLLENERTLDYHDSNVKNLYEKVRSQLKNNAKEIGNGCFEFYHKCDNTCMESVKNGTYDYPKYSEEAKLNREEIDGVKLESTRIYQILAIYSTVASSLVLVVSLGAISFWMCSNGSLRCRICI

SEQ ID NO: 5773 - protein, 566 aa, Artificial Sequence
  derived and/or modified protein sequence (wt) from hemagglutinin__InfluenzaA__ADM32958
MKAILVFLLYTFATANADTLCIGYHANNSTDTVDTVLEKNVTVTHSVNILEDKHNGKLCKLRGVAPLHLGKCNIAGWILGNPECESLSTASSWSYIVETSSSDNGTCYPGDFIDYEELREQLSSVSSFERFEIFPKTSSWPNHDSNKGVTAACPHAGAKSFYKNLIWLVKKGNSYPKLSKSYINDKGKEVLVLWGIHHPSTSADQQSLYQNADAYVFVESSRYSKKFKPEIAIRPKVRDQEGRMNYYWTLVEPGDKITFEATGNLVVPRYAFAMERNAGSGIIISDTPVHDCNTTCQTPKGAINTSLPFQNIHPITIGKCPKYVKSTKLRLATGLRNVPSIQSRGLFGAIAGFIEGGWTGMVDGWYGYHHQNEQGSGYAADLKSTQNAIDEITNKVNSVIEKMNTQFTAVGKEFNHLEKRLENLNKKVDDGFLDIWTYNAELLVLLENERTLDYHDSNVKNLYEKVRSQLKNNAKEVGNGCFEFYHKCDNTCMESVKNGTYDYPKYSEEAKLNREEIDGVKLESTRIYQILAIYSTAASSLVLVVSLGAISFWMCSNGSLRCRICI

SEQ ID NO: 5774 - protein, 566 aa, Artificial Sequence
  derived and/or modified protein sequence (wt) from hemagglutinin__InfluenzaA__ADM32977
MKAILVVLLCTFATANADTLCIGYHANNSTDTVDTVLEKNVTVTHSVNLLEDKHNGKLCKLRGVAPLHLGKCNIAGWILGNPECESLSTASSWSYIVETSSSDNGTCYPGDFIDYEELREQLSSVSSFERFEIFPKTSSWPNHDSNKGVTAACPHAGAKSFYKNLIWLVKKGNSYPKLSKSYINDKGKEVLVLWGIHHPSTSADQQSLYQNADAYVFVGTSKYSKKFKPEIAIRPKVRDQEGRMNYYWTLVEPGDKITFEATGNLVVPRYAFAMERNAGSGIIISDTPVHDCNTTCQTPKGAINTSLPFQNIHPITIGKCPKYVKSTKLRLATGLRNVPSIQSRGLFGAIAGFIEGGWTGMVDGWYGYHHQNEQGSGYAADLKSTQNAIDGITNKINSVIEKMNTQFTAVGKEFNHLEKRIENLNKKVDDGFLDIWTYNAELLVLLENERTLDYHDSNVKNLYEKVRSQLKNNAKEIGNGCFEFYHKCDNTCMESVKNGTYDYPKYSEEAKLNREEIDGVKLESTRIYQILAIYSTVASSLVLVVSLGAISFWMCSNGSLRCRICI

SEQ ID NO: 5775 - protein, 566 aa, Artificial Sequence
  derived and/or modified protein sequence (wt) from hemagglutinin__InfluenzaA__ADM32986
MKAILVVLLYTFATANADTLCIGYHANNSTDTVDTVLEKNVTVTHSVNLLEDKHNGKLCKLRGVAPLHLGKCNIAGWILGNPECESLSTASSWSYIVETSSSDNGTCYPGDFIDYEELREQLSSVSSFERFEIFPKTNSWPNHDSNKGVTAACPHAGAKSFYKNLIWLVKKGNSYPKLSKSYINDKGKEVLVLWGIHHPSTSADQQSLYQNADAYVFVGTSKYSKKFKPEIAIRPKVRDQEGRMNYYWTLVEPGDKITFEATGNLVVPRYAFAMERNAGSGIIISDTPVHDCNTTCQTPKGAINTSLPFQNIHPITIGKCPKYVKSTKLRLATGLRNVPSIQSRGLFGAIAGFIEGGWTGMVDGWYGYHHQNEQGSGYAADLKSTQNAIDGITNKINSVIEKMNTQFTAVGKEFNHLEKRIENLNKKVDDGFLDIWTYNAELLVLLENERTLNYHDSNVKNLYEKVRSQLKNNAKEIGNGCFEFYHKCDNTCMESVKNGTYDYPKYSEEAKLNREEIDGVKLESTRIYQILAIYSTVASSLVLVVSLGAISFWMCSNGSLRCRICI

SEQ ID NO: 5776 - protein, 566 aa, Artificial Sequence
  derived and/or modified protein sequence (wt) from hemagglutinin__InfluenzaA__ADM32995
MKAILVVLLYTFATANADTLCIGYHANNSTDTVDTVLEKNVTVTHSVNLLEDKHNGKLCKLRGVAPLHLGKCNIAGWILGNPECESLSTASSWSYIVETSSSDNGTCYPGDFIDYEELREQLSSVSSFERFEIFPKTNSWPNHDSNKGVTAACPHAGAKSFYKNLIWLVKKGNSYPKLSKSYINDKGKEVLVLWGIHHPSTSADQQSLYQNADAYVFVGTSKYSKKFKPEIAIRPKVRDQEGRMNYYWTLVEPGDKITFEATGNLVVPRYAFAMERNAGSGIIISDTPVHDCNTTCQTPKGAINTSLPFQNIHPITIGKCPKYVKSTKLRLATGLRNVPSIQSRGLFGAIAGFIEGGWTGMVDGWYGYHHQNEQGSGYAADLKSTQNAIDGITNKINSVIEKMNTQFTAVGKEFNHLEKRIENLNKKVDDGFLDIWTYNAELLVLLENERTLDYHDSNVKNLYEKVRSQLKNNAKEIGNGCFEFYHKCDNTCMESVKNGTYDYPKYSEEAKLNREEIDGVKLESTRIYQILAIYSTVASSLVLVVSLGAISFWMCSNGSLRCRICI

SEQ ID NO: 5777 - protein, 566 aa, Artificial Sequence; identical to SEQ ID NO: 3770
  derived and/or modified protein sequence (wt) from hemagglutinin__InfluenzaA__ADM33004

SEQ ID NO: 5778 - protein, 566 aa, Artificial Sequence; identical to SEQ ID NO: 2669
  derived and/or modified protein sequence (wt) from hemagglutinin__InfluenzaA__ADM33023

SEQ ID NO: 5779 - protein, 566 aa, Artificial Sequence
  derived and/or modified protein sequence (wt) from hemagglutinin__InfluenzaA__ADM33040
MKAILVVLLYTFATANADTLCIGYHANNSTDTVDTVLEKNVTVTHSVNLLEDKHNGKLCKLRGVAPLHLGKCNIAGWILGNPECESLSTASSWSYIVETSSSDNGTCYPGDFIDYEELREQLSSVSSFERFEIFPKTSSWPNHDSNKGVTAACPHAGAKSFYKNLIWLVKKGNSYPKLSKSYINDKGKEVLVLWGIHHPSTSADQQSLYQNADAYVFVGSSRYSKKFKPEIAIRPKVRDQEGRMNYYWTLVEPGDKITFEATGNLVVPRYAFAMERNAGSGIIISDTPVHDCNTTCQTPKGAINTSLPFQNIHPITIGKCPKYVKSTKLRLATGLRNVPSIQSRGLFGAIAGFIEGGWTGMVDGWYGYHHQNEQGSGYAADLKSTQNAIDEITNKVNSVIEKMNTQFTAVGKEFNHLEKRIENLNKKVDDGFLDIWTYNAELLVLLENERTLDYHDSNVKNLYEKVRSQLKNNAKEIGNGCFEFYHKCDNTCMESVKNGTYDYPKYSEEAKLNREEIDGVKLESTRIYQILAIYSTVASSLVLVVSLGAISFWMCSNGSLRCRICI

SEQ ID NO: 5780 - protein, 566 aa, Artificial Sequence
  derived and/or modified protein sequence (wt) from hemagglutinin__InfluenzaA__ADM33050
MKAILVVLLYTFATANADTLCIGYHANNSTDTVDTVLEKNVTVTHSVNLLEDKHNGKLCKLRGVAPLHLGKCNIAGWILGNPECESLSTASSWSYIVETSSSDNGTCYPGDFIDYEELREQLSSVSSFERFEIFPKTSSWPNHDSNKGVTAACPHAGAKSFYKNLIWLVKKGNSYPKLNKSYINDKGKEVLVLWGIHHPSTSADQQSLYQNADAYVFVGTSRYSKKFKPEIAIRPKVRDQEGRMNYYWTLVEPGDKITFEATGNLLVPRYAFAMERNAGSGIIISDTPVHDCNTTCQTPKGAINTSLPFQNIHPITIGKCPKYVKSTKLRLATGLRNVPSIQSRGLFGAIAGFIEGGWTGMVDGWYGYHHQNEQGSGYAADLKSTQNAIDEITNKVNSVIEKMNTQFTAVGKEFNHLEKRIENLNKKVDDGFLDIWTYNAELLVLLENERTLDYHDSNVKNLYEKVRSQLKNNAKEIGNGCFEFYHKCDNTCMESVKNGTYDYPKYSEEAKLNREEIDGVKLESTRIYQILAIYSTVASSLVLVVSLGAISFWMCSNGSLRCRICI

SEQ ID NO: 5781 - protein, 566 aa, Artificial Sequence
  derived and/or modified protein sequence (wt) from hemagglutinin__InfluenzaA__ADM33069
MKAILVVLLYTFATANADTLCIGYHANNSTDTVDTVLEKNVTVTHSVNLLEDKHNGKLCKLRGVAPLHLGKCNIAGWILGNPECESLSTASSWSYIVETSSSDNGTCYPGDFIDYEELREQLSSVSSFERFEIFPKTSSWPNHDSNKGVTAACPHAGAKSFYKNLIWLVKKGNSYPKLSKSYINDKGKEVLVLWGIHHPSTSADQQSLYQNADAYVFVGTSRYSKKFKPEIAIRPKVRDQEGRMNYYWTLVEPGDKITFEATGNLVVPRYAFAMERNAGSGIIISDTPVHDCNTTCQTPEGAINTSLPFQNIHPITIGKCPKYVKSTKLRLATGLRNVPSIQSRGLFGAIAGFIEGGWTGMVDGWYGYHHQNEQGSGYAADLKSTQNAIDEITNKVNSVIEKMNTQFTAVGKEFNHLEKRIENLNKKVDDGFLDIWTYNAELLVLLENERTLDYHDSNVKNLYEKVRSQLKNNAKEIGNGCFEFYHKCDNTCMESVKNGTYDYPKYSEEAKLNREEIDGVKLESTRIYQILAIYSTVASSLVLVVSLGAISFWMCSNGSLRCRICI

SEQ ID NO: 5782 - protein, 566 aa, Artificial Sequence
  derived and/or modified protein sequence (wt) from hemagglutinin__InfluenzaA__ADM33079
MKAILVVLLYTFATANADTLCIGYHANNSTDTVDTVLEKNVTVTHSVNLLEDKHNGKLCKLRGVAPLHLGKCNIAGWILGNPECESLSTASSWSYIVETSSSDNGTCYPGDFIDYEELREQLSSVSSFERFEIFPKTSSWPNHDSNKGVTAACPHAGAKSFYKNLIWLVKKGNSYPKLSKSYINDKGKEVLVLWGIHHPSTSADQQSLYQNADAYVFVGTSRYSKKFKPEIAIRPKVRDQEGRMNYYWTLVEPGDKITFEATGNLVVPRYAFAMERNAGSGIIISDTPVHDCNTTCQTPKGAINTSLPFQNIHPITIGKCPKYVKSTKLRLATGLRNVPSIQSRGLFGAIAGFIEGGWTGMVDGWYGYHHQNEQGSGYAADLKSTQNAIDEITNKVNSVIEKMNTQFTAVGKEFNHLEKRIENLNKKVDDGFLDIWTYNAELLVLLENERTLDYHDSNVKNLYEKVRSQLKNNAKEIGNGCFEFYHKCDNTCMESVKNGTYDYPKYSEEAKLNREEIDGVKLESTRIYQILAIYSTVASSLVLVVSLGAISFWMCSNGSLRCRICI

SEQ ID NO: 5783 - protein, 566 aa, Artificial Sequence
  derived and/or modified protein sequence (wt) from hemagglutinin__InfluenzaA__ADM33099
MKAILVVLLYTFATANADTLCIGYHANNSTDTVDTVLEKNVTVTHSVNLLEDKHNGKLCKLRGVAPLHLGKCNIAGWILGNPECESLSTASSWSYIVETSSSDNGTCYPGDFIDYEELREQLSSVSSFERFEIFPKTSSWPNHDSNKGVTAACPHAGAKSFYKNLIWLVKKGNSYPKLSKSYINDKGKEVLVLWGIHHPSTSADQQSLYQNADAYVFVGTSRYSKKFKPEIAIRPKVRDQEGRMNYYWTLVEPGDKITFEATGNLMVPRYAFAMERNAGSGIIISDTPVHDCNTTCQTPKGAINTSLPFQNIHPITIGKCPKYVKSTKLRLATGLRNVPSIQSRGLFGAIAGFIEGGWTGMVDGWYGYHHQNEQGSGYAADLKSTQNAIDEITNKVNSVIEKMNTQFTAVGKEFNHLEKRIENLNKKVDDGFLDIWTYNAELLVLLENERTLDYHDSNVKNLYEKVRSQLKNNAKEIGNGCFEFYHKCDNTCMESVKNGTYDYPKYSEEAKLNREEIDGVKLESTRIYQILAIYSTVASSLVLVVSLGAISFWMCSNGSLRCRICI

SEQ ID NO: 5784 - protein, 566 aa, Artificial Sequence; identical to SEQ ID NO: 5783
  derived and/or modified protein sequence (wt) from hemagglutinin__InfluenzaA__ADM33109

SEQ ID NO: 5785 - protein, 566 aa, Artificial Sequence
  derived and/or modified protein sequence (wt) from hemagglutinin__InfluenzaA__ADM33128
MKAILVVLLYTFATANADTLCIGYHANNSTDTVDTVLEKNVTVTHSVNLLEDKHNGKLCKLRGVAPLHLGKCNIAGWILGNPECESLSTASSWSYIVETSSSDNGTCYPGDFIDYEELREQLSSVSSFERFEIFPKTSSWPNHDSNKGVTAACPHAGAKSFYKNLIWLVKKGNSYPKLSKSYINDKGKEVLVLWGIHHPSTSADQQSLYQNADAYVFVGTSRYSKKFKPEIAIRPKVREQEGRMNYYWTLVEPGDKITFEATGNLVVPRYAFAMERNAGSGIIISDTPVHDCNTTCQTPKGAINTSLPFQNIHPITIGKCPKYVKSTKLRLATGLRNVPSIQSRGLFGAIAGFIEGGWTGMVDGWYGYHHQNEQGSGYAADLKSTQNAIDEITNKVNSVIEKMNTQFTAVGKEFNHLEKRIENLNKKVDDGFLDIWTYNAELLVLLENERTLDYHDSNVKNLYEKVRSQLKNNAKEIGNGCFEFYHKCDNTCMESVKNGTYDYPKYSEEAKLNREEIDGVKLESTRIYQILAIYSTVASSLVLVVSLGAISFWMCSNGSLRCRICI

SEQ ID NO: 5786 - protein, 566 aa, Artificial Sequence; identical to SEQ ID NO: 5785
  derived and/or modified protein sequence (wt) from hemagglutinin__InfluenzaA__ADM33137

SEQ ID NO: 5787 - protein, 566 aa, Artificial Sequence; identical to SEQ ID NO: 5785
  derived and/or modified protein sequence (wt) from hemagglutinin__InfluenzaA__ADM33147

SEQ ID NO: 5788 - protein, 566 aa, Artificial Sequence; identical to SEQ ID NO: 5785
  derived and/or modified protein sequence (wt) from hemagglutinin__InfluenzaA__ADM33157

SEQ ID NO: 5789 - protein, 566 aa, Artificial Sequence
  derived and/or modified protein sequence (wt) from hemagglutinin__InfluenzaA__ADM33167
MKAILVVLLYTFATANADTLCIGYHANNSTDTVDTVLEKNVTVTHSVNILEDKHNGKLCKLRGVAPLHLGKCNIAGWILGNPECESLSTASSWSYIVETSSSDNGTCYPGDFIDYEELREQLSSVSSFERFEIFPKTSSWPNHDSNKGVTAACPHAGAKSFYKNLIWLVKKGNSYPKLSKSYINDKGKEVLVLWGIHHPSTSADQQSLYQNADAYVFVGTSRYSKKFKPEIAIRPKVRDQEGRMNYYWTLVEPGDKITFEATGNLVVPRYAFAMERNAGSGIIISDTPVHDCNTTCQTPKGAINTSLPFQNIHPITIGKCPKYVKSTKLRLATGLRNVPSIQSRGLFGAIAGFIEGGWTGMVDGWYGYHHQNEQGSGYAADLKSTQNAIDEITNKVNSVIEKMNTQFTAVGKEFNHLEKRIENLNKKVDDGFLDIWTYNAELLVLLENERTLDYHDSNVKNLYEKVRSQLKNNAKEIGNGCFEFYHKCDNTCMESVKNGTYDYPKYSEEAKLNREKIDGVKLESTRIYQILAIYSTVASSLVLVVSLGAISFWMCSNGSLRCRICI

SEQ ID NO: 5790 - protein, 566 aa, Artificial Sequence; identical to SEQ ID NO: 4856
  derived and/or modified protein sequence (wt) from hemagglutinin__InfluenzaA__ADM33177

SEQ ID NO: 5791 - protein, 566 aa, Artificial Sequence; identical to SEQ ID NO: 5785
  derived and/or modified protein sequence (wt) from hemagglutinin__InfluenzaA__ADM33186

SEQ ID NO: 5792 - protein, 566 aa, Artificial Sequence; identical to SEQ ID NO: 5785
  derived and/or modified protein sequence (wt) from hemagglutinin__InfluenzaA__ADM33195

SEQ ID NO: 5793 - protein, 566 aa, Artificial Sequence; identical to SEQ ID NO: 5782
  derived and/or modified protein sequence (wt) from hemagglutinin__InfluenzaA__ADM33204

SEQ ID NO: 5794 - protein, 566 aa, Artificial Sequence
  derived and/or modified protein sequence (wt) from hemagglutinin__InfluenzaA__ADM33222
MEAILVVLLYTFATANADTLCIGYHANNSTDTVDTVLEKNVTVTHSVNLLEDKHNGKLCKLRGVAPLHLGKCNIAGWILGNPECESLSTASSWSYIVETSSSDNGTCYPGDFIDYEELREQLSSVSSFERFEIFPKTSSWPNHDSNKGVTAACPHAGAKSFYKNLIWLVKKGNSYPKLSKSYINDKGKEVLVLWGIHHPSTSADQQSLYQNADAYVFVGSSRYSKKFKPEIAIRPKVRDQEGRMNYYWTLVEPGDKITFEATGNLVVPRYAFAMERNAGSGIIISDTPVHDCNTTCQTPKGAINTSLPFHNIHPITIGKCPKYVKSTKLRLATGLRNVPSIQSRGLFGAIAGFIEGGWTGMVDGWYGYHHQNEQGSGYAADLKSTQNAIDEITNKVNSVIEKMNTQFTAVGKEFNHLEKRIENLNKKVDDGFLDIWTYNAELLVLLENERTLDYHDSNVKNLYEKVRNQLKNNAKEIGNGCFEFYHKCDNTCMESVKNGTYDYPKYSEEAKLNREEIDGVKLESTRIYQILAIYSTVASSLVLVVSLGAISFWMCSNGSLRCRICI

SEQ ID NO: 5795 - protein, 566 aa, Artificial Sequence
  derived and/or modified protein sequence (wt) from hemagglutinin__InfluenzaA__ADM33232
MEAILVVLLYTFATANADTLCIGYHANNSTDTVDTVLEKNVTVTHSVNLLEDKHNGKLCKLRGVAPLHLGKCNIAGWILGNPECESLSTASSWSYIVETSSSDNGTCYPGDFIDYEELREQLSSVSSFERFEIFPKTSSWPNHDSNKGVTAACPHAGAKSFYKNLIWLVKKGNSYPKLSKSYINDKGKEVLVLWGIHHPSTSADQQSLYQNADAYVFVGSSRYSKKFKPEIAIRPKVRDQEGRMNYYWTLVEPGDKITFEATGNLVVPRYAFAMERNAGSGIIISDTPVHDCNTTCQTPKGAINTSLPFHNIHPITIGKCPKYVKSTKLRLATGLRNVPSIQSRGLFGAIAGFIEGGWTGMVDGWYGYHHQNEQGSGYAADLKSTQNAIDEITNKVNSVIEKTNTQFTAVGKEFNHLEKRIENLNKKVDDGFLDIWTYNAELLVLLENERTLDYHDSNVKNLYEKVRNQLKNNAKEIGNGCFEFYHKCDNTCMESVKNGTYDYPKYSEEAKLNREEIDGVKLESTRIYQILAIYSTVASSLVLVVSLGAISFWMCSNGSLQCRICI

SEQ ID NO: 5796 - protein, 566 aa, Artificial Sequence
  derived and/or modified protein sequence (wt) from hemagglutinin__InfluenzaA__ADM33241
MKAILVVLLYTFATANADTLCIGYHANNSTDTVDTVLEKNVTVTHSVNILEDKHNGKLCKLRGVAPLHLGKCNIAGWILGNPECESLSTASSWSYIVETSSSDNGTCYPGDFIDYEELREQLSSVSSFERFEIFPKTSSWPNHDSNKGVTAACPHAGAKSFYKNLIWLVKKENSYPKLSKSYINDKGKEVLVLWGIHHPSTSADQQSLYQNADAYVFVGSSRYSKKFKPEITIRPKVRDQEGRMNYYWTLVEPGDKITFEATGNLVVPRYAFAMERNAGSGIIISDTPVHDCNTTCQTPKGAINTSLPFQNIHPITIGKCPKYVKSTKLRLATGLRNVPSIQSRGLFGAIAGFIEGGWTGMVDGWYGYHHQNEQGSGYAADLKSTQNAIDEITNKVNSVIEKMNTQFTAVGKEFNHLEKRIENLNKKVDDGFLDIWTYNAELLVLLENERTLDYHDSNVKNLYEKVRSQLKNNAKEIGNGCFEFYHKCDNTCMESVKNGTYDYPKYSEEAKLNREEIDGVKLESTRIYQILAIYSTVASSLVLVVSLGAISFWMCSNGSLRCRICI

SEQ ID NO: 5797 - protein, 566 aa, Artificial Sequence; identical to SEQ ID NO: 5794
  derived and/or modified protein sequence (wt) from hemagglutinin__InfluenzaA__ADM33251

SEQ ID NO: 5798 - protein, 566 aa, Artificial Sequence
  derived and/or modified protein sequence (wt) from hemagglutinin__InfluenzaA__ADM33260
MKAILVVLLYTFATANADTLCIGYHANNSTDTVDTVLEKNVTVTHSVNILEDKHNGKLCKLRGVAPLHLGKCNIAGWILGNPECESLSTASSWSYIVETSSSDNGTCYPGDFIDYEELREQLSSVSSFERFEIFPKTSSWPNHDSNKGVTAACPHAGAKSFYKNLIWLVKKGDSYPKLSKSYINDKGKEVLVLWGIHHPSTSADQQSLYQNADAYVFVGSSRYSKKFKPEIAIRPKVRDQEGRMNYYWTLVEPGDKITFEATGNLVVPRYAFAMERNAGSGIIISDTPVHDCNTTCQTPKGAINTSLPFQNIHPITIGKCPKYVKSTKLRLATGLRNVPSIQSRGLFGAIAGFIEGGWTGMVDGWYGYHHQNEQGSGYAADLKSTQNAIDEITNKVNSVIEKMNTQFTAVGKEFNHLEKRIENLNKKVDDGFLDIWTYNTELLVLLENERTLDYHDSNVKNLYEKVRSQLKNNAKEIGNGCFEFYHKCDNTCMESVKNGTYDYPKYSEEAKLNREEIDGVKLESTRIYQILAIYSTVASSLVLVVSLGAISFWMCSNGSLRCRICI

SEQ ID NO: 5799 - protein, 566 aa, Artificial Sequence
  derived and/or modified protein sequence (wt) from hemagglutinin__InfluenzaA__ADM33280
MKAILVVLLYTFATANADTLCIGYHANNSTDTVDTVLEKNVTVTHSVNILEDKHNGKLCKLRGVAPLHLGKCNIAGWILGNPECESLSTVSSWSYIVETSSSDNGTCYPGDFIDYEELREQLSSVSSFERFEIFPKTSSWPNHDSNKGVTAACPHAGAKSFYKNLIWLVKKGNSYPKLSKSYINDKGKEVLVLWGIHHPSTSADQQSLYQNADAYVFVGSSRYSKKFKPEIAIRPKVRDQEGRMNYYWTLVEPGDKITFEATGNLVVPRYAFAMERNAGSGIIISDTPVHDCNTTCQTPRGAINTSLPFQNIHPITIGKCPKYVKSTKLRLATGLRNVPSIQSRGLFGAIAGFIEGGWTGMVDGWYGYHHQNEQGSGYAADLKSTQNAIDEITNKVNSVIEKMNTQFTAVGKEFNHLEKRIENLNKKVDDGFLDIWTYNAELLVLLENERTLDYHDSNVKNLYEKVRSQLKNNAKEIGNGCFEFYHKCDNTCMESVKNGTYDYPKYSEEAKLNREEIDGVKLESTRIYQILAIYSTVASSLVLVVSLGAISFWMCSNGSLQCRICI

SEQ ID NO: 5800 - protein, 566 aa, Artificial Sequence; identical to SEQ ID NO: 3116
  derived and/or modified protein sequence (wt) from hemagglutinin__InfluenzaA__ADM33290

SEQ ID NO: 5801 - protein, 566 aa, Artificial Sequence; identical to SEQ ID NO: 2669
  derived and/or modified protein sequence (wt) from hemagglutinin__InfluenzaA__ADM33300

SEQ ID NO: 5802 - protein, 566 aa, Artificial Sequence; identical to SEQ ID NO: 2656
  derived and/or modified protein sequence (wt) from hemagglutinin__InfluenzaA__ADM33310

SEQ ID NO: 5803 - protein, 566 aa, Artificial Sequence
  derived and/or modified protein sequence (wt) from hemagglutinin__InfluenzaA__ADM33320
MKAILVVMLYTFATANADTLCIGYHANNSTDTVDTVLEKNVTVTHSVNLLEDKHNGKLCKLRGVAPLHLGKCNIAGWILGNPECESLSTASSWSYIVETFSSDNGTCYPGDFIDYEELREQLSSVSSFERFEIFPKTSSWPNHDSNKGVTAACPHAGAKSFYKNLIWLVKKGNSYPKLSKSYINDKGKEVLVLWGIHHPSTSADQQSLYQNADAYVFVGSSRYSKKFKPEIAIRPKVRDQEGRMNYYWTLVEPGDKITFEATGNLVVPRYAFAMERNAGSGIIISDTPVHDCNTTCQTPKGAINTSLPFQNIHPITIGKCPKYVKSTKLRLATGLRNVPSIQSRGLFGAIAGFIEGGWTGMVDGWYGYHHQNEQGSGYAADLKSTQNAIDEITNKVNSVIEKMNTQFTAVGKEFNHLEKRIENLNKKVDDGFLDIWTYNAELLVLLENERTLDYHDSNVKNLYEKVRSQLKNNAKEIGNGCFEFYHKCDNTCMESVKNGTYDYPKYSEEAKLNREEIDGVKLESTRIYQILAIYSTVASSLVLVVSLGAISFWMCSNGSLQCRICI

SEQ ID NO: 5804 - protein, 566 aa, Artificial Sequence; identical to SEQ ID NO: 2695
  derived and/or modified protein sequence (wt) from hemagglutinin__InfluenzaA__ADM33340

SEQ ID NO: 5805 - protein, 566 aa, Artificial Sequence
  derived and/or modified protein sequence (wt) from hemagglutinin__InfluenzaA__ADM33355
MKAILVVMLYTFATANADTLCIGYHANNSTDTVDTVLEKNVTVTHSVNLLEDKHNGKLCKLRGVAPLHLGKCNIAGWILGNPECESLSTASSWSYIVETSSSDNGTCYPGDFIDYEELREQLSSVSSFERFEIFPKTSSWPNHDSNKGVTAACPHAGAKSFYKNLIWLVKKGNSYPKLSKSYINDKGKEVLVLWGIHHPSTSADQQSLYQNADAYVFVGSSRYSKKFKPEIAIRPKVRDQEGRMNYYWTLVEPGDKITFEATGNLVVPRYAFAMERNAGSGIIISDTPVHNCNTTCQTPKGAINTSLPFQNIHPITIGKCPKYVKSTKLRLATGLRNVPSIQSRGLFGAIAGFIEGGWTGMVDGWYGYHHQNEQGSGYAADLKSTQNAIDEITNKVNSVIEKMNTQFTAVGKEFNHLEKRIENLNKKVDDGFLDIWTYNAELLVLLENERTLDYHDSNVKNLYEKVRSQLKNNAKEIGNGCFEFYHKCDNTCMESVKNGTYDYPKYSEEAKLNREEIDGVKLESTRIYQILAIYSTVASSLVLVVSLGAISFWMCSNGSLQCRICI

SEQ ID NO: 5806 - protein, 566 aa, Artificial Sequence; identical to SEQ ID NO: 5805
  derived and/or modified protein sequence (wt) from hemagglutinin__InfluenzaA__ADM33365

SEQ ID NO: 5807 - protein, 566 aa, Artificial Sequence; identical to SEQ ID NO: 2695
  derived and/or modified protein sequence (wt) from hemagglutinin__InfluenzaA__ADM33375

SEQ ID NO: 5808 - protein, 566 aa, Artificial Sequence
  derived and/or modified protein sequence (wt) from hemagglutinin__InfluenzaA__ADM33385
MKAILVVMLYTFATANADTLCIGYHANNSTDTVDTVLEKNVTVTHSVNLLEDKHNGKLCKLRGVAPLHLGKCNIAGWILGNPECESLSTASSWSYIVETSSSDNGTCYPGDFIDYEELREQLSSVSSFERFEIFPKTSSWPNHDSNKGVTAACPHAGAKSFYKNLIWLVKKGNSYPKLSKSYINDKGKEVLVLWGIHHPSTSADQQSLYQNADAYVFVGSSRYSKKFKPEIAIRPKVRDQEGRMNYYWTLVEPGDKITFEATGNLVVPRYAFAMERNAGSGIIISDTPVHDCNTTCQTSKGAINTSLPFQNIHPITIGKCPKYVKSTKLRLATGLRNVPSIQSRGLFGAIAGFIEGGWTGMVDGWYGYHHQNEQGSGYAADLKSTQNAIDEITNKVNSVIEKMNTQFTAVGKEFNHLEKRIENLNKKVDDGFLDIWTYNAELLVLLENERTLDYHDSNVKNLYEKVRSQLKNNAKEIGNGCFEFYHKCDNTCMESVKNGTYDYPKYSEEAKLNREEIDGVKLESTRIYQILAIYSTVASSLVLVVSLGAISFWMCSNGSLQCRICI

SEQ ID NO: 5809 - protein, 566 aa, Artificial Sequence; identical to SEQ ID NO: 3116
  derived and/or modified protein sequence (wt) from hemagglutinin__InfluenzaA__ADM33395

SEQ ID NO: 5810 - protein, 566 aa, Artificial Sequence; identical to SEQ ID NO: 3116
  derived and/or modified protein sequence (wt) from hemagglutinin__InfluenzaA__ADM33405

SEQ ID NO: 5811 - protein, 566 aa, Artificial Sequence; identical to SEQ ID NO: 5805
  derived and/or modified protein sequence (wt) from hemagglutinin__InfluenzaA__ADM33415

SEQ ID NO: 5812 - protein, 566 aa, Artificial Sequence; identical to SEQ ID NO: 3512
  derived and/or modified protein sequence (wt) from hemagglutinin__InfluenzaA__ADM33425

SEQ ID NO: 5813 - protein, 566 aa, Artificial Sequence
  derived and/or modified protein sequence (wt) from hemagglutinin__InfluenzaA__ADM34007
MKAILVVLLYTFATANADTLCIGYHANNSTDTVDTVLEKNVTVTHSVNLLEDKHNGKLCKLRGVAPLHLGKCNIAGWILGNPECESLSTASSWSYIVETSSSDNGTCYPGDFIDYEELREQLSSVSSFERFEIFPKTSSWPNHDSNKGVTAACPHAGAKSFYKNLIWLVKKGNSYPKLSKSYINDKGKEVLVLWGIHHPSTSADQQSLYQNADAYVFVGTSRYSKKFKPEIAIRPKVRDQEGRMNYYWTLEEPGDKITFEATGNLVVPRYAFAMERNAGSGIIISDTPVHDCNTTCQTPKGAINTSLPFQNIHPITIGKCPKYVKSTKLRLATGLRNVPSIQSRGLFGAIAGFIEGGWTGMVDGWYGYHHQNEQGSGYAADLKSTQNAIDEITNKVNSVIEKMNTQFTAVGKEFNHLEKRIENLNKKVDDGFLDIWTYNAELLVLLENERTLDYHDSNVKNLYEKVRSQLKNNAKEIGNGCFEFYHKCDNTCMESVKNGTYDYPKYSEEAKLNREEIDGVKLESTRIYQILAIYSTVASSLVLVVSLGAISFWMCSNGSLQCRICI

SEQ ID NO: 5814 - protein, 566 aa, Artificial Sequence; identical to SEQ ID NO: 2669
  derived and/or modified protein sequence (wt) from hemagglutinin__InfluenzaA__ADM52443

SEQ ID NO: 5815 - protein, 566 aa, Artificial Sequence
  derived and/or modified protein sequence (wt) from hemagglutinin__InfluenzaA__ADM52453
MKAILVVLLYTFATANADTLCIGYHANNSTDTVDTVLEKNVTVTHSVNILEDKHNGKLCKLRGVAPLHLGKCNIAGWILGNPECESLSTASSWSYIVETSSSDNGTCYPGDFIDYEELREQLSSVSSFERFEIFPKTSSWPNHDSNKGVTAACPHAGAKSFYKNLIWLVKKGNSYPKLSKSYINDKGKEVLVLWGIHHPSTSADQQSLYQNADAYVFVGSSRYSKKFKPEIAIRPKVRDQEGRMNYYWTLVEPGDKITFEATGNLVVPRYAFAMERNAGSGIIISDTPIHDCNTTCQTPKGAINTSLPFQNVHPITIGKCPKYVKSTKLRLATGLRNVPSIQSRGLFGAIAGFIEGGWTGMVDGWYGYHHQNEQGSGYAADLKSTQNAIDEITNKVNSVIEKMNTQFTAVGKEFNHLEKRIENLNKKVDDGFLDIWTYNAELLVLLENERTLDYHDSNVKNLYEKVRSQLKNNAKEIGNGCFEFYHKCDNTCMESVKNGTYDYPKYSEEAKLNREEIDGVKLESTRIYQILAIYSTVASSLVLVVSLGAISFWMCSNGSLQCRICI

SEQ ID NO: 5816 - protein, 566 aa, Artificial Sequence
  derived and/or modified protein sequence (wt) from hemagglutinin__InfluenzaA__ADM52473
MKAILAVLLYTFATANADTLCIGYHANNSTDTVDTVLEKNVTVTHSVNLLEDKHNGKLCKLRGVAPLHLGKCNIAGWILGNPECESLSTASSWSYIVETSSSGNGTCYPGDFIDYEELREQLSSVSSFERFEIFPKTSSWPNHDSNKGVTAACPHAGAKSFYKNLLWLVKKGNSYPKLSKSYINDKGKEVLVLWGIHHPSTSADQQSLYQNADAYVFVGTSRYSKKFKPEIAIRPKVRDQEGRMNYYWTLVGPGDKITFEATGNLVVPRYAFAMERNAGSGIIISDTPVHDCNTTCQTPKGAINTSLPFQNIHPITIGKCPKYVKSTKLRLATGLRNVPSIQSRGLFGAIAGFIEGGWTGMVDGWYGYHHQNEQGSGYAADLKSTQNAIDEITNKVNSVIEKMNTQFTAVGKEFNHLEKRIENLNKKVDDGFLDIWTYNAELLVLLENERTLDYHDSNVKNLYEKVRSQLKNNAKEIGNGCFEFYHKCDNTCMESVKNGTYDYPKYSEEAKLNREEIDGVKLESTRIYQILAIYSTVASSLVLVVSLGAISFWMCSNGSLQCRICI

SEQ ID NO: 5817 - protein, 566 aa, Artificial Sequence; identical to SEQ ID NO: 3833
  derived and/or modified protein sequence (wt) from hemagglutinin__InfluenzaA__ADM52483

SEQ ID NO: 5818 - protein, 566 aa, Artificial Sequence; identical to SEQ ID NO: 2849
  derived and/or modified protein sequence (wt) from hemagglutinin__InfluenzaA__ADM52493

SEQ ID NO: 5819 - protein, 566 aa, Artificial Sequence; identical to SEQ ID NO: 2849
  derived and/or modified protein sequence (wt) from hemagglutinin__InfluenzaA__ADM52513

SEQ ID NO: 5820 - protein, 566 aa, Artificial Sequence; identical to SEQ ID NO: 2849
  derived and/or modified protein sequence (wt) from hemagglutinin__InfluenzaA__ADM52524

SEQ ID NO: 5821 - protein, 566 aa, Artificial Sequence; identical to SEQ ID NO: 2849
  derived and/or modified protein sequence (wt) from hemagglutinin__InfluenzaA__ADM52534

SEQ ID NO: 5822 - protein, 566 aa, Artificial Sequence; identical to SEQ ID NO: 2849
  derived and/or modified protein sequence (wt) from hemagglutinin__InfluenzaA__ADM52554

SEQ ID NO: 5823 - protein, 566 aa, Artificial Sequence; identical to SEQ ID NO: 2849
  derived and/or modified protein sequence (wt) from hemagglutinin__InfluenzaA__ADM52564

SEQ ID NO: 5824 - protein, 566 aa, Artificial Sequence; identical to SEQ ID NO: 2656
  derived and/or modified protein sequence (wt) from hemagglutinin__InfluenzaA__ADM52574

SEQ ID NO: 5825 - protein, 566 aa, Artificial Sequence; identical to SEQ ID NO: 2669
  derived and/or modified protein sequence (wt) from hemagglutinin__InfluenzaA__ADM52584

SEQ ID NO: 5826 - protein, 566 aa, Artificial Sequence
  derived and/or modified protein sequence (wt) from hemagglutinin__InfluenzaA__ADM52594
MKAILVVLLYTFATANADTLCIGYHANNSTDTVDTVLEKNVTVTHSVNLLEDKHNGKLCKLRGVAPLHLGKCNIAGWILGNPECESLSTASSWSYIVETSSSDNGTCYPGDFIDYEELREQLSSVSSFERFEIFPKTSSWPNHDSNKGVTAACPHAGAKSFYKNLIWLVKKGNSYPKLSKSYINDKGKEVLVLWGIHHPSTSADQQSLYQNADAYVFVGTSKYSKKFKPEIAIRPKVRDQEGRMNYYWTLVEPGDKITFEATGNLVVPRYAFAMERNAGSGIIISDTPVHDCNTTCQTPKGAINTSLPFQNIHPITIGKCPKYVKSTKLRLATGLRNVPSIQSRGLFGAIAGFIEGGWTGMVDGWYGYHHQNEQGSGYAADLKSTQNAIDKITNKVNSVIEKMNTQFTAVGKEFNHLEKRIENLNKKVDDGFLDIWTYNAELLVLLENERTLDYHDSNVKNLYEKVRSQLKNNAKEIGNGCFEFYHKCDNTCMESVKNGTYDYPKYSEEAKLNREEIDGVKLESTRIYQILAIYSTVASSLVLVVSLGAISFWMCSNGSLQCRICI

SEQ ID NO: 5827 - protein, 566 aa, Artificial Sequence; identical to SEQ ID NO: 2849
  derived and/or modified protein sequence (wt) from hemagglutinin__InfluenzaA__ADM52604

SEQ ID NO: 5828 - protein, 566 aa, Artificial Sequence; identical to SEQ ID NO: 2849
  derived and/or modified protein sequence (wt) from hemagglutinin__InfluenzaA__ADM52614

SEQ ID NO: 5829 - protein, 566 aa, Artificial Sequence; identical to SEQ ID NO: 4441
  derived and/or modified protein sequence (wt) from hemagglutinin__InfluenzaA__ADM52624

SEQ ID NO: 5830 - protein, 566 aa, Artificial Sequence; identical to SEQ ID NO: 2849
  derived and/or modified protein sequence (wt) from hemagglutinin__InfluenzaA__ADM52634

SEQ ID NO: 5831 - protein, 566 aa, Artificial Sequence; identical to SEQ ID NO: 2849
  derived and/or modified protein sequence (wt) from hemagglutinin__InfluenzaA__ADM52644

SEQ ID NO: 5832 - protein, 566 aa, Artificial Sequence; identical to SEQ ID NO: 2849
  derived and/or modified protein sequence (wt) from hemagglutinin__InfluenzaA__ADM52654

SEQ ID NO: 5833 - protein, 566 aa, Artificial Sequence; identical to SEQ ID NO: 4257
  derived and/or modified protein sequence (wt) from hemagglutinin__InfluenzaA__ADM52664

SEQ ID NO: 5834 - protein, 566 aa, Artificial Sequence; identical to SEQ ID NO: 4441
  derived and/or modified protein sequence (wt) from hemagglutinin__InfluenzaA__ADM52674

SEQ ID NO: 5835 - protein, 566 aa, Artificial Sequence; identical to SEQ ID NO: 2849
  derived and/or modified protein sequence (wt) from hemagglutinin__InfluenzaA__ADM52684

SEQ ID NO: 5836 - protein, 566 aa, Artificial Sequence; identical to SEQ ID NO: 4441
  derived and/or modified protein sequence (wt) from hemagglutinin__InfluenzaA__ADM52704

SEQ ID NO: 5837 - protein, 566 aa, Artificial Sequence; identical to SEQ ID NO: 4257
  derived and/or modified protein sequence (wt) from hemagglutinin__InfluenzaA__ADM52714

SEQ ID NO: 5838 - protein, 566 aa, Artificial Sequence
  derived and/or modified protein sequence (wt) from hemagglutinin__InfluenzaA__ADM86399
MKAILVVLLYTFATANADTLCIGYHANNSTDTVDTVLEKNVTVTHSVNILEDKHNGKLCKLRGVAPLHLGKCNIAGWILGNPECESLSTASSWSYIVETSSSDNGTCYPGDFIDYEELREQLSSVSSFERFEIFPKTSSWPNHDSNKGVTAACPHAGAKSFYKNLIWLVKKGNSYPKLSKSYINDKGKEVLVLWGIHHPSTSADQQSLYQNADAYVFVGSSRYSKKFKPEIAIRPKVRDQEGRMNYYWTLVEPGDKITFEATGNLVVPRYAFAMERNAGSGIIISDTPVHDCNTTCQTPKGAVNTSLPFQNIHPITIGKCPKYVKSTKLRLATGLRNVPSIQSRGLFGAIAGFIEGGWTGMVDGWYGYHHQNEQGSGYAADLKSTQNAIDEITNKVNSVIEKMNTQFTAVGKEFNHLEKRIENLNKKVDDGFLDIWTYNAELLVLLENERTLDYHDSNVKNLYEKVRSQLKNNAKEVGNGCFEFYHKCDNTCMESVKNGTYDYPKYSEEAKLNREEIDGVKLESTRIYQILAIYSTAASSLVLVVSLGAISFWMCSNGSLQCRICI

SEQ ID NO: 5839 - protein, 566 aa, Artificial Sequence; identical to SEQ ID NO: 2669
  derived and/or modified protein sequence (wt) from hemagglutinin__InfluenzaA__ADM86409

SEQ ID NO: 5840 - protein, 566 aa, Artificial Sequence; identical to SEQ ID NO: 2669
  derived and/or modified protein sequence (wt) from hemagglutinin__InfluenzaA__ADM86419

SEQ ID NO: 5841 - protein, 566 aa, Artificial Sequence; identical to SEQ ID NO: 4318
  derived and/or modified protein sequence (wt) from hemagglutinin__InfluenzaA__ADM86440

SEQ ID NO: 5842 - protein, 566 aa, Artificial Sequence; identical to SEQ ID NO: 2669
  derived and/or modified protein sequence (wt) from hemagglutinin__InfluenzaA__ADM86450

SEQ ID NO: 5843 - protein, 568 aa, Artificial Sequence
  derived and/or modified protein sequence (wt) from hemagglutinin__InfluenzaA__ADM95450
MEKIVLLFAIVSLVKSDQICIGYHANNSTEQVDTIMEKNVTVTHAQDILEKTHNGKLCDLDGVKPLILRDCSVAGWLLGNPMCDEFINVPEWSYIVEKANPVNDLCYPGDFNDYEELKHLLSRINHFEKIQIIPKSSWPSHEASLGVSAACPYQGKSSFFRNVVWLIKKNNTYPTIKRSYNNTNQEDLLVMWGIHHPNDAAEQTNLYQNPTTYISVGTSTLNQRLTPRIATRSKVNGQSGRMEFFWTILKPNDAINFESNGNFIAPEYAYKIVKKGDSTIMKSELEYGNCNTKCQTPMGAINSSMPFHNIHPLTIGECPKYVKSNRLVLATGLRNSPQREGRRKKRGLFGAIAGFIEGGWQGMVDGWYGYHHSNEQGSGYAADKESTQKAIDGVTNKVNSIIDKMNTQFEAVGREFNNLERRIENLNKKMEDGFLDVWTYNAELLVLMENERTLDFHDSNVKNLYDKVRLQLRDNAKELGNGCFEFYHKCDNECMESVRNGTYDYPQYSEEARLKREEISGVKLESIGIYQILSIYSTVASSLALAIMVAGLSLWMCSNGSLQCRICI

SEQ ID NO: 5844 - protein, 566 aa, Artificial Sequence; identical to SEQ ID NO: 2669
  derived and/or modified protein sequence (wt) from hemagglutinin__InfluenzaA__ADM95745

SEQ ID NO: 5845 - protein, 566 aa, Artificial Sequence; identical to SEQ ID NO: 2669
  derived and/or modified protein sequence (wt) from hemagglutinin__InfluenzaA__ADM95746

SEQ ID NO: 5846 - protein, 566 aa, Artificial Sequence; identical to SEQ ID NO: 2669
  derived and/or modified protein sequence (wt) from hemagglutinin__InfluenzaA__ADM95747

SEQ ID NO: 5847 - protein, 566 aa, Artificial Sequence; identical to SEQ ID NO: 2669
  derived and/or modified protein sequence (wt) from hemagglutinin__InfluenzaA__ADM95749

SEQ ID NO: 5848 - protein, 566 aa, Artificial Sequence
  derived and/or modified protein sequence (wt) from hemagglutinin__InfluenzaA__ADM95750
MKAILVVLLYTFATANADTLCIGYHANNSTDTVDTVLEKNVTVTHSFNLLEDKHNGKLCKLRGVAPLHLGKCNIAGWILGNPECESLSTASSWSYIVETSSSDNGTCYPGDFIDYEELREQLSSVSSFERFEIFPKTSSWPNHDSNKGVTAACPHAGAKSFYKNLIWLVKKGSSYPKLSKSYINDKGKEVLVLWGIHHPSTSADQQSLYQNADAYVFVGSSRYSKKFKPEIAIRPKVRDQEGRMNYYWTLVEPGDKITFEATGNLVVPRYAFAMERNAGSGIIISDTPVHDCNTTCQTPKGAINTSLPFQNIHPITIGKCPKYVKSTKLRLATGLRNVPSIQSRGLFGAIAGFIEGGWTGMVDGWYGYHHQNEQGSGYAADLKSTQNAIDEITNKVNSVIEKMNTQFTAVGKEFNHLEKRIENLNKKVDDGFLDIWTYNAELLVLLENERTLDYHDSNVKNLYEKVRSQLKNNAKEIGNGCFEFYHKCDNTCMESVKNGTYDYPKYSEEAKLNREEIDGVKLESTRIYQILAIYSTVASSLVLVVSLGAISFWMCSNGSLQCRICI

SEQ ID NO: 5849 - protein, 566 aa, Artificial Sequence; identical to SEQ ID NO: 2669
  derived and/or modified protein sequence (wt) from hemagglutinin__InfluenzaA__ADM95751

SEQ ID NO: 5850 - protein, 566 aa, Artificial Sequence; identical to SEQ ID NO: 2669
  derived and/or modified protein sequence (wt) from hemagglutinin__InfluenzaA__ADM95752

SEQ ID NO: 5851 - protein, 566 aa, Artificial Sequence; identical to SEQ ID NO: 2669
  derived and/or modified protein sequence (wt) from hemagglutinin__InfluenzaA__ADM95753

SEQ ID NO: 5852 - protein, 566 aa, Artificial Sequence; identical to SEQ ID NO: 2669
  derived and/or modified protein sequence (wt) from hemagglutinin__InfluenzaA__ADM95754

SEQ ID NO: 5853 - protein, 566 aa, Artificial Sequence; identical to SEQ ID NO: 2669
  derived and/or modified protein sequence (wt) from hemagglutinin__InfluenzaA__ADM95755

SEQ ID NO: 5854 - protein, 566 aa, Artificial Sequence; identical to SEQ ID NO: 2849
  derived and/or modified protein sequence (wt) from hemagglutinin__InfluenzaA__ADM95757

SEQ ID NO: 5855 - protein, 566 aa, Artificial Sequence; identical to SEQ ID NO: 2669
  derived and/or modified protein sequence (wt) from hemagglutinin__InfluenzaA__ADM95758

SEQ ID NO: 5856 - protein, 566 aa, Artificial Sequence
  derived and/or modified protein sequence (wt) from hemagglutinin__InfluenzaA__ADM95759
MKAILVVLLYTFATANADTLCIGYHANNSTDTVDTVLEKNVTVTHSVNLLEDKHNGKLCKLRGVAPLHLGKCNIAGWILGNPECESLSTASSWSYIVETSSSDYGTCYPGDFIDYEELREQLSSVSSFERFEIFPKTSSWPNHDSNKGVTAACPHAGAKSFYKNLIWLVKKGNSYPKLSKSYINDKGKEVLVLWGIHHPSTSADQQSLYQNADAYVFVGTSRYSKKFKPEIAIRPKVRDQEGRMNYYWTLVEPGDKITFEATGNLVVPRYAFAMERNAGSGIIISDTPVHDCNTTCQTPKGAINTSLPFQNIHPITIGKCPKYVKSTKLRLATGLRNVPSIQSRGLFGAIAGFIEGGWTGMVDGWYGYHHQNEQGSGYAADLKSTQNAIDEITNKVNSVIEKMNTQFTAVGKEFNHLEKRIENLNKKVDDGFLDIWTYNAELLVLLENERTLDYHDSNVKNLYEKVRSQLKNNAKEIGNGCFEFYHKCDNTCMESVKNGTYDYPKYSEEAKLNREEIDGVKLESTRIYQILAIYSTVASSLVLVVSLGAISFWMCSNGSLQCRICI

SEQ ID NO: 5857 - protein, 566 aa, Artificial Sequence; identical to SEQ ID NO: 2656
  derived and/or modified protein sequence (wt) from hemagglutinin__InfluenzaA__ADM95760

SEQ ID NO: 5858 - protein, 566 aa, Artificial Sequence; identical to SEQ ID NO: 2669
  derived and/or modified protein sequence (wt) from hemagglutinin__InfluenzaA__ADM95761

SEQ ID NO: 5859 - protein, 566 aa, Artificial Sequence
  derived and/or modified protein sequence (wt) from hemagglutinin__InfluenzaA__ADM95763
MKAILVVLLYTFATANADTLCIGYHANNSTDTVDTVLEKNVTVTHSVNLLEDKNNGKLCKLRGVAPLHLGKCNIAGWILGNPECESLSTASSWSYIVETSSSDNGTCYPGDFIDYEELREQLSSVSSFERFEIFPKTSSWPNHDSNKGVTAACPHAGAKSFYKNLIWLVKKGNSYPKLSKSYINDKGKEVLVLWGIHHPSTSADQQSLYQNADAYVFVGSSRYSKKFKPEIAIRPKVRDQEGRMNYYWTLVEPGDKITFEATGNLVVPRYAFAMERNAGSGIIISDTPVHDCNTTCQTPKGAINTSLPFQNIHPITIGKCPKYVKSTKLRLATGLRNVPSIQSRGLFGAIAGFIEGGWTGMVDGWYGYHHQNEQGSGYAADLKSTQNAIDEITNKVNSVIEKMNTQFTAVGKEFNHLEKRIENLNKKVDDGFLDIWTYNAELLVLLENERTLDYHDSNVKNLYEKVRSQLKNNAKEIGNGCFEFYHKCDNTCMESVKNGTYDYPKYSEEAKLNREEIDGVKLESTRIYQILAIYSTVASSLVLVVSLGAISFWMCSNGSLQCRICI

SEQ ID NO: 5860 - protein, 566 aa, Artificial Sequence; identical to SEQ ID NO: 2669
  derived and/or modified protein sequence (wt) from hemagglutinin__InfluenzaA__ADM95764

SEQ ID NO: 5861 - protein, 566 aa, Artificial Sequence; identical to SEQ ID NO: 2669
  derived and/or modified protein sequence (wt) from hemagglutinin__InfluenzaA__ADM95765

SEQ ID NO: 5862 - protein, 566 aa, Artificial Sequence; identical to SEQ ID NO: 2669
  derived and/or modified protein sequence (wt) from hemagglutinin__InfluenzaA__ADM95767

SEQ ID NO: 5863 - protein, 566 aa, Artificial Sequence; identical to SEQ ID NO: 3512
  derived and/or modified protein sequence (wt) from hemagglutinin__InfluenzaA__ADM95768

SEQ ID NO: 5864 - protein, 566 aa, Artificial Sequence; identical to SEQ ID NO: 3022
  derived and/or modified protein sequence (wt) from hemagglutinin__InfluenzaA__ADM95769

SEQ ID NO: 5865 - protein, 566 aa, Artificial Sequence; identical to SEQ ID NO: 4785
  derived and/or modified protein sequence (wt) from hemagglutinin__InfluenzaA__ADM95771

SEQ ID NO: 5866 - protein, 566 aa, Artificial Sequence; identical to SEQ ID NO: 2669
  derived and/or modified protein sequence (wt) from hemagglutinin__InfluenzaA__ADM95772

SEQ ID NO: 5867 - protein, 566 aa, Artificial Sequence; identical to SEQ ID NO: 2669
  derived and/or modified protein sequence (wt) from hemagglutinin__InfluenzaA__ADM95774

SEQ ID NO: 5868 - protein, 566 aa, Artificial Sequence; identical to SEQ ID NO: 2669
  derived and/or modified protein sequence (wt) from hemagglutinin__InfluenzaA__ADM95775

SEQ ID NO: 5869 - protein, 566 aa, Artificial Sequence; identical to SEQ ID NO: 3022
  derived and/or modified protein sequence (wt) from hemagglutinin__InfluenzaA__ADM95776

SEQ ID NO: 5870 - protein, 566 aa, Artificial Sequence; identical to SEQ ID NO: 3022
  derived and/or modified protein sequence (wt) from hemagglutinin__InfluenzaA__ADM95778

SEQ ID NO: 5871 - protein, 566 aa, Artificial Sequence
  derived and/or modified protein sequence (wt) from hemagglutinin__InfluenzaA__ADM95779
MKAILVVLLYTFATANADTLCIGYHANNSTDTVDTVLEKNVTVTHSVNLLEDKHNGKLCKLRGVAPLHLGKCNIAGWILGNPECESLSTASSWSYIVETSSSDNGTCYPGDFIDYEELREQLSSVSSFERFEIFPKTSSWPNHDSNKGVTAACPHAGAKSFYKNLIWLVKKGNSYPKLSKSYINDKGKEVLVLWGIHHPSTSADQQSLYQNADAYVFVGTSRYSKKFKPEIAIRPKVRDQEGRMNYYWTLVEPGDKITFEATGNLVVPRYAFAMERNAGSGIIISDTPVHDCNTTCQTPKGAINTSLPFQNIHPITIGKCPKYVKSTKLRLATGLRNIPSIQSRGLFGAIAGFIEGGWTGMVDGWYGYHHQNEQGSGYAADLKSTQNAIDEITNKVNSVIEKMNTQFTAVGKEFNHLEKRIENLNKKVDDGFLDIWTYNAELLVLLENERTLDYHDSNVKNLYEKVRSQLKNNAKEIGNGCFEFYHKCDNTCMESVKNGTYDYPKYSEEAKLNREEIDGVKLEPTRIYQILAIYSTVASSLVLVVSLGAISFWMCSNGSLQCRICI

SEQ ID NO: 5872 - protein, 566 aa, Artificial Sequence; identical to SEQ ID NO: 3022
  derived and/or modified protein sequence (wt) from hemagglutinin__InfluenzaA__ADM95780

SEQ ID NO: 5873 - protein, 566 aa, Artificial Sequence; identical to SEQ ID NO: 3512
  derived and/or modified protein sequence (wt) from hemagglutinin__InfluenzaA__ADM95783

SEQ ID NO: 5874 - protein, 566 aa, Artificial Sequence; identical to SEQ ID NO: 2669
  derived and/or modified protein sequence (wt) from hemagglutinin__InfluenzaA__ADM95784

SEQ ID NO: 5875 - protein, 566 aa, Artificial Sequence; identical to SEQ ID NO: 2669
  derived and/or modified protein sequence (wt) from hemagglutinin__InfluenzaA__ADM95785

SEQ ID NO: 5876 - protein, 566 aa, Artificial Sequence
  derived and/or modified protein sequence (wt) from hemagglutinin__InfluenzaA__ADM95786
MKAILVVLLYTFATANADTLCIGYHANNSTDTVDTVLEKNVTVTHSVNLLEDKHNGKLCKLRGVAPLHLGKCNIAGWILGNPECESLSTASSWSYIVETSSSDNGTCYPGDFIDYEELREQLSSVSSFERFEIFPKTSSWPNHDSNKGVTAACSHAGAKSFYKNLIWLVKKGNSYPKLSKSYINDKGKEVLVLWGIHHPSTSADQQSLYQNADAYVFVGTSRYSKKFKPEIAIRPKVREQEGRMNYYWTLVEPGDKITFEATGNLVVPRYAFAMERNAGSGIIISDTPVHDCNTTCQTPKGAINTSLPFQNIHPITIGKCPKYVKSTKLRLATGLRNVPSIQSRGLFGAIAGFIEGGWTGMVDGWYGYHHQNEQGSGYAADLKSTQNAIDEITNKVNSVIEKMNTQFTAVGKEFNHLEKRIENLNKKVDDGFLDIWTYNAELLVLLENERTLDYHDSNVKNLYEKVRSQLKNNAKEIGNGCFEFYHKCDNTCMESVKNGTYDYPKYSEEAKLNREEIDGVKLESTRIYQILAIYSTVASSLVLVVSLGAISFWMCSNGSLQCRICI

SEQ ID NO: 5877 - protein, 566 aa, Artificial Sequence; identical to SEQ ID NO: 3022
  derived and/or modified protein sequence (wt) from hemagglutinin__InfluenzaA__ADM95788

SEQ ID NO: 5878 - protein, 566 aa, Artificial Sequence; identical to SEQ ID NO: 3022
  derived and/or modified protein sequence (wt) from hemagglutinin__InfluenzaA__ADM95789

SEQ ID NO: 5879 - protein, 566 aa, Artificial Sequence
  derived and/or modified protein sequence (wt) from hemagglutinin__InfluenzaA__ADM95790
MKAILVVLLYTFATANADTLCIGYHANNSTDTVDTVLEKNVTVTHSVNLLEDKHNGKLCKLRGVAPLHLGKCNIAGWILGNPECESLSTASSWSYIVETSSSDNGTCYPGDFIDYEELREQLSSVSSFERFEIFPKTSSWPNHDSNKGVTAACPHAGAKSFYKNLIWLVKKGNSYPKLRKSYINDKGKEVLVLWGIHHPSTSADQQSLYQNADAYVFVGTSRYSKKFKPEIAIRPKVRDQEGRMNYYWTLVEPGDKITFEATGNLVVPRYAFAMERNAGSGIIISDTPVHDCNTTCQTPKGAINTSLPFQNIHPITIGKCPKYVKSTKLRLATGLRNIPSIQSRGLFGAIAGFIEGGWTGMVDGWYGYHHQNEQGSGYAADLKSTQNAIDEITNKVNSVIEKMNTQFTAVGKEFNHLEKRIENLNKKVDDGFLDIWTYNAELLVLLENERTLDYHDSNVKNLYEKVRSQLKNNAKEIGNGCFEFYHKCDNTCMESVKNGTYDYPKYSEEAKLNREEIDGVKLESTRIYQILAIYSTVASSLVLVVSLGAISFWMCSNGSLQCRICI

SEQ ID NO: 5880 - protein, 566 aa, Artificial Sequence; identical to SEQ ID NO: 5879
  derived and/or modified protein sequence (wt) from hemagglutinin__InfluenzaA__ADM95791

SEQ ID NO: 5881 - protein, 566 aa, Artificial Sequence; identical to SEQ ID NO: 5879
  derived and/or modified protein sequence (wt) from hemagglutinin__InfluenzaA__ADM95792

SEQ ID NO: 5882 - protein, 566 aa, Artificial Sequence; identical to SEQ ID NO: 5266
  derived and/or modified protein sequence (wt) from hemagglutinin__InfluenzaA__ADM95793

SEQ ID NO: 5883 - protein, 566 aa, Artificial Sequence; identical to SEQ ID NO: 3022
  derived and/or modified protein sequence (wt) from hemagglutinin__InfluenzaA__ADM95794

SEQ ID NO: 5884 - protein, 566 aa, Artificial Sequence; identical to SEQ ID NO: 2669
  derived and/or modified protein sequence (wt) from hemagglutinin__InfluenzaA__ADM95795

SEQ ID NO: 5885 - protein, 566 aa, Artificial Sequence; identical to SEQ ID NO: 3771
  derived and/or modified protein sequence (wt) from hemagglutinin__InfluenzaA__ADM95798

SEQ ID NO: 5886 - protein, 566 aa, Artificial Sequence
  derived and/or modified protein sequence (wt) from hemagglutinin__InfluenzaA__ADM95799
MKAILVVLLYTFATANADTLCIGYHANNSTDTVDTVLEKNVTVTHSVNLLEDKHNGKLCKLRGVAPLHLGKCNIAGWILGNPECESLSTASSWSYIVETSSSDNGTCYPGDFIDYEELREQLSSVSSFERFEIFPKTSSWPNHDSNKGVTAACPHAGAKSFYKNLIWLVKKGNSYPKLSKSYINDKGKEVLVLWGIHHPSTSADQQSLYQNADAYVFVGTSRYSKKFKPEIAIRPKVRDQEGRMNYYWTLVEPGDKITFEATGNLVVPRYAFAMERNAGSGIIISDTPVHDCNTTCQTPKGAINTSLPFQNIHPITIGKCPKYVKSTKLRLATGLRNVPSIQSRGLFGAIAGFIEGGWTGMVDGWYGYHHQNEQGSGYAADLKSTQNAIDEITNKVNSVIEKMNTQFTAVGKEFNHLEKRIENLNKKVDDGFLDIWTYNAELLVLLENERTLDYHDSNVKNLYEKVRSQLKNNAKEIENGCFEFYHKCDNTCMESVKNGTYDYPKYSEEAKLNREEIDGVKLESTRIYQILAIYSTVASSLVLVVSLGAISFWMCSNGSLQCRICI

SEQ ID NO: 5887 - protein, 566 aa, Artificial Sequence
  derived and/or modified protein sequence (wt) from hemagglutinin__InfluenzaA__ADM95800
MKAILVVLLYTFATANADTLCIGYHANNSTDTVDTVLEKNVTVTHSVNLLEDKHNGKLCKLRGVAPLHLGKCNIAGWILGNPECESLSTASSWSYIVETSSSDNGTCYPGDFIDYEELREQLSSVSSFERFEIFPKTSSWPNHDSNKGVTAACPHAGAKSFYKNLIWLVKKGNSYPKLSKSYINDKGKEVLVLWGIHHPSTSADQQSLYQNADAYVFVGTSRYSKKFKPEIAIRPKVRDQEGRMNYYWTLVAPGDKITFEATGNLVVPRYAFAMERNAGSGIIISDTPVHDCNTTCQTPKGAINTSLPFQNIHPITIGKCPKYVKSTKLRLATGLRNVPSIQSRGLFGAIAGFIEGGWTGMVDGWYGYHHQNEQGSGYAADLKSTQNAIDEITNKVNSVIEKMNTQFTAVGKEFNHLEKRIENLNKKVDDGFLDIWTYNAELLVLLENERTLDYHDSNVKNLYEKVRSQLKNNAKEIGNGCFEFYHKCDNTCMESVKNGTYDYPKYSEEAKLNREEIDGVKLESTRIYQILAIYSTVASSLVLVVSLGAISFWMCSNGSLQCRICI

SEQ ID NO: 5888 - protein, 566 aa, Artificial Sequence; identical to SEQ ID NO: 3022
  derived and/or modified protein sequence (wt) from hemagglutinin__InfluenzaA__ADM95801

SEQ ID NO: 5889 - protein, 566 aa, Artificial Sequence; identical to SEQ ID NO: 3022
  derived and/or modified protein sequence (wt) from hemagglutinin__InfluenzaA__ADM95802

SEQ ID NO: 5890 - protein, 566 aa, Artificial Sequence; identical to SEQ ID NO: 5876
  derived and/or modified protein sequence (wt) from hemagglutinin__InfluenzaA__ADM95803

SEQ ID NO: 5891 - protein, 566 aa, Artificial Sequence
  derived and/or modified protein sequence (wt) from hemagglutinin__InfluenzaA__ADM95804
MKAILVVLLYTFATANADTLCIGYHANNSTDTVDTVLEKNVTVTHSVNLLEDKHNGKLCKLRGVAPLHLGKCNIAGWILGNPECESLSTASSWSYIVETSSSDNGTCYPGDFIDYEELREQLSSVSSFERFEIFPKTSSWPNHDSNKGVTAACPHAGAKNFYKNLIWLVKKGNSYPKLSKSYINDKGKEVLVLWGIHHPSTSADQQSLYQNADAYVFVGTSRYSKKFKPEIAIRPKVRDQEGRMNYYWTLVEPGDKITFEATGNLVVPRYAFAMERNAGSGIIISDTPVHDCNTTCQTPKGAINTSLPFQNIHPITIGKCPKYVKSTKLRLATGLRNVPSIQSRGLFGAIAGFIEGGWTGMVDGWYGYHHQNEQGSGYAADLKSTQNAIDEITNKVNSVIEKMNTQFTAVGKEFNHLEKRIENLNKKVDDGFLDIWTYNAELLVLLENERTLDYHDSNVKKLYEKVRSQLKNNAKEIGNGCFEFYHKCDNTCMESVKNGTYDYPKYSEEAKLNREEIDGVKLESTRIYQILAIYSTVASSLVLVVSLGAISFWMCSNGSLQCRICI

SEQ ID NO: 5892 - protein, 566 aa, Artificial Sequence; identical to SEQ ID NO: 4351
  derived and/or modified protein sequence (wt) from hemagglutinin__InfluenzaA__ADM95805

SEQ ID NO: 5893 - protein, 566 aa, Artificial Sequence; identical to SEQ ID NO: 3770
  derived and/or modified protein sequence (wt) from hemagglutinin__InfluenzaA__ADM95808

SEQ ID NO: 5894 - protein, 566 aa, Artificial Sequence; identical to SEQ ID NO: 3770
  derived and/or modified protein sequence (wt) from hemagglutinin__InfluenzaA__ADM95809

SEQ ID NO: 5895 - protein, 566 aa, Artificial Sequence; identical to SEQ ID NO: 3770
  derived and/or modified protein sequence (wt) from hemagglutinin__InfluenzaA__ADM95810

SEQ ID NO: 5896 - protein, 566 aa, Artificial Sequence
  derived and/or modified protein sequence (wt) from hemagglutinin__InfluenzaA__ADM95812
MKAILVVLLYTFATANADTLCIGYHANNSTDTVDTVLEKNVTVTHSVNLLEDKHNGKLCKLRGVAPLHLGKCNIAGWILGNPECELLSTASSWSYIVETSSSDNGTCYPGDFIDYEELREQLSSVSSFERFEIFPKTSSWPNHDSNKGVTAACPHAGAKSFYKNLIWLVKKGNSYPKLSKSYINDKGKEVLVLWGIHHPSTSADQQSLYQNADAYVFVGTSRYSKKFKPEIAIRPKVRDQEGRMNYYWTLVEPGDKITFEATGNLVVPRYAFAMERNAGSGIIISDTPVHDCNTTCQTPKGAINTSLPFQNIHPITIGKCPKYVKSTKLRLATGLRNVPSIQSRGLFGAIAGFIEGGWTGMVDGWYGYHHQNEQGSGYAADLKSTQNAIDEITNKVNSVIEKMNTQFTAVGKEFNHLEKRIENLNKKVDDGFLDIWTYNAELLVLLENERTLDYHDSNVKNLYEKVRSQLKNNAKEIGNGCFEFYHKCDNTCMESVKNGTYDYPKYSEEAKLNREEIDGVKLESTRIYQILAIYSTVASSLVLVVSLGAISFWMCSNGSLQCRICI

SEQ ID NO: 5897 - protein, 566 aa, Artificial Sequence; identical to SEQ ID NO: 5266
  derived and/or modified protein sequence (wt) from hemagglutinin__InfluenzaA__ADM95816

SEQ ID NO: 5898 - protein, 566 aa, Artificial Sequence; identical to SEQ ID NO: 5266
  derived and/or modified protein sequence (wt) from hemagglutinin__InfluenzaA__ADM95819

SEQ ID NO: 5899 - protein, 566 aa, Artificial Sequence; identical to SEQ ID NO: 4351
  derived and/or modified protein sequence (wt) from hemagglutinin__InfluenzaA__ADM95820

SEQ ID NO: 5900 - protein, 566 aa, Artificial Sequence; identical to SEQ ID NO: 5266
  derived and/or modified protein sequence (wt) from hemagglutinin__InfluenzaA__ADM95821

SEQ ID NO: 5901 - protein, 566 aa, Artificial Sequence; identical to SEQ ID NO: 3770
  derived and/or modified protein sequence (wt) from hemagglutinin__InfluenzaA__ADM95822

SEQ ID NO: 5902 - protein, 566 aa, Artificial Sequence; identical to SEQ ID NO: 3770
  derived and/or modified protein sequence (wt) from hemagglutinin__InfluenzaA__ADM95823

SEQ ID NO: 5903 - protein, 566 aa, Artificial Sequence
  derived and/or modified protein sequence (wt) from hemagglutinin__InfluenzaA__ADM95824
MKAILVVLLYTFATANADTLCIGYHANNSTDTVDTVLEKNVTVTHSVNLLEDKHNGKLCKLRGVAPLHLGKCNIAGWILGNPECESLSTASSWSYIVETSSSDNGTCYPGDFIDYEELREQLSSVSSFERFEIFPKTSSWPNHDSNKGVTAACPHAGAKSFYKNLIWLVKKGNSYPKLSKSYINDKGKEVLVLWGIHHPSTSADQQSLYQNADAYVFVGTSRYSKKFKPEIAIRPKVRDQEGRMNYHWTLVEPGDKITFEATGNLVVPRYAFAMERNAGSGIIISDTPVHDCNTTCQTPKGAINTSLPFQNIHPITIGKCPKYVKSTKLRMATGLRNVPSIQSRGLFGAIAGFIEGGWTGMVDGWYGYHHQNEQGSGYAADLKSTQNAIDEITNKVNSVIEKMNTQFTAVGKEFNHLEKRIENLNKKVDDGFLDIWTYNAELLVLLENERTLDYHDSNVKNLYEKVRSQLKNNAKEIGNGCFEFYHKCDNTCMESVKNGTYDYPKYSEEAKLNREEIDGVKLESTRIYQILAIYSTVASSLVLVVSLGAISFWMCSNGSLQCRICI

SEQ ID NO: 5904 - protein, 566 aa, Artificial Sequence; identical to SEQ ID NO: 5266
  derived and/or modified protein sequence (wt) from hemagglutinin__InfluenzaA__ADM95825

SEQ ID NO: 5905 - protein, 566 aa, Artificial Sequence; identical to SEQ ID NO: 5266
  derived and/or modified protein sequence (wt) from hemagglutinin__InfluenzaA__ADM95826

SEQ ID NO: 5906 - protein, 566 aa, Artificial Sequence
  derived and/or modified protein sequence (wt) from hemagglutinin__InfluenzaA__ADM95827
MKAILVVLLYTFATANADTLCIGYHANNSTDTVDTVLEKNVTVTHSVNLLEDKHNGKLCKLKGVAPLHLGKCNIAGWILGNPECESLSTASSWSYIVETSSSDNGTCYPGDFIDYEELREQLSSVSSFERFEIFPKTSSWPNHDSNKGVTAACPHAGAKSFYKNLIWLVKKGNSYPKLSKSYINDKGKEVLVLWGIHHPSTSADQQSLYQNADAYVFVGTSRYSKKFKPEIAIRPKVRDQEGRMNYYWTLVEPGDKITFEATGNLVVPRYAFAMERNAGSGIIISDTPVHDCNTTCQTPKGAINTSLPFQNIHPITIGKCPKYVKSTKLRLATGLRNVPSIQSRGLFGAIAGFIEGGWTGMVDGWYGYHHQNEQGSGYAADLKSTQHAIDEITNKVNSVIEKMNTQFTAVGKEFNHLEKRIENLNKKVDDGFLDIWTYNAELLVLLENERTLDYHDSNVKNLYEKVRSQLKNNAKEIGNGCFEFYHKCDNTCMESVKNGTYDYPKYSEEAKLNREEIDGVKLESTRIYQILAIYSTVASSLVLVVSLGAISFWMCSNGSLQCRICI

SEQ ID NO: 5907 - protein, 566 aa, Artificial Sequence
  derived and/or modified protein sequence (wt) from hemagglutinin__InfluenzaA__ADM95828
MKAILVVLLYTFATANADTLCIGYHANNSTDTVDTVLEKNVTVTHSVNLLEDKHNGKLCKLRGVAPLHLGKCNIAGWILGNPECESLSTASSWSYIVETSSSDNGTCYPGDFIDYEELREQLSSVSSFERFEIFPKTSSWPNHDSNKGVTAACPHAGAKSFYKNLIWLVKKGNSYPKLSKSYINDKGKEVLVLWGIHHPSTSADQQSLYQNADAYVFVGTSRYSKKFKPEIAIRPKVRDQEGRMNYYWTLVEPGDKITFEATGNLVVPRYAFAMERNAGSGIIISDTPAHDCNTTCQTPKGAINTSLPFQNIHPITIGKCPKYVKSTKLRMATGLRNVPSIQSRGLFGAIAGFIEGGWTGMVDGWYGYHHQNEQGSGYAADLKSTQNAIDEITNKVNSVIEKMNTQFTAVGKEFNHLEKRIENLNKKVDDGFLDIWTYNAELLVLLENERTLDYHDSNVKNLYEKVRSQLKNNAKEIGNGCFEFYHKCDNTCMESVKNGTYDYPKYSEEAKLNREEIDGVKLESTRIYQILAIYSTVASSLVLVVSLGAISFWMCSNGSLQCRICI

SEQ ID NO: 5908 - protein, 566 aa, Artificial Sequence
  derived and/or modified protein sequence (wt) from hemagglutinin__InfluenzaA__ADM95829
MKAILVVLLYTFATANADTLCIGYHANNSTDTVDTVLEKNVTVTHSVNLLEDKHNGKLCKLRGVAPLHLGKCNIAGWILGNPECESLSTASSWSYIVETSSSDNGTCYPGDFIDYEELREQLSSVSSFERFEIFPKTSSWPNHDSNKGVTAACPHAGAKSFYKNLIWLVKKGNSYPKLSKSYINDKGKEVLVLWGIHHPSTSADQQSLYQNADAYVFVGTSRYSKKFKPEIAIRPKVRDQEGRMNYYWTLVEPGDKITFEATGNLVVPRYAFAMERNAGSGIIISDTPVHDCNTTCQTPKGAINTSLPFQNIHPITIGKCPKYVKSTKLRLATGLRNVPSIQSRGLFGAIAGFIEGGWTGMVDGWYGYHHQNEQGSGYAADLKSTQNAIDEITNKVNSVIEKMNTQFTAVGKEFNHLEKRIENLNKKVDDGFLDIWTYNAELLVLLENERTLDYHDSNVKKLYEKVRSQLKNNAKEIGNGCFEFYHKCDNMCMESVKNGTYDYPKYSEEAKLNREEIDGVKLESTRIYQILAIYSTVASSLVLVVSLGAISFWMCSNGSLQCRICI

SEQ ID NO: 5909 - protein, 566 aa, Artificial Sequence
  derived and/or modified protein sequence (wt) from hemagglutinin__InfluenzaA__ADM95831
MKAILVVLLYTFVTANADTLCIGYHANNSTDTVDTVLEKNVTVTHSVNLLEDKHNGKLCKLRGVAPLHLGKCNIAGWILGNPECESLSTASSWSYIVETSSSDNGTCYPGDFIDYEELREQLSSVSSFERFEIFPKTSSWPNHDSNKGVTAACPHAGAKSFYKNLIWLVKKGNSYPKLSKSYINDKGKEVLVLWGIHHPSTSADQQSLYQNADAYVFVGTSRYSKKFKPEIAIRPKVRDQEGRMNYYWTLVEPGDKITFEATGNLVVPRYAFAMEKNAGSGIIISDTPVHDCNTTCQTPKGAINTSLPFQNIHPITIGKCPKYVKSTKLRLATGLRNVPSIQSRGLFGAIAGFIEGGWTGMVDGWYGYHHQNEQGSGYAADLKSTQHAIDEITNKVNSVIEKMNTQFTAVGKEFNHLEKRIENLNKKVDDGFLDIWTYNAELLVLLENERTLDYHDSNVKNLYEKVRSQLKNNAKEIGNGCFEFYHKCDNTCMESVKNGTYDYPKYSEEAKLNREEIDGVKLESTRIYQILAIYSTVASSLVLVVSLGAISFWMCSNGSLQCRICI

SEQ ID NO: 5910 - protein, 566 aa, Artificial Sequence; identical to SEQ ID NO: 3770
  derived and/or modified protein sequence (wt) from hemagglutinin__InfluenzaA__ADM95832

SEQ ID NO: 5911 - protein, 566 aa, Artificial Sequence; identical to SEQ ID NO: 4351
  derived and/or modified protein sequence (wt) from hemagglutinin__InfluenzaA__ADM95833

SEQ ID NO: 5912 - protein, 566 aa, Artificial Sequence; identical to SEQ ID NO: 5896
  derived and/or modified protein sequence (wt) from hemagglutinin__InfluenzaA__ADM95834

SEQ ID NO: 5913 - protein, 566 aa, Artificial Sequence; identical to SEQ ID NO: 4351
  derived and/or modified protein sequence (wt) from hemagglutinin__InfluenzaA__ADM95836

SEQ ID NO: 5914 - protein, 566 aa, Artificial Sequence; identical to SEQ ID NO: 5266
  derived and/or modified protein sequence (wt) from hemagglutinin__InfluenzaA__ADM95837

SEQ ID NO: 5915 - protein, 566 aa, Artificial Sequence
  derived and/or modified protein sequence (wt) from hemagglutinin__InfluenzaA__ADM95838
MKAILVVLLYTFATANADTLCIGYHANNSTDTVDTVLEKNVTVTHSVNLLEDKHNGKLCKLRGVAPLHLGKCNIAGWILGNPECESLSTASSWSYIVETSSSDNGTCYPGDFIDYEELREQLSSVSSFERFEIFPKTSSWPNHDSNKGVTAACLHAGAKSFYKNLIWLVKKGNSYPKLSKSYINDKGKEVLVLWGIHHPSTSADQQSLYQNADAYVFVGTSRYSKKFKPEIAIRPKVRDQEGRMNYYWTLVEPGDKITFEATGNLVVPRYAFAMERNAGSGIIISDTPVHDCNTTCQTPKGAINTSLPFQNIHPITIGKCPKYVKSTKLRLATGLRNVPSIQSRGLFGAIAGFIEGGWTGMVDGWYGYHHQNEQGSGYAADLKSTQNAIDKITNKVNSVIEKMNTQFTAVGKEFNHLEKRIENLNKKVDDGFLDIWTYNAELLVLLENERTLDYHDSNVKNLYEKVRSQLKNNAKEIGNGCFEFYHKCDNTCMESVKNGTYDYPKYSEEAKLNREEIDGVKLESTRIYQILAIYSTVASSLVLVVSLGAISFWMCSNGSLQCRICI

SEQ ID NO: 5916 - protein, 566 aa, Artificial Sequence; identical to SEQ ID NO: 4351
  derived and/or modified protein sequence (wt) from hemagglutinin__InfluenzaA__ADM95839

SEQ ID NO: 5917 - protein, 566 aa, Artificial Sequence; identical to SEQ ID NO: 5876
  derived and/or modified protein sequence (wt) from hemagglutinin__InfluenzaA__ADM95840

SEQ ID NO: 5918 - protein, 566 aa, Artificial Sequence; identical to SEQ ID NO: 5876
  derived and/or modified protein sequence (wt) from hemagglutinin__InfluenzaA__ADM95842

SEQ ID NO: 5919 - protein, 566 aa, Artificial Sequence; identical to SEQ ID NO: 5266
  derived and/or modified protein sequence (wt) from hemagglutinin__InfluenzaA__ADM95843

SEQ ID NO: 5920 - protein, 566 aa, Artificial Sequence; identical to SEQ ID NO: 5266
  derived and/or modified protein sequence (wt) from hemagglutinin__InfluenzaA__ADM95844

SEQ ID NO: 5921 - protein, 566 aa, Artificial Sequence
  derived and/or modified protein sequence (wt) from hemagglutinin__InfluenzaA__ADM95845
MKAILVVLLYTFATANADTLCIGYHANNSTDTVDTVLEKNVTVTHSVNLLEDKHNGKLCKLRGVAPLHLGKCNIAGWILGNPECESLSTASSWSYIVETSSSDNGTCYPGDFIDYEELREQLSSVSSFERFEIFPKTSSWPNHDSNKGVTAACPHAGAKSFYKNLIWLVKKGNSYPKLSKSYINDKGKEVLVLWGIHHPSTSADQQSLYQNADAYVFVGTSRYSKKFKPEIAIRPKVRDQEGRMNYYWTLVEPGDKITFEATGNLVVPRYAFAMERNAGSGIIISDTPVHDCNTTCQTPKGAINTSLPFQNIHPITIGKCPKYVKSTKLRMATGLRNVPSIQSRGLFGAIAGFIEGGWTGMVDGWYGYHHQNEQGSGYAADLKSTQNAIDEITNKVNSVIEKMNTQFTAVGKEFNHLEKRIENLNKKVDDGFLDIWTYNAELLVLLENERTLDYHDSNVKNLYEKVRSQLKNNAKEIGNGCFEFYHKCDNTCMESVKNGTYDYPKYSEETKLNREEIDGVKLESTRIYQILAIYSTVASSLVLVVSLGAISFWMCSNGSLQCRICI

SEQ ID NO: 5922 - protein, 566 aa, Artificial Sequence
  derived and/or modified protein sequence (wt) from hemagglutinin__InfluenzaA__ADM95846
MKAILVVLLYTFATANADTLCIGYHANNSTDTVDTVLEKNVTVTHSVNLLEDKHNGKLCKLRGVAPLHLGKCNIAGWILGNPECESLSTASSWSYIVEASSSDNGTCYPGDFIDYEELREQLSSVSSFERFEIFPKTSSWPNHDSNKGVTAACPHAGAKSFYKNLIWLVKKGNSYPKLSKSYINDKGKEVLVLWGIHHPSTSADQQSLYQNADAYVFVGTSRYSKKFKPEIAIRPKVRDQEGRMNYYWTLVEPGDKITFEATGNLVVPRYAFAMERNAGSGIIISDTPVHDCNTTCQTPKGAINTSLPFQNIHPITIGKCPKYVKSTKLRLATGLRNIPSIQSRGLFGAIAGFIEGGWTGMVDGWYGYHHQNEQGSGYAADLKSTQNAIDEITNKVNSVIEKMNTQFTAVGKEFNHLEKRIENLNKKVDDGFLDIWTYNAELLVLLENERTLDYHDSNVKNLYEKVRSQLKNNAKEIGNGCFEFYHKCDNTCMESVKNGTYDYPKYSEEAKLNREEIDGVKLESTRIYQILAIYSTVASSLVLVVSLGAISFWMCSNGSLQCRICI

SEQ ID NO: 5923 - protein, 566 aa, Artificial Sequence; identical to SEQ ID NO: 3770
  derived and/or modified protein sequence (wt) from hemagglutinin__InfluenzaA__ADM95847

SEQ ID NO: 5924 - protein, 566 aa, Artificial Sequence; identical to SEQ ID NO: 3770
  derived and/or modified protein sequence (wt) from hemagglutinin__InfluenzaA__ADM95848

SEQ ID NO: 5925 - protein, 566 aa, Artificial Sequence
  derived and/or modified protein sequence (wt) from hemagglutinin__InfluenzaA__ADM95849
MKAILVVLLYTFATANADTLCIGYHANNSTDTVDTVLEKNVTVTHSVNLLEDKHNGKLCKLRGVAPLHLGKCNIAGWILGNPECESLSTASSWSYIVETSSSDNGTCYPGDFIDYEELREQLSSVSSFERFEIFPKTSSWPNHDSNKGVTAACPHAGAKSFYKNLIWLVKKGNSYPKLSKSYINDKGKEVLVLWGIHHPSTSADQQSLYQNADAYVFVGTSRYSKKFKPEIAIRPKVRDQEGRMNYYWTLVEPGDKITFEATGNLVVPRYAFAMERNAGSGIIISDTPVHDCNTTCQTPKGAINTSLPFQNIHPITIGKCPKYVKSTKLRLATGLRNVPSIQSRGLFGAIAGFIEGGWTGMVDGWYGYHHQNEQGSGYAADLKSTQNAIDEITNKVNSVIEKMNTQFTAVGKEFNHLEKRIENLNKKVDDGFLDIWTYNAELLVLLENERTLDYHDSNVKKLYEKVRSQLKNNAKEIGNGCFEFYHKCDNTCMESVKNGTYDYPKYSEEAKLNREEIDGVKLESTRIYQILAIYSTVASSLVLVISLGAISFWMCSNGSLQCRICI

SEQ ID NO: 5926 - protein, 566 aa, Artificial Sequence; identical to SEQ ID NO: 5266
  derived and/or modified protein sequence (wt) from hemagglutinin__InfluenzaA__ADM95850

SEQ ID NO: 5927 - protein, 566 aa, Artificial Sequence
  derived and/or modified protein sequence (wt) from hemagglutinin__InfluenzaA__ADM95851
MKAILVVLLYTFATANADTLCIGYHANNSTDTVDTVLEKNVTVTHSVNLLEDKHNGKLCKLRGVAPLHLGKCNIAGWILGNPECESLSTTSSWSYIVETSSSDNGTCYPGDFIDYEELREQLSSVSSFERFEIFPKTSSWPNHDSNKGVTAACPHAGAKSFYKNLIWLVKKGNSYPKLSKSYINDKGKEVLVLWGIHHPSTSADQQSLYQNADAYVFVGTSRYSKKFKPEIAIRPKVRDQEGRMNYYWTLVEPGDKITFEATGNLVVPRYAFAMERNAGSGIIISDTPVHDCNTTCQTPKGAINTSLPFQNIHPITIGKCPKYVKSTKLRLATGLRNIPSIQSRGLFGAIAGFIEGGWTGMVDGWYGYHHQNEQGSGYAADLKSTQNAIDEITNKVNSVIEKMNTQFTAVGKEFNHLEKRIENLNKKVDDGFLDIWTYNAELLVLLENERTLDYHDSNVKNLYEKVRSQLKNNAKEIGNGCFEFYHKCDNTCMESVKNGTYDYPKYSEEAKLNREEIDGVKLESTRIYQILAIYSTVASSLVLVVSLGAISFWMCSNGSLQCRICI

SEQ ID NO: 5928 - protein, 566 aa, Artificial Sequence
  derived and/or modified protein sequence (wt) from hemagglutinin__InfluenzaA__ADM95852
MKAILVVLLYTFATANADTLCIGYHANNSTDTVDTVLEKNVTVTHSVNLLEDKHNGKLCKLRGVAPLHLGKCNIAGWILGNPECESLSTASSWSYIVETSSSDNGTCYPGDFIDYEELREQLSSVSSFERFEIFPKTSSWPNHDSNKGVTAACPHAGAKSFYKNLIWLVKKGNSYPKLSKSYINDKGKEVLVLWGIHHPSTSADQQSLYQNADAYVFVGTSRYSKKFKPEIAIRPKVRDQEGRMNYYWTLVEPGDKITFEATGNLVVPRYAFAMERNAGSGIIISDTPVHDCNTTCQTPKGAINTSLPFQNIHPITIGKCPKYVKSTKLRLATGLRNVPSIQSRGLFGAIAGFIEGGWTGMVDGWYGYHHQNEQGSGYAADLKSTQNAIDEITNKVNSVIEKMNTQFTAVGKEFNHLEKRIENLNKKVDDGFLDIWTYNAELLVLLENERTLDYHDSNVKKLYEKIRSQLKNNAKEIGNGCFEFYHKCDNTCMESVKNGTYDYPKYSEEAKLNREEIDGVKLESTRIYQILAIYSTVASSLVLVVSLGAISFWMCSNGSLQCRICI

SEQ ID NO: 5929 - protein, 566 aa, Artificial Sequence; identical to SEQ ID NO: 4089
  derived and/or modified protein sequence (wt) from hemagglutinin__InfluenzaA__ADM95854

SEQ ID NO: 5930 - protein, 566 aa, Artificial Sequence
  derived and/or modified protein sequence (wt) from hemagglutinin__InfluenzaA__ADM95855
MKAILVVLLYTFATTNADTLCIGYHANNSTDTVDTVLEKNVTVTHSVNLLEDKHNGKLCKLRGVAPLHLGKCNIAGWILGNPECESLSTASSWSYIVETSSSDNGTCYPGDFIDYEELREQLSSVSSFERFEIFPKTSSWPNHDSNKGVTAACPHAGAKSFYKNLIWLVKKGNSYPKLSKSYINDKGKEVLVLWGIHHPSTSADQQSLYQNADAYVFVGTSRYSKKFKPEIAIRPKVRDQEGRMNYYWTLVEPGDKITFEATGNLVVPRYAFAMERNAGSGIIISDTPVHDCNTTCQTPKGAINTSLPFQNIHPITIGKCPKYVKSTKLRLATGLRNVPSIQSRGLFGAIAGFIEGGWTGMVDGWYGYHHQNEQGSGYAADLKSTQNAIDEITNKVNSVIEKMNTQFTAVGKEFNHLEKRIENLNKKVDDGFLDIWTYNAELLVLLENERTLDYHDSNVKKLYEKVRSQLKNNAKEIGNGCFEFYHKCDNTCMESVKNGTYDYPKYSEEAKLNREEIDGVKLESTRIYQILAIYSTVASSLVLVVSLGAISFWMCSNGSLQCRICI

SEQ ID NO: 5931 - protein, 566 aa, Artificial Sequence
  derived and/or modified protein sequence (wt) from hemagglutinin__InfluenzaA__ADM95857
MKAILVVLLYTFATANADTLCIGYHANNSTDTVDTVLEKNVTVTHSVNLLEDKHNGKLCKLRGVAPLHLGKCNIAGWILGNPECESLSTANSWSYIVETSSSDNGTCYPGDFIDYEELREQLSSVSSFERFEIFPKTSSWPNHDSNKGVTAACPHAGAKSFYKNLIWLVKKGNSYPKLSKSYINDKGKEVLVLWGIHHPSTSADQQSLYQNADAYVFVGTSRYSKKFKPEIAIRPKVRDQEGRMNYYWTLVEPGDKITFEATGNLVVPRYAFAMERNAGSGIIISDTPVHDCNTTCQTPKGAINTSLPFQNIHPITIGKCPKYVKSTKLRMATGLRNVPSIQSRGLFGAIAGFIEGGWTGMVDGWYGYHHQNEQGSGYAADLKSTQNAIDEITNKVNSVIEKMNTQFTAVGKEFNHLEKRIENLNKKVDDGFLDIWTYNAELLVLLENERTLDYHDSNVKNLYEKVRSQLKNNAKEIGNGCFEFYHKCDNTCMESVKNGTYDYPKYSEEAKLNREEIDGVKLESTRIYQILAIYSTVASSLVLVVSLGAISFWMCSNGSLQCRICI

SEQ ID NO: 5932 - protein, 566 aa, Artificial Sequence; identical to SEQ ID NO: 4351
  derived and/or modified protein sequence (wt) from hemagglutinin__InfluenzaA__ADM95858

SEQ ID NO: 5933 - protein, 566 aa, Artificial Sequence
  derived and/or modified protein sequence (wt) from hemagglutinin__InfluenzaA__ADM95859
MKAILVVLLYTFATANADTLCIGYHANNSTDTVDTVLEKNVTVTHSVNLLEDKHNEKLCKLRGVAPLHLGKCNIAGWILGNPECESLSTASSWSYIVETSSSDNGTCYPGDFIDYEELREQLSSVSSFERFEIFPKTSSWPNHDSNKGVTAACPHAGAKSFYKNLIWLVKKGNSYPKLSKSYINDKGKEVLVLWGIHHPSTSADQQSLYQNADAYVFVGTSRYSKKFKPEIAIRPKVRDQEGRMNYYWTLVEPGDKITFEATGNLVVPRYAFAMERNAGSGIIISDTPVHDCNTTCQTPKGAINTSLPFQNIHPITIGKCPKYVKSTKLRLATGLRNVPSIQSRGLFGAIAGFIEGGWTGMVDGWYGYHHQNEQGSGYAADLKSTQNAIDEITNKVNSVIEKMNTQFTAVGKEFNHLEKRIENLNKKVDDGFLDIWTYNAELLVLLENERTLDYHDSNVKKLYEKVRSQLKNNAKEIGNGCFEFYHKCDNTCMESVKNGTYDYPKYSEEAKLNREEIDGVKLESTRIYQILAIYSTVASSLVLVVSLGAISFWMCSNGSLQCRICI

SEQ ID NO: 5934 - protein, 566 aa, Artificial Sequence; identical to SEQ ID NO: 4296
  derived and/or modified protein sequence (wt) from hemagglutinin__InfluenzaA__ADM95860

SEQ ID NO: 5935 - protein, 566 aa, Artificial Sequence; identical to SEQ ID NO: 5896
  derived and/or modified protein sequence (wt) from hemagglutinin__InfluenzaA__ADM95862

SEQ ID NO: 5936 - protein, 566 aa, Artificial Sequence
  derived and/or modified protein sequence (wt) from hemagglutinin__InfluenzaA__ADM95864
MKAILVVLLYTFATANADTLCIGYHANNSTDTVDTVLEKNVTVTHSVNLLEDKHNGKLCKLRGVAPLHLGKCNIAGWILGNPECESLSTASSWSYIVETSSSDNGTCYPGDFIDYEELREQLSSVSSFERFEIFPKTSSWPNHDSNKGVTAACPHAGAKSFYKNLIWLVKKGNSYPKLSKSYINDKGKEVLVLWGIHHPSTSADQQSLYQNADAYVFVGTSRYSKKFKPEIAIRPRVRDQEGRMNYHWTLVEPGDKITFEATGNLVVPRYAFAMERNAGSGIIISDTPVHDCNTTCQTPKGAINTSLPFQNIHPITIGKCPKYVKSTKLRLATGLRNIPSIQSRGLFGAIAGFIEGGWTGMVDGWYGYHHQNEQGSGYAADLKSTQNAIDEITNKVNSVIEKMNTQFTAVGKEFNHLEKRIENLNKKVDDGFLDIWTYNAELLVLLENERTLDYHDSNVKNLYEKVRSQLKNNAKEIGNGCFEFYHKCDNTCMESVKNGTYDYPKYSEEAKLNREEIDGVKLESTRIYQILAIYSTVASSLVLVVSLGAISFWMCSNGSLQCRICI

SEQ ID NO: 5937 - protein, 566 aa, Artificial Sequence; identical to SEQ ID NO: 4221
  derived and/or modified protein sequence (wt) from hemagglutinin__InfluenzaA__ADM95865

SEQ ID NO: 5938 - protein, 566 aa, Artificial Sequence
  derived and/or modified protein sequence (wt) from hemagglutinin__InfluenzaA__ADM95866
MKAILVVLLYTFATTNADTLCIGYHANNSTDTVDTVLEKNVTVTHSVNLLEDKHNGKLCKLRGVAPLHLGKCNIAGWILGNPECESLSTASSWSYIVEISSSDNGTCYPGDFIDYEELREQLSSVSSFERFEIFPKTSSWPNHDSNKGVTAACPHAGAKSFYKNLIWLVKKGNSYPKLSKSYINDKGKEVLVLWGIHHPSTSADQQSLYQNADAYVFVGTSRYSKKFKPEIAIRPKVRDQEGRMNYYWTLVEPGDKITFEATGNLVVPRYAFAMERNAGSGIIISDTPVHDCNTTCQTPKGAINTSLPFQNIHPITIGKCPKYVKSTKLRLVTGLRNVPSIQSRGLFGAIAGFIEGGWTGMVDGWYGYHHQNEQGSGYAADLKSTQNAIDKITNKVNSVIEKMNTQFTAVGKEFNHLEKRIENLNKKVDDGFLDIWTYNAELLVLLENERTLDYHDSNVKNLYEKVRSQLKNNAKEIGNGCFEFYHKCDNTCMESVKNGTYDYPKYSEEAKLNREEIDGVKLESTRIYQILAIYSTAASSLVLVVSLGAISFWMCSNGSLQCRICI

SEQ ID NO: 5939 - protein, 565 aa, Artificial Sequence; identical to SEQ ID NO: 5513
  derived and/or modified protein sequence (wt) from hemagglutinin__InfluenzaA__ADN06300

SEQ ID NO: 5940 - protein, 565 aa, Artificial Sequence
  derived and/or modified protein sequence (wt) from hemagglutinin__InfluenzaA__ADN06311
MKVKLLVLLCTLTATYADTICIGYHANNSTDTVDTVLEKNVTVTHSVNLLENSHNGKLCLLKGIAPLQLGNCSVAGWILGNPECELLISKESWSYIVEKPNPENGTCYPGHFADYEELREQLSSVSSFERFEIFPKGSSWPNHTVTGVSASCSHNGENSFYRNLLWLTGKNGLYPNLSKSYANNKEKEVLVLWGVHHPPNIADQKTLYHTENAYVSVVSSHYSRKFTPEIAKRPKVRDQEGRINYYWTLLEPGDTIIFEANGNLIAPRYAFALSRGFGSGIINSNAPMDKCDAKCQTPQGAINSSLPFQNVHPVTIGECPKYVRSAKLRMVTGLRNIPSIQSRGLFGAIAGFIEGGWTGMVDGWYGYHHQNEQGSGYAADQKSTQNAINGITNKVNSVIEKMNTQFTAVGKEFNKLERRMENLNKKVDDGFIDIWTYNAELLVLLENERTLDFHDSNVKNLYEKVKSQLKNNAKEIGNGCFEFYHKCNDECMESVKNGTYDYPKYSEESKLNREKIDGVKLESMGVYQILAIYSTVASSLVLLVSLGAISFWMCSNGSLQCRICI

SEQ ID NO: 5941 - protein, 565 aa, Artificial Sequence
  derived and/or modified protein sequence (wt) from hemagglutinin__InfluenzaA__ADN06322
MKVKLLVLLCTFTATYADTICIGYHANNSTDTVDTVLEKNVTVTHSVNLLENSHNGKLCLLKGIAPLQLGNCSVAGWILGNPECELLISKESWSYIVEKPNPENGTCYPGHFADYEELREQLSSVSSFERFEIFPKESSWPNHTVTGVSASCSHNGESSFYRNLLWLTGKNGLYPNLSKSYANNKEKEVLVLWGVHHPPNMVDQRTLYRTENAYVSVVSSHYSRKFTPEIAKRPKVRDQEGRINYYWTLLEPGDTIIFEANGNLIAPRYAFALSRGFGSGIINSNAPMGKCDAKCQTPQGAINSSLPFQNVHPVTIGECPKYVRSAKLRMVTGLRNIPSIQSRGLFGAIAGFIEGGWTGMVDGWYGYHHQNEQGSGYAADQKSTQNAINGITNKVNSVIEKMNTQFTAVGKEFNKLERRMENLNKKVDDGFIDIWTYNAELLVLLENERTLDFHDSNVKNLYEKVKSQLKNNAKEIGNGCFEFYHKCNDECMESVKNGTYDYPKYSEESKLNREKIDGVKLESMGVYQILAIYSTVASSLVLLVSLGAISFWMCSNGSLQCRICI

SEQ ID NO: 5942 - protein, 565 aa, Artificial Sequence
  derived and/or modified protein sequence (wt) from hemagglutinin__InfluenzaA__ADN06344
MKVKLLVLLCTFTATYADTICIGYHANNSTDTVDTVLEKNVTVTHSVNLLENSHNGKLCLLKGIAPLQLGNCSVAGWILGNPECELLISKESWSYIVEKPNPENGTCYPGHFADYEELREQLSSVSSFERFEIFPKESSWPNHTVTGVSASCSHNGESSFYRNLLWLTGKNGLYPNLSKSYANNKEKEVLVLWGVHHPPSISDQKTLYHTENAYVSVVSSHYSRKFTPEIAKRPKVRDQEGRINYYWTLLEPGDTIIFEANGNLIAPRYAFALSRGFGSGIINSNAPMDKCDAKCQTPQGAINSSLPFQNVHPVTIGECPKYVRSAKLRMVTGLRNIPSIQSRGLFGAIAGFIEGGWTGMVDGWYGYHHQNEQGSGYAADQKSTQNAINGITNKVNSVIEKMNTQFTAVGKEFNKLERRMENLNKKVDDGFIDIWTYNAELLVLLENERTLDFHDSNVKNLYEKVKSQLKNNAKEIGNGCFEFYHKCNDECMESVKNGTYDYPKYSEESKLNREKIDGVKLESMGVYQILAIYSTVASSLVLLVSLGAISFWMCSNGSLQCRICI

SEQ ID NO: 5943 - protein, 566 aa, Artificial Sequence; identical to SEQ ID NO: 5533
  derived and/or modified protein sequence (wt) from hemagglutinin__InfluenzaA__ADN06366

SEQ ID NO: 5944 - protein, 566 aa, Artificial Sequence
  derived and/or modified protein sequence (wt) from hemagglutinin__InfluenzaA__ADN26165
MKAILVVLLYTFATANADTLCIGYHANNSTDTVDTVLEKNVTVTHSVNLLEGKHNGKLCKLRGVAPLHLGKCNIAGWILGNPECESLSTASSWSYIVETSSSDNGTCYPGDFIDYEELREQLSSVSSFERFEIFPKTSSWPNHDSNKGVTAACPHAGAKSFYKNLIWLIKKGNSYPKLSKSYINDKGKEVLVLWGIHHPSTSADQQSLYQNADAYVFVGTSRYSKKFKPEIAIRPKVRDQEGRMNYYWTLVEPGDKITFEATGNLVVPRYAFAMERNAGSGIIISDTPVHDCNTTCQTPKGAINTSLPFQNIHPITIGKCPKYVKSTKLRLATGLRNIPSIQSRGLFGAIAGFIEGGWTGMVDGWYGYHHQNEQGSGYAADLKSTQNAIDEITNKVNSVIEKMNTQFTAVGKEFNHLEKRIENLNKKVDDGFLDIWTYNAELLVLLENERTLDYHDSNVKNLYEKVRSQLKNNAKEIGNGCFEFYHKCDNTCMESVKNGTYDYPKYSEEAKLNREEIDGVKLESARIYQILAIYSTVASSLVLVVSLGAISFWMCSNGSLQCRICI

SEQ ID NO: 5945 - protein, 566 aa, Artificial Sequence; identical to SEQ ID NO: 2849
  derived and/or modified protein sequence (wt) from hemagglutinin__InfluenzaA__ADN26175

SEQ ID NO: 5946 - protein, 566 aa, Artificial Sequence
  derived and/or modified protein sequence (wt) from hemagglutinin__InfluenzaA__ADN78194
MKAILVVLLYTFATTNADTLCIGYHANNSTDTVDTVLEKNVTVTHSVNLLEDKHNGKLCKLRGVAPLHLGKCNIAGWILGNPECESLSTASSWSYIVETSSSDNGTCYPGDFIDYEELREQLSSVSSFERFEIFPKTSSWPNHDSNKGVTAACPHAGAKSFYKNLIWLVKKGNSYPKLSKSYINDKGKEVLVLWGIHHPSTSADQQSLYQNADAYVFVGTSRYSKKFKPEIAIRPKVRDQEGRMNYYWTLVEPGDKITFEATGNLVVPRYAFAMERNAGSGIIISDTPVHDCNTTCQTPKGAINTSLPFQNIHPITIGKCPKYVKSTKLRLATGLRNVPSIQSRGLFGAIAGFIEGGWTGMVDGWYGYHHQNEQGSGYAADLKSTQNAIDKITNKVNSVIEKMNTQFTAVGKEFNHLEKRIENLNKKVDDGLLDIWTYNAELLVLLENERTLDYHDSNVKNLYEKVRSQLKNNAKEIGNGCFEFYHKCDNTCMESVKNGTYDYPKYSEEAKLNREEIDGVKLESTRIYQILAIYSTVASSLVLVVSLGAISFWMCSNGSLQCRICI

SEQ ID NO: 5947 - protein, 566 aa, Artificial Sequence; identical to SEQ ID NO: 3833
  derived and/or modified protein sequence (wt) from hemagglutinin__InfluenzaA__ADN78195

SEQ ID NO: 5948 - protein, 566 aa, Artificial Sequence; identical to SEQ ID NO: 4221
  derived and/or modified protein sequence (wt) from hemagglutinin__InfluenzaA__ADN78212

SEQ ID NO: 5949 - protein, 566 aa, Artificial Sequence; identical to SEQ ID NO: 4221
  derived and/or modified protein sequence (wt) from hemagglutinin__InfluenzaA__ADN78221

SEQ ID NO: 5950 - protein, 565 aa, Artificial Sequence; identical to SEQ ID NO: 5940
  derived and/or modified protein sequence (wt) from hemagglutinin__InfluenzaA__ADN89050

SEQ ID NO: 5951 - protein, 565 aa, Artificial Sequence
  derived and/or modified protein sequence (wt) from hemagglutinin__InfluenzaA__ADN89061
MKVKLLVLLCTFTATYADTICIGYHANNSTDTVDTVLEKNVTVTHSVNLLENSHNGKLCLLKGIAPLQLGNCSVAGWILGNPECELLISKESWSYIVEKPNPENGTCYPGHFADYEELREQLSSVSSFERFEIFPKESSWPNHTVTGVSASCSHNGESSFYRNLLWLTEKNGLYPNLSKSYANNKEKEVLVLWGVHHPPSISDQKTLYHTENAYVSVVSSHYSRKFTPEIAKRPKVRDQEGRINYYWTLLEPGDTIIFEANGNLIAPRYAFALSRGFGSGIINSNAPMDKCDAKCQTPQGAINSSLPFQNVHPVTIGECPKYVRSAKLRMVTGLRNIPSIQSRGLFGAIAGFIEGGWTGMVDGWYGYHHQNEQGSGYAADQKSTQNAINEITNKVNSVIEKMNTQFTAVGKEFNKLERRMENLNKKVDDGFIDIWTYNAELLVLLENERTLDFHDSNVKNLYEKVKNQLKNNAKEIGNGCFEFYHKCNDECMESVKNGTYDYPKYSEESKLNREKIDGVKLESMGVYQILAIYSTVASSLVLLVSLGAISFWMCSNGSLQCRICI

SEQ ID NO: 5952 - protein, 565 aa, Artificial Sequence; identical to SEQ ID NO: 5942
  derived and/or modified protein sequence (wt) from hemagglutinin__InfluenzaA__ADN89072

SEQ ID NO: 5953 - protein, 565 aa, Artificial Sequence
  derived and/or modified protein sequence (wt) from hemagglutinin__InfluenzaA__ADN89083
MKVKLLVLLCTFTATYADTICIGYHANNSTDTVDTVLEKNVTVTHSVNLLENSHNGKLCLLKGIAPLQLGNCSVAGWILGNPECELLISKESWSYIVEKPNPENGTCYPGHFADYEELREQLSSVSSFERFEIFPKESSWPNHTVTGVSASCSHNGENSFYRNLLWLTGKNGLYPNLSKSYANNKEKEVLVLWGVHHPPNMADQKTLYHTENAYVSVVSSHYSRKFTPEIAKRPKVRDQEGRINYYWTLLEPGDTIIFEANGNLIAPRYAFALSRGFGSGIINSNAPMDKCDAKCQTPQGAINSSLPFQNVHPVTIGECPKYVRSAKLRMVTGLRNIPSIQSRGLFGAIAGFIEGGWTGMVDGWYGYHHQNEQGSGYAADQKSTQNAINGITNKVNSVIEKMNTQFTAVGKEFNKLERRMENLNKKVDDGFIDIWTYNAELLVLLENERTLDFHDSNVKNLYEKVKSQLKNNAKEIGNGCFEFYHKCNDECMESVKNGTYDYPKYSEESKLNREKIDGVKLESMGVYQILAIYSTVASSLVLLVSLGAISFWMCSNGSLQCRICI

SEQ ID NO: 5954 - protein, 565 aa, Artificial Sequence
  derived and/or modified protein sequence (wt) from hemagglutinin__InfluenzaA__ADN89094
MKVKLLVLLCTFTATYADTICIGYHANNSTDTVDTALEKNVTVTHSVNLLENSHNGKLCLLKGIAPLQLGNCSVAGWILGNPECELLISKESWSYIVEKPNPENGTCYPGHFADYEELREQLSSVSSFERFEIFPKESSWPNHTVTGVSASCSHNGENSFYRNLLWLTGKNGLYPNLSKSYANNKGKEVLVLWGVHHPPNIADQKTLYHTENAYVSVVSSHYSRKFTPEIAKRPKVRDQEGRINYYWTLLEPGDTIIFEANGNLIAPRYAFALSRGFGSGIINSNAPMDKCDAKCQTPQGAINSSLPFQNVHPVTIGECPKYVRSAKLRMVTGLRNIPSIQSRGLFGAIAGFIEGGWTGMVDGWYGYHHQNEQGSGYAADQKSTQNAINGITNKVNSVIEKMNTQFTAVGKEFNKLERRMENLNKKVDDGFIDIWTYNAELLVLLENERTLDFHDSNVKNLYEKVKSQLKNNAKEIGNGCFEFYHKCNDECMESVKNGTYDYPKYSEESKLNREKIDGVKLESMGVYQILAIYSTVASSLVLLVSLGAISFWMCSNGSLQCRICI

SEQ ID NO: 5955 - protein, 565 aa, Artificial Sequence
  derived and/or modified protein sequence (wt) from hemagglutinin__InfluenzaA__ADN89116
MKVKLLILLCTFTATYADTICIGYHANNSTDTVDTVLEKNVTVTHSVNLLENSHNGKLCLLKGIAPLQLGNCSVAGWILGNPECELLISKESWSYIVEKPNPENGTCYPGHFADYEELREQLSSVSSFERFEIFPKESSWPNHTVTGVSASCSHNGESSFYRNLLWLTVKNGLYPNLSKSYANNKEKEVLVLWGVHHPPNIVDQKTLYRTENAYVSVVSSHYSRKFTPEIAKRPKVRDQEGRINYYWTLLEPGDTIIFEANGNLIAPRYAFALSRGFGSGIINSNAPMDKCDAKCQTPRGAINSSLPFQNVHPVTIGECPKYVRSAKLRMVTGLRNIPSIQSRGLFGAIAGFIEGGWTGMVDGWYGYHHQNEQGSGYAADQKSTQNAINGITNKVNSVIEKMNTQFTAVGKEFNNLERRMENLNKKVDDGFIDIWTYNAELLVLLENERTLDFHDSNVKNLYEKVKSQLKNNAKEIGNGCFEFYHKCNDECMESVKNGTYDYPKYSEESKLNREKIDGVKLESMGVYQILAIYSTVASSLVLLVSLGAISFWMCSNGSLQCRICI

SEQ ID NO: 5956 - protein, 565 aa, Artificial Sequence
  derived and/or modified protein sequence (wt) from hemagglutinin__InfluenzaA__ADN89127
MKVKLLVLLCTLTATYADTICIGYHANNSTDTVDTVLEKNVTVTHSVNLLENSHNGKLCLLKGIAPLQLGNCSVAGWILGNPECELLISKESWSYIVEKPNPENGTCYPGHFADYEELREQLSSVSSFERFEIFPKGSSWPNHTVTGVSASCSHNGENSFYRNLLWLTGKNGLYPNLSKSYANNKEKEVLVLWGVHHPPNIADQKTLYHTENAYVSVVSSHYSRKFTPEIAKRPKVRDQEGRINYYWTLLEPGDTIIFEANGNLIAPRYAFALSRGFGSGIINSNAPMDKCDAKCQTPQGAINSSLPFQNVHPVTIGECPKYVRSAKLRMVTGLRNIPSIQSRGLFGAIAGFIEGGWTGMVDGWYGYHHQNEQGSGYAADQKSTQNAINGITNKVNSVIEKMNTQFTAVGKEFNKLERRMENLNKKVDDGFIDIWTYNAELLVLLENERTLDFHDSNVKNLYEKVKSQLKNNAEEIGNGCFEFYHKCNDECMESVKNGTYDYPKYSEESKLNREKIDGVKLESMGVYQILAIYSTVASSLVLLVSLGAISFWMCSNGSLQCRICI

SEQ ID NO: 5957 - protein, 565 aa, Artificial Sequence
  derived and/or modified protein sequence (wt) from hemagglutinin__InfluenzaA__ADN89149
MKVKLLVLLCTFTATYADTICIGYHANNSTDTVDTVLEKNVTVTHSVNLLENSHNGKLCLLKGIAPLQLGNCSVAGWILGNPECELLISKESWSYIVEKPNPENGTCYPGHFADYEELREQLSSVSSFERFEIFPKESSWPNHTVTGVSASCSHNGESSFYRNLLWLTEKNGLYPNLSKSYANNKEKEVLVLWGVHHPPSISDQKTLYHTENAYVSVVSSHYSRKFTPEVAKRPKVRDQEGRINYYWTLLEPGDTIIFEANGNLIAPRYAFALSRGFGSGIINSNAPMDKCDAKCQTPQGAINSSLPFQNVHPVTIGECPKYVRSAKLRMVTGLRNIPSIQSRGLFGAIAGFIEGGWTGMVDGWYGYHHQNEQGSGYAADQKSTQNAINGITNKVNSVIEKMNTQFTAVGKEFNKLERRMENLNKKVDDGFIDIWTYNAELLVLLENERTLDFHDSNVKNLYEKVKSQLKNNAKEIGNGCFEFYHKCNDECMESVKNGTYDYPKYSEESKLNREKIDGVKLESMGVYQILAIYSTVASSLVLLVSLGAISFWMCSNGSLQCRICI

SEQ ID NO: 5958 - protein, 565 aa, Artificial Sequence; identical to SEQ ID NO: 5513
  derived and/or modified protein sequence (wt) from hemagglutinin__InfluenzaA__ADN89171

SEQ ID NO: 5959 - protein, 565 aa, Artificial Sequence
  derived and/or modified protein sequence (wt) from hemagglutinin__InfluenzaA__ADN89182
MKVKLLVLLCTLTATYADTICIGYHANNSTDTVDTVLEKNVTVTHSVNLLENSHNGKLCLLKGIAPLQLGNCSVAGWILGNPECELLISKESWSYIVEKPNPENGTCYPGHFADYEELREQLSSVSSFERFEIFPKESSWPNHTVTGVSASCSHNGESSFYRNLLWLTGKNGLYPNLSKSYANNKEKEVLVLWGVHHPPNIVDQKTLYRTENAYVSVVSSHYSRKFTPEIAKRPKVRDQEGRINYYWTLLEPGDTIIFEANGNLIAPRYAFALSRGFGSGIINSNAPMDKCDAKCQTPQGAINSSLPFQNVHPVTIGECPKYVRSAKLRMVTGLRNIPSIQSRGLFGAIAGFIEGGWTGMVDGWYGYHHQNEQGSGYAADQKSTQNAINGITNKVNSVIEKMNTQFTAVGKEFNKLERRMENLNKKVDDGFIDIWTYNAELLVLLENERTLDFHDSNVKNLYEKVKSQLKNNAKEIGNGCFEFYHKCNDECMESVKNGTYDYPKYSEESKLNREKIDGVKLESMGVYQILAIYSTVASSLVLLVSLGAISFWMCSNGSLQCRICI

SEQ ID NO: 5960 - protein, 565 aa, Artificial Sequence; identical to SEQ ID NO: 5513
  derived and/or modified protein sequence (wt) from hemagglutinin__InfluenzaA__ADN89193

SEQ ID NO: 5961 - protein, 565 aa, Artificial Sequence; identical to SEQ ID NO: 5513
  derived and/or modified protein sequence (wt) from hemagglutinin__InfluenzaA__ADN89204

SEQ ID NO: 5962 - protein, 565 aa, Artificial Sequence; identical to SEQ ID NO: 5940
  derived and/or modified protein sequence (wt) from hemagglutinin__InfluenzaA__ADN89215

SEQ ID NO: 5963 - protein, 565 aa, Artificial Sequence
  derived and/or modified protein sequence (wt) from hemagglutinin__InfluenzaA__ADN89226
MKVKLLVLLCTFAATYADTICIGYHANNSTDTVDTVLEKNVTVTHSVNLLENSHNGKLCLLKGIAPLQLGNCSVAGWILGNPECELLISKESWSYIVEKPNPENGTCYPGHFADYEELREQLSSVSSFERFEIFPKESSWPNHTVTGVSASCSHNGESSFYRNLLWLTEKNGLYPNLSKSYANNKEKEVLVLWGVHHPPSISDQKTLYHTENAYVSVVSSHYSRKFTPEIAKRPKVRDQEGRINYYWTLLEPGDTIIFEANGNLIAPRYAFALNRGFGSGIINSNAPMDKCDAKCQTPQGAINSSLPFQNVHPVTIGECPKYVRSAKLRMVTGLRNIPSVQSRGLFGAIAGFIEGGWTGMVDGWYGYHHQNEQGSGYAADQKSTQNAINGITNKVNSVIEKMNTQFTAVGKEFNKLERRMENLNKKVDDGFIDIWTYNAELLVLLENERTLDFHDSNVKNLYEKVKNQLKNNAKEIGNGCFEFYHKCNDECMESVKNGTYDYPKYSEESKLNREKIDGVKLESMGVYQILAIYSTVASSLVLLVSLGAISFWMCSNGSLQCRICI

SEQ ID NO: 5964 - protein, 565 aa, Artificial Sequence; identical to SEQ ID NO: 5940
  derived and/or modified protein sequence (wt) from hemagglutinin__InfluenzaA__ADN89237

SEQ ID NO: 5965 - protein, 565 aa, Artificial Sequence
  derived and/or modified protein sequence (wt) from hemagglutinin__InfluenzaA__ADN89248
MKVKLLVLLCTFTATYADTICIGYHANNSTDTVDTVLEKNVTVTHSVNLLENSHNGKLCLLKGIAPLQLGNCSIAGWILGNPECELLISKESWSYIVEKPNPENGTCYPGHFADYEELREQLSSVSSFERFEIFPKESSWPNHTVTGVSASCSHNGESSFYRNLLWLTGKNGLYPNLSKSYANNKEKEVLVLWGVHHPPSISDQKTLYHTENAYVSVVSSHYSRKFTPEIAKRPKVRDQEGRINYYWTLLEPGDTIIFEANGNLIAPRYAFALSRGFGSGIINSNAPMDKCDAKCQTPQGAINSSLPFQNVHPVTIGECPKYVRSAKLRMVTGLRNIPSIQSRGLFGAIAGFIEGGWTGMVDGWYGYHHQNEQGSGYAADQKSTQNAINGITNKVNSVIEKMNTQFTAVGKEFNKLERRMENLNKKVDDGFIDIWTYNAELLVLLENERTLDFHDSNVKNLYEKVKSQLKNNAKEIGNGCFEFYHKCNDECMESVKNGTYDYPKYSEESKLNREKIDGVKLESMGVYQILAIYSTVASSLVLLVSLGAISFWMCSNGSLQCRICI

SEQ ID NO: 5966 - protein, 565 aa, Artificial Sequence; identical to SEQ ID NO: 5953
  derived and/or modified protein sequence (wt) from hemagglutinin__InfluenzaA__ADN89259

SEQ ID NO: 5967 - protein, 565 aa, Artificial Sequence
  derived and/or modified protein sequence (wt) from hemagglutinin__InfluenzaA__ADN89281
MKVKLLVLLCTFTATYADTICIGYHANNSTDTVDTVLEKNVTVTHSVNLLENSHNGKLCLLKGIAPLQLGNCSVAGWILGNPECELLISKESWSYIVEKPNPENGTCYPGHFADYEELREQLSSVSSFERFEIFPKESSWPNHTVTGVSASCSHNGESSFYRNLLWLTEKNGLYPNLSKSYANNKEKEVLVLWGVHHPPSISDQKTLYHTENAYVSVVSSHYSRKFTPEIAKRPKVRDQEGRINYYWTLLEPGDTIIFEANGNLIAPRYAFALSRGFGSGIINSNAPMDKCDAKCQTPQGAINSSLPFQNVHPVTIGECPKYVRSAKLRMVTGLRNIPSIQSRGLFGAIAGFIEGGWTGMVDGWYGYHHQNEQGSGYAADQKSTQNAINGITNKVNSVIEKMNTQFTAVGKEFNKLERRMENLNKKVDDGFIDIWTYNAELLVLLENERTLDFHDSNVKNLYEKVKNQLKNNAKEIGNGCFEFYHKCNDECMESVKNGTYDYPKYSEESKLNREKIDGVKLESMGVYQILAIYSTVASSLVLLVSLGAISFWMCSNGSLQCRICI

SEQ ID NO: 5968 - protein, 565 aa, Artificial Sequence; identical to SEQ ID NO: 5967
  derived and/or modified protein sequence (wt) from hemagglutinin__InfluenzaA__ADN89292

SEQ ID NO: 5969 - protein, 565 aa, Artificial Sequence; identical to SEQ ID NO: 5967
  derived and/or modified protein sequence (wt) from hemagglutinin__InfluenzaA__ADN89303

SEQ ID NO: 5970 - protein, 565 aa, Artificial Sequence; identical to SEQ ID NO: 3626
  derived and/or modified protein sequence (wt) from hemagglutinin__InfluenzaA__ADN89314

SEQ ID NO: 5971 - protein, 565 aa, Artificial Sequence; identical to SEQ ID NO: 3131
  derived and/or modified protein sequence (wt) from hemagglutinin__InfluenzaA__ADN89325

SEQ ID NO: 5972 - protein, 565 aa, Artificial Sequence
  derived and/or modified protein sequence (wt) from hemagglutinin__InfluenzaA__ADN89336
MKVKLLVLLCTFTATYADTICIGYHANNSTDTVDTVLEKNVTVTHSVNLLENSHNGKLCLLKGIAPLQLGNCSVAGWILGNPECELLISKESWSYIVEKPNPENGTCYPGHFADYEELREQLSSVSSFERFEIFPKESSWPNHTVTGVSASCSHNGERSFYRNLLWLTGKNGLYPNLSKSYANNKEKEVLVLWGVHHPPDIGDQKTLYHTENAYVSVVSSHYSRKFTPEIAKRPKVRDQEGRINYYWTLLEPGDTIIFEANGNLIAPRYAFALSRGFGSGIINSNAPMDKCDAKCQTPQGAINSSLPFQNVHPVTIGECPKYVRSAKLRMVTGLRNIPSIQSRGLFGAIAGFIEGGWTGMVDGWYGYHHQNEQGSGYAADQKSTQNAINGITNKVNSVIEKMNTQFTAVGKEFNKLERRMENLNKKVDDGFIDIWTYNAELLVLLENERTLDFHDSNVKNLYEKVKSQLKNNAKEIGNGCFEFYHKCNDECMESVKNGTYDYPKYSEESKLNREKIDGVKLESMGVYQILAIYSTVASSLVLLVSLGAISFWMCSNGSLQCRICI

SEQ ID NO: 5973 - protein, 565 aa, Artificial Sequence; identical to SEQ ID NO: 5963
  derived and/or modified protein sequence (wt) from hemagglutinin__InfluenzaA__ADN89347

SEQ ID NO: 5974 - protein, 565 aa, Artificial Sequence; identical to SEQ ID NO: 3131
  derived and/or modified protein sequence (wt) from hemagglutinin__InfluenzaA__ADN89358

SEQ ID NO: 5975 - protein, 565 aa, Artificial Sequence
  derived and/or modified protein sequence (wt) from hemagglutinin__InfluenzaA__ADN89369
MKVKLLVLLCTFTATYADTICIGYHANNSTDTVDTVLEKNVTVTHSVNLLENSHNGKLCLLKGIAPLQLGNCSVAGWILGNPECELLISKESWSYIVEKPNPENGTCYPGHFADYEELREQLSSVSSFERFEIFPKESSWPNHTVTGVSASCSHNGESSFYRNLLWLTVKNGLYPNLSKSYANNKEKEVLVLWGVHHPPNIVDQKTLYRTENAYVSVVSSHYSRKFIPEIAKRPKVRDQEGRINYYWTLLEPGDTIIFEANGNLIAPRYAFALSRGFGSGIINSNAPMDKCDAKCQTPRGAINSSLPFQNVHPVTIGECPKYVRSAKLRMVTGLRNIPSIQSRGLFGAIAGFIEGGWTGMVDGWYGYHHQNEQGSGYAADQKSTQNAINGITNKVNSVIEKMNTQFTAVGKEFNKLERRMENLNKKVDDGFIDIWTYNAELLVLLENERTLDFHDSNVKNLYEKVKSQLKNNAKEIGNGCFEFYHKCNDECMESVKNGTYDYPKYSEESKLNREKIDGVKLESMGVYQILAIYSTVASSLVLLVSLGAISFWMCSNGSLQCRICI

SEQ ID NO: 5976 - protein, 565 aa, Artificial Sequence
  derived and/or modified protein sequence (wt) from hemagglutinin__InfluenzaA__ADN89380
MKVKLLVLLCTLTATYADTICIGYHANNSTDTVDTVLEKNVTVTHSVNLLENSHNGKLCLLKGIAPLQLGNCSVAGWILGNPECELLISKESWSYIVEKPNPENGTCYPGHFADYEELREQLSSVSSFERFEIFPKESSWPNHTVTGVSASCSHNGESSFYRNLLWLTGKNGLYPNLSKSYANNKEKEVLVLWGVHHPPNIVDQKTLYRTENAYVSVVSSHYSRKFTPEIAKRPKVRDQEGRINYYWTLLEPGDTIIFEANGNLIAPRYAFALSRGFGSGIINSNAPMDKCDAKCQTPQGAINSSLPFQNVHPVTIGECPKYVRSAKLRMVTGLRNIPSIQSRGLFGAIAGFIEGGWTGMVDGWYGYHHQNEQGSGYAADQKSTQNAINGITNKVNSVIEKMNTQFTAVGKEFNKLERRMENLNKKVDDGFIDIWTYNAELLVLLENERTLDFHDSNVKNLYEKVKSQLKNNAKEIGNGCFEFYHKCNNECMESVKNGTYDYPKYSEESKLNREKIDGVKLESMGVYQILAIYSTVASSLVLLVSLGAISFWMCSNGSLQCRICI

SEQ ID NO: 5977 - protein, 565 aa, Artificial Sequence
  derived and/or modified protein sequence (wt) from hemagglutinin__InfluenzaA__ADN89391
MKVKLLVLLCTFTATYADTICIGYHANNSTDTVDTVLEKNVTVTHSVNLLENSHNGKLCLLKGIAPLQLGNCSVAGWILGNPECELLISKESWSYIVEKPNPENGTCYPGHFADYEELREQLSSVSSFERFEIFPKESSWPNHTVTGVSASCSHNGERSFYKNLLWLTGKNGLYPNLSKSYANNKEKEVLVLWGVHHPPDIGDQKTLYHTENAYVSVVSSHYSRKFTPEIAKRPKVRDQEGRINYYWTLLEPGDTIIFEANGNLIAPRYAFALSRGFGSGIINSNAPMDKCDAKCQTPQGAINSSLPFQNVHPVTIGECPKYVRSAKLRMVTGLRNIPSIQSRGLFGAIAGFIEGGWTGMVDGWYGYHHQNEQGSGYAADQKSTQNAINGITNKVNSVIEKMNTQFTAVGKEFNKLERRMENLNKKVDDGFIDIWTYNAELLVLLENERTLDFHDSNVKNLYEKVKSQLKNNAKEIGNGCFEFYHKCNDECMESVKNGTYDYPKYSEESKLNREKIDGVKLESMGVYQILAIYSTVASSLVLLVSLGAISFWMCSNGSLQCRICI

SEQ ID NO: 5978 - protein, 565 aa, Artificial Sequence
  derived and/or modified protein sequence (wt) from hemagglutinin__InfluenzaA__ADN89402
MKVKLLVLLCTFTATYADTICIGYHANNSTDTVDTVLEKNVTVTHSVNLLENSHNGKLCLLKGIAPLQLGNCSVAGWILGNPECELLISKKSWSYIVEKPNPENGTCYPGHFADYEELKEQLSSVSSFERFEIFPKESSWPNHTVTGVSASCSHNGESSFYRNLLWLTGKNGLYPNLSKSYANNKEKEVLVLWGVHHPPNIVDQKTLYRTENAYVSVVSSHYSRKFTPEIAKRPKVRDQEGRINYYWTLLEPGDTIIFEANGNLIAPRYAFALSRGFGSGIINSNAPMGKCDAKCQTPQGAINSSLPFQNVHPVTIGECPKYVRSAKLRMVTGLRNIPSIQSRGLFGAIAGFIEGGWTGMVDGWYGYHHQNEQGSGYAADQKSTQNAINGITNKVNSVIEKMNTQFTAVGKEFNKLERRMENLNKKVDDGFIDIWTYNAELLVLLENERTLDFHDSNVKNLYEKVKSQLKNNAKEIGNGCFEFYHKCNDECMESVKNGTYDYPKYSEESKLNREKIDGVKLESMGVYQILAIYSTVASSLVLLVSLGAISFWMCSNGSLQCRICI

SEQ ID NO: 5979 - protein, 565 aa, Artificial Sequence; identical to SEQ ID NO: 5940
  derived and/or modified protein sequence (wt) from hemagglutinin__InfluenzaA__ADN89413

SEQ ID NO: 5980 - protein, 565 aa, Artificial Sequence; identical to SEQ ID NO: 5513
  derived and/or modified protein sequence (wt) from hemagglutinin__InfluenzaA__ADN89424

SEQ ID NO: 5981 - protein, 565 aa, Artificial Sequence
  derived and/or modified protein sequence (wt) from hemagglutinin__InfluenzaA__ADN89435
MKVKLLVLLCTFTATYADTICIGYHANNSTDTVDTVLEKNVTVTHSVNLLENSHNGKLCLLKGIAPLQLGNCSVAGWILGNPECELLISKESWSYIVEKPNPENGTCYPGHFADYEELREQLSSVSSFERFEIFPKESSWPNHTVTGVSASCSHNGENSFYRNLLWLTGKNGLYPNLSKSYANNKEKEVLVLWGVHHPPNIADQKTLYHTENAYVSVVSSHYSRKFTPEIAKRPKVRDQEGRINYYWTLLEPGDTIIFEANGNLIAPRYAFALSRGFGSGIINSNAPMDKCDAKCQTPQGAINSSLPFQNVHPVTIGECPKYVRSAKLRMVTGLRNIPSIQSRGLFGAIAGFIEGGWTGMVDGWYGYHHQNEQGSGYAADQKSTQNAINGITNKVNSVIEKMNTQFTAVGKEFNKLERRMENLNKKVDDGFIDIWTYNAELLVLLENERTLDFHDSNVKNLYEKVKSQLKNNAKEIGNGCFEFYHKCNDECMESVKNGTYDYPKYSEESRLNREKIDGVKLESMGVYQILAIYSTVASSLVLLVSLGAISFWMCSNGSLQCRICI

SEQ ID NO: 5982 - protein, 565 aa, Artificial Sequence
  derived and/or modified protein sequence (wt) from hemagglutinin__InfluenzaA__ADN89446
MKAKLLVLLCTFTATYADTICIGYHANNSTDTVDTVLEKNVTVTHSVNLLENSHNGKLCLLKGIAPLQLGNCSVAGWILGNPECELLISKESWSYIVEKPNPENGTCYPGHFADYEELREQLSSVSSFERFEIFPKESSWPNHTVTGVSASCSHNGENSFYRNLLWLTGKNGLYPNLSKSYANNKEKEVLVLWGVHHPPNIADQKTLYHTENAYVSVVSSHYSRKFTPEIAKRPKVRDQEGRINYYWTLLEPGDTIIFEANGNLIAPRYAFALSRGFGSGIINSNAPMDKCDAKCQTPQGAINSSLPFQNVHPVTIGECPKYVRSAKLRMVTGLRNIPSIQSRGLFGAIAGFIEGGWTGMVDGWYGYHHQNEQGSGYAADQKSTQNAINGITNKVNSVIEKMNTQFTAVGKEFNKLERRMENLNKKVDDGFIDIWTYNAELLVLLENERTLDFHDSNVKNLYEKVKSQLKNNAKEIGNGCFEFYHKCNDECMESVKNGTYDYPKYSEESKLNREKIDGVKLESMGVYQILAIYSTVASSLVLLVSLGAISFWMCSNGSLQCRICI

SEQ ID NO: 5983 - protein, 565 aa, Artificial Sequence; identical to SEQ ID NO: 5513
  derived and/or modified protein sequence (wt) from hemagglutinin__InfluenzaA__ADN89457

SEQ ID NO: 5984 - protein, 565 aa, Artificial Sequence
  derived and/or modified protein sequence (wt) from hemagglutinin__InfluenzaA__ADN89468
MKVKLLVLLCTFTATYADTICIGYHANNSTDTVDTVLEKNVTVTHSVNLLENSHNGKLCLLKGIAPLQLGNCSVAGWILGNPECELLISKESWSYIVEKPNPENGTCYPGHFADYEELREQLSSVSSFERFEIFPKDSSWPNHTVTGVSASCSHNGESSFYRNLLWLTGKNGLYPNLSKSYANNKEKEVLVLWGVHHPPSINDQKTLYHTENAYVSVVSSHYSRKFTPEIAKRPKVRDQEGRINYYWTLLEPGDTIIFEANGNLIAPRYAFALSRGFGSGIINSNAPMDKCDAKCQTPQGAINSSLPFQNVHPVTIGECPKYVRSAKLRMVTGLRNIPSIQSRGLFGAIAGFIEGGWTGMVDGWYGYHHQNEQGSGYAADQKSTQNAINGITNKVNSVIEKMNTQFTAVGKEFSKLERRMENLNKKVDDGFIDIWTYNAELLVLLENERTLDFHDSNVKNLYEKVKSQLKNNAKEIGNGCFEFYHKCNDECMESVKNGTYDYPKYSEESKLNREKIDGVKLESMGVYQILTIYSTVASSLVLLISLGAISFWMCSNGSLQCRICI

SEQ ID NO: 5985 - protein, 565 aa, Artificial Sequence; identical to SEQ ID NO: 5942
  derived and/or modified protein sequence (wt) from hemagglutinin__InfluenzaA__ADN89479

SEQ ID NO: 5986 - protein, 565 aa, Artificial Sequence; identical to SEQ ID NO: 5942
  derived and/or modified protein sequence (wt) from hemagglutinin__InfluenzaA__ADN89490

SEQ ID NO: 5987 - protein, 565 aa, Artificial Sequence; identical to SEQ ID NO: 5965
  derived and/or modified protein sequence (wt) from hemagglutinin__InfluenzaA__ADN89501

SEQ ID NO: 5988 - protein, 565 aa, Artificial Sequence; identical to SEQ ID NO: 5953
  derived and/or modified protein sequence (wt) from hemagglutinin__InfluenzaA__ADN89512

SEQ ID NO: 5989 - protein, 565 aa, Artificial Sequence; identical to SEQ ID NO: 5967
  derived and/or modified protein sequence (wt) from hemagglutinin__InfluenzaA__ADN89523

SEQ ID NO: 5990 - protein, 565 aa, Artificial Sequence; identical to SEQ ID NO: 5976
  derived and/or modified protein sequence (wt) from hemagglutinin__InfluenzaA__ADN89534

SEQ ID NO: 5991 - protein, 565 aa, Artificial Sequence; identical to SEQ ID NO: 5981
  derived and/or modified protein sequence (wt) from hemagglutinin__InfluenzaA__ADN89545

SEQ ID NO: 5992 - protein, 565 aa, Artificial Sequence; identical to SEQ ID NO: 3626
  derived and/or modified protein sequence (wt) from hemagglutinin__InfluenzaA__ADN89556

SEQ ID NO: 5993 - protein, 565 aa, Artificial Sequence; identical to SEQ ID NO: 5942
  derived and/or modified protein sequence (wt) from hemagglutinin__InfluenzaA__ADN89567

SEQ ID NO: 5994 - protein, 565 aa, Artificial Sequence
  derived and/or modified protein sequence (wt) from hemagglutinin__InfluenzaA__ADN89578
MKVKLLVLLCTLTATYADTICIGYHANNSTDTVDTVLEKNVTVTHSVNLLENSHNGKLCLLKGIAPLQLGNCSVAGWILGNPECELLISKESWSYIVEKPNPENGTCYPGHFADYEELREQLSSVSSFERFEIFPKGSSWPNHTVTGVSASCSHNGENSFYRNLLWLTGKNGLYPNLSKSYANNKEKEVLLLWGVHHPPNIADQKTLYHTENAYVSVVSSHYSRKFTPEIAKRPKVRDQEGRINYYWTLLEPGDTIIFEANGNLIAPRYAFALSRGFGSGIINSNAPMDKCDAKCQTPQGAINSSLPFQNVHPVTIGECPKYVRSAKLRMVTGLRNIPSIQSRGLFGAIAGFIEGGWTGMVDGWYGYHHQNEQGSGYAADQKSTQNAINGITNKVNSVIEKMNTQFTAVGKEFNKLERRMENLNKKVDDGFIDIWTYNAELLVLLENERTLDFHDSNVKNLYEKVKSQLKNNAKEIGNGCFEFYHKCNDECMESVKNGTYDYPKYSEESKLNREKIDGVKLESMGVYQILAIYSTVASSLVLLVSLGAISFWMCSNGSLQCRICI

SEQ ID NO: 5995 - protein, 565 aa, Artificial Sequence; identical to SEQ ID NO: 5513
  derived and/or modified protein sequence (wt) from hemagglutinin__InfluenzaA__ADN89589

SEQ ID NO: 5996 - protein, 565 aa, Artificial Sequence
  derived and/or modified protein sequence (wt) from hemagglutinin__InfluenzaA__ADN89600
MKVKLLVLLCTFTATYADTICIGYHANNSTDTVDTVLEKNVTVTHSVNLLENSHNGKLCLLKGIAPLQLGNCSVAGWILGNPECELLISKESWSYIVEKPNPENGTCYPGHFADYEELREQLSSVSSFERFEIFPKESSWPNHTVTGVSASCSHNGESSFYRNLLWLTRKNGLYPNLSKSYANNKEKEVLVLWGVHHPPNMVDQKTLYRTENAYVSVVSSHYSRKFTPEIAKRPKVRDQEGRINYYWTLLEPGDTIIFEANGNLIAPRYAFALSRGFGSGIINSNAPMGKCDAKCQTPQGAINSSLPFQNVHPVTIGECPKYVRSAKLRMVTGLRNIPSIQSRGLFGAIAGFIEGGWTGMVDGWYGYHHQNEQGSGYAADQKSTQNAINGITNKVNSVIEKMNTQFTAVGKEFNKLERRMENLNKKVDDGFIDIWTYNAELLVLLENERTLDFHDSNVKNLYEKVKSQLKNNAKEIGNGCFEFYHKCNDECMESVKNGTYDYPKYSEESKLNREKIDGVKLESMGVYQILAIYSTVASSLVLLVSLGAISFWMCSNGSLQCRICI

SEQ ID NO: 5997 - protein, 565 aa, Artificial Sequence; identical to SEQ ID NO: 5513
  derived and/or modified protein sequence (wt) from hemagglutinin__InfluenzaA__ADN89611

SEQ ID NO: 5998 - protein, 565 aa, Artificial Sequence; identical to SEQ ID NO: 5940
  derived and/or modified protein sequence (wt) from hemagglutinin__InfluenzaA__ADN89622

SEQ ID NO: 5999 - protein, 565 aa, Artificial Sequence; identical to SEQ ID NO: 5981
  derived and/or modified protein sequence (wt) from hemagglutinin__InfluenzaA__ADN89633

SEQ ID NO: 6000 - protein, 565 aa, Artificial Sequence; identical to SEQ ID NO: 5965
  derived and/or modified protein sequence (wt) from hemagglutinin__InfluenzaA__ADN89644

SEQ ID NO: 6001 - protein, 565 aa, Artificial Sequence; identical to SEQ ID NO: 5981
  derived and/or modified protein sequence (wt) from hemagglutinin__InfluenzaA__ADN89655

SEQ ID NO: 6002 - protein, 565 aa, Artificial Sequence; identical to SEQ ID NO: 5513
  derived and/or modified protein sequence (wt) from hemagglutinin__InfluenzaA__ADN89666

SEQ ID NO: 6003 - protein, 565 aa, Artificial Sequence; identical to SEQ ID NO: 5953
  derived and/or modified protein sequence (wt) from hemagglutinin__InfluenzaA__ADN89677

SEQ ID NO: 6004 - protein, 565 aa, Artificial Sequence; identical to SEQ ID NO: 5953
  derived and/or modified protein sequence (wt) from hemagglutinin__InfluenzaA__ADN89688

SEQ ID NO: 6005 - protein, 565 aa, Artificial Sequence; identical to SEQ ID NO: 5940
  derived and/or modified protein sequence (wt) from hemagglutinin__InfluenzaA__ADN89699

SEQ ID NO: 6006 - protein, 565 aa, Artificial Sequence; identical to SEQ ID NO: 5942
  derived and/or modified protein sequence (wt) from hemagglutinin__InfluenzaA__ADN89710

SEQ ID NO: 6007 - protein, 565 aa, Artificial Sequence; identical to SEQ ID NO: 5965
  derived and/or modified protein sequence (wt) from hemagglutinin__InfluenzaA__ADN89721

SEQ ID NO: 6008 - protein, 565 aa, Artificial Sequence; identical to SEQ ID NO: 5942
  derived and/or modified protein sequence (wt) from hemagglutinin__InfluenzaA__ADN89732

SEQ ID NO: 6009 - protein, 565 aa, Artificial Sequence; identical to SEQ ID NO: 5942
  derived and/or modified protein sequence (wt) from hemagglutinin__InfluenzaA__ADN89743

SEQ ID NO: 6010 - protein, 565 aa, Artificial Sequence; identical to SEQ ID NO: 5967
  derived and/or modified protein sequence (wt) from hemagglutinin__InfluenzaA__ADN89765

SEQ ID NO: 6011 - protein, 565 aa, Artificial Sequence
  derived and/or modified protein sequence (wt) from hemagglutinin__InfluenzaA__ADN89776
MKVKLLVLLCTFTATYADTICIGYHANNSTDTVDTVLEKNVTVTHSVNLLENSHNGKLCLLKGIAPLQLGNCSVAGWILGNPECELLISKESWSYIVEKPNPENGTCYPGHFADYEELREQLSSVSSFERFEIFPKESSWPNHTVTGVSASCSHNGESSFYRNLLWLTGKNGLYPNLSKSYANNKEKEVLVLWGVHHPPSISDQKTLYHTENAYVSVVSSHYSRKFTPEVAKRPKVRDQEGRINYYWTLLEPGDTIIFEANGNLIAPRYAFALSRGFGSGIINSNAPMDKCDAKCQTPQGAINSSLPFQNVHPVTIGECPKYVRSAKLRMVTGLRNIPSIQSRGLFGAIAGFIEGGWTGMVDGWYGYHHQNEQGSGYAADQKSTQNAINGITNKVNSVIEKMNTQFTAVGKEFNKLERRMENLNKKVDDGFIDIWTYNAELLVLLENERTLDFHDSNVKNLYEKVKSQLKNNAKEIGNGCFEFYHKCNDECMESVKNGTYDYPKYSEESKLNREKIDGVKLESMGVYQILAIYSTVASSLVLLVSLGAISFWMCSNGSLQCRICI

SEQ ID NO: 6012 - protein, 565 aa, Artificial Sequence; identical to SEQ ID NO: 5953
  derived and/or modified protein sequence (wt) from hemagglutinin__InfluenzaA__ADN89787

SEQ ID NO: 6013 - protein, 565 aa, Artificial Sequence; identical to SEQ ID NO: 5967
  derived and/or modified protein sequence (wt) from hemagglutinin__InfluenzaA__ADN89798

SEQ ID NO: 6014 - protein, 565 aa, Artificial Sequence; identical to SEQ ID NO: 5513
  derived and/or modified protein sequence (wt) from hemagglutinin__InfluenzaA__ADN89809

SEQ ID NO: 6015 - protein, 565 aa, Artificial Sequence; identical to SEQ ID NO: 5513
  derived and/or modified protein sequence (wt) from hemagglutinin__InfluenzaA__ADN89820

SEQ ID NO: 6016 - protein, 565 aa, Artificial Sequence; identical to SEQ ID NO: 5513
  derived and/or modified protein sequence (wt) from hemagglutinin__InfluenzaA__ADN89831

SEQ ID NO: 6017 - protein, 565 aa, Artificial Sequence
  derived and/or modified protein sequence (wt) from hemagglutinin__InfluenzaA__ADN89842
MKVKLLVLLCTFTATYADTICIGYHANNSTDTVDTVLEKNVTVTHSVNLLENRHNGKLCLLKGIAPLQLGNCSVAGWILGNPECELLISKESWSYIVEKPNPENGTCYPGHFADYEELREQLSSVSSFERFEIFPKESSWPNHTVTGVSASCSHNGESSFYRNLLWLTGKNGLYPNLSKSYANNKEKEVLVLWGVHHPPNIVDQKTLYRTENAYVSVVSSHYSRKFTPEIAKRPKVRDQEGRINYYWTLLEPGDTIIFEANGNLIAPRYAFALSRGFGSGIINSNAPMDKCDAKCQTPQGAINSSLPFQNVHPVTIGECPKYVRSAKLRMVTGLRNIPSIQSRGLFGAIAGFIEGGWTGMVDGWYGYHHQNEQGSGYAADQKSTQNAINGITNKVNSVIEKMNTQFTAVGKEFNKLERRMENLNKKVDDGFIDIWTYNAELLVLLENERTLDFHDSNVKNLYEKVKSQLKNNAKEIGNGCFEFYHKCNDECMESVKNGTYDYPKYSEESKLNREKIDGVKLESMGVYQILAIYSTVASSLVLLVSLGAISFWMCSNGSLQCRICI

SEQ ID NO: 6018 - protein, 566 aa, Artificial Sequence; identical to SEQ ID NO: 5533
  derived and/or modified protein sequence (wt) from hemagglutinin__InfluenzaA__ADN89864

SEQ ID NO: 6019 - protein, 566 aa, Artificial Sequence; identical to SEQ ID NO: 5533
  derived and/or modified protein sequence (wt) from hemagglutinin__InfluenzaA__ADN89875

SEQ ID NO: 6020 - protein, 566 aa, Artificial Sequence
  derived and/or modified protein sequence (wt) from hemagglutinin__InfluenzaA__ADN89886
MKTIIALSYILCLVFAQKLPGNDNSTATLCLGHHAVPNGTIVKTITNDQIEVTNATELVQSSSTGEICDSPHQILDGENCTLIDALLGDPQCDGFQNKKWDLFVERSKAYSNCYPYDVPDYASLRSLVASSGTLEFNNESFNWTGVTQNGTSSACIRRSNNSFFSRLNWLTHLNFKYPALNVTMPNNEQFDKLYIWGVHHPGTDKDQIFLYAQASGRITVSTKRSQQAVIPNIGSRPRVRNIPSRISIYWTIVKPGDILLINSTGNLIAPRGYFKIRSGKSSIMRSDAPIGKCNSECITPNGSIPNDKPFQNVNRITYGACPRYVKQSTLKLATGMRNVPEKQTRGIFGAIAGFIENGWEGMVDGWYGFRHQNSEGRGQAADLKSTQAAIDQINGKLNRLIGKTNEKFHQIEKEFSEVEGRIQDLEKYVEDTKIDLWSYNAELLVALENQHTIDLTDSEMNKLFEKTRKQLRENAEDMGNGCFTIYHKCDNACIGSIRNGTYDHNVYRDEALNNRFQIKGVELKSGYKDWILWISFAISCFLLCVALLGFIMWACQKGNIRCNICI

SEQ ID NO: 6021 - protein, 566 aa, Artificial Sequence; identical to SEQ ID NO: 5533
  derived and/or modified protein sequence (wt) from hemagglutinin__InfluenzaA__ADN89897

SEQ ID NO: 6022 - protein, 566 aa, Artificial Sequence; identical to SEQ ID NO: 5533
  derived and/or modified protein sequence (wt) from hemagglutinin__InfluenzaA__ADN89908

SEQ ID NO: 6023 - protein, 566 aa, Artificial Sequence; identical to SEQ ID NO: 5533
  derived and/or modified protein sequence (wt) from hemagglutinin__InfluenzaA__ADN89919

SEQ ID NO: 6024 - protein, 566 aa, Artificial Sequence; identical to SEQ ID NO: 5533
  derived and/or modified protein sequence (wt) from hemagglutinin__InfluenzaA__ADN89930

SEQ ID NO: 6025 - protein, 566 aa, Artificial Sequence; identical to SEQ ID NO: 5533
  derived and/or modified protein sequence (wt) from hemagglutinin__InfluenzaA__ADN89941

SEQ ID NO: 6026 - protein, 566 aa, Artificial Sequence; identical to SEQ ID NO: 5533
  derived and/or modified protein sequence (wt) from hemagglutinin__InfluenzaA__ADN89952

SEQ ID NO: 6027 - protein, 566 aa, Artificial Sequence; identical to SEQ ID NO: 5533
  derived and/or modified protein sequence (wt) from hemagglutinin__InfluenzaA__ADN89963

SEQ ID NO: 6028 - protein, 566 aa, Artificial Sequence
  derived and/or modified protein sequence (wt) from hemagglutinin__InfluenzaA__ADN89974
MKTIIALSYILCLVFAQKLPGNDNSTATLCLGHHAVPNGTIVKTITNDQIEVTNATELVQSSSTGEICDSPHQILDGENCTLIDALLGDPQCDGFQNKKWDLFVERSKAYSNCYPYDVPDYASLRSLVASSGTLEFNNESFNWTGVTQNGTSSACIRRSNNSFFSRLNWLTHLNFKYPALNVTMPNNEQFDKLYIWGVHHPGTDKDQIFLYAQASGRITVSTKRSQQAVIPNIGSRPRVRNIPSRISIYWTIVKPGDILLINSTGNLIAPRGYFKIQSGKSSIMRSDAPIGKCNSECITPNGSIPNDKPFQNVNRITYGACPRYVKQSTLKLATGMRNVPEKQTRGIFGAIAGFIENGWEGMVDGWYGFRHQNSEGRGQAADLKSTQAAIDQINGKLNRLIGKTNEKFHQIEKEFSEVEGRIQDLEKYVEDTKIDLWSYNAELLVALENQHTIDLTDSEMNKLFEKTKKQLRENAEDMGNGCFTIYHKCDNACIGSIRNGTYDHNVYRDEALNNRFQIKGVELKSGYKDWILWISFAISCFLLCVALLGFIMWACQKGNIRCNICI

SEQ ID NO: 6029 - protein, 566 aa, Artificial Sequence; identical to SEQ ID NO: 5533
  derived and/or modified protein sequence (wt) from hemagglutinin__InfluenzaA__ADN89985

SEQ ID NO: 6030 - protein, 566 aa, Artificial Sequence; identical to SEQ ID NO: 5533
  derived and/or modified protein sequence (wt) from hemagglutinin__InfluenzaA__ADN89996

SEQ ID NO: 6031 - protein, 566 aa, Artificial Sequence; identical to SEQ ID NO: 5533
  derived and/or modified protein sequence (wt) from hemagglutinin__InfluenzaA__ADN90007

SEQ ID NO: 6032 - protein, 566 aa, Artificial Sequence; identical to SEQ ID NO: 5533
  derived and/or modified protein sequence (wt) from hemagglutinin__InfluenzaA__ADN90018

SEQ ID NO: 6033 - protein, 566 aa, Artificial Sequence; identical to SEQ ID NO: 5533
  derived and/or modified protein sequence (wt) from hemagglutinin__InfluenzaA__ADN90040

SEQ ID NO: 6034 - protein, 566 aa, Artificial Sequence; identical to SEQ ID NO: 5533
  derived and/or modified protein sequence (wt) from hemagglutinin__InfluenzaA__ADN90051

SEQ ID NO: 6035 - protein, 566 aa, Artificial Sequence; identical to SEQ ID NO: 5533
  derived and/or modified protein sequence (wt) from hemagglutinin__InfluenzaA__ADN90062

SEQ ID NO: 6036 - protein, 566 aa, Artificial Sequence; identical to SEQ ID NO: 5533
  derived and/or modified protein sequence (wt) from hemagglutinin__InfluenzaA__ADN90073

SEQ ID NO: 6037 - protein, 566 aa, Artificial Sequence; identical to SEQ ID NO: 5533
  derived and/or modified protein sequence (wt) from hemagglutinin__InfluenzaA__ADN90084

SEQ ID NO: 6038 - protein, 566 aa, Artificial Sequence; identical to SEQ ID NO: 5533
  derived and/or modified protein sequence (wt) from hemagglutinin__InfluenzaA__ADN90095

SEQ ID NO: 6039 - protein, 566 aa, Artificial Sequence; identical to SEQ ID NO: 5533
  derived and/or modified protein sequence (wt) from hemagglutinin__InfluenzaA__ADN90106

SEQ ID NO: 6040 - protein, 566 aa, Artificial Sequence; identical to SEQ ID NO: 5533
  derived and/or modified protein sequence (wt) from hemagglutinin__InfluenzaA__ADN90117

SEQ ID NO: 6041 - protein, 566 aa, Artificial Sequence; identical to SEQ ID NO: 5533
  derived and/or modified protein sequence (wt) from hemagglutinin__InfluenzaA__ADN90128

SEQ ID NO: 6042 - protein, 566 aa, Artificial Sequence; identical to SEQ ID NO: 5533
  derived and/or modified protein sequence (wt) from hemagglutinin__InfluenzaA__ADN90139

SEQ ID NO: 6043 - protein, 566 aa, Artificial Sequence; identical to SEQ ID NO: 5533
  derived and/or modified protein sequence (wt) from hemagglutinin__InfluenzaA__ADN90150

SEQ ID NO: 6044 - protein, 566 aa, Artificial Sequence; identical to SEQ ID NO: 5533
  derived and/or modified protein sequence (wt) from hemagglutinin__InfluenzaA__ADN90161

SEQ ID NO: 6045 - protein, 566 aa, Artificial Sequence; identical to SEQ ID NO: 5533
  derived and/or modified protein sequence (wt) from hemagglutinin__InfluenzaA__ADN90172

SEQ ID NO: 6046 - protein, 566 aa, Artificial Sequence; identical to SEQ ID NO: 5533
  derived and/or modified protein sequence (wt) from hemagglutinin__InfluenzaA__ADN90183

SEQ ID NO: 6047 - protein, 566 aa, Artificial Sequence; identical to SEQ ID NO: 5533
  derived and/or modified protein sequence (wt) from hemagglutinin__InfluenzaA__ADN90194

SEQ ID NO: 6048 - protein, 566 aa, Artificial Sequence; identical to SEQ ID NO: 5533
  derived and/or modified protein sequence (wt) from hemagglutinin__InfluenzaA__ADN90205

SEQ ID NO: 6049 - protein, 566 aa, Artificial Sequence; identical to SEQ ID NO: 5533
  derived and/or modified protein sequence (wt) from hemagglutinin__InfluenzaA__ADN90216

SEQ ID NO: 6050 - protein, 566 aa, Artificial Sequence; identical to SEQ ID NO: 3430
  derived and/or modified protein sequence (wt) from hemagglutinin__InfluenzaA__ADN92467

SEQ ID NO: 6051 - protein, 566 aa, Artificial Sequence
  derived and/or modified protein sequence (wt) from hemagglutinin__InfluenzaA__ADN92478
MKTIIALSHILCLVFAQKLPGNDNSTATLCLGHHAVPNGTIVKTITNDQIEVTNATELVQSSSTGEICDSPHQILDGKNCTLIDALLGDPQCDGFQNKKWDLFVERSKAYSNCYPYDVPDYASLRSLVASSGTLEFNNESFNWTGVTQNGTSSACIRRSKNSFFSRLNWLTHLNFKYQALNVTMPNNEQFDKLYIWGVHHPGTDKDQIFLYAQASGRITVSTKRSQQTVIPNIGSRPRVRNIPSRISIYWTIVKPGDILLINSTGNLIAPRGYFKIQSGKSSIMRSDAPIGKCNSECITPNGSIPNDKPFQNVNRITYGACPRYVKQNTLKLATGMRNVPEKQTRGIFGAIAGFIENGWEGMVDGWYGFRHQNSEGRGQAADLKSTQAAIDQINGKLNRLIGKTNEKFHQIEKEFSEVEGRIQDLEKYVEDTKIDLWSYNAELLVALENQHTIDLTDSEMNKLFEKTKKQLRENAEDMGNGCFKIYHKCDNACIGSIRNGTYDHDVYRDEALNNRFQIKGVELKSGYKDWILWISFAISCFLLCVALLGFIMWACQKGNIRCNICI

SEQ ID NO: 6052 - protein, 566 aa, Artificial Sequence
  derived and/or modified protein sequence (wt) from hemagglutinin__InfluenzaA__ADN92489
MKTIIALSYILCLVFAQKLPGNDNSTATLCLGHHAVPNGTIVKTITNDQIEVTNATELVQSSSTGEICDSPHQILDGKNCTLIDALLGDPQCDGFQNKKWDLFVERSKAYSNCYPYDVPDYASLRSLVASSGTLEFNNENFNWTGVTQNGTSSACIRRSKNSFFSRLNWLTHLNFKYQALNVTMPNNEQFDKLYIWGVHHPGTDKDQIFLYAQASGRITVSTKRSQQTVIPNIGSRPRVRNIPSRISIYWTIVKPGDILLINSTGNLIAPRGYFKIQSGKSSIMRSDAPIGKCNSECITPNGSIPNDKPFQNVNRITYGACPRYVKQNTLKLATGMRNVPEKQTRGIFGAIAGFIENGWEGMVDGWYGFRHQNSEGRGQAADLKSTQAAIDQINGKLNRLIGKTNEKFHQIEKEFSEVEGRIQDLEKYVEDTKIDLWSYNAELLVALENQHTIDLTDSEMNKLFEKTKKQLRENAEDMGNGCFKIYHKCDNACIGSIRNGTYDHDVYRDEALNNRFQIKGVELKSGYKDWILWISFAISCFLLCVALLGFIMWACQKGNIRCNICI

SEQ ID NO: 6053 - protein, 566 aa, Artificial Sequence; identical to SEQ ID NO: 3430
  derived and/or modified protein sequence (wt) from hemagglutinin__InfluenzaA__ADN92500

SEQ ID NO: 6054 - protein, 566 aa, Artificial Sequence; identical to SEQ ID NO: 2669
  derived and/or modified protein sequence (wt) from hemagglutinin__InfluenzaA__ADN92510

SEQ ID NO: 6055 - protein, 566 aa, Artificial Sequence; identical to SEQ ID NO: 2669
  derived and/or modified protein sequence (wt) from hemagglutinin__InfluenzaA__ADN92520

SEQ ID NO: 6056 - protein, 566 aa, Artificial Sequence; identical to SEQ ID NO: 3771
  derived and/or modified protein sequence (wt) from hemagglutinin__InfluenzaA__ADN92530

SEQ ID NO: 6057 - protein, 566 aa, Artificial Sequence; identical to SEQ ID NO: 2911
  derived and/or modified protein sequence (wt) from hemagglutinin__InfluenzaA__ADN92540

SEQ ID NO: 6058 - protein, 566 aa, Artificial Sequence; identical to SEQ ID NO: 2669
  derived and/or modified protein sequence (wt) from hemagglutinin__InfluenzaA__ADN92550

SEQ ID NO: 6059 - protein, 566 aa, Artificial Sequence; identical to SEQ ID NO: 2669
  derived and/or modified protein sequence (wt) from hemagglutinin__InfluenzaA__ADN92560

SEQ ID NO: 6060 - protein, 566 aa, Artificial Sequence
  derived and/or modified protein sequence (wt) from hemagglutinin__InfluenzaA__ADO00730
MKAILVVLLYTFATANADTLCIGYHANNSTDTVDTVLEKNVTVTHSVNLLEDKHNGKLCKLRGVAPLHLGKCNIAGWILGNPECGSLSTASSWSYIVETSSSDNGTCYPGDFIDYEELREQLSSVSSFERFEIFPKTSSWPNHDSNKGVTAACPHAGAKSFYKNLIWLVKKGNSYPKLSKSYINDKGKEVLVLWGIHHPSTSADQQSLYQNADAYVFVGTSRYSKKFKPEIAIRPKVRDQEGRMNYYWTLVEPGDKITFEATGNLVVPRYAFAMERNAGSGIIISDTPVHDCNTTCQTPKGAINTSLPFQNIHPITIGKCPKYVKSTKLRLATGLRNVPSIQSRGLFGAIAGFIEGGWTGMVDGWYGYHHQNEQGSGYAADLKSTQNAIDGITNKVNSVIEKMNTQFTAVGKEFNHLEKRIENLNKKVDDGFLDIWTYNAELLVLLENERTLDYHDSNVKNLYEKVRSQLKNNAKEIGNGCFEFYHKCDNTCMESVKNGTYDYPKYSEEAKLNREEIDGVKLESTRIYQILAIYSTVASSLVLVVSLGAISFWMCSNGSLQCRICI

SEQ ID NO: 6061 - protein, 566 aa, Artificial Sequence; identical to SEQ ID NO: 4089
  derived and/or modified protein sequence (wt) from hemagglutinin__InfluenzaA__ADO00740

SEQ ID NO: 6062 - protein, 566 aa, Artificial Sequence; identical to SEQ ID NO: 3833
  derived and/or modified protein sequence (wt) from hemagglutinin__InfluenzaA__ADO00750

SEQ ID NO: 6063 - protein, 566 aa, Artificial Sequence; identical to SEQ ID NO: 2669
  derived and/or modified protein sequence (wt) from hemagglutinin__InfluenzaA__ADO12143

SEQ ID NO: 6064 - protein, 566 aa, Artificial Sequence; identical to SEQ ID NO: 2669
  derived and/or modified protein sequence (wt) from hemagglutinin__InfluenzaA__ADO12153

SEQ ID NO: 6065 - protein, 566 aa, Artificial Sequence; identical to SEQ ID NO: 2669
  derived and/or modified protein sequence (wt) from hemagglutinin__InfluenzaA__ADO12163

SEQ ID NO: 6066 - protein, 566 aa, Artificial Sequence; identical to SEQ ID NO: 2669
  derived and/or modified protein sequence (wt) from hemagglutinin__InfluenzaA__ADO12173

SEQ ID NO: 6067 - protein, 566 aa, Artificial Sequence; identical to SEQ ID NO: 2669
  derived and/or modified protein sequence (wt) from hemagglutinin__InfluenzaA__ADO12183

SEQ ID NO: 6068 - protein, 566 aa, Artificial Sequence; identical to SEQ ID NO: 2669
  derived and/or modified protein sequence (wt) from hemagglutinin__InfluenzaA__ADO12193

SEQ ID NO: 6069 - protein, 566 aa, Artificial Sequence; identical to SEQ ID NO: 2669
  derived and/or modified protein sequence (wt) from hemagglutinin__InfluenzaA__ADO12203

SEQ ID NO: 6070 - protein, 566 aa, Artificial Sequence; identical to SEQ ID NO: 2669
  derived and/or modified protein sequence (wt) from hemagglutinin__InfluenzaA__ADO12213

SEQ ID NO: 6071 - protein, 566 aa, Artificial Sequence; identical to SEQ ID NO: 2669
  derived and/or modified protein sequence (wt) from hemagglutinin__InfluenzaA__ADO12223

SEQ ID NO: 6072 - protein, 566 aa, Artificial Sequence; identical to SEQ ID NO: 2669
  derived and/or modified protein sequence (wt) from hemagglutinin__InfluenzaA__ADO12233

SEQ ID NO: 6073 - protein, 566 aa, Artificial Sequence; identical to SEQ ID NO: 2669
  derived and/or modified protein sequence (wt) from hemagglutinin__InfluenzaA__ADO12243

SEQ ID NO: 6074 - protein, 566 aa, Artificial Sequence; identical to SEQ ID NO: 2669
  derived and/or modified protein sequence (wt) from hemagglutinin__InfluenzaA__ADO12253

SEQ ID NO: 6075 - protein, 566 aa, Artificial Sequence; identical to SEQ ID NO: 2669
  derived and/or modified protein sequence (wt) from hemagglutinin__InfluenzaA__ADO12263

SEQ ID NO: 6076 - protein, 566 aa, Artificial Sequence; identical to SEQ ID NO: 2669
  derived and/or modified protein sequence (wt) from hemagglutinin__InfluenzaA__ADO12273

SEQ ID NO: 6077 - protein, 566 aa, Artificial Sequence; identical to SEQ ID NO: 2669
  derived and/or modified protein sequence (wt) from hemagglutinin__InfluenzaA__ADO12283

SEQ ID NO: 6078 - protein, 566 aa, Artificial Sequence; identical to SEQ ID NO: 2669
  derived and/or modified protein sequence (wt) from hemagglutinin__InfluenzaA__ADO12293

SEQ ID NO: 6079 - protein, 566 aa, Artificial Sequence; identical to SEQ ID NO: 2669
  derived and/or modified protein sequence (wt) from hemagglutinin__InfluenzaA__ADO12303

SEQ ID NO: 6080 - protein, 566 aa, Artificial Sequence; identical to SEQ ID NO: 2669
  derived and/or modified protein sequence (wt) from hemagglutinin__InfluenzaA__ADO12313

SEQ ID NO: 6081 - protein, 566 aa, Artificial Sequence; identical to SEQ ID NO: 2669
  derived and/or modified protein sequence (wt) from hemagglutinin__InfluenzaA__ADO12323

SEQ ID NO: 6082 - protein, 566 aa, Artificial Sequence; identical to SEQ ID NO: 2669
  derived and/or modified protein sequence (wt) from hemagglutinin__InfluenzaA__ADO12333

SEQ ID NO: 6083 - protein, 566 aa, Artificial Sequence; identical to SEQ ID NO: 2669
  derived and/or modified protein sequence (wt) from hemagglutinin__InfluenzaA__ADO12343

SEQ ID NO: 6084 - protein, 566 aa, Artificial Sequence; identical to SEQ ID NO: 2669
  derived and/or modified protein sequence (wt) from hemagglutinin__InfluenzaA__ADO12353

SEQ ID NO: 6085 - protein, 566 aa, Artificial Sequence; identical to SEQ ID NO: 2669
  derived and/or modified protein sequence (wt) from hemagglutinin__InfluenzaA__ADO12363

SEQ ID NO: 6086 - protein, 566 aa, Artificial Sequence
  derived and/or modified protein sequence (wt) from hemagglutinin__InfluenzaA__ADO12373
MKAILVVLLYTFATANADTLCIGYHANNSTDTVDTVLEKNVTVTHSVNLLEDKHNGKLCKLRGVAPLHLGKCNIAGWILGNPECESLSTASSWSYIVETSSSDNGTCYPGDFIDYEELREQLSSVSSFERFEIFPKTSSWPNHDSNKGVTAACPHAGAKSFYKNLIWLVKKGNSYPKLSKSYINNKGKEVLVLWGIHHPSTSADQQSLYQNADAYVFVGTSRYSKKFKPEIAIRPKVRDQEGRMNYYWTLVEPGDKITFEATGNLVVPRYAFAMERNAGSGIIISDTPVHDCNTTCQTPKGAINTSLPFQNIHPITIGKCPKYVKSTKLRLATGLRNVPSIQSRGLFGAIAGFIEGGWTGMVDGWYGYHHQNEQGSGYAADLKSTQNAIDEITNKVNSVIEKMNTQFTAVGKEFNHLEKRIENLNKKVDDGFLDIWTYNAELLVLLENERTLDYHDSNVKNLYEKVRSQLKNNAKEIGNGCFEFYHKCDNTCMESVKNGTYDYPKYSEEAKLNREEIDGVKLESTRIYQILAIYSTVASSLVLVVSLGAISFWMCSNGSLQCRICI

SEQ ID NO: 6087 - protein, 566 aa, Artificial Sequence; identical to SEQ ID NO: 4154
  derived and/or modified protein sequence (wt) from hemagglutinin__InfluenzaA__ADO12383

SEQ ID NO: 6088 - protein, 566 aa, Artificial Sequence
  derived and/or modified protein sequence (wt) from hemagglutinin__InfluenzaA__ADO12403
MKAILVVLLYTFATANADTLCIGYHANNSTDTVDTVLEKNVTVTHSVNLLEDKHNGKLCKLRGVAPLHLGKCNIAGWILGNPECESLSTASSWSYIVETSSSDNGTCYPGDFIDYEELREQLSSVSSFERFEIFPKTSSWPNHDSNKGVTAACPHAGAKSFYKNLIWLVKKGNSYPKLSKSYINDKGKEVLVLWGIHHPSTSADQQSLYQNADAYVFVGTSRYSKKFKPEIAIRPKVRDQEGRMNYYWTLVEPGDKITFEATGNLVVPRYAFAMERNAGSGIIISDTPVHDCNTTCQTPKGAINTSLPFQNVHPITIGKCPKYVKSTKLRLATGLRNVPSIQSRGLFGAIAGFIEGGWTGMVDGWYGYHHQNEQGSGYAADLKSTQNAIDEITNKVNSVIEKMNTQFTAVGKEFNHLEKRIENLNKKVDDGFLDIWTYNAELLVLLENERTLDYHDSNVKNLYEKVRSQLKNNAKEIGNGCFEFYHKCDNTCMESVKNGTYDYPKYSEEAKLNREEIDGVKLESTRIYQILAIYSTVASSLVLVVSLGAISFWMCSNGSLQCRICI

SEQ ID NO: 6089 - protein, 566 aa, Artificial Sequence; identical to SEQ ID NO: 4305
  derived and/or modified protein sequence (wt) from hemagglutinin__InfluenzaA__ADO12413

SEQ ID NO: 6090 - protein, 566 aa, Artificial Sequence; identical to SEQ ID NO: 2669
  derived and/or modified protein sequence (wt) from hemagglutinin__InfluenzaA__ADO12423

SEQ ID NO: 6091 - protein, 566 aa, Artificial Sequence; identical to SEQ ID NO: 2669
  derived and/or modified protein sequence (wt) from hemagglutinin__InfluenzaA__ADO12433

SEQ ID NO: 6092 - protein, 566 aa, Artificial Sequence; identical to SEQ ID NO: 2669
  derived and/or modified protein sequence (wt) from hemagglutinin__InfluenzaA__ADO12443

SEQ ID NO: 6093 - protein, 566 aa, Artificial Sequence; identical to SEQ ID NO: 2669
  derived and/or modified protein sequence (wt) from hemagglutinin__InfluenzaA__ADO12453

SEQ ID NO: 6094 - protein, 566 aa, Artificial Sequence; identical to SEQ ID NO: 2669
  derived and/or modified protein sequence (wt) from hemagglutinin__InfluenzaA__ADO12463

SEQ ID NO: 6095 - protein, 566 aa, Artificial Sequence
  derived and/or modified protein sequence (wt) from hemagglutinin__InfluenzaA__ADO12473
MKAILVVLLYTFATANADTLCIGYHANNSTDTVDTVLEKNVTVTHSVNLLEDKQNGKLCKLRGVAPLHLGKCNIAGWILGNPECESLSTASSWSYIVETSSSDNGTCYPGDFIDYEELREQLSSVSSFERFEIFPKTSSWPNHDSNKGVTAACPHAGAKSFYKNLIWLVKKGNSYPKLSKSYINDKGKEVLVLWGIHHPSTSADQQSLYQNADAYVFVGTSRYSKKFKPEIAIRPKVRDQEGRMNYYWTLVEPGDKITFEATGNLVVPRYAFAMERNAGSGIIISDTPVHDCNTTCQTPKGAINTSLPFQNIHPITIGKCPKYVKSTKLRLATGLRNVPSIQSRGLFGAIAGFIEGGWTGMVDGWYGYHHQNEQGSGYAADLKSTQNAIDEITNKVNSVIEKMNTQFTAVGKEFNHLEKRIENLNKKVDDGFLDIWTYNAELLVLLENERTLDYHDSNVKNLYEKVRSQLKNNAKEIGNGCFEFYHKCDNTCMESVKNGTYDYPKYSEEAKLNREEIDGVKLESTRIYQILAIYSTVASSLVLVVSLGAISFWMCSNGSLQCRICI

SEQ ID NO: 6096 - protein, 566 aa, Artificial Sequence; identical to SEQ ID NO: 2669
  derived and/or modified protein sequence (wt) from hemagglutinin__InfluenzaA__ADO12493

SEQ ID NO: 6097 - protein, 566 aa, Artificial Sequence
  derived and/or modified protein sequence (wt) from hemagglutinin__InfluenzaA__ADO12503
MKAILVVLLYTFATANADTLCIGYHANNSTDTVDTVLEKNVTVTHSVNLLEDKHNGKLCKLRGVAPLHLGKCNIAGWILGNPECESLSTASSWSYIVETSSSDNGTCYPGDFIDYEELREQLSSVSSFERFEIFPKTSSWPNHDSNKGVTAACPHAGAKSFYKNLIWLVKKGNSYPKLSKSYINDKGKEVLVLWGIHHPSTSADQQSLYQNADAYVFVGTSRYSKKFKPEIAIRPKVRDQEGRMNYYWTLVEPGDKITFEATGNLVVPRYAFAMERNAGSGIIISDTPVHDCNTTCQTPKGAINTSLPFQNIHPITIGKCPKYVKSTKLRLATGLRNVPSIQSRGLFGAIAGFIEGGWTGMVDGWYGYHHQNEQGSGYAADLKSTQNAIDEITNKVNSVIEKMNTQFTAVGKEFNHLEKRIENLNKKVDDGFLDIWTYNAELLVLLENERTLDYHDSNVKNLYEKVRSQLKNNAKEIGNGCFEFYHKCDNTCMESVKNGTYDYPKYSEEAKLNREEIDGVKLESTRIYQILAIYSTVASSLVLVVSLGAINFWMCSNGSLQCRICI

SEQ ID NO: 6098 - protein, 566 aa, Artificial Sequence
  derived and/or modified protein sequence (wt) from hemagglutinin__InfluenzaA__ADO12513
MKAILVVLLYTFATANADTLCIGYHANNSTDTVDTVLEKNVTVTHSVNLLEDKHNGKLCKLREVAPLHLGKCNIAGWILGNPECESLSTASSWSYIVETSSSDNGTCYPGDFIDYEELREQLSSVSSFERFEIFPKTSSWPNHDSNKGVTAACPHAGAKSFYKNLIWLVKKGNSYPKLSKSYINDKGKEVLVLWGIHHPSTSADQQSLYQNADAYVFVGTSRYSKKFKPEIAIRPKVRDQEGRMNYYWTLVEPGDKITFEATGNLVVPRYAFAMERNAGSGIIISDTPVHDCNTTCQTPKGAINTSLPFQNIHPITIGKCPKYVKSTKLRLATGLRNVPSIQSRGLFGAIAGFIEGGWTGMVDGWYGYHHQNEQGSGYAADLKSTQNAIDEITNKVNSVIEKMNTQFTAVGKEFNHLEKRIENLNKKVDDGFLDIWTYNAELLVLLENERTLDYHDSNVKNLYEKVRSQLKNNAKEIGNGCFEFYHKCDNTCMESVKNGTYDYPKYSEEAKLNREEIDGVKLESTRIYQILAIYSTVASSLVLVVSLGAISFWMCSNGSLQCRICI

SEQ ID NO: 6099 - protein, 566 aa, Artificial Sequence; identical to SEQ ID NO: 2669
  derived and/or modified protein sequence (wt) from hemagglutinin__InfluenzaA__ADO12523

SEQ ID NO: 6100 - protein, 566 aa, Artificial Sequence
  derived and/or modified protein sequence (wt) from hemagglutinin__InfluenzaA__ADO12533
MKAILVVLLYTFATANADTLCIGYHANNSTDTVDTVLEKNVTVTHSVNLLEDKHNGKLCKLRGVAPLHLGKCNIAGWILGNPECESLSTASSWSYIVETSSSDNGTCYPGDFIDYEELREQLSSVSSFERFEIFPKTSSWPNHDSNKGVTAACPHAGAKSFYKNLIWLVKKGNSYPKLSKSYINDKGKEVLVLWGIHHPSTSADQQSLYQNADAYVFVGTSRYSKKFKPEIAIRPKVRDQEGRMNYYWTLVEPGDKITFEATGNLVVPRYAFAMERNAGSGIIISDTPVHDCNTTCQTPKGAINTSLPFQNIHPITIGKCPKYVKSTRLRLATGLRNVPSIQSRGLFGAIAGFIEGGWTGMVDGWYGYHHQNEQGSGYAADLKSTQNAIDEITNKVNSVIEKMNTQFTAVGKEFNHLEKRIENLNKKVDDGFLDIWTYNAELLVLLENERTLDYHDSNVKNLYEKVRSQLKNNAKEIGNGCFEFYHKCDNTCMESVKNGTYDYPKYSEEAKLNREEIDGVKLESTRIYQILAIYSTVASSLVLVVSLGAISFWMCSNGSLQCRICI

SEQ ID NO: 6101 - protein, 566 aa, Artificial Sequence; identical to SEQ ID NO: 2669
  derived and/or modified protein sequence (wt) from hemagglutinin__InfluenzaA__ADO12543

SEQ ID NO: 6102 - protein, 566 aa, Artificial Sequence; identical to SEQ ID NO: 2669
  derived and/or modified protein sequence (wt) from hemagglutinin__InfluenzaA__ADO12553

SEQ ID NO: 6103 - protein, 566 aa, Artificial Sequence; identical to SEQ ID NO: 2669
  derived and/or modified protein sequence (wt) from hemagglutinin__InfluenzaA__ADO12563

SEQ ID NO: 6104 - protein, 566 aa, Artificial Sequence; identical to SEQ ID NO: 2669
  derived and/or modified protein sequence (wt) from hemagglutinin__InfluenzaA__ADO12573

SEQ ID NO: 6105 - protein, 566 aa, Artificial Sequence
  derived and/or modified protein sequence (wt) from hemagglutinin__InfluenzaA__ADO12593
MKAILVVLLYTFATANADTLCIGYHANNSTDIVDTVLEKNVTVTHSVNLLEDKHNGKLCKLRGVAPLHLGKCNIAGWILGNPECESLSTASSWSYIVETSSSDNGTCYPGDFIDYEELREQLSSVSSFERFEIFPKTSSWPNHDSNKGVTAACPHAGAKSFYKNLIWLVKKGNSYPKLSKSYINDKGKEVLVLWGIHHPSTSADQQSLYQNADAYVFVGTSRYSKKFKPEIAIRPKVRDQEGRMNYYWTLVEPGDKITFEATGNLVVPRYAFAMERNAGSGIIISDTPVHDCNTTCQTPKGAINTSLPFQNIHPITIGKCPKYVKSTKLRLATGLRNVPSIQSRGLFGAIAGFIEGGWTGMVDGWYGYHHQNEQGSGYAADLKSTQNAIDEITNKVNSVIEKMNTQFTAVGKEFNHLEKRIENLNKKVDDGFLDIWTYNAELLVLLENERTLDYHDSNVKNLYEKVRSQLKNNAKEIGNGCFEFYHKCDNTCMESVKNGTYDYPKYSEEAKLNREEIDGVKLESTRIYQILAIYSTVASSLVLVVSLGAISFWMCSNGSLQCRICI

SEQ ID NO: 6106 - protein, 566 aa, Artificial Sequence; identical to SEQ ID NO: 2669
  derived and/or modified protein sequence (wt) from hemagglutinin__InfluenzaA__ADO12603

SEQ ID NO: 6107 - protein, 566 aa, Artificial Sequence; identical to SEQ ID NO: 2669
  derived and/or modified protein sequence (wt) from hemagglutinin__InfluenzaA__ADO12613

SEQ ID NO: 6108 - protein, 566 aa, Artificial Sequence; identical to SEQ ID NO: 2669
  derived and/or modified protein sequence (wt) from hemagglutinin__InfluenzaA__ADO12623

SEQ ID NO: 6109 - protein, 566 aa, Artificial Sequence
  derived and/or modified protein sequence (wt) from hemagglutinin__InfluenzaA__ADO14349
MKAILVVLLYTFATANADTLCIGYHANNSTDTVDTVLEKNVTVTHSVNLLEDKHKGKLCKLRGVAPLHLGKCNIAGWILGNPECESLSTASSWSYIVETSSSDKGTCYPGDFIDYEELREQLSSVSSFERFEIFPKTSSWPNHDSNKGVTAACPHAGAKSFYKNLIWLVKKGNSYPKLSKSYINDKGKEVLVLWGIHHPSTSADQQSLYQNADAYVFVGTSRYSKKFKPEIAIRPKVRDQEGRMNYYWTLVEPGDKITFEATGNLVVPRYAFAMERNAGSGIIISDTPVHDCNTTCQTPKGAINTSLPFQNIHPITIGKCPKYVKSTKLRLATGLRNIPSIQSRGLFGAIAGFIEGGWTGMVDGWYGYHHQNEQGSGYAADLKSTQNAIDEITNKVNSVIEKMNTQFTAVGKEFNHLEKRIENLNKKVDDGFLDIWTYNAELLVLLENERTLDYHDSNVKNLYEKVRSQLKNNAKEIGNGCFEFYHKCDNTCMESVKNGTYDYPKYSEEAKLNREEIDGVKLESTRIYQILAIYSTVASSLVLVVSLGAISFWMCSNGSLQCRICI

SEQ ID NO: 6110 - protein, 566 aa, Artificial Sequence; identical to SEQ ID NO: 4933
  derived and/or modified protein sequence (wt) from hemagglutinin__InfluenzaA__ADO14351

SEQ ID NO: 6111 - protein, 566 aa, Artificial Sequence
  derived and/or modified protein sequence (wt) from hemagglutinin__InfluenzaA__ADO14353
MKAILVVLLYTFATANADTLCIGYHANNSTDTVDTVLEKNVTVTHSVNLLEDKHNGKLCKLRGVAPLHLGKCNIAGWILGNPECESLSTASSWSYIVETSSSDNGTCYPGDFIDYEELREQLSSVSSFERFEIFPKTSSWPNHDSNKGVTAACPHAEAKSFYKNLIWLVKKGNSYPKLSKSYINDKGKEVLVLWGIHHPSTSADQQSLYQNADAYVFVGTSRYSKKFKPEIAIRPKVRDQEGRMNYYWTLVEPGDKITFEATGNLVVPRYAFAMERNAGSGIIISDTPVHDCNTTCQTPKGAINTSLPFQNIHPITIGKCPKYVKSTKLRLATGLRNIPSIQSRGLFGAIAGFIEGGWTGMVDGWYGYHHQNEQGSGYAADLKSTQNAIDEITNKVNSVIEKMNTQFTAVGKEFNHLEKRIENLNKKVDDGFLDIWTYNAELLVLLENERTLDYHDSNVKNLYEKVRSQLKNNAKEIGNGCFEFYHKCDNTCMESVKNGTYDYPKYSEEAKLNREEIDGVKLESTRIYQILAIYSTVASSLVLVVSLGAISFWMCSNGSLQCRICI

SEQ ID NO: 6112 - protein, 566 aa, Artificial Sequence
  derived and/or modified protein sequence (wt) from hemagglutinin__InfluenzaA__ADO14354
MKAILVVLLYTFATANADTLCMGYHANNSTDTVDTVLEKNVTVTHSVNLLEDKHNGKLCKLRGVAPLHLGKCNIAGWILGNPECESLSTASSWSYIVETSSSDNGTCYPGDFIDYEELREQLSSVSSFERFEIFPKTSSWPNHDSNKGVTAACPHAGAKSFYKNLIWLVKKGNSYPKLSKSYINDKGKEVLVLWGIHHPSTSADQQSLYQNADAYVFVGTSRYSKKFKPEIAIRPKVREQEGRMNYYWTLVEPGDKITFEATGNLVVPRYAFAMERNAGSGIIISDTPVHDCNTTCQTPKGAINTSLPFQNIHPITIGKCPKYVKSTKLRLATGLRNVPSIQSRGLFGAIAGFIEGGWTGMVDGWYGYHHQNEQGSGYAADLKSTQNAIDEITNKVNSVIEKMNTQFTAVGKEFNHLEKRIENLNKKVDDGFLDIWTYNAELLVLLENERTLDYHDSNVKNLYEKVRSQLKNNAKEIGNGCFEFYHKCDNTCMESVKNGTYDYPKYSEEAKLNREEIDGVKLESTRIYQILAIYSTVASSLVLVVSLGAISFWMCSNGSLQCRICI

SEQ ID NO: 6113 - protein, 566 aa, Artificial Sequence
  derived and/or modified protein sequence (wt) from hemagglutinin__InfluenzaA__ADO14356
MKAILVVLLYTFATANADTLCIGYHANNSTDTVDTVLEKNVTVTHSVNLLEDKHNGKLCKLRGVAPLHLGKCNIAGWILGNPECESLSTASSWSYIVETSSSDNGTCYPGDFIDYEELREQLSSVSSFERFEIFPKTSSWPNHDSNKGVTAACPHAGAKSFYKNLIWLVKKGNSYPKLSKSYINDKGKEVLVLWGIHHPSTSADQQSLYQNADAYVFVGTSRYSKKFKPEIAIRPKVRGQEGRMNYYWTLVEPGDKITFEATGNLVVPRYAFAMERNAGSGIIISDTPVHDCNTTCQTPKGAINTSLPFQNIHPITIGKCPKYVKSTKLRLATGLRNIPSIQSRGLFGAIAGFIEGGWTGMVDGWYGYHHQNEQGSGYAADLKSTQNAIDEITNKVNSVIEKMNTQFTAVGKEFNHLEKRIENLNKKVDDGFLDIWTYNAELLVLLENERTLDYHDSNVKNLYEKVRSQLKNNAKEIGNGCFEFYHKCDNTCMESVKNGTYDYPEYSEEAKLNREEIDGVKLESTRIYQILAIYSTVASSLVLVVSLGAISFWMCSNGSLQCRICI

SEQ ID NO: 6114 - protein, 566 aa, Artificial Sequence; identical to SEQ ID NO: 4933
  derived and/or modified protein sequence (wt) from hemagglutinin__InfluenzaA__ADO14357

SEQ ID NO: 6115 - protein, 566 aa, Artificial Sequence
  derived and/or modified protein sequence (wt) from hemagglutinin__InfluenzaA__ADO14359
MKAILVVLLYTFATANADTLCIGYHANNSTDTVDTVLEKNVTVTHSVNLLEDKHNGKLCKLRGVAPLHLGKCNIAGWILGNPECESLSTASSWSYIVETSSSDNGTCYPGDFIDYEELREQLSSVSSFERFEIFPKTSSWPNHDSNKGVTAACPHAGAKSFYKNLIWLVKKGNSYPKLSKSYINDKGKEVLVLWGIHHPPTSADQQSLYQNADAYVFVGTSRYSKKFKPEIAIRPKVRDQEGRMNYYWTLVEPGDKITFEATGNLVVPRYAFAMERNAGSGIIISDTPVHDCNTTCQTPKGAINTSLPFQNIHPITIGKCPKYVKSTKLRLATGLRNVPSIQSRGLFGAIAGFIEGGWTGMVDGWYGYHHQNEQGSGYAADLKSTQNAIDKITNKVNSVIEKMNTQFTAVGKEFNHLEKRIENLNKKVDDGFLDIWTYNAELLVLLENERTLDYHDSNVKNLYEKVRSQLKNNAKEIGNGCFEFYHKCDNTCMESVKNGTYDYPKYSEEAKLNREEIDGVKLESTRIYQILAIYSTVASSLVLVVSLGAISFWMCSNGSLQCRICI

SEQ ID NO: 6116 - protein, 566 aa, Artificial Sequence
  derived and/or modified protein sequence (wt) from hemagglutinin__InfluenzaA__ADO14361
MKAILVVLLYTFATANADTLCIGYHANNSTDTVDTVLEKNVTVTHSVNLLEDKHNGKLCKLRGVAPLHLGKCNIAGWILGNPECESLSTASSWSYIVETSSSDKGTCYPGDFIDYEELREQLSSVSSFERFEIFPKTSSWPNHDSNKGVTAACPHAGAKSFYKNLIWLVKKGNSYPKLSKSYINDKGKEVLVLWGIHHPSTSADQQSLYQNADAYVFVGTSRYSKKFKPEIAIRPKVRDQEGRMNYYWTLVEPGDKITFEATGNLVVPRYAFAMERNAGSGIIISDTPVHDCNTTCQTPKGAINTSLPFQNIHPITIGKCPKYVKSTKLRLATGLRNIPSIQSRGLFGAIAGFIEGGWTGMVDGWYGYHHQNEQGSGYAADLKSTQNAIDEITNKVNSVIEKMNTQFTAVGKEFNHLEKRIENLNKKVDDGFLDIWTYNAELLVLLENERTLDYHDSNVKNLYEKVRSQLKNNAKEIGNGCFEFYHKCDNTCMESVKNGTYDYPKYSEEAKLNREEIDGVKLESTRIYQILAIYSTVASSLVLVVSLGAISFWMCSNGSLQCRICI

SEQ ID NO: 6117 - protein, 566 aa, Artificial Sequence
  derived and/or modified protein sequence (wt) from hemagglutinin__InfluenzaA__ADO14362
MKAILVVLLYTFATANADTLCIGYHANNSTDTVDTVLEKNVTVTHSVNLLEDKHNGKLCKLRGVAPLHLGKCNIAGWILGNPECESLSTASSWSYIVETSSSDNGTCYPGDFIDYEELREQLSSVSSFERFEIFPKTSSWPNHDSNKGVTAACPHAGAKSFYKNLIWLVKKGNSYPKLSKSYINDKGKEVLVLWGIHHPSNSADQQSLYQNADAYVFVGTSRYSKKFKPEIAIRPKVRDQEGRMNYYWTLVEPGDKITFEATGNLVVPRYAFAMERNAGSGIIISDTPVHDCNTTCQTPKGAINTSLPFQNIHPITIGKCPKYVKSTKLRLATGLRNVPSIQSRGLFGAIAGFIEGGWTGMVDGWYGYHHQNEQGSGYAADLKSTQNAIDEITNKVNSVIEKMNTQFTAVGKEFNHLEKRIENLNKKVDDGFLDIWTYNAELLVLLENERTLDYHDSNVKNLYEKVRSQLKNNAKEIGNGCFEFYHKCDNTCMESVKNGTYDYPKYSEEAKLNREEIDGVKLESTRIYQILAIYSTVASSLVLVVSLGAISFWMCSNGSLQCRICI

SEQ ID NO: 6118 - protein, 560 aa, Artificial Sequence
  derived and/or modified protein sequence (wt) from hemagglutinin__InfluenzaA__ADO21015
MEVVSLITILLLVTVSNADKICIGYQSTNSTETVDTLTENNVPVAHAKELLHTEHNGMLCATNLGHPLILDTCTIEGLIYGNPSCDLLLGGREWSYIVERPSAVNGLCYPGNVENLEELRSLFSSASSYQRIQIFPGTIWNVSYGGTSKACSDSFYKSMRWLTQKNNAYPIQDAQYTNNRGKNILFMWGINHPPTDTTQTNLYTRTDTTTSVATEDINRTFKPLIGPRPLVNGQQGRIDYYWSVLKPGQTLRVRSNGNLIAPWYGHILSGESHGRILKTDLNSGNCVVQCQTERGGLNTTLPFHNVSKYAFGNCPKYVGVKSLKLAVGLRNVPARSSRGLFGAIAGFIEGGWSGLVAGWYGFQHSNDQGVGMAADRDSTQKAIDKITSKVNNIVDKMNKQYEIIDHEFSEVETRLNMINNKIDDQIQDIWAYNAELLVLLENQKTLDEHDANVNNLYNKVKRALGSNAVEDGKGCFELYHKCDDQCMETIRNGTYNRRKYKEESRLERQKIEGVKLESEGTYKILTIYSTVASSLVIAMGFAAFLFWAMSNGSCRCNICI

SEQ ID NO: 6119 - protein, 560 aa, Artificial Sequence
  derived and/or modified protein sequence (wt) from hemagglutinin__InfluenzaA__ADO21026
MEVVSLITILLLVTVSNADKICIGYQSTNSTETVDTLTENNVPVAHAKELLHTEHNGMLCATNLGHPLILDTCTIEGLIYGNPSCDLLLGGREWSYIVERPSAVNGLCYPGNVENLEELRSLFSSASSYQRIQIFPGTIWNVSYGGTSKACSDSFYKSMRWLTQKNNAYPIQDAQYTNNRGKNILFMWGINHPPTDTTQTNLYTRTDTTTSVATEDINRTFNPLIGPRPLVNGQQGRIDYYWSVLKPGQTLRVRSNGNLIAPWYGHILSGESHGRILKTDLNSGNCVVQCQTERGGLNTTLPFHNVSKYAFGNCPKYVGVKSLKLAVGLRNVPARSSRGLFGAIAGFIEGGWSGLVAGWYGFQHSNDQGVGMAADRDSTQKAIDKITSKVNNIVDKMNKQYEIIDHEFSEVETRLNIINNKIDDQIQDIWAYNAELLVLLENQKTLDEHDANVNNLYNKVKRALGSNAVEDGKGCFELYHKCDDQCMETIRNGTYNRRKYKEESRLERQKIEGVKLESEGTYKILTIYSTVASSLVIAMGFAAFLFWAMSNGSCRCNICI

SEQ ID NO: 6120 - protein, 560 aa, Artificial Sequence
  derived and/or modified protein sequence (wt) from hemagglutinin__InfluenzaA__ADO21037
MEVVSLITILLLVTVSNADKICIGYQSTNSTETVDTLTENNVPVAHAKELLHTEHNGMLCATNLGHPLILDTCTIEGLIYGNPSCDLLLGGREWSYIVERPSAVNGLCYPGNVENLEELRSLFSSASSYQRIQIFPGTIWNVSYGGTSKACSDSFYKSMRWLTQKNNAYPIQDAQYTNNRGKNILFMWGINHPPTDTTQTNLYTRTDTTTSVATEDINRTFKPYIGPRPLVNGQQGRIDYYWSVLKPGQTLRVRSNGNLIAPWYGHILSGESHGRILKTDLNSGNCVVQCQTERGGLNTTLPFHNVSKYAFGNCPKYVGVKSLKLAVGLRNVPARSSRGLFGAIAGFIEGGWSGLVAGWYGFQHSNDQGVGMAADRDLTQKAIDKITSKVNNIVDKMNKQYEIIDHEFSEVETRLNMINNKIDDQIQDIWAYNAELLVLLENQKTLDEHDANVNNLYNKVKRALGSNAVEDGKGCFELYHKCDDQCMETIRNGTYNRRKYKEESRLERQKIEGVKLESEGTYKILTIYSTVASSLVIAMGFAAFLFWAMSNGSCRCNICI

SEQ ID NO: 6121 - protein, 560 aa, Artificial Sequence
  derived and/or modified protein sequence (wt) from hemagglutinin__InfluenzaA__ADO21048
MEVVSLITILLLVTVSNADKICIGYQSTNSTETVDTLTENNVPVAHAKELLHTEHNGMLCATNLGHPLILDTCTIEGLIYGNPSCDLLLGGREWSYIVERPSAVNGLCYPGNVENLEELRSLFSSASSYQRIQIFPGTIWNVSYGGTSKACSDSFYKSMRWLTQKNNAYPIQDAQYTNNRGKNIHFMWGINHPPTDTTQTNLYTRTDTTTSVATEDINRTFKPLIGPRPLVNGQQGRIDYYWSVLKPGQTLRVRSNGNLIAPWYGHILSGESHGRILKTDLNSGNCVVQCQTERGGLNTTLPFHNVSKYAFGNCPKYVGVKSLKLAVGLRNVPARSSRGLFGAIAGFIEGGWSGLVAGWYGFQHSNDQGVGMAADRVSTQKAIDKITSKVNNIVDKMNKQYEIIDHEFSEVETRLNMINNKIDDQIQDIWAYNAELLVLLENQKTLDEHDANVNNLYNKVKRALGSNAVEDGKGCFELYHKCDDQCMETIRNGTYNRRKYKEESRLERQKIEGVKLESEGTYKILTIYSTVASSLVIAMGFAAFLFWAMSNGSCRCNICI

SEQ ID NO: 6122 - protein, 566 aa, Artificial Sequence
  derived and/or modified protein sequence (wt) from hemagglutinin__InfluenzaA__ADO25092
MKAILVVLLYTFATANADTLCIGYHANNSTDTVDTVLEKNVTVTHSVNLLEDKHNGKLCKLRGVAPLHLGKCNIAGWILGNPECESLSTASSWSYIVETSSSDNGTCYPGDFIDYEELREQLSSVSSFERFEIFPKTSSWPNHDSNKGVTAACPHAGAKSFYKNLIWLVKKGNSYPKLSNSYINDKGKEVLVLWGIHHPSTSADQQSLYQNADAYVFVGTSRYSKKFKPEIAIRPKVRDQEGRMNYYWTLVEPGDKITFEATGNLVVPRYAFAMERNAGSGIIISDTPAHDCNTTCQTPKGAINTSLPFQNIHPITIGKCPKYVKSTKLRLATGLRNVPSIQSRGLFGAIAGFIEGGWTGMVDGWYGYHHQNEQGSGYAADLKSTQNAIDEITNKVNSVIEKMNTQFTAVGKEFNHLEKRIENLNKKVDDGFLDIWTYNAELLVLLENERTLDYHDSNVKNLYEKVRSQLKNNAKEIGNGCFEFYHKCDNTCMESVKNGTYDYPKYSEEAKLNREEIDGVKLESTRIYQILAIYSTVASSLVLVVSLGAISFWMCSNGSLQCRICI

SEQ ID NO: 6123 - protein, 566 aa, Artificial Sequence; identical to SEQ ID NO: 4541
  derived and/or modified protein sequence (wt) from hemagglutinin__InfluenzaA__ADO25112

SEQ ID NO: 6124 - protein, 566 aa, Artificial Sequence; identical to SEQ ID NO: 4541
  derived and/or modified protein sequence (wt) from hemagglutinin__InfluenzaA__ADO25122

SEQ ID NO: 6125 - protein, 566 aa, Artificial Sequence
  derived and/or modified protein sequence (wt) from hemagglutinin__InfluenzaA__ADO25132
MNAILVVLLYTFATANADTLCIGYHANNSTDTVDTLLEKNVTVTHSVNLLEDKHNGKLCKLRGVAPLHLGKCNIAGWILGNPECESLSTASSWSYIVETSSSDNGTCYPGDFIDYEELREQLSSVSSFERFEIFPKTSSWPNHDSNKGVTAACPHAGAKSFYKNLIWLVKKGNSYPKLSKSYINDKGKEVLVLWGIHHPSTSADQQSLYQNADAYVFVGTSRYSKKFKPEIAIRPKVRDQEGRMNYYWTLVEPGDKITFEATGNLVVPRYAFAMERNAGSDIIISDTPVHDCNTTCQTPKGAINTSLPFQNIHPITIGKCPKYVKSTKLRLATGLRNVPSIQSRGLFGAIAGFIEGGWTGMVDGWYGYHHQNEQGSGYAADLKSTQNAIDEITNKINSVIEKMNTQFTAVGKEFNHLEKRIENLNKKVDDGFLDIWTYNAELLVLLENERTLDYHDSNVKNLYEKVRSQLKNNAKEIGNGCFEFYHKCDNTCMESVKNGTYDYPKYSEEAKLNREEIDGVKLESTRIYQILAIYSTVASSLVLVVSLGAISFWMCSNGSLQCRICI

SEQ ID NO: 6126 - protein, 566 aa, Artificial Sequence; identical to SEQ ID NO: 4282
  derived and/or modified protein sequence (wt) from hemagglutinin__InfluenzaA__ADO25142

SEQ ID NO: 6127 - protein, 566 aa, Artificial Sequence
  derived and/or modified protein sequence (wt) from hemagglutinin__InfluenzaA__ADO25152
MKAILVVLLYTFAAANADTLCIGYHANNSTDTVDTVLEKNVTVTHSVNLLEDKHNGKLCKLRGVAPLHLGKCNIAGWILGNPECESLSTASSWSYIVETSSSDNGTCYPGDFINYEELREQLSSVSLFERFEIFPKTSSWPNHDSNKGVTAACPHAGAKSFYKNLIWLVKKGNSYPKLSKSYINDKGKEVLVLWGIHHPSTSADQQSLYQNADAYVFVGTSRYSKKFKPEIAIRPKVRDQEGRMNYYWTLVEPGDKITFEATGNLVVPRYAFAMERNAGSGIIISDTPVHDCNTTCQTPKGAINTSLPFQNIHPITIGKCPKYVKSTKLRLATGLRNVPSIQSRGLFGAIAGFIEGGWTGMVDGWYGYHHQNEQGSGYAADLKSTQNAIDKITNKVNSVIEKMNTQFTAVGKEFNHLEKRIENLNKKVDDGFLDIWTYNAELLVLLENERTLDYHDSNVKNLYEKVRSQLKNNAKEIGNGCFEFYHKCDNTCMESVKNGTYDYPKYSEEAKLNREEIDGVKLESTRIYQILAIYSTVASSLVLVVSLGAISFWMCSNGSLQCRICI

SEQ ID NO: 6128 - protein, 566 aa, Artificial Sequence; identical to SEQ ID NO: 4221
  derived and/or modified protein sequence (wt) from hemagglutinin__InfluenzaA__ADO25162

SEQ ID NO: 6129 - protein, 566 aa, Artificial Sequence; identical to SEQ ID NO: 4221
  derived and/or modified protein sequence (wt) from hemagglutinin__InfluenzaA__ADO25172

SEQ ID NO: 6130 - protein, 566 aa, Artificial Sequence; identical to SEQ ID NO: 4221
  derived and/or modified protein sequence (wt) from hemagglutinin__InfluenzaA__ADO25182

SEQ ID NO: 6131 - protein, 566 aa, Artificial Sequence; identical to SEQ ID NO: 2669
  derived and/or modified protein sequence (wt) from hemagglutinin__InfluenzaA__ADO25192

SEQ ID NO: 6132 - protein, 566 aa, Artificial Sequence; identical to SEQ ID NO: 2669
  derived and/or modified protein sequence (wt) from hemagglutinin__InfluenzaA__ADO25202

SEQ ID NO: 6133 - protein, 566 aa, Artificial Sequence
  derived and/or modified protein sequence (wt) from hemagglutinin__InfluenzaA__ADO25212
MKAILVVLLYTFATANADTLCIGYHANNSTDTVDTVLEKNVTVTHSVNLLEDKHNGKLCKLRGVAPLHLGKCNIAGWILGNPECESLSTASSWSYIVETSSSDNGTCYPGDFIDYEELREQLSSVSSFERFEIFPKTSSWPNHDSNKGVTAACPHAGAKSFYKNLIWLVKKGNSYPKLSKSYINDKRKEVLVLWGIHHPSTSADQQSLYQNADSYVFVGTSRYSKKFKPEIAIRPKVRDQEGRMNYYWTLVEPGDKITFEATGNLVVPRYAFAMERNAGSGIIISDTPVHDCNTTCQTPEGAINTSLPFQNIHPITIGKCPKYVKSTKLRLATGLRNVPSIQSRGLFGAIAGFIEGGWTGMVDGWYGYHHQNEQGSGYAADLKSTQNAIDEITNKVNSVIEKMNTQFTAVGKEFNHLEKRIENLNKKVDDGFLDIWTYNAELLVLLENERTLDYHDSNVKNLYEKVRSQLKNNAKEIGNGCFEFYHKCDNTCMESVKNGTYDYPKYSEEAKLNREEIDGVKLESTRIYQILAIYSTVASSLVLVVSLGAISFWMCSNGSLQCRICI

SEQ ID NO: 6134 - protein, 566 aa, Artificial Sequence
  derived and/or modified protein sequence (wt) from hemagglutinin__InfluenzaA__ADO25222
MKAILVVLLYTFATANADTLCIGYHANNSTDTVDTVLEKNVTVTHSVNLLEDKHNGKLCKLRGVAPLHLGKCNIAGWILGNPECESLSTASSWSYIVETSSSDNGTCYPGDFIDYEELREQLSSVSSFERFEIFPKTSSWPNHDSNKGVTAACPHAGAKSFYKNLIWLVKKGNSYPKLNKSYINDKGKEVLVLWGIHHPSTSADQQSLYQNADAYVFVGTSRYSKKFKPEIAIRPKVRDQEGRMNYYWTLVEPGDKITFEATGNLVVPRYAFAMERNAGSGIIISDTPVHDCNTTCQTPKGAINTSLPFQNIHPITIGKCPKYVKSTKLRLATGLRNVPSIQSRGLFGAIAGFIEGGWTGMVDGWYGYHHQNEQGSGYAADLKSTQNAIDKITNKVNSVIEKMNTQFTAVGKEFNHLEKRIENLNKKVDDGFLDIWTYNAELLVLLENERTLDYHDSNVKNLYEKVRSQLKNNAKEIGNGCFEFYHKCDNTCMESVKNGTYDYPKYSEEAKLNREEIDGVKLESTRIYQILAIYSTVASSLVLVVSLGAISFWMCSNGSLQCRICI

SEQ ID NO: 6135 - protein, 566 aa, Artificial Sequence; identical to SEQ ID NO: 4282
  derived and/or modified protein sequence (wt) from hemagglutinin__InfluenzaA__ADO25232

SEQ ID NO: 6136 - protein, 566 aa, Artificial Sequence; identical to SEQ ID NO: 4221
  derived and/or modified protein sequence (wt) from hemagglutinin__InfluenzaA__ADO25242

SEQ ID NO: 6137 - protein, 566 aa, Artificial Sequence; identical to SEQ ID NO: 4299
  derived and/or modified protein sequence (wt) from hemagglutinin__InfluenzaA__ADO25252

SEQ ID NO: 6138 - protein, 566 aa, Artificial Sequence; identical to SEQ ID NO: 4541
  derived and/or modified protein sequence (wt) from hemagglutinin__InfluenzaA__ADO25262

SEQ ID NO: 6139 - protein, 566 aa, Artificial Sequence
  derived and/or modified protein sequence (wt) from hemagglutinin__InfluenzaA__ADO25272
MKAILVVLLYTFATANADTLCIGYHANNSTDTVDTVLEKNVTVTHSVNLLEDKHNGKLCKLRGVAPLHLGKCNIAGWILGNPECESLSTASSWSYIVETSSSDNGTCYPGDFIDYEELREQLSSVSSFERFEMFPKTSSWPNHDSNKGVTAACPHAGVKSFYKNLIWLVKKGNSYPKLSKSYINDKGKEVLVLWGIHHPSTSADQQSLYQNADAYVFVGTSRYSKKFKPEIAIRPKVRDQEGRMNYYWTLVEPGDKITFEATGNLVVPRYAFAMERNAGSGIIISDTPVHDCNTTCQTPKGAINTSLPFQNIHPITIGKCPKYVKSTKLRLATGLRNVPSIQSRGLFGAIAGFIEGGWTGMVDGWYGYHHQNEQGSGYAADLKSTQNAIDEITNKVNSVIEKMNTQFTAVGKEFNHLEKRIENLNKKVDDGFLDIWTYNAELLVLLENERTLDYHDSNVKNLYEKVRSQLKNNAKEIGNGCFEFYHKCDNTCMESVKNGTYDYPKYSEEAKLNREEIDGVKLESTRIYQILAIYSTVASSLVLVVSLGAISFWMCSNGSLQCRICI

SEQ ID NO: 6140 - protein, 566 aa, Artificial Sequence; identical to SEQ ID NO: 4282
  derived and/or modified protein sequence (wt) from hemagglutinin__InfluenzaA__ADO25282

SEQ ID NO: 6141 - protein, 565 aa, Artificial Sequence; identical to SEQ ID NO: 2488
  derived and/or modified protein sequence (wt) from hemagglutinin__InfluenzaA__ADO27622

SEQ ID NO: 6142 - protein, 566 aa, Artificial Sequence; identical to SEQ ID NO: 2669
  derived and/or modified protein sequence (wt) from hemagglutinin__InfluenzaA__ADO29887

SEQ ID NO: 6143 - protein, 566 aa, Artificial Sequence
  derived and/or modified protein sequence (wt) from hemagglutinin__InfluenzaA__ADO29888
MKAILVVLLYTFATANADTLCIGYHANNSTDTVDTVLEKNVTVTHSVNLLEDKHNGKLCRLRGVAPLHLGKCNIAGWILGNPECESLSTASSWSYIVETSSSDNGTCYPGDFIDYEELREQLSSVSSFERFEIFPKTSSWPNHDPNKGVTAACPHAGAKSFYKNLIWLVKKGNSYPKLSKSYINDKGKEVLVLWGIHHPSTSADQQSLYQNADAYVFVGTSRYSKKFKPEIAIRPKVRDQEGRMNYYWTLVEPGDKITFEATGNLVVPRYAFAMERNAGSGIIISDTPVHDCNTTCQTPKGAINTSLPFQNIHPITIGKCPKYVKSTKLRLATGLRNVPSIQSRGLFGAIAGFIEGGWTGMVDGWYGYHHQNEQGSGYAADLKSTQNAIDEITNKVNSVIEKMNTQFTAVGKEFNHLEKRIENLNKKVDDGFLDIWTYNAELLVLLENERTLDYHDSNVKNLYEKVRSQLKNNAKEIGNGCFEFYHKCDNTCMESVKNGTYDYPKYSEEAKLNREEIDGVKLESTRIYQILAIYSTVASSLVLVVSLGAISFWMCSNGSLQCRICI

SEQ ID NO: 6144 - protein, 566 aa, Artificial Sequence
  derived and/or modified protein sequence (wt) from hemagglutinin__InfluenzaA__ADO29889
MKAILVVLLYTFATANADILCIGYHANNSTDTVDTVLEKNVTVTHSVNLLEDKHNGKLCKLRGVAPLHLGKCNIAGWILGNPECESFSTSSSWSYIVETSSSDNGTCYPGDFIDYEELREQLSSVSSFERFEIFPKTSSWPNHDSNKGVTAACPHAGAKSFYKNLIWLVKKGNSYPKLSKSYINDKGKEVLVLWGIHHPSTSADQQSLYQNADAYVFVGTSRYSKKFKPEIAIRPKVRDQEGRMNYYWTLVEPGDKITFEATGNLVVPRYAFAMERNAGSGIIISDTPVHDCNTTCQTPKGAINTSLPFQNIHPITIGKCPKYVKSTKLRLATGLRNVPSIQSRGLFGAIAGFIEGGWTGMVDGWYGYHHQNEQGSGYAADLKSTQNAIDEITNKVNSVIEKMNTQFTAVGKEFNHLEKRIENLNKKVDDGFLDIWTYNAELLVLLENERTLDYHDSNVKNLYEKVRSQLKNNAKEIGNGCFEFYHKCDNTCMESVKNGTYDYPKYSEEAKLNREEIDGVKLESTRIYQILAIYSTVASSLVLVVSLGAISFWMCSNGSLQCRICI

SEQ ID NO: 6145 - protein, 566 aa, Artificial Sequence
  derived and/or modified protein sequence (wt) from hemagglutinin__InfluenzaA__ADO29890
MKAILVVLLYTFATAKADTLCIGYHANNSADTVDTVLEKNVTVTHSVNLLEDKHNGKLCKLRGVAPLHLGKCNIAGWILGNPECESLSTASSWSYIVETSSSDNGTCYPGDFIDYEELREQLSSVSSFERFEIFPKTSSWPNHDPNKGVTAACPHAGAKSFYKNLIWLVKKGNSYPKLSKSYINDKGKEVLVLWGIHHPSTSVDQQSLYQNADAYVFVGTSRYSKKFKPEIAIRPKVRDQEGRMNYYWTLVEPGDKITFEATGNLVVPRYAFAMERNAGSGIIISDTPVHDCNTTCQTPKGAINTSLPFQNIHPITIGKCPKYVKSTKLRLATGLRNVPSIQSRGLFGAIAGFIEGGWTGMVDGWYGYHHQNEQGSGYAADLKSTQNAIDEITNKVNSVIEKMNTQFTAVGKEFNHLEKRIENLNKKVDDGFLDIWTYNAELLVLLENERTLDYHDSNVKNLYEKVRSQLKNNAKEIGNGCFEFYHKCDNTCMESVKNGTYDYPKYSEEAKLNREEIDGVKLESTRIYQILAIYSTVASSLVLVVSLGAISFWMCSNGSLQCRICI

SEQ ID NO: 6146 - protein, 566 aa, Artificial Sequence
  derived and/or modified protein sequence (wt) from hemagglutinin__InfluenzaA__ADO29891
MKAILVVLLYTFATANADTLCIGYHANNSTDTVDTVLEKNVTVTHSVNLLEDKHNGKLCKLRGVAPLHLGKCNIAGWILGNPECESLSTASSWSYIVETSSSDNGTCYPGDFIDYEELREQLSSVSSFERFEIFPKTSSWPNHDSNKGVTAACPHAGAKSFYKNLIWLVKKGNSYPKLSKSYINDKGKEVLVLWGIHHPSTSADQQSLYQNADAYVFVGTSRYSKKFKPEIAIRPKVRDQEGRMNYYWTLVEPGDKTTFEATGNLVVPRYAFAMERNAGSGIIISDTPVHDCNTTCQTPKGAINTSLPFQNIHPITIGKCPKYVKSTKLRLATGLRNVPSIQSRGLFGAIAGFIEGGWTGMVDGWYGYHHQNEQGSGYAADLKSTQNAIDKITNKVNSVIEKMNTQFTAVGKEFNHLEKRIENLNKKVDDGFLDIWTYNAELLVLSENERTLDYHDSNVKNLYEKVRSQLKNNAKEIGNGCFEFYHKCDNTCMESVKNGTYDYPKYSEEAKLNREEIDGVKLESTRIYQILAIYSTVASSLVLVVSLGAISFWMCSNGSLQCRICI

SEQ ID NO: 6147 - protein, 566 aa, Artificial Sequence
  derived and/or modified protein sequence (wt) from hemagglutinin__InfluenzaA__ADO29892
MKAILVVLLYTFATAKADTLCIGYHANNSTDTVDTVLEKNVTVTHSVNLLEDKHNGKLCKLRGVAPLHLGKCNIAGRILGNPECESLSTASSWSYIVETSSSDNGTCYPGDFIDYEELREQLSSVSSFERFEIFPKTSSWPNHDPNKGVTAACPHAGAKSFYKNLIWLVKKGNSYPKLSKSYINDKGKEVLVLWGIHHPSTSVDQQSLYQNADAYVFVGTSRYSKKFKPEIAIRPKVRDQEGRMNYYWTLVEPGDKITFEATGNLVVPRYAFAMERNAGSGIIISDTPVHDCNTTCQTPKGAINTSLPFQNIHPITIGKCPKYVKSTKLRLATGLRNVPSIQSRGLFGAIAGFIEGGWTGMVDGWYGYHHQNEQGSGYAADLKSTQNAIDEITNKVNSVIEKMNTQFTAVGKEFNHLEKRIENLNKKVDDGFLDIWTYNAELLVLLENERTLDYHDSNVKNLYEKVRSQLKNNAKEIGNGCFEFYHKCDNTCMESVKNGTYDYPKYSEEAKLNREEIDGVKLESTRIYQILAIYSTVASSLVLVVSLGAISFWMCSNGSLQCRICI

SEQ ID NO: 6148 - protein, 566 aa, Artificial Sequence; identical to SEQ ID NO: 3467
  derived and/or modified protein sequence (wt) from hemagglutinin__InfluenzaA__ADO29893

SEQ ID NO: 6149 - protein, 566 aa, Artificial Sequence
  derived and/or modified protein sequence (wt) from hemagglutinin__InfluenzaA__ADO29894
MKAILVVLLYTFATANADTLCIGYHANNSTDTVDTVLEMNVTVTHSVNLLEDKHNGKLCKLRGVAPLHLGKCNIAGWILGNPECESFSTSSSWSYIVETSSSDNGTCYPGDFIDYEELREQLSSVSSFERFEIFPKTSSWPNHDSNKGVTAACPHAGAKSFYKNLIWLVKKGSSYPKLSKSYINDKGKEVLVLWGIHHPSTSADQQSLYQNADAYVFVGTSRYSKKFKPEIAIRPKVRDQEGRMNYYWTLVEPGDKITFEATGNLVVPRYAFAMERNAGSGIIISDTPVHDCNTTCQTPKGAINTSLPFQNIHPITIGKCPKYVKSTKLRLATGLRNVPSIQSRGLFGAIAGFIEGGWTGMVDGWYGYHHQNEQGSGYAADLKSTQNAIDEITNKVNSVIEKMNTQFTAVGKEFNHLEKRIENLNKKVDDGFLDIWTYNAELLVLLENERTLDYHDSNVKNLYEKVRSQLKNNAKEIGNGCFEFYHKCDNTCMESVKNGTYDYPKYSEEAKLNREEIDGVKLESTRIYQILAIYSTVASSLVLVVSLGAISFWMCSNGSLQCRICI

SEQ ID NO: 6150 - protein, 566 aa, Artificial Sequence
  derived and/or modified protein sequence (wt) from hemagglutinin__InfluenzaA__ADO29895
MKAILVALLYTFATANADTLCIGYHANNSTDTVDTVLEKNVTVTHSVNLLEDKHNGKLCKLRGVAPLHLGKCNIAGWILGNPECESFSTSSSWSYIVETSSSDNGTCYPGDFIDYEELREQLSSVSSFERFEIFPKTSSWPNHDSNKGVTAACPHAGAKSFYKNLIWLVKKGSSYPKLSKSYINDKGKEVLVLWGIHHPSTSADQQSLYQNADAYVFVGTSRYSKKFKPEIAIRPKVRDQEGRMNYYWTLVEPGDKITFEATGNLVVPRYAFAMERNAGSGIIISDTPVHDCNTTCQTPKGAINTSLPFQNIHPITIGKCPKYVKGTKLRLATGLRNVPSIQSRGLFGAIAGFIEGGWTGMVDGWYGYHHQNEQGSGYAADLKSTQNAIDEITNKVNSVIEKMNTQFTAVGKEFNHLEKRIENLNKKVDDGFLDIWTYNAELLVLLENERTLDYHDSNVKNLYEKVRSQLKNNAKEIGNGCFEFYHKCDNTCMERVKNGTYDYPKYSEEAKLNREEIDGVKLESTRIYQILAIYSTVASSLVLVVSLGAISFWMCSNGSLQCRICI

SEQ ID NO: 6151 - protein, 566 aa, Artificial Sequence
  derived and/or modified protein sequence (wt) from hemagglutinin__InfluenzaA__ADO29897
MKAILVVLLYTFATANADILCIGYHANNSTDTVDTVLEKNVTVTHSVNLLEDKHNGKLCKLRGVAPLHLGKCNIAGWILGNPECESFSTSSSWSYIVETSSSDNGKCYPGDFIDYEELREQLSSVSSFERFEIFPKTSSWPNHDSNKGVTTACPHAGAKSFYKNLIWLVKKGNSYPRLSKSYINDKGKEVLVLWGIHHPSTSADQQSLYQNADAYVFVGTSRYSKKFKPEIAIRPKVRDQEGRMNYYWTLVEPGDKITFEATGNLVVPRYAFAMERNAGSGIIISDTPVHGCNTTCQTPKGAINTSLPFQNIHPITIGKCPKYVKSTKLRLATGLRNVPSIQSRGLFGAVAGFIEGGWTGMVDGWYGYHHQNEQGSGYAADLKSTQNAIDEITNKVNSVIEKMNTQFTAVGKEFNHLEKRIENLNKKVDDGFLDIWTYNAELLVLLENERTLDYHDSNVKNLYEKVRSQLKNNAKEIGNGCFEFYHKCDNTCMESVKNGTYDYPKYSEEAKLNREEIDGVKLESTRIYQILAIYSTVASSLVLVVSLGAISFWMCSNGSLQCRICI

SEQ ID NO: 6152 - protein, 566 aa, Artificial Sequence; identical to SEQ ID NO: 3467
  derived and/or modified protein sequence (wt) from hemagglutinin__InfluenzaA__ADO29898

SEQ ID NO: 6153 - protein, 566 aa, Artificial Sequence
  derived and/or modified protein sequence (wt) from hemagglutinin__InfluenzaA__ADO29899
MKAILVVLLYTFATANADTLCIGYHANNSTDTVDTVLEKNVTVTHSVNLLEDKHNGKLCKLRGVAPLHLGKCNIAGWILGNPECESLSTASSWSYIVETSSSDNGTCYPGDFIDYEELREQLSSVSSFERFEIFPKTSSWPNHDSNKGVTAACPHAGAKSFYKNLIWLVKKGNSYPKLSKSYINDKGKEVLVLWGIHHPSTSADQQSLYQNADAYVFVGTSRYSKKFKPEIAIRPKVRDQEGRMNYYWTLVEPGDKITFEATGNLVVPRYAFAMERNAGSGIIISDTPVHDCNTTCQTPKGAINTSLPFQNIHPITIGKCPKYVKSTKLRLATGLRNVPSIQSRGLFGAIAGFIEGGWTGMVDGWYGYHHQNEQGSGYAADLKSTQNAIDKITNKVNSVIEKMNTQFTAVGKEFNHLEKRIENLNKKVDDGFLDIWTYNAELLVLLENERTLDYHDSNVKNLYEKVRSQLKNNAKEIGNGCFEFYHKCDNTCMESVKNGTYDYPKYSEEAKLNREEIDGVKLESTRIYQILAIYSTVASSLVLVVSLGAISFWMCSNGSLQCRTCI

SEQ ID NO: 6154 - protein, 566 aa, Artificial Sequence
  derived and/or modified protein sequence (wt) from hemagglutinin__InfluenzaA__ADO29900
MKAILVVLLYTFATANADTLCIGYHANNSTDTVDTVLEKNVTVTHSVNLLEDKHNGKLCKLRGVAPLHLGKCNIAGWILGNPECESLSTASSWSYIVETSSSDNGTCYPGDLIDYEELREQLSSVSSFERFEIFPKTSSWPNHDLNKGVTAACPHAGAKSFYKNLIWLVKKGNSYPKLSKSYINDKGKEVLVLWGIHHPSTSADQQSLYQNADAYVFVGTSRYSKKSKPEIAIRPKVRDQEGRMNYYWTLVEPGDKITFEATGNLVVPRYAFAMERNAGSGIIISDTPVHDCNTTCQTPKGAINTSLPFQNIHPITIGKCPKYVRSTKLRLATGLRNVPSIQSRGLFGAIAGFIEGGWTGMVDGWYGYHHQNEQGSGYAADLKSTQNAIDEITNKVNSVIEKMNTQFTAVGKEFNHLEKRIENLNKKVDDGFLDIWAYNAELLVLLENERTLDYHDSNVKNLYEKVRSQLKNNAKEIGNGCFEFYHKCDNTCMESVKNGTYDYPKYSEEAKLNREEIDGVKLESTRIYQILAIYSTVASSLVLVVSLGAISFWMCSNGSLQCRICI

SEQ ID NO: 6155 - protein, 566 aa, Artificial Sequence
  derived and/or modified protein sequence (wt) from hemagglutinin__InfluenzaA__ADO29901
MKAILVVLLYTFATANADTLCIGYHANNSTDTVDTVLEKNVTVTHSVNLLEDKHNEKLCKLRGVAPLHLGKCNIAGWILGNPECESLSTASSWSYIVETSSSDNGTCYPGDFIDYEELREQLSSVSSFERFEIFPKTSSWPNHDSNKGVTAACPHAGAKSFYKNLIWLAKKGNSYPKVSKSYINDKGKEVLVLWGIHHPSTSADQQSLYQNADAYVFVGTSRYSKKFKPEIAIRPKVRDQEGRMNYYWTLVEPGDKITFEATGNLVVPRYAFAMERNAGSGIIISDTPVHDCNTTCQTPKGAINTSLPFQNIHPITIGKCPKYVKSTKLRLATGLRNVPSIQSRGLFGAIAGFIEGGWTGMVDGWYGYHHQNEQGSGYAADLKSTQNAIDEITNKVNSVIEKMNTQFTAVGKEFNHLEKRIENLNKKVDDGFLDIWTYNAELLVLLENERTLDYHDSNVKNLYEKVRSQLKNNAKEIGNGCFEFYHKCDNTCMESVKNGTYDYPKYSEEAKLNREEIDGVKLESTRIYQILAIYSTVASSLVLVVSLGAISFWMCFNGSLQCRICI

SEQ ID NO: 6156 - protein, 566 aa, Artificial Sequence
  derived and/or modified protein sequence (wt) from hemagglutinin__InfluenzaA__ADO29902
MKAILVVLLYTFATANADTLCIGYHANNSTDTVDTVLEKNVTVTHSVNLLEDKHNGKLCKLRGVAPLHLGKCNIAGWILGNPECESLSTASSWSYIVETSSSDNGTCYPGDFIDYEELREQLSSVSSFERFEIFPKTSSWPNHDSNKGVTAACPHAGAKSFYKNLIWLVKKGNSYPKLSKSYINDKGKEVLVLWGIHHPSTSADQQSLYQNADAYVFVGTSRYSKKFKPEIAIRPKVRDQEGRMNYYWTLVEPGDKITFEATGNLVVPRYAFAMERNAGSGIIISDTPVHDCNTTCQTPKGAINTSLPFQNIHPITIGKCPKYVKSTKLRLATGLRNVPSIQSRGLFGAIAGFIEGGWTGMVDGWYGYHHQNEQGSGYAADLKSTQNAIDKITNKVNSVIEKMNTQFTAVGKEFNHLEKRIENLNKKVDDGFLDIWTYNAELLVLLENERTLDYHDSNVKNLYEKVRSQLKNNAKEIGNGCFEFYHKCDNTCMEGVKNGTYDYPKYSEEAKLNREEIDGVKLESTRIYQILAIYSTVASSLVLVVSLGAISFWMCSNGSLQCRICI

SEQ ID NO: 6157 - protein, 566 aa, Artificial Sequence
  derived and/or modified protein sequence (wt) from hemagglutinin__InfluenzaA__ADO29903
MKAILVVLLYTFATANADTLCIGYHANNSTDTVDTVLEKNVTVTHSVNLLEDKHNGKLCKLRGVAPLHLGKCNTAGWILGNPECESLSTASSWSYIVETSSSDNGTCYPGDFIDYEELREQLSSVSSFERFEIFPKTSSWPNHDPNKGVTAACPHAGAKSFYKNLIWLVKKGNSYPKLSKSYINDKGKEVLVLWGIHHPSTSADQQSLYQNADAYVFVGTSRYSKKFKPEIAIRPKVRDQEGRMNYYWTLVEPGDKITFEATGNLVVPRYAFAMERNAGSGIIISDTPVHDCNTTCQTPKGAINTSLPFQNIHPITIGKCPKYVKSTKLRLATGLRNVPSIQSRGLFGAIAGFIEGGWTGMVDGWYGYHHQNEQGSGYAADLKSTQNAIDEITNKVNSVIEKMNTQFTAVGKEFNHLEKRIENLNKKVDDGFLDIWTYNAELLVLLENERTLDYHDSNVKNLYEKVRSQLKNNAKEIGNGCFEFYHKCDNTCMESVKNGTYDYPKYSEEAKLNREEIDGVKLESTRIYQILAIYSTVASSLVLVVSLGAISFWMCSNGSLQCRICI

SEQ ID NO: 6158 - protein, 566 aa, Artificial Sequence
  derived and/or modified protein sequence (wt) from hemagglutinin__InfluenzaA__ADO29904
MKAILVVLLYTFATANADTLCIGYHANNSTDTVDTVLEKNVTVTHSVNLLEDKHNGKLCKLRGVAPLHLGRCNIAGWILGNPECESLSTASSWSYIVETSSSDNGTCYPGDFIDYEELREQLSSVSSFERFEIFPKTSSWPNHDPNKGVTAACPHAGAKSFYKNLIWLVKKGNSYPKLSKSYINDKGKEVLVLWGIHRPSTSADQQSLYQNADAYVFVGTSRYSKKFKPEIAIRPKVGDQEGRMNYYWTLVEPGDKITFEATGNLVVPRYAFAMERNAGSGIIISNTPVHDCNTTCQTPKGAINTSLPFQNIHPITIGKCPKYVKSTKLRLATGLRNVPSIQSRGLFGAIAGFIEGGWTGMVDGWYGYHHQNEQGSGYAADLKSTQNAIDEITNKVNSVIEKMNTQFTAVGKEFNHLEKRIENLNKKVDDGFLDIWTYNAELLVLLENERTLDYHDSNVKNLYEKVRSQLKNNAKEIGNGCFEFYHKCDNTCMESVKNGTYDYPKYSEEAKLNREEIDGVKLESTRIYQILAIYSTVASSLVLVVSLGAISFWMCSNGSLQCRICI

SEQ ID NO: 6159 - protein, 566 aa, Artificial Sequence
  derived and/or modified protein sequence (wt) from hemagglutinin__InfluenzaA__ADO29905
MKAILVVLLYTFATANADTLCIGYHANNSTDTVDTVLEKNVTVTRSVNLLEDKHNGKLCKLRGVAPLHLGKCNIAGWILGNPECESLSTASSWSYIVETSSSDNGTCYPGDFIDYEELREQLSSVSSFERFEIFPKTSSWPNHDPNKGVTAACPHAGAKSFYKNLIWLVKKGNSYPKLSKSYINDKGKEVLVLWGIHHPSTSADQQSLYQNADAYVFVGTSRYSKKFKPEIAIRPKVRDQEGRMNYYWTLVEPGDKITFEATGNLVVPRYAFAMERNAGSGIIISNTPVHDCNTTCQTPKGAINTSLPFQNIHPITIGKCPKYVKSTKLRLATGLRNVPSIQSRGLFGAIAGFIEGGWTGMVDGWYGYHHQNEQGSGYAADLKSTQNAIDEITNKVNSVIEKMNTQFTAVGKEFNHLEKRIENLNKKVDDGFLDIWTYNAELLVLLENERTLDYHDSNVKNLYEKVRSQLKNNAKEIGNGCFEFYHKCDNTCMESVKNGTYDYPKYSEEAKLNREEIDGVKLESTRIYQILAIYSTVASSLVLVVSLGAISFWMCSNGSLQCRICI

SEQ ID NO: 6160 - protein, 566 aa, Artificial Sequence
  derived and/or modified protein sequence (wt) from hemagglutinin__InfluenzaA__ADO29906
MKAILVVLLYTFATANADTLCIGYHANNSTDTVDTVLEKNVTVTHSVNLLEDKHNRKLCKLRGVAPLHLGKCNIAGWILGNPECESLSTASSWSYIVETSSSDNGTCYPGDFIDYEELREQLSSVSSFERFEIFPKTSSWPNHDPNKGVTAACPHAGAKSFYKNLIWLVKKGNSYPKLSKSYINDKGKEVLVLWGIHHPSTSADQQSLYQNADAYVFVGTSRYSKKFKPEIAIRPKVRDQEGRMNYYWTLVEPGDKITFEATGNLVVPRYAFAMERNAGSGIIISDTPVHDCNTTCQTPKGAINTSLPFQNIHPITIGKCPKYVKSTKLRLATGLRNVPSIQSRGLFGAIAGFIEGGWTGMVDGWYGYHHQNEQGSGYAADLKSTQNAIDEITNKVNSVIEKMNTQFTAVGKEFNHLEKRIENLNKKVDDGFLDIWTYNAELLVLLENERTLDYHDSNVKNLYEKVRSQLKNNAKEIGNGCFEFYHKCDNTCMESVKNGTYDYPKYSEEAKLNREEIDGVKLESTRIYQILAIYSTVASSLVLVVSLGAISFWMCSNGSLQCRICI

SEQ ID NO: 6161 - protein, 566 aa, Artificial Sequence
  derived and/or modified protein sequence (wt) from hemagglutinin__InfluenzaA__ADO29907
MKAILVVLLYTFATANADTLCIGYHANNSTDTVDTVLEKNVTVTHSVNLLEDKHNGKLCKLRGVAPLHLGKCNIAGWILGNPECESLSTASSWSYIVETSSSDNGTCYPGDFIDYEELREQLSSVSSFERFEIFPKTSSWPNHDPNKGVTAACPHAGAKSFYKNLIWLVKKGNSYPKLSKSYINDKGKEVLVLWGIHHPSTSADQQSLYQNADAYVFVGTSRYSKKLKPEIAIRPKVRDQEGRMNYHWTLVEPGDKITFEATGNLVVPRYAFAMERNAGSGIIISDTPVHDCNTTCQTPKGAINTSLPFQNIHPITIGKCPKYVKSTKLRLATGLRNVPSIQSRGLFGAIAGFIEGGWTGMVDGWYGYHHQNEQGSGYAADLKSTQNAIDEITNKVNSVIEKMNTQFTAVGKEFNHLEKRIENLNKKVDDGFLDIWTYNAELLVLLENERTLDYHDSNVKNLYEKVRSQLKNNAKEIGNGCFEFYHKCDNTCMESVKNGTYDYPKYSEEAKLNREEIDGVKLESTRIYQILAIYSTVASSLVLVVSLGAISFWMCSNGSLQCRICI

SEQ ID NO: 6162 - protein, 566 aa, Artificial Sequence
  derived and/or modified protein sequence (wt) from hemagglutinin__InfluenzaA__ADO29908
MKAILVVLLYTFATANADTLCIGYHANNSTDTVDTVLEKNVTVTHSVNLLEDKHNGKLCKLRGVAPLHLGKCNIAGWILGNPECESLSTASSWSYIVETSSSDNGTCYPGDFIDYEELREQLSSVSSFERFEIFPKTSSWPNHDPNKGVTAACPHAGAKSFYKNLIWLVKKGNSYPKLSKSYINDKGKEVLVLWGIHHPSTSADQQSLYQNADAYVFVGTSRYSKKFKPEIAIRPKVRDQEWRMNYYWTLVEPGDKITFEATGNLVVPRYAFAMERNAGSGIIISDTPVHDCNTTCQTPKGAINTSLPFQNIHPITIGKCPKYVKSTKLRLATGLRNVPSIQSRGLFGAIAGFIEGGWTGMVDGWYGYHHQNEQGSGYAADLKSTQNAIDEITNKVNSVIEKMNTQFTAVGKEFNHLEKRIENLNKKVDDGFLDIWTYNAELLVLLENERTLDYHDSNVKNLYEKVRSQLKNNAKEIGNGCFEFYHKCDNTCMESVKNGTYDYPKYSEEAKLNREEIDGVKLESTRVYQILATYSTVASSLVLVVSLGAISFWMCSNGSLQCRICI

SEQ ID NO: 6163 - protein, 566 aa, Artificial Sequence
  derived and/or modified protein sequence (wt) from hemagglutinin__InfluenzaA__ADO29909
MKAILVVLLYTFATANADTLRIGYHANNSTDTVDTVLEKNVTVTHSVNLLEDKHNGKLCKLRGVAPLHLGKCNIAGWILGNPECESLSTASSWSYIVETSSSDNGTCYPGDFIDYEELREQLSSVSSFERFEIFPKTSSWPNHDPNKGVTAACPHAGAKSFYKNLIWLVKKGNSYPKLSKSYINDKGKEVLVLWGIHHPSTSADQQSLYQNADAYVFVGTSRYSKKFKPEIAIRPKVRDQEGRMNYYWTLVEPGDKITFEATGNLVVPRYAFAMERNAGSGIIISDTPVHDCNTTCQTPKGAINTSLPFQNIHPITIGKCPKYVKSTKLRLATGLRNVPSIQSRGLFGAIAGFIEGGWTGMVDGWYGYHHQNEQGSGYAADLKSIQNAIDEITNKVNSVIEKMNTQFTAVGKEFNHLEKRIENLNKKVDDGFLDIWTYNAELLVLLENERTLDYHDSNVKNLYEKVRSQLKNNAKEIGNGCFEFYHKCDNTCMESVKNGTYDYPKYSEEAKLNREEIDGVKLESTRIYQILAIYSTVASSLILVVSLGAISFWMCSNGSLQCRICI

SEQ ID NO: 6164 - protein, 566 aa, Artificial Sequence
  derived and/or modified protein sequence (wt) from hemagglutinin__InfluenzaA__ADO29910
MKAILVVLLYTFATANADTLCIGYHANNSTDTVDTVLEKNVTVTHSVNLLEDKHNGKLCKPRGVAPLHLGKCNIAGWILGNPECESLSTASSWSYIVETSSSDNGTCYPGDFIDYEELREQLSSVSSFERFEIFPKTSSWPNHDPNKGVTAACPHAGAKSFYKNLIWLVKKGNSYPKLSKSYINDKGKEVLVLWGIHHPSTSADQQSLYQNADAYVFVGTSRYSKKFKPEIAIRPKVRDQEGRMNYYWTLVEPGDKITFEAIGNLVVPRYAFAMERNAGSGIIISDTPVHDCNTTCQTPKGAINTSLPFQNIHPITIGKCPKYVKSTKLRLATGLRNVPSIQSRGLFGAIAGFIEGGWTGMVDGWYGYHHQNEQGSGYAADLKSTQNAIDEITNKVNSVIEKMNTQFTAVGKEFNHLEKRIENLNKKVDDGFLDIWTYNAELLVLLENERTLDYHDSNVKNLYEKVRSQLKNNAKEIGNGCFEFYHKCDNTCMESVKNGTYDYPKYSEEAKLNRGEIDGVKLESTRIYQILAIYSTVASSLVLVVSLGAISFWMCSNGSLQCRICI

SEQ ID NO: 6165 - protein, 566 aa, Artificial Sequence; identical to SEQ ID NO: 4391
  derived and/or modified protein sequence (wt) from hemagglutinin__InfluenzaA__ADO30407

SEQ ID NO: 6166 - protein, 566 aa, Artificial Sequence; identical to SEQ ID NO: 4282
  derived and/or modified protein sequence (wt) from hemagglutinin__InfluenzaA__ADO30417

SEQ ID NO: 6167 - protein, 566 aa, Artificial Sequence; identical to SEQ ID NO: 4004
  derived and/or modified protein sequence (wt) from hemagglutinin__InfluenzaA__ADO33202

SEQ ID NO: 6168 - protein, 566 aa, Artificial Sequence; identical to SEQ ID NO: 3512
  derived and/or modified protein sequence (wt) from hemagglutinin__InfluenzaA__ADO33240

SEQ ID NO: 6169 - protein, 566 aa, Artificial Sequence; identical to SEQ ID NO: 2669
  derived and/or modified protein sequence (wt) from hemagglutinin__InfluenzaA__ADO33247

SEQ ID NO: 6170 - protein, 566 aa, Artificial Sequence; identical to SEQ ID NO: 3512
  derived and/or modified protein sequence (wt) from hemagglutinin__InfluenzaA__ADO33254

SEQ ID NO: 6171 - protein, 566 aa, Artificial Sequence; identical to SEQ ID NO: 3512
  derived and/or modified protein sequence (wt) from hemagglutinin__InfluenzaA__ADO33261

SEQ ID NO: 6172 - protein, 566 aa, Artificial Sequence; identical to SEQ ID NO: 3512
  derived and/or modified protein sequence (wt) from hemagglutinin__InfluenzaA__ADO33269

SEQ ID NO: 6173 - protein, 566 aa, Artificial Sequence; identical to SEQ ID NO: 4004
  derived and/or modified protein sequence (wt) from hemagglutinin__InfluenzaA__ADO33277

SEQ ID NO: 6174 - protein, 566 aa, Artificial Sequence; identical to SEQ ID NO: 3512
  derived and/or modified protein sequence (wt) from hemagglutinin__InfluenzaA__ADO33285

SEQ ID NO: 6175 - protein, 566 aa, Artificial Sequence; identical to SEQ ID NO: 4004
  derived and/or modified protein sequence (wt) from hemagglutinin__InfluenzaA__ADO33293

SEQ ID NO: 6176 - protein, 566 aa, Artificial Sequence; identical to SEQ ID NO: 4004
  derived and/or modified protein sequence (wt) from hemagglutinin__InfluenzaA__ADO33307

SEQ ID NO: 6177 - protein, 566 aa, Artificial Sequence; identical to SEQ ID NO: 3512
  derived and/or modified protein sequence (wt) from hemagglutinin__InfluenzaA__ADO33313

SEQ ID NO: 6178 - protein, 566 aa, Artificial Sequence; identical to SEQ ID NO: 5762
  derived and/or modified protein sequence (wt) from hemagglutinin__InfluenzaA__ADO33329

SEQ ID NO: 6179 - protein, 566 aa, Artificial Sequence; identical to SEQ ID NO: 3512
  derived and/or modified protein sequence (wt) from hemagglutinin__InfluenzaA__ADO33337

SEQ ID NO: 6180 - protein, 566 aa, Artificial Sequence; identical to SEQ ID NO: 3512
  derived and/or modified protein sequence (wt) from hemagglutinin__InfluenzaA__ADO33345

SEQ ID NO: 6181 - protein, 566 aa, Artificial Sequence; identical to SEQ ID NO: 4004
  derived and/or modified protein sequence (wt) from hemagglutinin__InfluenzaA__ADO33352

SEQ ID NO: 6182 - protein, 566 aa, Artificial Sequence; identical to SEQ ID NO: 2669
  derived and/or modified protein sequence (wt) from hemagglutinin__InfluenzaA__ADO33360

SEQ ID NO: 6183 - protein, 566 aa, Artificial Sequence; identical to SEQ ID NO: 3512
  derived and/or modified protein sequence (wt) from hemagglutinin__InfluenzaA__ADO33368

SEQ ID NO: 6184 - protein, 566 aa, Artificial Sequence; identical to SEQ ID NO: 3512
  derived and/or modified protein sequence (wt) from hemagglutinin__InfluenzaA__ADO33376

SEQ ID NO: 6185 - protein, 566 aa, Artificial Sequence; identical to SEQ ID NO: 2656
  derived and/or modified protein sequence (wt) from hemagglutinin__InfluenzaA__ADO33384

SEQ ID NO: 6186 - protein, 566 aa, Artificial Sequence; identical to SEQ ID NO: 2669
  derived and/or modified protein sequence (wt) from hemagglutinin__InfluenzaA__ADO33391

SEQ ID NO: 6187 - protein, 566 aa, Artificial Sequence
  derived and/or modified protein sequence (wt) from hemagglutinin__InfluenzaA__ADO79917
MKAILVVLLYTFATANADTLCIGYHANNSTDTVDTVLEKNVTVTHSVNLLEDKHNGKLCKLRGVAPLHLGKCNIAGWILGNPECESLSTASSWSYIVETSSSDNGTCYPGDFIDYEELREQLSSVSSFERFEIFPKTSSWPNHDSNKGVTAACPHAGAKSFYKNLIWLVKKGNSYPKLSKSYINDKGKEVLVLWGIHHPSTSADQQSLYQNADAYVFVGTSRYSKKFKPEIAIRPKVRDREGRMNYYWTLVEPGDKITFEATGNLVVPRYAFAMERNAGSGIIISDTPVHNCNTTCQTPKGAINTSLPFQNIHPITIGKCPKYVKSTKLRLATGLRNVPSIQSRGLFGAIAGFIEGGWTGMVDGWYGYHHQNEQGSGYAADLKSTQNAIDEITNKVNSVIEKMNTQFTAVGKEFNHLEKRIENLNKKVDDGFLDIWTYNAELLVLLENERTLDYHDSNVKNLYEKVRSQLKNNAKEIGNGCFEFYHKCDNTCMESVKNGTYDYPKYSEEAKLNREEIDGVKLESTRIYQILAIYSTVASSLVLVVSLGAISFWMCSNGSLQCRICI

SEQ ID NO: 6188 - protein, 566 aa, Artificial Sequence
  derived and/or modified protein sequence (wt) from hemagglutinin__InfluenzaA__ADO79923
MKAILVVLLYTFATANADTLCIGYHANNSTDTVDTVLEKNVTVTHSVNLLEDKHNGKLCKLRGVAPLHLGKCNIAGWILGNPECESLSTASSWSYIVETSSTDKWTCYPGDFIDYEELREQLSSVSSFERFEIFPKTSSWPNHDSNKGVTAACPHAGAKSFYKNLIWLVKKGNSYPKLSKSYINDKGKEVLVLWGIHHPSTSADQQSLYQNADAYVFVGTSRYSKKFKPEIAIRPKVRDQERRMNYYWTLVQPGDKITFQATGNLVVPRYAFAMERNAGSGIIISDTPVHNCNTTCQTPKGAINTSLPFQNIHPITIGKCPKYVKSTKLRLATGLRNVPSIQSRGLFGAIAGFIEGGWTGMVDGWYGYHHQNEQGSGYAADLKSTQNAIDEITNKVNSVIEKMNTQFTAVGKEFNHLEKRIENLNKKVDDGFLDIWTYNAELLVLLENERTLDYHDSNVKNLYEKVRSQLKNNAKEIGNGCFEFYHKCDNTCMESVKNGTYDYPKYSEEAKLNREEIDGVKLESTRIYQILAIYSTVASSLVLVVSLGAISFWMCSNGSLQCRICI

SEQ ID NO: 6189 - protein, 566 aa, Artificial Sequence
  derived and/or modified protein sequence (wt) from hemagglutinin__InfluenzaA__ADO79924
MKAILVVLLYTFATANADTLCIGYHANNSTDTVDTVLEKNVTVTHSVNLLEDKHNGKLCKLRGVAPLHLGKCNIAGWILGNPECESLSTASSWSYIVETSSTDKWTCYPGDFIDYEELREQLSSVSSFERFEIFPKTSSWPNHDSNKGVTAACPHAGAKSFYKNLIWLVKKGNSYPKLSKSYINDKGKEVLVLWGIHHPSTSADQQSLYQNADAYVFVGTSRYSKKFKPEIAIRPKVRDREGRMNYYWTLIEPGDKITFEPTGNLVVPRYAFAMERNAGSGIIISDTPVHNCNTTCQTPKGAINTSLPFQNIHPITIGKCPKYVKSTKLRLATGLRNVPSIQSRGLFGAIAGFIEGGWTGMVDGWYGYHHQNEQGSGYAADLKSTQNAIDEITNKVNSVIEKMNTQFTAVGKEFNHLEKRIENLNKKVDDGFLDIWTYNAELLVLLENERTLDYHDSNVKNLYEKVRSQLKNNAKEIGNGCFEFYHKCDNTCMESVKNGTYDYPKYSEEAKLNREEIDGVKLESTRIYQILAIYSTVASSLVLVVSLGAISFWMCSNGSLQCRICI

SEQ ID NO: 6190 - protein, 566 aa, Artificial Sequence
  derived and/or modified protein sequence (wt) from hemagglutinin__InfluenzaA__ADO79925
MKAILVVLLYTFATANADTLCIGYHANNSTDTVDTVLEKNVTVTHSVNLLEDKHNGKLCKLRGVAPLHLGKCNIAGWILGNPECESLSTASSWSYIVETSSTHEWTCYPGDFIDYEELREQLSSVSSFERFEIFPKTSSWPNHDSNKGVTAACPHAGAKSFYKNLIWLVKKGNSYPKLSKSYINDKGKEVLVLWGIHHPSTSADQQSLYQNADAYVFVGTSRYSKKFKPEIAIRPKVRDREGRMNYYWTLVEPGDKITFEAPGNLVVPRYAFAMERNAGSGIIISDTPVHNCNTTCQTPKGAINTSLPFQNIHPIKIGKCSKYVKSTKLRLATGLRNVPSIQSRGLFGAIAGFIEGGWTGMVDGWYGYHHQNEQGSGYAADLKSTQNAIDEITNKVNSVIEKMNTQFTAVGKEFNHLEKRIENLNKKVDDGFLDIWTYNAELLVLLENERTLDYHDSNVKNLYEKVRSQLKNNAKEIGNGCFEFYHKCDNTCMESVKNGTYDYPKYSEEAKLNREEIDGVKLESTRIYQILAIYSTVASSLVLVVSLGAISFWMCSNGSLQCRICI

SEQ ID NO: 6191 - protein, 566 aa, Artificial Sequence
  derived and/or modified protein sequence (wt) from hemagglutinin__InfluenzaA__ADO79926
MKAILVVLLYTFATANADTLCIGYHANNSTDTVDTVLEKNVTVTHSVNLLEDKHNGKLCKLRGVAPLHLGKCNIAGWILGNPECESLSTASSWSYIVETSSTDKWTCYPGDFIDYEELREQLSSVSSFERFEIFPKTSSWPNHDSNKGVTAACPHAGAKSFYKNLIWLVKKGNSFSKLSKTYLNDKGKEVLVLWGIHHPSTSADQQSLYQNADAYVFVGTSRYSKKFKPEIAIRPKVRDQEGRMNYYWTLVEPGDKITFEATGNLVVPRYAFAMERNVGSGIIISDTPVHDCNTTCQTPKGAINTSLPFQNIHPITIGKCPKYVKSTKLRLATGLRNVPSIQSRGLFGAIAGFIEGGWTGMVDGWYGYHHQNEQGSGYAADLKSTQNAIDKITNKVNSVIEKMNTQFTAVGKEFNHLEKRIENLNKKVDDGFLDIWTYNAELLVLLENERTLDYHDSNVKNLYEKVRSQLKNNAKEMKNGCFEFYHKCDNTCMESVKNGTYDYPKYSEEAKLNREEIDGVKLESTRIYQILAIYSTVASSLVLVVSLGAISFWMCSNGSLQCRICI

SEQ ID NO: 6192 - protein, 566 aa, Artificial Sequence
  derived and/or modified protein sequence (wt) from hemagglutinin__InfluenzaA__ADO79927
MKAILVVLLYTFATANADTLCIGYHANNSTDTVDTVLEKNVTVTHSVNLLEDKHNGKLCKLRGVAPLHLGKCNIAGWILGNPECESLSTASSWSYIVETSSTDKWTCYPGDFIDYEELREQLSSVSSFERFEIFPKTSSWPNHDSNKGVTAACPHAAAKSFYKNLIWLVKKGNSYPKLSKSYINDKGKEVLVLWGIHHPSTSADQQSLYQNADAYVFVGTSRYSKKFKPEIAIRPKVRDQEGRMNYYWTLVEPGDKITFEATGNLVVPRYAFAMERNAGSGIIISDTPVHDCNTTCQTPKGAINTSLPFQNIHPITIGKCPKYVKSTKLRLATGLRNIPSVQSRGLFGAIAGFIEGGWTGMVDGWYGYHHQNEQGSGYAADLKSTQNAIDKITNKVNSVIEKMNTQFTAVGKEFNHLEKRIENLNKKVDDGFLDIWTYNAELLVLLENERTLDYHDSNVKNLYEKVRSQLKNNAKEMKNGCFEFYHKCDNTCMESVKNGTYDYPKYSEEAKLNREEIDGVKLESTRIYQILAIYSTVASSLVLVVSLGAISFWMCSNGSLQCRICI

SEQ ID NO: 6193 - protein, 566 aa, Artificial Sequence
  derived and/or modified protein sequence (wt) from hemagglutinin__InfluenzaA__ADO79928
MKAILVVLLYTFATANADTLCIGYHANNSTDTVDTVLEKNVTVTHSVNLLEDKHNGKLCKLRGVAPLHLGKCNIAGWILGNPECESLSTASSWSYIVETSSTDKWTCYPGDFIDYEELREQLSSVSSFERFEIFPKTNSWPNHDSNKGVTAACPHAGAKSFYKNLIWLVKKGNSYPKLSKSYINDKGKEVLVLWGIHHPSTSADQQSLYQNADAYVFVGTSKYSKKFKPEIAIRPKVRDQEGRMNYYWTLVEPGDKITFEATGNLVVPRYAFAMERNAGSGIIISDTPVHDCNTTCQTPKGAINTSLPFQNIHPITIGKCPKYVKSTKLRLATGLRNVPSIQSRGLFGAIAGFIEGGWTGMVDGWYGYHHQNEQGSGYAADLKSTQNAIDEITNKVNSVIEKMNTQFTAVGKEFNHLEKRIENLNKKVDDGFLDIWTYNAELLVLLENERTLDYHDSNVKNLYEKVRSQLKNNAKEIGNGCFEFYHKCDNTCMESVKNGTYDYPKYSEEAKLNREEIDGVKLESTRIYQILAIYSTVASSLVLVVSLGAISFWMCSNGSLQCRICI

SEQ ID NO: 6194 - protein, 566 aa, Artificial Sequence
  derived and/or modified protein sequence (wt) from hemagglutinin__InfluenzaA__ADO79929
MKAILVVLLYTFATANADTLCIGYHANNSTDTVDTVLEKNVTVTHSVNLLEDKHNGKLCKLRGVAPLHLGKCNIAGWILGNPECESLSTASSWSYIVETSSTDKWTCYPGDFIDYEELREQLSSVSSFERFEIFPKTSSWPNHDSNKGVTAACPHAGAKSFYKNLIWLVKKGNSYPKLSKSYINDKGKEVLVLWGIHHPSTSADQQSLYQNADAYVFVGTSRYSKKFKPEIAIRPKVRGQEGRMNYYWTLVEPGDKITFEATGNLVVPRYAFAMERNAGSGIIISDTPVHDCNTTCQTPKGAINTSLPFQNIHPITIGKCPKYVKSTKLRLATGLRNIPSIQSRGLFGAIAGFIEGGWTGMVDGWYGYHHQNEQGSGYAADLKSTQNAIDEITNKVNSVIEKMNTQFTAVGKEFNHLEKRIENLNKKVDDGFLDIWTYNAELLVLLENERTLDYHDSNVKNLYEKVRSQLKNNAKEIGNGCFEFYHKCDNTCMESVKNGTYDYPKYSEEAKLNREEIDGVKLESTRIYQILAIYSTVASSLVLVVSLGAISFWMCSNGSLQCRICI

SEQ ID NO: 6195 - protein, 566 aa, Artificial Sequence
  derived and/or modified protein sequence (wt) from hemagglutinin__InfluenzaA__ADO79930
MKAILVVLLYTFATANADTLCIGYHANNSTDTVDTVLEKNVTVTHSVNLLEDKHNGKLCKLRGVAPLHLGKCNIAGWILGNPECESLSTASSWSYIVETSSTDKWTCYPGDFIDYEELREQLSSVSSFERFEIFPKTSSWPNHDSNKGVTAACPHAGAKSFYKNLIWLVKKGNSYPKLSKSYINDKGKEVLVLWGIHHPSTSADQQSLYQNADAYVFVGTSRYSKKFKPEIAIRPKVRDREGRMNYYWTLVEPGDKITFEATGNLVVPRYAFAMERNAGSGIIISDTPVHNCNTTCQTPKGAINTSLPFQNIHPITIGKCPKYVKSTKLRLATGLRNVPSIQSRGLFGAIAGFIEGGWTGMVDGWYGYHHQNEQGSGYAADLKSTQNAIDEITNKVNSVIEKMNTQFTAVGKEFNHLEKRIENLNKKVDDGFLDIWTYNAELLVLLENERTLDYHDSNVKNLYEKVRSQLKNNAKEIGNGCFEFYHKCDNTCMESVKNGTYDYPKYSEEAKLNREEIDGVKLESTRIYQILAIYSTVASSLVLVVSLGAISFWMCSNGSLQCRICI

SEQ ID NO: 6196 - protein, 566 aa, Artificial Sequence
  derived and/or modified protein sequence (wt) from hemagglutinin__InfluenzaA__ADO84715
MKAILVVLLYTFATANAGTLCIGYHANNSTDTVDTVLEKNVTVTHSVNLLEDKHNGKLCKLRGVAPLHLGKCNIAGWILGNPECESLSTASSWSYIVETFSSDNGTCYPGDFIDYEELREQLSSVSSFERFEIFPKTSSWPNHDSNKGVTAACPHAGAKSFYKNLIWLVKKGNSYPKLSKSYINDKGKEVLVLWGIHHPSTSADQQSLYQNADAYVFVGTSRYSKKFKPEIAIRPKVRDQEGRMNYYWTLVEPGDKITFEATGNLVVPRYAFAMERNAGSGIIISDTPVHDCNTTCQTPKGAINTSLPFQNIHPITIGKCPKYVKSTKLRLATGLRNVPSIQSRGLFGAIAGFIEGGWTGMVDGWYGYHHQNEQGSGYAADLKSTQNAIDEITNKVNSVIEKMNTQFTAVGKEFNHLEKRIENLNKKVDDGFLDIWTYNAELLVLLENERTLDYHDSNVKNLYEKVRSQLKNNAKEIGNGCFEFYHKCDNTCMESVKNGTYDYPKYSEEAKLNREEIDGVKLESTRIYQILAIYSTVASSLVLVVSLGAISFWMCSNGSLQCRICI

SEQ ID NO: 6197 - protein, 566 aa, Artificial Sequence; identical to SEQ ID NO: 2849
  derived and/or modified protein sequence (wt) from hemagglutinin__InfluenzaA__ADP95341

SEQ ID NO: 6198 - protein, 566 aa, Artificial Sequence; identical to SEQ ID NO: 2656
  derived and/or modified protein sequence (wt) from hemagglutinin__InfluenzaA__ADP95351

SEQ ID NO: 6199 - protein, 566 aa, Artificial Sequence; identical to SEQ ID NO: 2656
  derived and/or modified protein sequence (wt) from hemagglutinin__InfluenzaA__ADP95361

SEQ ID NO: 6200 - protein, 566 aa, Artificial Sequence; identical to SEQ ID NO: 2656
  derived and/or modified protein sequence (wt) from hemagglutinin__InfluenzaA__ADP95371

SEQ ID NO: 6201 - protein, 566 aa, Artificial Sequence; identical to SEQ ID NO: 2656
  derived and/or modified protein sequence (wt) from hemagglutinin__InfluenzaA__ADP95381

SEQ ID NO: 6202 - protein, 566 aa, Artificial Sequence; identical to SEQ ID NO: 2656
  derived and/or modified protein sequence (wt) from hemagglutinin__InfluenzaA__ADP95391

SEQ ID NO: 6203 - protein, 566 aa, Artificial Sequence; identical to SEQ ID NO: 2911
  derived and/or modified protein sequence (wt) from hemagglutinin__InfluenzaA__ADQ28007

SEQ ID NO: 6204 - protein, 566 aa, Artificial Sequence; identical to SEQ ID NO: 2669
  derived and/or modified protein sequence (wt) from hemagglutinin__InfluenzaA__ADQ28008

SEQ ID NO: 6205 - protein, 566 aa, Artificial Sequence; identical to SEQ ID NO: 4520
  derived and/or modified protein sequence (wt) from hemagglutinin__InfluenzaA__ADQ28009

SEQ ID NO: 6206 - protein, 566 aa, Artificial Sequence
  derived and/or modified protein sequence (wt) from hemagglutinin__InfluenzaA__ADQ28010
MKAILVVLLYTFATANADTLCIGYHANNSTDTVDTVLEKNVTVTHSVNLLEDKHNGKLCKLRGVAPLHLGKCNIAGWILGNPECESLSTASSWSYIVETSSSDNGTCYPGDFINYEELREQLSSVSSFERFEIFPKTSSWPNHDSNKGVTAACPHAGAKSFYKSLIWLVKKGNSYPKLSKSYINDKGKEVLVLWGIHHPSTSADQQSLYQNADAYVFVGTSRYSKKFKPEIAIRPKVRDQEGRMNYYWTLVEPGDKITFEATGNLVVPRYAFAMERNAGSGIIISDTPVHDCNTTCQTPKGAINTSLPFQNIHPITIGKCPKYVKSTKLRLATGLRNVPSIQSRGLFGAIAGFIEGGWTGMVDGWYGYHHQNEQGSGYAADLKSTQNAIDEITNKVNSVIEKMNTQFTAVGKEFNHLEKRIENLNKKVDDGFLDIWTYNAELLVLLENERTLDYHDSNVKNLYEKVRSQLKNNAKEIGNGCFEFYHKCDNTCMESVKNGTYDYPKYSEEAKLNREEIDGVKLESTRIYQILAIYSTVASSLVLVVSLGAISFWMCSNGSLQCRICI

SEQ ID NO: 6207 - protein, 566 aa, Artificial Sequence; identical to SEQ ID NO: 2669
  derived and/or modified protein sequence (wt) from hemagglutinin__InfluenzaA__ADQ28011

SEQ ID NO: 6208 - protein, 566 aa, Artificial Sequence; identical to SEQ ID NO: 2669
  derived and/or modified protein sequence (wt) from hemagglutinin__InfluenzaA__ADQ28012

SEQ ID NO: 6209 - protein, 566 aa, Artificial Sequence; identical to SEQ ID NO: 2669
  derived and/or modified protein sequence (wt) from hemagglutinin__InfluenzaA__ADQ28013

SEQ ID NO: 6210 - protein, 566 aa, Artificial Sequence; identical to SEQ ID NO: 2911
  derived and/or modified protein sequence (wt) from hemagglutinin__InfluenzaA__ADQ28014

SEQ ID NO: 6211 - protein, 566 aa, Artificial Sequence; identical to SEQ ID NO: 2911
  derived and/or modified protein sequence (wt) from hemagglutinin__InfluenzaA__ADQ28015

SEQ ID NO: 6212 - protein, 566 aa, Artificial Sequence; identical to SEQ ID NO: 2669
  derived and/or modified protein sequence (wt) from hemagglutinin__InfluenzaA__ADQ28016

SEQ ID NO: 6213 - protein, 566 aa, Artificial Sequence; identical to SEQ ID NO: 2669
  derived and/or modified protein sequence (wt) from hemagglutinin__InfluenzaA__ADQ28017

SEQ ID NO: 6214 - protein, 566 aa, Artificial Sequence; identical to SEQ ID NO: 4915
  derived and/or modified protein sequence (wt) from hemagglutinin__InfluenzaA__ADQ28018

SEQ ID NO: 6215 - protein, 566 aa, Artificial Sequence; identical to SEQ ID NO: 2911
  derived and/or modified protein sequence (wt) from hemagglutinin__InfluenzaA__ADQ28019

SEQ ID NO: 6216 - protein, 566 aa, Artificial Sequence
  derived and/or modified protein sequence (wt) from hemagglutinin__InfluenzaA__ADQ28020
MEAILVVLLYTFATANADTLCIGYHANNSTDTVDTVLEKNVTVTHSVNLLEDKHNGKLCKLRGVAPLHLGKCNIAGWILGNPECESLSTASSWSYIVETSSSDNGTCYPGDFIDYEELREQLSSVSSFERFEIFPKTSSWPNHDSNKGVTAACPQAGAKSFYKNLIWLVKKGNSYPKLSKSYINDKGKEVLVLWGIHHPSTSADQQSLYQNADAYVFVGSSRYSKKFKPEIAIRPKVRDQEGRMNYYWTLVEPGDKITFEATGNLVVPRYAFAMERNAGSGIIISDTPVHDCNTTCQTPKGAINTSLPFHNIHPITIGKCPKYVKSTKLRLATGLRNVPSIQSRGLFGAIAGFIEGGWTGMVDGWYGYHHQNEQGSGYAADLKSTQNAIDEITNKVNSVIEKMNTQFTAVGKEFNHLEKRIENLNKKVDDGFLDIWTYNAELLVLLENERTLDYHDSNVKNLYEKVRSQLKNNAKEIGNGCFEFYHKCDNTCMESVKNGTYDYPKYSEEAKLNREEIDGVKLESTRIYQILAIYSTVASSLVLVVSLGAISFWMCSNGSLQCRICI

SEQ ID NO: 6217 - protein, 566 aa, Artificial Sequence; identical to SEQ ID NO: 3863
  derived and/or modified protein sequence (wt) from hemagglutinin__InfluenzaA__ADQ28021

SEQ ID NO: 6218 - protein, 566 aa, Artificial Sequence
  derived and/or modified protein sequence (wt) from hemagglutinin__InfluenzaA__ADQ28022
MKAILVVLLYTFATANADTLCIGYHANNSTDTVDTVLEKNVTVTHSVNLLEDKHNGKLCKLRGVAPLHLGKCNIAGWILGNPECESLSTASSWSYIVETSSSDNGTCYPGNFIDYEELREQLSSVSSFERFEIFPKTSSWPNHDSNKGVTAACPHAGAKSFYKNLIWLVKKGNSYPKLSKSYINDKGKEVLVLWGIHHPSTSADQQSLYQNADAYVFVGTSRYSKKFKPEIAIRPKVRGQEGRMNYYWTLVEPGDKITFEATGNLVVPRYAFAMERNAGSGIIISDTPVHDCNTTCQTPKGAINTSLPFQNIHPITIGKCPKYVKSTKLRLATGLRNVPSIQSRGLFGAIAGFIEGGWTGMVDGWYGYHHQNEQGSGYAADLKSTQNAIDEITNKVNSVIEKMNTQFTAVGKEFNHLEKRIENLNKKVDDGFLDIWTYNAELLVLLENERTLDYHDSNVKNLYEKVRSQLKNNAKEIGNGCFEFYHKCDNTCMESVKNGTYDYPKYSEEAKLNREEIDGVKLESTRIYQILAIYSTVASSLVLVVSLGAISFWMCSNGSLQCRICI

SEQ ID NO: 6219 - protein, 566 aa, Artificial Sequence; identical to SEQ ID NO: 2669
  derived and/or modified protein sequence (wt) from hemagglutinin__InfluenzaA__ADQ28023

SEQ ID NO: 6220 - protein, 566 aa, Artificial Sequence; identical to SEQ ID NO: 2911
  derived and/or modified protein sequence (wt) from hemagglutinin__InfluenzaA__ADQ28024

SEQ ID NO: 6221 - protein, 566 aa, Artificial Sequence; identical to SEQ ID NO: 2911
  derived and/or modified protein sequence (wt) from hemagglutinin__InfluenzaA__ADQ28025

SEQ ID NO: 6222 - protein, 566 aa, Artificial Sequence; identical to SEQ ID NO: 3414
  derived and/or modified protein sequence (wt) from hemagglutinin__InfluenzaA__ADQ28028

SEQ ID NO: 6223 - protein, 566 aa, Artificial Sequence; identical to SEQ ID NO: 4894
  derived and/or modified protein sequence (wt) from hemagglutinin__InfluenzaA__ADQ28029

SEQ ID NO: 6224 - protein, 566 aa, Artificial Sequence
  derived and/or modified protein sequence (wt) from hemagglutinin__InfluenzaA__ADQ28030
MKAILVVLLYTFATANADTLCIGYHANNSTDTVDTVLEKNVTVTHSVNLLEDKHNGKLCKLRGVAPLHLGKCNIAGWILGNPECESLSTASSWSYIVETSSSDNGTCYPGDFINYEELREQLSSVSSFERFEIFPKTSSWPNHDSNKGITAACPHAGAKSFYKNLIWLVKKGNSYPKLSKSYINDKGKEVLVLWGIHHPSTSADQQSLYQNADAYVFVGTSRYSKKFKPEIAIRPKVRDQEGRMNYYWTLVEPGDKITFEATGNLVVPRYAFAMERNAGSGIIISDTPVHDCNTTCQTPKGAINTSLPFQNIHPITIGKCPKYVKSTKLRLATGLRNVPSIQSRGLFGAIAGFIEGGWTGMVDGWYGYHHQNEQGSGYAADLKSTQNAIDEITNKVNSVIEKMNTQFTAVGKEFNHLEKRIENLNKKVDDGFLDIWTYNAELLVLLENERTLDYHDSNVKNLYEKVRSQLKNNAKEIGNGCFEFYHKCDNTCMESVKNGTYDYPKYSEEAKLNREEIDGVKLESTRIYQILAIYSTVASSLVLVVSLGAISFWMCSNGSLQCRICI

SEQ ID NO: 6225 - protein, 566 aa, Artificial Sequence; identical to SEQ ID NO: 3863
  derived and/or modified protein sequence (wt) from hemagglutinin__InfluenzaA__ADQ28031

SEQ ID NO: 6226 - protein, 566 aa, Artificial Sequence; identical to SEQ ID NO: 2911
  derived and/or modified protein sequence (wt) from hemagglutinin__InfluenzaA__ADQ28032

SEQ ID NO: 6227 - protein, 566 aa, Artificial Sequence
  derived and/or modified protein sequence (wt) from hemagglutinin__InfluenzaA__ADQ28034
MKAILVVLLYTFATANADTLCIGYHANNSTDTVDTVLEKNVTVTHSVNLLEDKHNGKLCKLRGVAPLHLGKCNIAGWILGNPECESLSTASSWSYIVETSSSDNGTCYPGDFINYEELREQLSSVSSFERFEIFPKTSSWPNHDSNKGVTAACPHAGAKSFYKNLIWLVKKGNSYPKLSKSYINDKGKEVLVLWGIHHPSTSADQQSLYQNADAYVFVGTSRYSKKFKPEIAIRPKVRGQEGRMNYYWTIVEPGDKITFEATGNLVVPRYAFAMERNAGSGIIISDTPVHDCNTTCQTPKGAINTSLPFQNIHPITIGKCPKYVKSTKLRLATGLRNVPSIQSRGLFGAIAGFIEGGWTGMVDGWYGYHHQNEQGSGYAADLKSTQNAIDEITNKVNSVIEKMNTQFTAVGKEFNHLEKRIENLNRKVDDGFLDIWTYNAELLVLLENERTLDYHDSNVKNLYEKVRSQLKNNAKEIGNGCFEFYHKCDNTCMESVKNGTYDYPKYSEEAKLNREEIDGVKLESTRIYQILAIYSTVASSLVLVVSLGAISFWMCSNGSLQCRICI

SEQ ID NO: 6228 - protein, 566 aa, Artificial Sequence
  derived and/or modified protein sequence (wt) from hemagglutinin__InfluenzaA__ADQ28035
MKAILVVLLYTFATANADTLCIGYHANNSTDTVDTVLEKNVTVTHSVNLLEDKHNGKLCRLRGVAPLHLGKCNIAGWILGNPECESLSTASSWSYIVETSSSDNGTCYPGDFIDYEELREQLSSVSSFERFEIFPKTSSWPNHDSNKGVTAACPHAGAKSFYKNLIWLVKKGNSYPKLSKSYINDKGKEVLVLWGIHHPSTSADQQSLYQNADAYVFVGTSRYSKKFKPEIAIRPKVRGQEGRMNYYWTLVEPGDKITFEATGNLVVPRYAFAMERNAGSGIIISDTPVHDCNTTCQTPKGAINTSLPFQNIHPITIGKCPKYVKSTKLRLATGLRNVPSIQSRGLFGAIAGFIEGGWTGMVDGWYGYHHQNEQGSGYAADLKSTQNAIDEITNKVNSVIEKMNTQFTAVGKEFNHLEKRIENLNKKVDDGFLDIWTYNAELLVLLENERTLDYHDSNVKNLYEKVRSQLKNNAKEIGNGCFEFYHKCDNTCMESVKNGTYDYPKYSEEAKLNREEIDGVKLESTRIYQILAIYSTVASSLVLVVSLGAISFWMCSNGSLQCRICI

SEQ ID NO: 6229 - protein, 566 aa, Artificial Sequence; identical to SEQ ID NO: 2669
  derived and/or modified protein sequence (wt) from hemagglutinin__InfluenzaA__ADQ28036

SEQ ID NO: 6230 - protein, 566 aa, Artificial Sequence; identical to SEQ ID NO: 2669
  derived and/or modified protein sequence (wt) from hemagglutinin__InfluenzaA__ADQ28037

SEQ ID NO: 6231 - protein, 566 aa, Artificial Sequence; identical to SEQ ID NO: 2911
  derived and/or modified protein sequence (wt) from hemagglutinin__InfluenzaA__ADQ28038

SEQ ID NO: 6232 - protein, 566 aa, Artificial Sequence; identical to SEQ ID NO: 2669
  derived and/or modified protein sequence (wt) from hemagglutinin__InfluenzaA__ADQ28039

SEQ ID NO: 6233 - protein, 566 aa, Artificial Sequence; identical to SEQ ID NO: 2911
  derived and/or modified protein sequence (wt) from hemagglutinin__InfluenzaA__ADQ28040

SEQ ID NO: 6234 - protein, 566 aa, Artificial Sequence; identical to SEQ ID NO: 2911
  derived and/or modified protein sequence (wt) from hemagglutinin__InfluenzaA__ADQ28041

SEQ ID NO: 6235 - protein, 566 aa, Artificial Sequence
  derived and/or modified protein sequence (wt) from hemagglutinin__InfluenzaA__ADQ28043
MEAILVVLLYTFATANADTLCIGYHANNSTDTVDTVLEKNVTVTHSVNLLEDKHNGKLCKLRGVAPLHLGKCNIAGWILGNPECESLSTASSWSYIVETSSSDNGTCYPGDFIDYEELREQLSSVSSFERFEIFPKTSSWPNHDSNKGVTAACPHDGAKSFYKNLIWLVKKGNSYPKLSKSYINDKGKEVLVLWGIHHPSTSADQQSLYQNADAYVFVGSSRYSKKFKPEIAIRPKVRDQEGRMNYYWTLVEPGDKITFEATGNLVVPRYAFAMERNAGSGIIISDTPVHDCNTTCQTPKGAINTSLPFHNIHPITIGKCPKYVKSTKLRLATGLRNVPSIQSRGLFGAIAGFIEGGWTGMVDGWYGYHHQNEQGSGYAADLKSTQNAIDEITNKVNSVIEKMNTQFTAVGKEFNHLEKRIENLNKKVDDGFLDIWTYNAELLVLLENERTLDYHDSNVKNLYEKVRSQLKNNAKEIGNGCFEFYHKCDNTCMESVKNGTYDYPKYSEEAKLNREEIDGVKLESTRIYQILAIYSTVASSLVLVVSLGAISFWMCSNGSLQCRICI

SEQ ID NO: 6236 - protein, 566 aa, Artificial Sequence; identical to SEQ ID NO: 2911
  derived and/or modified protein sequence (wt) from hemagglutinin__InfluenzaA__ADQ28044

SEQ ID NO: 6237 - protein, 566 aa, Artificial Sequence
  derived and/or modified protein sequence (wt) from hemagglutinin__InfluenzaA__ADQ28045
MKAILVVLLYTFATANADTLCIGYHANNSTDTVDTVLEKNVTVTHSVNLLEDKHNGKLCKLRGVAPLHLGKCNIAGWILGNPECESLSTASSWSYIVETSSSDNGTCYPGDFIDYEELREQLSSVSSFERFEIFPKTSSWPNHDSNKGVTAACSHAGAKSFYKNLIWLVKKGNSYPKLSKSYINDKGKEVLVLWGIHHPSTSADQQSLYQNADAYVFVGTSRYSKKFKPEIAIRPKVRDQEGRMNYYWTLVEPGDKITFEATGNLVVPRYAFAMERNAGSGIIISDTPVHDCNTTCQTPKGAINTSLPFQNIHPITIGKCPKYVKSTKLRLATGLRNVPSIQSRGLFGAIAGFIEGGWTGMVDGWYGYHHQNEQGSGYAADLKSTQNAIDEITNKVNSVIEKMNTQFTAVGKEFNHLEKRIENLNKKVDDGFLDIWTYNAELLVLLENERTLDYHDSNVKNLYEKVRNQLKNNAKEIGNGCFEFYHKCDNTCMESVKNGTYDYPKYSEEAKLNREEIDGVKLESTRIYQILAIYSTVASSLVLVVSLGAISFWMCSNGSLQCRICI

SEQ ID NO: 6238 - protein, 566 aa, Artificial Sequence; identical to SEQ ID NO: 3139
  derived and/or modified protein sequence (wt) from hemagglutinin__InfluenzaA__ADQ28047

SEQ ID NO: 6239 - protein, 566 aa, Artificial Sequence; identical to SEQ ID NO: 2669
  derived and/or modified protein sequence (wt) from hemagglutinin__InfluenzaA__ADQ28048

SEQ ID NO: 6240 - protein, 566 aa, Artificial Sequence; identical to SEQ ID NO: 2911
  derived and/or modified protein sequence (wt) from hemagglutinin__InfluenzaA__ADQ28049

SEQ ID NO: 6241 - protein, 566 aa, Artificial Sequence; identical to SEQ ID NO: 2669
  derived and/or modified protein sequence (wt) from hemagglutinin__InfluenzaA__ADQ28050

SEQ ID NO: 6242 - protein, 566 aa, Artificial Sequence
  derived and/or modified protein sequence (wt) from hemagglutinin__InfluenzaA__ADQ28051
MKAILVVLLYTFATANADTLCIGYHANNSTDTVDTVLEKNVTVTHSVNLLEDKHDGKLCKLRGVAPLHLGKCNIAGWILGNPECESLSTASSWSYIVETSSSDNGTCYPGDFINYEELREQLSSVSSFERFEIFPKTSSWPNHDSNKGVTAACPHAGAKSFYKNLIWLVKKGNSYPKLSKSYINDKGKEVLVLWGIHHPSTSADQQSLYQNADAYVFVGTSRYSKKFKPEIAIRPKVRDQEGRMNYYWTLVEPGDKITFEATGNLVVPRYAFAMERNAGSGIIISDTPVHDCNTTCQTPKGAINTSLPFQNIHPITIGKCPKYVKSTKLRLATGLRNVPSIQSRGLFGAIAGFIEGGWTGMVDGWYGYHHQNEQGSGYAADLKSTQNAIDEITNKVNSVIEKMNTQFTAVGKEFNHLEKRIENLNKKVDDGFLDIWTYNAELLVLLENERTLDYHDSNVKNLYEKVRSQLKNNAKEIGNGCFEFYHKCDNTCMESVKNGTYDYPKYSEEAKLNREEIDGVKLESTRIYQILAIYSTVASSLVLVVSLGAISFWMCSNGSLQCRICI

SEQ ID NO: 6243 - protein, 566 aa, Artificial Sequence; identical to SEQ ID NO: 2669
  derived and/or modified protein sequence (wt) from hemagglutinin__InfluenzaA__ADQ28053

SEQ ID NO: 6244 - protein, 566 aa, Artificial Sequence; identical to SEQ ID NO: 2911
  derived and/or modified protein sequence (wt) from hemagglutinin__InfluenzaA__ADQ28055

SEQ ID NO: 6245 - protein, 566 aa, Artificial Sequence
  derived and/or modified protein sequence (wt) from hemagglutinin__InfluenzaA__ADQ28056
MEAILVVLLYTFATADADTLCIGYHANNSTDTVDTVLEKNVTVTHSVNLLEDKHNGKLCKLRGVAPLHLGKCNIAGWILGNPECESLSTASSWSYIVETSSSDNGTCYPGDFIDYEELREQLSSVSSFERFEIFPKTSSWPNHDSNKGVTAACPHAGAKSFYKNLIWLVKKGNSYPKLSKSYINDKGKEVLVLWGIHHPSTSADQQSLYQNADAYVFVGSSRYSKKFKPEIAIRPKVRDQEGRMNYYWTLVEPGDKITFEATGNLVVPRYAFAMERNAGSGIIISDTPVHDCNTTCQTPKGAINTSLPFHNIHPITIGKCPKYVKSTKLRLATGLRNVPSIQSRGLFGAIAGFIEGGWTGMVDGWYGYHHQNEQGSGYAADLKSTQNAIDEITNKVNSVIEKMNTQFTAVGKEFNHLEKRIENLNKKVDDGFLDIWTYNAELLVLLENERTLDYHDSNVKNLYEKVRSQLKNNAKEIGNGCFEFYHKCDNTCMESVKNGTYDYPKYSEEAKLNREEIDGVKLESTRIYQILAIYSTVASSLVLVVSLGAISFWMCSNGSLQCRICI

SEQ ID NO: 6246 - protein, 566 aa, Artificial Sequence; identical to SEQ ID NO: 2669
  derived and/or modified protein sequence (wt) from hemagglutinin__InfluenzaA__ADQ28057

SEQ ID NO: 6247 - protein, 566 aa, Artificial Sequence; identical to SEQ ID NO: 2669
  derived and/or modified protein sequence (wt) from hemagglutinin__InfluenzaA__ADQ28058

SEQ ID NO: 6248 - protein, 566 aa, Artificial Sequence
  derived and/or modified protein sequence (wt) from hemagglutinin__InfluenzaA__ADQ28059
MKAILVVLLYTLATANADTLCIGYHANNSTDTVDTVLEKNVTVTHSVNLLEDKHNGKLCKLRGVAPLHLGKCNIAGWILGNPECESLSTASSWSYIVETSSSDNGTCYPGDFIDYEELREQLSSVSSFERFEIFPKTSSWPNHDSNKGVTAACPHAGAKSFYKNLIWLVKKGNSYPKLSKSYINDKGKEVLVLWGIHHPSTSADQQSLYQNADAYVFVGTSKYSKKFKPEIAIRPKVRDQEGRMNYYWTLVEPGDKITFEATGNLVVPRYAFAMERNAGSGIIISDTPVHDCNTTCQTPKGAINTSLPFQNIHPITIGKCPKYVKSTKLRLATGLRNVPSIQSRGLFGAIAGFIEGGWTGMVDGWYGYHHQNEQGSGYAADLKSTQNAIDEITNKVNSVIEKMNTQFTAVGKEFNHLEKRIENLNKKVDDGFLDIWTYNAELLVLLENERTLDYHDSNVKNLYEKVRSQLKNNAKEIGNGCFEFYHKCDNTCMESVKNGTYDYPKYSEEAKLNREEIDGVKLESTRIYQILAIYSTVASSLVLVVSLGAISFWMCSNGSLQCRICI

SEQ ID NO: 6249 - protein, 566 aa, Artificial Sequence; identical to SEQ ID NO: 2669
  derived and/or modified protein sequence (wt) from hemagglutinin__InfluenzaA__ADQ28060

SEQ ID NO: 6250 - protein, 566 aa, Artificial Sequence
  derived and/or modified protein sequence (wt) from hemagglutinin__InfluenzaA__ADQ28061
MKAILVVLLYTFATANADTLCIGYHANNSTDTVDTVLEKNVTVTHSVNLLEDKHNGKLCKLRGVAPLHLGRCNIAGWILGNPECESLSTASSWSYIVETSSSDNGTCYPGDFIDYEELREQLSSVSSFERFEIFPKTSSWPNHDSNKGVTAACPHAGAKSFYKNLIWLVKKGNSYPKLSKSYINDKGKEVLVLWGIHHPSTSADQQSLYQNADANVFVGTSRYSKKFKPEIAIRPKVRDQEGRMNYYWTLVEPGDKITFEATGNLVVPRYAFAMERNAGSGIIISDTPVHDCNTTCQTPKGAINTSLPFQNIHPITIGKCPKYVKSTKLRLATGLRNVPSIQSRGLFGAIAGFIEGGWTGMVDGWYGYHHQNEQGSGYAADLKSTQNAIDEITNKVNSVIEKMNTQFTAVGKEFNHLEKRIENLNKKVDDGFLDIWTYNAELLVLLENERTLDYHDSNVKNLYEKVRSQLKNNAKEIGNGCFEFYHKCDNTCMESVKNGTYDYPKYSEEAKLNREEIDGVKLESTRIYQILAIYSTVASSLVLVVSLGAISFWMCSNGSLQCRICI

SEQ ID NO: 6251 - protein, 566 aa, Artificial Sequence
  derived and/or modified protein sequence (wt) from hemagglutinin__InfluenzaA__ADQ28063
MKAILVVLLYTFATANADTLCIGYHANNSTDTVDTVLEKNVTVTHSVNLLEDKHNGKLCKLRGVAPLHLGKCNIAGWILGNPECESLSTASSWSYIVETSSSDNGTCYPGDFINYEELREQLSSVSSFERFEIFPKTSSWPNHDSNKGVTAACPHAGAKSFYKNLIWLVKKGNSYPKLSKSYINDKGKEVLVLWGIHHPSTSADQQSLYQNADAYVFVGTSRYSKKFKPEIAIRPKVRNQEGRMNYHWTLVKPGDKITFEATGNLVVPRYAFAVERNAGSGIIISDTPVHDCNTTCQTPKGAINTSLPFQNIHPITIGKCPKYVKSTKLRLATGLRNVPSIQSRGLFGAIAGFIEGGWTGMVDGWYGYHHQNEQGSGYAADLKSTQNAIDEITNKVNSVIEKMNTQFTAVGKEFNHLEKRIENLNKKVDDGFLDIWTYNAELLVLLENERTLDYHDSNVKNLYEKVRSQLKNNAKEIGNGCFEFYHKCDNTCMESVKNGTYDYPKYSEEAKLNREEIDGVKLESTRIYQILAIYSTVASSLVLVVSLGAISFWMCSNGSLQCRICI

SEQ ID NO: 6252 - protein, 566 aa, Artificial Sequence; identical to SEQ ID NO: 3417
  derived and/or modified protein sequence (wt) from hemagglutinin__InfluenzaA__ADQ28064

SEQ ID NO: 6253 - protein, 566 aa, Artificial Sequence
  derived and/or modified protein sequence (wt) from hemagglutinin__InfluenzaA__ADQ28065
MKAILVVLLYTFATANADTLCIGYHANNSTDTVDTVLEKNVTVTHSVNLLEDKHNGKLCKLRGVAPLHLGKCNIAGWILGNPECESLSTASSWSYIVETSSSDNGTCYPGDFIDYEELREQLSSVSSFERFEIFPKTSSWPNHDSNKGVTAACPHAGAKSFYKNLIWLVKKGNSYPKLSKSYINDKGKEVLVLWGIHHPSTSAGQQSLYQNADAYVFVGTSRYSKKFKPEIAIRPKVRDQEGRMNYYWTLVEPGDKITFEATGNLVVPRYAFAMERNAGSGIIISDTQVHDCNTTCQTPKGAINTSLPFQNIHPITIGKCPKYVKSTKLRLATGLRNVPSIQSRGLFGAIAGFIEGGWTGMVDGWYGYHHQNEQGSGYAADLKSTQNAIDKITNKVNSVIEKMNTQFTAVGKEFNHLEKRIENLNKKVDDGFLDIWTYNAELLVLLENERTLDYHDSNVKNLYEKVRSQLKNNAKEIGNGCFEFYHKCDNTCMESVKNGTYDYPKYSEEAKLNREEIDGVKLESTRIYQILAIYSTVASSLVLVVSLGAISFWMCSNGSLQCRICI

SEQ ID NO: 6254 - protein, 566 aa, Artificial Sequence
  derived and/or modified protein sequence (wt) from hemagglutinin__InfluenzaA__ADQ28066
MKAILVVLLYTFATANADTLCIGYHANNSTDTVDTVLEKNVTVTHSVNLLEDKHNGKLCKLRGVAPLHLGKCNIAGWILGNPECESLSTASSWSYIVETSSSDNGTCYPGDFIDYEELREQLSSVSSFERFEIFPKTSSWPNHDSNKGVTAACPHAGAKSFYKNLIWLVKKGNSYPKLSKSYINDKGKEVLVLWGIHHPSTSADQQSLYQNADAYVFVGTSRYSKKFKPEIAIRPRVRDQEGRMNYYWTLVEPGDKITFEATGNLVVPRYAFAMERNAGSGIIISDTPVHDCNTTCQTPKGAINTSLPFQNIHPITIGKCPKYVKSTKLRLATGLRNVPSIQSRGLFGAIAGFIEGGWTGMVDGWYGYHHQNEQGSGYAADLKSTQNAIDKITNKVNSVIEKMNTQFTAVGKEFNHLEKRIENLNKKVDDGFLDIWTYNAELLVLLENERTLDYHDSNVKNLYEKVRSQLKNNAKEIGNGCFEFYHKCDNTCMESVKNGTYDYPKYSEEAKLNREEIDGVKLESTRIYQILAIYSTVASSLVLVVSLGAISFWMCSNGSLQCRICI

SEQ ID NO: 6255 - protein, 566 aa, Artificial Sequence
  derived and/or modified protein sequence (wt) from hemagglutinin__InfluenzaA__ADQ28067
MKAILVVLLYTFATANADTLCIGYHANNSTDTVDTVLEKNVTVTHSVNLLEDKHNGKLCKLRGVAPLHLGKCNIAGWILGNPECESLSTASSWSYIVETSSSDNGTCYPGDFIDYEELREQLSSVSSFERFEIFPKTSSWPNHDSNKGVTAACPHAGAKSFYKNLIWLVKKGNSYPKLSKSYINDKGKEVLVLWGIHHPSTSADQQSLYQNADAYVFVGTSRYSKKFKPEIAIRPKVRDQEGRMNYYWTLVEPGDKITFEATGNLVVPRYAFAMERNAGSGIIISDTPVHDCNTTCQTPKGAINTSLPFQNIHPITIGKCPKYVKSTKLRLATGLRNVPSIQSRGLFGAIAGFIEGGWTGMVDGWYGYHHQNEQGSGYAADLKSTQNAIDKITNKVNSVIEKMNTQFTAVGKEFNHLEKRIENLNKKVDDGFLDIWTYNAELLVLLENERTLDYHDSNVKNLYEKVRSQLKNNAKEIGNGCFEFYHKCDNTCMESVKNGTYDYPKYSEEAKLNREEINGVKLESTRIYQILAIYSTVASSLVLVVSLGAISFWMCSNGSLQCRICI

SEQ ID NO: 6256 - protein, 566 aa, Artificial Sequence
  derived and/or modified protein sequence (wt) from hemagglutinin__InfluenzaA__ADQ28068
MKAILVVLLYTFTTANADTLCIGYHANNSTDTVDTVLEKNVTVTHSVNLLEDKHNGKLCKLRGVAPLHLGKCNIAGWILGNPECESLSTASSWSYIVETSSSDNGTCYPGDFINYEELREQLSSVSSFERFEIFPKTSSWPNHDSNKGVTAACPHAGEKSFYKNLIWLVKKGNSYPKLSKSYINDKGKEVLVLWGIHHPSTSADQQSLYQNADAYVFVGTSRYSKKFKPEIAIRPKVRDQEGRMNYHWTLVKPGDKITFEATGNLVVPRYAFAMERNAGSGIIISDTPVHDCNTTCQTPKGAINTSLPFQNIHPITIGKCPKYVKSTKLRLATGLRNVPSIQSRGLFGAIAGFIEGGWTGMVDGWYGYHHQNEQGSGYAADLKSTQNAIDEITNKVNSVIEKMNTQFTAVGKEFNHLEKRIENLNKKVDDGFLDIWTYNAELLVLLENERTLDYHDSNVKNLYEKVRSQLKNNAKEIGNGCFEFYHKCDNTCMESVKNGTYDYPKYSEEAKLNREEIDGVKLESTRIYQILAIYSTVASSLVLVVSLGAISFWMCSNGSLQCRICI

SEQ ID NO: 6257 - protein, 566 aa, Artificial Sequence; identical to SEQ ID NO: 6255
  derived and/or modified protein sequence (wt) from hemagglutinin__InfluenzaA__ADQ28069

SEQ ID NO: 6258 - protein, 566 aa, Artificial Sequence
  derived and/or modified protein sequence (wt) from hemagglutinin__InfluenzaA__ADQ28070
MKAILVVLLYTFATANADTLCIGYHANNSTDTVDTVLEKNVTVTHSVNLLEDKHNGKLCKLRGVAPLHLGKCNIAGWILGNPECESLSTASSWSYIVETSSSDNGTCYPGDFIDYEELREQLSSVSSFERFEIFPKTSSWPNHDSNKGVTAACPHAGAKSFYKNLIWLVKKGNSYPKLSKSYINDKGKEVLVLWGIHHPSTSADQQSLYQNADAYVFVGTSRYSKKFKPEIAIRPKVRDQEGRMNYYWTLVEPGDKITFEATGNLVVPRYAFAMERNAGSGIIISDTPVHDCNTTCQTPKGAINTSLPFQNIHPITIGKCPKYVKSTKLRLATGLRNVPSIQSRGLFGAIAGFIEGGWTGMVDGWYGYHHQNEQGSGYAADLKSTQNAIDKITNKVNSVIEKMNTQFTAVGKEFNHLEKRIENLNKKVDDGFLDIWTYNAELLVLLENERTLDYHDSNVKNLYEKVRRQLKNNAKEIGNGCFEFYHKCDNTCMESVKNGTYDYPKYSEEAKLNREEIDGVKLESTRIYQILAIYSTVASSLVLVVSLGAISFWMCSNGSLQCRICI

SEQ ID NO: 6259 - protein, 566 aa, Artificial Sequence
  derived and/or modified protein sequence (wt) from hemagglutinin__InfluenzaA__ADQ28071
MKAILVVLLYTLATANADTLCIGYHANNSTDTVDTVLEKNVTVTHSVNLLEDKHNGKLCKLRGVAPLHLGKCNIAGWILGNPECESLSTASSWSYIVETSSSDNGTCYPGDFIDYEELREQLSSVSSFERFEIFPKTSSWPNHDSNKGVTAACPHAGAKSFYKNLIWLVKKGNSYPKLSKSYINDKGKEVLVLWGIHHPSTSADQQSLYQNADAYVFVGTSRYSKKFKPEIAIRPKVRDQEGRMNYYWTLVEPGDKITFEATGNLVVPRYAFAMERNAGSGIIISDTPVHDCNTTCQTPKGAINTSLPFQNIHPITIGKCPKYVKSTKLRLATGLRNVPSIQSRGLFGAIAGFIEGGWTGMVDGWYGYHHQNEQGSGYAADLKSTQNAIDKITNKVNSVIEKMNTQFTAVGKEFNHLEKRIENLNKKVDDGFLDIWTYNAELLVLLENERTLDYHDSNVKNLYEKVRSQLKNNAKEIGNGCFEFYHKCDNTCMESVKNGTYDYPKYSEEAKLNREEIDGVKLESTRIYQILAIYSTVASSLVLVVSLGAISFWMCSNGSLQCRICI

SEQ ID NO: 6260 - protein, 566 aa, Artificial Sequence; identical to SEQ ID NO: 3613
  derived and/or modified protein sequence (wt) from hemagglutinin__InfluenzaA__ADR32361

SEQ ID NO: 6261 - protein, 562 aa, Artificial Sequence
  derived and/or modified protein sequence (wt) from hemagglutinin__InfluenzaA__ADT78887
MALIYLILLFTSVRGDQICIGYHANNSTEKVDTILERNVTVTHAKDILEKTHNGKLCKLNGIPPLELGDCSIAGWLLGNPECDRLLRVPEWSYIMEKENPKYSLCYPGSFNDYEELKHLISSVKHFEKVKILPKDGWTQHTTTGGSRACAVSGNPSFFRNMVWLTKKGPNYPVAKGSYNNTSGEQMLIIWGVHHPNDEAEQRALYQKVGTYVSASTSTLNKRSTPEIAARPEVNGLGSRMEFSWTLLDMWDTINFESTGNLVAPEYGFKISKRGSSGVMKTEGTLENCETKCQTPLGAINTTLPFHNVHPLTIGECPKYVKSEKLVLATGLRNVPQIESRGLFGAIAGFIEGGWQGMVDGWYGYHHSNDQGSGYAADKESTQKAFDGITNKVNSVIEKMNTQFEAVGKEFSNLEKRLENLNKKMEDGFLDVWTYNAELLVLMENERTLDFHDSNVKNLYDKVRMQLRDNVKELGNGCFEFYHKCDDECMDSVKNGTYDYPKYEEESKLNRNEIKGVKLSSMGVYQILAIYATVAGSLSLAIMMAGISFWMCSNGSLQCRICI

SEQ ID NO: 6262 - protein, 566 aa, Artificial Sequence
  derived and/or modified protein sequence (wt) from hemagglutinin__InfluenzaA__ADT78908
MKAKLLILLCALSATDADTICIGYHANNSTDTVDTVLEKNVTVTHSVNLLEDSHNGKLCRLKGKAPLQLGKCNIAGWVLGNPECESLLSNRSWSYIAETPNSENGTCYPGDFADYEELREQLSSVSSFERFEIFPKERSWPKHNTTRGVTAACSHARKSSFYKNLVWLTEANGSYPNLSKSYVNNQEKEVLVLWGVHHPSNIEDQRTLYRKDNAYVSVVSSNYNRRFTPEIAKRPKVRDQPGRMNYYWTLLEPGDTIIFEATGNLIAPWYAFALSRGPGSGIITSNAPMDECDTKCQTPQGAINSSLPFQNIHPVTIGECPKYVRSTKLRMVTGLRNIPSIQSRGLFGAIAGFIEGGWTGMMDGWYGYHHQNEQGSGYAADQKSTQNAINGITNKVNSVIEKMNTQFTAVGKEFNKLEKRMENLNKKVDDGFLDIWTYNAELLVLLENERTLDFHDSNVKNLYEKVKNQLRNNAKELGNGCFEFYHKCDNECMESVKNGTYDYPKYSEESKLNREKIDGVKLESMGVYRILAIYSTVASSLVLLVSLGAISFWMCSNGSLQCRICI

SEQ ID NO: 6263 - protein, 566 aa, Artificial Sequence
  derived and/or modified protein sequence (wt) from hemagglutinin__InfluenzaA__ADT78929
MKAKLLILLCALSATDADTICIGYHANNSTDTVDTVLEKNVTVTHSVNLLEDSHNGKLCRLKGIAPLQLGKCNIAGWILGNPECESLLSKRSWSYIAETPNSENGTCYPGDFADYEELREQLSSVSSFERFEIFPKERSWPKHNITRGVTAACSHAGKSSFYKNLLWLTETKGSYPNLSKSYVNNKEKEVLVLWGVHHPSNIEDQKTLYRKENAYVSVVSSNYNRRFTPEIAERPKVRGQAGRMNYYWTLLEPGDTIIFEANGNLIAPWYAFALSRGLGSGIITSNASMDECDTKCQTPQGAINSSLPFQNIHPVTIGECPKYVKSTKLRMVTGLRNIPSIQSRGLFGAIAGFIEGGWTGMIDGWYGYHHQNEQGSGYAADQKSTQNAINGITNKVNSVIEKMNTQFTAVGKEFNKLEKRMENLNKKVDDGFLDIWTYNAELLVLLENERTLDFHDSNVKNLYEKVKNQLRNNAKEIGNGCFEFYHKCNNECMESVKNGTYDYPKYSEESKLNREKIDGVKLESMGVYQILAIYSTVASSLVLLVSLGAISFWMCSNGSLQCRICI

SEQ ID NO: 6264 - protein, 566 aa, Artificial Sequence
  derived and/or modified protein sequence (wt) from hemagglutinin__InfluenzaA__ADT78936
MKAKLLVLLCALSATYADTICIGYHANNSTDTVDTVLEKNVTVTHSVNLLEDSHNGKLCRLKGKAPLQLGKCNIAGWILGNPECESLLSKRSWSYIAETPNSENGTCYPGDFADYEELREQLSSVSSFERFEIFPKESSWPKHNTTRGVTAACSHARKSSFYKNLLWLTEANGSYPNLSKSYVNNQEKEVLVLWGVHHPSNIEDQRTLYRKENAYVSVVSSNYNRRFTPEIAERPKVRNQAGRMNYYWTLLEPGDTIIFEANGNLIAPWYAFALSRGLGSGIITSNASMDECDTKCQTPQGAINSSLPFQNIHPVTIGECPKYVKSTKLRMVTGLRNIPSIQSRGLFGAIAGFIEGGWTGMMDGWYGYHHQNEQGSGYAADQKSTQNAINGITNKVNSVIEKMNTQFTAVGKEFNKLEKRMENLNKKVDDGFLDIWTYNAELLVLLENERTLDFHDSNVKNLYEKVKNQLRNNAKELGNGCFEFYHKCDNECMESVKNGTYDYPKYSEESKLNREKIDGVKLESMGVYRILAIYSTVASSLVLLVSLGAISFWMCSNGSLQCRICI

SEQ ID NO: 6265 - protein, 562 aa, Artificial Sequence
  derived and/or modified protein sequence (wt) from hemagglutinin__InfluenzaA__ADT78961
MAIICLILLFTAVRGDQICIGYHANNSTEKVDTILERNVTVTHAKDILEKTHNGKLCKLNGIPPLELGDCSIAGWLLGNPECDRLLSVPEWSYIMEKENPRDGLCYPGSFNDYEELKHLLSSVKHFEKVKILPKNRWTQHTTTGGSRACAVSGNPSFFRNMVWLTKKGSNYPVAKGSYNNTSGEQMLIIWGVHHPNDETEQRTLYQNVETYVSVSTSTLNKRSTPKIATRPEVNGLGSRMEFSWTLLDMWDTINFESTGNLIAPEYGFKISKRGSSGIMKTEGTLENCETKCQTPLGAINTTLPFHNVHPLTIGECPKYVKSEKLVLATGPRNVPQIESRGLFGAIAGFIEGGWQGMVDGWYGYHHSNDQGSGYAADKESTQKAFDGITNKVNSVIEKMNTQFEAVGKEFSNLERRLENLNKKMEDGFLDVWTYNAELLVLMENERTLDFHDSNVKNLYDKVRMQLRDNVKELGNGCFEFYHKCDDECMNSVKNGTYDYPKYEEESKLNRNEIKGVKLSSMGVYQILVIYATVAGSLSLAIMMAGISFWMCSNGSLQCRICI

SEQ ID NO: 6266 - protein, 566 aa, Artificial Sequence; identical to SEQ ID NO: 764
  derived and/or modified protein sequence (wt) from hemagglutinin__InfluenzaA__ADT78971

SEQ ID NO: 6267 - protein, 566 aa, Artificial Sequence; identical to SEQ ID NO: 305
  derived and/or modified protein sequence (wt) from hemagglutinin__InfluenzaA__ADT79010

SEQ ID NO: 6268 - protein, 566 aa, Artificial Sequence; identical to SEQ ID NO: 764
  derived and/or modified protein sequence (wt) from hemagglutinin__InfluenzaA__ADT79030

SEQ ID NO: 6269 - protein, 566 aa, Artificial Sequence; identical to SEQ ID NO: 1342
  derived and/or modified protein sequence (wt) from hemagglutinin__InfluenzaA__ADT79050

SEQ ID NO: 6270 - protein, 566 aa, Artificial Sequence
  derived and/or modified protein sequence (wt) from hemagglutinin__InfluenzaA__ADT79108
MKARLLILLCALSATDADTICIGYHANNSTDTVDTVLEKNVTVTHSVNLLEDSHNGKLCRLKGIAPLQLGKCNIAGWILGNPECESLLSNRSWSYIAETPNSENGTCYPGDFADYEELREQLSSVSSFERFEIFPKERSWPKHNITRGVTAACSHAKKSSFYKNLLWLTEANGSYPNLIKSYVNNKEKEVLVLWGVHHPSNIEDQRTLYRKENAYVSVVSSNYNRRFTPEIAERPKVRGQAGRMNYYWTLLEPGDKIIFEANGNLIAPWYAFALSRGLGSGIITSNASMDECDTKCQTPQGAINSSLPFQNIHPVTIGECPKYVRSTKLRMVTGLRNIPSIQSRGLFGAIAGFIEGGWTGMVDGWYGYHHQNEQGSGYAADQKSTQNAINGITNKVNSVIEKMNTQFTAVGKEFNKLEKRMENLNKKVDDGFLDIWTYNAELLVLLENERTLDFHDSNVKNLYEKVKNQLRNNAKEIGNGCFEFYHKCDNECMESVKNGTYDYPKYSEESKLNREKIDGVKLESMGVYQILAIYSTVASSLVLLVSLGAISFWMCSNGSLQCRICI

SEQ ID NO: 6271 - protein, 562 aa, Artificial Sequence
  derived and/or modified protein sequence (wt) from hemagglutinin__InfluenzaA__ADT79119
MAIIYLILLFTAVRGDQICIGYHANNSTEKVDTILERNVTVTHAKDILEKTHNGKLCKLNGIPPLELGDCSIAGWLLGNPECDRLLSVPEWSYIMEKENPRDGLCYPGSFNDYEELKHLLSSVKHFEKVKILPKDRWTQHTTTGGSRACAVSGNPSFFRNMVWLTKKGSNYPVAKGSYNNTSGEQMLIIWGVHHPNDETEQRTLYQNVGTYVSVGTSTLNKRSTPDIATRPKVNGLGGRMEFSWTLLDMWDTINFESTGNLIAPEYGFKISKRGSSGIMKTEGTLGNCETKCQTPLGAINTTLPFHNVHPLTIGECPKYVKSEKLVLATGLRNVPQIESRGLFGAIAGFIEGGWQGMVDGWYGYHHSNDQGSGYAADKESTQKAFDGITNKVNSVIEKMNTQFEAVGKEFSNLERRLENLNKKMEDGFLDVWTYNAELLVLMENERTLDFHDSNVKNLYDKVRMQLRDNVKELGNGCFEFYHKCDDECMNSVKNGTYDYPKYEEESKLNRNEIKGVKLSSMGVYQILAIYATVAGSLSLAIMMAGISFWMCSNGSLQCRICI

SEQ ID NO: 6272 - protein, 562 aa, Artificial Sequence
  derived and/or modified protein sequence (wt) from hemagglutinin__InfluenzaA__ADT79129
MAIIYLILLFTAVRGDQICIGYHANNSTEKVDTILERNVTVTHAKDILEKTHNGKLCKLNGIPPLELGDCSIAGWLLGNPECDRLLRVPEWSYIMEKENPRDGLCYPGSFNDYEELKHLLSSVKHFEKVKILPKDRWTQHTTTGGSRACAVSGNPSFFRNMIWLTKKGSNYPVAKGSYNNTSGEQMLIIWGVHHPNDETEQRTLYQNVGTYVSVVTSTLNKRSTPKIATRPKVNGLGGRMEFSWTLLDMWDTINFESTGNLIAPEYGFKISKRGSSGIMKTEGTLENCETKCQTPLGAINTTLPFHNVHPLAIGECPKYVKSEKLVLATGLRNVPQIESRGLFGAIAGFIEGGWQGMVDGWYGYHHSNDQGSGYAADKESTQRAFDGITNKVNSVIEKMNTQFEAVGKEFSNLERRLENLNKKMEDGFLDVWTYNAELLVLMENERTLDFHDSNVKNLYDKVRMQLRDNVKELGNGCFEFYHKCDDECMNSVKNGTYDYPKYEEESKLNRNEIKGVKLSSMGVYQILAIYATVAGSLSLAIMMAGISFWMCSNGSLQCRICI

SEQ ID NO: 6273 - protein, 566 aa, Artificial Sequence
  derived and/or modified protein sequence (wt) from hemagglutinin__InfluenzaA__ADT79232
MKAILVVLLYTFATANADTLCIGYHANNSTDTVDTVLEKNVTVTHSVNLLEDKHNGKLCKLRGVAPLHLGKCNIAGWILGNPECESLSTASSWSYIVETSSSDNGTCYPGDFIDYEELREQLSSVSSFERFEIFPKTSSWPNHDSNKGVTAACPHAGAKSFYKNLIWLVKKGNSYPKLSKSYINDKGKEVLVLWGIHHPSTSADQQSLYQNADAYVFVGSSRYSKKFKPEIAIRPKVRDQEGRMNYYWTLVEPGDKITFEATGNLVVPRYAFAMERNAGSGIIISDTPVHDCNTTCQTPKGAINTSLPFQNKHPITIGKCPKYVKSTKLRLATGLRNVPSIQSRGLFGAIAGFIEGGWTGMVDGWYGYHHQNEQGSGYAADVKSTQNAIDEITNKVNSVIEKMNTQFTAVGKEFNHLEKRIENLNKKVDDGFLDIWTYNAELLVLLENERTLDYHDSNVKNLYEKVRSQLKNNAKEIGNGCFEFYHKCDNTCMESVKNGTYDYPKYSEEAKLNREEIDGVKLESTRIYQILAIYSTVASSLVLVVSLGAISFWMCSNGSLQCRICI

SEQ ID NO: 6274 - protein, 566 aa, Artificial Sequence
  derived and/or modified protein sequence (wt) from hemagglutinin__InfluenzaA__ADT79242
MKAILVVLLYTFATANADTLCIGYHANNSTDTVDTVLEKNVTVTHSVNLLEDKHNGKLCKLRGVAPLHLGKCNIAGWILGNPECESLSTASSWSYIVETPSSDNGTCYPGDFIDYEELREQLSSVSSFERFEIFPKTSSWPNHDSNKGVTAACPHAGAKSFYKNLIWLVKKGNSYPKLSKSYINDKGKEVLVLWGIHHPSTSADQQSLYQNADAYVFVGSSRYSKKFKPEIAIRPKVRDQEGRMNYYWTLVEPGDKITFEATGNLVVPRYAFAMERNAGSGIIISDTPVHDCNTTCQTPKGAINTSLPFQNIHPITIGKCPKYVKSTKLRLATGLRNVPSIQSRGLFGAIAGFIEGGWTGMVDGWYGYHHQNEQGSGYAADLKSTQNAIDEITNKVNSVIEKMNTQFTAVGKEFNHLEKRIENLNKKVDDGFLDIWTYNAELLVLLENERTLDYHDSNVKNLYEKVRSQLKNNAKEIGNGCFEFYHKCDNTCMESVKNGTYDYPKYSEEAKLNREEIDGVKLESTRIYQILAIYSTVASSLVLVVSLGAISFWMCSNGSLQCRICI

SEQ ID NO: 6275 - protein, 566 aa, Artificial Sequence
  derived and/or modified protein sequence (wt) from hemagglutinin__InfluenzaA__ADT91182
MKAILVVLLYTFATANADTLCIGYHANNSTDTVDTVLEKNVTVTHSVNLLEDKHNGKLCKLRGVAPLHLGKCNIAGWILGNPECEPLSTASSWSYIVETSSSDNGTCYPGDFIDYEELREQLSSVSSFERFEIFPKTSSWPNHDSNKGVTTACPHAGAKSFYKNLIWLVKKGNSYPKLSKSYINDKGKEVLVLWGIHHPPTSADQQSLYQNADAYVFVGTSRYSKKFKPEIAIRPKVRDQEGRMNYYWTLVEPGDKITFEATGNLVVPRYAFAMERNAGSGIIISDTPVHDCNTTCQTPKGAINTSLPFQNIHPITIGKCPKYVKSTKLRLATGLRNVPSIQSRGLFGAIAGFIEGGWTGMVDGWYGYHHQNEQGSGYAADLKSTQNAIDGITNKVNSVIEKMNTQFTAVGKEFNHLEKRIENLNKKVDDGFLDIWTYNAELLVLLENERTLDYHDSNVKNLYEKVRSQLKNNAKEIGNGCFEFYHKCDNTCMESVKNGTYDYPKYSEEAKLNREEIDGVKLESTRIYQILAIYSTVASSLVLVVSLGAISFWMCSNGSLQCRICI

SEQ ID NO: 6276 - protein, 566 aa, Artificial Sequence
  derived and/or modified protein sequence (wt) from hemagglutinin__InfluenzaA__ADU20561
MKAILVVLLYTFATANADTLCIGYHANNSTDTVDTVLEKNVTVTHSVNLLEDKHNGKLCKLGGVAPLHLGKCNIAGWILGNPECESLSTASSWSYIVETSSSDNGTCYPGDFIDYEELREQLSSVSSFERFEIFPKTSSWPNHDSNKGVTAACPHAGAKSFYKNLIWLVKKGNSYPKLSKSYINDKGKEVLVLWGIHHPSTSADQQSLYQNADAYVFVGTSRYSKKFKPEIAIRPKVRDQEGRMNYYWTLVEPGDKITFEATGNLVVPRYAFAMERNAGSGIIISDTPVHDCNTTCQTPKGAINTSLPFQNIHPITIGKCPKYVKSTKLRLATGLRNVPSIQSRGLFGAIAGFIEGGWTGMVDGWYGYHHQNEQGSGYAADLKSTQNAIDKITNKVNSVIEKMNTQFTAVGKEFNHLEKRIENLNKKVDDGFLDIWTYNAELLVLLENERTLDYHDSNVKNLYEKVRSQLKNNAKEIGNGCFEFYHKCDNTCMESVKNGTYDYPKYSEEAKLNREEIDGVKLESTRIYQILAIYSTVASSLVLVVSLGAISFWMCSNGSLQCRICI

SEQ ID NO: 6277 - protein, 566 aa, Artificial Sequence
  derived and/or modified protein sequence (wt) from hemagglutinin__InfluenzaA__ADU20562
MKAILVVLLYTFATANADTLCIGYHANNSTDTVDTVLEKNVTVTHSVNLLEDKHNGKLCKLRGVAPLHLGKCKIAGWILGNPECESLSTASSWSYIVETSSSDNGTCYPGDFIDYEELREQLSSVSSFERFEIFPKTSSWPNHDSNKGVTAACPHAGAKSFYKNLIWLVKKGNSYPKLSKSYINDKGKEVLVLWGIHHPSTSADQQSLYQNADAYVFVGTSRYSKKFKPEIAIRPKVRDQEGRMNYYWTLVEPGDKITFEATGNLVVPRYAFAMERNAGSGIIISDTPVHDCNTTCQTPKGAINTSLPFQNIHPITIGKCPKYVKSTKLRLATGLRNVPSIQSRGLFGAIAGFIEGGWTGMVDGWYGYHHQNEQGSGYAADLKSTQNAIDKITNKVNSVIEKMNTQFTAVGKEFNHLEKRIENLNKKVDDGFLDIWTYNAELLVLLENERTLDYHDSNVKNLYEKVRSQLKNNAKEIGNGCFEFYHKCDNTCMESVKNGTYDYPKYSEEAKLNREEIDGVKLESTRIYQILAIYSTVASSLVLVVSLGAISFWMCSNGSLQCRICI

SEQ ID NO: 6278 - protein, 566 aa, Artificial Sequence
  derived and/or modified protein sequence (wt) from hemagglutinin__InfluenzaA__ADU25478
MEAKLFVLFCAFTALKADTICVGYHANNSTDTVDTILERNVTVTHSVNLLESSHNGKLCSLNGKAPLQLGNCNVAGWILGNPECDLLLTVNSWSYIIETSTSKNGACYPGEFADYEELREQLSTVSSFERFEIFPKATSWPNHETTKGTTVACSHSGANSFYRNLLWIVKKGNSYPKLSKSYTNNKGKEVLVIWGVHHPPTDSDQQTLYQNNHTYVSVGSSKYYQRFTPEIVTRPKVREQAGRMNYYWTLLDQGDTITFEATGNLIAPWHAFALNKGSSSGIMMSDAHVHNCTTKCQTPHGALKSNLPFQNVHPITIGECPKYVKSTQLRMATGLRNIPSIQSRGLFGAIAGFIEGGWTGMIDGWYGYHHQNEQGSGYAADQKSTQIAIDGISNKVNSVIEKMNVQFTSVGKEFNNLEKRIENLNKKVDDGFLDIWTYNAELLILLENERTLDFHDFNVKNLYERVKSQLRNNAKEIGNGCFEFYHKCNNECMESVKNGTYNYPRYSEESKLNREEIDGVKLESVGVHQILAIYSTVASSLVLLVSLGAISFWMCSNGSLQCRICI

SEQ ID NO: 6279 - protein, 566 aa, Artificial Sequence
  derived and/or modified protein sequence (wt) from hemagglutinin__InfluenzaA__ADU59558
MKAILVVLLYTFATANADTLCIGYHANNSTDTVDTVLEKNVTVTHSVNLLEDKHNGKLCKLRGVAPLHLGKCNIAGWILGNPECESLSTASSWSYIVETSSSDNGTCYPGDFIDYEELREQLSSVSSFERFEIFPKTSSWPNHDSNKGVTAACPHAGAKSFYKNLIWLVKKGNSYPKLSKSYINDKGKEVLVLWGIHHPSTSADQQSLYQNADAYVFVGTSRYSKKFKPEIAIRPKVRGQEGRMNYYWTLVEPGDKITFEATGNLVVPRYAFAMERNAGSGIIISDTPVHDCNTTCQTPKGAINTSLPFQNIHPITIGKCPKYVKSTKLRLATGLRNVPSIQSRGLFGAIAGFIEGGWTGMVDGWYGYHHQNEQGSGYAADLKSTQNAIDKITNKVNSVIEKMNTQFTAVGKEFNHLEKRIENLNKKVDDGFLDIWTYNAELLVLLENERTLDYHDSNVKNLYEKVRSQLKNNAKEIGNGCFEFYHKCDNTCMESVKNGTYDYPKYSEEAKLNREEIDGVKLESTRIYQILAIYSTVASSLVLVVSLGAISFWMCSNGSLQCRICI

SEQ ID NO: 6280 - protein, 566 aa, Artificial Sequence; identical to SEQ ID NO: 2669
  derived and/or modified protein sequence (wt) from hemagglutinin__InfluenzaA__ADU59579

SEQ ID NO: 6281 - protein, 566 aa, Artificial Sequence; identical to SEQ ID NO: 2669
  derived and/or modified protein sequence (wt) from hemagglutinin__InfluenzaA__ADU59590

SEQ ID NO: 6282 - protein, 566 aa, Artificial Sequence; identical to SEQ ID NO: 2669
  derived and/or modified protein sequence (wt) from hemagglutinin__InfluenzaA__ADU59601

SEQ ID NO: 6283 - protein, 566 aa, Artificial Sequence; identical to SEQ ID NO: 2669
  derived and/or modified protein sequence (wt) from hemagglutinin__InfluenzaA__ADU59612

SEQ ID NO: 6284 - protein, 566 aa, Artificial Sequence; identical to SEQ ID NO: 2669
  derived and/or modified protein sequence (wt) from hemagglutinin__InfluenzaA__ADU59768

SEQ ID NO: 6285 - protein, 566 aa, Artificial Sequence; identical to SEQ ID NO: 2669
  derived and/or modified protein sequence (wt) from hemagglutinin__InfluenzaA__ADU59769

SEQ ID NO: 6286 - protein, 566 aa, Artificial Sequence; identical to SEQ ID NO: 2669
  derived and/or modified protein sequence (wt) from hemagglutinin__InfluenzaA__ADU59771

SEQ ID NO: 6287 - protein, 566 aa, Artificial Sequence; identical to SEQ ID NO: 2669
  derived and/or modified protein sequence (wt) from hemagglutinin__InfluenzaA__ADU59772

SEQ ID NO: 6288 - protein, 566 aa, Artificial Sequence; identical to SEQ ID NO: 2669
  derived and/or modified protein sequence (wt) from hemagglutinin__InfluenzaA__ADU59774

SEQ ID NO: 6289 - protein, 566 aa, Artificial Sequence; identical to SEQ ID NO: 2669
  derived and/or modified protein sequence (wt) from hemagglutinin__InfluenzaA__ADU59906

SEQ ID NO: 6290 - protein, 566 aa, Artificial Sequence; identical to SEQ ID NO: 2669
  derived and/or modified protein sequence (wt) from hemagglutinin__InfluenzaA__ADU59916

SEQ ID NO: 6291 - protein, 566 aa, Artificial Sequence; identical to SEQ ID NO: 2669
  derived and/or modified protein sequence (wt) from hemagglutinin__InfluenzaA__ADU76756

SEQ ID NO: 6292 - protein, 566 aa, Artificial Sequence; identical to SEQ ID NO: 2669
  derived and/or modified protein sequence (wt) from hemagglutinin__InfluenzaA__ADU76757

SEQ ID NO: 6293 - protein, 566 aa, Artificial Sequence; identical to SEQ ID NO: 2669
  derived and/or modified protein sequence (wt) from hemagglutinin__InfluenzaA__ADU76758

SEQ ID NO: 6294 - protein, 566 aa, Artificial Sequence; identical to SEQ ID NO: 2669
  derived and/or modified protein sequence (wt) from hemagglutinin__InfluenzaA__ADU76759

SEQ ID NO: 6295 - protein, 566 aa, Artificial Sequence; identical to SEQ ID NO: 3029
  derived and/or modified protein sequence (wt) from hemagglutinin__InfluenzaA__ADU76761

SEQ ID NO: 6296 - protein, 566 aa, Artificial Sequence; identical to SEQ ID NO: 2669
  derived and/or modified protein sequence (wt) from hemagglutinin__InfluenzaA__ADU76762

SEQ ID NO: 6297 - protein, 566 aa, Artificial Sequence
  derived and/or modified protein sequence (wt) from hemagglutinin__InfluenzaA__ADU76764
MKAILVVLLYTFATANADTLCIGYHANNSTDTVDTVLEKNVTVTHSVNLLEDKHNGKLCKLRGVAPLHLGKCNIAGWILGNPECESLSTASSWSYIVEASSSNNGTCYPGDFIDYEELREQLSSVSSFERFEIFPKTSSWPNHDSNKGVTAACPHAGAKSFYKNLIWLVKKGNSYPKLSKSYINDKGKEVLVLWGIHHPSTSADQQSLYQNADAYVFVGTSRYSKKFKPEIAIRPKVRDQEGRMNYYWTLVEPGDKITFEATGNLVVPRYAFAMERNAGSGIIISDTPVHDCNTTCQTPKGAINTSLPFQNIHPITIGKCPKYVKSTKLRLATGLRNVPSIQSRGLFGAIAGFIEGGWTGMVDGWYGYHHQNEQGSGYAADLKSTQNAIDEITNKVNSVIEKMNTQFIAVGKEFNHLEKRIENLNKKVDDGFLDIWTYNAELLVLLENERTLDYHDSNVKNLYEKVRSQLKNNAKEIGNGCFEFYHKCDNTCMESVKNGTYDYPKYSEEAKLNREEIDGVKLESTRIYQILAIYSTVASSLVLVVSLGAISFWMCSNGSLQCRICI

SEQ ID NO: 6298 - protein, 566 aa, Artificial Sequence
  derived and/or modified protein sequence (wt) from hemagglutinin__InfluenzaA__ADU76765
MKAILIVLLYTFATANADTLCIGYHANNSTDTVDTVLEKNVTVTHSVNLLEDKHNGKLCKLRGVAPLHLGKCNIAGWILGNPECESLSTASSWSYIVETSSSDNGTCYPGDFIDYEELREQLSSVSSFERFEIFPKTSSWPNHDSNKGVTAACPHAGAKSFYKNLIWLVKKGNSYPKLSKSYINDKGKEVLVLWGIHHPSTSADQQSLYQNADAYVFVGTSRYSKKFKPEIAIRPKVRDQEGRMNYYWTLVEPGDKITFEATGNLVVPRYAFAMERNAGSGIIISDTPVHDCNTTCQTPKGAINTSLPFQNIHPITIGKCPKYVKSTKLRLATGLRNVPSIQSRGLFGAIAGFIEGGWTGMVDGWYGYHHQNEQGSGYAADLKSTQNAIDEITNKVNSVIEKMNTQFTAVGKEFNHLEKRIENLNKKVDDGFLDIWTYNAELLVLLENERTLDYHDSNVKNLYEKVRSQLKNNAKEIGNGCFEFYHKCDNTCMESVKNGTYDYPKYSEEAKLNREEIDGVKLESTRIYQILAIYSSVASSLVLVVSLGAISFWMCSNGSLQCRICI

SEQ ID NO: 6299 - protein, 566 aa, Artificial Sequence; identical to SEQ ID NO: 4266
  derived and/or modified protein sequence (wt) from hemagglutinin__InfluenzaA__ADU76766

SEQ ID NO: 6300 - protein, 566 aa, Artificial Sequence
  derived and/or modified protein sequence (wt) from hemagglutinin__InfluenzaA__ADU76767
MKAILVVLLYTFATANADTLCIGYHANNSTDTVDTVLEKNVTVTHSVNLLEDKHNGKLCKLRGVAPLHLGKCNIAGWILGNPECESLSTASSWSYIVETSSSDNGTCYPGDFIDYEELREQLSSVSSFERFEIFPKTSSWPNHDSNKGVTAACPHAGAKSFYKNLIWLVKKGNSYPKLSKSYINDKGKEVLVLWGIHHPSTSADQQSLYQNADAYVFVGTSRYSKKFKPEIAIRPKVREQEGRMNYYWTLVEPGDKITFEATGNLVVPRYAFAMERNAGSGIIISDTPVHDCNTTCQTPKGAINTSLPFQNIHPITIGKCPKYVKSTKLRLATGLRNVPSIQSRGLFGAIAGFIEGGWTGMVDGWYGYHHQNEQGSGYAADLKSTQNAIDKITNKVNSVIEKMNTQFTAVGKEFNHLEKRIENLNKKVDDGFLDIWTYNAELLVLLENERTLDYHDSNVKNLYEKVRSQLKNNAKEIGNGCFEFYHKCDNTCMESVKNGTYDYPKYSEEAKLNREEIDGVKLESTRIYQILAIYSTVASSLVLVVSLGAISFWMCSNGSLQCRICI

SEQ ID NO: 6301 - protein, 566 aa, Artificial Sequence
  derived and/or modified protein sequence (wt) from hemagglutinin__InfluenzaA__ADU76768
MKAILVVLLYTFAIANADTLCIGYHANNSTDTVDTVLEKNVTVTHSVNLLEDKHNGKLCKLRGVAPLHLGKCNIAGWILGNPECESLSTASSWSYIVETSSSDNGTCYPGDFIDYEELREQLSSVSSFERFEIFPKTSSWPNHDSNKGVTAACPHAGAKSFYKNLIWLVKKGNSYPKLSKSYINDKGKEVLVLWGIHHPSTSADQQSLYQNADAYVFVGTSKYSKKFKPEIAIRPKVRDQEGRMNYYWTLVEPGDKITFEATGNLVVPRYAFAMERNAGSGIIISDTPVHDCNTTCQTPKGAINTSLPFQNIHPITIGKCPKYVKSTKLRLATGLRNVPSIQSRGLFGAIAGFIEGGWTGMVDGWYGYHHQNEQGSGYAADLKSTQHAIDEITNKVNSVIEKMNTQFTAVGKEFNHLEKRIENLNKKVDDGFLDIWTYNAELLVLLENERTLDYHDSNVKNLYEKVRSQLKNNAKEIGNGCFEFYHKCDNTCMESVKNGTYDYPKYSEEAKLNREEINGVKLESTRIYQILAIYSTVASSLVLVVSLGAISFWMCSNGSLQCRICI

SEQ ID NO: 6302 - protein, 566 aa, Artificial Sequence; identical to SEQ ID NO: 2669
  derived and/or modified protein sequence (wt) from hemagglutinin__InfluenzaA__ADU76769

SEQ ID NO: 6303 - protein, 566 aa, Artificial Sequence; identical to SEQ ID NO: 2669
  derived and/or modified protein sequence (wt) from hemagglutinin__InfluenzaA__ADU76770

SEQ ID NO: 6304 - protein, 566 aa, Artificial Sequence; identical to SEQ ID NO: 2669
  derived and/or modified protein sequence (wt) from hemagglutinin__InfluenzaA__ADU76771

SEQ ID NO: 6305 - protein, 566 aa, Artificial Sequence; identical to SEQ ID NO: 3414
  derived and/or modified protein sequence (wt) from hemagglutinin__InfluenzaA__ADU76772

SEQ ID NO: 6306 - protein, 566 aa, Artificial Sequence; identical to SEQ ID NO: 2669
  derived and/or modified protein sequence (wt) from hemagglutinin__InfluenzaA__ADU76774

SEQ ID NO: 6307 - protein, 566 aa, Artificial Sequence; identical to SEQ ID NO: 2669
  derived and/or modified protein sequence (wt) from hemagglutinin__InfluenzaA__ADU76775

SEQ ID NO: 6308 - protein, 566 aa, Artificial Sequence; identical to SEQ ID NO: 2669
  derived and/or modified protein sequence (wt) from hemagglutinin__InfluenzaA__ADU76776

SEQ ID NO: 6309 - protein, 566 aa, Artificial Sequence; identical to SEQ ID NO: 2669
  derived and/or modified protein sequence (wt) from hemagglutinin__InfluenzaA__ADU76777

SEQ ID NO: 6310 - protein, 566 aa, Artificial Sequence; identical to SEQ ID NO: 2669
  derived and/or modified protein sequence (wt) from hemagglutinin__InfluenzaA__ADU76778

SEQ ID NO: 6311 - protein, 566 aa, Artificial Sequence; identical to SEQ ID NO: 5527
  derived and/or modified protein sequence (wt) from hemagglutinin__InfluenzaA__ADU76779

SEQ ID NO: 6312 - protein, 566 aa, Artificial Sequence; identical to SEQ ID NO: 2669
  derived and/or modified protein sequence (wt) from hemagglutinin__InfluenzaA__ADU76780

SEQ ID NO: 6313 - protein, 566 aa, Artificial Sequence; identical to SEQ ID NO: 4266
  derived and/or modified protein sequence (wt) from hemagglutinin__InfluenzaA__ADU76781

SEQ ID NO: 6314 - protein, 566 aa, Artificial Sequence; identical to SEQ ID NO: 3029
  derived and/or modified protein sequence (wt) from hemagglutinin__InfluenzaA__ADU76782

SEQ ID NO: 6315 - protein, 566 aa, Artificial Sequence
  derived and/or modified protein sequence (wt) from hemagglutinin__InfluenzaA__ADU76784
MKAILVVLLYTFATANADTLCIGYHANNSTDTVDTVLEKNVTVTHSVNLLEDKHNGKLCKLRGVAPLHLGKCNIAGWILGNPECESLSTASSWSYIVETSSSNNGTCYPGDFIDYEELREQLSSVSSFERFEIFPKTSSWPNHDSNKGVTAACPHAGAKSFYKNLIWLVKKGNSYPKLSKSYINDKGKEVLVLWGIHHPSTSADQQSLYQNADAYVFVGTSRYSKKFKPEIAIRPKVRDQEGRMNYYWTLVEPGDKITFEATGNLVVPRYAFAMERNAGSGIIISDTPVHDCNTTCQTPKGAINTSLPFQNIHPITIGKCPKYVKSTKLRLATGLRNVPSIQSRGLFGAIAGFIEGGWTGMVDGWYGYHHQNEQGSGYAADLKSTQNAIDEITNKVNSVIEKMNTQFTAVGKEFNHLEKRIENLNKKVDDGFLDIWTYNAELLVLLENERTLDYHDSNVKNLYEKVRSQLKNNAKEIGNGCFEFYHKCDNTCMESVKNGTYDYPKYSEEAKLNREEIDGVKLESTRIYQILAIYSTVASSLVLVVSLGAISFWMCSNGSLQCRICI

SEQ ID NO: 6316 - protein, 566 aa, Artificial Sequence; identical to SEQ ID NO: 2669
  derived and/or modified protein sequence (wt) from hemagglutinin__InfluenzaA__ADU76785

SEQ ID NO: 6317 - protein, 566 aa, Artificial Sequence; identical to SEQ ID NO: 2669
  derived and/or modified protein sequence (wt) from hemagglutinin__InfluenzaA__ADU76786

SEQ ID NO: 6318 - protein, 566 aa, Artificial Sequence
  derived and/or modified protein sequence (wt) from hemagglutinin__InfluenzaA__ADU76787
MKAILVVLLYTFATANADTLCIGYHANNSTDTVDTVLEKNVTVTHSVNLLEDKHNGKLCKLRGVAPLHLGKCNIAGWILGNPECESLSTASSWSYIVETSSSDNGTCYPGDFIDYEELREQLSSVSSFERFEIFPKTSSWPNHDSNKGVTAACPHAGAKSFYKNLIWLVKKGNSYPKLSKSYINDKGKEVLVLWGIHHPSTSADQQSLYQNADAYVFVGTSRYSKKFKPEIAIRPKVREQEGRMNYYWTLVEPGDKITFEATGNLVVPRYAFAMERNAGSGIIISDTPVHDCNTTCQTPKGAINTSLPFHNIHSITIGKCPKYVKSTKLRLATGLRNVPSIQSRGLFGAIAGFIEGGWTGMVDGWYGYHHQNEQGSGYAADLKSTQNAIDEITNKVNSVIEKMNTQFTAVGKEFNHLEKRIENLNKKVDDGFLDIWTYNAELLVLLENERTLDYHDSNVKNLYEKVRSQLKNNAKEIGNGCFEFYHKCDNTCMESVKNGTYDYPKYSEEAKLNREEIDGVKLESTRIYQILAIYSTVASSLVLVVSLGAISFWMCSNGSLQCRICI

SEQ ID NO: 6319 - protein, 566 aa, Artificial Sequence; identical to SEQ ID NO: 6300
  derived and/or modified protein sequence (wt) from hemagglutinin__InfluenzaA__ADU76788

SEQ ID NO: 6320 - protein, 566 aa, Artificial Sequence; identical to SEQ ID NO: 6300
  derived and/or modified protein sequence (wt) from hemagglutinin__InfluenzaA__ADU76789

SEQ ID NO: 6321 - protein, 566 aa, Artificial Sequence; identical to SEQ ID NO: 2669
  derived and/or modified protein sequence (wt) from hemagglutinin__InfluenzaA__ADU76790

SEQ ID NO: 6322 - protein, 566 aa, Artificial Sequence; identical to SEQ ID NO: 2669
  derived and/or modified protein sequence (wt) from hemagglutinin__InfluenzaA__ADU76791

SEQ ID NO: 6323 - protein, 566 aa, Artificial Sequence; identical to SEQ ID NO: 6300
  derived and/or modified protein sequence (wt) from hemagglutinin__InfluenzaA__ADU76792

SEQ ID NO: 6324 - protein, 566 aa, Artificial Sequence
  derived and/or modified protein sequence (wt) from hemagglutinin__InfluenzaA__ADU76793
MKAILVVLLYTFATANADTLCIGYHANNSTDTVDTVLEKNVTVTHSVNLLEDKHNGKLCKLRGVAPLHLGKCNIAGWILGNPECESLSTASSWSYIVETSSSDNGTCYPGDFIDYEELREQLSSVSSFEKFEIFPKTSSWPNHDSNKGVTAACPHAGTKSFYKNLIWLVKKGNSYPKLSKSYINDKGKEVLVLWGIHHPSTSADQQSLYQNADAYVFVGTSRYSKKFKPEIAIRPKVRDQEGRMNYYWTLVEPGDKITFEATGNLVVPRYAFAMERNAGSGIIISDTPVHDCNTTCQTPKGAINTSLPFQNIHPITIGKCPKYVKSTKLRLATGLRNVPSIQSRGLFGAIAGFIEGGWTGMVDGWYGYHHQNEQGSGYAADLKSTQNAIDKITNKVNSVIEKMNTQFTAVGKEFNHLEKRIENLNKKVDDGFLDIWTYNAELLVLLENERTLDYHDSNVKNLYEKVRSQLKNNAKEIGNGCFEFYHKCDNTCMESVKNGTYDYPKYSEEAKLNREEIDGVKLESTRIYQILAIYSTVASSLVLVVSLGAISFWMCSNGSLQCRICI

SEQ ID NO: 6325 - protein, 566 aa, Artificial Sequence
  derived and/or modified protein sequence (wt) from hemagglutinin__InfluenzaA__ADU85911
MKAIIVVLLYTFATADADTLCIGYHANNSTDTVDTVLEKNVTVTHSVNLLENKHNGKLCKLGGIAPLHLGKCDIAGWLLGNPECESLFTASSWSYIVETPNSDNGTCYPGDFINYEELREHLSSVSSFERFEIFPKANSWPNHDTNKGVTAACPYAGANSFYRNLIWLVKKGNSYPKLSKSYINNKKKEVLVIWGIHHPPTSTDQQTLYQNADAYVFVGSSKYSKRFKPEIAARPKVRDQAGRMDYYWTLIEPGDTITFEATGNLVVPRYAFAMKRGSGSGIIVSDAPVHDCNTTCQTPKGAINTSLPFQNIHPVTIGECPKYVKSTKLRMATGLRNIPSIQSRGLFGAIAGFLEGGWTGMIDGWYGYHHQNEQGSGYAADQKSTQNAIDGITNKVNSIIEKMNTQFTAVGKEFSQLEKRIESLNNKVDDGFLDIWTYNAELLVLLENERTLDYHDSNVKNLYEKVRSQLKNNAKEIGNGCFEFYHKCDNTCMESVKNGTYDYPKYSEEAKLNREEIDGVKLESARIYQILAIYSTVASSLVLLVSLGAISFWMCSNGSLQCRICI

SEQ ID NO: 6326 - protein, 566 aa, Artificial Sequence; identical to SEQ ID NO: 3833
  derived and/or modified protein sequence (wt) from hemagglutinin__InfluenzaA__ADV17283

SEQ ID NO: 6327 - protein, 566 aa, Artificial Sequence; identical to SEQ ID NO: 3833
  derived and/or modified protein sequence (wt) from hemagglutinin__InfluenzaA__ADV17293

SEQ ID NO: 6328 - protein, 566 aa, Artificial Sequence
  derived and/or modified protein sequence (wt) from hemagglutinin__InfluenzaA__ADV17303
MKAILVVLLYTFATANADTLCIGYHANNSTDTVDTVLEKNVTVTHSVNLLEDKHNGKLCKLRGVAPLHLGKCNIAGWILGNPECESLSTASSWSYIVETSSSDNGTCYPGDFIDYEELREQLSSVSSFERFEIFPKTSSWPNHDSNKGVTAACPHAGAKSFYKNLIWLVKKGNSYPKLSKSYINDKGKEVLVLWGIHHPSTSADQQSLYQNADAYVFVGTSRYSKKFKPEIAIRPKVRDQEGRMNYYWTLVEPGDKITFEATGNLVVPRYAFAMERNAGSGIIISDTPVHDCNTTCQTPKGAINTSLPFQNIHPITIGKCPKYVKSTKLRLAKGLRNVPSIQSRGLFGAIAGFIEGGWTGMVDGWYGYHHQNEQGSGYAADLKSTQNAIDEITNKVNSVIEKMNTQFTAVGKEFNHLEKRIENLNKKVDDGFLDIWTYNAELLVLLENERTLDYHDSNVKNLYEKVRSQLKNNAKEIGNGCFEFYHKCDNTCMESVKNGTYDYPKYSEEAKLNREEIDGVKLESTRIYQILAIYSTVASSLVLVVSLGAISFWMCSNGSLQCRICI

SEQ ID NO: 6329 - protein, 566 aa, Artificial Sequence; identical to SEQ ID NO: 3833
  derived and/or modified protein sequence (wt) from hemagglutinin__InfluenzaA__ADV17313

SEQ ID NO: 6330 - protein, 566 aa, Artificial Sequence
  derived and/or modified protein sequence (wt) from hemagglutinin__InfluenzaA__ADV17323
MKAILVVLLYTFATTNADTLCIGYHANNSTDTVDTVLEKNVTVTHSVNLLEDKHNGKLCKLRGVAPLHLGKCNIAGWILGNPECESLSTASSWSYIVETSSSDNGTCYPGDFIDYEELREQLSSVSSFERFEIFPKTNSWPNHDSNKGVTAACPHAGAKSFYKNLIWLVKKGNSYPKLSKSYINDKGKEVLVLWGIHHPSTSADQQGLYQNADAYVFVGTSRYSKKFKPEIAIRPKVRDQEGRMNYYWTLVEPGDKITFEATGNLVVPRYAFAMERNAGSGIIISDTPVHDCNTTCQTPEGAINTSLPFQNIHPITIGKCPKYVKSTKLRLATGLRNVPSIQSRGLFGAIAGFIEGGWTGMVDGWYGYHHQNEQGSGYAADLKSTQNAIDKITNKVNYVIEKMNTQFTAVGKEFNHLEKRIENLNKKVDDGFLDIWTYNAELLVLLENERTLDYHDSNVKNLYEKVRSQLKNNAKEIGNGCFEFYHKCDNTCMESVKNGTYDYPKYSEEAKLNREEIDGVKLESTRIYQILAIYSTVASSLVLVVSLGAISFWMCSNGSLQCRICI

SEQ ID NO: 6331 - protein, 566 aa, Artificial Sequence
  derived and/or modified protein sequence (wt) from hemagglutinin__InfluenzaA__ADV17333
MKAILVVLLYTFATANADTLCIGYHANNSTDTVDTVLEKNVTVTHSVNLLEDKHNGKLCKLRGVAPLHLGKCNIAGWILGNPECESLSTASSWSYIVETSSSDNGTCYPGDFIDYEELREQLSSVSSFERFEIFPKTSSWPNHDSNKGVTAACPHAGAKSFYKNLIWLVKKGNSYPKLSKSYINDKGKEVLVLWGIHHPSTSADQQNLYQNADAYVFVGTSRYSKKFKPEIAIRPKVRDQEGRMNYYWTLVEPGDKITFEATGNLVVLRYAFAMERNAGSGIIISDTPVHDCNTTCQTPKGAINTSLPFQNIHPITIGKCPKYVKSTKLRLATGLRNVPSIQSRGLFGAIAGFIEGGWTGMVDGWYGYHHQNEQGSGYAADLKSTQNAIDKITNKVNSVIEKMNTQFTAVGKEFNHLEKRIENLNKKVDDGFLDIWTYNAELLVLLENERTLDYYDSNVKNLYEKVRSQLKNNAKEIGNGCFEFYHKCDNTCMESVKNGTYDYPKYSEEAKLNREEIDGVKLESTRIYQILVIYSTVASSLVLVVSLGAISFWMCSNGSLQCRICI

SEQ ID NO: 6332 - protein, 566 aa, Artificial Sequence; identical to SEQ ID NO: 2669
  derived and/or modified protein sequence (wt) from hemagglutinin__InfluenzaA__ADV19019

SEQ ID NO: 6333 - protein, 566 aa, Artificial Sequence; identical to SEQ ID NO: 3154
  derived and/or modified protein sequence (wt) from hemagglutinin__InfluenzaA__ADV41677

SEQ ID NO: 6334 - protein, 566 aa, Artificial Sequence
  derived and/or modified protein sequence (wt) from hemagglutinin__InfluenzaA__ADV58939
MKAILVVLLYTFATANADTLCIGYHANNSTDTVDTVLEKNVTVTHSVNLLEDKHNGKLCKLRGVAPLHLGKCNIAGWILGNPECESLSTASSWSYIVETSSSDNGTCYPGDFIDYEELREQLSSVSSFERFEIFPKTSSWPNHDSNKGVTAACPHAGAKGFYKNLIWLVKKGNSYPKLSKSYINDKGKEVLVLWGIHHPSTTADQQSLYQNADTYVFVGTSRYSKKFKPEIAIRPKVRDQEGRMNYYWTLVEPGDKITFEATGNLVVPRYAFAMERNAGSGIIISDTPVHDCNTTCQTPKGAINTSLPFQNIHPITIGKCPKYVKSTKLRLATGLRNVPSIQSRGLFGAIAGFIEGGWTGMVDGWYGYHHQNEQGSGYAADLKSTQNAIDKITNKVNSVIEKMNTQFTAVGKEFNHLEKRIENLNKKVDDGFLDIWTYNAELLVLLENERTLDYHDSNVKNLYEKVRNQLKNNAKEIGNGCFEFYHKCDNTCMESVKNETYDYPKYSEEAKLNREEIDGVKLESTRIYQILAIYSTVASSLVLVVSLGAISFWMCSNGSLQCRICI

SEQ ID NO: 6335 - protein, 565 aa, Artificial Sequence
  derived and/or modified protein sequence (wt) from hemagglutinin__InfluenzaA__ADV69074
MKVKLLVLLCTFTATYADTICIGYHANNSTDTVDTVLEKNVTVTHSVNLLEDSHNGKLCLLKGIAPLQLGNCNVAGWILGNPECELLISKESWSYIVETPDPENGTCYPGYFTDYEELREQLSSVSSFKRFEIFPKESSWPNHTVTGVSASCSHNGKSSFYRNLLWLTVKNGLYPNLSKSYTNDKEKEVLVLWGVHHPPSIGDQRTLYHTENAYVSVVSSHYSRRFTPEIVKRPKVRDQEGRINYYWTLLEPGDTIICEANGNLIAPRYAFALSRGLGSGIITSNAPMGECNAKCQTPQGAINSSLPFQNVHPVTIGECPKYVKSAKLRMVTGLRNTPSIQSRGLFGAIAGFIEGGWTGMVDGWYGYHHQNEQGSGYAADQKSTQNAINGITNKVNSVIEKMNTQFTAVGKEFNKLERRMENLNKKVDDGFLDIWTYNAELLVLLENERTLDFHDSNVKNLYEKVKSQLKNNAKEIGNGCFEFYHKCNDECMESVKNGTYDYPKYSEESKLNREKIDGVKLESMEVYQILAIYSTVASSLVFLVALGAICFWMCSNGSLQCKICI

SEQ ID NO: 6336 - protein, 565 aa, Artificial Sequence
  derived and/or modified protein sequence (wt) from hemagglutinin__InfluenzaA__ADV69075
MKVKLLVLLCTFTATYADTICIGYHANNSTDTVDTVLEKNVTVTHSVNLLEDSHNGKLCLLKGIAPLQLGNCNVAGWILGNPECELLISKESWSYIVETPDPENGTCYPGYVTDYEELREQLSSVSSFKRFEIFPKESSWPNHTVTGVSASCSHNGKSSFYRNLLWLTVKNGLYPNLSKSYTNDKEKEVLVLWGVHHPPSIGDQRTLYHTENAYVSVVSSHYSRRFTPEIVKRPKVRDQEGRINYYWTLLEPGDTIICEANGNLIAPRYAFALSRGFGSGIITSNAPMGECNAKCQTPQGAINSSLPFQNVHPVTIGECPKYVKSAKLRMVTGLRNTPSIQSRGLFGAIAGFIEGGWTGMVDGWYGYHHPNEQGSGYAADQKSTQNAINGITNKVNSVIEKMNTQFTAVGKEFNKLERRMENLNKKVDDGFLDIWTYNAELLVLLENERTLDFHDSNVKNLYEKVKSQLKNKVKEIGNGCFEFYHKCNDECMESVKNGTYDYPKYSEESKLNREKIDGVKLESMEVYQILAIYSTVASSLVFLVALGAICFWMCSNGSLQCKICI

SEQ ID NO: 6337 - protein, 565 aa, Artificial Sequence
  derived and/or modified protein sequence (wt) from hemagglutinin__InfluenzaA__ADV69077
MKVKLLVLLCTFTATYADTICIGYHANNSTDTVDTVLEKNVTVTHSVNLLEDSHNGKLCLLKGIAPLQLGNCNVAGWILGNPECELLISKESWSYIVETPDPENGTCYPGYFTDYEELREQLSSVSSFKRFEIFPKESSWPNHTVTGVSASCSHNGKSSFYRNLLWLTVKNGLYPNLSKSYTNDKEKEVLVLWGVHHPPSIGDQRTLYHTENAYVSVVSSHYSRRFTPEIVKRPKVRDQEGRINYYWTLLEPGDTIIFEANGNLIAPRYAFALSRGFGSGIITSNAPMGECNAKCQTPQGAINSSLPFQNVHPVTIGECPKYVKSAKLRMVTGLRNTPSIQSRGLFGAIAGFIEGGWTGMVDGWYGYHHQNEQGSGYAADQKSTQNAINGITNKVNSVIEKMNTQFTAVGKEFNKLERRMENLNKKVDDGFLDIWTYNAELLVLLENERTLDFHDSNVKNLYEKVKSQLKNNAKEIGNGCFEFYHKCNDECMESVKNGTYDYPKYSEESKLNREKIDGVKLESMEVYQILAIYSTVASSLVFLVALGAICFWMCSNGSLQCKICI

SEQ ID NO: 6338 - protein, 565 aa, Artificial Sequence
  derived and/or modified protein sequence (wt) from hemagglutinin__InfluenzaA__ADV69078
MKVKLLILLCTFTATYADTICIGYHANNSTDTVDTVLEKNVTVTHSVNLLEDSHNGKLCLLKGIAPLQLGNCSVAGWILGNPECESLISKKSWSYIVETPNPENGACYPGEFADYEELREQLSSVSSFERFEIFPKESSWPNHTAAGVSASCSHNGEKSFYRNLIWLTKKNGLYPNLSKSYENDKEKEVLILWGVHHPPNIENQRTLYRTENAYVSVVSSHYSGRFTPEITKRPKVRNQEGRINYYWTLLEPGDTIIFEANGNLIAPWYAFTLSRGLGSGIITSNAPMDECDAKCQTPQGAINSSLPFQNVHPVTIGECPKYVRSSKLRMVTGLRNIPSIQSRGLFGAIAGFIEGGWTGMVDGWYGYHHQNEQGSGYAADQESTQNAINGITNKVNSVIEKMNTQFTAVGKEFNKLERRMENLNKKVDDGFLDIWTYNAELLVLLENERTLDFHDSNVKSLYEKVKSQLKNNAKEIGNGCFEFYHKCNNECMESVKNGTYDYPKYSEESKLNREKIDGVKLDSMGVYRILAIYSTVASSLVLLVSLGAISFWMCSNGSLQCRICI

SEQ ID NO: 6339 - protein, 565 aa, Artificial Sequence
  derived and/or modified protein sequence (wt) from hemagglutinin__InfluenzaA__ADV69079
MKVKLLILLCTFTATYADTICIGYHANNSTDTVDTVLEKNVTVTHSVNLLEDSHNGKLCLLKGIAPLQLGNCSVAGWILGNPECELLISKKSWSYIVKTPNPENGSCYPGYFADYEELREQLSSVSSFERFEMFPKESSWPNHNVNGVSASCSHNGKRSFYRNLLWLTGKNGLYPNLTKSYENNNEKEVLILWGVHHPSNIGDQRTLYHTENAYVSVMSSHYSRRFTPEINKRPKVRDQEGRINYYWTLLEPGDTIIFEANGNLIAPWYAFALSRGFGSGIITSSAPMDECDAKCQTPRGAINSSLPFQNVHPVTIGECPKYVRSAKLRMVTGLRNIPSIQSRGLFGAIAGFIEGGWTGMVDGWYGYHHQNEQGSGYAADQESTQNAINGITNKVNSVIEKMNTQFTAVGKEFNKLERRMENLNKKVDDGFLDIWTYNAELLVLLENERTLDFHDSNVKSLYEKVKSQLKNNAKEIGNGCFEFYHKCNNECMESVKNGTYDYPKYSEESKLNREKIDGVKLDSMGVYQILAIYSTVASSLVLLVSLGAISFWMCSNGSLQCRICI

SEQ ID NO: 6340 - protein, 565 aa, Artificial Sequence
  derived and/or modified protein sequence (wt) from hemagglutinin__InfluenzaA__ADV69080
MKVKLLILLCTFTATYADTICIGYHANNSTDTVDTVLEKNVTVTHSVNLLEDSHNGKLCLLKGIAPLQLGNCSVAGWILGNPECESLISKKSWSYIVETPNPENGACYPGEFADYEELREQLSSVSSFERFEIFPKESSWPNHTAAGVSASCSHNGERSFYRNLIWLTMKNGLYPNLRKSYENDKEKEVLILWGVHHPPNIENQRTLYHTENAYVSVVSSHYSGRFTPEITKRPKVRDQEGRINYYWTLLEPGDTIIFEANGNLIAPWYAFTLSRGLGSGIITSNAPMDACDAKCQTPQGAINSSLPFQNVHPVTIGECPKYVRSAKLRMVTGLRNIPSIQSRGLFGAIAGFIEGGWTGMVDGWYGYHHQNEQGSGYAADQESTQNAINGITNKVNSVIEKMNTQFTAVGKEFNKLERRIENLNKKVDDGFIDIWTYNAELLVLLENERTLDFHDSNVKSLYEKVKSQLKNNAKEIGNGCFEFYHKCNNECMESVKNGTYDYPKYSEESKLNREKIDGVKLDSMGVYRILAIYSTVASSLVLLVSLGAISFWMCSNGSLQCRICI

SEQ ID NO: 6341 - protein, 565 aa, Artificial Sequence
  derived and/or modified protein sequence (wt) from hemagglutinin__InfluenzaA__ADV69081
MKVKLLVLLCTFTATYADTICIGYHANNSTDTVDTVLEKNVTVTHSVNLLEDSHNGKLCLLKGIAPLQLGNCNVAGWILGNPECELLISKESWSYIVETPNPENGTCYPGYFTDYEELREQLSSVSSFKRFEIFPKESSWPNHTVTGVSASCSHNGESSFYRNLLWLTVKNGLYPKLSKSYTNDKEKEVLVLWGVHHPPNIRDQRTLYHTENAYVSVVSSHYSRRFTPEIVKRPKVRDQEGRINYYWTLLEPGDTIIFEANGNLIAPRYAFALSRGFGSGIITSNAPMGECNAKCQTPQGAIISSLPFQNVHPVTIGECPKYVKSAKLRMVTGLRNTPSIQSRGLFGAIAGFIEGGWTGMVDGWYGYHHQNEQGSGYAADQKSTQNAINGITNKVNSVIEKMNTQFTAVGKEFNKLERRMENLNKKVDDGFLDIWTYNAELLVLLENERTLDFHDSNVKNLYEKVKSQLKNNAKEIGNGCFEFYHKCNDECMESVKNGTYDYPKYSEESKLNREKIDGVKLESMEVYQILAIYSTVASSLVFLVALGAICFWMCSNGSLQCKICI

SEQ ID NO: 6342 - protein, 565 aa, Artificial Sequence
  derived and/or modified protein sequence (wt) from hemagglutinin__InfluenzaA__ADV69083
MKVKLMVLLCTFTATYADTICVGYHANNSTDTVDTVLEKNVTVTHSVNLLEDSHNGKLCLLKGIAPLQLGSCSVAGWILGNPECELLISKESWSYIVETPNPENGTCYPGYFTDYEELREQLSSVSSFKRFEIFPKESSWPNHNVTGVSSSCSHNGKSSFYRNLLWLTVKNGLYPNLSKSYTNKKEKEVLVLWGVHHPSNIGDQRALYHTENAYVSVVSSHYSRRFTPEIAKRPKVRNQEGRINYYWTLLEPGDTIILEANGNLIAPRYAFELSKGLGSGIITSNAPMGECNAKCQTPQGAINSSLPFQNVHPVTIGECPKYVKSAKLRMVTGLRNTPSIQSRGLFGAIAGFIEGGWTGMVDGWYGYHHQNEQGSGYAADQQSTQNAINGITNKVNSVIEKMNTQFTAVGKEFNKLERRMENLNKKVDDGFLDIWTYNAELLVLLENERTLDFHDSNVKNLYEKVKSQLKNNAKEIGNGCFEFYHKCNDECMESVKNGTYDYPKYSEESKLNREKIDGVKLESMGVYNILAIYSTVASSLVLLVSLGAISFWMCSNGSLQCRICI

SEQ ID NO: 6343 - protein, 565 aa, Artificial Sequence
  derived and/or modified protein sequence (wt) from hemagglutinin__InfluenzaA__ADV69084
MKVKLMVLLCTFTATYADTICVGYHANNSTDTVDTVLEKNVTVTHSVNLLEDSHNGKLCLLKGIAPLQLGSCSVAGWILGNPECELLISKESWSYIVETPNPENGTCYPGYFTDYEELREQLSSVSSFKRFEIFPKESSWPNHNVTGVSSSCSHNGKSSFYRNLLWLTVKNGLYPNLSKSYTNKKEKEVLILWGVHHPSNIRDQRALYYTENAYVSVVSSHYSRRFTPEIAKRPKVRNQEGRINYYWTLLEPGDTIIFEANGNLIAPRYAFELSKGFGSGIITSDAPMGECNAKCQTPQGAINSSLPFQNVHPVTIGECPKYVRSAKLRMVTGLRNTPSIQSRGLFGAIAGFIEGGWTGMVDGWYGYHHQNEQGSGYAADQQSTQNAINGITNKVNSVIEKMNTQFTAVGKEFNKLERRMENLNKKIDDGFLDIWTYNAELLVLLENERTLDFHDSNVKNLYEKVKSQLKNNAKEIGNGCFEFYHKCNDECMESVKNGTYDYPKYSEESKLNREKIDGVKLESMGVYNILAIYSTVASSLVLLVSLGAISFWMCSNGSLQCRICI

SEQ ID NO: 6344 - protein, 565 aa, Artificial Sequence
  derived and/or modified protein sequence (wt) from hemagglutinin__InfluenzaA__ADV69085
MKVKLMVLLCTFTATYADTICVGYHANNSTDTVDTVLEKNVTVTHSVNLLEDSHNGKLCLLKGIAPLQLGSCSVAGWILGNPECELLISKESWSYIVETPNPENGTCYPGYFTDYEELREQLSSVSSFKRFEIFPKESSWPNHTVTGVSSSCSHNGKSSFYRNLLWLTMKNGLYPNLSKSYTNKKEKEVLVLWGVHHPSNIGDQRALYHTENAYVSVVSSHYSRRFTPEIAKRPKVRNQEGRINYYWTLLEPGDTIIFEANGNLIAPRYAFELSKGFGSGIITSNAPMGECNAKCQTPQGAINSSLPFQNVHPVTIGECPKYVRSSKLRMVTGLRNTPSIQSRGLFGAIAGFIEGGWTGMVDGWYGYHHQNEQGSGYAADQQSTQNAINGITNKVNSVIEKMNTQFTAVGKEFNKLERRMENLNKKIDDGFLDIWTYNAELLVLLENERTLDFHDSNVKNLYEKVKSQLKNNAKEIGNGCFEFYHKCNDECMESVKNGTYDYPKYSEESKLNREKIDGVKLESMGVYNILAIYSTVASSLVLLVSLGAISFWMCSNGSLQCRICI

SEQ ID NO: 6345 - protein, 565 aa, Artificial Sequence
  derived and/or modified protein sequence (wt) from hemagglutinin__InfluenzaA__ADV69086
MKVKLLVLLCTFTATYADTICIGYHANNSTDTVDTVLEKNVTVTHSVNLLEDSHNGKLCLLKGIAPLQLGNCNVAGWILGNPECELLISKESWSYIVETPNPENGTCYPGYFTDYEELREQLSSVSSFKRFEIFPKESSWPKHTVTGVSASCSHNGKSSFYRNLLWLTGKNGLYPNLSKSYTNDKEKEVLVLWGVHHPSNIGDQRALYHKENAYVSVVSSHYSRRFTPEIVKRPKVRDQEGRINYYWTLLEPGDTIIFEANGNLIAPRYAFALSRGFGSGIITSNAPMDECNTKCQTPQGAINSSLPFQNVHPVTIGECPKYVKSAKLRMVTGLRNTPSIQSRGLFGAIAGFIEGGWTGMVDGWYGYHHQNEQGSGYAADQKSTQNAINGITNKVNSVIEKMNTQFTAVGKEFNKLERRMENLNKKVDDGFLDIWTYNAELLVLLENERTLDFHDSNVKNLYEKVKSQLKNNAKEIGNGCFEFYHKCNDECMESVKNGTYDYPKYSEESKLNREKIDGVKLESMEVYQILAIYSTVASSLVFLVSLGAICFWMCSNGSLQCRICI

SEQ ID NO: 6346 - protein, 565 aa, Artificial Sequence
  derived and/or modified protein sequence (wt) from hemagglutinin__InfluenzaA__ADV69087
MKVKLMVLLCTFTATYADTICVGYHANNSTDTVDTVLEKNVTVTHSVNLLEDSHNGKLCLLKGIAPLQLGSCSVAGWILGNPECELLISKESWSYIVETPNPENGTCYPGYFTDYEELREQLSSVSSFKRFEIFPKESSWPNHTVNGVSSSCSHNGESSFYRNLLWLTVKDGLYPNLSKSYTNKKEKEVLVLWGVHHPSNIGDQRALYHTENAYVSVVSSHYSRRFTPEIAKRPKVRNQEGRINYYWTLLEPGDTIIFEANGNLIAPRYAFELSKGFGSGIITSNAPMGECNAKCQTPQGAINSSLPFQNVHPVTIGECPKYVRSTKLRMVTGLRNTPSIQSRGLFGAIAGFIEGGWTGMVDGWYGYHHQNEQGSGYAADQQSTQNAINGITNKVNSVIEKMNTQFTAVGKEFNKLERRMENLNKKIDDGFLDIWTYNAELLVLLENERTLDFHDSNVKNLYEKVKSQLKNNAKEIGNGCFEFYHKCNDECMESVKNGTYDYPKYSEESKLNREKIDGVKLESMGVYNILAIYSTVASSLVLLVSLGAISFWMCSNGSLQCRICI

SEQ ID NO: 6347 - protein, 565 aa, Artificial Sequence
  derived and/or modified protein sequence (wt) from hemagglutinin__InfluenzaA__ADV69088
MKVKLLILLCTFTATYADTICIGYHANNSTDTVDTVLEKNVTVTHSVNLLEDSHNGKLCLLKGIAPLQLGNCSVTGWILGNPECELLISKKSWSYIVETPNPENGACYPGYFADYEELREQLSSVSSFERFEIFPKESSWPNHNVNGVSASCSHNGKSSFYRNLLWLTGKNGLYPSLTKSYANDKEKEVLILWGVHHPSNIGDQRTLYHTENAYVSVMSSHYSRRFTPEISKRPKVRDQEGRINYYWTLLEPGDTIIFEANGNLIAPWYAFALSRGFGSGIITSSAPMDACDAKCQTPQGAINSSLPFQNVHPVTIGECPKYVRSTKLRMVTGLRNIPSIQSRGLFGAIAGFIEGGWTGMVDGWYGYHHQNEQGSGYAADQESTQNALHGITNKVNSVIEKMNTQFTAVGKEFNKLERRMENLNKKVDDGFLDIWTYNAELLVLLENERTLDFHDSNVKSLYEKVKIQLKNNAKEIGNGCFEFYHKCNNECMESVRNGTYDYPKYSEESKLNREKIDGVKLDSMGVYQILAIYSTVASSLVLLVSLGAISFWMCSNGSLQCRICI

SEQ ID NO: 6348 - protein, 565 aa, Artificial Sequence
  derived and/or modified protein sequence (wt) from hemagglutinin__InfluenzaA__ADV69089
MKVKLLILLCTFTATYADTICIGYHANNSTDTVDTVLEKNVTVTHSVNLLEDSHNGKLCLLKGIAPLQLGNCSVAGWILGNPECELLISKKSWSYIVETPNPENGACYPGYFADYEELREQLSSVSSFERFEIFPKESSWPNHNVNGVSASCSHNGKSSFYRNLLWLTGKNGLYPNLTKSYANNKEKEVLILWGVHHPSNIGDQRTLYHTENAYVSVMSSHYSRRFTPEITKRPKIRDQEGRINYYWTLLEPGDTIIYEANGNLIAPWYAFALSRGFGSGIITSSAPMDECDAKCQTPQGAINSSLPFQNVHPVTIGECPKYVRSAKLRMVTGLRNIPSIQSRGLFGAIAGFIEGGWTGMVNGWYGYRLHNDQGSGYAADQKSTQNALNGITNKVNSVIEKMNTQFTAVGKEFNKLERRMENLNKKVDDGFLDIWTYNAEMLVLLENERTLDFHDSNVKSLYERVKIQLKNNAKEIGNGCFEFYHKCNNECMESVRNGTYDYPKYSEESKLNREKIDGVKLDSMGVYQILAIYSTVASSLVLLVSLGAISFWMCSNGSLQCRICI

SEQ ID NO: 6349 - protein, 565 aa, Artificial Sequence
  derived and/or modified protein sequence (wt) from hemagglutinin__InfluenzaA__ADV69090
MKVKLLVLLCTFTATYADTICIGYHANNSTDTVDTVLEKNVTVTHSVNLLEDSHNGKLCLLKGIAPLQLGNCSVAGWILGNPECESLISKESWSYIVETPNPENGTCYPGYFADYEELREQLSSVSSFERFEIFPKESSWPNHTVTGVSASCSHNGKSSFYRNLLWLTRKNGLYPNLSKSYANNKEKEVLVLWGVHHPPNLGDQRALYHTENAYVSVVSSHYSRRFTPEIAKRPKVRDQEGRINYYWTLLEPGDTIIFEANGNLIAPRFAFALSRGFGSGIITSNAPMDECDAKCQTPQGAINSSLPFQNVHPVTIGECPKYVRSTKLRMVTGLRNIPSIQSRGLFGAIAGFIEGGWTGMVDGWYGYHHQNEQGSGYAADQKSTQNAINGITNKVNSVIEKMNTQFTAVGKEFNKLERRMENLNKKVDDGFLDIWTYNAELLVLLENERTLDFHDSNVKNLYEKVKSQLKNNAKEIGNGCFEFYHKCNDECMESVKNGTYDYPKYSEESKLNREKIDGVKLESMGVYQILAIYSTVASSLVLLVSLGAISFWMCSNGSLQCRICI

SEQ ID NO: 6350 - protein, 565 aa, Artificial Sequence
  derived and/or modified protein sequence (wt) from hemagglutinin__InfluenzaA__ADV69091
MKVKLLVLLCTFTATYADTICIGYHANNSTDTVDTVLEKNVTVTHSVNLLEDSHNGKLCLLKGIAPLQLGNCNVAGWILGNPECELLISKESWSYIVETPNPENGTCYPGYFTDYEELREQLSSVSSFKRFEIFPKESSWPNHTVTGVSASCSHNGKSSFYRNLLWLTRKNGLYPNLSKSYTNDKEKEVLVLWGVHHPSNIGDQRALYHKENAYVSVVSSHYSRRFTPEIVKRPKVRDQEGRINYYWTLLEPGDTIIFEANGNLIAPRYAFALSRGFGSGIITSNAPMDECNTKCQTPQGAINSSLPFQNVHPVTIGECPKYVKSAKLRMVTGLRNTPSIQSRGLFGAIAGFIEGGWTGMVDGWYGYHHQNEQGSGYAADQKSTQNAINGITNKVNSVIEKMNTQFTAVGKEFNKLERRMENLNKKVDDGFLDIWTYNAELLVLLENERTLDFHDSNVKNLYEKVKNQLKNNAKEIGNGCFEFYHKCNDECMESVKNGTYDYPKYSEESKLNREKIDGVKLESMEVYQILAIYSTVASSLVFLVSLGAICFWMCSNGSLQCRICI

SEQ ID NO: 6351 - protein, 565 aa, Artificial Sequence
  derived and/or modified protein sequence (wt) from hemagglutinin__InfluenzaA__ADV69092
MKVKLLVLLCTFTATYADTICIGYHANNSTDTVDTVLEKNVTVTHSVNLLEDSHNGKLCLLKGIAPLQLGNCNVAGWILGNPECELLISKESWSYIVETPNPENGTCYPGYFTDYEELREQLSSVSSFKRFEIFPKESSWPNHTVTGVSASCSHNGKSSFYRNLLWLTGKNGLYPNLSKSYTNDKEKEVLVLWGVHHPSNIGDQRALYHKENAYVSVVSSHYSRRFTPEIVKRPKVRDQEGRINYYWTLLEPGDTIIFEANGNLIAPRYAFALSRGFGSGIITSNAPMDECNTKCQTPQGAINSSLPFQNVHPVTIGECPKYVKSAKLRMVTGLRNTLSIQSKGLFGAIAGFIEGGWTGMVDGWYGYHHQNEQGSGYAADQKSTQNAINGITNKVNSVIEKMNTQFTAVGKEFNKLERRMENLNKKVDDGFLDIWTYNAELLVLLENERTLDFHDSNVKNLYEKVKSQLKNNAKEIGNGCFEFYHKCNDECMESVKNGTYDYPKYSEESKLNREKIDGVKLESMEVYQILAIYSTVASSLVFLVSLGAICFWMCSNGSLQCRICI

SEQ ID NO: 6352 - protein, 565 aa, Artificial Sequence
  derived and/or modified protein sequence (wt) from hemagglutinin__InfluenzaA__ADV69093
MKVKLMVLLCTFTATYADTICVGYHANNSTDTVDTVLEKNVTVTHSVNLLEDSHNGKLCLLKGIAPLQLGSCSVAGWILGNPECELLISKESWSYIVETPNPENGTCYPGYVTDYEELREQLSSVSSFKRFEIFPKESSWPNHTVTGVSSSCSHNGKSSFYRNLLWLTVKNGLYPNLSKSYTNKKEKEVLVLWGVHHPSNIGDQRALYHTENAYVSVVSSHYSRRFTPEIAKRPKVRNQEGRINYYWTLLEPGDTIIFEANGNLIAPRYAFELSKGFGSGIITSNAPMGECNAKCQTPQGAINSSLPFQNVHPVTIGECPKYVKSAKLRMVTGLRNTPSIQSRGLFGAIAGFIEGGWTGMVDGWYGYHHQNEQGSGYAADQQSTQNAINGITNKVNSVIEKMNTQFTAVGKEFNKLERRMENLNKRVDDGFLDIWTYNAELLVLLENERTLDFHDSNVKNLYEKVKSQLKNNAKEIGNGCFEFYHKCNDECMESVKNGTYDYPKYSEESKLNREKIDGVKLESMGVYNILAIYSTVASSLVLLVSLGAISFWMCSNGSLQCRICI

SEQ ID NO: 6353 - protein, 565 aa, Artificial Sequence
  derived and/or modified protein sequence (wt) from hemagglutinin__InfluenzaA__ADV69094
MKVKLMVLLCTFTATYADTICVGYHANNSTDTVDTVLEKNVTVTHSVNLLEDSHNGKLCLLKGIAPLQLGSCSVAGWILGNPECELLISKESWSYIVETPNPENGTCYPGYFTDYEELREQLSSVSSFKRFEIFPKESSWPNHTVTGVSSSCSHNGKSSFYRNLLWLTVKNGLYPNLSKSYTNKKEKEVLVLWGVHHPSNIGDQRALYHTENAYVSVVSSHYSRRFTPEIAKRPKVRNQEGRINYYWTLLEPGDTIIFEANGNLIAPRYAFELSKGFGSGIITSNAPMGECNAKCQTPQGAINSSLPFQNVHPVTIGECPKYVKSAKLRMVTGLRNTPSIQSRGLFGAIAGFIEGGWTGMVHGWYGYHHQNEQGSGYAAEQQSTQYAINGITNKVNSVIEKMNTQFTAVGKEFNKLERRMENLNKRVDDGFLDIWTYNAELLVLLENERTLDFHDSNVKNLYEKVKSQLKNNAKEIGNGCFEFYHKCNDECMESVKNGTYDYPKYSEESKLNREKIDGVKLESMGVYNILAIYSTVASSLVLLVSLGAISFWMCSNGSLQCRICI

SEQ ID NO: 6354 - protein, 565 aa, Artificial Sequence
  derived and/or modified protein sequence (wt) from hemagglutinin__InfluenzaA__ADV69095
MKVKLMVLLCTFTATYADTICVGYHANNSTDTVDTVLEKNVTVTHSVNLLEDSHNGKLCLLKGIAPLQLGSCSVAGWILGNPECELLISKESWSYIVEPPNPENGTCYPGYFTDYEELREQLSSVSSFKRFEIFPKESSWPNHTVNGVSSSCSHNGESSFYRNLLWLTVKDGLYPNLSKSYTNKKEKEVLVLWGVHHPSNIGDQRALYHTENAYVSVVSSHYSRRFTPEIAKRPKVRNQEGRINYYWTLLEPGDTIIFEANGNLIAPRYAFELSKGFGSGIITSNAPMGECNAKCQTPQGAINSSLPFQNVHPVTIGECPKYVRSTKLRMVTGLRNTPSIQSRGLFGAIAGFIEGGWTGMVDGWYGYHHQNEQGSGYAADQQSTQNAINGITNKVNSVIEKMNTQFTAVGKEFNKLERRMENLNKKIDDGFLDIWTYNAELLVLLENERTLDFHDSNVKNLYEKVKSQLKNNAKEIGNGCFEFYHKCNDECMESVKNGTYDYPKYSEESKLNREKIDGVKLESMGVYNILAIYSTVASSLVLLVSLGAISFWMCSNGSLQCRICI

SEQ ID NO: 6355 - protein, 565 aa, Artificial Sequence
  derived and/or modified protein sequence (wt) from hemagglutinin__InfluenzaA__ADV69096
MKVKLMVLLCTFTATYADTICVGYHANNSTDTVDTVLEKNVTVTHSVNLLEDSHNGKLCLLKGIAPLQLGSCSVAGWILGNPECELLISKESWSYIVETPNPENGTCYPGYVTDYEELREQLSSVSSFKRFEIFPKESSWPNHTVTGVSSSCSHNGKSSFYRNLLWLTVKNGLYPNLSKSYTNKKEKEVLVLWGVHHPSNIGDQRALYHTENAYVSVVSSHYSRRFTPEIAKRPKVRNQEGRINYYWTLLEPGDTIIFEANGNLIAPRYAFELSKGFGSGIITSNAPMGECNAKCQTPKGAINSSLPFQNVHPVTIGECPKYVKSAKLRMVTGLRNTPSIQSRGLFGAIAGFIEGGWTGMVDGWYGYHHQNEQGSGYAADQQSTQNAINGITNKVNSVIEKMNTQFTAVGKEFNKLERRMENLNKKVDDGFLDIWTYNAELLVLLENERTLDFHESNVKNLYEKVKSQLKNNAKEIGNGCFEFYHKCNDECMESVKNGTYDYPKYSEESKLNREKIDGVKLESMGVYNILAIYSTVASSLVLLVSLGAISFWMCSNGSLQCRICI

SEQ ID NO: 6356 - protein, 565 aa, Artificial Sequence
  derived and/or modified protein sequence (wt) from hemagglutinin__InfluenzaA__ADV69097
MKVKLLILLCTFTATYADTICIGYHANNSTDTVDTVLEKNVTVTHSVNLLEDSHNGKLCLLKGIAPLQLGNCSVAGWILGNPECELLISKKSWSYIVETPNPGNGACYPGYFADYEELREQLSSVSSFERFEIFPKESSWSNHNVNGVSASCSHNGKSSFYRNLLWLTGKNGLYPTLTKSYANDKEKEVLILWGVHHPSNIGDQRTLYHTENAYVSVMSSHYSRRFTPEISKRPKVRDQEGRINYYWTLLEPGDTIIFEANGNLIAPWYAFALSRGFGSGIITSNAPMDECDAKCQTPQGAINSSLPFQNIHPVTIGECPKYVRSAKLRMVTGLRNTPSIQSRGLFGAIAGFIEGGWTGMVDGWYGYHHQNEQGSGYAADQESTQNAINEITNKENSVIEKMNTQFTSVGKEFNKLERRMENLNKKVDDGFLDIWTYNAELLVLLENERTLDFHDSNVKSLYEKVKIQLKNNAKEIGNGCFEFYHKCNNECMESVRNGTYDYPKYSEESKLNREKIDGVKLDSMGVYQILAIYSTVASSLVLLVSLGAISFWMCSNGSLQCRICI

SEQ ID NO: 6357 - protein, 565 aa, Artificial Sequence
  derived and/or modified protein sequence (wt) from hemagglutinin__InfluenzaA__ADV69098
MKVKLIVLLCTFTATYADTICVGYHANNSTDTVDTVLEKNVTVTHSVNLLEDSHNGKLCLLKGIAPLQLGSCSVAGWILGNPECELLISKESWSYIVETPNPENGTCYPGYFTDYEELREQLSSVSSFKRFEIFPKESSWPNHTVTGVSSSCSHNGNSSFYRNLLWLTVKNGLYPNLSKSYTNKKEKEVLVLWGVHHPSNIEDQRALYHTENAYVSVVSSHYSRRFNPEIAKRPKVRNQEGRINYYWTLLEPGDTIIFEANGNLIAPRYAFELSKGFGSGIITSNAPMGECNAKCQTPQGAINSNLPFQNVHPVTIGECPKYVRSAKLRMVTGLRNTPSIQSRGLFGAIAGFIEGGWTGMVDGWYGYHHHNEQGSGYAANQKSTPNAINGITNKVNSVIEKMNTQFTAVGKEFNKLERRMENLNKKVDDGFLDIWTYNAELLVLLENERTLDFHDSNVKNLYEKVRSQLKNNAKEIGNGCFEFYHKCNDECMESVKNGTYDYPKYSEESKLNREKIDGVKLESMGVYNILAIYSTVASSLVLLVSLGAISFWMCSNGSLQCRICI

SEQ ID NO: 6358 - protein, 565 aa, Artificial Sequence
  derived and/or modified protein sequence (wt) from hemagglutinin__InfluenzaA__ADV69099
MKVKLIVLLCTFTATYADTICVGYHANNSTDTVDTVLEKNVTVTHSVNLLEDSHNGKLCLLKGIAPLQLGSCSVAGWILGNPECELLISKESWSYIVETPNPENGTCYPGYFTDYEELREQLSSVSSFKRFEIFPKESSWPNHTVTGVSSSCSHNGNSSFYRNLLWLTVKNGLYPNLSKSYTNKKEKEVLVLWGVHHPSNIEDQRALYHTENAYVSVVSSHYSRRFNPEIAKRPKVRNQEGRINYYWTLLEPGDTIIFEANGNLIAPRYAFELSKGFGSGIITSNAPMGECNAKCQTPQGAINSNLPFQNVHPVTIGECPKYVRSAKLRMVTGLRNTPSIQSRGLFGAIAGFIEGGWTGMVNGWYGYHHHNEQGSGYAANQQSPPNAINGITNKVNSVIEKMNTQFTAVGKEFNKLERRMENLNKKVDDGFLDIWTYNAELLVLLENERTLDFHDSNVKNLYEKVRSQLKNNAKEIGNGCFEFYHKCNDECMESVKNGTYDYPKYSEESKLNREKIDGVKLESMGVYNILAIYSTVASSLVLLVSLGAISFWMCSNGSLQCRICI

SEQ ID NO: 6359 - protein, 565 aa, Artificial Sequence
  derived and/or modified protein sequence (wt) from hemagglutinin__InfluenzaA__ADV69100
MKVKLLILLCTFTATYADTICIGYHANNSTDTVDTVLEKNVTVTHSVNLLEDSHNGKLCLLKGIAPLQLGNCSVAGWILGNPECESLISKKSWSYIVETPKPENGTCYPGEFADYEELREQLSSVSSFERFEIFPKESSWPNHTAAGVSASCSHNGERSFYKNLIWLTVKNGLYPNLSKSYKNDKEKEVLILWGVHHPPNIENQRTLYHTENTYVSVVSSHYSGRFTPEITKRPKVRDQEGRINYYWTLLEPGDTIIFEANGNLIAPWYAFTLSRGLGSGIVTSNAPMDKCDAKCQTPHGAINSSLPFQNVHPVTIGECPKYVRSAKLRMVTGLRNIPSIQSRGLFGAIAGFIEGGWTGMVDGWYGYHHQNEQGSGYAADQESTQNAINGITNKVNSVIEKMNTQFTAVGKEFNKLERRMENLNKKVDDGFLDIWTYNAELLVLLENERTLDFHDSNVKSLYEKVKSQLKNNAKEIGNGCFEFYHKCNNECMESVKNGTYDYPKYSEESKLNREKIDGVKLDSMGVYRILAIYSTVASSLVLLVSLGAISFWMCSNGSLQCRICI

SEQ ID NO: 6360 - protein, 565 aa, Artificial Sequence
  derived and/or modified protein sequence (wt) from hemagglutinin__InfluenzaA__ADV69101
MKVKLLILFCTFTATYADTICIGYHANNSTDTVDTVLEKNVTVTHSVNLLEDSHNGKLCLLKGIAPLQLGNCSVAGWILGNPECESLISKKSWSYIVETPNPENGACYPGEFADYEELREQLSSVSSFERFEIFPKESSWPNHTATGVSASCSHNGERSFYRNLIWLTVKNGLYPNLSKSYENDKEKEVLILWGVHHPPNIENQRTLYHTENAYVSVVSSHYSGRFTPEITKRPKVRDQEGRINYYWTLLEPGDTIIFEANGNLIAPWYAFTLSRGLGSGIITSNAPMDECDSKCQTPQGAINSSLPFQNVHPVTIGECPKYVRSAKLRMVTGLRNIPSIQSRGLFGAIAGFIEGGWTGMVDGWYGYHHQNEQGSGYAADQESTQNAINGITNKVNSVIEKMNPQFTAVGKEFNKLERRMENLNKKVDDGFLDIWTYNAELLVLLENERTLDFHDSNVKSLYEKVKSQLKNNAKEIGNGCFEFYHKCNNECMESVKNGTYDYPKYSEESKLNREKIDGVKLDSMGVYRILAIYSTVASSLVLLVSLGAISFWMCSNGSLQCRICI

SEQ ID NO: 6361 - protein, 565 aa, Artificial Sequence
  derived and/or modified protein sequence (wt) from hemagglutinin__InfluenzaA__ADV69102
MKVKLLILFCTFTATYADTICIGYHANNSTDTVDTVLEKNVTVTHSVNLLEDSHNGKLCLLKGIAPLQLGNCSVAGWILGNPECESLISKKSWSYIVETPNPENGACYPGEFADYEELREQLSSVSSFERFEIFPKESSWPNHTATGVSASCSHNGERSFYRNLIWLTVKNGLYPNLSKSYENDKEKEVLILWGVHHPPNIENQRTLYHTENAYVSVVSSHYSGRFTPEITKRPKVRDQEGRINYYWTLLEPGDTIIFEANGNLIAPWYAFTLSTGLGSGIITSNAPMDECDSKCQTPQGAINSSLPFQNVHPVTIGECPKYVRSAKLRMVTGLRNIPSIQSRGLFGAIAGFIEGGWTGMVDGWYGYHHQNEQGSGYAADQESTQNAINGITNKVNSVIEKMNTQFTAVGKEFNKLERRMENLNKKVDDGFLDIWTYNAELLVLLENERTLDFHDSNVKSLYEKVKSQLKNNAKEIGNGCFEFYHKCNNECMESVKNGTYDYPKYSEESKLNREKIDGVKLDSMGVYRILAIYSTVASSLVLLVSLGAISFWMCSNGSLQCRICI

SEQ ID NO: 6362 - protein, 565 aa, Artificial Sequence
  derived and/or modified protein sequence (wt) from hemagglutinin__InfluenzaA__ADV69103
MKVKLMVLLCTFTATYADTICVGYHANNSTDTVDTVLEKNVTVTHSVNLLEDSHNGKLCLLKGIAPLQLGSCSVAGWILGNPECELLISKESWSYIVETPNPENGTCYPGYFTDYEELREQLSSVSSFKRFEIFPKESSWPNHNVTGVSSSCSHNGKSSFYRNLLWLTVKNGLYPNLSKSYTNKKEKEVLVLWGVHHPSNIGDQRALYHTENAYVSVVSSHYSRRFTPEIAKRPKVRNQEGRINYYWTLLEPGDTIIFEANGNLIAPRYAFELSKGFGSGIITSNAPIGECNAKCQTPQGAINSSLPFQNVNPVTIGECPKYVKSAKLRMVTGLRNTPSIQSRGLFGAIAGFIEGGWTGMVDGWYGYHHQNEQGSGYAADQQSTQNAINGITNKVNSVIEKMNTQFTAVGKEFNKLERRMENLNKKVDDGFLDIWTYNAELLVLLENERTLDFHDSNVKNLYEKVKSQLKNNAKEIGNGCFEFYHKCNDECMESVKNGTYDYPKYSEESKLNREKIDGVKLESMGVYNILAIYSTVASSLVLLVSLGAISFWMCSNGSLQCRICI

SEQ ID NO: 6363 - protein, 565 aa, Artificial Sequence
  derived and/or modified protein sequence (wt) from hemagglutinin__InfluenzaA__ADV69104
MKVKLLILFCTFTATYADTICIGYHANNSTDTVDTVLEKNVTVTHSVNLLEDSHNGKLCLLKGIAPLQLGNCSVAGWILGNPECESLISKKSWSYIVETPNPENGACYPGEFADYEELREQLSSVSSFERFEIFPKESSWPNHTATGVSASCSHNGERSFYRNLIWLTVKNGLYPNLSKSYENDKEKEVLILWGVHHPPNIENQRTLYHTENAYVSVVSSHYSGRFTPEITKRPKVRDQEGRINYYWTLLEPGDTIIFEANGNLIAPWYAFTLSRGLGSGIITSNAPMDECDSKCQTPQGAINSSLPFQNVHPVTIGECPKYVRSAKLRMVTGLRNIPSIQSRGLFGAIAGFIEGGWTGMVDGWYGYHHQNEQGSGYAADQESTQNAINGITNKVNSVIEKMNTQFTAVGKEFNKLERRMENLNKKVDDGFLDIWTYNAELLVLLENERTLDFHDSNVKSLYEKVKSQLKNNAKEIGNGCFEFYHKCNNECMESVKNGTYDYPKYSEESKLNREKIDGVKLDSMGVYRILAIYSTVASSLVLLVSLGAISFWMCSNGSLQCRICI

SEQ ID NO: 6364 - protein, 565 aa, Artificial Sequence
  derived and/or modified protein sequence (wt) from hemagglutinin__InfluenzaA__ADV69105
MKVKLLILLCTFTATYADTICIGYHANNSTDTVDTVLEKNVTVTHSVNLLEDSHNGKLCLLKGIAPLQLGNCSVAGWILGNPECESLISKKSWSYIVETPNPENGACYPGEFADYEELREQLSSVSSFERFEIFPKESSWPNHTAAGVSASCSHNGERSFYRNLIWLTVKNGLYPNLSKSYKNDKEKEVLIIWGVHHPPNIENQRTLYHTENAYVSVVSSHYSGRFTPEITKRPKVRDQEGRINYYWTLLEPGDTIIFEANGNLIAPWYAFTLSRGLGSGIITSNAPMDECDAKCQTPQGAINSSLPFQNVHPVTIGECPKYVRSAKLRMVTGLRNIPSIQSRGLFGAIAGFIEGGWTGMVDGWYGYHHQNEQGSGYAADQESTQNAINGITNKVNSVIEKMNTQFTAVGKEFNKLERRMENLNKKVDDGFLDIWTYNAELLVLLENERTLDFHDSNVKSLYEKVKSQLKNNAKEIGNGCFEFYHKCNNECMESVKNGTYDYPKYSEESKLNREKIDGVKLDSMGVYRILAIYSTVASSLVLLVSLGAISFWMCSNGSLQCRICI

SEQ ID NO: 6365 - protein, 565 aa, Artificial Sequence
  derived and/or modified protein sequence (wt) from hemagglutinin__InfluenzaA__ADV69106
MKVKLLILLCTFTATYADTICIGYHANNSTDTVDTVLEKNVTVTHSVNLLEDSHNGKLCLLKGIAPLQLGNCSVAGWILGNPECESLISKKSWSYIVETPNPGNGACYPGYFADYEELREQLSSVSSFERFEMFPKESSWPNHNVNGVSASCSHNGKSSFYRNLLWLTRKNGLYPNLTKSYANNNDKEVLILWGVHHPSNIGDQRTLYHTENAYVSVMSSHYSRRFTPEITKRPKVRDQEGRINYYWTLLEPGDTIIFEANGNLIAPWYAFALSRSFGSGIITSSAPMDECDAKCQTPQGAINSSLPFQNVHPVTIGECPKYVRSAKLKMVTGLRNIPSIQSRGLFGAIAGFIEGGWTGMVDGWYGYHHQNEQGSGYAADQESTQNAINGITNKVNSVIEKMNTQFTAVGKEFNKLEKRMENLNKKVDDGFLDIWTYNAELLVLLENERTLDFHDSNVKSLYEKVKIQLKNNAKEIGNGCFEFYHKCNNECMESVRNGTYDYPKYSEESKLNREKIDGVKLDSMGVYQILAIYSTVASSLVLLVSLGAISFWMCSNGSLQCRICI

SEQ ID NO: 6366 - protein, 565 aa, Artificial Sequence
  derived and/or modified protein sequence (wt) from hemagglutinin__InfluenzaA__ADV69107
MKVKLLILLCTFTATYADTICIGYHANNSTDTVDTVLEKNVTVTHSVNLLEDSHNGKLCLLKGIAPLQLGNCSVAGWILGNPECESLISKESWSYIVETPNSDNGACYPGQFTDYEELREQLSSVSSFERFEIFPKESSWPNHTVTGVSASCSHNGERSFYRNLIWLTVKNGLYPNLSKSYENDKEKEVLILWGVHHPPNIGDQRTLYHTENAYISVVSSHYSGRFTPEITKRPKVRDQEGRINYYWTLLEPGDTIIFEANGNLIAPWYAFALSRGLGSGIITSNAPMDKCDAKCQTPQGAINSSLPFQNVHPVTIGECPKYVRSTKLRMVTGLRNIPSIQSRGLFGAIAGFIEGGWTGMVDGWYGYHHQNEQGSGYAADQESTQNAINGITNKVNSVIEKMNTQFTAVGKEFNKLERRMENLNKKVDDGFLDIWTYNAELLVLLENERTLDFHDSNVKSLYEKVKSQLKNNAKEIGNGCFEFYHKCNNECMESVRNGTYDYPKYSEESKLNREKIDGVKLDSMGVYRILAIYSTAASSLVLLVSLGAISFWMCSNGSLQCRICI

SEQ ID NO: 6367 - protein, 565 aa, Artificial Sequence
  derived and/or modified protein sequence (wt) from hemagglutinin__InfluenzaA__ADV69108
MKVKLLVLLCTFTATYADTICVGYHANNSTDTVDTVLEKNVTVTHSVNLLEDSHNGKLCLLKGIAPLQLGSCSVAGWILGNPECELLISKESWSYIVETPNPENGTCYPGYFTDYEELREQLSSVSSFKRFEIFPKESSWPNHTVTGVSSSCSHNGKSSFYRNLLWLTMKNGLYPNLSKSYTNKKEKEVLVLWGVHHPSNIGDQRALYHTENAYVSVVSSHYSRRFTPEIAKRPKVRNQEGRINYYWTLLEPEDTIIFEANGNLIAPRYAFELSKGFGSGIITSNAPMGECNAKCQTPQGAINSSLPFQNVHPVTIGECPKYVRSSKLRMVTGLRNTPSIQSRGLFGAIAGFIEGGWTGMVDGWYGYHHQNEQGSGYAADQQSTQNAINGITNKVNSVIEKMNTQFTAVGKEFNKLERRMENLNKKIDDGFLDIWTYNAELLVLLENERTLDFHDSNVKNLYEKVKSQLKNNAKEIGNGCFEFYHKCNDECMESVKNGTYDYPKYSEESKLNREKIDGVKLESMGVYNILAIYSTVASSLVLLVSLGAISFWMCSNGSLQCRICI

SEQ ID NO: 6368 - protein, 565 aa, Artificial Sequence
  derived and/or modified protein sequence (wt) from hemagglutinin__InfluenzaA__ADV69109
MKVKLLILLCTFKATYADTICIGYHANNSTETVDTVLEKNVTVTHSVNLLEDSHNGKLCLLKGIAPLQLGNCSVAGWILGNPECESLISKKSWSYIVETPNPENGACYPGEFADYEELREQLSSVSSFERFEIFPKESSWPNHTATGVSASCSHNGERSFYRNLIWLTVKNGLYPNLSKSYENDKKKEVLILWGVHHPPNIENQRTLYHTENAYVSVVSSHYSGRFTPEITKRPKVRDQEGRINYYWTLLEPGDTIIFEANGNLIAPWYAFTLSRGLGSGIITSNAPMDECDAKCQTPKGAINSSLPFQNVHPVTIGECPKYVRSAKLRMVTGLRNIPSIQSRGLFGAIAGFIEGGWTGMVDGWYGYHHQNEQGSGYAADQESTQNAINGITNKVNSVIEKMNTQFTAVGKEFNKLERRMENLNKKVDDGFLDIWTYNAELLVLLENERTLDFHDSNVKSLYEKVKSQLKNNAKEIGNGCFEFYHKCNNECMESVKNGTYDYPKYSEESKLNREKIDGVKLDSMGVYRILAIYSTVASSLVLLVSLGAISFWMCSNGSLQCRICI

SEQ ID NO: 6369 - protein, 566 aa, Artificial Sequence
  derived and/or modified protein sequence (wt) from hemagglutinin__InfluenzaA__ADV76579
MKTIIALSYILCLVFAQKLPGNDDSTATLCLGHHAVPNGTIVKTITNDQIEVTNATELVQSSSTGEICDSPHQILDGENCTLIDALLGDPQCDGFQNKKWDLFVERSKAYSNCYPYDVPDYASLRSLVASSGTLEFNNESFNWTGVTQNGTSSACIRRSNNSFFSRLNWLTHLRFKYPALNVTMPNNEQFDKLYIWGVHHPGTDNDQIFLYAQASGRITVSTKRSQQTVIPNIGSRPRVRNIPSRISIYWTIVKPGDILLINSTGNLIAPRGYFKIRSGKSSIMRSDAPIGKCNSECITPNGSIPNDKPFQNVNRITYGACPRYVKQNTLKLATGMRNVPEKQTRGIFGAIAGFIENGWEGMVDGWYGFRHQNSEGRGQAADLKSTQAAIDQINGKLNRLIGKTNEKFHQIEKEFSEVEGRIQDLEKYVEDTKIDLWSYNAELLVALENQHTIDLTDSEMNKLFEKTKKQLRENAEDMGNGCFKIYHKCDNACIGSIRNGTYDHDVYRDEALNNRFQIKGVELKSGYKDWILWISFAISCFLLCVALLGFIMWACQKGNIRCNICI

SEQ ID NO: 6370 - protein, 566 aa, Artificial Sequence; identical to SEQ ID NO: 3588
  derived and/or modified protein sequence (wt) from hemagglutinin__InfluenzaA__ADV76587

SEQ ID NO: 6371 - protein, 566 aa, Artificial Sequence; identical to SEQ ID NO: 3588
  derived and/or modified protein sequence (wt) from hemagglutinin__InfluenzaA__ADV76598

SEQ ID NO: 6372 - protein, 566 aa, Artificial Sequence; identical to SEQ ID NO: 3411
  derived and/or modified protein sequence (wt) from hemagglutinin__InfluenzaA__ADV76609

SEQ ID NO: 6373 - protein, 566 aa, Artificial Sequence; identical to SEQ ID NO: 3588
  derived and/or modified protein sequence (wt) from hemagglutinin__InfluenzaA__ADV76620

SEQ ID NO: 6374 - protein, 566 aa, Artificial Sequence
  derived and/or modified protein sequence (wt) from hemagglutinin__InfluenzaA__ADV76631
MKTIIALSYILCLVFAQKLPGNDNSTATLCLGHHAVPNGTIVKTITNDQIEVTNATELVQSSSTGEICDSPHQILDGKNCTLIDALLGDPQCDGFQNKKWDLFVERSKAYSNCYPYDVPDYASLRSLVASSGTLEFNNESFNWTGVTQNGTSSACIRRSKNSFFSRLNWLTHLNFKYPALNVTMPNNEQFDKLYIWGVHHPGTDKDQIFLYAQASGRITVSTKRSQQTVIPNIGSRPRVRNIPSRISIYWTMVKPGDILLINSTGNLIAPRGYFKIRSGKSSIMRSDTPIGKCNSECITPNGSIPNDKPFQNVNRITYGACPRYVKQNTLKLATGMRNVPEKQTRGIFGAIAGFIENGWEGMVDGWYGFRHQNSEGRGQAADLKSTQAAIDQINGKLNRLIGKANEKFHQIEKEFSEVEGRIQDLEKYVEDTKIDLWSYNAELLVALENQHTIDLTDSEMNKLFEKTKKQLRENAEDMGNGCFKIYHKCDNACIGSIRNGTYDHDVYRDEALNNRFQIKGVELKSGYKDWILWISFAISCFLLCVALLGFIMWACQKGNIRCNICI

SEQ ID NO: 6375 - protein, 566 aa, Artificial Sequence; identical to SEQ ID NO: 5592
  derived and/or modified protein sequence (wt) from hemagglutinin__InfluenzaA__ADV76642

SEQ ID NO: 6376 - protein, 566 aa, Artificial Sequence; identical to SEQ ID NO: 5596
  derived and/or modified protein sequence (wt) from hemagglutinin__InfluenzaA__ADV76664

SEQ ID NO: 6377 - protein, 566 aa, Artificial Sequence
  derived and/or modified protein sequence (wt) from hemagglutinin__InfluenzaA__ADV76673
MKTIIALSYIFCLALGQDLPGNDNSTATLCLGHHAVPNGTLVKTITDDQIEVTNATELVQSSSTGKICNNPHRILDGIDCTLIDALLGDPHCDVFQNETWDLFVERSKAFSNCYPYDVPDYASLRSLVASSGTLEFITEGFTWTGVTQNGGSNACKRGPGSGFFSRLNWLTKSGSTYPVLNVTMPNNDNFDKLYIWGVHHPSTNQEQTSLYVQASGRVTVSTRRSQQTIIPNIESRPWVRGLSSRISIYWTIVNPGDVLVINSNGNLIAPRGYFKMRTGKSSIMRSDAPIDTCISECITPNGSIPNDKPFQNVNKITYGACPKYVKQNTLKLATGMRNVPEKQTRGLFGAKAGFIENGWEGMIDGWYGFRHQNSEGTGQAADLKSTQAAIDQINGKLNRVIEKTNEKFHQIEKEFSEVEGRIQDLEKYVEDTKIDLWSYNAELLVALENQHTIDLTDSEMNKLFEKTRRQLRENAEDMGNGCFKIYHKCDNACIESIRNGTYDHDVYRDEALNNRFQIKGVELKSGYKDWILWISFAISCFLLCVVLLGFIMWACQRGNIRCNICI

SEQ ID NO: 6378 - protein, 566 aa, Artificial Sequence
  derived and/or modified protein sequence (wt) from hemagglutinin__InfluenzaA__ADV76682
MKTIIALSYILCLVFAQKLPGNDNSTATLCLGHHAVPNGTIVKTITNDQIEVTNATELVQSSSTGEICDSPHQILDGENCTLIDALLGDPQCDGFQNKKWDLFVERSKAYSNCYPYDVPDYASLRSLVASSGTLEFNNESFNWTGVTQNGTSSACIRRSNNSFFSRLNWLTHLNFKYPALNVTMPNNEQFDKLYIWGVHHPGTDKDQIFLYAQASGRITVSTKRSQQAVIPNIGSRPRVRNIPSRISIYWTIVKPGDILLINSTGNLIAPRGYFKIRSGESSIMRSDAPIGKCNSECITPNGSIPNDKPFQNVNRITYGACPRYVKQNTLKLATGMRNVPEKQTRGIFGAIAGFIENGWEGMVDGWYGFRHQNSEGRGQAADLKSTQAAIDQINGKLNRLIGKTNEKFHQIEKEFSEVEGRIQDLEKYVEDTKIDLWSYNAELLVALENQHTIDLTDSEMNKLFEKTKKQLRENAEDMGNGCFKIYHKCDNACIGSIRNGTYDHDVYRDEALNNRFQIKGVELKSGYKDWILWISFAISCFLLCVALLGFIMWACQKGNIRCNICI

SEQ ID NO: 6379 - protein, 566 aa, Artificial Sequence; identical to SEQ ID NO: 3613
  derived and/or modified protein sequence (wt) from hemagglutinin__InfluenzaA__ADV76694

SEQ ID NO: 6380 - protein, 566 aa, Artificial Sequence; identical to SEQ ID NO: 3411
  derived and/or modified protein sequence (wt) from hemagglutinin__InfluenzaA__ADV76705

SEQ ID NO: 6381 - protein, 566 aa, Artificial Sequence; identical to SEQ ID NO: 3613
  derived and/or modified protein sequence (wt) from hemagglutinin__InfluenzaA__ADV76716

SEQ ID NO: 6382 - protein, 566 aa, Artificial Sequence
  derived and/or modified protein sequence (wt) from hemagglutinin__InfluenzaA__ADV76727
MKTIIALSYILCLVFAQKLPGNDNSTATLCLGHHAVPNGTIVKTITNDQIEVTNATELVQSSSTGEICDSPHQILDGKNCTLIDALLGDPQCDGFQNKKWDLFVERSKAYSNCYPYDVPDYASLRSLVASSGTLEFNNESFNWTGVTQNGKSSACIRRSKNSFFSRLNWLTHLNFKYPALNVTMPNNEQFDKLYIWGVHHPGTDKDQIFLYAQASGRITVSTKRSQQTVIPNIGSRPRVRNIPSRISIYWTIVKPGDILLINSTGNLIAPRGYFKIRSGKSSIMRSDAPIGKCNSECITPNGSIPNDKPFQNVNRITYGACPRYVKQNTLKLATGMRNVPEKQTRGIFGAIAGFIENGWEGMVDGWYGFRHQNSEGRGQAADLKSTQAAIDQINGKLNRLIGKTNEKFHQIEKEFSEVEGRIQDLEKYVEDTKIDLWSYNAELLVALENQHTIDLTDSEMNKLFEKTKKQLRENAEDMGNGCFKIYHKCDNACIGSIRNGTYDHDVYRDEALNNRFQIKGVELKSGYKDWILWISFAISCFLLCVALLGFIMWACQKGNIRCNICI

SEQ ID NO: 6383 - protein, 566 aa, Artificial Sequence
  derived and/or modified protein sequence (wt) from hemagglutinin__InfluenzaA__ADV91009
MKAILAVLLYTFATANADTLCIGYHANNSTDTVDTVLEKNVTVTHSVNLLEDKHNGKLCKLRGIAPLHLGKCNIAGWILGNPECESLSTASSWSYIVETPSSDNGTCYPGDFIDYEELREQLSSVSSFERFEIFPKTSSWPNHDSNKGVTAACPHAGAKSFYKNLIWLVKKGNSYPKLSKSYINDKGKKVLVLWGIHHPSTSADQQSLYQNADAYVFVGTSRYSKKFKPEIAIRPKVRDQEGRMNYYWTLVEPGDKITFEATGNLVVPRYAFAMERNAGSGIIISDTPVHDCNTTCQTPKGAINTSLPFQNIHPITIGKCPKYVESTKLRLATGLRNVPSIQSRGLFGAIAGFIEGGWTGMVDGWYGYHHQNEQGSGYAADLKSTQNAIDKITNKVNSVIEKMNTQFTAVGKEFNHLEKRIENLNKKVDDGFLDIWTYNAELLVLLENERTLDYHDSNVKNLYEKVRSQLKNNAKEIGNGCFEFYHKCDNTCMESVKNGTYDYPKYSEEAKLNREEIDGVKLESTRIYQILAIYSTVASSLVLVVSLGAISFWMCSNGSLQCRICI

SEQ ID NO: 6384 - protein, 566 aa, Artificial Sequence
  derived and/or modified protein sequence (wt) from hemagglutinin__InfluenzaA__ADV91010
MKAILVVLLYTFATANADTLCIGYHANNSTDTVDTVLEKNVTVTHSVNLLEDKHNGKLCKLRGVAPLHLGKCNIAGWILGNPECESLSTASSWSYIVETSSSDNGTCYPGDFTDYEELREQLSSVSSFERFEIFPKTSSWPNHDSNKGVTTACPHAGAKSFYKNLIWLVKKGNSYPKLSKSYINDKGKEVLVLWGIHHPPTSADQQSLYQNADAYVFVGTSRYSKKFKPEIAIRPKVRDQEGRMNYYWTLVEPGDKITFEATGNLVVPRYAFAMERNAGSGIIISDTPVHDCNTTCQTPKGAINTSLPFQNIHPITIGKCPKYVKSTKLRLATGLRNVPSIQSRGLFGAIAGFIEGGWTGMVDGWYGYHHQNEQGSGYAADLKSTQNAIDEITNKVNSVIEKMNTQFTAVGKEFNHLEKRIENLNKKVDDGFLDIWTYNAELLVLLENERTLDYHDSNVKNLYEKVRSQLKNNAKEIGNGCFEFYHKCDNTCMESVKNGTYDYPKYSEEAKLNREEIDGVKLESTRIYQILAIYSTVASSLVLVVSLGAISFWMCSNGSLQCRICI

SEQ ID NO: 6385 - protein, 566 aa, Artificial Sequence
  derived and/or modified protein sequence (wt) from hemagglutinin__InfluenzaA__ADW01407
MEAKLFVLFCAFTALKADTICVGYHANNSTDTVDTILEKNVTVTHSVNLLENSHNGKLCSLNGKIPLQLGNCNVAGWILGNPKCDLLLTANSWSYIIETSNSKNGACYPGEFADYEELKEQLSTVSSFERFEIFPKATSWPNHDTTRGTTVACSHSGANSFYRNLLWIVKKGNSYPKLSKSYTNNKGKEVLVIWGVHHPPTDSDQQTLYQNNHTYVSVGSSKYYKRLTPEIVARPKVREQAGRMNYYWTLLDQGDTITFEATGNLIAPWHAFALKKGSSSGIMRSDAQVHNCTTKCQTPHGALKGNLPFQNVHPVTIGECPKYVKSTQLRMATGLRNIPSIQSRGLFGAIAGFIEGGWTGMVDGWYGYHHRNEQGSGYAADQKSTQIAIDGISNKVNSVIEKMNIQFTSVGKEFNSLEKRMENLNKKVDDGFLDVWTYNAELLILLENERTLDFHDLNVKNLYEKVKSQLRNNAKEIGNGCFEFYHKCDNECMESVKNGTYNYPKYSEESKLNREEIDGVKLESMGIHQILAIYSTVASSLVLLVSLGAISFWMCSNGSLQCRVCI

SEQ ID NO: 6386 - protein, 565 aa, Artificial Sequence; identical to SEQ ID NO: 3131
  derived and/or modified protein sequence (wt) from hemagglutinin__InfluenzaA__ADW09101

SEQ ID NO: 6387 - protein, 565 aa, Artificial Sequence
  derived and/or modified protein sequence (wt) from hemagglutinin__InfluenzaA__ADW09111
MKVKLLVLLCTFTATYADTICIGYHANNSTDTVDTVLEKNVTVTHSVNLLENSHNGKLCLLKGIAPLQLGNCSVAGWILGNPECELLISKESWSYIVEKPNPENGTCYPGHFADYEELREQLSSVSSFERFEIFPKESSWPNHTVTGVSASCSHNGESSFYRNLLWLTGKNGLYPNLSKSYANNKEKEVLVLWGVHHPPNIVDQKTLYRTENAYVSVVSSHYSRKFTPEIAKRPKVRDQEGRINYYWTLLEPGDTIIFEANGNLIAPRYAFALSRGFGSGIINSNAPMDKCDAKCQTPRGAINSSLPFQNVHPVTIGECPKYVRSAKLRMVTGLRNIPSIQSRGLFGAIAGFIEGGWTGMVDGWYGYHHQNDQGSGYAADQKSTQNAINGITNKVNSVIEKMNTQFTAVGKEFNKLERRMENLNKKVDDGFIDIWTYNAELLVLLENERTLDFHDSNVKNLYEKVKSQLKNNAKEIGNGCFEFYHKCNDECMESVKNGTYDYPKYSEESKLNREKIDGVKLESMGVYQILAIYSTVASSLVLLVSLGAISFWMCSNGSLQCRICI

SEQ ID NO: 6388 - protein, 565 aa, Artificial Sequence
  derived and/or modified protein sequence (wt) from hemagglutinin__InfluenzaA__ADW09120
MKVKLLVLLCTFTATYADTICIGYHANNSTDTVDTVLEKNVTVTHSVNLLENSHNGKLCLLKGIAPLQLGNCSVAGWILGNPECELLISKESWSYIVEKPNPENGTCYPGHFADYEELREQLSSVSSFERFEIFPKESSWPNHTVTGVSASCSHNGESSFYRNLLWLTVKNGLYPNLSKSYANNKEKEVLVLWGVHHPPNIVDQKTLYHTENAYVSVVSSHYSRKFTPEIAKRPKVRDQEGRINYYWTLLEPGDTIIFEANGNLIAPRYAFALSKGFGSGIINSNAPMDKCDAKCQTPRGAINSSLPFQNVHPVTIGECPKYVRSAKLRMVTGLRNIPSIQSRGLFGAIAGFIEGGWTGMVDGWYGYHHQNEQGSGYAADQKSTQNAINGITNKVNSVIEKMNTQFTAVGKEFNKLERRMENLNKKVDDGFIDIWTYNAELLVLLENERTLDFHDSNVKNLYEKVKSQLKNNAKEIGNGCFEFYHKCNDECMESVKNGTYDYPKYSEESKLNREKIDGVKLESMGVYQILAIYSTVASSLVLLVSLGAISFWMCSNGSLQCRICI

SEQ ID NO: 6389 - protein, 565 aa, Artificial Sequence; identical to SEQ ID NO: 3616
  derived and/or modified protein sequence (wt) from hemagglutinin__InfluenzaA__ADW09131

SEQ ID NO: 6390 - protein, 565 aa, Artificial Sequence
  derived and/or modified protein sequence (wt) from hemagglutinin__InfluenzaA__ADW09153
MKVKLLVLLCTFTATYADTICIGYHANNSTDTVDTVLEKNVTVTHSVNLLENSHNGKLCLLKGIAPLQLGNCSVAGWILGNPECELLISKESWSYIVEKPNPENGTCYPGHFADYEELREQLSSVSSFERFEIFPKESSWPNHTVTGVSASCSHNGESSFYRNLLWLTVKNGLYPNLSKSYANNKEKEVLVLWGVHHPPNIVDQKTLYRTENAYVSVVSSHYSRKFTPEIAKRPKVRDQEGRINYYWTLLEPGDTIIFEANGNLIAPRYAFALSRGFGSGIINSNAPMDKCDAKCQTPRGAINSSLPFQNVHPVTIGECPKYVRSAKLRMVTGLRNIPSIQSRGLFGAIAGFIEGGWTGMVDGWYGYHHQNEQGSGYAADQKSTQDAINGITNKVNSVIEKMNTQFTAVGKEFNKLERRMENLNKKVDDGFIDIWTYNAELLVLLENERTLDFHDSNVKNLYEKVKSQLKNNAKEIGNGCFEFYHKCNDECMESVKNGTYDYPKYSEESKLNREKIDGVKLESMGVYQILAIYSTVASSLVLLVSLGAISFWMCSNGSLQCRICI

SEQ ID NO: 6391 - protein, 565 aa, Artificial Sequence; identical to SEQ ID NO: 3616
  derived and/or modified protein sequence (wt) from hemagglutinin__InfluenzaA__ADW09164

SEQ ID NO: 6392 - protein, 565 aa, Artificial Sequence
  derived and/or modified protein sequence (wt) from hemagglutinin__InfluenzaA__ADW09186
MKVKLLVLLCTFTATYADTICIGYHANNSTDTVDTVLEKNVTVTHSVNLLENSHNGKLCLLKGIAPLQLGNCSVAGWILGNPECELLISKESWSYIVEKPNPENGTCYPGHFADYEELREQLSSVSSFERFEIFPKESSWPNHTVTGVSASCSHNGESSFYRNLLWLTGKNGLYPNLSKSYANNKEKEVLVLWGVHHPPNIVDQKTLYRTENAYVSVVSSHYSRKFTPEIAKRPKVRDQEGRINYYWTLLEPGDTIIFEANGNLIAPRYAFALSRGFGSGIINSNAPMDKCDAKCQTPQGAINSSLPFQNVHPVTIGECPKYVRSAKLRMVTGLRNTPSIQSRGLFGAIAGFIEGGWTGMVDGWYGYHHQNEQGSGYAADQKSTQNAINGITNKVNSVIEKMNTQFTAVGKEFNKLERRMENLNKKVDDGFIDIWTYNAELLVLLENERTLDFHDSNVKNLYEKVKSQLKNNAKEIGNGCFEFYHKCNDECMESVKNGTYDYPKYSEESKLNREKIDGVKLESMGVYQILAIYSTVASSLVLLVSLGAISFWMCSNGSLQCRICI

SEQ ID NO: 6393 - protein, 565 aa, Artificial Sequence; identical to SEQ ID NO: 3131
  derived and/or modified protein sequence (wt) from hemagglutinin__InfluenzaA__ADW09197

SEQ ID NO: 6394 - protein, 565 aa, Artificial Sequence; identical to SEQ ID NO: 3616
  derived and/or modified protein sequence (wt) from hemagglutinin__InfluenzaA__ADW09208

SEQ ID NO: 6395 - protein, 565 aa, Artificial Sequence; identical to SEQ ID NO: 3616
  derived and/or modified protein sequence (wt) from hemagglutinin__InfluenzaA__ADW09219

SEQ ID NO: 6396 - protein, 565 aa, Artificial Sequence; identical to SEQ ID NO: 3131
  derived and/or modified protein sequence (wt) from hemagglutinin__InfluenzaA__ADW09230

SEQ ID NO: 6397 - protein, 565 aa, Artificial Sequence
  derived and/or modified protein sequence (wt) from hemagglutinin__InfluenzaA__ADW09241
MKVKLLVLLCTFTATYADTICIGYHANNSTDTVDTVLEKNVTVTHSVNLLENSHNGKLCLLKGIAPLQLGNCSVAGWILGNPECELLISKESWSYIVEKPNPENGTCYPGHFADYEEMREQLSSVSSFERFEIFPKESSWPNHTVTGVSASCSHNGESSFYRNLLWLTVKNGLYPNLSKSYANNKEKEVLVLWGVHHPPNIVDQKTLYRTENAYVSVVSSHYSRKFTPEIAKRPKVRDQEGRINYYWTLLEPGDTIIFEANGNLIAPRYAFALSRGFGSGIINSNAPMDKCDAKCQTPRGAINSSLPFQNVHPVTIGECPKYVRSAKLRMVTGLRNIPSIQSRGLFGAIAGFIEGGWTGMVDGWYGYHHQNEQGSGYAADQKSTQNAINGITNKVNSVIEKMNTQFTAVGKEFNKLERRMENLNKKVDDGFIDIWTYNAELLVLLENERTLDFHDSNVKNLYEKVKSQLKNNAKEIGNGCFEFYHKCNDECMESVKNGTYDYPKYSEESKLNREKIDGVKLESMGVYQILAIYSTVASSLVLLVSLGAISFWMCSNGSLQCRICI

SEQ ID NO: 6398 - protein, 565 aa, Artificial Sequence; identical to SEQ ID NO: 3616
  derived and/or modified protein sequence (wt) from hemagglutinin__InfluenzaA__ADW09252

SEQ ID NO: 6399 - protein, 565 aa, Artificial Sequence
  derived and/or modified protein sequence (wt) from hemagglutinin__InfluenzaA__ADW09274
MKVKLLVLLCTFTATYADTICIGYHANNSTDTVDTVLEKNVTVTHSVNLLENSHNGKLCLLKGIAPLQLGNCSVAGWILGNPECELLISKESWSYIVEKPNPENGTCYPGHFADYEELREQLSSVSSFERFEIFPKESSWPNHTVTGVSASCSHNGESSFYRNLLWLTVKNGLYPNLSKPYANNKEKEVLVLWGVHHPPNIVDQKTLYRTENAYVSVVSSHYSRKFTPEIAKRPKVRDQEGRINYYWTLLEPGDTIIFEANGNLIAPRYAFALSRGFGSGIINSNAPMDKCDAKCQTPRGAINSSLPFQNVHPVTIGECPKYVRSAKLRMVTGLRNIPSIQSRGLFGAIAGFIEGGWTGMVDGWYGYHHQNEQGSGYAADQKSTQNAINGITNKVNSVIEKMNTQFTAVGKEFNKLERRMENLNKKVDDGFIDIWTYNAELLVLLENERTLDFHDSNVKNLYEKVKSQLKNNAKEIGNGCFEFYHKCNDECMESVKNGTYDYPKYSEESKLNREKIDGVKLESMGVYQILAIYSTVASSLVLLVSLGAISFWMCSNGSLQCRICI

SEQ ID NO: 6400 - protein, 565 aa, Artificial Sequence
  derived and/or modified protein sequence (wt) from hemagglutinin__InfluenzaA__ADW09285
MKVKLLVLLCTFTATYADTICIGYHANNSTDTVDTVLEKNVTVTHSVNLLENSHNGKLCLLKGIAPLQLGNCSVAGWILGNPECELLISKESWSYIVEKPNPENGTCYPGHFADYEELREQLSSVSSFERFEIFPKESSWPNHTVTGVSASCSHNGESSFYRNLLWLTGKNGLYPNLSKSYANNKEKEVLVLWGVHHPPNIVDQKTLYRTENAYVSVVSSHYSRKFTPEIAKRPKVRDQEGRINYYWTLLEPGDTITFEANGNLIAPRYAFALSRGFGSGIINSNAPMDKCDAKCQTPQGAINSSLPFQNVHPVTIGECPKYVRSAKLRMVTGLRNIPSIQSRGLFGAIAGFIEGGWTGMVDGWYGYHHQNEQGSGYAADQKSTQNAINGITNKVNSVIEKMNTQFTAVGKEFNKLERRMENLNKKVDDGFIDIWTYNAELLVLLENERTLDFHDSNVKNLYEKVKSQLKNNAKEIGNGCFEFYHKCNDECMESVKNGTYDYPKYSEESKLNREKIDGVKLESMGVYQILAIYSTVASSLVLLVSLGAISFWMCSNGSLQCRICI

SEQ ID NO: 6401 - protein, 565 aa, Artificial Sequence; identical to SEQ ID NO: 3616
  derived and/or modified protein sequence (wt) from hemagglutinin__InfluenzaA__ADW09296

SEQ ID NO: 6402 - protein, 565 aa, Artificial Sequence; identical to SEQ ID NO: 3131
  derived and/or modified protein sequence (wt) from hemagglutinin__InfluenzaA__ADW09307

SEQ ID NO: 6403 - protein, 565 aa, Artificial Sequence
  derived and/or modified protein sequence (wt) from hemagglutinin__InfluenzaA__ADW09327
MKVKLLVLLCTFTATYADTICIGYHANNSTDTVDTVLEKNVTVTHSVNLLENSHNGKLCLLKGIAPLQLGNCSVAGWILGNPECELLISKESWSYIVEKPNPENGTCYPGHFADYEELREQLSSVSSFERFEIFPKESSWPNHTVTGVSASCSHNGESSFYRNLLWLTGKNGLYPNLSKSYANNKEKEVLVLWGVHHPPNIVDQKTLYRTENAYVSVVSSHYSRKFTPEIAKRPKVRDQEGRINYYWTLLEPGDTIIFEANGNLIAPRYAFALSRGFGSGIINSNAPMDKCDAKCQTPQGAINSSLPFQNVHPVTIGECPKYVRSAKLRMVTGLRNIPSIQSRGLFGAIAGFIEGGWTGMVDGWYGYHHQNEQGSGYAADQKSTQNAINGITNKVNSVIEKMNTQFTAVGKEFNKLERRMENLNKKVDDGFIDIWTYNAELLVLLENERTLDFHDSNVKNLYEKVKSQLKNNAKEIGNGCFEFYHKCNNECMESVKNGTYDYPKYSEESKLNREKIDGVKLESMGVYQILAIYSTVASSLVLLVSLGAISFWMCSNGSLQCRICI

SEQ ID NO: 6404 - protein, 565 aa, Artificial Sequence; identical to SEQ ID NO: 3616
  derived and/or modified protein sequence (wt) from hemagglutinin__InfluenzaA__ADW10483

SEQ ID NO: 6405 - protein, 565 aa, Artificial Sequence
  derived and/or modified protein sequence (wt) from hemagglutinin__InfluenzaA__ADW10494
MKVKLLVLLCTFTATYADTICIGYHANNSTDTVDTVLEKNVTVTHSVNLLENSHNGKLCLLKGIAPLQLGNCSVAGWILGNPECELLISKESWSYIVEKPNPENGTCYPGHFADYEELREQLSSVSSFERFEIFPKESSWPNHTVTGVSASCSHNGESSFYRNLLWLTGKNGLYPNLSKSYANNKEKEVLVLWGVHHPPNIVDQKTLYRTENAYVSVVSSHYSRKFTPEIAKRPKVRDQEGRINYYWTLLEPGDTIIFEANGNLIAPRYAFALSRGFGSGIINSNAPMDKCDAKCQTPQGAINSSLPFQNVHPVTIGECPKYVRSAKLRMVTGLRNIPSIQSRGLFGAIAGFIEGGWTGMVDGWYGYHHQNEQGSGYAADQKSTQNAINGITNKVNSVIEKMNTQFTAVGKEFNKLERRMENLNKKVDDGFIDIWTYNAELLVLLENERTLDFHDSNVKNLYEKVKNQLKNNAKEIGNGCFEFYHKCNDECMESVKNGTYDYPKYSEESKLNREKIDGVKLESMGVYQILAIYSTVASSLVLLVSLGAISFWMCSNGSLQCRICI

SEQ ID NO: 6406 - protein, 565 aa, Artificial Sequence; identical to SEQ ID NO: 3616
  derived and/or modified protein sequence (wt) from hemagglutinin__InfluenzaA__ADW10505

SEQ ID NO: 6407 - protein, 565 aa, Artificial Sequence; identical to SEQ ID NO: 3616
  derived and/or modified protein sequence (wt) from hemagglutinin__InfluenzaA__ADW10516

SEQ ID NO: 6408 - protein, 565 aa, Artificial Sequence
  derived and/or modified protein sequence (wt) from hemagglutinin__InfluenzaA__ADW10527
MKVKLLVLLCTFTATYADTICIGYHANNSTDTVDTVLEKNVTVTHSVNLLENSHNGKLCLLKGIAPLQLGNCSVAGWILGNPECELLISKESWSYIVEKPNPENGTCYPGHFADYEELREQLSSVSSFERFEIFPKESSWPNHTVTGVSASCSHNGESSFYRNLLWLTGKNGLYPNLSKSYANNKEKEVLVLWGVHHPPNIVDQKTLYRTENAYVSVVSSHYSRKFTPEIAKRPKVRDQEGRINYYWTLLEPGDTIIFEANGNLIAPRYAFALSRGFGLGIINSNAPMDKCDAKCQTPQGAINSSLPFQNVHPVTIGECPKYVRSAKLRMVTGLRNIPSIQSRGLFGAIAGFIEGGWTGMVDGWYGYHHQNEQGSGYAADQKSTQNAINGITNKVNSVIEKMNTQFTAVGKEFNKLERRMENLNKKVDDGFIDIWTYNAELLVLLENERTLDFHDSNVKNLYEKVKSQLKNNAKEIGNGCFEFYHKCNDECMESVKNGTYDYPKYSEESKLNREKIDGVKLESMGVYQILAIYSTVASSLVLLVSLGAISFWMCSNGSLQCRICI

SEQ ID NO: 6409 - protein, 565 aa, Artificial Sequence
  derived and/or modified protein sequence (wt) from hemagglutinin__InfluenzaA__ADW10538
MKVKLLVLLCTFTATYADTICIGYHANNSTDTVDTVLEKNVTVTHSVNLLENSHNGKLCLLKGIAPLQLGNCSVAGWILGNPECELLISKESWSYIVEKPNPENGTCYPGHFADYEELREQLSSVSSFERFEIFPKESSWPNHTVTGVSASCSHNGESSFYRNLLWLTGKNGLYPNLSKSYANNKEKEVLVLWGVHHPPNIVDQKTLYRTENAYVSVMSSHYSRKFTPEIAKRPKVRDQEGRINYYWTLLEPGDTIIFEANGNLIAPRYAFALSRGFGSGIINSNAPMDKCDAKCQTPQGAINSSLPFQNVHPVTIGECPKYVRSAKLRMVTGLRNIPSIQSRGLFGAIAGFIEGGWTGMVDGWYGYHHQNEQGSGYAADQKSTQNAINGITNKVNSVIEKMNTQFTAVGKEFNKLERRMENLNKKVDDGFIDIWTYNAELLVLLENERTLDFHDSNVKNLYEKVKSQLKNNAKEIGNGCFEFYHKCNDECMESVKNGTYDYPKYSEESKLNREKIDGVKLESMGVYQILAIYSTVASSLVLLVSLGAISFWMCSNGSLQCRICI

SEQ ID NO: 6410 - protein, 565 aa, Artificial Sequence; identical to SEQ ID NO: 3616
  derived and/or modified protein sequence (wt) from hemagglutinin__InfluenzaA__ADW10549

SEQ ID NO: 6411 - protein, 565 aa, Artificial Sequence
  derived and/or modified protein sequence (wt) from hemagglutinin__InfluenzaA__ADW10560
MKVKLLVLLCTFTATYADTICIGYHANNSTDTVDTVFEKNVTVTHSVNLLENSHNGKLCLLKGIAPLQLGNCSVAGWILGNPECELLISKESWSYIVEKPNPENGTCYPGHFADYEELREQLSSVSSFERFEIFPKESSWPNHTVTGVSASCSHNGERSFYRNLLWLTGKNGLYPNLSKSYANNKEKEVLVLWGVHHPPDIGDQKTLYHTENAYVSVVSSHYSRKFTPEIAKRPKVRDQEGRINYYWTLLEPGDTIIFEANGNLIAPRYAFALSRGFGSGIINSNAPMDKCDAKCQTPQGAINSSLPFQNVHPVTIGECPKYVRSAKLRMVTGLRNIPSIQSRGLFGAIAGFIEGGWTGMVDGWYGYHHQNEQGSGYAADQKSTQNAINGITNKVNSVIEKMNTQFTAVGKEFNKLERRMENLNKKVDDGFIDIWTYNAELLVLLENERTLDFHDSNVKNLYEKVKSQLKNNAKEIGNGCFEFYHKCNDECMESVKNGTYDYPKYSEESKLNREKIDGVKLESMGVYQILAIYSTVASSLVLLVSLGAISFWMCSNGSLQCRICI

SEQ ID NO: 6412 - protein, 565 aa, Artificial Sequence; identical to SEQ ID NO: 5953
  derived and/or modified protein sequence (wt) from hemagglutinin__InfluenzaA__ADW10571

SEQ ID NO: 6413 - protein, 565 aa, Artificial Sequence; identical to SEQ ID NO: 3131
  derived and/or modified protein sequence (wt) from hemagglutinin__InfluenzaA__ADW10582

SEQ ID NO: 6414 - protein, 565 aa, Artificial Sequence; identical to SEQ ID NO: 3616
  derived and/or modified protein sequence (wt) from hemagglutinin__InfluenzaA__ADW10593

SEQ ID NO: 6415 - protein, 565 aa, Artificial Sequence; identical to SEQ ID NO: 3616
  derived and/or modified protein sequence (wt) from hemagglutinin__InfluenzaA__ADW10604

SEQ ID NO: 6416 - protein, 565 aa, Artificial Sequence; identical to SEQ ID NO: 3616
  derived and/or modified protein sequence (wt) from hemagglutinin__InfluenzaA__ADW10615

SEQ ID NO: 6417 - protein, 565 aa, Artificial Sequence
  derived and/or modified protein sequence (wt) from hemagglutinin__InfluenzaA__ADW10626
MKVKLLVLLCTFTATYADTICIGYHANNSTDTVDTVLEKNVTVTHSVNLLENSHNGKLCLLKGIAPLQLGNCSVAGWILGNPECELLISKESWSYIVEKPNPENGTCYPGHFADYEELREQLSSVSSFERFEIFPKESSWPNHTVTGVSASCSHNGESSFYRNLLWLTVKNGLYPNLSKSYANNKEKEVLVLWGVHHPPSIVDQKTLYRTENAYVSVVSSHYSRKFTPEIAKRPKVRDQEGRINYYWTLLEPGDTIIFEANGNLIAPRYAFALSRGFGSGIINSNAPMDKCDAKCQTPRGAINSSLPFQNVHPVTIGECPKYVRSAKLRMVTGLRNIPSIQSRGLFGAIAGFIEGGWTGMVDGWYGYHHQNEQGSGYAADQKSTQNAINGITNKVNSVIEKMNTQFTAVGKEFNKLERRMENLNKKVDDGFIDIWTYNAELLVLLENERTLDFHDSNVKNLYEKVKSQLKNNAKEIGNGCFEFYHKCNDECMESVKNGTYDYPKYSEESKLNREKIDGVKLESMGVYQILAIYSTVASSLVLLVSLGAISFWMCSNGSLQCRICI

SEQ ID NO: 6418 - protein, 565 aa, Artificial Sequence
  derived and/or modified protein sequence (wt) from hemagglutinin__InfluenzaA__ADW10721
MKVKLLVLLCTFTATYADTICIGYHANNSTDTVDTVLEKNVTVTHSVNLLENSHNGKLCLLKGIAPLQLGNCSVAGWILGNPECELLISKESWSYIVEKPNPENGTCYPGHFADYEELREQLSSVSSFKRFEIFPKESSWPNHTVTGVSASCSHNGESSFYRNLLWLTVKNGLYPNLSKSYANNKEKEVLVLWGVHHPPNIVDQRTLYHTENAYVSVVSSHYSRKFTPEIAKRPKVRNQEGRINYYWTLLEPGDTIIFEANGNLIAPRYAFALSRGFGSGIINSNAPMDKCDAKCQTPRGAINSSLPFQNVHPVTIGECPKYVRSAKLRMVTGLRNIPSIQSRGLFGAIAGFIEGGWTGMVDGWYGYHHQNEQGSGYAADQKSTQNAINGITNKVNSVIEKMNTQFTAVGKEFNKLERRMENLNKKVDDGFIDIWTYNAELLVLLENERTLDFHDSNVKNLYEKVKSQLKNNAKEIGNGCFEFYHKCNDECMESVKNGTYDYPKYSEESKLNREKIDGVKLESMGVYQILAIYSTVASSLVLLVSLGAISFWMCSNGSLQCRICI

SEQ ID NO: 6419 - protein, 565 aa, Artificial Sequence
  derived and/or modified protein sequence (wt) from hemagglutinin__InfluenzaA__ADW10743
MKVKLLVLLCTFTATYADTICIGYHANNSTDTVDTVLEKNVTVTHSVNLLENSHNGKLCLLKGIAPLQLGNCSVAGWILGNPECELLISKESWSYIVEKPNPENGTCYPGHFADYEELREQLSSVSSFERFEIFPKESSWPNHTVTGVSASCSHNGESSFYRNLLWLTVKNGLYPNLSKSYANNKEKEVLVLWGVHHPPNIVDQKTLYRTENTYVSVVSSHYSRKFTPEIAKRPKIRDQEGRINYYWTLLEPGDTIIFEANGNLIAPRYAFALSRGFGSGIINSNAPMDKCDAKCQTPRGAINSSLPFQNVHPVTIGECPKYVRSVKLRMVTGLRNIPSIQSRGLFGAIAGFIEGGWTGMVDGWYGYHHQNEQGSGYAADQKSTQNAINGITNKVNSVIEKMNTQFTAVGKEFNKLERRMENLNKKVDDGFIDIWTYNAELLVLLENERTLDFHDSNVKNLYEKVKSQLKNNAKEIGNGCFEFYHKCNDECMESVKNGTYDYPKYSEESKLNREKIDGVKLESMGVYQILAIYSTVASSLVLLVSLGAISFWMCSNGSLQCRICI

SEQ ID NO: 6420 - protein, 565 aa, Artificial Sequence
  derived and/or modified protein sequence (wt) from hemagglutinin__InfluenzaA__ADW10754
MKVKLLVLLCTFTATYADTICIGYHANNSTDTVDTVLEKNVTVTHSVNLLENSHNGKLCLLKGIAPLQLGNCSVAGWILGNPECELLISKESWSYIVEKPNPENGTCYPGHFADYEELREQLSSVSSFERFEIFPKESSWPNHTVTGVSASCSHNGENSFYRNLLWLTGKNGLYPNLSKSYANNKEKEVLVLWGVHHPPNIADQKTLYHTENAYVSVVSSHYSRKFTPEIAKRPKVRDQEGRINYYWTLLEPGDTIIFEANGNLIAPRYAFALSRGFGSGIINSNAPMDKCDAKCQTPQGAINSSLPFQNVHPVTIGECPKYVRSAKLRMVTGLRNIPSVQSRGLFGAIAGFIEGGWTGMVDGWYGYHHQNEQGSGYAADQKSTQNAINGITNKVNSVIEKMNTQFTAVGKEFNKLERRMENLNKKVDDGFIDIWTYNAELLVLLENERTLDFHDSNVKNLYEKVKSQLKNNAKEIGNGCFEFYHKCNDECMESVKNGTYDYPKYSEESKLNREKIDGVKLESMGVYQILAIYSTVASSLVLLVSLGAISFWMCSNGSLQCRICI

SEQ ID NO: 6421 - protein, 565 aa, Artificial Sequence
  derived and/or modified protein sequence (wt) from hemagglutinin__InfluenzaA__ADW10765
MKVKLLVLLCTFTATYADTICIGYHANNSTDTVDTVLEKNVTVTHSVNLLENSHNGKLCLLKGIAPLQLGNCSVAGWILGNPECELLISKESWSYIVEKPNPENGTCYPGHFADYEELREQLSSVSSFERFEIFPKESSWPNHTVTGVSASCSHNGESSFYRNLLWLTVKNGLYPNLSKSYANNKEKEVLVLWGVHHPPNIVDQKTLYHTENAYVSVVSSHYSRKFTPEIAKRPKVRNQEGRINYYWTLLEPGDTIIFEANGNLIAPRYAFALSRGFGSGIINSNAPMDKCDAKCQTPRGAINSSLPFQNVHPVTIGECPKYVRSAKLRMVTGLRNIPSIQSRGLFGAIAGFIEGGWTGMVDGWYGYHHQNEQGSGYAADQKSTQNAINGITNKVNSVIEKMNTQFTAVGKEFNKLERRMENLNKKVDDGFIDIWTYNAELLVLLENERTLDFHDSNVKNLYEKVKSQLKNNAKEIGNGCFEFYHKCNDECMESVKNGTYDYPKYSEESKLNREKIDGVKLESMGVYQILAIYSTVASSLVLLVSLGAISFWMCSNGSLQCRICI

SEQ ID NO: 6422 - protein, 565 aa, Artificial Sequence
  derived and/or modified protein sequence (wt) from hemagglutinin__InfluenzaA__ADW10776
MKVKLLVLLCTFTATYADTICIGYHANNSTDTVDTVLEKNVTVTHSVNLLENSHNGKLCLLKGIAPLQLGNCSVAGWILGNPECELLISKESWSYIVEKPNPENGTCYPGHFADYEELREQLSSVSSFERFEIFPKESSWPNHTVTGVSASCSHNGESSFYRNLLWLTGKNGLYPNLSKSYANDKEKEVLVLWGVHHPPNIVDQKTLYRTENAYVSVVSSHYSRKFTPEIAKRPKVRDQEGRINYYWTLLEPGDTIIFEANGNLIAPRYAFALSRGFGSGIINSNAPMDKCDAKCQTPQGAINSSLPFQNVHPVTIGECPKYVRSAKLRMVTGLRNIPSIQSRGLFGAIAGFIEGGWTGMVDGWYGYHHQNEQGSGYAADQKSTQNAINGITNKVNSVIEKMNTQFTAVGKEFNKLERRMENLNKKVDDGFIDIWTYNAELLVLLENERTLDFHDSNVKNLYEKVKSQLKNNAKEIGNGCFEFYHKCNDECMESVKNGTYDYPKYSEESKLNREKIDGVKLESMGVYQILAIYSTVASSLVLLVSLGAISFWMCSNGSLQCRICI

SEQ ID NO: 6423 - protein, 565 aa, Artificial Sequence
  derived and/or modified protein sequence (wt) from hemagglutinin__InfluenzaA__ADW10787
MKVKILVLLCTFTATYADTICIGYHANNSTDTVDTVLEKNVTVTHSVNLLENSHNGKLCLLKGIAPLQLGNCSVAGWILGNPECELLISKESWSYIVEKPNPENGTCYPGHFADYEELREQLSSVSSFERFEIFPKESSWPNHTVTGVSASCSHNGESSFYRNLLWLTVKNGLYPNLSKSYANNKEKEVLVLWGVHHPPNIVDQKTLYRTENAYVSVVSSHYSRKFTPEIAKRPKVRDQEGRINYYWTLLEPGDTIIFEANGNLIAPRYAFALSRGFGSGIINSNAPMDKCDAKCQTPRGAINSSLPFQNVHPVTIGECPKYVRSAKLRMVTGLRNIPSIQSRGLFGAIAGFIEGGWTGMVDGWYGYHHQNEQGSGYAADQKSTQNAINGITNKVNSVIEKMNTQFTAVGKEFNKLERRMENLNKKVDDGFIDIWTYNAELLVLLENERTLDFHDSNVKNLYEKVKSQLKNNAKEIGNGCFEFYHKCNDECMESVKNGTYDYPKYSEESKLNREKIDGVKLESMGVYQILAIYSTVASSLVLLVSLGAISFWMCSNGSLQCRICI

SEQ ID NO: 6424 - protein, 565 aa, Artificial Sequence
  derived and/or modified protein sequence (wt) from hemagglutinin__InfluenzaA__ADW10798
MKVKLLVLLCTFTATYADTICIGYHANNSTDTVDTVLEKNVTVTHSVNLLENSHNGKLCLLKGIAPLQLGNCSVAGWILGNPECELLISKESWSYIVEKPNPENGTCYPGHFADYEELREQLSSVSSFERFEIFPKESSWPNHTVTGVSASCSHNGESSFYRNLLWLTGKNGLYPNLSKSYANNKEKEVLVLWGVHHPPNIVDQKTLYRTENAYVSVVSSHYSRKFTPEIAKRPKVRDQEGRINYYWTLLEPGDTIIFEANGNLIAPRYAFALSRGFGSGIINSNAPMGKCDAKCQTPQGAINSSLPFQNVHPVTIGECPKYVRSAKLRMVTGLRNIPSIQSRGLFGAIAGFIEGGWTGMVDGWYGYHHQNEQGSGYAADQKSTQNAINGITNKVNSVIEKMNTQFTAVGKEFNKLERRVENLNKKVDDGFIDIWTYNAELLVLLENERTLDFHDSNVKNLYEKVKSQLKNNAKEIGNGCFEFYHKCNDECMESVKNGTYDYPKYSEESKLNREKIDGVKLESMGVYQILAIYSTVASSLVLLVSLGAISFWMCSNGSLQCRICI

SEQ ID NO: 6425 - protein, 565 aa, Artificial Sequence; identical to SEQ ID NO: 6421
  derived and/or modified protein sequence (wt) from hemagglutinin__InfluenzaA__ADW10809

SEQ ID NO: 6426 - protein, 565 aa, Artificial Sequence; identical to SEQ ID NO: 3616
  derived and/or modified protein sequence (wt) from hemagglutinin__InfluenzaA__ADW10820

SEQ ID NO: 6427 - protein, 565 aa, Artificial Sequence; identical to SEQ ID NO: 3131
  derived and/or modified protein sequence (wt) from hemagglutinin__InfluenzaA__ADW10831

SEQ ID NO: 6428 - protein, 565 aa, Artificial Sequence
  derived and/or modified protein sequence (wt) from hemagglutinin__InfluenzaA__ADW10842
MKVKLLVLLCTFTATYADTICIGYHANNSTDTVDTVLEKNVTVTHSVNLLENSHNGKLCLLKGIAPLQLGNCSVAGWILGNPECELLISKESWSYIVEKPNPENGTCYPGHFADYEELREQLSSVSSFERFEIFPKESSWPNHTVTGVSASCSHNGESSFYRNLLWLTVKNGLYPNLSKSYANNKEKEVLVLWGVHHPPNIVDQKTLYRTENAYVSVVSSHYSRKFAPEIAKRPKVRDQEGRINYYWTLLEPGDTIIFEANGNLIAPRYAFALSRGFGSGIINSNAPMDKCDAKCQTPRGAINSSLPFQNVHPVTIGECPKYVRSAKLRMVTGLRNIPSIQSRGLFGAIAGFIEGGWTGMVDGWYGYHHQNEQGSGYAADQKSTQNAINGITNKVNSVIEKMNTQFTAVGKEFNKLERRMENLNKKVDDGFIDIWTYNAELLVLLENERTLDFHDSNVKNLYEKVKSQLKNNAKEIGNGCFEFYHKCNDECMESVKNGTYDYPKYSEESKLNREKIDGVKLESMGVYQILAIYSTVASSLVLLVSLGAISFWMCSNGSLQCRICI

SEQ ID NO: 6429 - protein, 565 aa, Artificial Sequence; identical to SEQ ID NO: 5972
  derived and/or modified protein sequence (wt) from hemagglutinin__InfluenzaA__ADW10853

SEQ ID NO: 6430 - protein, 565 aa, Artificial Sequence; identical to SEQ ID NO: 6421
  derived and/or modified protein sequence (wt) from hemagglutinin__InfluenzaA__ADW10864

SEQ ID NO: 6431 - protein, 565 aa, Artificial Sequence; identical to SEQ ID NO: 6421
  derived and/or modified protein sequence (wt) from hemagglutinin__InfluenzaA__ADW10875

SEQ ID NO: 6432 - protein, 565 aa, Artificial Sequence; identical to SEQ ID NO: 3616
  derived and/or modified protein sequence (wt) from hemagglutinin__InfluenzaA__ADW10886

SEQ ID NO: 6433 - protein, 565 aa, Artificial Sequence
  derived and/or modified protein sequence (wt) from hemagglutinin__InfluenzaA__ADW10897
MKVKLLVLLCTFTATYADTICIGYHANNSTDTVDTVLEKNVTVTHSVNLLENSHNGKLCLLKGIAPLQLGNCSVAGWILGNPECELLISKESWSYIVEKPNPENGTCYPGHFADYEELREQLSSVSSFERFEIFPKESSWPNHTVTGVSASCSHNGESSFYRNLLWLTGKNGLYPNLSKSYANNKEKEVLVLWGVHHPPSISDQKTLYHTENAYVSVVSSHYSRKFTPEIAKRPKVRDQEGRINYYWTLLEPGDTIIFEANGNLIAPRYAFALSRGFGSGIINSNAPMDKCDTKCQTPQGAINSSLPFQNVHPVTIGECPKYVRSAKLRMVTGLRNIPSIQSRGLFGAIAGFIEGGWTGMVDGWYGYHHQNEQGSGYAADQKSTQNAINGITNKVNSVIEKMNTQFTAVGKEFNKLERRMENLNKKVDDGFIDIWTYNAELLVLLENERTLDFHDSNVKNLYEKVKSQLKNNAKEVGNGCFEFYHKCNDECMESVKNGTYDYPKYSEESKLNREKIDGVKLESMGVYQILAIYSTVASSLVLLVSLGAISFWMCSNGSLQCRICI

SEQ ID NO: 6434 - protein, 566 aa, Artificial Sequence
  derived and/or modified protein sequence (wt) from hemagglutinin__InfluenzaA__ADW23115
MKTIIALSYILCLVFAQKLPGNGNSTATLCLGHHAVPNGTIVKTITNDQIEVTNATELVQSSSTGEICDSPHQILDGENCTLIDALLGDPQCDGFQNKKWDLFVERSKAYSNCYPYDVPDYASLRSLVASSGTLEFNNESFNWTGVTQNGTSSACIRRSNNSFFSRLNWLTHSKFKYPALNVTMPNNEQFDKLYIWGVHHPGTDNDQIFLYAQASGRITVSTKRSQQTVIPNIGSRPRVRNIPSRISIYWTIVKPGDILLINSTGNLIAPRGYFKIRSGKSSIMRSDAPIGKCNSECITPNGSIPNDKPFQNVNRITYGACPRYVKQNTLKLATGMRNVPEKQTRGIFGAIAGFIENGWEGMVDGWYGFRHQNSEGRGQAADLKSTQAAIDQINGKLNRLIGKTNEKFHQIEKEFSEVEGRIQDLEKYVEDTKIDLWSYNAELLVALENQHTIDLTDSEMNKLFEKTKKQLRENAEDMGNGCFKIYHKCDNACIGSIRNGTYDHDVYRDEALNNRFQIKGVELKSGYKDWILWISFAISCFLLCVALLGFIMWACQKGNIRCNICI

SEQ ID NO: 6435 - protein, 566 aa, Artificial Sequence
  derived and/or modified protein sequence (wt) from hemagglutinin__InfluenzaA__ADW54481
MKAILVVLLYTFATANADTLCIGYHANNSTDTVDTVLEKNVTVTHSVNLLEDKHNGKLCKLRGVAPLHLGKCNIAGWILGNPECESLSTASSWSYIVETSSSDNGTCYPGDFIDYEELREQLSSVSSFERFEIFPKTSSWPNHDSNKGVTAACPHAGAKSFYKNLIWLVKKGNSYPKLSKSYINDKGKEVLVLWGIHHPSTTADQQSLYQNADTYVFVGTSRYSKKFKPEIAIRPKVRDQEGRMNYYWTLVEPGDKITFEATGNLVVPRYAFAMERNAGSGIIISDTPVHDCNTTCQTPKGAINTSLPFQNIHPITIGKCPKYVKSTKLRLATGLRNVPSIQSRGLFGAIAGFIEGGWTGMVDGWYGYHHQNEQGSGYAADLKSTQNAIDKITNKVNSVIEKMNTQFTAVGKEFNHLEKRIENLNKKVDDGFLDIWTYNAELLVLLENERTLDYHDSNVKNLYEKVRNQLKNNAKEIGNGCFEFYHKCDNTCMESVKNGTYDYPKYSEEAKLNREEIDGVKLESTRIYQILAIYSTVASSLVLVVSLGAISFWMCSNGSLQCRICI

SEQ ID NO: 6436 - protein, 566 aa, Artificial Sequence
  derived and/or modified protein sequence (wt) from hemagglutinin__InfluenzaA__ADW54512
MKAILVVLLYTFATANADTLCIGYHANNSTDTVDTVLEKNVTVTHSVNLLEDKHNGKLCKLRGVAPLHLGKCNIAGWILGNPECESLSTASSWSYIVETSSSDNGTCYPGDFIDYEELREQLSSVSSFKRFEIFPKTSSWPNHDSNKGVTTACPHAGAKSFYKNLIWLVKKGNSYPKLSKSYINDKGKEVLVLWGIHHPPTSADQQSLYQNADAYVFVGTSRYSKKFKPEIAIRPKVRDQEGRMNYYWTLVEPGDKITFEATGNLVVPRYAFAMERNAGSGIIISDTPVHDCNTTCQTPKGAINTSLPFQNIHPITIGKCPKYVKSTKLRLATGLRNVPSIQSRGLFGAIAGFIEGGWTGMVDGWYGYHHQNEQGSGYAADLKSTQNAIDEITNKVNSVIEKMNTQFTAVGKEFNHLEKRIENLNKKVDDGFLDIWTYNAELLVLLENERTLDYHDSNVKNLYEKVRSQLKNNAKEIGNGCFEFYHKCDNTCMESVKNGTYDYPKYSEEAKLNREEIDGVKLESTRIYQILAIYSTVASSLVLVVSLGAISFWMCSNGSLQCRICI

SEQ ID NO: 6437 - protein, 566 aa, Artificial Sequence
  derived and/or modified protein sequence (wt) from hemagglutinin__InfluenzaA__ADW54527
MKAILVVLLYTFATASADTLCIGYHANNSTDTVDTVLEKNVTVTHSVNLLEDKHNGKLCKLRGVAPLHLGKCNIAGWILGNPECESLSTASSWSYIVETSSSDNGTCYPGDFIDYEELREQLSSVSSFERFEIFPKTSSWPNHDSNKGVTTACPHAGAKSFYKNLIWLVKKGNSYPKLSKSYINDKGKEVLVLWGIHHPPTSADQQSLYQNADAYVFVGTSRYSKKFKPEIAIRPKVRDQEGRMNYYWTLVEPGDKITFEATGNLVVPRYAFAMERNAGSGIIISDTPVHDCNTTCQTPNGAINTSLPFQNIHPITIGKCPKYVKSTKLRLATGLRNVPSIQSRGLFGAIAGFIEGGWTGMVDGWYGYHHQNEQGSGYAADLKSTQNAIDEITNKVNSVIEKMNTQFTAVGKEFNHLEKRIENLNKKVDDGFLDIWTYNAELLVLLENERTLDYHDSNVKNLYEKVRSQLKNNAKEIGNGCFEFYHKCDNTCMESVKNGTYDYPKYSEEAKLNREEIDGVKLESTRIYQILAIYSTVASSLVLVVSLGAISFWMCSNGSLQCRICI

SEQ ID NO: 6438 - protein, 566 aa, Artificial Sequence; identical to SEQ ID NO: 6435
  derived and/or modified protein sequence (wt) from hemagglutinin__InfluenzaA__ADW65825

SEQ ID NO: 6439 - protein, 566 aa, Artificial Sequence
  derived and/or modified protein sequence (wt) from hemagglutinin__InfluenzaA__ADW82135
MKTIIALSYILCLVFAQKLPGNDNSTATLCLGHHAVPNGTVVKTITNDQIEVTNATELVQSSSTGEICDSPHQILDGKNCTLIDALLGDPQCDGFQNKKWDLFVERSKAYSNCYPYDVPDYASLRSLVASSGTLEFNNESFNWTGVTQNGTSSACIRRSKNSFFSRLNWLTHLNFKYTALNVTMPNNEQFDKLYIWGVHHPGTDKDQIFLYAQASGRITVSTKRSQQTVIPNIGSRPRVRNIPSRISIYWTIVKPGDILLINSTGNLIAPRGYFKIRSGKSSIMRSDAPIGKCNSECITPNGSIPNDKPFQNVNRITYGACPRYVKQNTLKLATGMRNVPEKQTRGIFGAIAGFIENGWEGMVDGWYGFRHQNSEGRGQAADLKSTQAAIDQINGKLNRLIGKTNEKFHQIEKEFSEVEGRIQDLEKYVEDTKIDLWSYNAELLVALENQHTIDLTDSEMNKLFEKTKKQLRENAEDMGNGCFKIYHKCDNACIGSIRNGTYDHDVYRDEALNNRFQIKGVELKSGYKDWILWISFAISCFLLCVALLGFIMWACQKGNIRCNICI

SEQ ID NO: 6440 - protein, 566 aa, Artificial Sequence; identical to SEQ ID NO: 6439
  derived and/or modified protein sequence (wt) from hemagglutinin__InfluenzaA__ADW82155

SEQ ID NO: 6441 - protein, 566 aa, Artificial Sequence; identical to SEQ ID NO: 6439
  derived and/or modified protein sequence (wt) from hemagglutinin__InfluenzaA__ADW82166

SEQ ID NO: 6442 - protein, 566 aa, Artificial Sequence; identical to SEQ ID NO: 6439
  derived and/or modified protein sequence (wt) from hemagglutinin__InfluenzaA__ADW82177

SEQ ID NO: 6443 - protein, 566 aa, Artificial Sequence; identical to SEQ ID NO: 2669
  derived and/or modified protein sequence (wt) from hemagglutinin__InfluenzaA__ADW82188

SEQ ID NO: 6444 - protein, 566 aa, Artificial Sequence; identical to SEQ ID NO: 2669
  derived and/or modified protein sequence (wt) from hemagglutinin__InfluenzaA__ADW82198

SEQ ID NO: 6445 - protein, 566 aa, Artificial Sequence; identical to SEQ ID NO: 2669
  derived and/or modified protein sequence (wt) from hemagglutinin__InfluenzaA__ADW82208

SEQ ID NO: 6446 - protein, 566 aa, Artificial Sequence; identical to SEQ ID NO: 2669
  derived and/or modified protein sequence (wt) from hemagglutinin__InfluenzaA__ADW82218

SEQ ID NO: 6447 - protein, 566 aa, Artificial Sequence; identical to SEQ ID NO: 2669
  derived and/or modified protein sequence (wt) from hemagglutinin__InfluenzaA__ADW82228

SEQ ID NO: 6448 - protein, 566 aa, Artificial Sequence; identical to SEQ ID NO: 2669
  derived and/or modified protein sequence (wt) from hemagglutinin__InfluenzaA__ADW82238

SEQ ID NO: 6449 - protein, 566 aa, Artificial Sequence; identical to SEQ ID NO: 2669
  derived and/or modified protein sequence (wt) from hemagglutinin__InfluenzaA__ADW82248

SEQ ID NO: 6450 - protein, 566 aa, Artificial Sequence; identical to SEQ ID NO: 2669
  derived and/or modified protein sequence (wt) from hemagglutinin__InfluenzaA__ADW82258

SEQ ID NO: 6451 - protein, 566 aa, Artificial Sequence
  derived and/or modified protein sequence (wt) from hemagglutinin__InfluenzaA__ADW82268
MKAILVVLLYTFATANADTLCIGYHANNSTDTVDTVLEKNVTVTHSVNLLEDKHNGKLCKLRGVAPLHLGKCNIAGWILGNPECESLSTASSWSYIVETSSSDNGTCYPGDFIDYEELREQLSSVSSFERFEIFPKTSSWPNHDSNKGVTAACPHAGAKSFYKNLIWLVKKGNSYPKLSKSYINDKGKEVLVLWGIHHPSTSADQQSLYQNADAYVFVGTSRYSKKFKPEIAIRPKVRDQEGRMNYYWTLVEPGDKITFEATGNLVVPRYAFAMERNAGSGIIISDTPVHDCNTTCQTPKGAINTSLPFQNIHPITIGKCPKYVKSTKLRLATGLRNVPSIQSRGLFGAIAGFIEGGWTGMVDGWYGYHHQNEQGSGYAADLKSTQNAIDEITNKVNSVIEKMNTQFTAVGKEFNHLEKRIENLNKKVDDGFLDIWTYNAELLVLLENERTLDYHDSNVKNLYEKVRSQLKNNAKEIGNGCFEFYHKCDNTCMESVKNGTYDYPKYSEEAKLNREEIDGVKLESTRIHQILAIYSTVASSLVLVVSLGAISFWMCSNGSLQCRICI

SEQ ID NO: 6452 - protein, 566 aa, Artificial Sequence; identical to SEQ ID NO: 6439
  derived and/or modified protein sequence (wt) from hemagglutinin__InfluenzaA__ADW93760

SEQ ID NO: 6453 - protein, 566 aa, Artificial Sequence
  derived and/or modified protein sequence (wt) from hemagglutinin__InfluenzaA__ADW95319
MKAILVVLLYTFATANADTLCIGYHANNSTDTVDTVLEKNVTVTHSVNLLEDKHNGKLCKLRGVAPLHLGKCNIAGWILGNPECESLSTASSWSYIVETSSSDNGTCYPGDFIDYEELREQLSSVSSFERFEIFPKTSSWPNHDSNKGVTAACPHAGAKGFYKNLIWLVKKGNSYPKLSKSYINDKGKEVLVLWGIHHPSTTADQQSLYQNADTYVFVGTSRYSKKFKPEIAIRPKVRDQEGRMNYYWTLVEPGDKITFEATGNLVVPRYAFAMERNAGSGIIISDTPVHDCNTTCQTPKGAINTSLPFQNIHPITIGKCPKYVKSTKLRLATGLRNVPSIQSRGLFGAIAGFIEGGWTGMVDGWYGYHHQNEQGSGYAADLKSTQNAIDEITNKVNSVIEKMNTQFTAVGKEFNHLEKRIENLNKKVDDGFLDIWTYNAELLVLLENERTLDYHDSNVKNLYEKVRNQLKNNAKEIGNGCFEFYHKCDNTCMESVKNGTYDYPKYSEEAKLNREEIDGVKLESTRIYQILAIYSTVASSLVLVVSLGAISFWMCSNGSLQCRICI

SEQ ID NO: 6454 - protein, 566 aa, Artificial Sequence
  derived and/or modified protein sequence (wt) from hemagglutinin__InfluenzaA__ADW95332
MKAILVVLLYTFATANADTLCIGYHANNSTDTVDTVLEKNVTVTHSVNLLEDKHNGKLCKLRGVAPLHLGKCNIAGWILGNPECESLSTASSWSYIVETSSSDNGTCYPGDFIDYEELREQLSSVSSFERFEIFPKTSSWPNHDSNKGVTAACPHAGAKGFYKNLIWLVKKGNSYPKLSKSYINDKGKEVLVLWGIHHPSTTADQQSLYQNADTYVFVGTSRYSKKFKPEIAIRPKVRDQEGRMNYYWTLVEPGDKITFEATGNLVVPRYAFAMERNAGSGIIISDTPVHDCNTTCQTPKGAINTSLPFQNIHPITIGKCPKYVKSTKLRLATGLRNVPSIQSRGLFGAIAGFIEGGWTGMVDGWYGYHHQNEQGSGYAADLKSTQNAIDKITNKVNSVIEKMNTQFTAVGKEFNHLEKRIENLNKKVDDGFLDIWTYNAELLVLLENERTLDYHDSNVKNLYEKVRNQLKNNAKEIGNGCFEFYHKCDNTCMESVKNGTYDYPKYSEEAKLNREEIDGVKLESTRIYQILAIYSTVASSLVLVVSLGAISFWMCSNGSLQCRICI

SEQ ID NO: 6455 - protein, 566 aa, Artificial Sequence
  derived and/or modified protein sequence (wt) from hemagglutinin__InfluenzaA__ADX21078
MKTIIALSYILCLVFAQKLPGNDNSTATLCLGHHAVPNGTVVKTITNDQIEVTNATELVQSSSTGEICDSPHQILDGKNCTLIDALLGDPQCDGFQNKKWDLFVERSKAYSNCYPYDVPDYASLRSLVASSGTLEFNNESFNWTGVTQNGTSSACIRRSKNSFFSRLNWLTHLNFKYTALNVTMPNNEQFDKLYIWGVHHPGTDKDQIFLYAQASGRITVSTKRSQQTVIPNIGSRPRVRNIPSRISIYWTIVKPGDILLINSTGNLIAPRGYFKIRSGKSSIMRSDAPIGKCNSECITPNGSIPNDKPFQNVNRITYGACPRYVKQNTLKLATGMRNVPEKQTRGIFGAIAGFIENGWEGMVDGWYGFRHQNSEGRGQAADLKSTQAAIDQINGKLNRLIRKTNEKFHQIEKEFSEVEGRIQDLEKYVEDTKIDLWSYNAELLVALENQHTIDLTDSEMNKLFEKTKKQLRENAEDMGNGCFKIYHKCDNACIGSIRNGTYDHDVYRDEALNNRFQIKGVELKSGYKDWILWISFAISCFLLCVALLGFIMWACQKGNIRCNICI

SEQ ID NO: 6456 - protein, 566 aa, Artificial Sequence; identical to SEQ ID NO: 6455
  derived and/or modified protein sequence (wt) from hemagglutinin__InfluenzaA__ADX21088

SEQ ID NO: 6457 - protein, 566 aa, Artificial Sequence
  derived and/or modified protein sequence (wt) from hemagglutinin__InfluenzaA__ADX21098
MKAILVVLLYTFATANADTLCIGYHANNSTDTVDTVLEKNVTVTHSVNLLEDKHNGKLCKLRGVAPLHLGKCNIAGWILGNPECESLSTASSWSYIVETSSSDNGTCYPGDFIDYEELREQLSSVSSFERFEIFPKTSSWPNHDSNKGVTAACPHAGAKSFYKNLIWLVKKGNSYPKLSKSYINDKGKEVLVLWGIHHPSTSADQQSLYQNADAYVFVGTSRYSKKFKPEIAIRPKVRDQEGRMNYYWTLVEPGDKITFEATGNLVVPRYAFAMERNAGSGIIISDTPVHDCSTTCQTPKGAINTSLPFQNIHPITIGKCPKYVKSTKLRLATGLRNVPSIQSRGLFGAIAGFIEGGWTGMVDGWYGYHHQNEQGSGYAADLKSTQNAIDEITNKVNSVIEKMNTQFTAVGKEFNHLEKRIENLNKKVDDGFLDIWTYNAELLVLLENERTLDYHDSNVKNLYEKVRSQLKNNAKEIGNGCFEFYHKCDNTCMESVKNGTYDYPKYSEEAKLNREEIDGVKLESTRIHQILAIYSTVASSLVLVVSLGAISFWMCSNGSLQCRICI

SEQ ID NO: 6458 - protein, 566 aa, Artificial Sequence; identical to SEQ ID NO: 3588
  derived and/or modified protein sequence (wt) from hemagglutinin__InfluenzaA__ADX36109

SEQ ID NO: 6459 - protein, 566 aa, Artificial Sequence
  derived and/or modified protein sequence (wt) from hemagglutinin__InfluenzaA__ADX96278
MKAILVVLLYTFATANADTLCIGYHANNSTDTVDTVLEKNVTVTHSVNILEDKHNGKLCKLRGVAPLHLGKCNIAGWILGNPECESLSTASSWSYIVETSSSDNGTCYPGDFIDYEELREQLSSVSSFERFEIFPKTSSWPNHDSNKGVTAACPHAGAKGFYKNLIWLVKKGNSYPKLSKSYINDKGKEVLVLWGIHHPSTSADQQSLYQNADAYVFVGSSRYSKKFKPEIAIRPKVRDQEGRMNYYWTLVEPGDKITFEATGNLVVPRYAFAMERNAGSGIIISDTPVHDCNTTCQTPKGAVNTSLPFQNIHPITIGKCPKYVKSTKLRLATGLRNVPSIQSRGLFGAIAGFIEGGWTGMVDGWYGYHHQNEQGSGYAADLKSTQNAIDEITNKVNSVIEKMNTQFTAVGKEFNHLEKRIENLNKKVDDGFLDIWTYNAELLVLLENERTLDYHDSNVKNLYEKVRSQLKNNAKEVGNGCFEFYHKCDNTCMESVKNGTYDYPKYSEEAKLNREEIDGVKLESTRIYQILAIYSTAASSLVLVVSLGAISFWMCSNGSLQCRICI

SEQ ID NO: 6460 - protein, 566 aa, Artificial Sequence
  derived and/or modified protein sequence (wt) from hemagglutinin__InfluenzaA__ADX96288
MKAILVVLLYTFATANADTLCIGYHANNSTDTVDTVLEKNVTVTHSVNILEDKHNGKLCKLRGVAPLHLGKCNIAGWILGNPECESLSTASSWSYIVETSSSDNGTCYPGDFIDYEELREQLSSVSSFERFEIFPKTSSWPNHDSNKGVTAACPHAGAKSFYKNLIWLVKQGNSYPKLSKSYINDKGKEVLVLWGIHHPSTSADQQSLYQNADAYVFVGSSRYSKKFKPEIAIRPKVRDQEGRMNYYWTLVEPGDKITFEATGNLVVPRYAFAMERNAGSGIIISDTPVHDCNTTCQTPKGAINTSLPFQNIHPITIGKCPKYVKSTKLRLATGLRNVPSIQSRGLFGAIAGFIEGGWTGMVDGWYGYHHQNEQGSGYAADLKSTQNAIDEITNKVNSVIEKMNTQFTAVGKEFNHLEKRIENLNKKVDDGFLDIWTYNAELLVLLENERTLDYHDSNVKNLYEKVRSQLKNNAKEVGNGCFEFYHKCDNTCMESVKNGTYDYPKYSEEAKLNREEIDGVKLESTRIYQILAIYSTAASSLVLVVSLGAISFWMCSNGSLQCRICI

SEQ ID NO: 6461 - protein, 566 aa, Artificial Sequence
  derived and/or modified protein sequence (wt) from hemagglutinin__InfluenzaA__ADX96298
MKAILVVLLYTFATANADTLCIGYHANNSTDTVDTVLEKNVTVTHSVNILEDKHNGKLCKLRGVAPLHLGKCNIAGWILGNPECESLSTASSWSYIVETSSSDNGTCYPGDFIDYEELREQLSSVSSFERFEIFPKTSSWPNHDSNKGVTAACPHAGAKSFYKNLIWLVKKGNSYPKLSKSYINDKGKEVLVLWGIHHPSTSADQQSLYQNADAYVFVGTSRYSKKFKPEIVIRPKVRDQEGRMNYYWTLVEPGDKITFEATGNLVVPRYAFAMERNAGSGIIISDTPVHDCNTTCQTPKGAINTSLPFQNIHPITIGKCPKYVKSTKLRLATGLRNVPSIQSRGLFGAIAGFIEGGWTGMVDGWYGYHHQNEQGSGYAADLKSTQNAIDEITNKVNSVIEKMNTQFTAVGKEFNHLEKRIENLNKKVDDGFLDIWTYNAELLVLLENERTLDYHDSNVKNLYEKVRSQLKNNAKEIGNGCFEFYHKCDNTCMESVKNGTYDYPKYSEEAKLNREEIDGVKLESTRIYQILAIYSTVASSLVLVVSLGAISFWMCSTGSLQCRICI

SEQ ID NO: 6462 - protein, 566 aa, Artificial Sequence; identical to SEQ ID NO: 4266
  derived and/or modified protein sequence (wt) from hemagglutinin__InfluenzaA__ADX96308

SEQ ID NO: 6463 - protein, 566 aa, Artificial Sequence
  derived and/or modified protein sequence (wt) from hemagglutinin__InfluenzaA__ADX96318
MKAILVVLLYTFATANADTLCIGYHANNSTDTVDTVLEKNVTVTHSVNLLEDKHNGKLCKLRGVAPLHLGKCNIAGWILGNPECESLSTASSWSYIVETSSSDNGTCYPGDFIDYEELREQLSSVSSFERFEIFPKTSSWPNHDSNKGVTAACPHAGAKSFYKNLIWLVKKGNSYPKLSKSYINDKGKEVLVLWGIHHPSTSADQQSLYQNADSYVFVGTSRYSKKFKPEIAIRPKVRDQEGRMNYYWTLVEPGDKITFEATGNLVVPRYAFAMERNAGSGIIISDTPVHDCNTTCQTPKGAINTSLPFQNIHPITIGKCPKYVKSTKLRLATGLRNVPSIQSRGLFGAIAGFIEGGWTGMVDGWYGYHHQNEQGSGYAADLKSTQNAIDKITNKVNSVIEKMNTQFTAVGKEFNHLEKRIENLNKKVDDGFLDIWTYNAELLVLLENERTLDYHDSNVKNLYEKVRSQLKNNAKEIGNGCFEFYHKCDNTCMESVKNGTYDYPKYSEEAKLNREEIDGVKLESTRIYQILAIYSTVASSLVLVVSLGAISFWMCSNGSLQCRICI

SEQ ID NO: 6464 - protein, 566 aa, Artificial Sequence
  derived and/or modified protein sequence (wt) from hemagglutinin__InfluenzaA__ADX96328
MKAILVVLLYTFATANADTLCIGYHANNSTDTVDTVLEKNVTVTHSVNLLEDKHNGKLCKLRGVAPLHLGKCNIAGWILGNPECESLSTASSWSYIVETSSSDNGTCYPGDFIDYEELREQLSSVSSFERFEIFPKTSSWPNHDSNKGVTAACPHAGAKSFYKNLIWLVKKGNSYPKLSKSYINDKGKEVLVLWGIHHPSTSADQQSLYQNADAYVFVGTSRYSKKFKPEIAIRPKVRDQEGRMNYYWTLVEPGDKITFEATGNLVAPRYAFAMERNAGSGIIISDTPVHDCNTTCQTPKGAINTSLPFQNIHPITIGKCPKYVKSTKLRLATGLRNVPSIQSRGLFGAIAGFIEGGWTGMVDGWYGYHHQNEQGSGYAADLKSTQNAIDKITNKVNSVIEKMNTQFTAVGKEFNHLEKRIENLNKKVDDGFLDIWTYNAELLVLLENERTLDYHDSNVKNLYEKVRSQLKNNAKEIGNGCFEFYHKCDNTCMESVKNGTYDYPKYSEEAKLNREEIDGVKLESTRIYQILAIYSTVASSLVLVVSLGAISFWMCSNGSLQCRICI

SEQ ID NO: 6465 - protein, 566 aa, Artificial Sequence
  derived and/or modified protein sequence (wt) from hemagglutinin__InfluenzaA__ADX96347
MKAILVVLLYTFATANADTLCIGYHANNSTDTVDTVLEKNVTVTHSVNLLEDKHNGKLCKLRGVAPLHLGKCNIAGWILGNPECESLSTASSWSYIVETSSSDNGTCYPGDFIDYEELREQLSSVSSFERFEIFPKTSSWPNHDSNKGVTAACPHAGAKSFYKNLIWLVKKGNSYPKLSKSYINDKGKEVLVLWGIHHPSTSADQQSLYQNADAYVFVGTSRYSKKFKPEIAIRPKVRDQEGRMNYYWTLVEPGDKITFEATGNLVVPRYAFAMERNAGSGIIISDTPVHNCNTTCQTPKGAINTSLPFQNIHPITIGKCPKYVKSTKLRLATGLRNVPSIQSRGLFGAIAGFIEGGWTGMVDGWYGYHHQNEQGSGYAADLKSTQNAIDKITNKVNSVIEKMNTQFTAVGKEFNHLEKRIENLNKKVDDGFLDIWTYNAELLVLLENERTLDYHDSNVKNLYEKVRSQLKNNAKEIGNGCFEFYHKCDNTCMESVKNGTYDYPKYSEEAKLNREEIDGVKLESTRIYQILAIYSTVASSLVLVVSLGAISFWMCSNGSLQCRICI

SEQ ID NO: 6466 - protein, 566 aa, Artificial Sequence
  derived and/or modified protein sequence (wt) from hemagglutinin__InfluenzaA__ADX96357
MKAILVVLLYTFATANADTLCIGYHANNSTDTVDTVLEKNVTVTHSVNILEDKHNGKLCKLRGVAPLHLGKCNIAGWILGNPECESLSTASSWSYIVETSSSDNGTCYPGDFIDYEELREQLSSVSSFERFEIFPKTSSWPNHDSNKGVTAACPHAGAKSFYKNLIWLVKKGNSYPKLSKSYINDKGKEVLVLWGIHHPSTSADQQSLYQNADAYVFVGTSRYSKKFKPEIVIRPKVRDQEGRMNYYWTLVEPGDKITFEATGNLVVPRYAFAMERNAGSGIIISDTPVHDCNTTCQTPKGAINTSLPFQNIHPITIGKCPKYVKSTKLRLATGLRNVPSIQSRGLFGAIAGFIEGGWTGMVDGWYGYHHQNEQGSGYAADLKSTQNAIDEITNKVNSVIEKMNTQFTAVGKEFNHLEKRIENLNKKVDDGFLDIWTYNAELLVLLENERTLDYHDSNVKNLYEKVRSQLKNNAKEIGNGCFEFYHKCDNTCMESVKNGTYDYPKYSEEAKLNREEIDGVKLESTRIYQILAIYSTVASSLVLVVSLGAISFWMCSNGSLQCRICI

SEQ ID NO: 6467 - protein, 566 aa, Artificial Sequence; identical to SEQ ID NO: 5606
  derived and/or modified protein sequence (wt) from hemagglutinin__InfluenzaA__ADX96367

SEQ ID NO: 6468 - protein, 566 aa, Artificial Sequence
  derived and/or modified protein sequence (wt) from hemagglutinin__InfluenzaA__ADX96378
MKAILVVLLYTFATANADTLCIGYHANNSTDTVDTVLEKNVTVTHSVNLLEDKHNGKLCKLRGVAPLHLGKCNIAGWILGNPECESLSTASSWSYIVETSSSDNGTCYPGDFIDYEELREQLSSVSSFERFEIFPKTSSWPNHDSNKGVTAACPHAGAKSFYKNLIWLVKKGNSYPKLSKSYINDKGKEVLVLWGIHHPSTSADQQSLYQNADAYVFVGTSRYSKKFKPEIAIRPKVRDQEGRMNYYWTLVEPGDKITFEATGNLVVPRYAFAMERNAGSGIIISDTPIHDCNTTCQTPKGAINTSLPFQNIHPITIGKCPKYVKSTKLRLATGLRNVPSIQSRGLFGAIAGFIEGGWTGMVDGWYGYHHQNEQGSGYAADLKSTQNAIDEITNKVNSVIEKMNTQFTAVGKEFNHLEKRIENLNKKVDDGFLDIWTYNAELLVLLENERTLDYHDSNVKNLYEKVRSQLKNNAKEIGNGCFEFYHKCDNTCMESVKNGTYDYPKYSEEAKLNREEIDGVKLESTRIYQILAIYSTVASSLVLVVSLGAISFWMCSNGSLQCRICI

SEQ ID NO: 6469 - protein, 566 aa, Artificial Sequence; identical to SEQ ID NO: 6468
  derived and/or modified protein sequence (wt) from hemagglutinin__InfluenzaA__ADX96398

SEQ ID NO: 6470 - protein, 566 aa, Artificial Sequence
  derived and/or modified protein sequence (wt) from hemagglutinin__InfluenzaA__ADX96408
MKAILVVLLYTFATANADTLCIGYHANNSTDTVDTVLEKNVTVTHSVNILEDKHNGKLCKLRGVAPLHLGKCNIAGWILGNPECESLSTASSWSYIVETSSSDNGTCYPGDFIDYEELREQLSSVSSFERFEIFPKTSSWPNHDSNKGVTAACPHAGAKSFYKNLIWLVKKGNSYPKLSKSYINDKGKEVLVLWGIHHPSTSADQQSLYQNADAYVFVGTSRYSKKFKPEIAIRPKVRDQEGRMNYYWTLVEPGDKITFEATGNLVVPRYAFAMERNAGSGIIISDTPIHDCNTTCQTPKGAINTSLPFQNIHPITIGKCPKYVKSTKLRLATGLRNVPSIQSRGLFGAIAGFIEGGWTGMVDGWYGYHHQNEQGSGYAADLKSTQNAIDEITNKVNSVIEKMNTQFTAVGKEFNHLEKRIENLNKKVDDGFLDIWTYNAELLVLLENERTLDYHDSNVKNLYEKVRSQLKNNAKEIGNGCFEFYHKCDNTCMESVKNGTYDYPKYSEEAKLNREEIDGVKLESTRIYQILAIYSTVASSLVLVVSLGAISFWMCSNGSLQCRICI

SEQ ID NO: 6471 - protein, 566 aa, Artificial Sequence; identical to SEQ ID NO: 2982
  derived and/or modified protein sequence (wt) from hemagglutinin__InfluenzaA__ADX96427

SEQ ID NO: 6472 - protein, 566 aa, Artificial Sequence
  derived and/or modified protein sequence (wt) from hemagglutinin__InfluenzaA__ADX96437
MKAILVVLLYTFATANADTLCIGYHANNSTDTVDTVLEKNVTVTHSVNILEDKHNGKLCKLRGVAPLHLGKCNIAGWILGNPECESLSTASSWSYIVETSSSDNGTCYPGDFIDYEELREQLSSVSSFERFEIFPKTSSWPNHDSNKGVTAACPHAGAKSFYKNLIWLVKKGNSYPKLSKSYINDKGKEVLVLWGIHHPSTSADQQSLYQNADAYVFVGSSRYSKKFKPEIAIRPKVRDQEGRMNYYWTLVEPGDKITFEATGNLVVPRYAFAMERNAGSGIIISDTPVHDCNTTCQTPKGAINTSLPFQNIHPITIGKCPKYVKSTKLRLATGLRNVPSIQSRGLFGAIAGFIEGGWTGMVDGWYGYHHQNEQGSGYAADLKSTQNAIDEITNKVNSVIEKMNTQFTAVGKEFNHLEKRLENLNKKVDDGFLDIWTYNAELLVLLENERTLDYHDSNVKNLYEKVRSQLKNNAKEVGNGCFEFYHKCDNTCMESVKNGTYDYPKYSEEAKLNREEIDGVKLESTRIYQILAIYSTAASSLVLVVSLGAISFWMCSNGSLQCRICI

SEQ ID NO: 6473 - protein, 566 aa, Artificial Sequence; identical to SEQ ID NO: 2656
  derived and/or modified protein sequence (wt) from hemagglutinin__InfluenzaA__ADX96447

SEQ ID NO: 6474 - protein, 566 aa, Artificial Sequence; identical to SEQ ID NO: 2669
  derived and/or modified protein sequence (wt) from hemagglutinin__InfluenzaA__ADX96497

SEQ ID NO: 6475 - protein, 566 aa, Artificial Sequence
  derived and/or modified protein sequence (wt) from hemagglutinin__InfluenzaA__ADX96507
MKAILVVLLYTFATANADTLCIGYHANNSTDTVDTVLEKNVTVTHSVNLLEDKHNGKLCKLRGVAPLHLGKCNIAGWILGNPECESLSTASSWSYIVETSSSDNGTCYPGDFIDYEELREQLSSVSSFERFEIFPKTSSWPNHDSNKGVTAACPHAGAKSFYKNLIWLVKKGNSYPKLSKSYINDKGKEVLVLWGIHHPSTSADQQSLYQNADAYVFVGTSRYSKKFKPEIAIRPKVRDQEGRMNYYWTLVEPGDKITFEATGNLVVPRYAFAMERNAGSGIIISDTPVHDCNTTCQTPKGAINTSLPFQNIHPITIGKCPKYVKSTKLRLATGLRNVPSIQSRGLFGAIAGFIEGGWTGMVDGWYGYHHQNEQGSGYAADLKSTQNAIDEITNKVNSVIEKMNTQFTAVGKEFNHLEKRIENLNKKVDDGFLDIWTYNAELLVLLENERTLDYHDSNVKNLYEKVRSQLKNNAKEIGNGCFEFYHKCDNTCMESVKNGTYDYPKYSEEAKLNREEIDGVKLESTRIYQILAIYSTVASSLVLVVSLGAISFWMCSTGSLQCRICI

SEQ ID NO: 6476 - protein, 566 aa, Artificial Sequence; identical to SEQ ID NO: 6475
  derived and/or modified protein sequence (wt) from hemagglutinin__InfluenzaA__ADX96517

SEQ ID NO: 6477 - protein, 566 aa, Artificial Sequence
  derived and/or modified protein sequence (wt) from hemagglutinin__InfluenzaA__ADX96527
MKAILVVLLYTFATANADTLCIGYHANNSTDTVDTVLEKNVTVTHSVNLLEDKHNGKLCKLRGVAPLHLGKCNIAGWILGNPECESLSTASSWSYIVETSSSDNGTCYPGDFIDYEELREQLSSVSSFERFEIFPKTSSWPNHDSNKGVTAACPHAGAKSFYKNLIWLVKKGNSYPKLSKSYINDKGKEVLVLWGIHHPSTSADQQSLYQNADAYVFVGTSRYSKKFKPEIAIRPKVRDQEGRMNYYWTLVEPGDKITFEATGNLVVPRYAFAMERNAGSGIIISDTPVHDCNTTCQTPKGAINTSLPFQNIHPITIGKCPKYVKSTKLRLATGLRNVPSIQSRGLFGAIAGFIEGGWTGMVDGWYGYHHQNEQGSGYAADLKSTQNAIDEITNKVNSVIEKMNTQFTAVGKEFNHLEKRIENLNKKVDDGFLDIWTYNAELLVLLENERTLDYHDSNVKNLYEKVRSQLKNNAKEIGNGCFEFFHKCDNTCMESVKNGTYDYPKYSEEAKLNREEIDGVKLESTRIYQILAIYSTVASSLVLVVSLGAISFWMCSNGSLQCRICI

SEQ ID NO: 6478 - protein, 566 aa, Artificial Sequence; identical to SEQ ID NO: 2669
  derived and/or modified protein sequence (wt) from hemagglutinin__InfluenzaA__ADX96537

SEQ ID NO: 6479 - protein, 566 aa, Artificial Sequence; identical to SEQ ID NO: 2669
  derived and/or modified protein sequence (wt) from hemagglutinin__InfluenzaA__ADX96547

SEQ ID NO: 6480 - protein, 566 aa, Artificial Sequence; identical to SEQ ID NO: 3770
  derived and/or modified protein sequence (wt) from hemagglutinin__InfluenzaA__ADX96557

SEQ ID NO: 6481 - protein, 566 aa, Artificial Sequence; identical to SEQ ID NO: 2669
  derived and/or modified protein sequence (wt) from hemagglutinin__InfluenzaA__ADX96587

SEQ ID NO: 6482 - protein, 566 aa, Artificial Sequence; identical to SEQ ID NO: 2656
  derived and/or modified protein sequence (wt) from hemagglutinin__InfluenzaA__ADX96597

SEQ ID NO: 6483 - protein, 566 aa, Artificial Sequence; identical to SEQ ID NO: 2656
  derived and/or modified protein sequence (wt) from hemagglutinin__InfluenzaA__ADX96607

SEQ ID NO: 6484 - protein, 566 aa, Artificial Sequence
  derived and/or modified protein sequence (wt) from hemagglutinin__InfluenzaA__ADX96627
MKAILVVLLYTFATANADTLCIGYHANNSTDTVDTVLEKNVTVTHSVNLLEDKHNGKLCKLRGVAPLHLGKCNIAGWILGNPECESLSTASSWSYIVETSSSDNGTCYPGDFIDYEELREQLSSVSSFERFEIFPKTSSWPNHDSNKGVTAACPHAGAKSFYKNLIWLVKKGNSYPKLSKSYINDKGKEVLVLWGIHHPSTSADQQSLYQNADAYVFVGTSRYSKKFKPEIAIRPKVRDQEGRMNYYWTLVEPGDKITFEATGNLVVPRYAFAMEKNAGSGIIISDTPVHDCNTTCQTPKGAINTSLPFQNIHPITIGKCPKYVKSTKLRLATGLRNVPSIQSRGLFGAIAGFIEGGWTGMVDGWYGYHHQNEQGSGYAADLKSTQNAIDEITNKVNSVIEKMNTQFTAVGKEFNHLEKRIENLNKKVDDGFLDIWTYNAELLVLLENERTLDYHDSNVKNLYEKVRSQLKNNAKEIGNGCFEFYHKCDNTCMESVKNGTYDYPKYSEEAKLNREEIDGVKLESTRIYQILAIYSTVASSLVLVVSLGAISFWMCSTGSLQCRICI

SEQ ID NO: 6485 - protein, 566 aa, Artificial Sequence; identical to SEQ ID NO: 3116
  derived and/or modified protein sequence (wt) from hemagglutinin__InfluenzaA__ADX96637

SEQ ID NO: 6486 - protein, 566 aa, Artificial Sequence; identical to SEQ ID NO: 2669
  derived and/or modified protein sequence (wt) from hemagglutinin__InfluenzaA__ADX96647

SEQ ID NO: 6487 - protein, 566 aa, Artificial Sequence; identical to SEQ ID NO: 2656
  derived and/or modified protein sequence (wt) from hemagglutinin__InfluenzaA__ADX96657

SEQ ID NO: 6488 - protein, 566 aa, Artificial Sequence; identical to SEQ ID NO: 2669
  derived and/or modified protein sequence (wt) from hemagglutinin__InfluenzaA__ADX96667

SEQ ID NO: 6489 - protein, 566 aa, Artificial Sequence
  derived and/or modified protein sequence (wt) from hemagglutinin__InfluenzaA__ADX96677
MKAILVVLLYTFATANADTLCIGYHANNSTDTVDTVLEKNVTVTHSVNLLEDKHNGKLCKLRGVAPLHLGKCNIAGWILGNPECESLSTASSWSYIVETSSSDNGTCYPGDFIDYEELREQLSSVSSFERFEIFPKTSSWPNHDSNKGVTAACPHAGAKSFYKNLIWLVKKGNSYPKLSKSYINDKGKEVLVLWGIHHPSTSADQQSLYQNADAYVFVGSSRYSKKFKPEIAIRPKVRDQEGRMNYYWTVVEPGDKITFEATGNLVVPRYAFAMERNAGSGIIISDTPVHDCNTTCQTPKGAINTSLPFHNIHPITIGKCPKYVKSTKLRLATGLRNVPSIQSRGLFGAIAGFIEGGWTGMVDGWYGYHHQNEQGSGYAADLKSTQNAIDEITNKVNSVIEKMNTQFTAVGKEFNHLEKRIENLNKKVDDGFLDIWTYNAELLVLLENERTLDYHDSNVKNLYEKVRSQLKNNAKEIGNGCFEFYHKCDNTCMESVKNGTYDYPKYSEEAKLNREEIDGVKLESTRIYQILAIYSTVASSLVLVVSLGAISFWMCSNGSLQCRICI

SEQ ID NO: 6490 - protein, 566 aa, Artificial Sequence
  derived and/or modified protein sequence (wt) from hemagglutinin__InfluenzaA__ADX96687
MKAILVVLLYTFATANADTLCIGYHANNSTDTVDTVLEKNVTVTHSVNLLEDKHNGKLCKLRGVAPLHLGKCNIAGWILGNPECESLSTASSWSYIVETSSSDNGTCYPGDFIDYEELREQLSSVSSFKRFEIFPKTSSWPNHDSNKGVTAACPHAGAKSFYKNLIWLVKKGNSYPKLSKSYINDKGKEVLVLWGIHHPSTSADQQSLYQNADAYVFVGTSRYSKKFKPEIAIRPKVRDQEGRMNYYWTLVEPGDKITFEATGNLVVPRYAFAMERNAGSGIIISDTPVYDCNTTCQTPKGAINTSLPFQNIHPITIGKCPKYVKSTKLRLATGLRNVPSIQSRGLFGAIAGFIEGGWTGMVDGWYGYHHQNEQGSGYAADLKSTQNAIDEITNKVNSVIEKMNTQFTAVGKEFNHLEKRIENLNKKVDDGFLDIWTYNAELLVLLENERTLDYHDSNVKNLYEKVRSQLKNNAKEIGNGCFEFYHKCDNTCMESVKNGTYDYPKYSEEAKLNREEIDGVKLESTRIYQILAIYSTVASSLVLVVSLGAISFWMCSNGSLQCRICI

SEQ ID NO: 6491 - protein, 566 aa, Artificial Sequence; identical to SEQ ID NO: 2669
  derived and/or modified protein sequence (wt) from hemagglutinin__InfluenzaA__ADX96697

SEQ ID NO: 6492 - protein, 566 aa, Artificial Sequence
  derived and/or modified protein sequence (wt) from hemagglutinin__InfluenzaA__ADX96707
MKAILVVLLYTFATANADTLCIGYHANNSTDTVDTVLEKNVTVTHSVNLLEDKHNGKLCKLRGVAPLHLGKCNIAGWILGNPECESLSTASSWSYIVETSSSDNGTCYPGDFIDYEELREQLSSVSSFERFEIFPKTSSWPNHDSNKGVTAACPHAGAKSFYKNLIWLVKKGNSYPKLSKSYINDKGKEVLVLWGIHHPSTSADQQSLYQNADAYVFVGTSRYSKKFKPEIAIRPKVRDQEGRMNYYWTLVEPGDKITFEATGNLVVPRYAFAMERNAGSGIIISDTPVHDCDTTCQTPKGAINTSLPFQNIHPITIGKCPKYVKSTKLRLATGLRNVPSIQSRGLFGAIAGFIEGGWTGMVDGWYGYHHQNEQGSGYAADLKSTQNAIDKITNKVNSVIEKMNTQFTAVGKEFNHLEKRIENLNKKVDDGFLDIWTYNAELLVLLENERTLDYHDSNVKNLYEKVRSQLKNNAKEIGNGCFEFYHKCDNTCMESVKNGTYDYPKYSEEAKLNREEIDGVKLESTRIYQILAIYSTVASSLVLVVSLGAISFWMCSTGSLQCRICI

SEQ ID NO: 6493 - protein, 566 aa, Artificial Sequence; identical to SEQ ID NO: 3829
  derived and/or modified protein sequence (wt) from hemagglutinin__InfluenzaA__ADX96727

SEQ ID NO: 6494 - protein, 566 aa, Artificial Sequence
  derived and/or modified protein sequence (wt) from hemagglutinin__InfluenzaA__ADX96737
MKAILVVLLYTFATANADTLCIGYHANNSTDTVDTVLEKNVTVTHSVNLLEDKHNGKLCKLRGVAPLHLGKCNIAGWILGNPECESLSTASSWSYIVETSSSDNGTCYPGDFIDYEELREQLSSVSSFERFEIFPKTSSWPNHDSNKGVTAACPHAGAKSFYKNLIWLVKKGNSYPKLSKSYINDKGKEVLVLWGIHHPSTSADQQSLYQNADAYVFVGTSRYSKKFKPEIAIRPKVKEQEGRMNYYWTLVEPGDKITFEATGNLVVPRYAFAMERKAGSGIIISDTPVHDCNTTCQTPKGAINTSLPFQNIHSITIGKCPKYVKSTKLRLATGLRNVPSIQSRGLFGAIAGFIEGGWTGMVDGWYGYHHQNEQGSGYAADLKSTQNAIDEITNKVNSVIEKMNTQFTAVGKEFNHLEKRIENLNKKVDDGFLDIWTYNAELLVLLENERTLDYHDSNVKNLYEKVRSQLKNNAKEIGNGCFEFYHKCDNTCMESVKNGTYDYPKYSEEAKLNREEIDGVKLESTRIYQILAIYSTVASSLVLVISLGAISFWMCSTGSLQCRICI

SEQ ID NO: 6495 - protein, 566 aa, Artificial Sequence; identical to SEQ ID NO: 2669
  derived and/or modified protein sequence (wt) from hemagglutinin__InfluenzaA__ADX96747

SEQ ID NO: 6496 - protein, 566 aa, Artificial Sequence
  derived and/or modified protein sequence (wt) from hemagglutinin__InfluenzaA__ADX96757
MKAILVVLLYTFATANADTLCIGYHANNSTDTVDTVLEKNVTVTHSVNLLEDKHNGKLCKLRGVAPLHLGKCNIAGWILGNPECESLSTASSWSYIVETSSSGNGTCYPGDFIDYEELREQLSSVSSFERFEIFPKTSSWPNHDSNKGVTAACPHAGAKSFYKNLIWLVKKGNSYPKLSKSYINDKGKEVLVLWGIHHPSTSADQQSLYQNADAYVFVGTSRYSKKFKPEIAIRPKVRDQEGRMNYYWTLVVPGDKITFEATGNLVVPRYAFAMERNAGSGIIISDTPVHDCNTTCQTPKGAINTSLPFQNIHPITIGKCPKYVKSTKLRLATGLRNVPSIQSRGLFGAIAGFIEGGWTGMVDGWYGYHHQNEQGSGYAADLKSTQNAIDEITNKVNSVIEKMNTQFTAVGKEFNHLEKRIENLNKKVDDGFLDIWTYNAELLVLLENERTLDYHDSNVKNLYEKVRSQLKNNAKEIGNGCFEFYHKCDNTCMESVKNGTYDYPKYSEEAKLNREEIDGVKLESTRIYQILAIYSTVASSLVLVVSLGAISFWMCSTGSLQCRICI

SEQ ID NO: 6497 - protein, 566 aa, Artificial Sequence
  derived and/or modified protein sequence (wt) from hemagglutinin__InfluenzaA__ADX96767
MKAILVVLLYTFATANADTLCIGYHANNSTDTVDTVLEKNVTVTHSVNLLEDKHNGKLCKLRGVAPLHLGKCNIAGWILGNPECESLSTASSWSYIVETSSSDNGTCYPGDFIDYEELREQLSSVSSFERFEIFPKTSSWPNHDSNKGVTAACPHAGAKSFYKNLIWLVKKGNSYPKLSKSYINDKGKEVLVLWGIHHPSTSADQQSLYQNADAYVFVGTSRYSKKFKPEIAIRPKVRDQEGRMNYYWTLVESGDKITFEATGNLVVPRYAFAMERNAGSGIIISDTPVHDCNTTCQTPKGAINTSLPFQNIHPITIGKCPKYVKSTKLRLATGLRNVPSIQSRGLFGAIAGFIEGGWTGMVDGWYGYHHQNEQGSGYAADLKSTQNAIDEITNKVNSVIEKMNTQFTAVGKEFNHLEKRIENLNKKVDDGFLDIWTYNAELLVLLENERTLDYHDSNVKKLYEKVRSQLKNNAKEIGNGCFEFYHKCDNTCMESVKNGTYDYPKYSEEAKLNREEIDGVKLESTRIYQILAIYSTVASSLVLVVSLGAISFWMCSTGSLQCRICI

SEQ ID NO: 6498 - protein, 566 aa, Artificial Sequence
  derived and/or modified protein sequence (wt) from hemagglutinin__InfluenzaA__ADX96777
MKAILVVLLYTFATANADTLCIGYHANNSTDTVDTVLEKNVTVTHSVNLLEDKHNGKLCKLRGVAPLHLGKCNIAGWILGNPECESLSTASSWSYIVETSSSDNGTCYPGDFIDYEELREQLSSVSSFERFEIFPKTSSWPNHDSNKGVTAACPHAGAKSFYKNLIWLVKKGNSYPKLSKSYINDKGKEVLVLWGIHHPSTSADQQSLYQNADAYVFVGTSRYSKKFKPEIAIRPKVRDQEGRMNYYWTLVVPGDKITFEATGNLVVPRYAFAMERNAGSGIIISDTPVHDCNTTCQTPKGAINTSLPFQNIHSITIGKCPKYVKSTKLRLATGLRNVPSIQSRGLFGAIAGFIEGGWTGMVDGWYGYHHQNEQGSGYAADLKSTQNAIDEITNKVNSVIEKMNTQFTAVGKEFNHLEKRIENLNKKVDDGFLDIWTYNAELLVLLENERTLDYHDSNVKNLYEKVRSQLKNNAKEIGNGCFEFYHKCDNTCMESVKNGTYDYPKYSEEAKLNREEIDGVKLESTRIYQILAIYSTVASSLVLVVSLGAISFWMCSNGSLQCRICI

SEQ ID NO: 6499 - protein, 566 aa, Artificial Sequence; identical to SEQ ID NO: 2669
  derived and/or modified protein sequence (wt) from hemagglutinin__InfluenzaA__ADX96787

SEQ ID NO: 6500 - protein, 566 aa, Artificial Sequence; identical to SEQ ID NO: 5896
  derived and/or modified protein sequence (wt) from hemagglutinin__InfluenzaA__ADX96797

SEQ ID NO: 6501 - protein, 566 aa, Artificial Sequence
  derived and/or modified protein sequence (wt) from hemagglutinin__InfluenzaA__ADX96807
MKAILVVLLYTFATANADTLCIGYHANNSTDTVDTVLEKNVTVTHSVNILEDKHNGKLCKLRGVAPLHLGKCNIAGWILGNPECESLSTASSWSYIVETSSSDNGTCYPGDFIDYEELREQLSSVSSFERFEIFPKTSSWPNHDSNKGVTAACPHAGAKSFYKNLIWLVKKGNSYPKLSKSYINDKGKEVLVLWGIHHPSTSADQQSLYQNADAYVFVGSSRFSKKFKPEIAIRPKVRDQEGRMNYYWTLVEPGDKITFEATGNLVVPRYAFAMERNAGSGIIISDTPVHDCNTTCQTPKGAINTSLPFQNIHPITIGKCPKYVKSTKLRLATGLRNVPSIQSRGLFGAIAGFIEGGWTGMVDGWYGYHHQNEQGSGYAADLKSTQNAIDEITNKVNSVIEKMNTQFTAVGKEFNHLEKRIENLNKKVDDGFLDIWTYNAELLVLLENERTLDYHDSNVKNLYEKVRSQLKNNAKEVGNGCFEFYHKCDNTCMESVKNGTYDYPKYSEEAKLNREEIDGVKLESTRIYQILAIYSTVASSLVLVVSLGAISFWMCSNGSLQCRICI

SEQ ID NO: 6502 - protein, 566 aa, Artificial Sequence; identical to SEQ ID NO: 2656
  derived and/or modified protein sequence (wt) from hemagglutinin__InfluenzaA__ADX96817

SEQ ID NO: 6503 - protein, 566 aa, Artificial Sequence
  derived and/or modified protein sequence (wt) from hemagglutinin__InfluenzaA__ADX96837
MKAILVVLLYTFATANADTLCIGYHANNSTDTVDTVLEKNVTVTHSVNILEDKHNGKLCKLRGVAPLHLGKCNIAGWILGNPECESLSTASSWSYIVETSSSDNGTCYPGDFIDYEELREQLSSVSSFERFEIFPKTSSWPNHDSNKGVTAACPYAGAKSFYKNLIWLVKKGNSYPKLSKSYINDKGKEVLVLWGIHHPSTSADQQSLYQNADAYVFVGSSRYSKKFKPEIAIRPKVRDQEGRMNYYWTLVEPGDKITFEATGNLVVPRYAFAMERNAGSGIIISDTPVHDCNTTCQTPKGAINTSLPFQNIHPITIGKCPKYVKSTKLRLATGLRNVPSIQSRGLFGAIAGFIEGGWTGMVDGWYGYHHQNEQGSGYAADLKSTQNAIDEITNKVNSVIEKMNTQFTAVGKEFNHLEKRIENLNKKVDDGFLDIWTYNAELLVLLENERTLDYHDSNVKNLYEKVRSQLKNNAKEVGNGCFEFYHKCDNTCMESVKNGTYDYPKYSEEAKLNREEIDGVKLESTRIYQILAIYSTVASSLVLVVSLGAISFWMCSTGSLQCRICI

SEQ ID NO: 6504 - protein, 566 aa, Artificial Sequence; identical to SEQ ID NO: 2669
  derived and/or modified protein sequence (wt) from hemagglutinin__InfluenzaA__ADX96847

SEQ ID NO: 6505 - protein, 566 aa, Artificial Sequence; identical to SEQ ID NO: 2669
  derived and/or modified protein sequence (wt) from hemagglutinin__InfluenzaA__ADX96857

SEQ ID NO: 6506 - protein, 566 aa, Artificial Sequence; identical to SEQ ID NO: 2849
  derived and/or modified protein sequence (wt) from hemagglutinin__InfluenzaA__ADX96867

SEQ ID NO: 6507 - protein, 566 aa, Artificial Sequence; identical to SEQ ID NO: 5606
  derived and/or modified protein sequence (wt) from hemagglutinin__InfluenzaA__ADX96877

SEQ ID NO: 6508 - protein, 566 aa, Artificial Sequence
  derived and/or modified protein sequence (wt) from hemagglutinin__InfluenzaA__ADX96897
MKAILVVLLYTFATANADTLCIGYHANNSTDTVDTVLEKNVTVTHSVNLLEDKHNGKLCKLRGVAPLHLGKCNIAGWILGNPECESLSTASSWSYIVETSSSDNGTCYPGDFIDYEELREQLSSVSSFERFEIFPKTSSWPNHDSNKGVTAACPHAGAKSFYKNLIWLVKKGNSYPKLSKSYINDKGKEVLVLWGIHHPSTSADQQSLYQNADAYVFVGTSRYSKKFKPEIAIRPKVRDQEGRMNYYWTLVEPGDKITFEATGNLVVPRYAFAMERNAGSGIIISDTPIHDCNTTCQTPKGAINTSLPFQNIHPITIGKCPKYVKSTKLRLATGLRNVPSIQSRGLFGAIAGFIEGGWTGMVDGWYGYHHQNEQGSGYAADLKSTQNAIDKITNKVNSVIEKMNTQFTAVGKEFNHLEKRIENLNKKVDDGFLDIWTYNAELLVLLENERTLDYHDSNVKNLYEKVRSQLKNNAKEIGNGCFEFYHKCDNTCMESVKNGTYDYPKYSEEAKLNREEIDGVKLESTRIYQILAIYSTVASSLVLVVSLGAISFWMCSNGSLQCRICI

SEQ ID NO: 6509 - protein, 566 aa, Artificial Sequence
  derived and/or modified protein sequence (wt) from hemagglutinin__InfluenzaA__ADX96907
MKAILVVLLYTFATANADTLCIGYHANNSTDTVDTVLEKNVTVTHSVNLLEDKHSGKLCKLRGVAPLHLGKCNIAGWILGNPECESLSTASSWSYIVETSSSDNGTCYPGDFIDYEELREQLSSVSSFERFEIFPKTSSWPNHDSSKGVTAACPHAGAKSFYKNLIWLVKKGNSYPKLSKSYINDKGKEVLVLWGIHHPSTSADQQSLYQNADAYVFVGTSRYSKKFKPEIAIRPKVRDQEGRMNYYWTLVEPGDKITFEATGNLVVPRYAFAMERNAGSGIIISDTPVHDCNTTCQTPKGAINTSLPFQNIHPITIGKCPKYVKSTKLRLATGLRNVPSIQSRGLFGAIAGFIEGGWTGMVDGWYGYHHQNEQGSGYAADLKSTQNAIDKITNKVNSVIEKMNTQFTAVGKEFNHLEKRIENLNKKVDDGFLDIWTYNAELLVLLENERTLDYHDSNVKNLYEKVRSQLKNNAKEIGNGCFEFYHKCDNTCMESVKNGTYDYPKYSEEAKLNREEIDGVKLESTRIYQILAIYSTVASSLVLVVSLGAISFWMCSNGSLQCRICI

SEQ ID NO: 6510 - protein, 566 aa, Artificial Sequence
  derived and/or modified protein sequence (wt) from hemagglutinin__InfluenzaA__ADX96927
MKAILVVLLYTFATANADTLCIGYHANNSTDTVDTLLEKNVTVTHSVNLLEDKHNGKLCKLRGVAPLHLGKCNIAGWILGNPECESLSTASSWSYIVETSSSDNGTCYPGDFIDYEELREQLSSVSSFERFEIFPKTSSWPNHDSNKGVTAACPHAGAKSFYKNLIWLVKKGNSYPKLSKSYINDKGKEVLVLWGIHHPSTSADQQSLYQNADAYVFVGTSRYSKKFKPEIAIRPKVRDQEGRMNYYWTLVEPGDKITFEATGNLVVPRYAFAMDRNAGSGIIISDTPVHDCNTTCQTPKGAINTSLPFQNIHPITIGKCPKYVKSTKLRLATGLRNVPSIQSRGLFGAIAGFIEGGWTGMVDGWYGYHHQNEQGSGYAADLKSTQNAIDEITNKVNSVIEKMNTQFTAVGKEFNHLEKRIENLNKKVDDGFLDIWTYNAELLVLLENERTLDYHDSNVKNLYEKVRSQLKNNAKEIGNGCFEFYHKCDNTCMESVKNGTYDYPKYSEEAKLNREEIDGVKLESTRIYQILAIYSTVASSLVLVVSLGAISFWMCSNGSLQCRICI

SEQ ID NO: 6511 - protein, 566 aa, Artificial Sequence; identical to SEQ ID NO: 4089
  derived and/or modified protein sequence (wt) from hemagglutinin__InfluenzaA__ADX96937

SEQ ID NO: 6512 - protein, 566 aa, Artificial Sequence; identical to SEQ ID NO: 2656
  derived and/or modified protein sequence (wt) from hemagglutinin__InfluenzaA__ADX96947

SEQ ID NO: 6513 - protein, 566 aa, Artificial Sequence; identical to SEQ ID NO: 3833
  derived and/or modified protein sequence (wt) from hemagglutinin__InfluenzaA__ADX96957

SEQ ID NO: 6514 - protein, 566 aa, Artificial Sequence; identical to SEQ ID NO: 2982
  derived and/or modified protein sequence (wt) from hemagglutinin__InfluenzaA__ADX96967

SEQ ID NO: 6515 - protein, 566 aa, Artificial Sequence; identical to SEQ ID NO: 2849
  derived and/or modified protein sequence (wt) from hemagglutinin__InfluenzaA__ADX96977

SEQ ID NO: 6516 - protein, 566 aa, Artificial Sequence
  derived and/or modified protein sequence (wt) from hemagglutinin__InfluenzaA__ADX96987
MKAILVVLLYTFATANADTLCIGYHANNSTDTVDTVLEKNVTVTHSVNILEDKHNGKLCKLRGVAPLHLGKCNIAGWILGNPECESLSTASSWSYIVETSSSDNGTCYPGDFIDYEELREQLSSVSSFERFEIFPKTSSWPNHDSNKGVTAACPHAGAKSFYKNLIWLVKKGNSYPKLSKSYINDKGKEVLVLWGIHHPSTSADQQSLYQNADAYVFVGSSRYSKKFKPEIAIRPKVRDQEGRMNYYWTLVEPGDKITFEATGNLVVPRYAFAMERNAGSGIIISDTPVHDCNTTCQTPKGAINTSLPFQNIHPITIGKCPKYVKSTKLRLATGLRNVPSIQSRGLFGAIAGFIEGGWTGMVDGWYGYHHQNEQGSGYAADLKSTQNAIDEITNKVNSVIEKMNTQFTAVGKEFNHLEKRIENLNKKVDDGFLDIWTYNAELLVLLENERTLDYHDSNVKNLYEKVRSQLKNNAKEIGNGCFEFYHKCDNTCMESVKNGTYDYPKYSEEAKLNREEIDGIKLESTRIYQILAIYSTVASSLVLVVSLGAISFWMCSNGSLQCRICI

SEQ ID NO: 6517 - protein, 566 aa, Artificial Sequence; identical to SEQ ID NO: 2849
  derived and/or modified protein sequence (wt) from hemagglutinin__InfluenzaA__ADX96997

SEQ ID NO: 6518 - protein, 566 aa, Artificial Sequence
  derived and/or modified protein sequence (wt) from hemagglutinin__InfluenzaA__ADX97007
MKAILVVLLYTFATANADTLCIGYHANNSTDTVDTVLEKNVTVTHSVNLLEDKHNGKLCKLRGVAPLHLGKCNIAGWILGNPECESLSTASSWSYIVETSSSDNGTCYPGDFIDYEELREQLSSVSSFERFEIFPKTSSWPNHDSNKGVTAACPHAGAKSFYKNLIWLVKKGNSYPKLSKSYINDKGKEVLVLWGIHHPSTSADQQSLYQNADAYVFVGTSRYSKKFKPEIAIRPKVRDQEGRMNYYWTLVEPGDKITFEATGNLVVPRYAFAMERNAGSGIIISDAPVHDCNTTCQTPKGAINTSLPFQNIHPITIGKCPKYVKSTKLRLATGLRNVPSIQSRGLFGAIAGFIEGGWTGMVDGWYGYHHQNEQGSGYAADLKSTQNAIDEITNKVNSVIEKMNTQFTAVGKEFNHLEKRIENLNKKVDDGFLDIWTYNAELLVLLENERTLDYHDSNVKNLYEKVRSQLKNNAKEIGNGCFEFYHKCDNTCMESVKNGTYDYPKYSEEAKLNREEIDGVKLESTRIYQILAIYSTVASSLVLVVSLGAISFWMCSNGSLQCRICI

SEQ ID NO: 6519 - protein, 566 aa, Artificial Sequence; identical to SEQ ID NO: 6468
  derived and/or modified protein sequence (wt) from hemagglutinin__InfluenzaA__ADX97018

SEQ ID NO: 6520 - protein, 566 aa, Artificial Sequence
  derived and/or modified protein sequence (wt) from hemagglutinin__InfluenzaA__ADX97028
MKAILVVLLYTFATANADTLCIGYHANNSTDTVDTVLEKNVTVTHSVNILEDKHNGKLCKLRGVAPLHLGKCNIAGWILGNPECESLSTASSWSYIVETSSSDNGTCYPGDFIDYEELREQLSSVSSFERFEIFPKTSSWPNHDSNKGVTAACPHAGAKSFYKNLIWLVKQGNSYPKLSKSYINDKGKEVLVLWGIHHPSTTADQQSLYQNADAYVFVGSSRYSKKFKPEIAIRPKVRDQEGRMNYYWTLVEPGDKITFEATGNLVVPRYAFAMERNAGSGIIISDTPVHDCNTTCQTPKGAINTSLPFQNIHPITIGKCPKYVKSTKLRLATGLRNVPSIQSRGLFGAIAGFIEGGWTGMVDGWYGYHHQNEQGSGYAADLKSTQNAIDEITNKVNSVIEKMNTQFTAVGKEFNHLEKRIENLNKKVDDGFLDIWTYNAELLVLLENERTLDYHDSNVKNLYEKVRSQLKNNAKEVGNGCFEFYHKCDNTCMESVKNGTYDYPKYSEEAKLNREEIDGVKLESTRIYQILAIYSTAASSLVLVVSLGAISFWMCSNGSLQCRICI

SEQ ID NO: 6521 - protein, 566 aa, Artificial Sequence; identical to SEQ ID NO: 5222
  derived and/or modified protein sequence (wt) from hemagglutinin__InfluenzaA__ADX98640

SEQ ID NO: 6522 - protein, 566 aa, Artificial Sequence; identical to SEQ ID NO: 4221
  derived and/or modified protein sequence (wt) from hemagglutinin__InfluenzaA__ADX98650

SEQ ID NO: 6523 - protein, 566 aa, Artificial Sequence
  derived and/or modified protein sequence (wt) from hemagglutinin__InfluenzaA__ADX98665
MKAILVVLLYTFATANADTLCIGYHANNSTDTVDTVLEKNVTVTHSVNLLEDKHNGKLCKLRGVAPLHLGKCNIAGWILGNPECESLSTASSWSYIVETSSSGNGTCYPGDFIDYEELREQLSSVSSFERFEIFPKTSSWPNHDSNKGVTAACPHAGAKSFYKNLIWLVKKGNSYPKLSKSYINDKGKEVLVLWGIHHPSTSADQQSLYQNADAYVFVGTSRYSKKFKPEIAIRPKVRDQEGRMNYYWTLVEPGDKITFEATGNLVVPRYAFAMERNAGSGIIISDTPVHDCNTTCQTPKGAINTSLPFQNIHPITIGKCPKYVKSTKLRLATGLRNVPSIQSRGLFGAIAGFIEGGWTGMVDGWYGYHHQNEQGSGYAADLKSTQNAIDEITNKVNSVIEKMNTQFTAVGKEFNHLEKRIENLNKKVDDGFLDIWTYNAELLVLLENERTLDYHDSNVKNLYEKVRSQLKNNAKEIGNGCFEFYHKCDNTCMESVKNGTYDYPKYSEEAKLNREEIDGVKLESTRIYQILAIYSTAASSLVLVVSLGAISFWMCSNGSLQCRICI

SEQ ID NO: 6524 - protein, 566 aa, Artificial Sequence; identical to SEQ ID NO: 3833
  derived and/or modified protein sequence (wt) from hemagglutinin__InfluenzaA__ADX98675

SEQ ID NO: 6525 - protein, 566 aa, Artificial Sequence; identical to SEQ ID NO: 3833
  derived and/or modified protein sequence (wt) from hemagglutinin__InfluenzaA__ADX98695

SEQ ID NO: 6526 - protein, 566 aa, Artificial Sequence; identical to SEQ ID NO: 4221
  derived and/or modified protein sequence (wt) from hemagglutinin__InfluenzaA__ADX98729

SEQ ID NO: 6527 - protein, 566 aa, Artificial Sequence; identical to SEQ ID NO: 5552
  derived and/or modified protein sequence (wt) from hemagglutinin__InfluenzaA__ADX98739

SEQ ID NO: 6528 - protein, 566 aa, Artificial Sequence; identical to SEQ ID NO: 5301
  derived and/or modified protein sequence (wt) from hemagglutinin__InfluenzaA__ADX98748

SEQ ID NO: 6529 - protein, 566 aa, Artificial Sequence; identical to SEQ ID NO: 2669
  derived and/or modified protein sequence (wt) from hemagglutinin__InfluenzaA__ADX98758

SEQ ID NO: 6530 - protein, 566 aa, Artificial Sequence; identical to SEQ ID NO: 3022
  derived and/or modified protein sequence (wt) from hemagglutinin__InfluenzaA__ADX98767

SEQ ID NO: 6531 - protein, 566 aa, Artificial Sequence; identical to SEQ ID NO: 4266
  derived and/or modified protein sequence (wt) from hemagglutinin__InfluenzaA__ADX98777

SEQ ID NO: 6532 - protein, 566 aa, Artificial Sequence
  derived and/or modified protein sequence (wt) from hemagglutinin__InfluenzaA__ADX98785
MKAILVVLLYTLATANADTLCIGYHANNSTDTVDTVLEKNVTVTHSVNLLEDKHNGKLCKLRGIAPLHLGKCNIAGWILGNPECESLSTASSWSYIVETSSSDNGTCYPGDFIDYEELREQLSSVSSFERFEIFPKTSSWPNHDSNKGVTAACPHAGAKSFYKNLIWLVKKGNSYPKLSKSYINDKGKEVLVLWGIHHPSTSADQQSLYQNADAYVFVGTSRYSKKFKPEIAIRPKVRDQEGRMNYYWTLVEPGDKITFEATGNLVVPRYAFAMERNAGSGIIISDTPVHDCNTTCQTPKGAINTSLPFQNIHPITIGKCPKYVKSTKLRLATGLRNVPSIQSRGLFGAIAGFIEGGWTGMVDGWYGYHHQNEQGSGYAADLKSTQNAIDEITNKVNSVIEKMNTQFTAVGKEFNHLEKRIENLNKKVDDGFLDIWTYNAELLVLLENERTLDYHDSNVKNLYEKVRSQLKNNAKEIGNGCFEFYHKCDNTCMESVKNGTYDYPKYSEEAKLNREEIGGVKLESTRIYQILAIYSTVASSLVLVVSLGAISFWMCSNGSLQCRICI

SEQ ID NO: 6533 - protein, 566 aa, Artificial Sequence; identical to SEQ ID NO: 3770
  derived and/or modified protein sequence (wt) from hemagglutinin__InfluenzaA__ADX98792

SEQ ID NO: 6534 - protein, 566 aa, Artificial Sequence; identical to SEQ ID NO: 3770
  derived and/or modified protein sequence (wt) from hemagglutinin__InfluenzaA__ADX98806

SEQ ID NO: 6535 - protein, 566 aa, Artificial Sequence; identical to SEQ ID NO: 5710
  derived and/or modified protein sequence (wt) from hemagglutinin__InfluenzaA__ADX98818

SEQ ID NO: 6536 - protein, 566 aa, Artificial Sequence; identical to SEQ ID NO: 2669
  derived and/or modified protein sequence (wt) from hemagglutinin__InfluenzaA__ADX98828

SEQ ID NO: 6537 - protein, 566 aa, Artificial Sequence; identical to SEQ ID NO: 6060
  derived and/or modified protein sequence (wt) from hemagglutinin__InfluenzaA__ADX98843

SEQ ID NO: 6538 - protein, 566 aa, Artificial Sequence
  derived and/or modified protein sequence (wt) from hemagglutinin__InfluenzaA__ADX98853
MKAILVVLLYTFATANADTLCIGYHANNSTDTVDTVLEKNVTVTHSVNLLEDKHNGKLCKLRGVAPLHLGKCNIAGWILGNPECESLSIASSWSYIVETSSSDNGTCYPGDFIDYEELREQLSSVSSFERFEIFPKTSSWPNHDSNKGVTAACPHAGAKSFYKNLIWLVKKGNSYPKLSKSYINDKGKEVLVLWGIHHPSTSADQQSLYQNADAYVFVGTSRYSKKFKPEIAIRPKVRDQEGRMNYHWTLVEPGDKITFEATGNLVVPRYAFAMERNAGSGIIISDTPVHDCNTTCQTPKGAINTSLPFQNIHPITIGKCPKYVKSTKLRLATGLRNVPSIQSRGLFGAIAGFIEGGWTGMVDGWYGYHHQNEQGSGYAADLKSTQNAIDKITNKVNSVIEKMNTQFTAVGKEFNHLEKRIENLNKKVDDGFLDIWTYNAELLVLLENERTLDYHDSNVKNLYEKVRSQLKNNAKEIGNGCFEFYHKCDNTCMESVKNGTYDYPKYSEEAKLNREEIDGVKLESTRIYQILAIYSTVASSLVLVVSLGAISFWMCSNGSLQCRICI

SEQ ID NO: 6539 - protein, 566 aa, Artificial Sequence; identical to SEQ ID NO: 3833
  derived and/or modified protein sequence (wt) from hemagglutinin__InfluenzaA__ADX98860

SEQ ID NO: 6540 - protein, 566 aa, Artificial Sequence; identical to SEQ ID NO: 5221
  derived and/or modified protein sequence (wt) from hemagglutinin__InfluenzaA__ADX98870

SEQ ID NO: 6541 - protein, 566 aa, Artificial Sequence
  derived and/or modified protein sequence (wt) from hemagglutinin__InfluenzaA__ADX98880
MKAILVVLLYTFATANADTLCIGYHANNSTDTVDTVLEKNVTVTHSVNLLEDKHNGKLCKLRGVAPLHLGKCNIAGWILGNPECESLSTASSWSYIVETSSSDNGTCYPGDFIDYEELREQLSSVSSFERFEIFPKTSSWPNHDSNKGVTAACPHAGAKSFYKNLIWLVKKGNSYPKLSKSYINDKGKEVLVLWGIHHPSTSADQQSLYQNADAYVFVGTSRYSKKFKPEIAIRPKVRDQEGRMNYYWTLVEPGDKITFEATGNLVVPRYAFAMERNAGSGIIISDTPVHDCNTTCQTPKGAINTSLPFQNIHPITIGKCPKYVKSTKLRLATGLRNVPSIQSRGLFGAIAGFIEGGWTGMVDGWYGYHHQNEQGSGYAADLKSTQNAIDEITNKVNSIIEKMNTQFTAVGKEFNHLEKRIENLNKKVDDGFLDIWTYNAELLVLLENERTLDYHDSNVKNLYEKVRSQLKNNAKEIGNGCFEFYHKCDNTCMESVKNGTYDYPKYSEEAKLNREEIDGVKLESTRIYQILAIYSTVASSLVLVVSLGAISFWMCSNGSLQCRICI

SEQ ID NO: 6542 - protein, 566 aa, Artificial Sequence
  derived and/or modified protein sequence (wt) from hemagglutinin__InfluenzaA__ADX98890
MKAILVVLLYTFATANADTLCIGYHANNSTDTVDTVLEKNVTVTHSVNLLEDKHNGKLCKLRGVAPLHLGKCNIAGWILGNPECESLSTASSWSYIVETSSSDNGTCYPGDFIDYEELREQLSSVSSFERFEIFPKTSSWPNHDSNKGVTAACPHAGAKSFYKNLIWLVKKGNSYPKLSKSYINDKGKEVLVLWGIHHPSTSADQQSLYQNADAYVFVGTSRYSKKFKPEIAIRPKVRDQEGRMNYYWTLVEPGDKITFEATGNLVVPRYAFAMERNAESGIIISDTPVHDCNTTCQTPKGAINTSLPFQNIHPITIGKCPKYVKSTKLRLATGLRNVPSIQSRGLFGAIAGFIEGGWTGMVDGWYGYHHQNEQGSGYAADLKSTQNAIDKITNKVNSVIEKMNTQFTAVGKEFNHLEKRIENLNKKVDDGFLDIWTYNAELLVLLENERTLDYHDSNVKNLYEKVRSQLKNNAKEIGNGCFEFYHKCDNTCMESVKNGTYDYPKYSEEAKLNREEIDGVKLESTRIYQILAIYSTVASSLVLVVSLGAISFWMCSNGSLQCRICI

SEQ ID NO: 6543 - protein, 566 aa, Artificial Sequence; identical to SEQ ID NO: 4221
  derived and/or modified protein sequence (wt) from hemagglutinin__InfluenzaA__ADX98900

SEQ ID NO: 6544 - protein, 566 aa, Artificial Sequence
  derived and/or modified protein sequence (wt) from hemagglutinin__InfluenzaA__ADX98910
MKAILVVLLYTFATANADTLCIGYHANNSTDTVDTVLEKNVTVTHSVNLLEDKHNGKLCKLRGVAPLHLGKCNIAGWILGNPECESLSTAISWSYIVETSSSDNGTCYPGDFIDYEELREQLSSVSSFERFEIFPKTSSWPNHDSNKGVTAACPHAGAKSFYKNLIWLVKKGNSYPKLSKSYINDKGKEVLVLWGIHHPSTSADQQSLYQNADAYVFVGTSRYSKKFKPEIAIRPKVRDQEGRMNYYWTLVEPGDKITFEATGNLVVPRYAFAMERNAGSGIIISDTPVHDCNTTCQTPKGAINTSLPFQNIHPITIGKCPKYVKSTKLRLATGLRNVPSIQSRGLFGAIAGFIEGGWTGMVDGWYGYHHQNEQGSGYAADLKSTQNAIDKITNKVNSVIEKMNTQFTAVGKEFNHLEKRIENLNKKVDDGFLDIWTYNAELLVLLENERTLDYHDSNVKNLYEKVRSQLKNNAKEIGNGCFEFYHKCDNTCMESVKNGTYDYPKYSEEAKLNREEIDGVKLESTRIYQILAIYSTVASSLVLVVSLGAISFWMCSNGSLQCRICI

SEQ ID NO: 6545 - protein, 566 aa, Artificial Sequence; identical to SEQ ID NO: 4221
  derived and/or modified protein sequence (wt) from hemagglutinin__InfluenzaA__ADX98920

SEQ ID NO: 6546 - protein, 566 aa, Artificial Sequence; identical to SEQ ID NO: 3833
  derived and/or modified protein sequence (wt) from hemagglutinin__InfluenzaA__ADX98930

SEQ ID NO: 6547 - protein, 566 aa, Artificial Sequence; identical to SEQ ID NO: 3460
  derived and/or modified protein sequence (wt) from hemagglutinin__InfluenzaA__ADX98940

SEQ ID NO: 6548 - protein, 566 aa, Artificial Sequence; identical to SEQ ID NO: 5289
  derived and/or modified protein sequence (wt) from hemagglutinin__InfluenzaA__ADX98950

SEQ ID NO: 6549 - protein, 566 aa, Artificial Sequence; identical to SEQ ID NO: 5270
  derived and/or modified protein sequence (wt) from hemagglutinin__InfluenzaA__ADX98960

SEQ ID NO: 6550 - protein, 566 aa, Artificial Sequence
  derived and/or modified protein sequence (wt) from hemagglutinin__InfluenzaA__ADX98970
MKAILVVLLYTFATANADTLCIGYHANNSTDTVDTVLEKNVTVTHSVNLLEDKHNGKLCKLRGVAPLHLGKCNIAGWILGNPECESLSTASSWSYIVETSSSDNGTCYPGDFIDYEELREQLSSVSSFERFEIFPKTSSWPNHDSNKGVTAACPHAGAKSFYKNLIWLVKKGNSYPKLSKSYINDKGKEVLVLWGIHHPSTSADQQGLYQNADAYVFVGTSRYSKKFKPEIAIRPKVRDQEGRMNYYWTLVEPGDKITFEATGNLVVPRYAFAMERNAGSGIIISDTPVHDCNTTCQTPKGAINTSLPFQNIHPITIGKCPKYVKSTKLRLATGLRNIPSIQSRGLFGAIAGFIEGGWTGMVDGWYGYHHQNEQGSGYAADLKSTQNAIDKITNKVNSVIEKMNTQFTAVGKEFNHLEKRIENLNKKVDDGFLDIWTYNAELLVLLENERTLDYHDSNVKNLYEKVRSQLKNNAKEIGNGCFEFYHKCDNTCMESVKNGTYDYPKYSEEAKLNREEIDGVKLESTRIYQILAIYSTVASSLVLVVSLGAISFWMCSNGSLQCRICI

SEQ ID NO: 6551 - protein, 566 aa, Artificial Sequence; identical to SEQ ID NO: 3770
  derived and/or modified protein sequence (wt) from hemagglutinin__InfluenzaA__ADX98980

SEQ ID NO: 6552 - protein, 566 aa, Artificial Sequence; identical to SEQ ID NO: 2669
  derived and/or modified protein sequence (wt) from hemagglutinin__InfluenzaA__ADX98990

SEQ ID NO: 6553 - protein, 566 aa, Artificial Sequence; identical to SEQ ID NO: 3833
  derived and/or modified protein sequence (wt) from hemagglutinin__InfluenzaA__ADX99000

SEQ ID NO: 6554 - protein, 565 aa, Artificial Sequence
  derived and/or modified protein sequence (wt) from hemagglutinin__InfluenzaA__ADX99581
MKANLLVLLSALAAADADTICIGYHANNSTDTVDTVLEKNVTVTHSVNLLEDSHNGKLCRLKGIAPLQLGKCNIAGWLLGNPECDPLLPVRSWSYIVETPNSENGICYPGDFIDYEELREQLSSVSSFERFEIFPKESSWPNHNTNGVTAACSHEGKSSFYRNLLWLTEKEGSYPKLKNSYVNKKGKEVLVLWGIHHPPNSKEQQNLYQNENAYVSVVTSNYNRRFTPEIAERPKVRDQAGRMNYYWTLLKPGDTIIFEANGNLIAPMYAFALSRGFGSGIITSNASMHECNTKCQTPLGAINSSLPYQNIHPVTIGECPKYVRSAKLRMVTGLRNTPSIQSRGLFGAIAGFIEGGWTGMIDGWYGYHHQNEQGSGYAADQKSTQNAINGITNKVNTVIEKMNIQFTAVGKEFNKLEKRMENLNKKVDDGFLDIWTYNAELLVLLENERTLDFHDSNVKNLYEKVKSQLKNNAKEIGNGCFEFYHKCDNECMESVRNGTYDYPKYSEESKLNREKVDGVKLESMGIYQILAIYSTVASSLVLLVSLGAISFWMCSNGSLQCRICI

SEQ ID NO: 6555 - protein, 565 aa, Artificial Sequence; identical to SEQ ID NO: 6554
  derived and/or modified protein sequence (wt) from hemagglutinin__InfluenzaA__ADX99592

SEQ ID NO: 6556 - protein, 565 aa, Artificial Sequence; identical to SEQ ID NO: 6554
  derived and/or modified protein sequence (wt) from hemagglutinin__InfluenzaA__ADX99603

SEQ ID NO: 6557 - protein, 565 aa, Artificial Sequence
  derived and/or modified protein sequence (wt) from hemagglutinin__InfluenzaA__ADX99614
MKANLLVLLSALAAADADTICIGYHANNSTDTVDTVLEKNVTVTHSVNLLEDSHNGKLCRLKGIAPLQLGKCNIAGWLLGNPECDPLLPVRSWSYIVETPNSENGICYPGDFIDYEELREQLSSVSSFERFEIFPKESSWPNHNTNGVTAACSHEGKSSFYRNLLWLTEKKGSYPKLKNSYVNKKGKEVLVLWGIHHPPNSKEQQNLYQNENAYVSVVTSNYNRRFTPEIAERPKVRDQAGRMNYYWTLLKPGDTIIFEANGNLIAPMYAFALSRGFGSGIITSNASMHECNTKCQTPLGAINSSLPYQNIHPVTIGECPKYVRSAKLRMVTGLRNTPSIQSRGLFGAIAGFIEGGWTGMIDGWYGYHHQNEQGSGYAADQKSTQNAINGITNKVNTVIEKMNIQFTAVGKEFNKLEKRMENLNKKVDDGFLDIWTYNAELLVLLENERTLDFHDSNVKNLYEKVKSQLKNNAKEIGNGCFEFYHKCDNECMESVRNGTYDYPKYSEESKLNREKVDGVKLESMGIYQILAIYSTVASSLVLLVSLGAISFWMCSNGSLQCRICI

SEQ ID NO: 6558 - protein, 565 aa, Artificial Sequence
  derived and/or modified protein sequence (wt) from hemagglutinin__InfluenzaA__ADX99625
MKANLLVLLSALAAADADTICIGYHANNSTDTVDTVLEKNVTVTHSVNLLEDSHNGKLCRLKGIAPLQLGKCNIAGWLLGNPECDPLLPVRSWSYIVETPNSENGICYPGDFIDYEELREQLSSVSSFERFEIFPKESSWPNHNTNGVTAACSHEGKSSFYRNLLWLTEKEGSYPKLKNSYVNKKGKEVLVLWGIHHPPNSKEQQNLYQNENAYVSVVTSNYNRRFTPEIAERPKVRDQAGRMNYYWTLLKPGDTIIFGANGNLIAPMYAFALSRGFGSGIITSNASMHECNTKCQTPLGAINSSLPYQNIHPVTIGECPKYVRSAKLRMVTGLRNTPSIQSRGLFGAIAGFIEGGWTGMIDGWYGYHHQNEQGSGYAADQKSTQNAINGITNKVNTVIEKMNIQFTAVGKEFNKLEKRMENLNKKVDDGFLDIWTYNAELLVLLENERTLDFHDSNVKNLYEKVKSQLKNNAKEIGNGCFEFYHKCDNECMESVRNGTYDYPKYSEESKLNREKVDGVKLESMGIYQILAIYSTVASSLVLLVSLGAISFWMCSNGSLQCRICI

SEQ ID NO: 6559 - protein, 565 aa, Artificial Sequence
  derived and/or modified protein sequence (wt) from hemagglutinin__InfluenzaA__ADX99636
MKANLLVLLSALAAADADTICIGYHANNSTDTVDTVLEKNVTVTHSVNLLEDSHNGKLCRLKGIAPLQLGKCNIAGWLLGNPECDPLLPVRSWSYIVETPNSENGICYPGDFIDYEELREQLSSVSSFERFEIFPKESSWPNHNTNGVTAACSHEGKSSFYRNLLWLTKKEGSYPKLKNSYVNKKGKEVLVLWGIHHPPNSKEQQNLYQNENAYVSVVTSNYNRRFTPEIAERPKVRDQAGRMNYYWTLLKPGDTIIFEANGNLIAPMYAFALSRGFGSGIITSNASMHECNTKCQTPLGAINSSLPYQNIHPVTIGECPKYVRSAKLRMVTGLRNTPSIQSRGLFGAIAGFIEGGWTGMIDGWYGYHHQNEQGSGYAADQKSTQNAINGITNKVNTVIEKMNIQFTAVGKEFNKLEKRMENLNKKVDDGFLDIWTYNAELLVLLENERTLDFHDSNVKNLYEKVKSQLKNNAKEIGNGCFEFYHKCDNECMESVRNGTYDYPKYSEESKLNREKVDGVKLESMGIYQILAIYSTVASSLVLLVSLGAISFWMCSNGSLQCRICI

SEQ ID NO: 6560 - protein, 565 aa, Artificial Sequence; identical to SEQ ID NO: 3278
  derived and/or modified protein sequence (wt) from hemagglutinin__InfluenzaA__ADX99647

SEQ ID NO: 6561 - protein, 565 aa, Artificial Sequence
  derived and/or modified protein sequence (wt) from hemagglutinin__InfluenzaA__ADX99680
MKANLLVLLCALAAADADTICIGYHANNSTDTVDTVLEKNVTVTHSVNLLEDSHNGKLCRLKGIAPLQLGKCNIAGWLLGNPECDPLLPVRSWSYIVETPNSENGICYPGDFIDYEELREQLSSVSSFERFEIFPKESSWSNHNTNGVTAACSHEGKSSFYRNLLWLTEKEGSYPKLKNSYVNKKGKEVLVLWGIHHPPNSKEQQNLYQNENAYVSVVTSNYNRRFTPEIAERPKVRDQAGRMNYYWTLLKPGDTIIFEANGNLIAPMYAFALSRGFGSGIITSNASMHECNTKCQTPLGAINSSLPYQNIHPVTIGECPKYVRSAKLRMVTGLRNIPSIQSRGLFGAIAGFIEGGWTGMIDGWYGYHHQNEQGSGYAADQKSTQNAINGITNKVNTVIEKMNIQFTAVGKEFNKLEKRMENLNKKVDDGFLDIWTYNAELLVLLENERTLDFHDSNVKNLYEKVKSQLKNNAKEIGNGCFEFYHKCDNECMESVRNGTYDYPKYSEESKLNREKVDGVKLESMGIYQILAIYSTVASSLVLLVSLGAISFWMCSNGSLQCRICI

SEQ ID NO: 6562 - protein, 565 aa, Artificial Sequence
  derived and/or modified protein sequence (wt) from hemagglutinin__InfluenzaA__ADX99702
MKANLLVLLCALAAADADTICIGYHANNSTDTVDTVLEKNVTVTHSVNLLEDSHNGKLCRLKGIAPLQLGKCNIAGWLLGNPECDPLLPVRSWSYIVETPNSENGICYPGDFIDYEELREQLSSVSSFERFEIFPKESSWPNHNTNGVTAACSHEGKSSFYRNLLWLTEKEGSYPKLKKSYVNKKGKEVLVLWGIHHPPNSKEQQNLYQNENAYVSVVTSNYNRRFTPEIAERPKVRDQAGRMNYYWTLLKPGDTIIFEANGNLIAPMYAFALSRGFGSGIITSNASMHECNTKCQTPLGAINSSLPYQNIHPVTIGECPKYVRSAKLRMVTGLRNIPSIQSRGLFGAIAGFIEGGWTGMIDGWYGYHHQNEQGSGYAADQKSTQNAINGITNKVNTVIEKMNIQFTAVGKEFNKLEKRMENLNKKVDDGFLDIWTYNAELLVLLENERTLDFHDSNVKNLYEKVKSQLKNNAKEIGNGCFEFYHKCDNECMESVRNGTYDYPKYSEESKLNREKVDGVKLESMGIYQILAIYSTVASSLVLLVSLGAISFWMCSNGSLQCRICI

SEQ ID NO: 6563 - protein, 565 aa, Artificial Sequence; identical to SEQ ID NO: 6562
  derived and/or modified protein sequence (wt) from hemagglutinin__InfluenzaA__ADX99843

SEQ ID NO: 6564 - protein, 565 aa, Artificial Sequence
  derived and/or modified protein sequence (wt) from hemagglutinin__InfluenzaA__ADX99854
MKANLLVLLCALAAADADTICIGYHANNSTDTVDTVLEKNVTVTHSVNLLEDSHNGKLCRLKGIAPLQLGKCNIAGWLLGNPECDPLLPVRSWSYIVETPNSENGICYPGDFIDYEELREQLSSVSSFERFEIFPKESSWPNHNTNGVTAACSHEGKSSFYRNLLWLTEKEGSYLKLKNSYVNKKGKEVLVLWGIHHPPNSKEQQNLYQNENAYVSVVTSNYNRRFTPEIAERPKVRDQAGRMNYYWTLLKPGDTIIFEANGNLIAPMYAFALSRGFGSGIITSNASMHECNTKCQTPLGAINSSLPYQNIHPVTIGECPKYVRSAKLRMVTGLRNIPSIQSRGLFGAIAGFIEGGWTGMIDGWYGYHHQNEQGSGYAADQKSTQNAINGITNKVNTVIEKMNIQFTAVGKEFNKLEKRMENLNKKVDDGFLDIWTYNAELLVLLENERTLDFHDSNVKNLYEKVKSQLKNNAKEIGNGCFEFYHKCDNECMESVRNGTYDYPKYSEESKLNREKVDGVKLESMGIYQILAIYSTVASSLVLLVSLGAISFWMCSNGSLQCRICI

SEQ ID NO: 6565 - protein, 565 aa, Artificial Sequence
  derived and/or modified protein sequence (wt) from hemagglutinin__InfluenzaA__ADX99865
MKANLLVLLCALAAADADTICIGYHANNSTDTVDTVLEKNVTVTHSVNLLEDSHNGKLCRLKGIAPLQLGKCNIAGWLLGNPECDPLLPVRSWSYIVETPNSENGICYPGDFIDYEELREQLSSVSSFERFEIFPKESSWPNHNTNGVTAACSHEGKSSFYRNLLWLTEKEGSYPKQKNSYVNKKGKEVLVLWGIHHPPNSKEQQNLYQNENAYVSVVTSNYNRRFTPEIAERPKVRDQAGRMNYYWTLLKPGDTIIFEANGNLIAPMYAFALSRGFGSGIITSNASMHECNTKCQTPLGAINSSLPYQNIHPVTIGECPKYVRSAKLRMVTGLRNIPSIQSRGLFGAIAGFIEGGWTGMIDGWYGYHHQNEQGSGYAADQKSTQNAINGITNKVNTVIEKMNIQFTAVGKEFNKLEKRMENLNKKVDDGFLDIWTYNAELLVLLENERTLDFHDSNVKNLYEKVKSQLKNNAKEIGNGCFEFYHKCDNECMESVRNGTYDYPKYSEESKLNREKVDGVKLESMGIYQILAIYSTVASSLVLLVSLGAISFWMCSNGSLQCRICI

SEQ ID NO: 6566 - protein, 565 aa, Artificial Sequence
  derived and/or modified protein sequence (wt) from hemagglutinin__InfluenzaA__ADX99887
MKANLLVLLCALAAADADTICIGYHANNSTDTVDTVLEKNVTVTHSVNLLEDSHNGKLCRLKGIAPLQLGKCNIAGWLLGNPECDPLLPVRSWSYIVETPNSENGICYPGDFIDYEELREQLSSVSSFERFEIFPKESSWPNHNTNGVTAACSHEGKSSFYRNLLWLTEKEGSYPKLENSYVNKKGKEVLVLWGIHHPPNSKEQQNLYQNENAYVSVVTSNYNRRFTPEIAERSKVRDQAGRMNYYWTLLKPGDTIIFEANGNLIAPMYAFALSRGFGSGIITSNASMHECNTKCQTPLGAINSSLPYQNIHPVTIGECPKYVRSAKLRMVTGLRNIPSIQSRGLFGAIAGFIEGGWTGMIDGWYGYHHQNEQGSGYAADQKSTQNAINGITNKVNTVIEKMNIQFTAVGKEFNKLEKRMENLNKKVDDGFLDIWTYNAELLVLLENERTLDFHDSNVKNLYEKVKSQLKNNAKEIGNGCFEFYHKCDNECMESVRNGTYDYPKYSEESKLNREKVDGVKLESMGIYQILAIYSTVASSLVLLVSLGAISFWMCSNGSLQCRICI

SEQ ID NO: 6567 - protein, 565 aa, Artificial Sequence
  derived and/or modified protein sequence (wt) from hemagglutinin__InfluenzaA__ADX99898
MKANLLVLLCALAAADADTICIGYHANNSTDTVDTVLEKNVTVTHSVNLLEDSHNGKLCRLKGIAPLQLGKCNIAGWLLGNPECDPLLPVRSWSYIVETPNSENGICYPGDFIDYEELREQLSSVSSFERFEIFPKESSWPNHNTNGVTAACSHEGKSSFYRNLLWLTEKEGSYPKLKNYYVNKKGKEVLVLWGIHHPPNSKEQQNLYQNENAYVSVVTSNYNRRFTPEIAERPKVRDQAGRMNYYWTLLKPGDTIIFEANGNLIAPMYAFALSRGFGSGIITSNASMHECNTKCQTPLGAINSSLPYQNIHPVTIGECPKYVRSAKLRMVTGLRNIPSIQSRGLFGAIAGFIEGGWTGMIDGWYGYHHQNEQGSGYAADQKSTQNAINGITNKVNTVIEKMNIQFTAVGKEFNKLEKRMENLNKKVDDGFLDIWTYNAELLVLLENERTLDFHDSNVKNLYEKVKSQLKNNAKEIGNGCFEFYHKCDNECMESVRNGTYDYPKYSEESKLNREKVDGVKLESMGIYQILAIYSTVASSLVLLVSLGAISFWMCSNGSLQCRICI

SEQ ID NO: 6568 - protein, 565 aa, Artificial Sequence
  derived and/or modified protein sequence (wt) from hemagglutinin__InfluenzaA__ADX99909
MKANLLVLLCALAAADADTICIGYHANNSTDTVDTVLEKNVTVTHSVNLLEDSHNGKLCRLKGIAPLQLGKCNIAGWLLGNPECDPLLPVRSWSYIVETPNSENGICYPGDFIDYEELREQLSSVSSFERFEIFPKESSWPNHNTNGVTAACSHEGKSSFYRNLLWLTEKEGSYPKLKNFYVNKKGKEVLVLWGIHHPPNSKEQQNLYQNENAYVSVVTSNYNRRFTPEIAERPKVRDQAGRMNYYWTLLKPGDTIIFEANGNLIAPMYAFALSRGFGSGIITSNASMHECNTKCQTPLGAINSSLPYQNIHPVTIGECPKYVRSAKLRMVTGLRNIPSIQSRGLFGAIAGFIEGGWTGMIDGWYGYHHQNEQGSGYAADQKSTQNAINGITNKVNTVIEKMNIQFTAVGKEFNKLEKRMENLNKKVDDGFLDIWTYNAELLVLLENERTLDFHDSNVKNLYEKVKSQLKNNAKEIGNGCFEFYHKCDNECMESVRNGTYDYPKYSEESKLNREKVDGVKLESMGIYQILAIYSTVASSLVLLVSLGAISFWMCSNGSLQCRICI

SEQ ID NO: 6569 - protein, 565 aa, Artificial Sequence; identical to SEQ ID NO: 6568
  derived and/or modified protein sequence (wt) from hemagglutinin__InfluenzaA__ADX99920

SEQ ID NO: 6570 - protein, 565 aa, Artificial Sequence
  derived and/or modified protein sequence (wt) from hemagglutinin__InfluenzaA__ADX99931
MKANLLVLLCALAAADADTICIGYHANNSTDTVDTVLEKNVTVTHSVNLLEDSHNGKLCRLKGIAPLQLGKCNIAGWLLGNPECDPLLPVRSWSYIVETPNSENGICYPGDFIDYEELREQLSSVSSFERFEIFPKESSWPNHNTNGVTAACSHEGKSSFYRNLLWLTEKEGSYPKLENSYVNKKGKEVLVLWGIHHPPNSKEQQNLYQNENAYVSVVTSNYNRRFTPEIAGRPKVRDQAGRMNYYWTLLKPGDTIIFEANGNLIAPMYAFALSRGFGSGIITSNASMHECNTKCQTPLGAINSSLPYQNIHPVTIGECPKYVRSAKLRMVTGLRNIPSIQSRGLFGAIAGFIEGGWTGMIDGWYGYHHQNEQGSGYAADQKSTQNAINGITNKVNTVIEKMNIQFTAVGKEFNKLEKRMENLNKKVDDGFLDIWTYNAELLVLLENERTLDFHDSNVKNLYEKVKSQLKNNAKEIGNRCFEFYHKCDNECMESVRNGTYDYPKYSEESKLNREKVDGVKLESMGIYQILAIYSTVASSLVLLVSLGAISFWMCSNGSLQCRICI

SEQ ID NO: 6571 - protein, 565 aa, Artificial Sequence
  derived and/or modified protein sequence (wt) from hemagglutinin__InfluenzaA__ADX99964
MKANLLVLLCALAAADADTICIGYHANNSTDTVDTVLEKNVTVTHSVNLLEDSHNGKLCRLKGIAPLQLGKCNIAGWLLGNPECDPLLPVRSWSYIVETPNSENGICYPGDFIDYEELREQLSSVSSFERFEIFPKESSWPKHNTNGVTAACSHEGKSSFYRNLLWLTEKEGSYPKLKNSYVNKKGKEVLVLWGIHHPPNSKEQQNLYQNENAYVSVVTSNYNRRFTPEIAERPKVRDQAGRMNYYWTLLKPGDTIIFEANGNLIAPMYAFALSRGFGSGIITSNASMHECNTKCQTPLGAINSSLPYQNIHPVTIGECPKYVRSAKLRMVTGLRNIPSIQSRGLFGAIAGFIEGGWTGMIDGWYGYHHQNEQGSGYAADQKSTQNAINGITNKVNTVIEKMNIQFTAVGKEFNKLEKRMENLNKKVDDGFLDIWTYNAELLVLLENERTLDFHDSNVKNLYEKVKSQLKNNAKEIGNGCFEFYHKCDNECMESVRNGTYDYPKYSEESKLNREKVDGVKLESMGIYQILAIYSTVASSLVLLVSLGAISFWMCSNGSLQCRICI

SEQ ID NO: 6572 - protein, 565 aa, Artificial Sequence
  derived and/or modified protein sequence (wt) from hemagglutinin__InfluenzaA__ADX99975
MKANLLVLLCALAAADADTICIGYHANNSTDTVDTVLEKNVTVTHSVNLLEDSHNGKLCRLKGIAPLQLGKCNIAGWLLGNPECDPLLPVRSWSYIVETPNSENGICYPGDFIDYEELREQLSSVSSFERFEIFPKESSWPNHNTNGVTATCSHEGKSSFYRNLLWLTEKEGSYPELKNSYVNKKGKEVLVLWGIHHPPNSKEQQNLYQNENAYVSVVTSNYNRRFTPEIAERPKVRDQAGRMNYYWTLLKPGDTIIFEANGNLIAPMYAFALSRGFGSGIITSNASMHECNTKCQTPLGAINSSLPYQNIHPVTIGECPKYVRSAKLRMVTGLRNIPSIQSRGLFGAIAGFIEGGWTGMIDGWYGYHHQNEQGSGYAADQKSTQNAINGITNKVNTVIEKMNIQFTAVGKEFNKLEKRMENLNKKVDDGFLDIWTYNAELLVLLENERTLDFHDSNVKNLYEKVKSQLKNNAKEIGNGCFEFYHKCDNECMESVRNGTYDYPKYSEESKLNREKVDGVKLESMGIYQILAIYSTVASSLVLLVSLGAISFWMCSNGSLQCRICI

SEQ ID NO: 6573 - protein, 565 aa, Artificial Sequence
  derived and/or modified protein sequence (wt) from hemagglutinin__InfluenzaA__ADX99986
MKANLLVLLCALAAADADTICIGYHANNSTDTVDTVLEKNVTVTHSVNLLEDSHNGKLCRLKGIAPLQLGKCNIAGWLLGNPKCDPLLPVRSWSYIVETPNSENGICYPGDFIDYEELREQLSSVSSFERFEIFPKESSWPNHNTNGVTAACSHEGKSSFYRNLLWLTEKEGSYPKLENSYVNKKGKEVLVLWGIHHPPNSKEQQNLYQNENAYVSVVTSNYNRRFTPEIAERPKVRDQAGRMNYYWTLLKPGDTIIFEANGNLIAPMYAFALSRGFGSGIITSNASMHECNTKCQTPLGAINSSLPYQNIHPVTIGECPKYVRSAKLRMVTGLRNIPSIQSRGLFGAIAGFIEGGWTGMIDGWYGYHHQNEQGSGYAADQKSTQNAINGITNKVNTVIEKMNIQFTAVGKEFNKLEKRMENLNKKVDDGFLDIWTYNAELLVLLENERTLDFHDSNVKNLYEKVKSQLKNNAKEIGNGCFEFYHKCDNECMESVRNGTYDYPKYSEESKLNREKVDGVKLESMGIYQILAIYSTVASSLVLLVSLGAISFWMCSNGSLQCRICI

SEQ ID NO: 6574 - protein, 565 aa, Artificial Sequence
  derived and/or modified protein sequence (wt) from hemagglutinin__InfluenzaA__ADX99997
MKANLLVLLCALAAADADTICIGYHANNSTDTVDTVLEKNVTVTHSVNLLEDSHNGKLCRLKGIAPLQLGKCNIAGWLLGNPECDPLLPVRSWSYIVETPNSENGICYPGDFIDYEELREQLSSVSSFERFEIFPKESSWPNHNTNGVTAACSHEGKSSFYRNLLWLTEKEGSYPKLENSYVNKKGKEVLVLWGIHHPPNSKEQQNLYQNENAYVSVVTSNYNRRFTPEIAERPKVRDQAGRMKYYWTLLKPGDTIIFEANGNLIAPMYAFALSRGFGSGIITSNASMHECNTKCQTPLGAINSSLPYQNIHPVTIGECPKYVRSAKLRMVTGLRNIPSIQSRGLFGAIAGFIEGGWTGMIDGWYGYHHQNEQGSGYAADQKSTQNAINGITNKVNTVIEKMNIQFTAVGKEFNKLEKRMENLNKKVDDGFLDIWTYNAELLVLLENERTLDFHDSNVKNLYEKVKSQLKNNAKEIGNGCFEFYHKCDNECMESVRNGTYDYPKYSEESKLNREKVDGVKLESMGIYQILAIYSTVASSLVLLVSLGAISFWMCSNGSLQCRICI

SEQ ID NO: 6575 - protein, 565 aa, Artificial Sequence
  derived and/or modified protein sequence (wt) from hemagglutinin__InfluenzaA__ADY00009
MKANLLVLLCALAAADADTICIGYHANNSTDTVDTVLEKNVTVTHSVNLLEDSHNGKLCRLKGIAPLQLGKCNIAGWLLGNPECDPLLPVRSWSYIVETPNSENGICYPGDFIDYEELREQLSSVSSFERFEIFPKESSWPNHNTNGVTAACSHEGKSSFYRNLLWLTEKKGSYPKLENSYVNKKGKEVLVLWGIHHPPNSKEQQNLYQNENAYVSVVTSNYNRRFTPEIAERPKVRDQAGRMNYYWTLLKPGDTIIFEANGNLIAPMYAFALSRGFGSGIITSNASMHECNTKCQTPLGAINSSLPYQNIHPVTIGECPKYVRSAKLRMVTGLRNIPSIQSRGLFGAIAGFIEGGWTGMIDGWYGYHHQNEQGSGYAADQKSTQNAINGITNKVNTVIEKMNIQFTAVGKEFNKLEKRMENLNKKVDDGFLDIWTYNAELLVLLENERTLDFHDSNVKNLYEKVKSQLKNNAKEIGNGCFEFYHKCDNECMESVRNGTYDYPKYSEESKLNREKVDGVKLESMGIYQILAIYSTVASSLVLLVSLGAISFWMCSNGSLQCRICI

SEQ ID NO: 6576 - protein, 565 aa, Artificial Sequence; identical to SEQ ID NO: 3278
  derived and/or modified protein sequence (wt) from hemagglutinin__InfluenzaA__ADY00020

SEQ ID NO: 6577 - protein, 565 aa, Artificial Sequence
  derived and/or modified protein sequence (wt) from hemagglutinin__InfluenzaA__ADY04727
MKAKLLVLLCTFTATYADTICIGYHANNSTDTVDTVLEKNVTVTHSVNLLEDSHNGKLCLLKGIAPLQLGNCSVAGWILGNPECELLISKESWSYIVETPNPENGTCYPGYFADYEELREQLSSVSSFERFEIFPKGSSWPNHTVTGVSASCSHNGKSSFYRNLLWLTGKNGLYPNLSMSYVNNKEKEVLVLWGVHHPPNIGNQRALYHTENAYVSVVSSHYSRRFTPEIAKRPKVRDQEGRINYYWTLLEPGDTIIFEANGNLIAPWYAFALSRGFGSGIITSNAPMGECDAKCQTPQGAINSSLPFQNVHPVTIGECPKYVRSAKLRMVTGLRNIPSIQSRGLFGAIAGFIEGGWTGMVDGWYGYHHQNEQGSGYAADQKSTQNAINGITNKVNSVIEKMNTQFTAVGKEFNKLERRMENLNKKVDDGFLDIWTYNAELLVLLENERTLDFHDSNLKNLYEKVKSQLKNNAKEIGNGCFEFYHKCNNECMESVKNGTYDYPKYSEESKLNREKIDGVKLESMGVYQILAIYSTVASSLVLLVSLGAISFWMCSNGSLQCRICI

SEQ ID NO: 6578 - protein, 566 aa, Artificial Sequence; identical to SEQ ID NO: 3613
  derived and/or modified protein sequence (wt) from hemagglutinin__InfluenzaA__ADY11836

SEQ ID NO: 6579 - protein, 566 aa, Artificial Sequence; identical to SEQ ID NO: 3588
  derived and/or modified protein sequence (wt) from hemagglutinin__InfluenzaA__ADY17654

SEQ ID NO: 6580 - protein, 566 aa, Artificial Sequence
  derived and/or modified protein sequence (wt) from hemagglutinin__InfluenzaA__ADY17665
MKTIIALSYILCLIFAQKLPGNDNSTATLCLGHHAVPNGTIVKTITNDQIEVTNATELVQSSSTGEICDSPHQILDGKNCTLIDALLGDPQCDGFQNKKWDLFVERSKAYSNCYPYDVPDYASLRSLVASSGTLEFNNESFNWTGVTQDGTSSACIRRSKNSFFSRLNWLTHLNFKYPALNVTMPNNEQFDKLYIWGVHHPGTDKDQIFLYAQASGRITVSTKRSQQTAIPNIGSRPRVRNIPSRISIYWTIVKPGDILLINSTGNLIAPRGYFKIRSGKSSIMRSDAPIGKCNSECITPNGSIPNDKPFQNVNRITYGACPRYVKQNTLKLATGMRNVPEKQTRGIFGAIAGFIENGWEGMVDGWYGFRHQNSEGRGQAADLKSTQAAIDQINGKLNRLIGKTNEKFHQIEKEFSEVEGRIQDLEKYVEDTKIDLWSYNAELLVALENQHTIDLTDSEMNKLFEKTKKQLRENAEDMGNGCFKIYHKCDNACIGSIRNGTYDHDVYRDEALNNRFQIKGVELKSGYKDWILWISFAISCFLLCVALLGFIMWACQKGNIRCNICI

SEQ ID NO: 6581 - protein, 566 aa, Artificial Sequence; identical to SEQ ID NO: 3613
  derived and/or modified protein sequence (wt) from hemagglutinin__InfluenzaA__ADY17676

SEQ ID NO: 6582 - protein, 566 aa, Artificial Sequence
  derived and/or modified protein sequence (wt) from hemagglutinin__InfluenzaA__ADY17687
MKTIIALSYILCLVFAQKLPGNDNSTATLCLGHHAVPNGTIVKTITNDQIEVTNATELVQSSSTGEICDSPHQILDGKNCTLIDALLGDPQCDGFQNKKWDLFVERSKAYSNCYPYDVPDYASLRSLVASSGTLEFNNESFNWTGVTQDGTSSACIRRSKNSFFSRLNWLTHLNFKYPALNVTMPNNEQFDKLYIWGVHHPGTDKDQIFLYAQASGRITVSTKRSQQTAIPNIGSRPRVRNIPSRISIYWTIVKPGDILLINSTGNLIAPRGYFKIRSGKSSIMRSDAPIGKCNSECITPNGSIPNDKPFQNVNRITYGACPRYVKQNTLKLATGMRNVPEKQTRGIFGAIAGFIENGWEGMVDGWYGFRHQNSEGRGQAADLKSTQAAIDQINGKLNRLIGKTNEKFHQIEKEFSEVEGRIQDLEKYVEDTKIDLWSYNAELLVALENQHTIDLTDSEMNKLFEKTKKQLRENAEDMGNGCFKIYHKCDNACIGSIRNGTYDHDVYRDEALNNRFQIKGVELKSGYKDWILWISFAISCFLLCAALLGFIMWACQKGNIRCNICI

SEQ ID NO: 6583 - protein, 566 aa, Artificial Sequence; identical to SEQ ID NO: 3588
  derived and/or modified protein sequence (wt) from hemagglutinin__InfluenzaA__ADY17698

SEQ ID NO: 6584 - protein, 566 aa, Artificial Sequence
  derived and/or modified protein sequence (wt) from hemagglutinin__InfluenzaA__ADY38719
MKTIIALSYILCLVFTQKLPGNDNSTATLCLGHHAVPNGTIVKTITNDQIEVTNATELVQSSSTGEICDSPHQILDGKNCTLIDALLGDPQCDGFQNKKWDLFVERSKAYSNCYPYDVPDYASLRSLVASSGTLEFNNESFNWTGVTQNGTSSACIRRSKNSFFSRLNWLTHLNFKYPALNVTMPNNEQFDKLYIWGVHHPGTDKDQIFLYAQASGRITVSTKRSQQTAIPNIGSRPRVRNIPSRISIYWTIVKPGDILLINSTGNLIAPRGYFKIRSGKSSIMRSDAPIGKCNSECITPNGSIPNDKPFQNVNRITYGACPRYVKQNTLKLATGMRNVPEKQTRGIFGAIAGFIENGWEGMVDGWYGFRHQNSEGRGQAADLKSTQAAIDQINGKLNRLIGKTNEKFHQIEKEFSEVEGRIQDLEKYVEDTKIDLWSYNAELLVALENQHTIDLTDSEMNKLFEKTKKQLRENAEDMGNGCFKIYHKCDNACIGSIRNGTYDHDVYRDEALNNRFQIKGVELKSGYKDWILWISFAISCFLLCVALLGFIMWACQKGNIRCNICI

SEQ ID NO: 6585 - protein, 566 aa, Artificial Sequence; identical to SEQ ID NO: 2669
  derived and/or modified protein sequence (wt) from hemagglutinin__InfluenzaA__ADY38750

SEQ ID NO: 6586 - protein, 566 aa, Artificial Sequence; identical to SEQ ID NO: 3833
  derived and/or modified protein sequence (wt) from hemagglutinin__InfluenzaA__ADY38760

SEQ ID NO: 6587 - protein, 566 aa, Artificial Sequence
  derived and/or modified protein sequence (wt) from hemagglutinin__InfluenzaA__ADZ04607
MKAILVVLLYTFATANADTLCIGYHANNSTDTVDTVLEKNVTVTHSVNLLEDKHNGKLCKLRGVAPLHLGKCNIAGWILGNPECESLSTASSWSYIVETSSSDNGTCYPGDFIDYEELREQLSSVSSFERFEIFPKTSSWPNHDSNKGVTAACPHAGAKSFYKNLIWLVKKGNSYPKLSKSYINDKGKEVLVLWGIHHPSTSADQQSLYQNADAYVFVGTSRYSKKFKPEIAIRPKVRDQEGRMNYYWTLVEPGDKITFEATGNLVVPRYAFAMERNAGSGIIISDTPVHDCNTTCQTPKGAINTSLPFQNIHPITIGKCPKYVKSTKLRLATGLRNVPSIQSRGLFGAIAGFIEGGWTGMVDGWYGYHHQNEQGSGYAADLKSTQNAIDEITNKVNSVIEKMNTQFTAVGKEFNHLEKRIENLNKKVDDGFLDIWTYNAELLVLLENERTLDYHDSNVKNLYEKVRSQLKNNAKEIGNGCFEFYHKCDNTCMESVKNGTYDYPKYSEEAKLNREEIDGVKLESTRVYQILAIYSTVASSLVLVVSLGAISFWMCSNGSLQCRICI

SEQ ID NO: 6588 - protein, 565 aa, Artificial Sequence; identical to SEQ ID NO: 5963
  derived and/or modified protein sequence (wt) from hemagglutinin__InfluenzaA__ADZ05834

SEQ ID NO: 6589 - protein, 565 aa, Artificial Sequence
  derived and/or modified protein sequence (wt) from hemagglutinin__InfluenzaA__ADZ05845
MKVKLLVLLCTFTATYADTICIGYHANNSTDTVDTVLEKNVTVTHSVNLLEDSHNGKLCLLKGIAPLQLGNCSVAGWILGNPECELLISKESWSYIVEKPNPENGTCYPGHFADYEELREQLSSVSSFERFEIFPKESSWPNHTVTGVSASCSHNGENSFYRNLLWLTGKNGLYPNLSKSYANNKEKEVLVLWGVHHPPNMADQKTLYHTENAYVSVVSSHYSRKFTPEIAKRPKVRDQEGRINYYWTLLEPGDTIIFEANGNLIAPRYAFALSRGFGSGIINSNAPMDKCDAKCQTPQGAINSSLPFQNVHPVTIGECPKYVRSAKLRMVTGLRNIPSIQSRGLFGAIAGFIEGGWTGMVDGWYGYHHQNEQGSGYAADQKSTQNAINGITNKVNSVIEKMNTQFTAVGKEFNKLERRMENLNKKVDDGFIDIWTYNAELLVLLENERTLDFHDSNVKNLYEKVKSQLKNNAKEIGNGCFEFYHKCNDECMESVKNGTYDYPKYSEESKLNREKIDGVKLESMGVYQILAIYSTVASSLVLLVSLGAISFWMCSNGSLQCRICI

SEQ ID NO: 6590 - protein, 566 aa, Artificial Sequence; identical to SEQ ID NO: 2434
  derived and/or modified protein sequence (wt) from hemagglutinin__InfluenzaA__ADZ05855

SEQ ID NO: 6591 - protein, 566 aa, Artificial Sequence
  derived and/or modified protein sequence (wt) from hemagglutinin__InfluenzaA__ADZ47838
MKAILVVLLYTLATANADTLCIGYHANNSTDTVDTVLEKNVTVTHSVNLLEDKHNGKLCKLRGVAPLHLGKCNIAGWILGNPECESLSTASSWSYIVETSSSDNGTCYPGDFIDYEELREQLSSVSSFERFEIFPKTSSWPNHDSNKGVTAACPHAGAKSFYKNLIWLVKKGNSYPKLSKSYINDKGKEVLVLWGIHHPSTSADQQSLYQNADAYVFVGTSRYSKKFKPEIAIRPKVREQEGRMNYYWTLVEPGDKITFEATGNLVVPRYAFAMERNAGSGIIISDTPVHDCNTTCQTPKGAINTSLPFQNIHSITIGKCPKYVKSTKLRLATGLRNVPSIQSRGLFGAIAGFIEGGWTGMVDGWYGYHHQNEQGSGYAADLKSTQNAIDEITNKVNSVIEKMNTQFTAVGKEFNHLEKRIENLNKKVDDGFLDIWTYNAELLVLLENERTLDYHDSNVKNLYEKVRSQLKNNAKEIGNGCFEFYHKCDNTCMESVKNGTYDYPKYSEEAKLNREEIDGVKLESTRIYQILAIYSTVASSFVLIVSLGAISFWMCSNGSLQCRICI

SEQ ID NO: 6592 - protein, 566 aa, Artificial Sequence; identical to SEQ ID NO: 3841
  derived and/or modified protein sequence (wt) from hemagglutinin__InfluenzaA__ADZ47858

SEQ ID NO: 6593 - protein, 565 aa, Artificial Sequence
  derived and/or modified protein sequence (wt) from hemagglutinin__InfluenzaA__ADZ53100
MKVKLLVLLCTFTATYADTICIGYHANNSTDTVDTVLEKNVTVTHSVNLLENSHNGKLCLLKGIAPLQLGNCSVAGWILGNPECELLISKETWSYIVEKPNPENGTCYPGHFADYEELREQLSSVSSFERFEIFPKESSWPNHTVTGVSASCSHNGESSFYRNLLWLTGKNGLYPNLSKSYANNKEKEVLVLWGVHHPPSINDQKTLYHTENAYVSVVSSHYSRKFTPEIAKRPKVRDQEGRINYYWTLLEPRDTIIFEANGNLIAPRYAFALSRGFGSGIINSNAPMDKCDAKCQTPQGAINSSLPFQNVHPVTIGECPKYVRSAKLRMVTGLRNIPSIQSRGLFGAIAGFIEGGWTGMVDGWYGYHHQNEQGSGYAADQKSTQNAINGITNKVNSVIEKMNTQFTAVGKEFNKLERRMENLNKKVDDGFIDIWTYNAELLVLLENERTLDFHDSNVKNLYEKVKSQLKNNAKEIGNGCFEFYHKCNDECMESVKNGTYDYPKYSEESKLNREKIDGVKLESMGVYQILAIYSTVASSLVLLVSLGAISFWMCSNGSLQCRICI

SEQ ID NO: 6594 - protein, 566 aa, Artificial Sequence; identical to SEQ ID NO: 3116
  derived and/or modified protein sequence (wt) from hemagglutinin__InfluenzaA__ADZ53123

SEQ ID NO: 6595 - protein, 566 aa, Artificial Sequence; identical to SEQ ID NO: 2911
  derived and/or modified protein sequence (wt) from hemagglutinin__InfluenzaA__ADZ53125

SEQ ID NO: 6596 - protein, 566 aa, Artificial Sequence; identical to SEQ ID NO: 3293
  derived and/or modified protein sequence (wt) from hemagglutinin__InfluenzaA__ADZ53127

SEQ ID NO: 6597 - protein, 566 aa, Artificial Sequence; identical to SEQ ID NO: 2656
  derived and/or modified protein sequence (wt) from hemagglutinin__InfluenzaA__ADZ53131

SEQ ID NO: 6598 - protein, 566 aa, Artificial Sequence; identical to SEQ ID NO: 2669
  derived and/or modified protein sequence (wt) from hemagglutinin__InfluenzaA__ADZ53133

SEQ ID NO: 6599 - protein, 566 aa, Artificial Sequence; identical to SEQ ID NO: 2911
  derived and/or modified protein sequence (wt) from hemagglutinin__InfluenzaA__ADZ53135

SEQ ID NO: 6600 - protein, 566 aa, Artificial Sequence; identical to SEQ ID NO: 3833
  derived and/or modified protein sequence (wt) from hemagglutinin__InfluenzaA__ADZ53138

SEQ ID NO: 6601 - protein, 566 aa, Artificial Sequence; identical to SEQ ID NO: 2669
  derived and/or modified protein sequence (wt) from hemagglutinin__InfluenzaA__ADZ53140

SEQ ID NO: 6602 - protein, 566 aa, Artificial Sequence; identical to SEQ ID NO: 3116
  derived and/or modified protein sequence (wt) from hemagglutinin__InfluenzaA__ADZ93496

SEQ ID NO: 6603 - protein, 562 aa, Artificial Sequence; identical to SEQ ID NO: 2350
  derived and/or modified protein sequence (wt) from hemagglutinin__InfluenzaA__AEA04365

SEQ ID NO: 6604 - protein, 562 aa, Artificial Sequence
  derived and/or modified protein sequence (wt) from hemagglutinin__InfluenzaA__AEA04376
MAIIYLILLFTAVRGDQICIGYHANNSTEKVDTILERNVTVTHAKDILEKTHNGKLCKLNGIPPLELGDCSIAGWLLGNPECDRLLSVPEWSYIMEKENPRDGLCYPGSFNDYEELKHLLSSVKHFEKVKILPKDRWTQHTTTGGSRACAVSGNPSFFRNMVWLTEKGSNYPVAKGSYNNTSGEQMLIIWGVHHPNDETEQRTLYQNVGTYVSVGTSTLNKRSTPEIATRPKVNGQGGRMEFSWTLLDMWDTINFESTGNLIAPEYGFKISKRGSSGIMKTEGTLENCETKCQTPLGAINTTLPFHNVHPLTIGECPKYVKSEKLVLATGLRNVPQIESRGLFGAIAGFIEGGWQGMVDGWYGYHHSNDQGSGYAADKESTQKAFDGITNKVNSVIEKMNTQFEAVGKEFSNLERRLENLNKKVEDGFLDVWTYNAELLVLMENERTLDFHDSNVKNLYDKVRMQLRDNVKELGNGCFEFYHKCDDECMNSVKNGTYDYPKYEEESKLNRNEIKGVKLSSMGVYQILAIYATVAGSLSLAIMMAGISFWMCSNGSLQCRICI

SEQ ID NO: 6605 - protein, 565 aa, Artificial Sequence
  derived and/or modified protein sequence (wt) from hemagglutinin__InfluenzaA__AEA10292
MKVKLLVLLCTFTATYADTICIGYHANNSTDTVDTVLEKNVTVTHSVNLLENSHNGKLCSLKGIAPLQLGNCSVAGWILGNPECELLISKESWSYIVEKPNPENGTCYPGHFADYEELREQLSSVSSFERFEIFPKESSWPNHTVTGVSASCSHNGESSFYRNLLWLTVKNGLYPNLSKSYANNKEKEVLVLWGVHHPPNIVDQKTLYRTENAYVSVVSSHYSRKFTPEIAKRPKVRDQEGRINYYWTLLEPGDTIIFEANGNLIAPRYAFALSRGFGSGIINSNAPMDKCDAKCQTPRGAINSSLPFQNVHPVTIGECPKYVRSAKLRMVTGLRNIPSIQSRGLFGAIAGFIEGGWTGMVDGWYGYHHQNEQGSGYAADQKSTQNAINGITNKVNSVIEKMNTQFTAVGKEFNKLERRMENLNKKVDDGFIDIWTYNAELLVLLENERTLDFHDSNVKNLYEKVKSQLKNNAKEIGNGCFEFYHKCNDECMESVKNGTYDYPKYSEESKLNREKIDGVKLESMGVYQILAIYSTVASSLVLLVSLGAISFWMCSNGSLQCRICI

SEQ ID NO: 6606 - protein, 566 aa, Artificial Sequence; identical to SEQ ID NO: 5268
  derived and/or modified protein sequence (wt) from hemagglutinin__InfluenzaA__AEA10303

SEQ ID NO: 6607 - protein, 566 aa, Artificial Sequence; identical to SEQ ID NO: 6122
  derived and/or modified protein sequence (wt) from hemagglutinin__InfluenzaA__AEA10313

SEQ ID NO: 6608 - protein, 566 aa, Artificial Sequence; identical to SEQ ID NO: 3833
  derived and/or modified protein sequence (wt) from hemagglutinin__InfluenzaA__AEA10323

SEQ ID NO: 6609 - protein, 566 aa, Artificial Sequence; identical to SEQ ID NO: 4221
  derived and/or modified protein sequence (wt) from hemagglutinin__InfluenzaA__AEA10339

SEQ ID NO: 6610 - protein, 566 aa, Artificial Sequence
  derived and/or modified protein sequence (wt) from hemagglutinin__InfluenzaA__AEA10349
MKAILIVLLYTFATANADTLCIGYHANNSTDTVDTVLEKNVTVTHSVNLLEDKHNGKLCKLRGVAPLHLGKCNIAGWILGNPECESLSTASSWSYIVETSSSDNGTCYPGDFIDYEELREQLSSVSSFERFEIFPKTSSWPNHDSNKGVTAACPHAGAKSFYKNLIWLVKKGNSYPKLSKSYINDKGKEVLVLWGIHHPSTSADQQSLYQNADAYVFVGTSRYSKKFKPEIAIRPKVRDQEGRMNYYWTLVEPGDKITFEATGNLVVPRYAFAMERNAGSGIIISDTPVHDCNTTCQTPKGAINTSLPFQNIHPITIGKCPKYVKSTKLRLATGLRNVPSIQSRGLFGAIAGFIEGGWTGMVDGWYGYHHQNEQGSGYAADLKSTQNAIDKITNKVNSVIEKMNTQFTAVGKEFNHLEKRIENLNKKVDDGFLDIWTYNAELLVLLENERTLDYHDSNVKNLYEKVRSQLKNNAKEIGNGCFEFYHKCDNTCMESVKNGTYDYPKYSEEAKLNREEIDGVKLESTRIYQILAIYSTVASSLVLVVSLGAISFWMCSNGSLQCRICI

SEQ ID NO: 6611 - protein, 566 aa, Artificial Sequence; identical to SEQ ID NO: 4266
  derived and/or modified protein sequence (wt) from hemagglutinin__InfluenzaA__AEA30293

SEQ ID NO: 6612 - protein, 566 aa, Artificial Sequence
  derived and/or modified protein sequence (wt) from hemagglutinin__InfluenzaA__AEA48989
MKAILVVLLYTFATANADTLCIGYHANNSTDTVDTVLEKNVTVTHSVNLLEDKHNGKLCKLRGVAPLHLGKCNIAGWILGNPECESLSTASSWSYIVETSSSDNGTCYPGDFIDYEELREQLSSVSSFERFEIFPKTSSWPNHESNKGVTAACPHAGARSFYKNLIWLVKKGNSYPKLSKSYINDKGKEVLVLWGIHHPSTSADQQSLYQNADAYVFVGTSRYSKKFKPEIAIRPKVRDQEGRMNYYWTLVEPGDKITFEATGNLVVPRYAFAMERNAGSGIIISDTPVHDCNTTCQTPKGAINTSLPFQNIHPITIGKCPKYVKSTKLRLATGLRNVPSIQSRGLFGAIAGFIEGGWTGMVDGWYGYHHQNEQGSGYAADLKSTQNAIDEITNKVNSVIEKMNTQFTAVGKEFNHLEKRIENLNKKVDDGFLDIWTYNAELLVLLENERTLDYHDSNVKNLYEKVRSQLKNNAKEIGNGCFEFYHKCDNTCMESVKNGTYDYPKYSEEAKLNREEIDGVKLESTRIYQILAIYSTVASSLVLVVSLGAISFWMCSNGSLQCRICI

SEQ ID NO: 6613 - protein, 568 aa, Artificial Sequence
  derived and/or modified protein sequence (wt) from hemagglutinin__InfluenzaA__AEA50985
MEKIVLLLAIINLVKSDQICIGYHANNSTEQVDTIMEKNVTVTHAQDILEKTHNGKLCDLDGVKPLILRDCSVAGWLLGNPMCDEFLNVPEWSYIVEKINPANDLCYPGNFNDYEELKHLLSRINHFEKIQIIPKSSWSDHEASSGVSSACPYQGRSSFFRNVVWLIKKNDAYPTIKISYNNTNQEDLLVLWGIHHPNDAAEQTKLYQNPTTYISVGTSTLNLRLVPKIATRSKVNGQSGRMEFFWTILKPNDAINFESNGNFIAPENAYKIVKKGDSTIMKSELEYGNCNTKCQTPVGAINSSMPFHNIHPLTIGECPKYVKSNRLVLATGLRNSPQGERRRKKRGLFGAIAGFIEGGWQGMVDGWYGYHHSNEQGSGYAADKESTQKAINGVTNKVNSIIDKMNTQFEAVGREFNNLERRIENLNKKMEDGFLDVWTYNAELLVLMENERTLDFHDSNVKNLYDKVRLQLRDNAKELGNGCFEFYHRCDNECMESVRNGTYDYPQYSEESRLKREEISGVKLESIGIYQILSIYSTAASSLALAIMVAGLSLWMCSNGSLQCRICI

SEQ ID NO: 6614 - protein, 566 aa, Artificial Sequence; identical to SEQ ID NO: 5533
  derived and/or modified protein sequence (wt) from hemagglutinin__InfluenzaA__AEA72704

SEQ ID NO: 6615 - protein, 566 aa, Artificial Sequence; identical to SEQ ID NO: 5533
  derived and/or modified protein sequence (wt) from hemagglutinin__InfluenzaA__AEA72715

SEQ ID NO: 6616 - protein, 566 aa, Artificial Sequence; identical to SEQ ID NO: 5533
  derived and/or modified protein sequence (wt) from hemagglutinin__InfluenzaA__AEA72726

SEQ ID NO: 6617 - protein, 566 aa, Artificial Sequence
  derived and/or modified protein sequence (wt) from hemagglutinin__InfluenzaA__AEA72740
MKAILVVLLYTFATANADTLCIGYHANNSTDTVDTVLEKNVTVTHSVNLLEDKHNGKLCKLRGVAPLHLGKCNIAGWILGNPECESLSTASSWSYIVETSSSDNGTCYPGDFIDYEELREQLSSVSSFERFEIFPKTSSWPNHDSNKGVTAACPHAGAKSFYKNLIWLVKKGNSYPKLSKSYINDKGKEVLVLWGIHHPSTSADQQSLYQNADAYVFVGTSRYSKKFKPEIATRPKVRDQEGRMNYYWTLVEPGDKITFEATGNLVVPRYAFAMERNAGSGIIISDTPVHDCNTTCQTPKGAINTSLPFQNIHPITIGKCPKYVKSTKLRLATGLRNVPSIQSRGLFGAIAGFIEGGWTGMVDGWYGYHHQNEQGSGYAADLKSTQNAIDEITNKVNSVIEKMNTQFTAVGKEFNHLEKRIENLNKKVDDGFLDIWTYNAELLVLLENERTLDYHDSNVKNLYEKVRNQLKNNAKEIGNGCFEFYHKCDNTCMESVKNGTYDYPKYSEEAKLNREEIDGVKLESTRIYQILAIYSTVASSLVLVVSLGAISFWMCSNGSLQCRICI

SEQ ID NO: 6618 - protein, 566 aa, Artificial Sequence
  derived and/or modified protein sequence (wt) from hemagglutinin__InfluenzaA__AEA72750
MKAILVVLLYTFATANADTLCIGYHANNSTDTVDTVLEKNVTVTHSVNLLEDKHNGKLCKLRGVAPLHLGKCNIAGWILGNPECESLSTASSWSYIVETSSSDNGTCYPGVFIDYEELREQLSSVSSFERFEIFPKTSSWPNHDSNKGVTAACPHAGAKSFYKNLIWLVKKGNSYPKLSKSYINDKGKEVLVLWGIHHPSTTADQQSLYQNADTYVFVGTSRYSKKFKPEIAIRPKVRDQEGRMNYYWTLVEPGDKITFEATGNLVVPRYAFAMERNAGSGIIISDTPVHDCNTTCQTPKGAINTSLPFQNIHPITIGKCPKYVKSTKLRLATGLRNVPSIQSRGLFGAIAGFIEGGWTGMVDGWYGYHHQNEQGSGYAADLKSTQNAIDKITNKVNSVIEKMNTQFTAVGKEFNHLEKRIENLNKKVDDGFLDIWTYNAELLVLLENERTLDYHDSNVKNLYEKVRNQLKNNAKEIGNGCFEFYHKCDNTCMESVKNGTYDYPKYSEEAKLNREEIDGVKLESTRIYQILAIYSTVASSLVLVVSLGAISFWMCSNGSLQCRICI

SEQ ID NO: 6619 - protein, 566 aa, Artificial Sequence; identical to SEQ ID NO: 6435
  derived and/or modified protein sequence (wt) from hemagglutinin__InfluenzaA__AEA72759

SEQ ID NO: 6620 - protein, 566 aa, Artificial Sequence
  derived and/or modified protein sequence (wt) from hemagglutinin__InfluenzaA__AEA72777
MKAILVVLLYTLATANADTLCIGYHANNSTDTVDTVLEKNVTVTHSVNLLEDKHDGKLCKLRGVAPLHLGKCNIAGWILGNPECESLSTASSWSYIVETSSSDNGTCYPGDFIDYEELREQLSSVSSFERFEIFPKTSSWPNHDSNKGVTAACPHAGAKSFYKNLIWLVKKGNSYPKLSKSYINDKGKEILVLWGIHHPSTSADQQSLYQNADAYVFVGTSRYSKKFKPEIAIRPKVRDQEGRMNYYWTLVEPGDKITFEATGNLVVPRYAFAMERNAGSGIIISDTPVHDCNATCQTPKGAINTSLPFQNIHPITIGKCPKYVKSTKLRLATGLRNVPSIQSRGLFGAIAGFIEGGWTGMVDGWYGYHHQNEQGSGYAADLKSTQNAIDKITNKVNSVIEKMNTQFTAVGKEFNHLEKRIENLNKKVDDGFLDIWTYNAELLVLLENERTLDYHDSNVKNLYEKVRSQLKNNAKEIGNGCFEFYHKCDNTCMESVKNGTYDYPKYSEEAKLNREEIDGVKLESTRIYQILAIYSTVASSLVLVVSLGAISFWMCSNGSLQCRICI

SEQ ID NO: 6621 - protein, 566 aa, Artificial Sequence; identical to SEQ ID NO: 6435
  derived and/or modified protein sequence (wt) from hemagglutinin__InfluenzaA__AEA72787

SEQ ID NO: 6622 - protein, 566 aa, Artificial Sequence; identical to SEQ ID NO: 5533
  derived and/or modified protein sequence (wt) from hemagglutinin__InfluenzaA__AEA73288

SEQ ID NO: 6623 - protein, 566 aa, Artificial Sequence; identical to SEQ ID NO: 5533
  derived and/or modified protein sequence (wt) from hemagglutinin__InfluenzaA__AEA73299

SEQ ID NO: 6624 - protein, 566 aa, Artificial Sequence; identical to SEQ ID NO: 5533
  derived and/or modified protein sequence (wt) from hemagglutinin__InfluenzaA__AEA73310

SEQ ID NO: 6625 - protein, 566 aa, Artificial Sequence
  derived and/or modified protein sequence (wt) from hemagglutinin__InfluenzaA__AEA73321
MKTIIALSYILCLVFAQKLPGNDNSTATLCLGHHAVPNGTIVKTITNDQIEVTNATELVQSSSTGEICDSPHQILDGENCTLIDALLGDPQCDGFQNKKWDLFVERSKAYSNCYPYDVPDYASLRSLVASSGTLEFNNESFNWTGVTQNGTSSACIRRSNNSFFSRLNWLTHLNFKYPALNVTMPNNEQFDKLYIWGVHHPGTDKDQIFLYAQASGRITVSTKRSQQAVIPNIGSRPRVRNIPSRISIYWTIVKPGDILLINSTGNLIAPRGYFKIRSGKSSIMRSDAPIGKCNSECITPNGSIPNDKPFQNVNRITYGACPRYVKQSTLKLATGMRNVPEKQTRGIFGAIAGFIENGWEGMVDGWYGFRHQNSEGRGQAADLKSTQAAIDQINGKLNRLIGKTNEKFHQIEKEFSEVEGRIQDLEKYVEDTKIDLWSYNAELLVTLENQHTIDLTDSEMNKLFEKTKKQLRENAEDMGNGCFTIYHKCDNACIGSIRNGTYDHNVYRDEALNNRFQIKGVELKSGYKDWILWISFAISCFLLCVALLGFIMWACQKGNIRCNICI

SEQ ID NO: 6626 - protein, 566 aa, Artificial Sequence; identical to SEQ ID NO: 5533
  derived and/or modified protein sequence (wt) from hemagglutinin__InfluenzaA__AEA73332

SEQ ID NO: 6627 - protein, 566 aa, Artificial Sequence; identical to SEQ ID NO: 5533
  derived and/or modified protein sequence (wt) from hemagglutinin__InfluenzaA__AEA73343

SEQ ID NO: 6628 - protein, 566 aa, Artificial Sequence; identical to SEQ ID NO: 5533
  derived and/or modified protein sequence (wt) from hemagglutinin__InfluenzaA__AEA73354

SEQ ID NO: 6629 - protein, 566 aa, Artificial Sequence
  derived and/or modified protein sequence (wt) from hemagglutinin__InfluenzaA__AEA73365
MKTIIALSYTLCLVFAQKLPGNDNSTATLCLGHHAVPNGTIVKTITNDQIEVTNATELVQSSSTGEICDSPHQILDGENCTLIDALLGDPQCDGFQNKKWDLFVERSKAYSNCYPYDVPDYASLRSLVASSGTLEFNNESFNWTGVTQNGTSSACIRRSNNSFFSRLNWLTHLNFKYPALNVTMPNNEQFDKLYIWGVHHPGTDKDQIFLYAQASGRITVSTKRSQQAVIPNIGSRPRVRNIPSRISIYWTIVKPGDILLINSTGNLIAPRGYFKIRSGKSSIMRSDAPIGKCNSECITPNGSIPNDKPFQNVNRITYGACPRYVKQSTLKLATGMRNVPEKQTRGIFGAIAGFIENGWEGMVDGWYGFRHQNSEGRGQAADLKSTQAAIDQINGKLNRLIGKTNEKFHQIEKEFSEVEGRIQDLEKYVEDTKIDLWSYNAELLVALENQHTIDLTDSEMNKLFEKTKKQLRENAEDMGNGCFTIYHKCDNACIGSIRNGTYDHNVYRDEALNNRFQIKGVELKSGYKDWILWISFAISCFLLCVALLGFIMWACQKGNIRCNICI

SEQ ID NO: 6630 - protein, 566 aa, Artificial Sequence; identical to SEQ ID NO: 5533
  derived and/or modified protein sequence (wt) from hemagglutinin__InfluenzaA__AEA73376

SEQ ID NO: 6631 - protein, 566 aa, Artificial Sequence; identical to SEQ ID NO: 5533
  derived and/or modified protein sequence (wt) from hemagglutinin__InfluenzaA__AEA73387

SEQ ID NO: 6632 - protein, 566 aa, Artificial Sequence; identical to SEQ ID NO: 5533
  derived and/or modified protein sequence (wt) from hemagglutinin__InfluenzaA__AEA73398

SEQ ID NO: 6633 - protein, 566 aa, Artificial Sequence; identical to SEQ ID NO: 5533
  derived and/or modified protein sequence (wt) from hemagglutinin__InfluenzaA__AEA73409

SEQ ID NO: 6634 - protein, 566 aa, Artificial Sequence; identical to SEQ ID NO: 5533
  derived and/or modified protein sequence (wt) from hemagglutinin__InfluenzaA__AEA73420

SEQ ID NO: 6635 - protein, 566 aa, Artificial Sequence; identical to SEQ ID NO: 5533
  derived and/or modified protein sequence (wt) from hemagglutinin__InfluenzaA__AEA73452

SEQ ID NO: 6636 - protein, 566 aa, Artificial Sequence; identical to SEQ ID NO: 5533
  derived and/or modified protein sequence (wt) from hemagglutinin__InfluenzaA__AEA73463

SEQ ID NO: 6637 - protein, 566 aa, Artificial Sequence; identical to SEQ ID NO: 5533
  derived and/or modified protein sequence (wt) from hemagglutinin__InfluenzaA__AEA73474

SEQ ID NO: 6638 - protein, 566 aa, Artificial Sequence
  derived and/or modified protein sequence (wt) from hemagglutinin__InfluenzaA__AEA73485
MKTIIALSYILCLVFAQKLPGNDNSTATLCLGHHAVPNGTIVKTITNDQIEVTNATELVQSSSTGEICDSPHQILDGENCTLIDALLGDPQCDGFQNKKWDLFVERSKAHSNCYPYDVPDYASLRSLVASSGTLEFNNESFNWTGVTQNGTSSACIRRSNNSFFSRLNWLTHLNFKYPALNVTMPNNEQFDKLYIWGVHHPGTDKDQIFLYAQASGRITVSTKRSQQAVIPNIGSRPRVRNIPSRISIYWTIVKPGDILLINSTGNLIAPRGYFKIRSGKSSIMRSDAPIGKCNSECITPNGSIPNDKPFQNVNRITYGACPRYVKQSTLKLATGMRNVPEKQTRGIFGAIAGFIENGWEGMVDGWYGFRHQNSEGRGQAADLKSTQAAIDQINGKLNRLIGKTNEKFHQIEKEFSEVEGRIQDLEKYVEDTKIDLWSYNAELLVALENQHTIDLTDSEMNKLFEKTKKQLRENAEDMGNGCFTIYHKCDNACIGSIRNGTYDHNVYRDEALNNRFQIKGVELKSGYKDWILWISFAISCFLLCVALLGFIMWACQKGNIRCNICI

SEQ ID NO: 6639 - protein, 566 aa, Artificial Sequence; identical to SEQ ID NO: 5533
  derived and/or modified protein sequence (wt) from hemagglutinin__InfluenzaA__AEA73496

SEQ ID NO: 6640 - protein, 566 aa, Artificial Sequence; identical to SEQ ID NO: 5533
  derived and/or modified protein sequence (wt) from hemagglutinin__InfluenzaA__AEA73507

SEQ ID NO: 6641 - protein, 566 aa, Artificial Sequence; identical to SEQ ID NO: 5533
  derived and/or modified protein sequence (wt) from hemagglutinin__InfluenzaA__AEA73518

SEQ ID NO: 6642 - protein, 566 aa, Artificial Sequence; identical to SEQ ID NO: 5533
  derived and/or modified protein sequence (wt) from hemagglutinin__InfluenzaA__AEA73529

SEQ ID NO: 6643 - protein, 566 aa, Artificial Sequence; identical to SEQ ID NO: 5533
  derived and/or modified protein sequence (wt) from hemagglutinin__InfluenzaA__AEA73540

SEQ ID NO: 6644 - protein, 566 aa, Artificial Sequence; identical to SEQ ID NO: 5533
  derived and/or modified protein sequence (wt) from hemagglutinin__InfluenzaA__AEA73551

SEQ ID NO: 6645 - protein, 566 aa, Artificial Sequence; identical to SEQ ID NO: 5533
  derived and/or modified protein sequence (wt) from hemagglutinin__InfluenzaA__AEA73562

SEQ ID NO: 6646 - protein, 565 aa, Artificial Sequence
  derived and/or modified protein sequence (wt) from hemagglutinin__InfluenzaA__AEA73573
MKVKLLVLLCTFTATYADTICIGYHANNSTDTVDTVLEKNVTVTHSVNLLENSHNGKLCLLKGIAPLQLGNCSVAGWILGNPECELLISKESWSYIVEKPNPENGTCYPGHFADYEELREQLSSVSSFERFEIFPKESSWPNHTVTGVSASCSHNGESSFYRNLLWLTEKNGLYPNLSKSYANNKEKEVLVLWGVHHPPNIGDQKTLYHTENAYVSVVSSHYSRKFTPEIAKRPKVRDQEGRINYYWTLLEPGDTIIFEANGNLIAPRYAFALSRGFGSGIINSNAPMDKCDAKCQTPQGAINSSLPFQNVHPVTIGECPKYVRSAKLRMVTGLRNIPSIQSRGLFGAIAGFIEGGWTGMVDGWYGYHHQNEQGSGYAADQKSTQNAINGITNKVNSVIEKMNTQFTAVGKEFNKLERRMENLNKKVDDGFIDIWTYNAELLVLLENERTLDFHDSNVKNLYEKVKSQLKNNAKEIGNGCFEFYHKCNDECMESVKNGTYDYPKYSEESKLNREKIDGVKLESMGVYQILAIYSTVASSLVLLVSLGAISFWMCSNGSLQCRICI

SEQ ID NO: 6647 - protein, 565 aa, Artificial Sequence
  derived and/or modified protein sequence (wt) from hemagglutinin__InfluenzaA__AEA73584
MKVKLLVLLCTFTATYADTICIGYHANNSTDTVDTVLEKNVTVTHSVNLLENSHNGKLCLLKGIAPLQLGNCSVAGWILGNPECELLISKESWSYIVEKPNPENGTCYPGHFADYEELREQLSSVSSFERFEIFPKESSWPNHTVTGVSASCSHNGESSFYRNLLWLTGKNGLYPNLSKSYANNKEKEVLVLWGVHHPPNIVDQKTLYRTENAYVSVVSSHYSRKFTPEIAKRPKVRNQEGRINYYWTLLEPGDTIIFEANGNLIAPRYAFALSRGFGSGIINSNAPMDKCDAKCQTPQGAINSSLPFQNVHPVTIGECPKYVRSAKLRMVTGLRNIPSIQSRGLFGAIAGFIEGGWTGMVDGWYGYHHQNEQGSGYAADQKSTQNAINGITNKVNSVIEKMNTQFTAVGKEFNKLERRMENLNKKVDDGFIDIWTYNAELLVLLENERTLDFHDSNVKNLYEKVKSQLKNNAKEIGNGCFEFYHKCNDECMESVKNGTYDYPKYSEESKLNREKIDGVKLESMGVYQILAIYSTVASSLVLLVSLGAISFWMCSNGSLQCRICI

SEQ ID NO: 6648 - protein, 565 aa, Artificial Sequence
  derived and/or modified protein sequence (wt) from hemagglutinin__InfluenzaA__AEA73595
MKVKLLVLLCTFTATYADTICIGYHANNSTDTVDTVLEKNVTVTHSVNLLENSHNGKLCLLKGIAPLQLGNCSVAGWILGNPECELLISKESWSYIVEKPNPENGTCYPGHFADYEELREQLSSVSSFERFEIFPKESSWPNHTVTGVSASCSHNGESSFYRNLLWLTVKNGLYPNLSKSYANNKEKEVLVLWGVHHPPNIVDQKTLYHTENAYVSVVSSHYSRKFTPEIAKRPKVRDQEGRINYYWTLLEPGDTIIFEANGNLIAPRYAFALSRGFGSGIINSNAPMDKCDAKCQTPRGAINSSLPFQNVHPVTIGECPKYVRSAKLRMVTGLRNIPSIQSRGLFGAIAGFIEGGWTGMVDGWYGYHHQNEQGSGYAADQKSTQNAINGITNKVNSVIEKMNTQFTAVGKEFNKLERRMENLNKKVDDGFIDIWTYNAELLVLLENERTLDFHDSNVKNLYEKVKSQLKNNAKEIGNGCFEFYHKCNDECMESVKNGTYDYPKYSEESKLNREKIDGVKLESMGVYQILAIYSTVASSLVLLVSLGAISFWMCSNGSLQCRICI

SEQ ID NO: 6649 - protein, 565 aa, Artificial Sequence; identical to SEQ ID NO: 5953
  derived and/or modified protein sequence (wt) from hemagglutinin__InfluenzaA__AEA73606

SEQ ID NO: 6650 - protein, 565 aa, Artificial Sequence; identical to SEQ ID NO: 3131
  derived and/or modified protein sequence (wt) from hemagglutinin__InfluenzaA__AEA73617

SEQ ID NO: 6651 - protein, 565 aa, Artificial Sequence; identical to SEQ ID NO: 3616
  derived and/or modified protein sequence (wt) from hemagglutinin__InfluenzaA__AEA73628

SEQ ID NO: 6652 - protein, 565 aa, Artificial Sequence; identical to SEQ ID NO: 5972
  derived and/or modified protein sequence (wt) from hemagglutinin__InfluenzaA__AEA73639

SEQ ID NO: 6653 - protein, 565 aa, Artificial Sequence; identical to SEQ ID NO: 3131
  derived and/or modified protein sequence (wt) from hemagglutinin__InfluenzaA__AEA73650

SEQ ID NO: 6654 - protein, 565 aa, Artificial Sequence; identical to SEQ ID NO: 3616
  derived and/or modified protein sequence (wt) from hemagglutinin__InfluenzaA__AEA73661

SEQ ID NO: 6655 - protein, 565 aa, Artificial Sequence
  derived and/or modified protein sequence (wt) from hemagglutinin__InfluenzaA__AEA73672
MKVKLLVLLCTFTATFADTICIGYHANNSTDTVDTVLEKNVTVTHSVNLLENSHNGKLCLLKGIAPLQLGNCSVAGWILGNPECELLISKESWSYIVEKPNPENGTCYPGHFADYEELREQLSSVSSFERFEIFPKESSWPNHTVTGVSASCSHNGESSFYRNLLWLTVKNGLYPNLSKSYANNKEKEVLVLWGVHHPPNIVDQKTLYRTENAYVSVVSSHYSRKFTPEIAKRPKVRDQEGRINYYWTLLEPGDTIIFEANGNLIAPRYAFALSRGFGSGIINSNAPMDKCDAKCQTPRGAINSSLPFQNVHPVTIGECPKYVRSAKLRMVTGLRNIPSIQSRGLFGAIAGFIEGGWTGMVDGWYGYHHQNEQGSGYAADQKSTQNAINGITNKVNSVIEKMNTQFTAVGKEFNKLERRMENLNKKVDDGFIDIWTYNAELLVLLENERTLDFHDSNVKNLYEKVKSQLKNNAKEIGNGCFEFYHKCNDECMESVKNGTYDYPKYSEESKLNREKIDGVKLESMGVYQILAIYSTVASSLVLLVSLGAISFWMCSNGSLQCRICI

SEQ ID NO: 6656 - protein, 565 aa, Artificial Sequence; identical to SEQ ID NO: 3616
  derived and/or modified protein sequence (wt) from hemagglutinin__InfluenzaA__AEA73683

SEQ ID NO: 6657 - protein, 565 aa, Artificial Sequence
  derived and/or modified protein sequence (wt) from hemagglutinin__InfluenzaA__AEA73694
MKVKLLVLLCTFTATYADTICIGYHANNSTDTVDTVLEKNVTVTHSVNLLENSHNGKLCLLKGIAPLQLGNCSVAGWILGNPECELLISKESWSYIVEKPNPENGTCYPGHFADYEELREQLSSVSSFERFEIFPKESSWPNHTVTGVSASCSHNGESSFYRNLLWLTVKNGLYPNLSKSYANNKEKEVLVLWGVHHPPNIVDQKTLYRTENAYVSVVSSHYSRKFTPEIAKRPKVRDQEGRINYYWTLLEPGDTIIFEANGNLIAPRYAFALSRGFGSGIINSNAPMDKCDAKCQTPRGAINSSLPFQNVHPVTIGECPKYVRSAKLRMVTGLRNIPSIQSRGLFGAIAGFIEGGWTGMVDGWYGYHHQNEQGSGYAADQKSTQNAINGITNKVNSVIEKMNTQFTAVGKEFNKLERRMENLNKKVDDGFIDIWTYNAELLVLLENERTLDFHDSNVKNLYEKVKSQLKNNAKEIGNGCFEFYHKCNDECMESVKNGTYDYPKYSEESKLNREKIDGVELESMGVYQILAIYSTVASSLVLLVSLGAISFWMCSNGSLQCRICI

SEQ ID NO: 6658 - protein, 565 aa, Artificial Sequence; identical to SEQ ID NO: 3616
  derived and/or modified protein sequence (wt) from hemagglutinin__InfluenzaA__AEA73705

SEQ ID NO: 6659 - protein, 565 aa, Artificial Sequence; identical to SEQ ID NO: 3131
  derived and/or modified protein sequence (wt) from hemagglutinin__InfluenzaA__AEA73716

SEQ ID NO: 6660 - protein, 565 aa, Artificial Sequence; identical to SEQ ID NO: 3131
  derived and/or modified protein sequence (wt) from hemagglutinin__InfluenzaA__AEA73727

SEQ ID NO: 6661 - protein, 565 aa, Artificial Sequence; identical to SEQ ID NO: 3131
  derived and/or modified protein sequence (wt) from hemagglutinin__InfluenzaA__AEA73738

SEQ ID NO: 6662 - protein, 565 aa, Artificial Sequence; identical to SEQ ID NO: 3131
  derived and/or modified protein sequence (wt) from hemagglutinin__InfluenzaA__AEA73749

SEQ ID NO: 6663 - protein, 565 aa, Artificial Sequence
  derived and/or modified protein sequence (wt) from hemagglutinin__InfluenzaA__AEA73760
MKVKLLVLLCTFTATYADTICIGYHANNSTDTVDTVLEKNVTVTHSVNLLENSHNGKLCLLKGIAPLQLGNCSVAGWILGNPECELLISKESWSYIVEKPNPENGTCYPGHFADYEELREQLSSVSSFERFEIFPKESSWPNHTVTGVSASCSHNGESSFYRNLLWLTVKNGLYPNLSKSYANNKEKEVLVLWGVHHPPNIVDQKTLYRTENAYVSVVSSHYSRKFTPEIAKRPKIRDQEGRINYYWTLLEPGDTIIFEANGNLIAPRYAFALSRGFGSGIINSNAPMDKCDAKCQTPRGAINSSLPFQNVHPVTIGECPKYVRSAKLRMVTGLRNIPSIQSRGLFGAIAGFIEGGWTGMVDGWYGYHHQNEQGSGYAADQKSTQNAINGITNKVNSVIEKMNTQFTAVGKEFNKLERRMENLNKKVDDGFIDIWTYNAELLVLLENERTLDFHDSNVKNLYEKVKSQLKNNAKEIGNGCFEFYHKCNDECMESVKNGTYDYPKYSEESKLNREKIDGVKLESMGVYQILAIYSTVASSLVLLVSLGAISFWMCSNGSLQCRICI

SEQ ID NO: 6664 - protein, 566 aa, Artificial Sequence; identical to SEQ ID NO: 2669
  derived and/or modified protein sequence (wt) from hemagglutinin__InfluenzaA__AEA73771

SEQ ID NO: 6665 - protein, 566 aa, Artificial Sequence; identical to SEQ ID NO: 4299
  derived and/or modified protein sequence (wt) from hemagglutinin__InfluenzaA__AEA73781

SEQ ID NO: 6666 - protein, 566 aa, Artificial Sequence; identical to SEQ ID NO: 4221
  derived and/or modified protein sequence (wt) from hemagglutinin__InfluenzaA__AEA73791

SEQ ID NO: 6667 - protein, 566 aa, Artificial Sequence; identical to SEQ ID NO: 2849
  derived and/or modified protein sequence (wt) from hemagglutinin__InfluenzaA__AEA73801

SEQ ID NO: 6668 - protein, 566 aa, Artificial Sequence; identical to SEQ ID NO: 3833
  derived and/or modified protein sequence (wt) from hemagglutinin__InfluenzaA__AEA73811

SEQ ID NO: 6669 - protein, 566 aa, Artificial Sequence; identical to SEQ ID NO: 4391
  derived and/or modified protein sequence (wt) from hemagglutinin__InfluenzaA__AEA73821

SEQ ID NO: 6670 - protein, 566 aa, Artificial Sequence
  derived and/or modified protein sequence (wt) from hemagglutinin__InfluenzaA__AEA73831
MKAILVVLLYTFATANADTLCIGYHANNSTDTVDTVLEKNVTVTHSVNLLEDKHNGKLCKLRGVTPLHLGKCNIAGWILGNPECESLSTASSWSYIVETSSSDNGTCYPGDFIDYEELREQLSSVSSFERFEIFPKTSSWPNHDSNKGVTAACPHAGAKSFYKNLIWLVKKGNSYPKLSKSYINDKGKEVLVLWGIHHPSTSTDQQSLYQNADAYVFVGTSRYSKKFKPEIAIRPKVRDQEGRMNYYWTLVEPGDKITFEATGNLVVPRYAFAMERNAGSGIIISDTPVHDCNTTCQTPKGAINTSLPFQNIHPITIGKCPKYVKSTKLRLATGLRNVPSIQSRGLFGAIAGFIEGGWTGMVDGWYGYHHQNEQGSGYAADLKSTQNAIDKITNKVNSVIEKMNTQFTAVGKEFNHLEKRIENLNKKVDDGFLDIWTYNAELLVLLENERTLDYHDSNVKNLYEKVRSQLKNNAKEIGNGCFEFYHKCDNTCMESVKNGTYDYPKYSEEAKLNREEIDGVKLESTRIYQILAIYSTVASSLVLVVSLGAISFWMCSNGSLQCRICI

SEQ ID NO: 6671 - protein, 566 aa, Artificial Sequence
  derived and/or modified protein sequence (wt) from hemagglutinin__InfluenzaA__AEA73841
MKAILVVLLYTFATANADTLCIGYHANNSTDTVDTVLEKNVTVTHSVNLLEDKHNGKLCKLRGVAPLHLGKCNIAGWILGNPECESLSTASSWSYIVETSSSDNGTCYPGDFINYEELREQLSSVSSFERFEIFPKTSSWPNHDSNKGVTAACPHAGAKSFYKNLIWLVKKGNSYPKLSKSYINDKGKEVLVLWGIHHPSTSADQQSLYQNADAYVFVGTSRYSKKFKPEIAIRPKVRDQEGRMNYYWTLVEPGDKITFEATGNLVVPRYAFAMERNAESGIIISDTPVHDCNTTCQTPKGAINTSLPFQNIHPITIGKCPKYVKSTKLRLATGLRNVPSIQSRGLFGAIAGFIEGGWTGMVDGWYGYHHQNEQGSGYAADLKSTQNAIDKITNKVNSVVEKMNTQFTAVGKEFNHLEKRIENLNKKVDDGFLDIWTYNAELLVLLENERTLDYHDSNVKNLYEKVRSQLKNNAKEIGNGCFEFYHKCDNTCMESVKNGTYDYPKYSEEAKLNREEIDGVKLESTRIYQILAIYSTVASSLVLVVSLGAISFWMCSNGSLQCRICI

SEQ ID NO: 6672 - protein, 566 aa, Artificial Sequence; identical to SEQ ID NO: 4299
  derived and/or modified protein sequence (wt) from hemagglutinin__InfluenzaA__AEA73851

SEQ ID NO: 6673 - protein, 566 aa, Artificial Sequence
  derived and/or modified protein sequence (wt) from hemagglutinin__InfluenzaA__AEA73861
MKAILVVLLYTFATANADTLCIGYHANNSTDTVDTVLEKNVTVTHSVNLLEDKHNGKLCKLRGVAPLHLGECNIAGWILGNPECESLSTASSWSYIVETSSSDNGTCYPGDFIDYEELREQLSSVSSFERFEIFPKTSSWPNHDSNKGVTAACPHAGAKSFYKNLIWLVKKGNSYPKLSKSYINDKGKEVLVLWGIHHPSTSADQQSLYQNADAYVFVGTSRYSKKFKPEIAIRPKVRDQEGRMNYYWTLVEPGDKITFEATGNLVVPRYAFAMERNAGSGIIISDTPVHDCNTTCQTPKGAINTSLPFQNVHPITIGKCPKYVKSTKLRLATGLRNVPSIQSRGLFGAIAGFIEGGWTGMVDGWYGYHHQNEQGSGYAADLKSTQNAIDEITNKVNSVIEKMNTQFTAVGKEFNHLEKRIENLNKKIDDGFLDIWTYNAELLVLLENERTLDYHDSNVKNLYEKVRSQLKNNAKEIGNGCFEFYHKCDNTCMESVKNGTYDYPKYSEEAKLNREEIDGVKLESTRIYQILAIYSTVASSLVLVVSLGAISFWMCSNGSLQCRICI

SEQ ID NO: 6674 - protein, 566 aa, Artificial Sequence; identical to SEQ ID NO: 4541
  derived and/or modified protein sequence (wt) from hemagglutinin__InfluenzaA__AEA73871

SEQ ID NO: 6675 - protein, 566 aa, Artificial Sequence; identical to SEQ ID NO: 4541
  derived and/or modified protein sequence (wt) from hemagglutinin__InfluenzaA__AEA73881

SEQ ID NO: 6676 - protein, 566 aa, Artificial Sequence; identical to SEQ ID NO: 4221
  derived and/or modified protein sequence (wt) from hemagglutinin__InfluenzaA__AEA73891

SEQ ID NO: 6677 - protein, 566 aa, Artificial Sequence
  derived and/or modified protein sequence (wt) from hemagglutinin__InfluenzaA__AEA73901
MNAILVVLLYTFATANADTLCIGYHANNSTDTVDTLLEKNVTVTHSVNLLEDKHNGKLCKLRGVAPLHLGKCNIAGWILGNPECESLSTASSWSYIVETSSSDNGTCYPGDFIDYEELREQLSSVSSFERFEIFPKTSSWPNHDSNKGVTAACPHAGAKSFYKNLIWLVKKGNSYPKLSKSYINDKGKEVLVLWGIHHPSTSADQQSLYQNADAYVFVGTSRYSKKFKPEIAIRPKVRDQEGRMNYYWTLVEPGDKITFEATGNLVVPRYAFAMERNAGSGIIISDTPVHDCNTTCQTPKGAINTSLPFQNIHPITIGKCPKYVKSTKLRLATGLRNVPSIQSRGLFGAIAGFIEGGWTGMVDGWYGYHHQNEQGSGYAADLKSTQNAIDEITNKINSVIEKMNTQFTAVGKEFNHLEKRIENLNKKVDDGFLDIWTYNAELLVLLENERTLDYHDSNVKNLYEKVRSQLKNNAKEIGNGCFEFYHKCDNTCMESVKNGTYDYPKYSEEAKLNREEIDGVKLESTRIYQILAIYSTVASSLVLVVSLGAISFWMCSNGSLQCRICI

SEQ ID NO: 6678 - protein, 566 aa, Artificial Sequence; identical to SEQ ID NO: 3833
  derived and/or modified protein sequence (wt) from hemagglutinin__InfluenzaA__AEA73911

SEQ ID NO: 6679 - protein, 566 aa, Artificial Sequence; identical to SEQ ID NO: 4541
  derived and/or modified protein sequence (wt) from hemagglutinin__InfluenzaA__AEA73921

SEQ ID NO: 6680 - protein, 566 aa, Artificial Sequence; identical to SEQ ID NO: 4299
  derived and/or modified protein sequence (wt) from hemagglutinin__InfluenzaA__AEA73931

SEQ ID NO: 6681 - protein, 566 aa, Artificial Sequence; identical to SEQ ID NO: 4299
  derived and/or modified protein sequence (wt) from hemagglutinin__InfluenzaA__AEA73961

SEQ ID NO: 6682 - protein, 566 aa, Artificial Sequence
  derived and/or modified protein sequence (wt) from hemagglutinin__InfluenzaA__AEA73971
MKAILVVLLYTFATANADTLCIGYHANNSTDTVDTVLEKNVTVTHSVNLLEDKHNGKLCKLRGVAPLHLGKCNIAGWILGNPECESLSTASSWSYIVETSSSDNGTCYPGDFIDYEELREQLSSVSSFERFEIFPKTSSWPNHDSNKGVTAACPHAGAKSFYKNLIWLVKKGNSYPKLSKSYINDKGKEVLVLWGIHHPSTSADQQSLYQNADAYVFVGTSRYSKKFKPEIAIRPKVREQEGRMNYYWTLVEPGDKITFEATGNLVVPRYAFAMERNAGSGIIISDTPVHDCNTTCQTPKGAINTSLPFQNIHSITIGKCPKYVKSTKLRLATGLRNVPSIQSRGLFGAIAGFIEGGWTGMVDGWYGYHHQNEQGSGYAADQKSTQNAIDEITNKVNSVIEKMNTQFTAVGKEFNHLEKRIENLNKKVDDGFLDIWTYNAELLVLLENERTLDYHDSNVKNLYEKVRSQLKNNAKEIGNGCFEFYHKCNNTCMESVKNGTYDYPKYSEEAKLNREEIDGVKLESTRIYQILAIYSTVASSLVLVVSLGAISFWMCSNGSLQCRICI

SEQ ID NO: 6683 - protein, 566 aa, Artificial Sequence; identical to SEQ ID NO: 4299
  derived and/or modified protein sequence (wt) from hemagglutinin__InfluenzaA__AEA73981

SEQ ID NO: 6684 - protein, 566 aa, Artificial Sequence
  derived and/or modified protein sequence (wt) from hemagglutinin__InfluenzaA__AEA73991
MKAILVVLLYTFATANADTLCIGYHANNSTDTVDTVLEKNVTVTHSVNLLEDKHNGKLCKLRGVAPLHLGKCNIAGWILGNPECESLSTASSWSYIVETSSSDNGTCYPGDFIDYEELREQLSSVSSFEKFEIFPKTSSWPNHDSNKGVTAACPHAGAKSFYKNLIWLVKKGNSYPKLSKSYINDKGKEVLVLWGIHHPSTSADQQSLYQNADSYVFVGTSRYSKKFKPEIAIRPKVRDQEGRMNYYWTLVEPGDKITFEATGNLVVPRYAFAMERNAGSGIIISDTPVHDCNTTCQTPEGAINTSLPFQNIHPITIGKCPKYVKSTKLRLATGLRNVPSIQSRGLFGAIAGFIEGGWTGMVDGWYGYHHQNEQGSGYAADLKSTQNAIDEITNKVNSVIEKMNTQFTAVGKEFNHLEKRIENLNKKVDDGFLDIWTYNAELLVLLENERTLDYHDSNVKNLYEKVRSQLKNNAKEIGNGCFEFYHKCDNTCMESVKNGTYDYPKYSEEAKLNREEIDGVKLESTRIYQILAIYSTVASSLVLVVSLGAISFWMCSNGSLQCRICI

SEQ ID NO: 6685 - protein, 566 aa, Artificial Sequence; identical to SEQ ID NO: 4282
  derived and/or modified protein sequence (wt) from hemagglutinin__InfluenzaA__AEA74001

SEQ ID NO: 6686 - protein, 566 aa, Artificial Sequence
  derived and/or modified protein sequence (wt) from hemagglutinin__InfluenzaA__AEA74011
MKAILVVLLYTFATANADTLCIGYHANNSTDTVDTVLEKNVTVTHSVNLLEDKHNGKLCKLRGVAPLHLGKCNIAGWILGNPECESLSTASSWSYIVETSSSDNGTCYPGDFIDYEELREQLSSVSSFERFEIFPKTSSWPNHDSNKGVTAACPHAGAKSFYKNLIWLVKKRNSYPKLSQSYINDKGKEVLVLWGIHHPSTSADQQSLYQNADAYVFVGTSRYSKKFKPEIAIRPKVRDQEGRMNYYWTLVEPGDKITFEATGNLVVPRYAFAMERNAGSGIIISDTPVHDCNTTCQTPKGAINTSLPFQNIHPITIGKCPKYVKSTKLRLATGLRNVPSIQSRGLFGAIAGFIEGGWTGMVDGWYGYHHQNEQGSGYAADLKSTQNAIDKITNKVNSVIEKMNTQFTAVGKEFNHLEKRIENLNKKVDDGFLDIWTYNAELLVLLENERTLDYHDSNVKNLYEKVRSQLKNNAKEIGNGCFEFYHKCDNTCMESIKNGTYDYPKYSEEAKLNREEIDGVKLESTRIYQILAIYSTVASSLVLVVSLGAISFWMCSNGSLQCRICI

SEQ ID NO: 6687 - protein, 566 aa, Artificial Sequence
  derived and/or modified protein sequence (wt) from hemagglutinin__InfluenzaA__AEA74021
MKAILVVLLYTFATANADTLCIGYHANNSTDTVDTVLEKNVTVTHSVNLLEDKHNGKLCKLRGVAPLHLGKCNIAGWILGNPECESLSTASSWSYIVETSSSDNGTCYPGDFIDYEELREQLSSVSSFERFEIFPKTSSWPNHDSNKGVTAACPHAGAKSFYKNLIWLVKKGNSYPKLSQSYINDKGKEVLVLWGIHHPSTSADQQSLYQNADAYVFVGTSRYSKKFKPEIAIRPKVRDQEGRMNYYWTLVEPGDKITFEATGNLVVPRYAFAMERNAGSGIIISDTPVHDCNTTCQTPKGAINTSLPFQNIHPITIGKCPKYVKSTKLRLATGLRNVPSIQSRGLFGAIAGFIEGGWTGMVDGWYGYHHQNEQGSGYAADLKSTQNAIDKITNKVNSVIEKMNTQFTAVGKEFNHLEKRIENLNKKVDDGFLDIWTYNAELLVLLENERTLDYHDSNVKNLYEKVRSQLKNNAKEIGNGCFEFYHKCDNTCMESIKNGTYDYPKYSEEAKLNREEIDGVKLESTRIYQILAIYSTVASSLVLVVSLGAISFWMCSNGSLQCRICI

SEQ ID NO: 6688 - protein, 566 aa, Artificial Sequence
  derived and/or modified protein sequence (wt) from hemagglutinin__InfluenzaA__AEA74031
MKAILVVLLYTFATANADTLCIGYHANNSTDTVDTVLEKNVTVTHSVDLLEDKHNGKLCKLRGVAPLHLGKCNIAGWILGNPECESLSTASSWSYIVETSSSDNGTCYPGDFIDYEELREQLSSVSSFERFEIFPKTSSWPNHDSNKGVTAACPHAGAKSFYNNLIWLVKKGNSYPKLNKSYINDKGKEVLVLWGIHHPSTSTDQQSLYQNADAYVFVGTSRYSKKFKPEIAIRPKVRNQEGRMNYYWTLVEPGDKITFEATGNLVVPRYAFAMERNAGSGIIISDTPIHDCNTTCQTPKGAINTSLPFQNIHPITIGKCPKYVKSTKLRLATGLRNVPSIQSRGLFGAIAGFIEGGWTGMVDGWYGYHHQNEQGSGYAADLKSTQNAIDEITNKVNSVIEKMNTQFTAVGKEFNHLEKRIENLNKKVDDGFLDIWTYNAELLVLLENERTLDYHDSNVKNLYEKVRSQLKNNAKEIGNGCFEFYHKCDNTCMESVKNGTYDYPKYSEEAKLNREEIDGVKLESTRIYQILAIYSTVASSLVLVVSLGAISFWMCSNGSLQCRICI

SEQ ID NO: 6689 - protein, 566 aa, Artificial Sequence
  derived and/or modified protein sequence (wt) from hemagglutinin__InfluenzaA__AEA74035
MKAILVVLLYTFATANADTLCIGYHANNSTDTVDTVLEKNVTVTHSVDLLEDKHNGKLCKLRGVAPLHLGKCNIAGWILGNPECESLSTASSWSYIVETSSSDNGTCYPGDFIDYEELREQLSSVSSFERFEIFPKTSSWPNHDSNKGVTAACPHAGAKSFYNNLIWLVKKGNSYPKLNKSYINDKGKEVLVLWGIHHPSTSTDQQSLYQNADAYVFVGTSRYSKKFKPEIAIRPKVRDQEGRMNYYWTLVEPGDKITFEATGNLVVPRYAFAMERNAGSGIIISDTPIHDCNTTCQTPKGAINTSLPFQNIHPITIGKCPKYVKSTKLRLATGLRNVPSIQSRGLFGAIAGFIEGGWTGMVDGWYGYHHQNEQGSGYAADLKSTQNAIDEITNKVNSVIEKMNTQFTAVGKEFNHLEKRIENLNKKVDDGFLDIWTYNAELLVLLENERTLDYHDSNVKNLYEKVRSQLKNNAKEIGNGCFEFYHKCDNTCMESVKNGTYDYPKYSEEAKLNREEIDGVKLESTRIYQILAIYSTVASSLVLVVSLGAISFWMCSNGSLQCRICI

SEQ ID NO: 6690 - protein, 566 aa, Artificial Sequence; identical to SEQ ID NO: 2434
  derived and/or modified protein sequence (wt) from hemagglutinin__InfluenzaA__AEA77299

SEQ ID NO: 6691 - protein, 566 aa, Artificial Sequence; identical to SEQ ID NO: 6435
  derived and/or modified protein sequence (wt) from hemagglutinin__InfluenzaA__AEB21316

SEQ ID NO: 6692 - protein, 566 aa, Artificial Sequence; identical to SEQ ID NO: 6454
  derived and/or modified protein sequence (wt) from hemagglutinin__InfluenzaA__AEB21326

SEQ ID NO: 6693 - protein, 566 aa, Artificial Sequence; identical to SEQ ID NO: 6435
  derived and/or modified protein sequence (wt) from hemagglutinin__InfluenzaA__AEB21338

SEQ ID NO: 6694 - protein, 566 aa, Artificial Sequence; identical to SEQ ID NO: 6454
  derived and/or modified protein sequence (wt) from hemagglutinin__InfluenzaA__AEB21348

SEQ ID NO: 6695 - protein, 566 aa, Artificial Sequence; identical to SEQ ID NO: 3588
  derived and/or modified protein sequence (wt) from hemagglutinin__InfluenzaA__AEB40206

SEQ ID NO: 6696 - protein, 566 aa, Artificial Sequence; identical to SEQ ID NO: 3588
  derived and/or modified protein sequence (wt) from hemagglutinin__InfluenzaA__AEB66895

SEQ ID NO: 6697 - protein, 565 aa, Artificial Sequence
  derived and/or modified protein sequence (wt) from hemagglutinin__InfluenzaA__AEB71102
MDVPVFVLLMLTSICVQADRICVGYLSTNSSERVDTLLENNVPVTSSVDLVETNHTGTYCSLGGISPVHLGDCSFEGWIVGNPACASNLGIREWSYLIEDPSAPHGLCYPGELDNNGELRHLFSGIRSFSRTELIAPTSWGEVNDGVTAACQDKGASSFYRNLVWFVERGNKYPVIRRTYNNTTGRDVLVIWGIHHPVSTDEARKLYAKDNPYTLVSTSSWSRKYNLETGTRPGYNGQKSWTKIYWYLMHPGDSISFESNGGLLAPKYGYIIEEYGKGRIFQSRIRIAKCNTKCQTSVGGINTNKTFQNIERNALGDCPKYIKSGQLKLATGLRNVPAISNRGLFGAIAGFIEGGWPGLINGWYGFQHQNEQGMGMAADKESTQKAIDQITTKINNIIEKMNGNYDSIRGEFSQVEQRINMLADRIDDAVTDVWSYNAKLLVLLENDKTLDMHDANVRNLHDQVRRVLRTNAIDEGNGCFELLHKCNDSCMETIRNGTYNHIEYEEESKLKRQEIEGIKLKSDDNVYKALSIYSCIASSIVLVGLILAFIMWACSSGNCRFNICI

SEQ ID NO: 6698 - protein, 565 aa, Artificial Sequence
  derived and/or modified protein sequence (wt) from hemagglutinin__InfluenzaA__AEB71896
MKVKLLVLLCTFTATYADTICIGYHANNSTDTVDTVLEKNVTVTHSVNLLENSHNGKLCLLKGIAPLQLGNCSVAGWILGNPECELLISKESWSYIVEKPNPENGTCYPGHFADYEELREQLSSVSSFERFEIFPKESSWPNHTVTGVSASCSHNGESSFYRNLLWLTGKNGLYPNLSKSYANNKEKEVLVLWGVHHPPNIVDQKTLYRTENAYVSVVSSHYSRKFTPEIAKRPKVRDQEGRINYYWTLLEPGDTIIFEANGNLIAPRYAFALSRGFGSGIINSNAPMGKCDAKCQTPQGAINSSLPFQNVHPVTIGECPKYVRSAKLRMVTGLRNIPSIQSRGLFGAIAGFIEGGWTGMVDGWYGYHHQNEQGSGYAADQKSTQNAINGITNKVNSVIEKMNTQFTAVGKEFNKLERRMENLNKKVDDGFIDIWTYNAELLVLLENERTLDFHDSNVKNLYEKVKSQLKNNAKEIGNGCFEFYHKCNDECMESVKNGTYDYPKYSEESKLNKEKIDGVKLESMGVYQILAIYSTVASSLVLLVSLGAISFWMCSNGSLQCRICI

SEQ ID NO: 6699 - protein, 566 aa, Artificial Sequence; identical to SEQ ID NO: 2911
  derived and/or modified protein sequence (wt) from hemagglutinin__InfluenzaA__AEB71916

SEQ ID NO: 6700 - protein, 566 aa, Artificial Sequence; identical to SEQ ID NO: 2434
  derived and/or modified protein sequence (wt) from hemagglutinin__InfluenzaA__AEB71925

SEQ ID NO: 6701 - protein, 566 aa, Artificial Sequence; identical to SEQ ID NO: 2434
  derived and/or modified protein sequence (wt) from hemagglutinin__InfluenzaA__AEB71936

SEQ ID NO: 6702 - protein, 566 aa, Artificial Sequence; identical to SEQ ID NO: 2434
  derived and/or modified protein sequence (wt) from hemagglutinin__InfluenzaA__AEB71947

SEQ ID NO: 6703 - protein, 565 aa, Artificial Sequence; identical to SEQ ID NO: 5972
  derived and/or modified protein sequence (wt) from hemagglutinin__InfluenzaA__AEB71958

SEQ ID NO: 6704 - protein, 566 aa, Artificial Sequence; identical to SEQ ID NO: 5419
  derived and/or modified protein sequence (wt) from hemagglutinin__InfluenzaA__AEB71969

SEQ ID NO: 6705 - protein, 566 aa, Artificial Sequence
  derived and/or modified protein sequence (wt) from hemagglutinin__InfluenzaA__AEB71980
MKTIIALSCILCLVFAQKLPGNDNSTATLCLGHHAVPNGTIVKTITNDQIEVTNATELVQSSSTGEICDSPHQILDGENCTLIDALLGDPQCDGFQNKKWDLFVERSKAYSNCYPYDVPDYASLRSLVASSGTLEFNNESFNWTGVTQNGTSSACIRRSNNSFFSRLNWLTHLKFKYPALNVTMPNNEQFDKLYIWGVHHPGTDNDQIFLYAQASGRITVSTKRSQQTVIPNIGSRPRVRNIPSRISIYWTIVKPGDILLINSTGNLIAPRGYFKIRSGKSSIMRSDAPIGKCNSECITPNGSIPNDKPFQNVNRITYGACPRYVKQNTLKLATGMRNVPEKQTRGIFGAIAGFIENGWEGMVDGWYGFRHQNSEGRGQAADLKSTQAAIDQINGKLNRLIGKTNEKFHQIEKEFSEVEGRIQDLEKYVEDTKIDLWSYNAELLVALENQHTIDLTDSEMNKLFEKTKKQLRENAEDMGNGCFKIYHKCDNACIGSIRNGTYDHDVYRDEALNNRFQIKGVELKSGYKDWILWISFAISCFLLCVALLGFIMWACQKGNIRCNICI

SEQ ID NO: 6706 - protein, 565 aa, Artificial Sequence; identical to SEQ ID NO: 3616
  derived and/or modified protein sequence (wt) from hemagglutinin__InfluenzaA__AEB71992

SEQ ID NO: 6707 - protein, 565 aa, Artificial Sequence; identical to SEQ ID NO: 3616
  derived and/or modified protein sequence (wt) from hemagglutinin__InfluenzaA__AEC13313

SEQ ID NO: 6708 - protein, 566 aa, Artificial Sequence
  derived and/or modified protein sequence (wt) from hemagglutinin__InfluenzaA__AEC46553
MKAILVVLLYTFATANADTLCIGYHANNSTDTVDTVLEKNVTVTHSVNLLEDKHNGKLCKLRGVAPLHLGKCNIAGWILGNPECESLSTASSWSYIVETSSSDNGTCYPGDFIDYEELREQLSSVSSFERFEIFPKTSSWPNHDPNKGVTAACPHAGAKSFYKNLIWLVKKGNSYPKLSTSYINDKGKEVLVLWGIHHPSTSADQQSLYQNADAYAFVGTSRYSKKFKPEIAIRPKVRDQEGRMNYYWTLVEPGDKITFEATGNLVVPRYAFAMERNAGSGIIISDTSVHDCNTTCQTPKGAINTSLPFQNVHPITIGKCPKYVKSTKLRLATGLRNVPSIQSRGLFGAIAGFIEGGWTGMVDGWYGYHHQNEQGSGYAADLKSTQNAFDKITNKVNSVIEKMNTQFTAVGKEFNHLEKRIENLNKKVDDGFLDIWTYNAELLVLLENERTLDYHDSNVKNLYEKVRSQLKNNAKEIGNGCFEFYHKCDNTCMESVKNGTYDYPKYSEEAKLNREEIDGVKLESTRIYQILAIYSTVASSLVLVVSLGAISFWMCSNGSLQCRICI

SEQ ID NO: 6709 - protein, 566 aa, Artificial Sequence
  derived and/or modified protein sequence (wt) from hemagglutinin__InfluenzaA__AEC46555
MKAILVVLLYTFATANADTLCIGYHANNSTDTVDTVLEKNVTVTHSVNLLEDKHNGKLCKLRGVAPLHLGKCNIAGWILGNPECESLSTASSWSYIVETSSSDNGTCYPGDFIDYEELREQLSSVSSFERFEIFPKTSSWPNHDPNKGVTAACPHAGAKSFYKNLIWLVKKGNSYPKLSTSYINDKGKKVLVLWGIHHPSTSADQQSLYQNADAYAFVGTSRYSKKFKPEIAIRPKVRDQEGRMNYYWTLVEPGDKITFEATGNLVVPRYAFAMERNEGSGIIISDTSVHDCNTTCQTPKGAINTSLPFQNVHPITIGKCPKYVKSTKLRLATGLRNVPSIQSRGLFGAIAGFIEGGWTGMVDGWYGYHHQNEQGSGYAADLKSTQNAFDKITNKVNSVIEKMNTQFTAVGKEFNHLEKRIENLNKKVDDGFLDIWTYNAELLVLLENERTLDYHDSNVKNLYEKVRSQLKNNAKEIGNGCFEFYHKCDNTCMESVKNGTYDYPKYSEEAKLNREEIDGVKLESTRIYQILAIYSTVASSLVLVVSLGAISFWMCSNGSLQCRICI

SEQ ID NO: 6710 - protein, 566 aa, Artificial Sequence; identical to SEQ ID NO: 6708
  derived and/or modified protein sequence (wt) from hemagglutinin__InfluenzaA__AEC46557

SEQ ID NO: 6711 - protein, 566 aa, Artificial Sequence; identical to SEQ ID NO: 2656
  derived and/or modified protein sequence (wt) from hemagglutinin__InfluenzaA__AEC53259

SEQ ID NO: 6712 - protein, 566 aa, Artificial Sequence
  derived and/or modified protein sequence (wt) from hemagglutinin__InfluenzaA__AEC53269
MKAILVVLLYTFATANADTLCIGYHANNSTDTVDTVLEKNVTVTHSVNLLEDKHNGKLCKLRGVAPLHLGKCNIAGWILGNPECESLSTASSWSYIVETSSSDNGTCYPGDFIDYEELRELLSSVSSFERFEIFPKTSSWPNHDSNKGVTAACPHAGAKSFYKNLIWLVKKGNSYPKLSKSYINDKGKEVLVLWGIHHPSTSADQQSLYQNADAYVFVGSSRYSKKFKPEIAIRPKVRDQEGRMNYYWTLVEPGDKITFEATGNLVVPRYAFAMERNAGSGIIISDTPVHDCNTTCQTPKGAINTSLPFQNIHPITIGKCPKYVKSTKLRLATGLRNIPSIQSRGLFGAIAGFIEGGWTGMVDGWYGYHHQNEQGSGYAADLKSTQNAIDEITNKVNSVIEKMNTQFTAVGKEFNHLEKRIENLNKKVDDGFLDIWTYNAELLVLLENERTLDYHDSNVKNLYEKVRSQLKNNAKEIGNGCFEFYHKCDNTCMESVKNGTYDYPKYSEEAKLNREEIDGVKLESTRIYQILAIYSTVASSLVLVVSLGAISFWMCSNGSLQCRICI

SEQ ID NO: 6713 - protein, 566 aa, Artificial Sequence; identical to SEQ ID NO: 3399
  derived and/or modified protein sequence (wt) from hemagglutinin__InfluenzaA__AEC53279

SEQ ID NO: 6714 - protein, 566 aa, Artificial Sequence; identical to SEQ ID NO: 2656
  derived and/or modified protein sequence (wt) from hemagglutinin__InfluenzaA__AEC53289

SEQ ID NO: 6715 - protein, 566 aa, Artificial Sequence; identical to SEQ ID NO: 2656
  derived and/or modified protein sequence (wt) from hemagglutinin__InfluenzaA__AEC53299

SEQ ID NO: 6716 - protein, 566 aa, Artificial Sequence; identical to SEQ ID NO: 2849
  derived and/or modified protein sequence (wt) from hemagglutinin__InfluenzaA__AEC53327

SEQ ID NO: 6717 - protein, 566 aa, Artificial Sequence
  derived and/or modified protein sequence (wt) from hemagglutinin__InfluenzaA__AEC53347
MKAILVVLLYTFATANADTLCIGYHANNSTDTVDTVLEKNVTVTHSVNLLEDKHNGKLCKLRGVAPLHLGKCNIAGWILGNPECESLSTASSWSYIVETSSSDNGTCYPGDFIDYEELREQLSSVSSFERFEIFPKTSSWPNHDSNKGVTAACPHAGAKSFYKNLIWLVKKGNSYPKLSKSYINDKGKEVLVLWGIHHPSTSADQQSLYQNADAYVFVGSSRYSKKFKPEIAIRPKVRDQEGRMNYYWTLIEPGDKITFEATGNLVVPRYAFAMERNAGSGIIISDTPVHDCNTTCQTPKGAINTSLPFQNIHPITIGKCPKYVKSTKLRLATGLRNVPSIQSRGLFGAIAGFIEGGWTGMVDGWYGYHHQNEQGSGYAADLKSTQNAIDEITNKVNSVIEKMNTQFTAVGKEFNHLEKRIENLNKKVDDGFLDIWTYNAELLVLLENERTLDYHDSNVKNLYEKVRSQLKNNAKEIGNGCFEFYHKCDNTCMESVKNGTYDYPKYSEEAKLNREEIDGVKLESTRIYQILAIYSTVASSLVLVVSLGAISFWMCSNGSLQCRICI

SEQ ID NO: 6718 - protein, 566 aa, Artificial Sequence
  derived and/or modified protein sequence (wt) from hemagglutinin__InfluenzaA__AEC53404
MKAILVVLLYTFATANADTLCIGYHANNSTDTVDTVLEKNVTVTHSVNILEDKHNGKLCKLRGVAPLHLGKCNIAGWILGNPECESLSTASSWSYIVETSSSDNGTCYPGDFIDYEELREQLSSVSSFERFEIFPKTSSWPNHDSNKGITAACPHAGAKSFYKNLIWLVKKGNSYPKLSKSYINDKGKEVLVLWGIHHPSTSADQQSLYQNADAYVFVGSSRYSKKFKPEIAIRPKVRDQEGRMNYYWTLVEPGDKITFEATGNLVVPRYAFAMERNAGSGIIISDTPVHDCNTTCQTPKGAINTSLPFQNIHPITIGKCPKYVKSTKLRLATGLRNVPSIQSRGLFGAIAGFIEGGWTGMVDGWYGYHHQNEQGSGYAADLKSTQNAIDEITNKVNSVIEKMNTQFTAVGKEFNHLEKRIENLNKKVDDGFLDIWTYNAELLVLLENERTLDYHDSNVKNLYEKVRSQLKNNAKEIGNGCFEFYHKCDNTCMESVKNGTYDYPKYSEEAKLNREEIDGVKLESTRIYQILAIYSTVASSLVLVVSLGAISFWMCSNGSLQCRICI

SEQ ID NO: 6719 - protein, 566 aa, Artificial Sequence; identical to SEQ ID NO: 2656
  derived and/or modified protein sequence (wt) from hemagglutinin__InfluenzaA__AEC53414

SEQ ID NO: 6720 - protein, 566 aa, Artificial Sequence
  derived and/or modified protein sequence (wt) from hemagglutinin__InfluenzaA__AEE27177
MKTILVVLLYTFATANADTLCIGYHANNSTDTVDTVLEKNVTVTHSVNILEDKHNGKLCKLRGVAPLHLGKCNIAGWILGNPECESLSTASSWSYIVETSSSDNGTCYPGDFIDYEELREQLSSVSSFERFEIFPKTSSWPNHDSNKGVTAACPHAGAKSFYKNLIWLVKKGNSYPKLSKSYINDKRKEVLVLWGIHHPSTSADQQSLYQNADAYVFVGSSRYSKKFKPEIAIRPKVRDQEGRMNYYWTLVEPGDKITFEATGNLVVPRYAFAMERNAGSGIIISDTPVHDCNTTCQTPKGAINTSLPFQNIHPITIGKCPKYVKSTKLRLATGLRNVPSIQSRGLFGAIAGFIEGGWTGMVDGWYGYHHQNEQGSGYAADLKSTQNAIDEITNKVNSVIEKMNTQFTAVGKEFNHLEKRIENLNKKVDDGFLDIWTYNAELLVLLENERTLDYHDSNVKNLYEKVRSQLKNNAKEIGNGCFEFYHKCDNTCMESVKNGTYDYPKYSEEAKLNREEIDGVKLESTRIYQILAIYSTVASSLVLVVSLGAISFWMCSNGSLQCRICI

SEQ ID NO: 6721 - protein, 566 aa, Artificial Sequence; identical to SEQ ID NO: 4441
  derived and/or modified protein sequence (wt) from hemagglutinin__InfluenzaA__AEE27187

SEQ ID NO: 6722 - protein, 566 aa, Artificial Sequence
  derived and/or modified protein sequence (wt) from hemagglutinin__InfluenzaA__AEE27207
MKAILVVLLYTFATANADTLCIGYHANNSTDTVDTVLEKNVTVTHSVNLLEDKHNGKLCKLRGVAPLHLGKCNIAGWILGNPECESLSTASSWSYIVETSSSDNGTCYPGDFIDYEELREQLSSVSSFERFEIFPKTSSWPNHDSNKGVTAACPHAGAKSFYKNLIWLVKKGNSYPKLSKSYINDKGKEVLVLWGIHHPSTSADQQSLYQNADAYVFVGTSRYSKKFKPEIAIRPKVRDQEGRMNYYWTLVEPGDKITFEATGNLVVPRYAFAMERNAGSGIIISDTPVHDCNTTCQTPKGAINTSLPFQNIHPITIGKCPKYVKSTKLRLATGLRNVPSIQSRGLFGAIAGFIEGGWTGMVDGWYGYHHQNEQGSGYAADLKSTQNAIDEITNKVNSVIEKMNTQFTAVGKEFNHLEKRIENLNKKVDDGFLDIWTYNAELLVLLENERTLDYHDSKVKNLYEKVRSQLKNNAKEIGNGCFEFYHKCDNTCMESVKNGTYDYPKYSEEAKLNREEIDGVKLESTRIYQILAIYSTVASSLVLVVSLGAISFWMCSNGSLQCRICI

SEQ ID NO: 6723 - protein, 566 aa, Artificial Sequence
  derived and/or modified protein sequence (wt) from hemagglutinin__InfluenzaA__AEG64752
MKAILVVLLYTFATANADTLCIGYHANNSTDTVDTVLEKNVTVTHSVNLLEDKHNGKLCKLRGVAPLHLGKCNIAGWILGNPECESLSTASSWSYIVETSSSDNGTCYPGDFIDYEELREQLSSVSSFERFEIFPKTSSWPNHDSNKGVTAACPHAGAKSFYKNLIWLVKKGNSYPKLSKSYINDKGKEVLVLWGIHHPSTSADQQSLYQNADAYVFVGSSRYSKKFKPEIAIRPKVRDQEGRMNYYWTLVEPGDKITFEATGNLVVPRYAFAMERNAGSGIIISDTPVHDCNTTCQTPKGAINTSLPFQNIHPITIGKCPKYVRSTKLRLATGLRNVPSIQSRGLFGAIAGFIEGGWTGMVDGWYGYHHQNEQGSGYAADLKSTQNAIDEITNKVNSVIEKMNTQFTAVGKEFNHLEKRIENLNKKVDDGFLDIWTYNAELLVLLENERTLDYHDSNVKNLYEKVRRQLKNNAKEIGNGCFEFYHKCDNTCMESVKNGTYDYPKYSEEAKLNREEIDGVKLESTRIYQILAIYSTVASSLVLVVSLGAISFWMCSNGSLQCRICI

SEQ ID NO: 6724 - protein, 566 aa, Artificial Sequence
  derived and/or modified protein sequence (wt) from hemagglutinin__InfluenzaA__AEG64762
MKARLLVLLCALAATDADTICIGYHANNSTDTVDTLLEKNVTVTHSVNLLEDSHNGKLCKLKGIAPLQLGKCNIAGWLLGNPECDSLLPARSWSYIVETPNSENGACYPGDFIDYEELREQLSTVSSLERFEIFPKESSWPNHNTLKGVTVSCSHGGKSSFYRNLLWLTKTGDSYPKLNNSYVNNKGKEVLVLWGVHHPSSSNEQQSLYHNVNAYVSVVSSNYNRRFTPEIAARPKVRDQPGRMNYYWTLLEPGDTILFEATGNLIAPWYAFALSRGFGSGIITSNASMHECNTKCQTPQGAINSSLPFQNIHPVTIGECPKYVRSTKLRMVTGLRNIPSIQSRGLFGAIAGFIEGGWTGMIDGWYGYHHQNEQGSGYAADQKSTQNAINGITNKVNSVIEKMNTQFTAVGKEFNNLEKRMENLNKKVDDGFLDIWTYNAELLVLLENERTLDFHDLNVKNLYEKVKSQLKNNAKEIGNGCFEFYHKCDNECMESVRDGTYDYPKYSEESKLNREKIDGVKLESMGVYQILAIYSTVASSLVLLVSLGAISFWMCSNGSLQCRICI

SEQ ID NO: 6725 - protein, 566 aa, Artificial Sequence; identical to SEQ ID NO: 2669
  derived and/or modified protein sequence (wt) from hemagglutinin__InfluenzaA__AEG64784

SEQ ID NO: 6726 - protein, 566 aa, Artificial Sequence
  derived and/or modified protein sequence (wt) from hemagglutinin__InfluenzaA__AEG64834
MKTIIALSYILCLVFAQKLPGNDNSTATLCLGHHAVPNGTIVKTITNDQIEVTNATELVQNSSAGEICDSPHQILDGENCTLIDALLGDPQCDGFQNKKWDLFVERSRAYSNCYPYDVPDYASLRSLVASSGTLEFNNESFNWTGVTQNGTSSACIRRSNNSFFSRLNWLTHLNFKYPALNVTMPNNEQFDKLYIWGVHHPGTDKDQIFLYAQASGRITVSTKRSQQAVIPNIGSRPRVRNIPSRISIYWTIVKPGDILLINSTGNLIAPRGYFKIRSGKSSIMRSDAPIGKCNSECITPNGSIPNDKPFQNVNRITYGACPRYVKQSTLKLATGMRNVPEKQTRGIFGAIAGFIENGWEGMVDGWYGFRHQNSEGRGQAADLKSTQAAIDQINGKLNRLIGKTNEKFHQIEKEFSEVEGRIQDLEKYVEDTKIDLWSYNAELLVALENQHTIDLTDSEMNKLFEKTKKQLRENAEDMGNGCFKIYHKCDNACIGSIRNGTYDHDVYRDEALNNRFQIKGVELKSGYKDWILWISFAISCFLLCVALLGFIMWACQKGNIRCNICI

SEQ ID NO: 6727 - protein, 566 aa, Artificial Sequence
  derived and/or modified protein sequence (wt) from hemagglutinin__InfluenzaA__AEG64845
MKTIIALSYILCLVFAQKLPGNDNSTATLCLGHHAVPNGTIVKTITNDQIEVTNATELVQNSSTGEICDSPHQILDGENCTLIDALLGDPQCDGFQNKKWDLFVERSKAYSNCYPYDVPDYASLRSLVASSGTLEFNNESFNWTGVTQNGTSSACIRRSNNSFFSRLNWLTHLNFKYPALNVTMPNNEQFDKLYIWGVHHPGTDKDQIFLYAQASGRITVSTKRSQQTVIPNIGSRPRVRNIPSRISIYWTIVKPGDILLINSTGNLIAPRGYFKIRSGKSSIMRSDAPIGKCNSECITPNGSIPNDKPFQNVNRITYGACPRYVKQNTLKLATGMRNVPEKQTRGIFGAIAGFIENGWEGMVDGWYGFRHQNSEGRGQAADLKSTQAAIDQINGKLNRLIGKTNEKFHQIEKEFSEVEGRIQDLEKYVEDTKIDLWSYNAELLVALENQHTIDLTDSEMNKLFEKTKKQLRENAEDMGNGCFKIYHKCDNACIGSIRNGTYDHDVYRDEALNNRFQIKGVELKSGYKDWILWISFAISCFLLCVALLGFIMWACQKGNIRCNICI

SEQ ID NO: 6728 - protein, 566 aa, Artificial Sequence
  derived and/or modified protein sequence (wt) from hemagglutinin__InfluenzaA__AEG64856
MKTIIALSYILCLVFAQKLPGNDNSTATLCLGHHAVPNGTLVKTITNDQIEVTNATELVQSSSTGRICDSPHQILDGENCTLIDALLGDPHCDGFQNKEWDLFVERSKAYSNCYPYDVPDYASLRSLVASSGTLEFNNESFNWTGVAQNGTSSACKRRSNKSFFSRLNWLHQLKYKYPALNVTMPNNEKFDKLYIWGVHHPSTDSDQISLYAQASGRVTVSTKRSQQTVIPNIGSRPWVRGVSSRISIYWTIVKPGDILLINSTGNLIAPRGYFKIRSGKSSVMRSDASIGKCNSECITPNGSIPNDKPFQNVNRITYGACPRYVKQNTLKLATGMRNVPEKQTRGIFGAIAGFIENGWEGMVDGWYGFRHQNSEGTGQAADLKSTQAAINQINGKLNRLIEKTNEKFHQIEKEFSEVEGRIQDLEKYVEDTKIDLWSYNAELLVALENQHTIDLTDSEMNKLFERTKKQLRENAEDMGNGCFKIYHKCDNACIESIRNGTYDHDVYRDEALNNRFQIKGVELKSGYKDWILWISFAISCFLLCVVLLGFIMWACQKGNIRCNICI

SEQ ID NO: 6729 - protein, 566 aa, Artificial Sequence; identical to SEQ ID NO: 72
  derived and/or modified protein sequence (wt) from hemagglutinin__InfluenzaA__AEG64867

SEQ ID NO: 6730 - protein, 566 aa, Artificial Sequence
  derived and/or modified protein sequence (wt) from hemagglutinin__InfluenzaA__AEG64878
MKTIIALSYILCLVFAQKLPVNDNSTATLCLGHHAVPNGTLVKTITNDHIEVTNATELVQSSSTGRICDSPHQILDGENCTLIDALLGDPHCDGFQNKEWDLFVERSTAYSNCYPYDVPDYASLRSLVASSGTLEFNNESFNWTGVAQNGTSSACKRRSIKSFFSRLNWLHQLKYKYPALNVTMPNNEKFDKLYIWGVHHPSTDSDQISLYAQASGRVTVSTKRSQQTVIPNIGSRPWVRGVSSRISIYWTIVKPGDILLINSTGNLIAPRGYFKIRSGKSSIMRSNAPIGKCNSECITPNGSIPNDKPFQNVNRITYGACPRYVKQNTLKLATGMRNVPEKQTRGIFGAIAGFIENGWEGMVDGWYGFRHQNSEGIGQAADLKSTQAAINQINGKLNRLIEKTNEKFHQIEKEFSEVEGRIQDLEKYVEDTKIDLWSYNAELLVALENQHTIDLTDSEMNKLFERTRKQLRENAEDMGNGCFKIYHKCDNACIGSIRNGTYDHDVYRDEALNNRFQIKGVELKSGYKDWILWISFAISCFLLCVVLLGFIMWACQKGNIRCNICI

SEQ ID NO: 6731 - protein, 566 aa, Artificial Sequence
  derived and/or modified protein sequence (wt) from hemagglutinin__InfluenzaA__AEG64889
MKTIIALSYILCLVFAQKLPVNDNSTATLCLGHHAVPNGTLVKTITNDHIEVTNATELVQSSSTGRICDSPHQILDGENCTLIDALLGDPHCDGFQNKEWDLFVERSTAYSNCYPYDVPDYASLRSLFASSGTLEFNNESFNWTGVAQNGTSSACKRRSIKSFFSRLNWLHQLKYKYPALNVTMPNNEKFDKLYIWGVHHPSTDSDQISLYAQASGRVTVSTKRSQQTVIPNIGSRPWVRGVSSRISIYWTIVKPGDILLINSTGNLIAPRGYFKIRSGKSSIMRSNAPIGKCNSECITPNGSIPNDKPFQNVNRITYGACPRYVKQNTLKLATGMRNVPEKQTRGIFGAIAGFIENGWEGMVDGWYGFRHQNSEGTGQAADLKSTQAAINQINGKLNRLIEKTNEKFHQIEKEFSEVEGRIQDLEKYVEDTKIDLWSYNAELLVALENQHTIDLTDSEMNKLFEKTRKQLRENAEDMGNGCFKIYHKCDNACIGSIRNGTYDHDVYRDEALNNRFQIKGVELKSGYKDWILWISFAISCFLLCVVLLGFIMWACQKGNIRCNICI

SEQ ID NO: 6732 - protein, 566 aa, Artificial Sequence; identical to SEQ ID NO: 32
  derived and/or modified protein sequence (wt) from hemagglutinin__InfluenzaA__AEG64911

SEQ ID NO: 6733 - protein, 566 aa, Artificial Sequence; identical to SEQ ID NO: 32
  derived and/or modified protein sequence (wt) from hemagglutinin__InfluenzaA__AEG64922

SEQ ID NO: 6734 - protein, 566 aa, Artificial Sequence; identical to SEQ ID NO: 32
  derived and/or modified protein sequence (wt) from hemagglutinin__InfluenzaA__AEG64933

SEQ ID NO: 6735 - protein, 566 aa, Artificial Sequence; identical to SEQ ID NO: 118
  derived and/or modified protein sequence (wt) from hemagglutinin__InfluenzaA__AEG64944

SEQ ID NO: 6736 - protein, 566 aa, Artificial Sequence; identical to SEQ ID NO: 32
  derived and/or modified protein sequence (wt) from hemagglutinin__InfluenzaA__AEG64955

SEQ ID NO: 6737 - protein, 566 aa, Artificial Sequence; identical to SEQ ID NO: 32
  derived and/or modified protein sequence (wt) from hemagglutinin__InfluenzaA__AEG64966

SEQ ID NO: 6738 - protein, 566 aa, Artificial Sequence
  derived and/or modified protein sequence (wt) from hemagglutinin__InfluenzaA__AEG64977
MKTIIALSYILCLVFAQKLPENDNSTATLCLGHHAVPNGTIVKTITNDQIEVTNATELVQSSSTGGICDSPHQILDGENCTLIDALLGDPQCDGFQNKKWDLFVERSKAYSNCYPYDVPDYASLRSLVASSGTLEFNNESFDWTGVTQNGTSSACKRRSNKSFFSRLNWLTHLKYKYPALNVTMPNNEKFDKLYIWGVHHPGTDSDQISLYAQASGRITVSTKRSQQTVIPNIGSRPRVRDVSSRISIYWTIVKPGDILLINSTGNLIAPRGYFKIRSGKSSIMRSDAPIDKCNSECITPNGSIPNDKPFQNVNRITYGACPRYVKQNTLKLATGMRNVPEKQTRGIFGAIAGFIENGWEGMVDGWYGFRHQNSEGTGQAADLKSTQAAINQINGKLNRLIGKTNEKFHQIEKEFSEVEGRIQDLEKYVEDTKIDLWSYNAELLVALENQHTIDLTDSEMNKLFERTKKQLRENAEDMGNGCFKIYHKCDNACIGSIRNGTYDHDVYRDEALNNRFQIKGVELKSGYKDWILWISFAISCFLLCVALLGFIMWACQKGNIRCNICI

SEQ ID NO: 6739 - protein, 566 aa, Artificial Sequence
  derived and/or modified protein sequence (wt) from hemagglutinin__InfluenzaA__AEG64988
MKTIIALSYILCLVFAQKLPGNDNSTATLCLGHHAVPNGTIVKTITNDQIEVTNATELVQSSSTGEICDMPHQILDGENCTLIDALLGDPQCDGFQNKKWDLFVERSKAYSNCYPYDVPDYASLRSLVASSGTLEFNNESFNWTGVTQNGTSSACKRRSNNSFFSRLNWLTHLKFKYPALNVTMPNNEKFDKLYIWGVHHPGTDNDQIFLYAQASGRITVSTKRSQQTVIPNIGSRPRVRNIPSRISIYWTIVKPGDILLINSTGNLIAPRGYFKIRSGKSSIMRSDAPIGKCNSECITPNGSIPNDKPFQNVNRITYGACPRYVKQNTLKLATGMRNVPEKQTRGIFGAIAGFIENGWEGMVDGWYGFRHQNSEGIGQAADLKSTQAAINQINGKLNRLIGKTNEKFHQIEKEFSEVEGRIQDLEKYVEDTKIDLWSYNAELLVALENQHTIDLTDSEMNKLFERTKKQLRENAEDMGNGCFKIYHKCDNACIGSIRNGTYDHDVYRDEALNNRFQIKGVELKSGYKDWILWISFAISCFLLCVVLLGFIMWACQKGNIRCNICI

SEQ ID NO: 6740 - protein, 566 aa, Artificial Sequence
  derived and/or modified protein sequence (wt) from hemagglutinin__InfluenzaA__AEG64999
MKTIIALSYILCLVFAQKLPGNDNSTATLCLGHHAVPNGTIVKTITNDQIEVTNATELVQNSSTGGICDSPHQILDGENCTLIDALLGDPQCDGFQNKKWDLFVERSKAYSNCYPYDVPDYVSLRSLVASSGTLEFNNESFNWTGVTQNGTSSACKRRSNNSFFSRLNWLTHLKFKYPALNVTMPNNEKFDKLYIWGVHHPGTDNDQISLYAQASGRITVSTKRSQQTVIPNIGSRPRVRDIPSRISIYWTIVKPGDILLINSTGNLIAPRGYFKIRSGKSSIMRSDAPIGKCNSECITPNGSIPNDKPFQNVNRITYGACPRYVKQNTLKLATGMRNVPEKQTRGIFGAIAGFIENGWEGMVDGWYGFRHQNSEGIGQAADLKSTQAAINQINGKLNRLIGKTNEKFHQIEKEFSEVEGRIQDLEKYVEDTKIDLWSYNAELLVALENQHTIDLTDSEMNKLFERTKKQLRENAEDMGNGCFKIYHKCDNACIGSIRNGTYDHDVYRDEALNNRFQIKGVELKSGYKDWILWISFAISCFLLCVALLGFIMWACQKGNIRCNICI

SEQ ID NO: 6741 - protein, 566 aa, Artificial Sequence; identical to SEQ ID NO: 255
  derived and/or modified protein sequence (wt) from hemagglutinin__InfluenzaA__AEG65010

SEQ ID NO: 6742 - protein, 566 aa, Artificial Sequence
  derived and/or modified protein sequence (wt) from hemagglutinin__InfluenzaA__AEG65021
MKTIIALSYILCLVFAQKLPGNDNSTATLCLGHHAVPNGTIVKTITNDQIEVTNATELVQSSSTGGICDSPHQILDGENCTLIDALLGDPQCDGFQNKKWDLFVERSKAYSNCYPYDVPDYVSLRSLVASSGTLEFNNESFNWTGVTQNGTSSACKRRSNNSFFSRLNWLTHLKFKYPALNVTMPNTEKFDKLYIWGVHHPGTDNDQISLYAQASGRITVSTKRSQQTVIPNIGSRPRVRDIPSRISIYWTIVKPGDILLINSTGNLIAPRGYFKIRSGKSSIMRSDAPIGKCNSECITPNGSIPNDKPFQNVNRITYGACPRYVKQNTLKLATGMRNVPEKQTRGIFGAIAGFIENGWEGMVDGWYGFRHQNSEGIGQAADLKSTQAAINQINGKLNRLIGKTNEKFHQIEKEFSEVEGRIQDLEKYVEDTKIDLWSYNAELLVALENQHTIDLTDSEMNKLFERTKKQLRENAEDMGNGCFKIYHKCDNACIGSIRNGTYDHDVYRDEALNNRFQIKGVELKSGYKDWILWISFAISCFLLCVALLGFIMWACQKGNIRCNICI

SEQ ID NO: 6743 - protein, 566 aa, Artificial Sequence
  derived and/or modified protein sequence (wt) from hemagglutinin__InfluenzaA__AEG65032
MKTIIALSYILCLVFAQKLPGNDNSTATLCLGHHAVPNGTIVKTITNDQIEVTNATELVQSSSTGGICDSPHQILDGENCTLIDALLGDPQCDGFQNKKWDLFVERSKAYSNCYPYDVPDYASLRSLVASSGTLEFNNESFNWTGVTQNGTSSACKRRSNNSFFSRLNWLTHLKFKYPALNVTMPNNEKFDKLYIWGVHHPGTDNDQIFLYAQASGRITVSTKRSQQTVIPNIGSRPRVRNIPSRISIYWTIVKPGDILLINSTGNLIAPRGYFKIRSGKSSIMRSDAPIGKCNSECITPNGSIPNDKPFQNVNRITYGACPRYVKQNTLKLATGMRNVPEKQTRGIFGAIAGFIENGWEGMVDGWYGFRHQNSEGIGQAADLKSTQAAINQINGKLNKLIGKTNEKFHQIEKEFSEVEGRIQDLEKYVEDTKIDLWSYNAELLVALENQHTIDLTDSEMNKLFERTKKQLRENAEDMGNGCFKIYHKCDNACIGSIRNGTYDHDVYRDEALNNRFQIKGVELKSGYKDWILWISFAISCFLLCVALLGFIMWACQKGNIRCNICI

SEQ ID NO: 6744 - protein, 566 aa, Artificial Sequence; identical to SEQ ID NO: 630
  derived and/or modified protein sequence (wt) from hemagglutinin__InfluenzaA__AEG65043

SEQ ID NO: 6745 - protein, 566 aa, Artificial Sequence; identical to SEQ ID NO: 630
  derived and/or modified protein sequence (wt) from hemagglutinin__InfluenzaA__AEG65054

SEQ ID NO: 6746 - protein, 566 aa, Artificial Sequence
  derived and/or modified protein sequence (wt) from hemagglutinin__InfluenzaA__AEG65065
MKTIIALSYILCLVFAQKLPGNDNSTATLCLGHHAVPNGTIVKTITNDQIEVTNATELVQSSSTGEICDSPHQILDGENCTLIDALLGDPQCDGFQNKKWDLFVERSKAYSNCYPYDVPDYASLRSLVASSGTLEFNNESFNWTGVTQNGTSSACKRRSNNSFFSRLNWLTHLKFKYPALNVTMPNNEKFDKLYIWGVHHPGTDNDQIFLYAQASGRITVSTKRSQQTVIPNIGSRPRVRNIPSRISIYWTIVKPGDILLINSTGNLIAPRGYFKIRSGKSSIMRSDAPIGKCNSECITPNGSIPNDKPFQNVNRITYGACPRYVKQNTLKLATGMRNVPEKQTRGIFGAIAGFIENGWEGMVDGWYGFRHQNSEGIGQAADLKSTQAAINQINGKLNRLIGKTNEKFHQIEKEFSEVEGRIQDLEKYVEDTKIDLWSYNAELLVALENQHTIDLTDSEMNKLFERTKKQLRENAEDMGNGCFKIYHKCDNACIGSIRNGTYDHDVYRDEALNNRFQIKGVELKSGYKDWVLWISFAISCFLLCVVLLGFIMWACQKGNIRCNICI

SEQ ID NO: 6747 - protein, 566 aa, Artificial Sequence
  derived and/or modified protein sequence (wt) from hemagglutinin__InfluenzaA__AEG65076
MKTIIALSYILCLVFAQKLPGNDNSTATLCLGHHAVPNGTIVKTITNDQIEVTNATELVQSSSTGGICDSPHQILDGENCTLIDALLGDPQCDGFQNKKWDLFVERSKAYSNCYPYDVPDYASLRSLVASSGTLEFNNESFNWTGVTQNGTSSACKRRSNNSFFSRLNWLTHLRFKYPALNVTMPNNEKFDKLYIWGVHHPGTDNDQIFLYAQASGRITVSTKRSQQTVIPNVGSRPRVRNIPSRISIYWTIVKPGDILLINSTGNLIAPRGYFKIRSGKSSIMRSDAPIGKCNSECITPNGSIPNDKPFQNVNRITYGACPRYVKQNTLKLATGMRNVPEKQTRGIFGAIAGFIENGWEGMVDGWYGFRHQNSEGTGQAADLKSTQAAINQINGKLNRLIGKTNEKFHQIEKEFSEVEGRIQDLEKYVEDTKIDLWSYNAELLVALENQHTIDLTDSEMNKLFERTKKQLRENAEDMGNGCFKIYHKCDNACIGSIRNGTYDHDVYRDEALNNRFQIKGVELKSGYKDWILWISFAISCFLLCVALLGFIMWACQKGNIRCNICI

SEQ ID NO: 6748 - protein, 566 aa, Artificial Sequence
  derived and/or modified protein sequence (wt) from hemagglutinin__InfluenzaA__AEG65087
MKTIIALSYILCLVFAQKLPGNDNSTATLCLGHHAVPNGTIVKTITNDQIEVTNATELVQSSSTGGICDSPHQILDGENCTLIDALLGDPQCDGFQNKKWDLFVERSKAYSNCYPYDVPDYASLRSLVASSGTLEFNNESFNWTGVTQNGTSSACKRRSNNSFFSRLNWLTHLKFKYPALNVTMPNNEKFDKLYIWGVHHPGTNNDQIFLYAQASGRITVSTKRSQQTVIPNIGSRPRVRNIPSRISIYWTIVKPGDILLINSTGNLIAPRGYFKIRSGKSSIMRSDAPIGKCNSECITPNGSIPNDKPFQNVNRITYGACPRYVKQNTLKLATGMRNVPEKQTRGIFGAIAGFIENGWEGMVDGWYGFRHQNSEGIGQAADLKSTQAAINQINGKLNRLIGKTNEKFHQIEKEFSEVEGRIQDLEKYVEDTKIDLWSYNAELLVALENQHTIDLTDSEMNKLFERTKKQLRENAEDMGNGCFKIYHKCDNACIGSIRNGTYDHDVYRDEALNNRFQIKGVELKSGYKDWILWISFAISCFLLCVALLGFIMWACQKGNIRCNICI

SEQ ID NO: 6749 - protein, 566 aa, Artificial Sequence
  derived and/or modified protein sequence (wt) from hemagglutinin__InfluenzaA__AEG65098
MKTIIALSYILCLVFAQKLPGNDNSTATLCLGHHAVPNGTIVKTITNDQIEVTNATELVQSSSTGEICDSPHQILDGENCTLIDALLGDPQCDDFQNKKWDLFVERSKAYSNCYPYDVPDYASLRSLVASSGTLEFNNESFNWTGVTQNGTSSACKRRSNNSFFSRLNWLTHSKFKYPALNVTMPNNEKFDKLYIWGVHHPGTDNDQIFLYAQASGRITVSTKRSQQTVIPNIGSRPRVRNIPSRISIYWTIVKPGDILLINSTGNLIAPRGYFKIRSGKSSIMRSDAPIGKCNSECITPNGSIPNDKPFQNVNRITYGACPRYVKQNTLKLATGMRNVPEKQTRGIFGAIAGFIENGWEGMVDGWYGFRHQNSEGIGQAADLKSTQAAINQINGNLNRLIGKTNEKFHQIEKEFSEVEGRIQDLEKYVEDTKIDLWSYNAELLVALENQHTIDLTDSEMNKLFERTKKQLRENAEDMGNGCFKIYHKCDNACIGSIRNGTYDHDVYRDEALNNRFQIKGVELKSGYKDWILWISFAISCFLLCVVLLGFIMWACQKGNIRCNICI

SEQ ID NO: 6750 - protein, 566 aa, Artificial Sequence
  derived and/or modified protein sequence (wt) from hemagglutinin__InfluenzaA__AEG65109
MKTIIALSYILCLVFAQKLPGNDNSTATLCLGHHAVPNGTIVKTITNDQIEVTNATELVQSSSTGEICDSPHQILDGENCKLIDALLGDPQCDGFQNKKWDLFVERSKAYSNCYPYDVPDYASLRSLVASSGTLEFNNESFNWTGVTQNGTSSACKRRSNNSFFSRLNWLTHLKFKYPALNVTMPNNEKFDKLYIWGVHHPGTDNDQIFLYAQSSGRITVSTKRSQQTVIPNIGSRPRVRNIPSRISIYWTIVKPGDILLINSTGNLIAPRGYFKIRSGKSSIMRSDAPIGKCNSECITPNGSIPNDKPFQNVNRITYGACPRYVKQNTLKLATGMRNVPEKQTRGIFGAIAGFIENGWEGMVDGWYGFRHQNSEGIGQAADLKSTQAAINQINGKLNRLIGKTNEKFHQIEKEFSEVEGRIQDLEKYVEDTKIDLWSYNAELLVALENQHTIDLTDSEMNKLFERTKKQLRENAEDMGNGCFKIYHKCDNACIGSIRNGTYDHDVYRDEALNNRFQIKGVELKSGYKDWILWISFAISCFLLCVALLGFIMWACQKGNIRCNICI

SEQ ID NO: 6751 - protein, 566 aa, Artificial Sequence
  derived and/or modified protein sequence (wt) from hemagglutinin__InfluenzaA__AEG65120
MKTIIALSYILCLVFAQKLPGNDNSTATLCLGHHAVPNGTIVKTITNDQIEVTNATELVQSSSTGEICDSPHQILDGENCTLIDALLGDPQCDGFQNKKWDLFVERSKAYSNCYPYDVPDYASLRSLVASSGTLEFNNESFNWTGVTQNGTSSACKRRSNNSFFSRLNWLTHLKFKYPALNVTMPNNEKFDKLYIWGVHHPGTDNDQIFLYAQASGRITVSTKRSQQTVIPNIGSRPRVRNIPSRISIYWTIVKPGDILLINSTGNLIAPRGYFKIRSGKSSIMRSDAPIGKCNSECITPNGSIPNDKPFQNVNRIAYGACPRYVKQNTLKLATGMRNVPEKQTRGIFGAIAGFIENGWEGMVDGWYGFRHQNSEGIGQAADLKSTQAAINQINGKLNRLIGKTNEKFHQIEKEFSEVEGRIQDLEKYVEDTKIDLWSYNAELLVALENQHTIDLTDSEMNKLFERTKKQLRENAEDMGNGCFKIYHKCDNACIGSIRNGTYDHDVYRDEALNNRFQIKGVELKSGYKDWILWISFAISCFLLCVVLLGFIMWACQKGNIRCNICI

SEQ ID NO: 6752 - protein, 566 aa, Artificial Sequence
  derived and/or modified protein sequence (wt) from hemagglutinin__InfluenzaA__AEG65131
MKTIIALSYILCLVFAQKLPGNDNSTATLCLGHHAVPNGTIVKTITNDQIEVTNATELVQSSSTGEICDSPHQILDGENCTLIDALLGDPQCDGFQNKKWDLFVERSKAYSNCYPYDVPDYASLRSLVASSGTLEFNNESFNWTGVTQNGTSSACKRRSNNSFFSRLNWLTHSKFKYPALNVTMPNNEKFDKLYIWGVHHPGTDNDQIFLYAQASGRITVSTKRSQQTVIPNIGSRPRVRNIPSRISIYWTIVKPGDILLINSTGNLIAPRGYFKIRSGKSSIMRSDAPIGKCNSECITPNGSIPNDKPFQNVNRITYGACPRYVKQNTLKLATGMRNVPEKQTRGIFGAIAGFIENGWEGMVDGWYGFRHQNSEGIGQAADLKSTQAAINQINGKLNRLIGKTNEKFHQIEKEFSEVEGRIQDLEKYVEDTKIDLWSYNAELLVALENQHTIDLTDSEMNKLFERTKKQLRENAEDMGNGCFKIYHKCDNACIGSIRNGTYDHDVYRDEALNNRFQIKGVELKSGYKDWILWISFAISCFLLCVVLLGFIMWACQKGNIRCNICI

SEQ ID NO: 6753 - protein, 566 aa, Artificial Sequence; identical to SEQ ID NO: 51
  derived and/or modified protein sequence (wt) from hemagglutinin__InfluenzaA__AEG65142

SEQ ID NO: 6754 - protein, 566 aa, Artificial Sequence; identical to SEQ ID NO: 51
  derived and/or modified protein sequence (wt) from hemagglutinin__InfluenzaA__AEG65153

SEQ ID NO: 6755 - protein, 566 aa, Artificial Sequence
  derived and/or modified protein sequence (wt) from hemagglutinin__InfluenzaA__AEG65164
MKTIIALSYILCLVFAQKLPGNDNSTATLCLGHHAVPNGTLVKTITNDQIEVTNATELVQSSSTGRICDSPHQILDGENCTLIDALLGDPHCDGFQNKEWDLFVERSKAYSNCYPYDVPDYVSLRSLVASSGTLEFNNESFNWTGVAQNGTSSACKRRSDKSFFSRLNWLHQLKYKYPALNVTMPNNEKFDKLYIWGVHHPGTDSDQISLYAQASGRVTVSTKRSQQTVIPNIGSRPWVRGVSSRISIYWTIVKPGDILLINSTGNLIAPRGYFKIRSGKSSIMRSDAPIGKCNSECITPNGSIPNDKPFQNVNRITYGPCPRYVKQNTLKLATGMRNVPEKQTRGIFGAIAGFIENGWEGMMDGWYGFRHQNSEGTGQAADLKSTQAAINQINGKLNRLIEKTNEKFHQIEKEFSEVEGRIQDLEKYVEDTKIDLWSYNAEFLVALENQHTIDLTDSEMNKLFERTKKQLRENAEDMGNGCFKIYHKCDNACIGSIRNGTYDHDVYRDEALNNRFQIKGVELKSGYKDWILWISFAISCFLLCIVLLGFIMWACQKGNIRCNICI

SEQ ID NO: 6756 - protein, 566 aa, Artificial Sequence
  derived and/or modified protein sequence (wt) from hemagglutinin__InfluenzaA__AEG65175
MKTIIALSYILCLVFAQKLPGNDNSTATLCLGHHAVPNGTIVKTITNDQIEVTNATELVQSSSTGGICDSPHQILDGENCTLIDALLGDPQCDGFQNKKWDLFVERSKAYSNCYPYDVPDYASLRSLVASSGTLEFNNESFNWTGVTQNGTSSACERRSNKSFFSRLNWLTHLKYKYPALNVTMPNNEKFDKLYIWGVHHPGTDSDQISLYAQASGRITVSTKRSQQTVIPNIGSRPRVRDVSSRISIYWTIVKPGDILLINSTGNLIAPRGYFKIRNGKSSIMRSDAPIGKCNSECITPNGSIPNDKPFQNVNRITYGACPRYVKQNTLKLATGMRNVPEKQTRGIFGAIAGFIENGWEGMVDGWYGFRHQNSEGTGQAADLKSTQAAINQINGKLNRLIGKTNEKFHQIEKEFSEVEGRIQDLEKYVEDTKIDLWSYNAELLVALENQHTIDLTDSEMNKLFERTKKQLRENAEDMGNGCFKIYHKCDNACIGSIRNGTYDHDVYRDEALNNRFQIKGVELKSGYKDWILWISFAISCFLLCVALLGFIMWACQKGNIRCDICI

SEQ ID NO: 6757 - protein, 566 aa, Artificial Sequence; identical to SEQ ID NO: 419
  derived and/or modified protein sequence (wt) from hemagglutinin__InfluenzaA__AEG65186

SEQ ID NO: 6758 - protein, 566 aa, Artificial Sequence
  derived and/or modified protein sequence (wt) from hemagglutinin__InfluenzaA__AEG65197
MKTIIALSYILCLVFAQKLPGNDNSTATLCLGHHAVPNGTIVKTITNDQIEVTNATELVQSSPTGGICDSPHQILDGENCTLIDALLGDPQCDGFQNKKWDLFVERSKAYSNCYPYDVPDYASLRSLVASSGTLEFNNESFNWTGVTQNGTSSACKRRSNNSFFSRLNWLTHLKFKYPALNVTMPNNEKFDKLYIWGVHHPGTDNDQISLYAQASGRITVSTKRSQQTVIPNIGSRPRVRDIPSRISIYWTIVKPGDIILINSTGNLIAPRGYFKIRSGKSSIMRSDTPIGKCNSECITPNGSIPNDKPFQNVNRITYGACPRYVKQNTLKLATGMRNVPEKQTRGIFGAIAGFIENGWEGMVDGWYGFRHQNSEGIGQAADLKSTQAAINQINGKLNRLIGKTNEKFHQIEKEFSEVEGRIQDLEKYVEDTKIDLWSYNAELLVALENQHTIDLTDSEMNKLFERTKKQLRENAEDMGNGCFKIYHKCDNACIGSIRNGTYDHDVYRDEALNNRFQIKGVELKSGYKDWILWISFAISCFLLCVALLGFIMWACQKGNIRCNICI

SEQ ID NO: 6759 - protein, 566 aa, Artificial Sequence; identical to SEQ ID NO: 630
  derived and/or modified protein sequence (wt) from hemagglutinin__InfluenzaA__AEG65208

SEQ ID NO: 6760 - protein, 566 aa, Artificial Sequence
  derived and/or modified protein sequence (wt) from hemagglutinin__InfluenzaA__AEG65219
MKTIIALSYILCLVFAQKLPGNDNSTATLCLGHHAVPNGTIVKTITNDQIEVTNATELVQSSSTGGICDSPHQILDGENCTLIDALLGDPQCDGFQNKKWDLFVERSKAYSNCYPYDVPDYASLRSLVASSGTLEFNNESFNWTGVTQNGTSSACKRRSNKSFFSRLNWLTHLKFKYPALNVTMPNNEKFDKLYIWGVHHPGTDNDQISLYAQASGRITVSTKRSQQTVIPNIGSRPRVRDVPSRISIYWTIVKPGDILLINSTGNLIAPRGYFKIRSGKSSIMRSDAPIGKCNSECITPNGSIPNDKPFQNVNRITYGACPRYVKQNTLKLATGMRNVPEKQTRGIFGAIAGFIENGWEGMVDGWYGFRHQNSEGTGQAADLKSTQAAINQINGKLNRLIGKTNEKFHQIEKEFSEVEGRIQDLEKYVEDTKIDLWSYNAELLVALENQHTIDLTDSEMNKLFERTKKQLRENAEDMGNGCFKIYHKCDNACIGSIRNGTYDHDVYRDEALNNRFQIKGVELKSGYKDWILWISFAISCFLLCVALLGFIMWACQKGNIKCNICI

SEQ ID NO: 6761 - protein, 566 aa, Artificial Sequence; identical to SEQ ID NO: 1795
  derived and/or modified protein sequence (wt) from hemagglutinin__InfluenzaA__AEG65230

SEQ ID NO: 6762 - protein, 566 aa, Artificial Sequence; identical to SEQ ID NO: 1795
  derived and/or modified protein sequence (wt) from hemagglutinin__InfluenzaA__AEG65252

SEQ ID NO: 6763 - protein, 566 aa, Artificial Sequence; identical to SEQ ID NO: 516
  derived and/or modified protein sequence (wt) from hemagglutinin__InfluenzaA__AEG65263

SEQ ID NO: 6764 - protein, 566 aa, Artificial Sequence; identical to SEQ ID NO: 516
  derived and/or modified protein sequence (wt) from hemagglutinin__InfluenzaA__AEG65274

SEQ ID NO: 6765 - protein, 566 aa, Artificial Sequence; identical to SEQ ID NO: 516
  derived and/or modified protein sequence (wt) from hemagglutinin__InfluenzaA__AEG65285

SEQ ID NO: 6766 - protein, 566 aa, Artificial Sequence
  derived and/or modified protein sequence (wt) from hemagglutinin__InfluenzaA__AEG65296
MKTVIALSYILCLVFAQKLPGNDNSTATLCLGHHAVPNGTIVKTITNDQIEVTNATELVQSSSTGGICDSPHQILDGENCTLIDALLGDPQCDGFQNKKWDLFVERSKAYSNCYPYDVPDHASLRSLVASSGTLEFNNESFDWTGVTQNGTSSACKRRSNKSFFSRLNWLTHLKYKYPALNVTMPNNEKFDKLYIWGVHHPGTDSDQISLYAQASGRITVSTKRSQQTVIPNIGSRPRVRDVSSRISIYWTIVKPGDILLINSTGNLIAPRGYFKIRSGKSSIMRSDAPIGKCNSECITPNGSIPNDKPFQNVNRITYGACPRYVKQNTLKLATGMRNVPEKQTRGIFGAIAGFIENGWEGMVDGWYGFRHQNSEGTGQAADLKSTQAAINQINGKLNRLIGKTNEKFHQIEKEFSEVEGRIQDLEKYVEDTKIDLWSYNAELLVALENQHTIDLTDSEMNKLFERTKKQLRENAEDMGNGCFKIYHKCDNACIGSIRNGTYDHDVYRDEALNNRFQIKGVELKSGYKDWILWISFAISCFLLCVALLGFIMWACQKGNIRCNICI

SEQ ID NO: 6767 - protein, 566 aa, Artificial Sequence; identical to SEQ ID NO: 1795
  derived and/or modified protein sequence (wt) from hemagglutinin__InfluenzaA__AEG65307

SEQ ID NO: 6768 - protein, 566 aa, Artificial Sequence
  derived and/or modified protein sequence (wt) from hemagglutinin__InfluenzaA__AEG65318
MKTIIALSYILCLVFAQKLPGNDNSTATLCLGHHAVPNGTIVKTITNDQIEVTNATELVQSSSTGGICDSPHQILDGENCTLIDALLGDPQCDGFQNKKWDLFVERSKAYSNCYPYDVPDYASLRSLVASSGTLEFNNESFNWTGVTQNGTSSACKRRSNKSFFSRLNWLTHLKFKYPALNVTMPNNEKFDKLYIWGVHHPGTDNDQISLYAQASGRITVSTKRSQQTVIPNIGSRPRVRDVPSRISIYWTIVKPGDILLINSTGNLIAPRGYFKIRSGKSSIMRSDAPIGKCNSECITPNGSIPNDKPFQNVNRITYGACPRYVRQNTLKLATGMRNVPEKQTRGIFGAIAGFIENGWEGMVDGWYGFRHQNSEGTGQAADLKSTQAAINQINGKLNRLIGKTNEKFHQIEKEFSEVEGRIQDLEKYVEDTKIDLWSYNAELLVALENQHTIDLTDSEMNKLFERTKKQLRENAEDMGNGCFKIYHKCDNACIGSIRNGTYDHDVYRDEALNNRFQIKGVELKSGYKDWILWISFAISCFLLCVALLGFIMWACQKGNIRCNICI

SEQ ID NO: 6769 - protein, 566 aa, Artificial Sequence; identical to SEQ ID NO: 1795
  derived and/or modified protein sequence (wt) from hemagglutinin__InfluenzaA__AEG65329

SEQ ID NO: 6770 - protein, 566 aa, Artificial Sequence
  derived and/or modified protein sequence (wt) from hemagglutinin__InfluenzaA__AEG65340
MKTIIALSYILCLVFAQKLPGNDNSTATLCLGHHAVPNGTIVKTITNDQIEVTNATELVQSSSTGGICDSPHQILDGENCTLIDALLGDPQCDGFQNKKWDLFVERSKAYSNCYPYDVPDYASLRSLVASSGTLEFNNESFNWTGVTQNGTSSACERRSNKSFFSRLNWLTHLKYKYPALNVTMPNNEKFDKLYIWGVHHPGTDSDQISLYAQASGRITVSTKRSQQTVIPNIGSRPRVRDVSSRISIYWTIVKPGDILLINSTGNLIAPRGYFKIRSGKSSIMRSDAPIGKCNSECITPNGSIPNDKPFQNVNRITYGACPRYVKQNTLKLATGMRNVPEKQTRGIFGAIAGFIENGWEGMVDGWYGFRHQNSEGTGQAADLKSTQAAINQINGKLNRLIGKTNEKFHQIEKEFSEVEGRIQDLEKYVEDTKIDLWSYNAELLVALENQHTIDLTDSEMNKLFERTKKQLRENAEDMGNGCFKIYHKCDNACIESIRNGTYDHDVYRDEALNNRFQIKGVELKSGYKDWILWISFAISCFLLCVALLGFIMWACQKGNIRCNICI

SEQ ID NO: 6771 - protein, 566 aa, Artificial Sequence; identical to SEQ ID NO: 1795
  derived and/or modified protein sequence (wt) from hemagglutinin__InfluenzaA__AEG65351

SEQ ID NO: 6772 - protein, 566 aa, Artificial Sequence; identical to SEQ ID NO: 1795
  derived and/or modified protein sequence (wt) from hemagglutinin__InfluenzaA__AEG65362

SEQ ID NO: 6773 - protein, 566 aa, Artificial Sequence; identical to SEQ ID NO: 6770
  derived and/or modified protein sequence (wt) from hemagglutinin__InfluenzaA__AEG65373

SEQ ID NO: 6774 - protein, 566 aa, Artificial Sequence; identical to SEQ ID NO: 516
  derived and/or modified protein sequence (wt) from hemagglutinin__InfluenzaA__AEG65384

SEQ ID NO: 6775 - protein, 566 aa, Artificial Sequence; identical to SEQ ID NO: 516
  derived and/or modified protein sequence (wt) from hemagglutinin__InfluenzaA__AEG65406

SEQ ID NO: 6776 - protein, 566 aa, Artificial Sequence; identical to SEQ ID NO: 516
  derived and/or modified protein sequence (wt) from hemagglutinin__InfluenzaA__AEG65417

SEQ ID NO: 6777 - protein, 566 aa, Artificial Sequence; identical to SEQ ID NO: 516
  derived and/or modified protein sequence (wt) from hemagglutinin__InfluenzaA__AEG65428

SEQ ID NO: 6778 - protein, 566 aa, Artificial Sequence
  derived and/or modified protein sequence (wt) from hemagglutinin__InfluenzaA__AEG65439
MKTIIALSYILCLVFAQKLPGNDNSTATLCLGHHAVPNGTIVKTITNDQIEVTNATELVQSSSTGGICDSPHQILDGENCTLIDALLGDPQCDGFQNKKWDLFVERSKAYSNCYPYDVPDYASLRSLVASSGTLEFNNESFNWTGVTQNGTSSACKRRSNNSFFSRLNWLTHLKFKYPALNVTMPNNEKFDKLYIWGVHHPGTDNDQIFLYAQASGRITVSTKRSQQTVIPNIGSRPRVRNIPSRISIYWTIVKPGDILLINSTGNLIAPRGYFKIRSGKSSIMRSDAPIGKCNSECITPNGSIPNDKPFQNVNRITYGACPRYVKQNTLKLATGMRNVPEKQTRGIFGAIAGFIENGWEGMVDGWYGFRHQNSEGVGQAADLKSTQAAINQINGKLNRLIGKTNEKFHQIEKEFSEVEGRIQDLEKYVEDTKIDLWSYNAELLVALENQHTIDLTDSEMNKLFERTKKQLRENAEDMGNGCFKIYHKCDNACIGSIRNGTYDHDVYRDEALNNRFQIKGVELKSGYKDWILWISFAISCFLLCVALLGFIMWACQKGNIRCNICI

SEQ ID NO: 6779 - protein, 566 aa, Artificial Sequence
  derived and/or modified protein sequence (wt) from hemagglutinin__InfluenzaA__AEG65450
MKTIIAWSYILCLVFAQKLPGNDNSTATLCLGHHAVPNGTIVKTITNDQIEVTNATELVQSSSTGGICDSPHQILDGENCTLIDALLGDPQCDGFQNKKWDLFVERSKAYSNCYPYDVPDYASLRSLIASSGTLEFNNESFNWTGVTQNGTSSACKRRSNSSFFSRLNWLTHLKFKYPALNVTMPNNEEFDKLYIWGVHHPGTYNDQISLYAQASGRITVSTKRSQQTVIPNIGSRPRVRDIPSRISIYWTIVKPGDILLINSTGNLIAPRGYFKIRSGKSSIMRSDAPIGKCNSECITPNGSIPNDKPFQNVNRITYGACPRYVKQNTLKLATGMRNVPEKQTRGIFGAIAGFIENGWEGMVDGWYGFRHQNSEGIGQAADLKSTQAAIDQINGKLNRLIGKTNEKFHQIEKEFSEVEGRIQDLEKYVEDTKIDLWSYNAELLVALENQHTIDLTDSEMNKLFERTKKQLRENAEDMGNGCFKIYHKCDNACIGSIRNGTYDHDVYRDEALNNRFQIKGVELKSGYKDWILWISFAISCFLLCVALLGFIMWACQKGNIRCNICI

SEQ ID NO: 6780 - protein, 566 aa, Artificial Sequence; identical to SEQ ID NO: 6779
  derived and/or modified protein sequence (wt) from hemagglutinin__InfluenzaA__AEG65461

SEQ ID NO: 6781 - protein, 566 aa, Artificial Sequence
  derived and/or modified protein sequence (wt) from hemagglutinin__InfluenzaA__AEG65472
MKTIIAWSYILCLVFAQKLPGNDNSTATLCLGHHAVPNGTIVKTITNDQIEVTNATELVQSSSTGGICDSPHQILDGENCTLIDALLGDPQCDGFQNKKWDLFVERSKAYSNCYPYDVPDYASLRSLIASSGTLEFNNESFNWTGVTQNGTSSACKRRSNSSFFSRLNWLTHLKFKYPALNVTMPNNEEFDKLYIWGVHHPGTYNDQISLYAQASGRITVSTKRSQQTVIPNIGSRPRVRDIPSRISIYWTIVKPGDILLINSTGNLIAPRGYFKIRSGKSSIMRSDAPIGKCNSECITPNGSIPNDKPFQNVNRITYGACPRYVKQNTLKLATGMRNVPEKQTRGIFGAIAGFIENGWEGMVDGWYGFRHQNSEGIGQAADLKSTQAAIDQINGKLNRLIGKTNEKFHQIEKEFSEVEGRIQDLEKYVEDTKIDLWSYNAELLVALENQHTIDLTDSEMNKLFEITKKQLRENAEDMGNGCFKIYHKCDNACIGSIRNGTYDHDVYRDEALNNRFQIKGVELKSGYKDWILWISFAISCFLLCVALLGFIMWACQKGNIRCNICI

SEQ ID NO: 6782 - protein, 566 aa, Artificial Sequence; identical to SEQ ID NO: 6779
  derived and/or modified protein sequence (wt) from hemagglutinin__InfluenzaA__AEG65483

SEQ ID NO: 6783 - protein, 566 aa, Artificial Sequence; identical to SEQ ID NO: 6779
  derived and/or modified protein sequence (wt) from hemagglutinin__InfluenzaA__AEG65494

SEQ ID NO: 6784 - protein, 566 aa, Artificial Sequence; identical to SEQ ID NO: 6779
  derived and/or modified protein sequence (wt) from hemagglutinin__InfluenzaA__AEG65505

SEQ ID NO: 6785 - protein, 566 aa, Artificial Sequence; identical to SEQ ID NO: 6779
  derived and/or modified protein sequence (wt) from hemagglutinin__InfluenzaA__AEG65516

SEQ ID NO: 6786 - protein, 566 aa, Artificial Sequence; identical to SEQ ID NO: 6779
  derived and/or modified protein sequence (wt) from hemagglutinin__InfluenzaA__AEG65527

SEQ ID NO: 6787 - protein, 566 aa, Artificial Sequence; identical to SEQ ID NO: 6779
  derived and/or modified protein sequence (wt) from hemagglutinin__InfluenzaA__AEG65538

SEQ ID NO: 6788 - protein, 566 aa, Artificial Sequence
  derived and/or modified protein sequence (wt) from hemagglutinin__InfluenzaA__AEG65560
MKTIIALSYILCLVFAQKLPGNDNSTATLCLGHHAVPNGTIVKTITNDQIEVTNATELVQSSSTGGICDSPHQILDGENCTLIDALLGDPQCDGFQNKKWDLFVERSKAYSNCYPYDVPDYASLRSLIASSGTLEFNNESFNWTGVTQNGTSSACKRRSNSSFFSRLNWLTHLKFKYPALNVTMPNNEEFDKLYIWGVHHPGTYNDQISLYAQASGRITVSTKRSQQTVIPNIGSRPRVRDIPSRISIYWTIVKPGDILLINSTGNLIAPRGYFKIRSGKSSIMKSDAPIGKCNSECITPNGSIPNDKPFQNVNRITYGACPRYVKQNTLKLATGMRNVPEKQTRGIFGAIAGFIENGWEGMVDGWYGFRHQNSEGIGQAADLKSTQAAIDQINGKLNRLIGKTNEKFHQIEKEFSEVEGRIQDLEKYVEDTKIDLWSYNAELLVALENQHTIDLTDSEMNKLFERTKKQLRENAEDMGNGCFKIYHKCDNACIGSIRNGTYDHDVYRDEALNNRFQIKGVELKSGYKDWILWISFAISCFLLCVALLGFIMWACQKGNIRCNICI

SEQ ID NO: 6789 - protein, 566 aa, Artificial Sequence; identical to SEQ ID NO: 6788
  derived and/or modified protein sequence (wt) from hemagglutinin__InfluenzaA__AEG65571

SEQ ID NO: 6790 - protein, 566 aa, Artificial Sequence; identical to SEQ ID NO: 6788
  derived and/or modified protein sequence (wt) from hemagglutinin__InfluenzaA__AEG65582

SEQ ID NO: 6791 - protein, 566 aa, Artificial Sequence; identical to SEQ ID NO: 6788
  derived and/or modified protein sequence (wt) from hemagglutinin__InfluenzaA__AEG65593

SEQ ID NO: 6792 - protein, 566 aa, Artificial Sequence
  derived and/or modified protein sequence (wt) from hemagglutinin__InfluenzaA__AEG65604
MKTIIALSYILCLVFAQKLPGNDNSTATLCLGHHAVPNGTIVKTITNDQIEVTNATELVQSSSTGGICDSPHQILDGENCTLIDALLGDPQCDGFQNKKWDLFVERSKAYSNCYPYDVPDYASLRSLIASSGTLEFNNESFNWTGVTQNGTSSACKRRSNNSFFSRLNWLTHLKFKYPALNVTMPNNEEFDKLYIWGVHHPGTDNDQISLYAQASGKITVSTKRSQQTVIPNIGSRPRVRDIPSRISIYWTIVKPGDILLINSTGNLIAPRGYFKIRSGKSSIMRSDAPIGKCNSECITPNGSIPNDKPFQNVNRITYGACPRYVKQNTLKLATGMRNVPEKQTRGIFGAIAGFIENGWEGMVDGWYGFRHQNSEGIGQAADLKSTQAAIDQINGKLNRLIGKTNEKFHQIEKEFSEVEGRIQDLEKYVEDTKIDLWSYNAELLVALENQHTIDLTDSEMNKLFERTKKQLRENAEDMGNGCFKIYHKCDNACIGSIRNGTYDHDVYRDEALNNRFQIKGVELKSGYKDWILWISFAISCFLLCVALLGFIMWACQKGNIRCNICI

SEQ ID NO: 6793 - protein, 566 aa, Artificial Sequence
  derived and/or modified protein sequence (wt) from hemagglutinin__InfluenzaA__AEG65626
MKTIIALSYILCLVFAQKLPGNDNSTATLCLGHHAVPNGTIVKTITNDQIEVTNATELVQSSSTGGICDSPHQILDGENCTLIDALLGDPQCDGFQNKKWDLFVERSKAYSNCYPYDVPDYASLRSLVASSGTLEFNNESFNWTGVTQNGTSSACKRKSNNSFFSRLNWLTHLKFKYPALNVTMPNNKKFDKLYIWGVHHPGTDNDQISLYAQASGRITVSTKRSQQTVIPNIGSRPRVRDIPSRISIYWTIVKPGDMLLINSTGNLIAPRGYFKIRSGKSSIMRSDAPIGKCNSECITPNGSIPNDKPFQNVNRITYGACPRYVKQNTLKLATGMRNVPEKQTRGIFGAIAGFIENGWEGMVDGWYGFRHQNSEGTGQAADLKSTQAAINQINGKLNRLIGKTNEKFHQIEKEFSEVEGRIQDLEKYVEDTKIDLWSYNAELLVALENQHTIDLTDSEMNKLFERTKKQLRENAEDMGNGCFKIYHKCDNACIGSIRNGTYDHDVYRDEALNNRFQIKGVELKSGYKDWILWISFAISCFLLCVALLGFIMWACQKGNIRCNICI

SEQ ID NO: 6794 - protein, 566 aa, Artificial Sequence
  derived and/or modified protein sequence (wt) from hemagglutinin__InfluenzaA__AEG65637
MKTIIALSYILCLVFAQKLPGNDNSTATLCLGHHAVPNGTIVKTITNDQIEVTNATELVQSSSTGGICDSPHQILDGENCTLIDALLGDPQCDGFQNKKWDLFVERSKAYSNCYPYDVPDYASLRSLVASSGTLEFNNESFNWTGVTQNGTSSACKRKSNNSFFSRLNWLTHLKFKYPALNVTMPNNKKFDKLYIWGVHHPGTDNDQISLYAQASGRITVSTKRSQQTVIPNIGSRPRVRDIPSRISIYWTIVKPGDMLLINSTGNLIAPRGYFKIRSGRSSIMRSDAPIGKCNSECITPNGSIPNDKPFQNVNRITYGACPRYVKQNTLKLATGMRNVPEKQTRGIFGAIAGFIENGWEGMVDGWYGFRHQNSEGTGQAADLKSTQAAINQINGKLNRLIGKTNEKFHQIEKEFSEVEGRIQDLEKYVEDTKIDLWSYNAELLVALENQHTIDLTDSEMNKLFERTKKQLRENAEDMGNGCFKIYHKCDNACIGSIRNGTYDHDVYRDEALNNRFQIKGVELKSGYKDWILWISFAISCFLLCVALLGFIMWACQKGNIRCNICI

SEQ ID NO: 6795 - protein, 566 aa, Artificial Sequence; identical to SEQ ID NO: 31
  derived and/or modified protein sequence (wt) from hemagglutinin__InfluenzaA__AEG65648

SEQ ID NO: 6796 - protein, 566 aa, Artificial Sequence; identical to SEQ ID NO: 1795
  derived and/or modified protein sequence (wt) from hemagglutinin__InfluenzaA__AEG65659

SEQ ID NO: 6797 - protein, 566 aa, Artificial Sequence; identical to SEQ ID NO: 1795
  derived and/or modified protein sequence (wt) from hemagglutinin__InfluenzaA__AEG65670

SEQ ID NO: 6798 - protein, 566 aa, Artificial Sequence; identical to SEQ ID NO: 1795
  derived and/or modified protein sequence (wt) from hemagglutinin__InfluenzaA__AEG65681

SEQ ID NO: 6799 - protein, 566 aa, Artificial Sequence; identical to SEQ ID NO: 6770
  derived and/or modified protein sequence (wt) from hemagglutinin__InfluenzaA__AEG65692

SEQ ID NO: 6800 - protein, 566 aa, Artificial Sequence; identical to SEQ ID NO: 630
  derived and/or modified protein sequence (wt) from hemagglutinin__InfluenzaA__AEG65703

SEQ ID NO: 6801 - protein, 566 aa, Artificial Sequence
  derived and/or modified protein sequence (wt) from hemagglutinin__InfluenzaA__AEG65747
MKTIIALSYILCLVFAQKLPGNDNSTATLCLGHHTVPNGTIVKTITNDQIEVTNATELVQSSSTGEICDSPHQILDGENCTLIDALLGDPQCDGFQNKKWDLFVERSKAYSNCYPYDVPDYASLRSLVASSGTLEFNNESFNWTGVTQNGTSSACKRRSNNSFFSRLNWLTHLKFKYPALNVTMPNNEKFDKLYIWGVHHPGTDNDQIFLYAQASGRITVSTKRSQQTVIPNIGSRPRVRNIPSRISIYWTIVKPGDILLINSTGNLIAPRGYFKIRSGKSSIMRSDAPIGKCNSECITPNGSIPNDKPFQNVNRITYGACPRYVKQNTLKLATGMRNVPEKQTRGIFGAIAGFIENGWEGMVDGWYGFRHQNSEGTGQAADLKSTQAAINQINGKLNRLIGKTNEKFHQIEKEFSEVEGRIQDLEKYVEDTKIDLWSYNAELLVALENQHTIDLTDSEMNKLFERTKKQLRENAEDMGNGCFKIYHKCDNACIGSIRNGTYDHDVYRDEALNNRFQIKGVELKSGYKDWILWISFAISCFLLCVALLGFIMWACQKGNIRCNICI

SEQ ID NO: 6802 - protein, 566 aa, Artificial Sequence
  derived and/or modified protein sequence (wt) from hemagglutinin__InfluenzaA__AEG65758
MKTIIALSYILCLVSAQKLPGNDNSTATLCLGHHAVPNGTIVKTITNDQIEVTNATELVQSSSTGGICDSPHQILDGENCTLIDALLGDPQCDGFQNKKWDLFVERSKAYSNCYPYDVPDYASLRSLVASSGTLEFNNESFNWTGVTQNGTSSACKRRSNNSFFSRLNWLTHLKFKYPALNVTMPNNEKFDKLYIWGVHHPGTDNDQIFLYAQASGRITVSTKRSQQTVIPNIGSRPRVRNIPSRISIYWTIVKPGDILLINSTGNLIAPRGYFKIRSGKSSIMRSDAPIGKCNSECITPNGSIPNDKPFQNVNRITYGACPRYVKQNTLKLATGMRNVPEKQTRGIFGAIAGFIENGWEGMVDGWYGFRHQNSEGIGQAADLKSTQAAINQINGKLNRLIGKTNEKFHQIEKEFSEVEGRIQDLEKYVEDTKIDLWSYNAELLVALENQHTIDLTDSEMNKLFERTKKQLRENAEDMGNGCFKIYHKCDNACIGSIRNGTYDHDVYRDEALNNRFQIKGVELKSGYKDWILWISFAISCFLLCVALLGFIMWACQKGNIRCNICI

SEQ ID NO: 6803 - protein, 566 aa, Artificial Sequence; identical to SEQ ID NO: 281
  derived and/or modified protein sequence (wt) from hemagglutinin__InfluenzaA__AEG65769

SEQ ID NO: 6804 - protein, 566 aa, Artificial Sequence
  derived and/or modified protein sequence (wt) from hemagglutinin__InfluenzaA__AEG65780
MKTIIALSYILCLVFAQKLPGNDNSTATLCLGHHAVPNGTIVKTITNDKIEVTNATELVQSSSTGEICNSPHQILDGENCTLIDALLGDPQCDGFQNKKWDLFVERSKAHSNCYPYDVPDYASLRSLVAASGTLEFNNESFNWTGVTQNGTSSACIRRSNNSFFSRLNWLTHLNFKYPALNVTMPNNEQFDKLYIWGVHHPGTDKDQIFLYAQAAGRITVSTKRSQQAVIPNIGSRPRVRNIPSRVSIYWTIVKPGDILLINSTGNLIAPRGYFKIRSGKSSIMRSDAPIGKCNSACITPNGSIPNDKPFQNVNRITYGACPRYVKQNTLKLATGMRNVPEKQTRGIFGAIAGFIENGWEGMVDGWYGFRHQNSEGRGQAADLKSTQAAIDQINGKLNRLIGKTNEKFHQIEKEFSEVEGRIQDLEKYVEDTKIDLWSYNAELLVALENQHTIDLTDSEMNKLFEKTKKQLRENAEDMGNGCFKIYHKCDNACIGSIRNGTYDHDVYRDEALNNRFQIKGVELKSGYKDWILWISFAISCFLLCVALLGFIMWACQKGNIRCNICI

SEQ ID NO: 6805 - protein, 566 aa, Artificial Sequence
  derived and/or modified protein sequence (wt) from hemagglutinin__InfluenzaA__AEG65813
MKTIIALSYILCLVFAQKLPGNDNSTATLCLGHHAVPNGTIVKTITNDQIEVTNATELVQSSSTGEICNSPHQILDGENCTLIDALLGDPQCDGFQNKKWDLFVERSKAHSNCYPYDVPDYASLRSLVASSGTLEFNNESFNWTGVTQNGTSSACIRRSNNSFFSRLNWLTHLNFKYPALNVTMPNNEQFDKLYIWGVHHPGTDKDQIFLYAQAAGRITVSTKRSQQAVIPNIGSRPRVRNIPSRVSIYWTIVKPGDILLINSTGNLIAPRGYFKIRSGKSSIMRSDAPIGKCNSACITPNGSIPNDKPFQNVNRITYGACPRYVKQNTLKLATGMRNVPEKQTRGIFGAIAGFIENGWEGMVDGWYGFRHQNSEGRGQAADLKSTQAAIDQINGKLNRLIGKTNEKFHQIEKEFSEVEGRIQDLEKYVEDTKTDLWSYNAELLVALENQHTIDLTDSEMNKLFEKTKKQLRENAEDMGNGCFKIYHKCDNACIGSIRNGTYDHDVYRDEALNNRFQIKGVELKSGYKDWILWISFAISCFLLCVALLGFIMWACQKGNIRCNICI

SEQ ID NO: 6806 - protein, 566 aa, Artificial Sequence
  derived and/or modified protein sequence (wt) from hemagglutinin__InfluenzaA__AEG79801
MKAILVVLLYTFATANADTLCIGYHANNSTDTVDTVLEKNVTVTHSVNLLEDKHNGKLCKLRGVAPLHLGKCNIAGWILGNPECESLSTASSWSYIVETSSSDNGTCYPGDFINYEELREQLSSVSSFERFEIFPKTSSWPNHDSNKGVTAACPHAGAKSFYKNLIWLVKKGNSYPKLSKSYINDKGKEVLVLWGIHHPSTTADQQSLYQNADAYVFVGTSRYSKKFKPEIAIRPKVRDREGRMNYYWTLVEPGDKITFEATGNLVVPRYAFAMERNAGSGIIISDTPVHDCNTTCQTPKGAINTSLPFQNIHPITIGKCPKYVKSTKLRLATGLRNVPSIQSRGLFGAIAGFIEGGWTGMVDGWYGYHHQNEQGSGYAADLKSTQNAIDKITNKVNSVIEKMNTQFTAVGKEFNHLEKRIENLNKKVDDGFLDIWTYNAELLVLLENERTLDYHDSNVKNLYEKVRNQLKNNAKEIGNGCFEFYHKCDNTCMESVKNGTYDYPKYSEEAKLNREEIDGVKLESTRIYQILAIYSTVASSLVLVVSLGAISFWMCSNGSLQCRICI

SEQ ID NO: 6807 - protein, 566 aa, Artificial Sequence
  derived and/or modified protein sequence (wt) from hemagglutinin__InfluenzaA__AEG79807
MKAILVVLLYTFATANADTLCIGYHANNSTDTVDTVLEKNVTVTHSVNLLEDKHNGKLCKLRGVAPLHLGKCNIAGWILGNPECESLSTASSWSYIVETSSSDNGTCYPGDFINYEELREQLSSVSSFERFEIFPKTSSWPNHDSNKGVTAACPHAGAKSFYKNLIWLVKKENSYPKLSKSYINDKGKEVLVLWGIHHPSTTADQQSIYQNADAYVFVGTSRYSKKFKPEIAIRPKVRDQEGRMNYYWTLVEPGDKITFEATGNLVVPRYAFAMERNAGSGIIISDTPVHDCNTTCQTPKGAINTSLPFQNIHPITIGKCPKYVKSTKLRLATGLRNVPSIQSRGLFGAIAGFIEGGWTGMVDGWYGYHHQNEQGSGYAADLKSTQNAIDKITNKVNSVIEKMNTQFTAVGKEFNHLEKRIENLNKKVDDGFLDIWTYNAELLVLLENERTLDYHDSNVKNLYEKVRNQLKNNAKEIGNGCFEFYHKCDNTCMESVKNGTYDYPKYSEEAKLNREEIDGVKLESTRIYQILAIYSTVASSLVLVVSLGAISFWMCSNGSLQCRICI

SEQ ID NO: 6808 - protein, 566 aa, Artificial Sequence
  derived and/or modified protein sequence (wt) from hemagglutinin__InfluenzaA__AEG79835
MKAILVVLLYTFATANADTLCIGYHANNSTDTVDTVLEKNVTVTHSVNLLEDKHNGKLCKLRGVAPLHLGKCNIAGWILGNPECESLSTASSWSYIVETSSSDNGTCYPGDFIDYEELREQLSSVSSFERFEIFPKTSSWPNHDSNKGVTAACPHAGAKGFYKNLIWLVKKGNSYPKLSKSYINDKGKEVLVLWGIHHPSTTADQQSIYQNADTYVFVGTSRYSKKFKPEIAIRPKVRDQEGRMNYYWTLVEPGDKITFEATGNLVVPRYAFAMERNAGSGIIISDTPVHDCNTTCQTPKGAINTSLPFQNIHPITIGKCPKYVKSTKLRLATGLRNVPSIQSRGLFGAIAGFIEGGWTGMVDGWYGYHHQNEQGSGYAADLKSTQNAIDKITNKVNSVIEKMNTQFTAVGKEFNHLEKRIENLNKKVDDGFLDIWTYNAELLVLLENERTLDYHDSNVKNLYEKVRNQLKNNAKEIGNGCFEFYHKCDNTCMESVKNGTYDYPKYSEEAKLNREEIDGVKLESTRIYQILAIYSTVASSLVLVVSLGAISFWMCSNGSLQCRICI

SEQ ID NO: 6809 - protein, 566 aa, Artificial Sequence
  derived and/or modified protein sequence (wt) from hemagglutinin__InfluenzaA__AEH59363
MKAILVVLLYTFATANADTLCIGYHANNSTDTVDTVLEKNVTVTHSVNLLEDKHNGKLCKLRGVAPLHLGKCNIAGWILGNPECESLSTASSWSYIVETSSSDNGTCYPGDFINYEELREQLSSVSSFERFEIFPKTSSWPNHDSNKGVTAACPQAGAKSFYKNLIWLVKKGNSYPKLSKSYINDKGKEVLVLWGIHHPSTSADQQSLYQNADAYVFVGTSKYSKKFKPEIAVRPKVRDQEGRMNYYWTLVEPGDKITFEATGNLLVPRYAFAMERNAGSGIIISDTPVHDCNTTCQTPKGAINTSLPFQNIHPITIGKCPKYVKSTKLRLATGLRNVPSIQSRGLFGAIAGFIEGGWTGMVDGWYGYHHQNAQGSGYAADLKSTQNAIDKITNKVNSVIEKMNTQFTAVGKEFNHLEKRIENLNKKVDDGFLDIWTYNAELLVLLENERTLDYHDSNVKNLYEKVRSQLKNNAKEIGNGCFEFYHKCDNTCMESVKNGTYDYPKYSEEAKLNREEIDGVKLESTRIYQILAIYSTVASSLVLVVSLGAISFWMCSNGSLQCRICI

SEQ ID NO: 6810 - protein, 566 aa, Artificial Sequence
  derived and/or modified protein sequence (wt) from hemagglutinin__InfluenzaA__AEH59367
MKAILVVLLYTFATANADTLCIGYHANNSTDTVDTVLEKNVTVTHSVNLLEDKHNGKLCKLRGVAPLHLGKCNIAGWILGNPECESLSTASSWSYIVETSSSDNGTCYPGDFINYEELREQLSSVSSFERFEIFPKTSSWPNHDSNKGVTAACPHAGAKSFYKNLIWLVKKGNSYPKLSKSYINDKGKEVLVLWGIHHPSTTADQQSLYQNADAYVFVGTSRYSKKFKPEIAIRPKVRDQEGRMNYYWALVEPGDKITFEATGNLVVPRYAFAMERNAGSGIIISDTPVHDCNTTCQTPKGAINTSLPFQNIHPITIGKCPKYVKSTKLRLATGLRNVPSIQSRGLFGAIAGFIEGGWTGMVDGWYGYHHQNEQGSGYAADLKSTQNAIDKITNKVNSVIEKMNTQFTAVGKEFNHLEKRIENLNKKVDDGFLDIWTYNAELLVLLENERTLDYHDSNVKNLYEKVRNQLKNNAKEIGNGCFEFYHKCDNTCMESVKNGTYDYPKYSEEAKLNREEIDGVKLESTRIYQILAIYSTVASSLVLVVSLGAISFWMCSNGSLQCRICI

SEQ ID NO: 6811 - protein, 566 aa, Artificial Sequence
  derived and/or modified protein sequence (wt) from hemagglutinin__InfluenzaA__AEH59369
MKAILVVLLYTFATANADTLCIGYHANNSTDTVDTVLEKNVTVTHSVNLLEDKHNGKLCKLRGVAPLHLGKCNIAGWILGNPECESLSTASSWSYIVETSSSDNGTCYPGDFIDYEELREQLSSVSSFERFEIFPKASSWPNHDSNKGVTAACPHAGAKGFYKNLIWLVKKGNSYPKLSKSYINDKGKEVLVLWGIHHPSTTADQQSLYQNADTYVFVGTSRYSKKFKPEIAIRPKVRDQEGRMNYYWTLVEPGDKITFEATGNLVVPRYAFAMERNAGSGIIISDTPVHDCNTTCQTPKGAINTSLPFQNIHPITIGKCPKYVKSTKLRLATGLRNVPSIQSRGLFGAIAGFIEGGWTGMVDGWYGYHHQNEQGSGYAADLKSTQNAIDKITNKVNSVIEKMNTQFTAVGKEFNHLEKRIENLNKKVDDGFLDIWTYNAELLVLLENERTLDYHDSNVKNLYEKVRNQLKNNAKEIGNGCFEFYHKCDNTCMESVKNGTYDYPKYSEEAKLNREEIDGVKLESTRIYQILAIYSTVASSLVLVVSLGAISFWMCSNGSLQCRICI

SEQ ID NO: 6812 - protein, 566 aa, Artificial Sequence; identical to SEQ ID NO: 6809
  derived and/or modified protein sequence (wt) from hemagglutinin__InfluenzaA__AEH59371

SEQ ID NO: 6813 - protein, 566 aa, Artificial Sequence
  derived and/or modified protein sequence (wt) from hemagglutinin__InfluenzaA__AEH59373
MKAILVVLLYTFATANADTLCIGYHANNSTDTVDTVLEKNVTVTHSVNLLEDKHNGKLCKLREVAPLHLGKCNIAGWILGNPECESLSTASSWSYIVETSSSDNGTCYPGDFIDYEELREQLSSVSSFERFEIFPKTSSWPNHDSNKGVTAACPHAGAKGFYKNLIWLVKKGNSYPKLSKSYINDKGKEVLVLWGIHHPSTTADQQSLYQNADTYVFVGTSRYSKKFKPEIAIRPKVRDQEGRMNYYWTLVEPGDKITFEATGNLVVPRYAFAMERNAGSGIIISDTPVHDCNTTCQTPKGAINTSLPFQNIHPITIGKCPKYVKSTKLRLATGLRNVPSIQSRGLFGAIAGFIEGGWTGMVDGWYGYRHQNEQGSGYAADLKSTQNAIDKITNKVNSVIEKMNTQFTAVGKEFNHLERRIENLNKKVDDGFLDIWTYNAELLVLLENERTLDYHDSNVKNLYEKVRNQLKNNAKEIGNGCFEFYHKCDNTCMESVKNGTYDYPKYSEEAKLNREEIDGVKLESTRIYQILAIYSTVASSLVLVVSLGAISFWMCSNGSLQCRICI

SEQ ID NO: 6814 - protein, 566 aa, Artificial Sequence; identical to SEQ ID NO: 6809
  derived and/or modified protein sequence (wt) from hemagglutinin__InfluenzaA__AEH59375

SEQ ID NO: 6815 - protein, 566 aa, Artificial Sequence
  derived and/or modified protein sequence (wt) from hemagglutinin__InfluenzaA__AEH59379
MKAILVVLLYTFATANADTLCIGYHANNSTDTVDTVLEKNVTVTHSVNLLEDKHNGKLCKLRGVAPLHLGKCNIAGWILGNPECESLSTASSWSYIVETSSSDNGTCYPGDFIDYEELREQLSSVSSFERFEIFPKTSSWPNHDSNKGVTAACPHAGAKSFYKNLIWLVKKGNSYPKLSKSYINDKGKEVLVLWGIHHPSTTADQQSLYQNADTYVFVGTSRYSKKFKPEIAIRPKVRDQEGRMNYYWTLVEPGDKITFEATGNLVVPRYAFAMERNAGSGIIISDTPVHDCNTTCQTPKGAINTSLPFQNIHPITIGKCPKYVKSTKLRLATGLRNVPSIQSRGLFGAIAGFIEGGWTGMVDGWYGYHHQNEQGSGYAADLKSTQNAIDKITNKVNSVIEKMNTQFTAVGKEFNHLEKRIENLNKKVDDGFLDIWTYNAELLVLLENERTLDYHDSNVKNLYEKVRNQLKNNAKETGNGCFEFYHKCDNTCMESVKNGTYDYPKYSEEAKLNREEIDGVKLESTRIYQILAIYSTVASSLVLVVSLGAISFWMCSNGSLQCRICI

SEQ ID NO: 6816 - protein, 566 aa, Artificial Sequence; identical to SEQ ID NO: 6809
  derived and/or modified protein sequence (wt) from hemagglutinin__InfluenzaA__AEH59381

SEQ ID NO: 6817 - protein, 566 aa, Artificial Sequence
  derived and/or modified protein sequence (wt) from hemagglutinin__InfluenzaA__AEH59383
MKAILVVLLYTFATANADTLCIGYHANNSTDTVDTVLEKNVTVTHSVNLLEDKHNGKLCKLRGVAPLHLGKCNIAGWILGNPECESLSTASSWSYIVETSSSDNGTCYPGDFIDYEELREQLSSVSSFERFEIFPKTSSWPNHDSNKGVTAACPHAGAKGFYKNLIWLVKKGNSYPKLSISYINDKGKEVLVLWGIHHPSTTADQQSLYQNADTYVFVGTSRYSKKFKPEIAIRPKVRDQEGRMNYYWTLVEPGDKITFEATGNLVVPRYAFAMERNAGSGIIISDTPVHDCNTTCQTPKGAINTSLPFQNIHPITIGKCPKYVKSTKLRLATGLRNVPSIQSRGLFGAIAGFIEGGWTGMVDGWYGYHHQNEQGSGYAADLKSTQNAIDKITNKVNSVIEKMNTQFTAVGKEFNHLEKRIENLNKKVDDGFLDIWTYNAELLVLLENERTLDYHDSNVKNLYEKVRNQLKNNAKEIGNGCFEFYHKCDNTCMESVKNGTYDYPKYSEEAKLNREEIDGVKLESTRIYQILAIYSTVASSLVLVVSLGAISFWMCSNGSLQCRICI

SEQ ID NO: 6818 - protein, 566 aa, Artificial Sequence
  derived and/or modified protein sequence (wt) from hemagglutinin__InfluenzaA__AEH59385
MKAILVVLLYTFATANADTLCIGYHANNSTDTVDTVLEKNVTVTHSVNLLEDKHNGKLCKLRGVAPLHLGKCNIAGWILGNPECESLSTASSWSYIVETSSSDNGTCYPGDFIDYEELREQLSSVSSFERFEIFPKTSSWPNHDSNKGVTAACPHAGAKSFYKNLIWLVKKGNSYPKLSKSYINDKGKEVLVLWGIHHPSTTADQQSLYQNADAYIFVGTSRYSKKFKPEIAIRPKVRDQEGRMNYYWTLVEPGDKITFEATGNLVVPRYAFAMERNAGSGIIISDTPVHDCNTTCQTPKGAINTSLPFQNIHPITIGKCPKYVKSTKLRLATGLRNVPSIQSRGLFGAIAGFIEGGWTGMVDGWYGYHHQNEQGSGYAADLKSTQNAIDKITNKVNSVIEKMNTQFTAVGKEFNHLEKRIENLNKKVDDGFLDIWTYNAELLVLLENERTLDYHDSNVKNLYEKVRNQLKNNAKEIGNGCFEFYHKCDNTCMESVKNGTYDYPKYSEEAKLNREEIDGVKLESTRIYQILAIYSTVASSLVLVVSLGAISFWMCSNGSLQCRICI

SEQ ID NO: 6819 - protein, 566 aa, Artificial Sequence; identical to SEQ ID NO: 6809
  derived and/or modified protein sequence (wt) from hemagglutinin__InfluenzaA__AEH59387

SEQ ID NO: 6820 - protein, 566 aa, Artificial Sequence
  derived and/or modified protein sequence (wt) from hemagglutinin__InfluenzaA__AEH59393
MKAILVVILYTFATANADTLCIGYHANNSTDTVDTVLEKNVTVTHSVNLLEDKHNGKLCKLRGVAPLHLGKCNIAGWILGNPECESLSTASSWSYIVETSSSDNGTCYPGDFIDYEELREQLSSVSSFERFEIFPKTSSWPNHDSNKGVTAACPHAGAKGFYKNLIWLVKKGNSYPKLSKSYINDKGKEVLVLWGIHHPSTTADQQSLYQNADTYVFVGTSRYSKKFKPEIAIRPKVRDQEGRMNYYWTLVEPGDKITFEATGNLVVPRYAFAMERNAGSGIIISDTPVHDCNTTCQTPKGAINTSLPFQNIHPITIGKCPKYVKSTKLRLATGLRNVPSIQSRGLFGAIAGFIEGGWTGMVDGWYGYHHQNEQGSGYAADLKSTQNAIDKITNKVNSVIEKMNTQFTAVGKEFNHLEKRIENLNKKVDDGFLDIWTYNAELLVLLENERTLDYHDSNVKNLYEKVRNQLKNNAKEIGNGCFEFYHKCDNTCMESVKNGTYDYPKYSEEAKLNREEIDGVKLESTRIYQILAIYSTVASSLVLVVSLGAISFWMCSNGSLQCRICI

SEQ ID NO: 6821 - protein, 566 aa, Artificial Sequence
  derived and/or modified protein sequence (wt) from hemagglutinin__InfluenzaA__AEH59397
MKAILVVLLYTFATANADTLCIGYHANNSTDTVDTVLEKNVTVTHSVNLLEDKHNGKLCKLRGVAPLHLGKCNIAGWILGNPECESLSTASSWSYIVETSSSDNGTCYPGDFINYEELREQLSSVSSFERFEIFPKTSSWPSHDSNKGVTAACPHAGAKSFYKNLIWLVKKGNSYPKLSKSYINDKGKEVLVLWGIHHPSTSADQQSLYQNADAYVFVGTSKYSKKFKPEIAVRPKVRDQEGRMNYYWTLVEPGDKITFEATGNLLVPRYAFAMERNAGSGIIISDTPVHDCNTTCQTPKGAINTSLPFQNIHPITIGKCPKYVKSTKLRLATGLRNVPSIQSRGLFGAIAGFIEGGWTGMVDGWYGYHHQNEQGSGYAADLKSTQNAIDKITNKVNSVIEKMNTQFTAVGKEFNHLEKRIENLNKKVDDGFLDIWTYNAELLVLLENERTLDYHDSNVKNLYEKVRSQLKNNAKEIENGCFEFYHKCDNTCMESVKNGTYDYPKYSEEAKLNREEIDGVKLESTRIYQILAIYSTVASSLVLVVSLGAISFWMCSNGSLQCRICI

SEQ ID NO: 6822 - protein, 566 aa, Artificial Sequence
  derived and/or modified protein sequence (wt) from hemagglutinin__InfluenzaA__AEH59399
MKAILVVLLYTFATANADTLCIGYHANNSTDTVDTVLEKNVTVTHSVNLLEDKHNGKLCKLRGVAPLHLGKCNIAGWILGNPECESLSTASSWSYIVETSSSDNGTCYPGDFIDYEELREQLSSVSSFERFEIFPKTSSWPNHDSNKGVTAACPHAGAKGFYKNLIWLVKKGNSYPKLSKSYINDKGKEVLVLWGIHHPSTTADQQSLYQNADTYVFVGTSRYSKKFKPEIAIRPKVRDQEGRMNYYWTIVEPGDKITFEATGNLVVPRYAFAMERNAGSGIIISDTPVHDCNTTCQTPKGAINTSLPFQNIHPITIGKCPKYVKSTKLRLATGLRNVPSIQSRGLFGAIAGFIEGGWTGMVDGWYGYHHQNEQGSGYAADLKSTQNAIDKITNKVNSVIEKMNTQFTAVGKEFNHLEKRIENLNKKVDDGFLDIWTYNAELLVLLENERTLDYHDSNVKNLYEKVRNQLKNNAKEIGNGCFEFYHKCDNTCMESVKNGTYDYPKYSEEAKLNREEIDGVKLESTRIYQILAIYSTVASSLVLVVSLGAISFWMCSNGSLQCRICI

SEQ ID NO: 6823 - protein, 566 aa, Artificial Sequence
  derived and/or modified protein sequence (wt) from hemagglutinin__InfluenzaA__AEH59403
MKAILVVLLYTFATANADTLCIGYHANNSTDTVDTVLEKNVTVTHSVNLLEDKHNGKLCKLRGVAPLHLGKCNIAGWILGNPECESLSTASSWSYIVETSSSDNGTCYPGDFIDYEELREQLSSVSSFERFEIFPKTSSWPNHDSNKGVTAACPHAGAKGFYKNLIWLVKKGNSYPKLSKSYINDKGKEVLVLWGIHHPSTTADQQSLYQNADTYVFVGTSRYSKKFKPEIAIRPKVRDQEGRMNYYWTLVAPGDKITFEATGNLVVPRYAFAMERNAGSGIIISDTPVHDCNTTCQTPKGAINTSLPFQNIHPITIGKCPKYVKSTKLRLATGLRNVPSIQSRGLFGAIAGFIEGGWTGMVDGWYGYHHQNEQGSGYAADLKSTQNAIDKITNKVNSVIEKMNTQFTAVGKEFNHLEKRIENLNKKVDDGFLDIWTYNAELLVLLENERTLDYHDSNVKNLYEKVRNQLKNNAKEIGNGCFEFYHKCDNTCMESVKNGTYDYPKYSEEAKLNREEIDGVKLESTRIYQILAIYSTVASSLVLVVSLGAISFWMCSNGSLQCRICI

SEQ ID NO: 6824 - protein, 566 aa, Artificial Sequence
  derived and/or modified protein sequence (wt) from hemagglutinin__InfluenzaA__AEH59407
MKAILVVMLYTFATANADTLCIGYHANNSTDTVDTVLEKNVTVTHSVNLLEDKHNGKLCKLRGVAPLHLGKCNIAGWILGNPECESLSTASSWSYIVETSSSDNGTCYPGDFIDYEELREQLSSVSSFERFEIFPKTSSWPNHDSNKGVTAACPHAGAKGFYKNLIWLVKKGNSYPKLSKSYINDKGKEVLVLWGIHHPSTTADQQSLYQNADTYVFVGTSRYSKKFKPEIAIRPKVRDQEGRMNYYWTLVEPGDKITFEATGNLVVPRYAFAMERNAGSGIIISDTPVHDCNTTCQTPKGAINTSLPFQNIHPITIGKCPKYVKSTKLRLATGLRNVPSIQSRGLFGAIAGFIEGGWTGMVDGWYGYHHQNEQGSGYAADLKSTQNAIDKITNKVNSVIEKMNTQFTAVGKEFNHLEKRIENLNKKVDDGFLDIWTYNAELLVLLENERTLDYHDSNVKNLYEKVRNQLKNNAKEIGNGCFEFYHKCDNTCMESVKNGTYDYPKYSEEAKLNREEIDGVKLESTRIYQILAIYSTVASSLVLVVSLGAISFWMCSNGSLQCRICI

SEQ ID NO: 6825 - protein, 566 aa, Artificial Sequence; identical to SEQ ID NO: 6824
  derived and/or modified protein sequence (wt) from hemagglutinin__InfluenzaA__AEH59409

SEQ ID NO: 6826 - protein, 566 aa, Artificial Sequence
  derived and/or modified protein sequence (wt) from hemagglutinin__InfluenzaA__AEH59411
MKAILVVLLYTFATANADTLCIGYHANNSTDTVDTVLEKNVTVTHSVNLLEDKHNGKLCKLRGVAPLHLGKCNIAGWILGNPECESLSTASSWSYIVETSSSDNGTCYPGDFIDYEELREQLSSVSSFERFEIFPKTSSWPNHDSNKGVTAACPHAGAKGFYKNLIWLVKKGNSYPKLSKSYINDKGKEVLVLWGIHHPSTTADQQSLYQNADTYVFVGTSRYSKKFKPEIAIRPKVRDQEGRMNYYWTLVEPGDKITFEATGNLVVPRYAFAMDRNAGSGIIISDTPVHDCNTTCQTPKGAINTSLPFQNIHPITIGKCPKYVKSTKLRLATGLRNVPSIQSRGLFGAIAGFIEGGWTGMVDGWYGYHHQNEQGSGYAADLKSTQNAIDKITNKVNSVIEKMNTQFTAVGKEFNHLEKRIENLNKKVDDGFLDIWTYNAELLVLLENERTLDYHDSNVKNLYEKVRNQLKNNAKEIGNGCFEFYHKCDNTCMESVKNGTYDYPKYSEEAKLNREEIDGVKLESTRIYQILAIYSTVASSLVLVVSLGAISFWMCSNGSLQCRICI

SEQ ID NO: 6827 - protein, 566 aa, Artificial Sequence
  derived and/or modified protein sequence (wt) from hemagglutinin__InfluenzaA__AEH59413
MKAILVVLLYTFAIANADTLCIGYHANNSTDTVDTVLEKNVTVTHSVNLLEDKHNGKLCKLRGVAPLHLGKCNIAGWILGNPECESLSTASSWSYIVETSSSDNGTCYPGDFINYEELREQLSSVSSFERFEIFPKTSSWPNHDSNKGVTAACPHAGAKSFYKNLIWLVKKGNSYPKLSKSYINDKGKEVLVLWGIHHPSTSADQQSLYQNADAYVFVGTSKYSKKFKPEIAVRPKVRDQEGRMNYYWTLVEPGDKITFEATGNLLVPRYAFAMERNAGSGIIISDTPVHDCNTTCQTPEGAINTSLPFQNIHPITIGKCPKYVKSTKLRLATGLRNVPSIQSRGLFGAIAGFIEGGWTGMVDGWYGYHHQNEQGSGYAADLKSTQNAIDKITNKVNSVIEKMNTQFTAVGKEFNHLEKRIENLNKKVDDGFLDIWTYNAELLVLLENERTLDYHDSNVKNLYEKVRSQLKNNAKEIGNGCFEFYHKCDNTCMESVKNGTYDYPKYSEEAKLNREEIDGVKLESTRIYQILAIYSTVASSLVLVVSLGAISFWMCSNGSLQCRICI

SEQ ID NO: 6828 - protein, 566 aa, Artificial Sequence
  derived and/or modified protein sequence (wt) from hemagglutinin__InfluenzaA__AEH59585
MKAILVVLLYTFATANADTLCIGYHANNSTDTVDTVLEKNVTVTHSVNLLEDKHNGKLCKLRGVAPLHLGKCNIAGWILGNPECESLSTASSWSYIVETSSSDNGTCYPGDFIDYEELREQLSSVSSFERFEIFPKTSSWPNHDPNKGVTAACPHAGAKSFYKNLIWLVKKGNSYPKLSKSYINDKGKEVLVLWGIHHPSTSADQQSLYQNADAYVFVGTSRYSKKFKPEIAIRPKVRDQEGRMNYYWTLVEPGDKITFEATGNLVVPRYAFAMERNAGSGIIISDTPVHDCNTTCQTPKGAINTSLPFQNIHPITIGKCPKYVKSTKLRLATGLRNVPSIQSRGLFGAIAGFIEGGWTGMVDGWYGYHHQNEQGSGYAADLKSTQNAIDEITNKVNSVIEKMNTQFTVVGKEFNHLEKRIENLNKKVDDGFLDIWTYNAELLVLLENERTLDYHDSNVKNLYEKVRSQLKNNAKEIGNGCFEFYHKCDNTCMESVKNGTYDYPKYSEEAKLNREEIDGVKLESTRIYQILAIYSTVASSLVLVVSLGAISFWMCSNGSLQCRICI

SEQ ID NO: 6829 - protein, 566 aa, Artificial Sequence
  derived and/or modified protein sequence (wt) from hemagglutinin__InfluenzaA__AEH59587
MKAILVVLLYTFATANADTLCIGYHANNSTDTVDTVLEKNVTVTHSVNLLEDKHNGKLCKLRGVAPLHLGKCNIAGWILGNPECESLSTASSWSYIVETSSSDNGTCYPGDFIDYEELREQLSSVSSFERFEIFPKTSSWPNHESNKGVTAACPHAGAKSFYKNLIWLVKKGNSYPKLSKSYINDKGKEVLVLWGIHHPSTSADQQSLYQNADAYVFVGTSRYSKKFKPEIAIRPKVRDQEGRMNYYWTLVEPGDKITFEATGNLVVPRYAFAMERNAGSGIIISDTPVHDCNTTCQTPKGAINTSLPFQNIHPITIGKCPKYVKSTKLRLATGLRNVPFIQSRGLFGAIAGFIEGGWTGMVDGWYGYHHQNEQGSGYAADLKSTQNAIDKITNKVNSVIEKMNTQFTVVGKEFNPLEKRIENLNKKVDDGFLDIWTYNAELLVLLENERTLDYHDSNVKNLYEKVRSQLKNNAKEIGNGCFEFYHKCDNTCMESVKNGTYDYPKYSEEAKLNREEIDGVKLESTRIYQILAIYSTVASSLVLVVSLGAISFWMCSNGSLQCRICI

SEQ ID NO: 6830 - protein, 566 aa, Artificial Sequence; identical to SEQ ID NO: 3833
  derived and/or modified protein sequence (wt) from hemagglutinin__InfluenzaA__AEH59589

SEQ ID NO: 6831 - protein, 566 aa, Artificial Sequence
  derived and/or modified protein sequence (wt) from hemagglutinin__InfluenzaA__AEH59591
MKAILVVLLYTFATANADTLCIGYHANNSTDTVDTVLEKNVTVTHSVNLLEDKHNGKLCKLRGVAPLHLGKCNIAGWILGNPECESLSTASSWSYIVETSSSDNGTCYPGDFIDYEELREQLSSVSSFERFEIFPKTSSWPNHDSNKGVTAACPHAGAKSFYKNLIWLVKKGNSYPKLSKSYINDKGKEVLVLWGIHHPSTSADQQSLYQNADAYVFVGTSRYSKKFKPEIAIRPKVRDQEGRMNYYWTLVEPGDKITFEATGNLVVPRYAFAMERNAGSGIIISDTPVHDCNTTCQTPKGAINTSLPFQNIHPITIGKCPKYVKSTKLRLATGLRNVPSIQSRGLFGAIAGFIEGGWTGMVDGWYGYHHQNEQGSGYAADLKSTQNAIDKITNKVNSVIEKMNTQFTVVGKEFNHLEKRIENLNKKVDDGFLDIWTYNAELLVLLENERTLDYHDSNVKNLYEKVRSQLKNNAKEIGNGCFEFYHKCDNTCMESVKNGTYDYPKYSEEAKLNREEIDGVKLESTRIYQILAIYSTVASSLVLVVSLGAISFWMCSNGSLQCRICI

SEQ ID NO: 6832 - protein, 566 aa, Artificial Sequence
  derived and/or modified protein sequence (wt) from hemagglutinin__InfluenzaA__AEH59593
MKAILVVLLYTFATANADTLCIGYHANNSTDTVDTVLEKNVTVTHSVNLLEDKHNGKLCKLRGVAPLHLGKCNIAGWILGNPECESLSTASSWSYIVETSSSDNGTCYPGDFIDYEELREQLSSVSSFERFEIFPKTSSWPNHESNKGVTAACPHAGAKSFYKNLIWLVKKGNSYPKLSKSYINDKGKEVLVLWGIHHPSTSADQQSIYQNADAYVFVGTSRYSKKFKPEIAIRPKVRDQEGRMNYYWTLVEPGDKITFEATGNLVVPRYAFAMERNAGSGIIISDTPVHDCNTTCQTPKGAINTSLPFQNIHPITIGKCPKYVKSTKLRLATGLRNVPSIQSRGLFGAIAGFIEGGWTGMVDGWYGYHHQNEQGSGYAADLKSTQNAIDKITNKVNSVIEKMNTQFTAVGKEFNHLEKRIENLNKKVDDGFLDIWTYNAELLVLLENERTLDYHDSNVKNLYEKVRSQLKNNAKEIGNGCFEFYHKCDNTCMESVKNGTYDYPKYSEEAKLNREEIDGVKLESTRIYQILAIYSTVASSLVLVVSLGAISFWMCSNGSLQCRICI

SEQ ID NO: 6833 - protein, 566 aa, Artificial Sequence; identical to SEQ ID NO: 3467
  derived and/or modified protein sequence (wt) from hemagglutinin__InfluenzaA__AEH59595

SEQ ID NO: 6834 - protein, 566 aa, Artificial Sequence; identical to SEQ ID NO: 3833
  derived and/or modified protein sequence (wt) from hemagglutinin__InfluenzaA__AEH59597

SEQ ID NO: 6835 - protein, 566 aa, Artificial Sequence; identical to SEQ ID NO: 6828
  derived and/or modified protein sequence (wt) from hemagglutinin__InfluenzaA__AEH59599

SEQ ID NO: 6836 - protein, 566 aa, Artificial Sequence
  derived and/or modified protein sequence (wt) from hemagglutinin__InfluenzaA__AEH59601
MKAILVVLLYTFATANADTLCIGYHANNSTDTVDTVLEKNVTVTHSVNLLEDKHNGKLCKLRGVAPLHLGNCNIAGWILGNPECESLSTASSWSYIVETSSSDNGTCYPGDFIDYEELREQLSSVSSFERFEIFPKTSSWPNHDSNKGVTAACPHAGAKSFYKNLIWLVKKGNSYPKLSKSYINDKGKEVLVLWGIHHPSTSADQQSLYQNADAYVFVGTSRYSKKFKPEIAIRPKVRDQEGRMNYYWTLVEPGDKITFEATGNLVVPRYAFAMERNAGSGIIISDTPVHDCNTTCQTPKGAINTSLPFQNIHPITIGKCPKYVKSTKLRLATGLRNVPSIQSRGLFGAIAGFIEGGWTGMVDGWYGYHHQNEQGSGYAADLKSTQNAIDKITNKVNSVIEKMNTQFTVVGKEFNHLEKRIENLNKKVDDGFLDIWTYNAELLVLLENERTLDYHDSNVKNLYEKVRSQLKNNAKEIGNGCFEFYHKCDNTCMESVKNGTYDYPKYSEEAKLNREEIDGVKLESTRIYQILAIYSTVASSLVLVVSLGAISFWMCSNGSLQCRICI

SEQ ID NO: 6837 - protein, 566 aa, Artificial Sequence; identical to SEQ ID NO: 3467
  derived and/or modified protein sequence (wt) from hemagglutinin__InfluenzaA__AEH59604

SEQ ID NO: 6838 - protein, 566 aa, Artificial Sequence; identical to SEQ ID NO: 3467
  derived and/or modified protein sequence (wt) from hemagglutinin__InfluenzaA__AEH59614

SEQ ID NO: 6839 - protein, 566 aa, Artificial Sequence
  derived and/or modified protein sequence (wt) from hemagglutinin__InfluenzaA__AEH59624
MKAILVVLLYTFATANADTLCIGYHANNSTDTVDTVLEKNVTVTHSVNLLEDKHNGKLCKLRGVAPLHLGKCNIAGWILGNPECESLSTASSWSYIVETSSSDNGTCYPGDFIDYEELREQLSSVSSFERFEIFPKTSSWPNHDPNKGVTAACPHAGAKSFYKNLIWLVKKGNSYPKLSKSYINDKGKEVLVLWGIHHPSTSADQQSFYQNADAYVFVGTSRYSKKFKPEIAIRPKVRDQEGRMNYYWTLVEPGDKITFEATGNLVVPRYAFAMERNAGSGIIISDTPVHDCNTTCQTPKGAINTSLPFQNIHPITIGKCPKYVKSTKLRLATGLRNVPSIQSRGLFGAIAGFIEGGWTGMVDGWYGYHHQNEQGSGYAADLKSTQNAIDEITNKVNSVIEKMNTQFTAVGKEFNHLEKRIENLNKKVDDGFLDIWTYNAELLVLLENERTLDYHDSNVKNLYEKVRSQLKNNAKEIGNGCFEFYHKCDNTCMESVKNGTYDYPKYSEEAKLNREEIDGVKLESTRIYQILAIYSTVASSLVLVVSLGAISFWMCSNGSLQCRICI

SEQ ID NO: 6840 - protein, 565 aa, Artificial Sequence
  derived and/or modified protein sequence (wt) from hemagglutinin__InfluenzaA__AEH77259
MKVKLLVLLCTFTATYADTICIGYHANNSTDTVDTVLEKNVTVTHSVNLLENSHNGKLCLLKGIAPLQLGNCSVAGWILGNPECELLISKESWSYIVEKPNPENGTCYPGHFADYEELREQLSSVSSFERFEMFPKESSWPNHTVTGVSASCSHNGESSFYRNLLWLTEKNGLYPNLSKSYANNKEKEVLVLWGVHHPPSISDQKTLYHTENAYVSVVSSHYSRKFTPEIAKRPKVRDQEGRINYYWTLLEPGDTIIFEANGNLIAPRYAFALSRGFGSGIINSNAPMDKCDAKCQTPQGAINSSLPFQNVHPVTIGECPKYVRSAKLRMVTGLRNIPSIQSRGLFGAIAGFIEGGWTGMVDGWYGYHHQNEQGSGYAADQKSTQNAINGITNKVNSVIEKMNTQFTAVGKEFNKLERRMENLNKKVDDGFIDIWTYNAELLVLLENERTLDFHDSNVKNLYEKVKNQLKNNAKEIGNGCFEFYHKCNDECMESVKNGTYDYPKYSEESKLNREKIDGVKLESMGVYQILAIYSTVASSLVFLVSLGAISFWMCSNGSLQCRICI

SEQ ID NO: 6841 - protein, 566 aa, Artificial Sequence; identical to SEQ ID NO: 2656
  derived and/or modified protein sequence (wt) from hemagglutinin__InfluenzaA__AEH77270

SEQ ID NO: 6842 - protein, 566 aa, Artificial Sequence; identical to SEQ ID NO: 32
  derived and/or modified protein sequence (wt) from hemagglutinin__InfluenzaA__AEH77279

SEQ ID NO: 6843 - protein, 566 aa, Artificial Sequence; identical to SEQ ID NO: 3771
  derived and/or modified protein sequence (wt) from hemagglutinin__InfluenzaA__AEI29215

SEQ ID NO: 6844 - protein, 566 aa, Artificial Sequence; identical to SEQ ID NO: 2669
  derived and/or modified protein sequence (wt) from hemagglutinin__InfluenzaA__AEI29225

SEQ ID NO: 6845 - protein, 566 aa, Artificial Sequence
  derived and/or modified protein sequence (wt) from hemagglutinin__InfluenzaA__AEI29591
MKTIIALSYIFCLVFAQDLPGNDNSTATLCLGHHAVPNGTLVKTITNDQIEVTNATELVQSSSTGKICDNPHRILDGINCTLIDALLGDPHCDGFQNEKWDLFVERSKAFSNCYPYDVPDYASLRSLVASSGTLEFINEGFNWTGVTQNGGSSACKRGPDNGFFSRLNWLYKSGSTYPVQNVTMPNNDNSDKLYIWGVHHPSTDKEQTNLYVQASGKVTVSTKRSQQTVIPNVGSRPWVRGLSSRVSIYWTIVKPGDILVINSNGNLIAPRGYYKMRTGKSSIMRSDAPIGTCSSECITPNGSIPNDKPFQNVNKITYGACPKYVKQNTLKLATGMRNVPEKQTRGIFGAIAGFIENGWEGMIDGWYGFRHQNSEGTGQAADLKSTQAAIDQINGKLNRVIEKTNEKFHQIEKEFSEVEGRIQDLEKYVEDTKIDLWSYNAELLVALENQHTIDLTDSEMNKLFEKTRRQLRENAEDMGNGCFKIYHKCDNACIGSIRNGTYDHDVYRDEALNNRFQIKGVELKSGYKDWILWISFAISCFLLCVVLLGFIMWACQKGNIRCNICI

SEQ ID NO: 6846 - protein, 566 aa, Artificial Sequence; identical to SEQ ID NO: 32
  derived and/or modified protein sequence (wt) from hemagglutinin__InfluenzaA__AEI54347

SEQ ID NO: 6847 - protein, 566 aa, Artificial Sequence; identical to SEQ ID NO: 118
  derived and/or modified protein sequence (wt) from hemagglutinin__InfluenzaA__AEI54358

SEQ ID NO: 6848 - protein, 566 aa, Artificial Sequence; identical to SEQ ID NO: 633
  derived and/or modified protein sequence (wt) from hemagglutinin__InfluenzaA__AEI54369

SEQ ID NO: 6849 - protein, 566 aa, Artificial Sequence; identical to SEQ ID NO: 516
  derived and/or modified protein sequence (wt) from hemagglutinin__InfluenzaA__AEI54380

SEQ ID NO: 6850 - protein, 566 aa, Artificial Sequence; identical to SEQ ID NO: 6779
  derived and/or modified protein sequence (wt) from hemagglutinin__InfluenzaA__AEI54391

SEQ ID NO: 6851 - protein, 566 aa, Artificial Sequence
  derived and/or modified protein sequence (wt) from hemagglutinin__InfluenzaA__AEI54402
MKTIIALSYILCLVFAQKLPGNDNSTATLCLGHHAVPNGTIVKTITNDQIEVTNATELVQSSSTGEICYSPHQILDGENCTLIDALLGDPQCDGFQNKKWDLFVERSKAYSNCYPYDVPDYASLRSLVASSGTLEFNNESFNWTGVTQNGTSSACIRRSNNSFFSRLNWLTHLKFKYPALNVTMPNNEKFDKLYIWGVHHPGTDNDQIFLYAQASGRITVSTKRSQQTVIPNIGSRPRVRNIPSRISIYWTIVKPGDILLINSTGNLIAPRGYFKIRSGKSSIMRSDAPIGKCNSECITPNGSIPNDKPFQNVNRITYGACPRYVKQNTLKLATGMRNVPEKQTRGIFGAIAGFIENGWEGMVDGWYGFRHQNSEGIGQAADLKSTQAAIDQINGKLNRLIGKTNEKFHQIEKEFSEVEGRIQDLEKYVEDTKIDLWSYNAELLVALENQHTIDLTDSEMNKLFEKTKKQLRENAEDMGNGCFKIYHKCDNACIGSIRNGTYDHDVYRDEALNNRFQIKGVELKSGYKDWILWISFAISCFLLCVALLGFIMWACQKGNIRCNICI

SEQ ID NO: 6852 - protein, 566 aa, Artificial Sequence; identical to SEQ ID NO: 1928
  derived and/or modified protein sequence (wt) from hemagglutinin__InfluenzaA__AEI54413

SEQ ID NO: 6853 - protein, 566 aa, Artificial Sequence; identical to SEQ ID NO: 281
  derived and/or modified protein sequence (wt) from hemagglutinin__InfluenzaA__AEI54424

SEQ ID NO: 6854 - protein, 566 aa, Artificial Sequence
  derived and/or modified protein sequence (wt) from hemagglutinin__InfluenzaA__AEI54446
MKTIIALSYILCLVFAQKLPENDNSTATLCLGHHAVPNGTIVKTITNDQIEVTNATELVQSSSTGEICNSPHQILDGENCTLIDALLGDPQCDGFQNKKWDLFVERSKAHSNCYPYDVPDYASLRSLVASSGTLEFNNESFNWTGVTQNGTSSACIRRSNNSFFSRLNWLTHLNFKYPALNVTMPNNEQFDKLYIWGVHHPGTDKDQIFLYAQAAGRITVSTKRSQQAVIPNIGSRPRVRNIPSRVSIYWTIVKPGDILLINSTGNLIAPRGYFKIRSGKSSIMRSDAPIGKCNSACITPNGSIPNDKPFQNVNRITYGACPRYVKQNTLKLATGMRNVPEKQTRGIFGAIAGFIENGWEGMVDGWYGFRHQNSEGRGQAADLKSTQAAIDQINGKLNRLIGKTNEKFHQIEKEFSEVEGRIQDLEKYVEDTKIDLWSYNAELLVALENQHTIDLTDSEMNKLFEKTKKQLRENAEDMGNGCFKIYHKCDNACIGSIRNGTYDHDVYRDEALNNRFQIKGVELKSGYKDWILWISFAISCFLLCVALLGFIMWACQKGNIRCNICI

SEQ ID NO: 6855 - protein, 566 aa, Artificial Sequence
  derived and/or modified protein sequence (wt) from hemagglutinin__InfluenzaA__AEI54457
MKTIIALSYILCLVFAQKLPGNDNSTATLCLGHHAVPNGTIVKTITNDQIEVTNATELVQSSSTGEICNSPHQILDGENCTLIDALLGDPQCDGFQNKKWDLFVERSKAHSNCYPYDVPDYASLRSLVASSGTLEFNNESFNWTGVTQNGTSSACIRRSNNSFFSRLNWLTHLNFKYPALNVTMPNNEQFDKLYIWGVHHPGTDKDQIFLYAQAAGRITVSTKRSQQAVIPNIGSRPRVRNIPSRVSIYWTIVKPGDILLINSTGNLIAPRGYFKIRSGKSSIMRSDAPIGKCNSACITPNGSIPNDKPFQNVNRITYGACPRYVKQNTLKLATGMRNVPEKQTRGIFGAIAGFIENGWEGMVDGWYGFRHQNSEGRGQAADLKSTQAAIDQINGKLNRLIGKTNEKFHQIEKEFSEVEGRIQDLEKYVEDTKIDLWSYNAELLVALENQHTIDLTDSEMNKLFEKTKKQLRENAEDMGNGCFKIYHKCDNACIGSIRNGTYDHDVYRDEALNNRFQIKGVELKSGYKDWILWISFAISCFLLCVALLGFIMWACQKGNIRCNICI

SEQ ID NO: 6856 - protein, 566 aa, Artificial Sequence; identical to SEQ ID NO: 5533
  derived and/or modified protein sequence (wt) from hemagglutinin__InfluenzaA__AEI54468

SEQ ID NO: 6857 - protein, 566 aa, Artificial Sequence; identical to SEQ ID NO: 5533
  derived and/or modified protein sequence (wt) from hemagglutinin__InfluenzaA__AEI54479

SEQ ID NO: 6858 - protein, 566 aa, Artificial Sequence; identical to SEQ ID NO: 6855
  derived and/or modified protein sequence (wt) from hemagglutinin__InfluenzaA__AEI54490

SEQ ID NO: 6859 - protein, 566 aa, Artificial Sequence; identical to SEQ ID NO: 6854
  derived and/or modified protein sequence (wt) from hemagglutinin__InfluenzaA__AEI54501

SEQ ID NO: 6860 - protein, 566 aa, Artificial Sequence
  derived and/or modified protein sequence (wt) from hemagglutinin__InfluenzaA__AEI59979
MKTIIALSYILCLVFAQKLPGNDNSTATLCLGHHAVPNGTIVKTITNDQIEVTNATELVQISSTGEICDSPHQILDGENCTLIDALLGDPQCDGFQNKKWDLFVERSKAYSNCYPYDVPDYASLRSLVASSGTLEFNNESFNWTGVTQNGTSSACIRRSNNSFFSRLNWLTHLKFKYPALNVTMPNNEQFDKLYIWGVHHPGTDNDQIFLYAQASGRITVSTKRSQQTVIPNIGSRPRVRNIPSRISIYWTIVKPGDILLINSTGNLIAPRGYFKIRSGKSSIMRSDAPIGKCNSECITPNGSIPNDKPFQNVNRITYGACPRYVKQNTLKLATGMRNVPEKQTRGIFGAIAGFIENGWEGMVDGWYGFRHQNSEGRGQAADLKSTQAAIDQINGKLNRLIEKTNEKFHQIEKEFSEVEGRIQDLEKYVEDTKIDLWSYNAELLVALENQHTIDLTDSEMNKLFEKTKKQLRENAEDMGNGCFKIYHKCDNACIGSIRNGTYDHDVYRDEALNNRFQIKGVELKSGYKDWILWISFAISCFLLCVALLGFIMWACQKGNIRCNICI

SEQ ID NO: 6861 - protein, 565 aa, Artificial Sequence; identical to SEQ ID NO: 5957
  derived and/or modified protein sequence (wt) from hemagglutinin__InfluenzaA__AEI59990

SEQ ID NO: 6862 - protein, 565 aa, Artificial Sequence; identical to SEQ ID NO: 5959
  derived and/or modified protein sequence (wt) from hemagglutinin__InfluenzaA__AEI60001

SEQ ID NO: 6863 - protein, 566 aa, Artificial Sequence
  derived and/or modified protein sequence (wt) from hemagglutinin__InfluenzaA__AEI60012
MKTIIALSYILCLVFAQKLPGNDNSTATLCLGHHAVPNGTIVKTITNDQIEVTNATELVQSSSTGEICDSPHQILDGENCTLIDALLGDPQCDGFQNKKWDLFVERSKAYSNCYPYDVPDYASLRSLVASSGTLEFNNESFNWTGVTQNGTSSACIRSSNNSFFSRLNWLTHLKFKYPALNVTMPNNEQFDKLYIWGVHHPGTDNDQIFLYAQASGRITVSTKRSQQTVIPNIGSRPRVRNIPSRISIYWTIVKPGDILLINSTGNLIAPRGYFKIRSGKSSIMRSDAPIGKCNSECITPNGSIPNDKPFQNVNRITYGACPRYVKQNTLKLATGMRNVPEKQTRGIFGAIAGFIENGWEGMVDGWYGFRHQNSEGRGQAADLKSTQAAIDQINGKLNRLIGKTNEKFHQIEKEFSEVEGKIQDLEKYVEDTKIDLWSYNAELLVALENQHTIDLTDSEMNKLFEKTKKQLRENAEDMGNGCFKIYHKCDNACIGSIRNGTYNHDVYRDEALNNRFQIKGVELKSGYKDWILWISFAISCFLLCVALLGFIMWACQKGNIRCNICI

SEQ ID NO: 6864 - protein, 566 aa, Artificial Sequence; identical to SEQ ID NO: 2434
  derived and/or modified protein sequence (wt) from hemagglutinin__InfluenzaA__AEI60023

SEQ ID NO: 6865 - protein, 566 aa, Artificial Sequence
  derived and/or modified protein sequence (wt) from hemagglutinin__InfluenzaA__AEI60034
MKTIIALSYILCLVFAQKLPGNDNSTATLCLGHHAVPNGTIVKTITNDQIEVTNATELVQSSSTGEICDSPHQILDGKNCTLIDALLGDPQCDGFQNKKWDLFVERSKAYSNCYPYDVPDYASLRSLVASSGTLEFNNESFNWTGVTQNGTSSACIRRSNNSFFSRLNWLTHLKFKYPALNVTMPNNEQFDKLYIWGVHHPGTDKDQIFLYAQASGRITVSTKRSQQTVIPNIGSRPRVRNIPSRISIYWTIVKPGDILLINSTGNLIAPRGYFKIRSGKSSIMRSDAPIGKCNSECITPNGSIPNDKPFQNVNRITYGACPRYVKQNTLKLATGMRNVPEKQTRGIFGAIAGFIENGWEGMVDGWYGFRHQNSEGRGQAADLKSTQAAIDQINGKLNRLIGKTNEKFHQIEKEFSEVEGRIQDLEKYVEDTKIDLWSYNAELLVALENQHTIDLTDSEMNKLFEKTKKQLRENAEDMGNGCFKIYHKCDNACIGSIRNGTYDHDVYRDEALNNRFQIKGVELKSGYKDWILWISFAISCFLLCVALLGFIMWACQKGNIRCNICI

SEQ ID NO: 6866 - protein, 566 aa, Artificial Sequence
  derived and/or modified protein sequence (wt) from hemagglutinin__InfluenzaA__AEI60045
MKTIIALSYILCLVFAQKLPGNDNSTATLCLGHHAVPNGTIVKTIMNDQIEVTNATELVQSSSTGEICDSPHQILDGKNCTLIDALLGDPQCDGFQNKKWDLFVERSKAYSNCYPYDVPDYASLRSLVASSGTLEFNNESFNWTGVTQNGTSSACIRRSKNSFFSRLNWLTHLNFKYPALNVTMPNNEQFDKLYIWGVHHPGTDKDQIFLYAQASGRITVSTKRSQQTAIPNIGYRPRVRNIPSRISIYWTIVKPGDILLINSTGNLIAPRGYFKIRSGKSSIMRSDAPIGKCNSECITPNGSIPNDKPFQNVNRITYGACPRYVKQNTLKLATGMRNVPEKQTRGIFGAIAGFIENGWEGMVDGWYGFRHQNSEGRGQAADLKSTQAAIDQINGKLNRLIGKTNEKFHQIEKEFSEVEGRIQDLEKYVEDTKIDLWSYNAELLVALENQHTIDLTDSEMNKLFEKTKKQLRENAEDMGNGCFKIYHKCDNACIGSIRNGTYDHDVYRDEALNNRFQIKGVELKSGYKDWILWISFAISCFLLCVALLGFIMWACQKGNIRCNICI

SEQ ID NO: 6867 - protein, 566 aa, Artificial Sequence
  derived and/or modified protein sequence (wt) from hemagglutinin__InfluenzaA__AEI60086
MKAILVVLLYTFATANADTLCIGYHANNSTDTVDTVLEKNVTVTHSVNLLEDKHNGKLCKLRGVAPLHLGKCNIAGWILGNPECESLSTASSWSYIVETSSSDNGTCYPGDFINYEELREQLSSVSSFERFEIFPKTSSWPNHDSNKGVTAACPHAGAKSFYKNLIWLVKKGNSYPKLSKSYINDKGKEVLVLWGIHHPSTTADQQSLYQNADAYVFVGTSRYSKKFKPEIAIRPKVRDQEGRMNYYWTLVEPGDKITFEATGNLVVPRYAFAMERNAGSGIIISDTPVHDCNTTCQTPKGAINTSLPFQNIHPITIGKCPKYVKSTKLRLATGLRNVPSIQSRGLFGAIAGFIEGGWTGMVDGWYGYHHQNEQGSGYAADLKSTQNAIDKITNKVNSVIEKMNTQFTAVGKEFNHLEKRIENLNKKVDDGFLDIWTYNAELLVLLENERTLDYHDSNVKNLYEKVRNQLKNNAKEIGNGCFEFYHKCDNTCMESVKNGTYDYPKYSEEAKLNREEIDGVKLESTRIYQILAIYSTVASSLVLVVSLGAISFWMCSNGSLQCRICI

SEQ ID NO: 6868 - protein, 566 aa, Artificial Sequence
  derived and/or modified protein sequence (wt) from hemagglutinin__InfluenzaA__AEI60109
MKTTIALSYILCLVFAQKLPGNDNSTATLCLGHHAVPNGTLVKTITNDQIEVTNATELVQNSSTGRICDSPHQILDGENCTLIDALLGDPHCDGFQNKEWDLFVERSKAYSNCYPYNVPDYVSLRSLVASSGTLEFNNESFNWTGVAQDGSSYACKRRSNKSFFSRLNWLHQLNYKYPALNVTMPNNENFDKLYIWGVHHPGTDSDQISLYAQASGRVTVSTKRSQQTVIPNIGYRPWVRGVSSIISIYWTIVKPGDILLINSTGNLIAPRGYFKIRSGKSSIMRSDAPIGKCNSECITPNGSIPNDKPFQNVNRITYGPCPRYVKQNTLKLATGMRNVPEKQTRGIFGAIAGFIENGWEGMKDGWYGFRHQNSEGTGQAADIKSTQAAINQINGKLNRLIEKTNEKFHQIEKEFSEVEGRIQDLEKYVEDTKIDLWSYNAELLVALENQHTIDLTDSEMNKLFERTKKQLRENAEDMGNGCFKIYHKCDNTCIGSIRNGTYDHDVYRDEALNNRFHIKGVELKSGYKDWILWISFATSCFLLCIVLLGFIMWACQKGNIRCNICI

SEQ ID NO: 6869 - protein, 566 aa, Artificial Sequence
  derived and/or modified protein sequence (wt) from hemagglutinin__InfluenzaA__AEI86734
MKAILVVLLYTFATANADTLCVGYHANNSTDTVDTVLEKNVTVTHSVNLLEDKHNGKLCKLRGVAPLHLGKCNIAGWILGNPECESLSTASSWSYIVETSNSDNGTCYPGDFIDYEELREQLSSVSSFERFEIFPKTSSWPNHDSNKGVTAACPHAGAKSFYRNLIWLVKKGNSYPKLSKSYINDKGKEVLVLWGIHHPSTSADQQSLYQNADTYVFVGTSRYSKKFKPEIAIRPKVRDQEGRMNYYWTLVEPGDKITFEATGNLVVPRYAFAMERNAGSGIIISDTPVHDCNTTCQTPKGAINTSLPFQNIHPITIGKCPKYVKSTKLRLATGLRNVPSIQSRGLFGAIAGFIEGGWTGMVDGWYGYHHQNEQGSGYAADLKSTQNAIDEITNKVNSVIEKMNTQFTAVGKEFNHLEKRIENLNKKVDDGFLDIWTYNAELLVLLENERTLDYHDSNVKNLYEKVRSQLKNNAKEIGNGCFEFYHKCDNTCMESVKNGTYDYPKYSEEAKLNREEIDGVKLESTRIYQILAIYSTVASSLVLVVSLGAISFWMCSNGSLQCRICI

SEQ ID NO: 6870 - protein, 566 aa, Artificial Sequence
  derived and/or modified protein sequence (wt) from hemagglutinin__InfluenzaA__AEI86764
MKAILVVLLYTFATANADTLCIGYHANNSTDTVDTVLEKNVTVTHSVNLLEDKHNGKLCKLRGVAPLHLGKCNIAGWILGNPECESLSTASSWSYIVETSSSDNGTCYPGDFIDYEELREQLSSVSSFERFEIFPKTSSWPDHDSNKGVTAACPHAGAKSFYKNLIWLVKKGNSYPKLSKSYINDKGKEVLVLWGIHHPSTSADQQSLYQNADAYVFVGTSRYSKKFKPEIAIRPKVRDQEGRMNYYWTLVEPGDKITFEATGNLVVPRYAFAMERNAGSGIIISDTPVHDCNTTCQTPKGAINTSLPFQNIHPITIGKCPKYVKSTKLRLATGLRNVPSIQSRGLFGAIAGFIEGGWTGMVDGWYGYHHQNEQGSGYAADLKSTQNAIDKITNKVNSVIEKMNTQFTAVGKEFNHLEKRIENLNKKVDDGFLDIWTYNAELLVLLENERTLDYHDSNVKNLYEKVRSQLKNNAKEIGNGCFEFYHKCDNTCMESVKNGTYDYPKYSEEAKLNREKIDGVKLESTRIYQILAIYSTVASSLVLVVSLGAISFWMCSNGSLQCRICI

SEQ ID NO: 6871 - protein, 566 aa, Artificial Sequence; identical to SEQ ID NO: 6870
  derived and/or modified protein sequence (wt) from hemagglutinin__InfluenzaA__AEI86774

SEQ ID NO: 6872 - protein, 566 aa, Artificial Sequence
  derived and/or modified protein sequence (wt) from hemagglutinin__InfluenzaA__AEI86784
MKVILVVLLYTFATANADTLCIGYHANNSTDTVDTVLEKNVTVTHSVNLLEDKHNGKLCKLRGVAPLHLGKCNIAGWILGNPECESLSTASSWSYIVETSSSDNGTCYPGDFIDYEELREQLSSVSSFKRFEIFPKTSSWPNHDSNKGVTAACPHAGAKSFYKNLIWLVKKGNSYPKLSKSYINDKGKEVLVLWGIHHPSTSADQQSLYQNADAYVFVGTSRYSKKFKPEIAIRPKVRDQEGRMNYYWTLVEPGDKITFEATGNLVVPRYAFAMERNAGSGIIISDTPVHDCNTTCQTPKGAINTSLPFQNIHPITIGKCPKYVKSTKLRLATGLRNVPSIQSRGLFGAIAGFIEGGWTGMVDGWYGYHHQNEQGSGYAADLKSTQNAIDKITNKVNSVIEKMNTQFTAVGKEFNHLEKRIENLNKKVDDGFLDIWTYNAELLVLLENERTLDYHDSNVKNLYEKVRSQLKNNAKEIGNGCFEFYHKCDNTCMESVKNGTYDYPKYSEEAKLNREEIDGVKLESTRIYQILAIYSTVASSLVLVVSLGAISFWMCSNGSLQCRICI

SEQ ID NO: 6873 - protein, 566 aa, Artificial Sequence
  derived and/or modified protein sequence (wt) from hemagglutinin__InfluenzaA__AEI86794
MKTILVVLLYTFATANADTLCIGYHANNSTDTVDTVLEKNVTVTHSVNLLEDKHNGKLCKLRGVAPLHLGKCNIAGWILGNPECESLSTASSWSYIVETSSSDNGTCYPGNFIDYEELREQLSSVSSFERFEIFPKTSSWPDHDSNKGVTAACPHAGAKSFYKNLIWLVKKGNSYPKLSKSYINDKGKEVLVLWGIHHPSTSADQQSLYQNADAYVFVGTSKYSKKFKPEIAIRPKVRDQEGRMNYYWTLVEPGDKITFEATGNLVAPRYAFAMERNAGSGIIISDTPVHDCNTTCQTPKGAINTSLPFQNIHPITIGKCPKYVKSTKLRLATGLRNVPSIQSRGLFGAIAGFIEGGWTGMVDGWYGYHHQNEQGSGYAADLKSTQNAIDKITNKVNSVIEKMNTQFTAVGKEFNHLEKRIENLNKKVDDGFLDIWTYNAELLVLLENERTLDYHDSNVKNLYEKVRSQLKNNAKEIGNGCFEFYHKCDNTCMESVKNGTYDYPKYSEEAKLNREEIDGVKLESTRIYQILAIYSTVASSLVLVVSLGAISFWMCSNGSLQCRICI

SEQ ID NO: 6874 - protein, 566 aa, Artificial Sequence
  derived and/or modified protein sequence (wt) from hemagglutinin__InfluenzaA__AEI86804
MKAILVVLLYTFATANADTLCIGYHANNSTDTVDTVLEKNVTVTHSVNLLEDKHNGKLCKLRGVAPLHLGKCNIAGWILGNPECESLSTASSWSYIVETSSSDNGTCYPGDFINYEELREQLSSVSSFERFEIFPKTSSWPDHDSNKGVTAACPHAGAKSFYKNLMWLVKKGNSYPKLSKSYINDKGKEVLVLWGIHHPSTSADQQSLYQNADAYVFVGTSRYSKKFKPEIAIRPKVRDQEGRMNYYWTLVEPGDKITFEATGNLVVPRYAFAMERNAGSGIIISDTPVHDCNTTCQTPKGAINTSLPFQNIHPITIGKCPKYVKSTKLRLATGLRNVPSIQSRGLFGAIAGFIEGGWTGMVDGWYGYHHQNEQGSGYAADLKSTQNAIDKITNKVNSVIEKMNTQFTAVGKEFNHLEKRIENLNKKVDDGFLDIWTYNAELLVLLENERTLDYHDSNVKNLYEKVRSQLKNNAKEIGNGCFEFYHKCDNTCMESVKNGTYDYPKYSEEAKLNREEIDGVKLESTRIYQILAIYSAVASSLVLVVSLGAISFWMCSNGSLQCRICI

SEQ ID NO: 6875 - protein, 566 aa, Artificial Sequence; identical to SEQ ID NO: 6870
  derived and/or modified protein sequence (wt) from hemagglutinin__InfluenzaA__AEI86814

SEQ ID NO: 6876 - protein, 566 aa, Artificial Sequence
  derived and/or modified protein sequence (wt) from hemagglutinin__InfluenzaA__AEI86824
MKAILVVLLYTFATANADTLCIGYHANNSTDTVDTVLEKNVTVTHSVNLLEDKHNGKLCKLRGVAPLHLGKCNIAGWILGNPECESLSTASSWSYIVETSSSDNGTCYPGDFIDYEELREQLSSVSSFERFEIFPKTSSWPDHDSNKGVTAACPHAGAKSFYKNLIWLVKKGNSYPKLSKSYINDKGKEVLVLWGIHHPSTSADQQSLYQNADAYVFVGTSRYSKKFKPEIAIRPKVRDQEGRMNYYWTLVEPGDKITFEATGNLVVPRYAFAMERNAGSGIIISDTPVHDCNTTCQTPKGAINTSLPFQNIHPITIGKCPKYVKSTKLRLATGLRNVPSIQSRGLFGAIAGFIEGGWTGMVDGWYGYHHQNEQGSGYAADLKSTQDAIDKITNKVNSVIEKMNTQFTAVGKEFNHLEKRIENLNKKVDDGFLDIWTYNAELLVLLENERTLDYHDSNVKNLYEKVRSQLKNNAKEIGNGCFEFYHKCDNTCMESVKNGTYDYPKYSEEAKLNREKIDGVKLESTRIYQILAIYSTVASSLVLVVSLGAISFWMCSNGSLQCRICI

SEQ ID NO: 6877 - protein, 566 aa, Artificial Sequence
  derived and/or modified protein sequence (wt) from hemagglutinin__InfluenzaA__AEI86834
MKAILVVLLYTFATANADTLCIGYHANNSTDTVDTVLEKNVTVTHSVNLLEDKHNGKLCKLRGVAPLHLGKCNIAGWILGNPECESLSTASSWSYIVETSSSDNGTCYPGNFIDYEELREQLSSVSSFERFEIFPKTSSWPDHDSNKGVTAACPHAGAKSFYKNLIWLVKKGNSYPKLSKSYINDKGKEVLVLWGIHHPSTSADQQSLYQNADAYVFVGTSRYSRKFKPEIAIRPKVRDQEGRMNYYWTLVEPGDKITFEATGNLVAPRYAFAMERNAGSGIIISDTPVHDCNTTCQTPKGAINTSLPFQNIHPITIGKCPKYVKSTKLRLATGLRNVPSIQSRGLFGAIAGFIEGGWTGMVDGWYGYHHQNEQGSGYAADLKSTQNAIDKITNKVNSVIEKMNTQFTAVGKEFNHLEKRIENLNKKVDDGFLDIWTYNAELLVLLENERTLDYHDSNVKNLYEKVRSQLKNNAKEIGNGCFEFYHKCDNTCMESVKNGTYDYPKYSEEAKLNREEIDGVKLESTRIYQILAIYSTVASSLVLVVSLGAISFWMCSNGSLQCRICI

SEQ ID NO: 6878 - protein, 566 aa, Artificial Sequence; identical to SEQ ID NO: 5584
  derived and/or modified protein sequence (wt) from hemagglutinin__InfluenzaA__AEI86854

SEQ ID NO: 6879 - protein, 566 aa, Artificial Sequence
  derived and/or modified protein sequence (wt) from hemagglutinin__InfluenzaA__AEI86864
MKAILVALLYTFATANADTLCIGYHANNSTDTVDTVLEKNVTVTHSVNLLEDKHNGKLCKLRGVAPLHLGKCNIAGWILGNPECESLSTASSWSYIVETSSSDNGTCYPGDFINYEELREQLSSVSSFERFEIFPKTSSWPNHDSNKGVTAACPHAGAKSFYKNLIWLVKKGNSYPKLSKSYINDKGKEVLVLWGIHHPSTTADQQSLYQNADAYVFVGTSRYSKKFKPEIAIRPKVRDQEGRMNYYWTLVEPGDKITFEATGNLVVPRYAFAMERNAGSGIIISDTPVHDCNTTCQTPKGAINTSLPFQNIHPITIGKCPKYVKSTKLRLATGLRNVPSIQSRGLFGAIAGFIEGGWTGMVDGWYGYHHQNEQGSGYAADLKSTQNAIDKITNKVNSVIEKMNTQFTAVGKEFNHLEKRIENLNKKVDDGFLDIWTYNAELLVLLENERTLDYHDSNVKNLYEKVRNQLKNNAKEIGNGCFEFYHKCDNTCMESVKNGTYDYPKYSEEAKLNREEIDGVKLESTRIYQILAIYSTVASSLVLVVSLGAISFWMCSNGSLQCRICI

SEQ ID NO: 6880 - protein, 566 aa, Artificial Sequence; identical to SEQ ID NO: 6870
  derived and/or modified protein sequence (wt) from hemagglutinin__InfluenzaA__AEI86874

SEQ ID NO: 6881 - protein, 566 aa, Artificial Sequence
  derived and/or modified protein sequence (wt) from hemagglutinin__InfluenzaA__AEI86894
MKAILVVLLYTFATANADTLCIGYHANNSTDTVDTVLEKNVTVTHSVNLLEDKHNGKLCKLRGVAPLHLGKCNIAGWILGNPECESLSTASSWSYIVETSSSDNGTCYPGNFIDYEELREQLSSVSSFERFEIFPKTSSWPDHDSNKGVTAACPHAGAKSFYKNLIWLVKKGNSYPKLSKSYINDKGKEVLVLWGIHHPSTSADQQSLYQNADAYVFVGTSRYSKKFKPEIAIRPKVRDQEGRMNYYWTLVEPGDKITFEATGNLVAPRYAFAMERNAGSGIIISDTPVHDCNTTCQTPKGAINTSLPFQNIHPITIGKCPKYVKSTKLRLATGLRNVPSIQSRGLFGAIAGFIEGGWTGMVDGWYGYHHQNEQGSGYAADLKSTQNAIDKITNKVNSVIEKMNTQFTAVGKEFNHLEKRIENLNKKVDDGFLDIWTYNAELLVLLENERTLDYHDSNVKNLYEKVRSQLKNNAKEIGNGCFEFYHKCDNTCMESVKNGTYDYPKYSEEAKLNREEIDGVKLESTRIYQILAIYSTVASSLVLVVSLGAISFWMCSNGSLQCRICI

SEQ ID NO: 6882 - protein, 566 aa, Artificial Sequence
  derived and/or modified protein sequence (wt) from hemagglutinin__InfluenzaA__AEI86904
MKAILVVLLYTFTTANADTLCIGYHANNSTDTVDTVLEKNVTVTHSVNLLEDKHNGKLCKLRGVAPLHLGKCNIAGWILGNPECESLSTASSWSYIVETSSSDNGTCYPGDFIDYEELREQLSSVSSFERFEIFPKTSSWPNHDSNKGVTAACPHAGAKSFYKNLIWLVKKGNSYPKLSKSYINDKGKEVLVLWGIHHPSTTADQQSLYQNADAYVFVGTSRYSKKFKPEIAIRPKVRDQEGRMNYYWTLVEPGDKITFEATGNLVVPRYAFAMERNAGSGIIISDTPVHDCNTTCQTPKGAINTSLPFQNIHPITIGKCPKYVKSTKLRLATGLRNVPSIQSRGLFGAIAGFIEGGWTGMVDGWYGYHHQNEQGSGYAADLKSTQNAIDKITNKVNSVIEKMNTQFTAVGKEFNHLEKRIENLNKKVDDGFLDIWTYNAELLVLLENERTLDYHDSNVKNLYEKVRNQLKNNAKEIGNGCFEFYHKCDNTCMESVKNGTYDYPKYSEEAKLNREEIDGVKLESTRIYQILAIYSTVASSLVLVVSLGAISFWMCSNGSLQCRICI

SEQ ID NO: 6883 - protein, 566 aa, Artificial Sequence
  derived and/or modified protein sequence (wt) from hemagglutinin__InfluenzaA__AEI86914
MKAILVVLLYTFATANADTLCIGYHANNSTDTVDTVLEKNVTVTHSVNLLEDKHNGKLCKLRGVAPLHLGKCNIAGWILGNPECESLSTASSWSYIVETSSSDNGTCYPGDFINYEELREQLSSVSSFERFEIFPKTSSWPNHDSNKGVTAACPHAGAKSFYKNLIWLVKKGNSYPRLSKSYINDKGKEVLVLWGIHHPSTTADQQSLYQNADAYVFVGTSRYSKKFKPEIAIRPKVRDQEGRMNYYWTLVEPGDKITFEATGNLVVPRYAFAMERNAGSGIIISDTPVHDCNTTCQTPKGAINTSLPFQNIHPITIGKCPKYVKSTKLRLATGLRNVPSIQSRGLFGAIAGFIEGGWTGMVDGWYGYHHQNEQGSGYAADLKSTQNAIDKITNKVNSVIEKMNTQFTAVGKEFNHLEKRIENLNKKVDDGFLDIWTYNAELLVLLENERTLDYHDSNVKNLYEKVRNQLKNNAKEIGNGCFEFYHKCDNTCMESVKNGTYDYPKYSEEAKLNREEIDGVKLESTRIYQILAIYSTVASSLVLVVSLGAISFWMCSNGSLQCRICI

SEQ ID NO: 6884 - protein, 566 aa, Artificial Sequence
  derived and/or modified protein sequence (wt) from hemagglutinin__InfluenzaA__AEI86924
MKAILVVLLYTFATANADTLCIGYHANNSTDTVDTVLEKNVTVTHSVNLLEDKHNGKLCKLRGVAPLHLGKCNIAGWILGNPECESLSTASSWSYIVETSSSDNGTCYPGVFIDYEELREQLSSVSSFERFEIFPKTSSWPNHDSNKGVTAACPHAGAKSFYKNLIWLIKKGNSYPKLSKSYINDKGKEVLVLWGIHHPSTTADQQSLYQNADAYVFVGTSRYSKKFKPEIAVRPKVRDQEGRMNYYWTLVEPGDKITFEATGNLVVPRYAFAMERNAGSGIIISDTPVHDCNTTCQTPKGAINTSLPFQNIHPITIGKCPKYVKSTKLRLATGLRNVPSIQSRGLFGAIAGFIEGGWTGMVDGWYGYHHQNEQGSGYAADLKSTQNAIDKITNKVNSVIEKMNTQFTAVGKEFNHLEKRIENLNKKVDDGFLDIWTYNAELLVLLENERTLDYHDSNVKNLYEKVRNQLKNNAKEIGNGCFEFYHKCDNTCMESVKNGTYDYPKYSEEAKLNREEIDGVKLESTRIYQILAIYSTVASSLVLVVSLGAISFWMCSNGSLQCRICI

SEQ ID NO: 6885 - protein, 566 aa, Artificial Sequence; identical to SEQ ID NO: 6870
  derived and/or modified protein sequence (wt) from hemagglutinin__InfluenzaA__AEI86934

SEQ ID NO: 6886 - protein, 566 aa, Artificial Sequence; identical to SEQ ID NO: 5584
  derived and/or modified protein sequence (wt) from hemagglutinin__InfluenzaA__AEI86944

SEQ ID NO: 6887 - protein, 566 aa, Artificial Sequence
  derived and/or modified protein sequence (wt) from hemagglutinin__InfluenzaA__AEI86964
MKAILVVLLYTFATANADTLCIGYHANNSTDTVDTVLEKNVTVTHSVNLLEDKHNGKLCKLRGVAPLHLGKCNIAGWILGNPECESLSTASSWSYIVETSSSDNGTCYPGVFIDYEELREQLSSVSSFERFEIFPKTSSWPNHDSNKGVTAACPHAGAKSFYKNLIWLVKKGNSYPKLSKSYINDKGKEVLVLWGIHHPSTTADQQSLYQNADAYVFVGTSRYSKKFKPEIAVRPKVRDQEGRMNYYWTLVEPGDKITFEATGNLVVPRYAFAMERNAGSGIIISDTPVHDCNTTCQTPKGAINTSLPFQNIHPITIGKCPKYVKSTKLRLATGLRNVPSIQSRGLFGAIAGFIEGGWTGMVDGWYGYHHQNEQGSGYAADLKSTQNAIDKITNKVNSVIEKMNTQFTAVGKEFNHLEKRIENLNKKVDDGFLDIWTYNAELLVLLENERTLDYHDSNVKNLYEKVRNQLKNNAKEIGNGCFEFYHKCDNMCMESVKNGTYDYPKYSEEAKLNREEIDGVKLESTRIYQILAIYSTVASSLVLVVSLGAISFWMCSNGSLQCRICI

SEQ ID NO: 6888 - protein, 566 aa, Artificial Sequence; identical to SEQ ID NO: 5826
  derived and/or modified protein sequence (wt) from hemagglutinin__InfluenzaA__AEI86974

SEQ ID NO: 6889 - protein, 566 aa, Artificial Sequence; identical to SEQ ID NO: 5584
  derived and/or modified protein sequence (wt) from hemagglutinin__InfluenzaA__AEI86984

SEQ ID NO: 6890 - protein, 566 aa, Artificial Sequence; identical to SEQ ID NO: 5584
  derived and/or modified protein sequence (wt) from hemagglutinin__InfluenzaA__AEI86994

SEQ ID NO: 6891 - protein, 566 aa, Artificial Sequence
  derived and/or modified protein sequence (wt) from hemagglutinin__InfluenzaA__AEI87004
MKAILVVLLYTFATANADTLCIGYHANNSTDTVDTVLEKNVTVTHSVNLLEDKHNGKLCKLKGVAPLHLGKCNIAGWILGNPECESLSTASSWSYIVETSSSDNGTCYPGNFIDYEELREQLSSVSSFERFEIFPKTSSWPDHDSNKGVTAACPHAGAKSFYKNLIWLVKKGNSYPKLSKSYINDKGKEVLVLWGIHHPSTSADQQGLYQNADAYVFVGTSRYSKKFKPEIAIRPKVRDQEGRMNYYWTLVEPGDKITFEATGNLVAPRYAFAMERNAGSGIIISDTPVHDCNTTCQTPKGAINTSLPFQNIHPITIGKCPKYVKSTKLRLATGLRNVPSIQSRGLFGAIAGFIEGGWTGMVDGWYGYHHQNEQGSGYAADLKSTQNAIDKITNKVNSVIEKMNTQFTAVGKEFNHLEKRIENLNKKVDDGFLDIWTYNAELLVLLENERTLDYHDSNVKNLYEKVRSQLKNNAKEIGNGCFEFYHKCDNTCMESVKNGTYDYPKYSEEAKLNREEIDGVKLESTRIYQILAIYSTVASSLVLVVSLGAISFWMCSNGSLQCRICI

SEQ ID NO: 6892 - protein, 566 aa, Artificial Sequence
  derived and/or modified protein sequence (wt) from hemagglutinin__InfluenzaA__AEI87014
MKAILVVLLYTFATANADTLCIGYHANNSTDTVDTVLEKNVTVTHSVNLLEDKHNGKLCKLRGVAPLHLGKCNIAGWILGNPECESLSTASSWSYIVETSSSDNGTCYPGDFIDYEELREQLSSVSSFERFEIFPKTSSWPNHDSNKGVTAACPHAGAKSFYKNLIWLVKKGNSYPKLSKSYINDKGKEVLVLWGIHHPSTSADQQSLYQNADAYVFVGTSRYSKKFKPEIAIRPKVRDQEGRMNYYWTLVEPGDKITFEATGNLVVPRYAFAMERNAGSGIIISDTPVHDCNTTCQTPKGAINTSLPFQNIHPITIGKCPKYVKSTKLRLATGLRNVPSIQSRGLFGAIAGFIEGGWTGMVDGWYGYHHQNEQGSGYAADLKSTQNAIDKITNKVNSVIEKMNTQFTAVGKEFNHLEKRIENLNKKVDDGFLDIWTYNAELLVLLENERTLDYHDSNVKNLYEKVRSQLKNNAKEIGNGCFEFYHKCDNTCMESVKNGTYDYPKYSGEAKLNREEIDGVKLESTRIYQILAIYSTVASSLVLVVSLGAISFWMCSNGSLQCRICI

SEQ ID NO: 6893 - protein, 566 aa, Artificial Sequence
  derived and/or modified protein sequence (wt) from hemagglutinin__InfluenzaA__AEI87034
MKAILVVLLYTFATANADTLCIGYHANNSTDTVDTVLEKNVTVTHSVNLLEDKHNGKLCKLRGVAPLHLGKCNIAGWILGNPECESLSTASSWSYIVETSSSDNGTCYPGDFIDYEELREQLSSVSSFERFEIFPKTSSWPDHDSNKGVTAACPHAGAKSFYKNLIWLVKKGNSYPKLSKSYINDKGKEVLVLWGIHHPSTSADQQSLYQNADAYVFVGTSRYSKKFKPEIAIRPKVRDQEGRMNYYWTLVEPGDKITFEATGNLVVPRYAFAMERNAGSGIIISDTPVHDCNTTCQTPKGAINTSLPFQNIHPITIGKCPKYVKSTKLRLATGLRNVPSIQSRGLFGAIAGFIEGGWTGMVDGWYGYHHQNEQGSGYAADLKSTQNAIDKITNKVNSVIEKMNTQFTAIGKEFNHLEKRIENLNKKVDDGFLDIWTYNAELLVLLENERTLDYHDSNVKNLYEKVRSQLKNNAKEIGNGCFEFYHKCDNTCMESVKNGTYDYPKYSEEAKLNREEIDGVKLESTRIYQILAIYSTVASSLVLVVSLGAISFWMCSNGSLQCRICI

SEQ ID NO: 6894 - protein, 566 aa, Artificial Sequence; identical to SEQ ID NO: 5584
  derived and/or modified protein sequence (wt) from hemagglutinin__InfluenzaA__AEI87044

SEQ ID NO: 6895 - protein, 566 aa, Artificial Sequence; identical to SEQ ID NO: 3833
  derived and/or modified protein sequence (wt) from hemagglutinin__InfluenzaA__AEI87054

SEQ ID NO: 6896 - protein, 566 aa, Artificial Sequence
  derived and/or modified protein sequence (wt) from hemagglutinin__InfluenzaA__AEI87064
MKAILVVLLYTFATANADTLCIGYHANNSTDTVDTVLEKNVTVTHSVNLLEDKHNGKLCKLRGVAPLHLGKCNIAGWILGNPECESLSTASSWSYIVETSSSDNGTCYPGDFIDYEELREQLSSVSSFERFEIFPKTSSWPNHDSNKGVTAACPHAGAKSFYKNLIWLVKKGNSYPKLSKSYINDKGKEVLVLWGIHHPSTTADQQSLYQNADTYVFVGTSRYSKKFKPEIAIRPKVRDQEGRMNYYWTLVEPGDKITFEATGNLVVPRYAFAMERNAGSGIIISDTPVHDCNTTCQTPKGAINTSLPFQNIHPITIGKCPKYVKSTKLRLATGLRNVPSIQSRGLFGAIAGFIEGGWTGMVDGWYGYHHQNEQGSGYAADLKSTQNAIDKITNKVNSVIEKMNTQFTAVGKEFNHLEKRIENLNKKVDDGFLDIWTYNAELLVLLENERTLDYHDSNVKNLYEKVRNQLKNNAKEIGNGCFEFYHKCDNTCMESVKNGTYDYPKYSEEAKLNREEIDGVKLESTRIYQILAIYSTAASSLVLVVSLGAISFWMCSNGSLQCRICI

SEQ ID NO: 6897 - protein, 566 aa, Artificial Sequence
  derived and/or modified protein sequence (wt) from hemagglutinin__InfluenzaA__AEI87074
MKATLVVLLYTFATANADTLCIGYHANNSTDTVDTVLEKNVTVTHSVNLLEDKHNGKLCKLRGVAPLHLGKCNIAGWILGNPECESLSTASSWSYIVETSSSDNGTCYPGDFINYEELREQLSSVSSFERFEIFPKTSSWPNHDSNKGVTAACPHAGAKSFYKNLIWLVKKGNSYPKLSKSYINDKGKEVLVLWGIHHPSTTADQQSLYQNADAYVFVGTSRYSKKFKPEIAIRPKVRDQEGRMNYYWTLVEPGDKITFEATGNLVVPRYAFAMERNAGSGIIISDTPVHDCNTTCQTPKGAINTSLPFQNIHPITIGKCPKYVKSTKLRLATGLRNVPSIQSRGLFGAIAGFIEGGWTGMVDGWYGYHHQNEQGSGYAADLKSTQNAIDKITNKVNSVIEKMNTQFTAVGKEFNHLEKRIENLNKKVDDGFLDIWTYNAELLVLLENERTLDYHDSNVKNLYEKVRNQLKNNAKEIGNGCFEFYHKCDNTCMESVKNGTYDYPKYSEEAKLNREEIDGVKLESTRIYQILAIYSTVASSLVLVVSLGAISFWMCSNGSLQCRICI

SEQ ID NO: 6898 - protein, 566 aa, Artificial Sequence
  derived and/or modified protein sequence (wt) from hemagglutinin__InfluenzaA__AEI87094
MKAILVVLLYTFATANADTLCIGYHANNSTDTVDTVLEKNVTVTHSVNLLEDKHNGKLCKLRGVAPLHLGKCNIAGWILGNPECESLSTASSWSYIVETSSSDNGTCYPGDFIDYEELREQLSSVSSFERFEIFPKTSSWPDHDSNKGVTAACPHAGAKSFYKNLIWLVKKGNSYPKLSKSYINDKGKEVLVLWGIHHPSTSADQQSLYQNADAYVFVGTSRYSKKFKPEIAIRPKVRDQEGRMNYYWTLVEPGDKITFEATGNLVVPRYAFAMERNTGSGIIISDTPVHDCNTTCQTPKGAINTSLPFQNIHPITIGKCPKYVKSTKLRLATGLRNVPSIQSRGLFGAIAGFIEGGWTGMVDGWYGYHHQNEQGSGYAADLKSTQNAIDKITNKVNSVIEKMNTQFTAVGKEFNHLEKRIENLNKKVDDGFLDIWTYNAELLVLLENERTLDYHDSNVKNLYEKVRSQLKNNAKEIGNGCFEFYHKCDNTCMESVKNGTYDYPKYSEEAKLNREKIDGIKLESTRIYQILAIYSTVASSLVLVVSLGAISFWMCSNGSLQCRICI

SEQ ID NO: 6899 - protein, 566 aa, Artificial Sequence; identical to SEQ ID NO: 6898
  derived and/or modified protein sequence (wt) from hemagglutinin__InfluenzaA__AEI87104

SEQ ID NO: 6900 - protein, 565 aa, Artificial Sequence; identical to SEQ ID NO: 3626
  derived and/or modified protein sequence (wt) from hemagglutinin__InfluenzaA__AEI91963

SEQ ID NO: 6901 - protein, 566 aa, Artificial Sequence; identical to SEQ ID NO: 3833
  derived and/or modified protein sequence (wt) from hemagglutinin__InfluenzaA__AEI91977

SEQ ID NO: 6902 - protein, 566 aa, Artificial Sequence; identical to SEQ ID NO: 5357
  derived and/or modified protein sequence (wt) from hemagglutinin__InfluenzaA__AEI91978

SEQ ID NO: 6903 - protein, 566 aa, Artificial Sequence; identical to SEQ ID NO: 4299
  derived and/or modified protein sequence (wt) from hemagglutinin__InfluenzaA__AEI91998

SEQ ID NO: 6904 - protein, 566 aa, Artificial Sequence
  derived and/or modified protein sequence (wt) from hemagglutinin__InfluenzaA__AEI91999
MKTIIALSYILCLVFAQKLPGNDNSTATLCLGHHAVPNGTIVKTITNDQIEVTNATELVQSSSTGEICNSPHQILDGENCTLIDALLGDPQCDGFQNKKWDLFVERSKAYSNCYPYDVPDYASLRSLVASSGTLEFNNESFNWTGVTQNGTSSACIRRSNNSFFSRLNWLTHLNFKYPALNVTMPNNEQFDKLYIWGVHHPGTDKDQIFLYAQASGRITVSTKRSQQAVIPNIGSRPRVRNIPSRISIYWTIVKPGDILLINSTGNLIAPRGYFKIRSGKSSIMRSDAPIGKCNSECITPNGSILNDKPFQNVNRITYGACPRYVKQNTLKLATGMRNVPEKQTRGIFGAIAGFIENGWEGMVDGWYGFRHQNSEGRGQAADLKSTQAAIDQINGKLNRLIGKTNEKFHQIEKEFSEVEGRIQDLEKYVEDTKIDLWSYNAELLVALENQHTIDLTDSEMNKLFEKTKKQLRENAEDMGNGCFKIYHKCDNACIGSIRNGTYDHDVYRDEALNNRFQIKGVELKSGYKDWILWISFAISCFLLCVALLGFIMWACQKGNIRCNICI

SEQ ID NO: 6905 - protein, 565 aa, Artificial Sequence
  derived and/or modified protein sequence (wt) from hemagglutinin__InfluenzaA__AEI92018
MKVKLLVLLCTFTATYADTICIGYHANNSTDTVDTVLEKNVTVTHSVNLLENSHNGKLCLLKGIAPLQLGNCSVAGWILGNPECELLISKESWSYIVEKPNPENGTCYPGHFADYEELREQLSSVSSFERFEIFPKESSWPNHTVTGVSASCSHNGESSFYRNLLWLTGKNGLYPNLSKSYANNKEKEVLVLWGVHHPPNIADQKTLYHTENAYVSVVSSHYSRKFTPEIAKRPKVRDQEGRINYYWTLLEPGDTIIFEANGNLIAPRYAFALSRGFGSGIINSNAPMDKCDAKCQTPQGAINSSLPFQNVHPVTIGECPKYVRSAKLRMVTGLRNIPSIQSRGLFGAIAGFIEGGWTGMVDGWYGYHHQNEQGSGYAADQKSTQNAINGITNKVNSVIEKMNTQFTAVGKEFNKLERRMENLNKKVDDGFIDIWTYNAELLVLLENERTLDFHDSNVKNLYEKVKSQLKNNAKEIGNGCFEFYHKCNDECMESVKNGTYDYPKYSEESKLNREKIDGVKLESMGVYQILAIYSTVASSLVLLVSLGAISFWMCSNGSLQCRICI

SEQ ID NO: 6906 - protein, 566 aa, Artificial Sequence; identical to SEQ ID NO: 6881
  derived and/or modified protein sequence (wt) from hemagglutinin__InfluenzaA__AEJ10400

SEQ ID NO: 6907 - protein, 566 aa, Artificial Sequence
  derived and/or modified protein sequence (wt) from hemagglutinin__InfluenzaA__AEJ10410
MKTILVVLLYTFATANADTLCIGYHANNSTDTIDTVLEKNVTVTHSVNLLEDKHNGKLCKLRGVAPLHLGKCNIAGWILGNPECESLSTASSWSYIVETSSSDNGTCYPGNFIDYEELREQLSSVSSFERFEIFPKTSSWSDHDSNKGVTAACPHAGAKSFYKNLIWLVKKGNSYPKLSKSYINDKGKEVLVLWGIHHPSTSADQQSLYQNADAYVFVGTSRYSKKFKPEIAIRPKVRDQEGRMNYYWTLVEPGDKITFEATGNLVAPRYAFAMERNAGSGIIISDTPVHDCNTTCQTPKGAINTSLPFQNIHPITIGKCPKYVKSTKLRLATGLRNVPSIQSRGLFGAIAGFIEGGWTGMVDGWYGYHHQNEQGSGYAADLKSTQNAIDKITNKVNSVIEKMNTQFTAVGKEFNHLEKRIENLNKKVDDGFLDIWTYNAELLVLLENERTLDYHDSNVKNLYEKVRSQLKNNAKEIGNGCFEFYHKCDNTCMESVKNGTYDYPKYSEEAKLNREEIDGVKLESTRIYQILAIYSTVASSLVLVVSLGAISFWMCSNGSLQCRICI

SEQ ID NO: 6908 - protein, 566 aa, Artificial Sequence
  derived and/or modified protein sequence (wt) from hemagglutinin__InfluenzaA__AEJ10420
MKAILVVLLYTFATANADTLCIGYHANNSTDTVDTVLEKNVTVTHSVNLLEDRHNGKLCKLRGVAPLHLGKCNIAGWILGNPECESLSTASSWSYIVETSSSDNGTCYPGDFIDYEELREQLSSVSSFERFEIFPKTSSWPDHDSNKGVTAACPHAGAKSFYKNLIWLVKKGNSYPKLSKSYINDKGKEVLVLWGIHHPSTSADQQSLYQNADAYVFVGTSRYSKKFKPEIAIRPKVRDQEGRMNYYWTLVEPGDKITFEATGNLVVPRYAFAMERNAGSGIIISDTPVHDCNTTCQTPKGAINTSLPFQNIHPITIGKCPKYVKSTKLRLATGLRNVPSIQSRGLFGAIAGFIEGGWTGMVDGWYGYHHQNEQGSGYAADLKSTQNAIDKITNKVNSVIEKMNTQFTAVGKEFNHLEKRIENLNKKVDDGFLDIWTYNAELLVLLENERTLDYHDSNVKNLYEKVRSQLKNNAKEIGNGCFEFYHKCDNTCMESVKNGTYDYPKYSEEAKLNREEIDGVKLESTRIYQILAIYSTVASSLVLVVSLGAISFWMCSNGSLQCRICI

SEQ ID NO: 6909 - protein, 566 aa, Artificial Sequence
  derived and/or modified protein sequence (wt) from hemagglutinin__InfluenzaA__AEJ10430
MKAILVVLLYTFATANADTLCIGYHANNSTDTVDTVLEKNVTVTHSVNLLEDKHNGKLCKLRGVAPLHLGKCNIAGWILGNPECESLSTASSWSYIVETSSSDNGTCYPGDFIDYEELREQLSSVSSFERFEIFPKTSSWPNHDSNKGVTTACPHAGAKSFYKNLIWLVKKGNSYPKLSKSYINDKGKEVLVLWGIHHPPTSADQQSLYQNADAYVFVGTSRYSKKFKPEIAIRPKVRDQEGRMNYYWTLVEPGDKITFEATGNLVVPRYAFAMERNAGSGIIISDTPVHDCNTTCQTPKGAINTSLPFQNIHPITIGKCPKYVKSTKLRLATGLRNVPSIQSRGLFGAIAGFIEGGWTGMVDGWYGYHHQNEQGSGYAADLKSTQNAIDEITNKVNSVIEKMNTQFTAVGKEFNHLEKRIENLNKKVDDGFLDIWTYNAELLVLLENERTLDYHDSNVKNLYEKVRSQLKNNAKEIGNGCFEFYHKCDNTCMESVKNGTYDYPKYSEEAKLNREEIDGVKLESTRIYQILAIYSTVASSLVLVVSLGAISFWMCSNGSLQCRICI

SEQ ID NO: 6910 - protein, 566 aa, Artificial Sequence
  derived and/or modified protein sequence (wt) from hemagglutinin__InfluenzaA__AEJ10440
MKAILVVLLYTFATANADTLCIGYHANNSTDTVDTVLEKNVTVTHSVNLLEDKHNGKLCKLRGVAPLHLGKCNIAGWILGNPECESLSTASSWSYIVETSSSDNGTCYPGDFIDYEELREQLSSVSSFERFEIFPKTSSWPNHDSNKGVTAACPHAGAKSFYKNLIWLVKKGNSYPKLSKSYINDKGKEVLVLWGIHHPSTTADQQILYQNADTYVFVGTSRYSKKFKPEIAIRPKVRDQEGRMNYYWTLVEPGDKITFEATGNLVVPRYAFAMERNAGSGIIISDTPVHDCNTTCQTPKGAINTSLPFQNIHPITIGKCPKYVKSTKLRLATGLRNVPSIQSRGLFGAIAGFIEGGWTGMVDGWYGYHHQNEQGSGYAADLKSTQNAIDKITNKVNSVIEKMNTQFTAVGKEFNHLEKRIENLNKKVDDGFLDIWTYNAELLVLLENERTLDYHDSNVKNLYEKVRNQLKNNAKEIGNGCFEFYHKCDNTCMESVKNGTYDYPKYSEEAKLNREEIDGVKLESTRIYQILAIYSTVASSLVLVVSLGAISFWMCSNGSLQCRICI

SEQ ID NO: 6911 - protein, 566 aa, Artificial Sequence; identical to SEQ ID NO: 6824
  derived and/or modified protein sequence (wt) from hemagglutinin__InfluenzaA__AEJ10450

SEQ ID NO: 6912 - protein, 566 aa, Artificial Sequence
  derived and/or modified protein sequence (wt) from hemagglutinin__InfluenzaA__AEJ10480
MKAILVVLLYTFATANADTLCIGYHANNSTDTVDTVLEKNVTVTHSVNLLEDKHNGKLCKLRGVAPLHLGKCNIAGWILGNPECESLSTASSWSYIVETSSSDNGTCYPGDFINYEELREQLSSVSSFERFEIFPKTSSWPNHDSNKGVTAACPQAGAKSFYKNLIWLVKKGNSYPKLSKSYINDKGKEVLVLWGIHHPSTSADQQSLYQSADAYVFVGTSKYSKKFKPEIAVRPKVRDQEGRMNYYWTLVEPGDKITFEATGNLLVPRYAFAMERNAGSGIIISDTPVHDCNTTCQTPKGAINTSLPFQNIHPITIGKCPKYVKSTKLRLATGLRNVPSIQSRGLFGAIAGFIEGGWTGMVDGWYGYHHQNAQGSGYAADLKSTQNAIDKITNKVNSVIEKMNTQFTAVGKEFNHLEKRIENLNKKVDDGFLDIWTYNAELLVLLENERTLDYHDSNVKNLYEKVRSQLKNNAKEIGNGCFEFYHKCDNTCMESVKNGTYDYPKYSEEAKLNREEIDGVKLESTRIYQILAIYSTVASSLVLVVSLGAISFWMCSNGSLQCRICI

SEQ ID NO: 6913 - protein, 566 aa, Artificial Sequence
  derived and/or modified protein sequence (wt) from hemagglutinin__InfluenzaA__AEJ10490
MKAILVVLLYTFATANADTLCIGYHANNSTDTVDTVLEKNVTVTHSVNLLEDKHNGKLCKLRGVAPLHLGKCNIAGWILGNPECESLSTASSWSYIVETSSSDNGTCYPGDFIDYEELREQLSSVSSFERFEIFPKTSSWPNHDSNKGVTTACPHAGAKSFYKNLIWLVKKGNSYPKLSKSYINDKGKEVLVLWGIHHPPTSADQQSLYQNADAYVFVGTSRYSKKFKPEIAIRPKVRDQEGRMNYYWTLVEPGDKITFEATGNLVVPRYAFAMERNAGSGIIISDTPVHDCNTTCQTPKGAINTSLPFQNIHPITIGRCPKYVKSTKLRLATGLRNVPSIQSRGLFGAIAGFIEGGWTGMVDGWYGYHHQNEQGSGYAADLKSTQNAIDGITNKVNSVIEKMNTQFTAVGKEFNHLEKRIENLNKKVDDGFLDIWTYNAELLVLLENERTLDYHDSNVKNLYEKVRSQLKNNAKEIGNGCFEFYHKCDNTCMESVKNGTYDYPKYSEEAKLNREEIDGVKLESTMIYQILAIYSTVASSLVLIVSLGAISFWMCSNGSLQCRICI

SEQ ID NO: 6914 - protein, 566 aa, Artificial Sequence
  derived and/or modified protein sequence (wt) from hemagglutinin__InfluenzaA__AEJ10500
MKAILVVLLYTFATANADTLCIGYHANNSTDTVDTVLEKNVTVTHSVNLLEGKHNGKLCKLRGVAPLHLGKCNIAGWILGNPECESLSTASSWSYIVETSSSDNGTCYPGDFIDYEELREQLSSVSSFERFEIFPKTSSWPNHDSNKGVTAACPHAGAKGFYKNLIWLVKKGNSYPKLNKSYINDKGKEVLVLWGIHHPSTTADQQSLYQNADTYVFVGTSRYSKKFKPEIAIRPKVRDQEGRMNYYWTLVEPGDKITFEATGNLVVPRYAFAMERNAGSGIIISDTPVHDCNTTCQTPKGAINTSLPFQNIHPITIGKCPKYVKSTKLRLATGLRNVPSIQSRGLFGAIAGFIEGGWTGMVDGWYGYHHQNEQGSGYAADLKSTQNAIDKITNKVNSVIEKMNTQFTAVGKEFNHLEKRIENLNKKVDDGFLDIWTYNAELLVLLENERTLDYHDSNVKNLYEKVRNQLKNNAKEIGNGCFEFYHKCDNTCMESVKNGTYDYPKYSEEAKLNREEIDGVKLESTRIYQILAIYSTVASSLVLVVSLGAISFWMCSNGSLQCRICI

SEQ ID NO: 6915 - protein, 566 aa, Artificial Sequence; identical to SEQ ID NO: 6867
  derived and/or modified protein sequence (wt) from hemagglutinin__InfluenzaA__AEJ10510

SEQ ID NO: 6916 - protein, 566 aa, Artificial Sequence
  derived and/or modified protein sequence (wt) from hemagglutinin__InfluenzaA__AEJ10520
MKAILVVLLYTFATANADTLCIGYHANNSTDTVDTVLEKNVTVTHSVNLLEDKHNGKLCKLRGVAPLHLGKCNIAGWILGNPECESLSTASSWSYIVETSSSDNGTCYPGDFIDYEELREQLSSVSSFERFEIFPKTSSWPNYDSNKGVTAACPHAGAKSFYKNLIWLVKKGNSYPKLSKSYINDKGKEVLVLWGIHHPSTSADQQSLYQNADAYVFVGTSRYSKKFKPEIAIRPKVRDQEGRMNYYWTLVEPGDKITFEATGNLVVPRYAFAMERNAGSGIIISDTPVHDCNTTCQTPKGAINTSLPFQNIHPITIGKCSKYVKSTKLRLATGLRNVPSIQSRGLFGAIAGFIEGGWTGMVDGWYGYHHQNEQGSGYAADLKSTQNAIDEITNKVNSVIEKMNTQFTAVGKEFNHLEKRIENLNKKVDDGFLDIWTYNAELLVLLENERTLDYHDSNVKNLYEKVRSQLKNNAKEIGNGCFEFYHKCDNTCMESVKNGTYDYPKYSEEAKLNREEIDGVKLESTRIYQILAIYSTVASSLVLVVSLGAISFWMCSNGSLQCRICI

SEQ ID NO: 6917 - protein, 566 aa, Artificial Sequence; identical to SEQ ID NO: 2669
  derived and/or modified protein sequence (wt) from hemagglutinin__InfluenzaA__AEJ10530

SEQ ID NO: 6918 - protein, 566 aa, Artificial Sequence; identical to SEQ ID NO: 2669
  derived and/or modified protein sequence (wt) from hemagglutinin__InfluenzaA__AEJ10540

SEQ ID NO: 6919 - protein, 566 aa, Artificial Sequence; identical to SEQ ID NO: 2669
  derived and/or modified protein sequence (wt) from hemagglutinin__InfluenzaA__AEJ10550

SEQ ID NO: 6920 - protein, 566 aa, Artificial Sequence
  derived and/or modified protein sequence (wt) from hemagglutinin__InfluenzaA__AEJ10570
MKAILVVLLYTLATANADTLCIGYHANNSTDTVDTVLEKNVTVTHSVNLLEDKHDGKLCKLRGVAPLHLGKCNIAGWILGNPECESLSTASSWSYIVETSSSDNGTCYPGDFIDYEELREQLSSVSSFERFEIFPKTSSWPNHDSNKGVTAACPHAGAKSFYKNLIWLVKKGNSYPKLSKSYINDKGKEVLVLWGIHHPSTSADQQSLYQNADAYVFVGTSRYSKKFKPEIAIRPKVRDQEGRMNYYWTLVEPGDKITFEATGNLVVPRYAFAMERNAGSGIIISDTPVHDCNATCQTPKGAINTSLPFQNIHPITIGKCPKYVKSTKLRLATGLRNVPSIQSRGLFGAIAGFIEGGWTGMVDGWYGYHHQNEQGSGYAADLKSTQNAIDKITNKVNSVIEKMNTQFTAVGKEFNHLEKRIENLNKKVDDGFLDIWTYNAELLVLLENERTLDYHDSNVKNLYEKVRSQLKNNAKEIGNGCFEFYHKCDNTCMESVKNGTYDYPKYSEEAKLNREEIDGVKLESTRIYQILAIYSTVASSLVLVVSLGAISFWMCSNGSLQCRICI

SEQ ID NO: 6921 - protein, 566 aa, Artificial Sequence; identical to SEQ ID NO: 6920
  derived and/or modified protein sequence (wt) from hemagglutinin__InfluenzaA__AEJ10580

SEQ ID NO: 6922 - protein, 566 aa, Artificial Sequence
  derived and/or modified protein sequence (wt) from hemagglutinin__InfluenzaA__AEJ36302
MKAILVVLLYTFATANADTLCIGYHANNSTDTVDTVLEKNVTVTHSVNLLEDKHNGKLCKLRGVAPLHLGKCNIAGWILGNPECESLSTASSWSYIVETSSSYNGTCYPGDFIDYEELREQLSSVSSFERFEIFPKTSSWPNHDPNKGVTAACPHAGAKSFYKNLIWLVKKGNSYPKLSKSYINDKGKEVLVLWGIHHPSTSADQQRLYQNADAYAFVGTSRYSKKFKPEIAIRPKVRDQEGRMNYYWTLVEPGDKITFEATGNLVVPRYAFAMERNAGSGIIISDTPAHDCNTTCQTPKGAINTSLPFQNVHPITIGKCPKYVKSTKLRLATGLRNVPSIQSRGLFGAIAGFIEGGWTGMVDGWYGYHHQNEQGSGYAADLKSTQNAFDEITNKVNSVIEKMNTQFTAVGKEFNHLEKRIENLNKKVDDGFLDIWTYNAELLVLLENERTLDYHDSNVKNLYEKVRSQLKNNAKETGNGCFEFYHKCDNTCMESVKNGTYDYPKYSEEAKLNREEIDGVKLESTRIYQILAIYSTVASSLVLVVSLGAISFWMCSNGSLQCRICI

SEQ ID NO: 6923 - protein, 566 aa, Artificial Sequence
  derived and/or modified protein sequence (wt) from hemagglutinin__InfluenzaA__AEJ36312
MKAILVVLLYTFATANADTLCIGYHANNSTDTVDTVLEKNVTVTHSVNLLEDKHNGKLCKLRGVAPLHLGKCNIAGWILGNPECESLSTASSWSYIVETSSSDNGTCYPGDFIDYEELREQLSSVSSFERFEIFPKTSSWPDHDSNKGVTAACPHAGAKSFYKNLIWLVKKGNSYPKLSKSYINDKGKEVLVLWGIHHPSTSADQQSLYQNADAYVFVGTSRYSKKFKPEIAIRPKVRDQEGRMNYYWTLVEPGDKITFEATGNLVVPRYAFAMERNAGSGIIISDTPVHDCNTTCQTPKGAINTSLPFQNIHPITIGKCPKYVKSTKLRLATGLRNVPSIQSRGLFGAIAGFIEGGWTGMVDGWYGYHHQNEQGSGYAADLKSTQNAIDKITNKVNSVIEKMNIQFTAVGKEFNHLEKRIENLNKKVDDGFLDIWTYNAELLVLLENERTLDYHDSNVKNLYEKVRSQLKNNAKEIGNGCFEFYHKCDNTCMESVKNGTYDYPKYSEEAKLNREEIDGVKLESTRIYQILAIYSTVASSLVLVVSLGAISFWMCSNGSLQCRICI

SEQ ID NO: 6924 - protein, 566 aa, Artificial Sequence
  derived and/or modified protein sequence (wt) from hemagglutinin__InfluenzaA__AEJ37853
MKAILVVLLYTFATANADTLCIGYHANNSTDTVDTVLEKNVTVTHSVNLLEDKHNGKLCKLRGVAPLHLGKCNIAGWILGNPECESLSTASSWSYIVEASSSDNGTCYPGDFIDYEELREQLSSVSSFERFEIFPKTSSWPNHDSNKGVTAACPHAGAKSFYKNLIWLVKKGNSYPKLSKSYINDKGKEVLVLWGIHHPSTSADQQSLYQNADAYVFVGTSRYSKKFKPEIAIRPKVRDQEGRMNYYWTLVEPGDKITFEATGNLVVPRYAFAMERNAGSGIIISDTPVHDCNTTCQTPKGAINTSLPFQNIHPITIGKCPKYVKSTKLRLATGLRNVPSIQSRGLFGAIAGFIEGGWTGMVDGWYGYHHQNEQGSGYAADLKSTQNAIDKITNKVNSVIEKMNTQFTAVGKEFNHLEKRIENLNKKVDDGFLDIWTYNAELLVLLENERTLDYHDSNVKNLYEKVRSQLKNNAKEIGNGCFEFYHKCDNMCMESVKNGTYDYPKYSEEAKLNREEIDGVKLESTRIYQILAIYSTVASSLVLVVSLGAISFWMCSNGSLQCRICI

SEQ ID NO: 6925 - protein, 566 aa, Artificial Sequence
  derived and/or modified protein sequence (wt) from hemagglutinin__InfluenzaA__AEJ37863
MKAILVVLLYTFATANADTLCIGYHANNSTDTVDTVLEKNVTVTHSVNLLEDKHNGKLCKLRGVAPLHLGKCNIAGWILGNPECESLSTASSWSYIVETSSSDNGTCYPGDFIDYEELREQLSSVSSFERFEIFPKTSSWPNHDSNKGVTAACPHAGAKSFYKNLIWLVKKGNSYPKLSKSYINDKGKEVLVLWGIHHPSTSADQQSLYQNADAYVFVGTSRYSKKFKPEIAIRPKLRDQEGRMNYYWTLVEPGDKITFEATGNLVVPRYAFAMERNAGSGIIISDTPVHDCNTTCQTPKGAINTSLPFQNIHPITIGKCPKYVKSTKLRLATGLRNVPSIQSRGLFGAIAGFIEGGWTGMVDGWYGYHHQNEQGSGYAADLKSTQNAIDKITNKVNSVIEKMNTQFTAVGKEFNHLEKRIENLNKKVDDGFLDIWTYNAELLVLLENERTLDYHDSNVKNLYEKVRSQLKNNAKEIGNGCFEFYHKCDNTCMESVKNGTYDYPKYSEEAKLNREEIDGVKLESTRIYQILAIYSTVASSLVLVVSLGAISFWMCSNGSLQCRICI

SEQ ID NO: 6926 - protein, 566 aa, Artificial Sequence; identical to SEQ ID NO: 3833
  derived and/or modified protein sequence (wt) from hemagglutinin__InfluenzaA__AEJ37873

SEQ ID NO: 6927 - protein, 566 aa, Artificial Sequence; identical to SEQ ID NO: 6881
  derived and/or modified protein sequence (wt) from hemagglutinin__InfluenzaA__AEJ37883

SEQ ID NO: 6928 - protein, 566 aa, Artificial Sequence
  derived and/or modified protein sequence (wt) from hemagglutinin__InfluenzaA__AEJ37893
MKAILVVLLYTFATTNADTLCIGYHANNSTDTVDTVLEKNVTVTHSVNLLEDKHNGKLCKLRGVAPLHLGKCNIAGWILGNPECESLSTASSWSYIVETSSSDNGTCYPGNFIDYEELREQLSSVSSFERFEIFPKTSSWPDHDSNKGVTAACPHAGAKSFYKNLIWLVKKGNSYPKLSKSYINDKGKEVLVLWGIHHPSTSADQQSLYQNADAYVFVGTSRYSKKFKPEIAIRPKVRDQEGRMNYYWTLVEPGDKITFEATGNLVAPRYAFAMERNAGSGIIISDKPVHDCNTTCQTPKGAINTSLPFQNIHPITIGKCPKYVKSTKLRLATGLRNVPSIQSRGLFGAIAGFIEGGWTGMVDGWYGYHHQNEQGSGYAADLKSTQNAIDKITNKVNSVIEKMNTQFTAVGKEFNHLEKRIENLNKKVDDGFLDIWTYNAELLVLLENERTLDYHDSNVKNLYEKVRSQLKNNAKEIGNGCFEFYHKCDNTCMESVKNGTYDYPKYSEEAKLNREEIDGVKLESTRIYQILAIYSTVASSLVLVVSLGAISFWMCSNGSLQCRICI

SEQ ID NO: 6929 - protein, 566 aa, Artificial Sequence; identical to SEQ ID NO: 6881
  derived and/or modified protein sequence (wt) from hemagglutinin__InfluenzaA__AEJ37903

SEQ ID NO: 6930 - protein, 566 aa, Artificial Sequence
  derived and/or modified protein sequence (wt) from hemagglutinin__InfluenzaA__AEJ37923
MKAILVVLLYTFATANADTLCIGYHANNSTDTVDTVLEKNVTVTHSVNLLEDKHNGKLCKLRGVAPLHLGKCNIAGWILGNPECESLSTASSWSYIVETSSSDNGTCYPGNFIDYEELREQLSSVSSFERFEIFPKTSSWPDHDSNKGVTAACPHAGAKSFYKNLIWLVKKGNSYPKLSKSYINDKGKEVLVLWGIHHPSTSADQQSLYQNADAYVFVGTSRYSKKFKPEIAIRPKVRDQEGRMNYYWTLVEPGDKITFEATGNLVAPRYAFAIERMAGSGIIISDTPVHDCNTTCQTPKGAINTSLPFQNIHPITIGKCPKYVKSTKLRLATGLRNVPSIQSRGLFGAIAGFIEGGWTGMVDGWYGYHHQNEQGSGYAADLKSTQNAIDKITNKVNSVIEKMNTQFTAVGKEFNHLEKRIENLNKKVDDGFLDIWTYNAELLVLLENERTLDYHDSNVKNLYEKVRSQLKNNAKEIGNGCFEFYHKCDNTCMESVKNGTYDYPKYSEEAKLNREEIDGVKLESTRIYQILAIYSTVASSLVLVVSLGAISFWMCSNGSLQCRICI

SEQ ID NO: 6931 - protein, 566 aa, Artificial Sequence
  derived and/or modified protein sequence (wt) from hemagglutinin__InfluenzaA__AEJ37943
MKAILVVLLYTFATANADTLCIGYHANNSTDTVDTVLEKNVTVTHSVNLLEDKHNGKLCKLRGVAPLHLGKCNIAGWILGNPECESLSTASSWSYIVETSSSDNGTCYPGDFIDYEELREQLSSVSSFERFEIFPKTSSWPNHDSNKGVTAACPHAGAKSFYKNLIWLVKKGNSYPKLSKSYINDKGKEVLVLWGIHHPSTSADQQSLYQNADAYVFVGTSRYSKKFKPEIAIRPKVRDQEGRMNYHWTLVEPGDKITFEATGNLVVPRYAFAMERNAGSGIIISDTPVHDCNTTCQTPKGAINTSLPFQNIHPITIGKCPKYVKSTKLRLATGLRNVPSIQSRGLFGAIAGFIEGGWTGMVDGWYGYHHQNEQGSGYAADLKSTQNAIDKITNKVNSVIEKMNTQFTAVGKEFNHLEKRIENLNKKVDDGFLDIWTYNAELLVLLENERTLDYHDSNVKNLYEKVRSQLKNNAKEIGNGCFEFYHKCDNTCMESVKNGTYDYPKYSEEAKLNREEIDGVKLESTRIYQILAIYSTVASSLVLVVSLGAISFWMCSNGSLQCRICI

SEQ ID NO: 6932 - protein, 566 aa, Artificial Sequence; identical to SEQ ID NO: 6881
  derived and/or modified protein sequence (wt) from hemagglutinin__InfluenzaA__AEJ37953

SEQ ID NO: 6933 - protein, 566 aa, Artificial Sequence
  derived and/or modified protein sequence (wt) from hemagglutinin__InfluenzaA__AEJ37963
MKAILVVLLYTFATANADTLCIGYHANNSTDTVDTVLEKNVTVTHSVNLLEDKHNGKLCKLRGVAPLHLGKCNIAGWILGNPECESLSTASSWSYIVETSSSDNGTCYPGNFIDYEELREQLSSVSSFERFEIFPKTSSWPDHDSNKGVTAACPHAGAKSFYKNLIWLVKKGNSYPKLSKSYINDKGKEVLVLWGIHHPSTSADQQSLYQNADAYVFVGTSRYSKKFKPEIAIRPKVRDQEGRMNYYWTLVEPGDKITFEATGNLVAPRYAFAMERNAGSGIIISDTPVHDCNTTCQTPKGATNTSLPFQNIHPITIGKCPKYVKSTKLRLATGLRNVPSIQSRGLFGAIAGFIEGGWTGMVDGWYGYHHQNEQGSGYAADLKSTQNAIDKITNKVNSVIEKMNTQFTAVGKEFNHLEKRIENLNKKVDDGFLDIWTYNAELLVLLENERTLDYHDSNVKNLYEKVRSQLKNNAKEIGNGCFEFYHKCDNTCMESVKNGTYDYPKYSEEAKLNREEIDGVKLESTRIYQILAIYSTVASSLVLVVSLGAISFWMCSNGSLQCRICI

SEQ ID NO: 6934 - protein, 566 aa, Artificial Sequence; identical to SEQ ID NO: 3833
  derived and/or modified protein sequence (wt) from hemagglutinin__InfluenzaA__AEJ37973

SEQ ID NO: 6935 - protein, 566 aa, Artificial Sequence; identical to SEQ ID NO: 6881
  derived and/or modified protein sequence (wt) from hemagglutinin__InfluenzaA__AEJ37983

SEQ ID NO: 6936 - protein, 566 aa, Artificial Sequence; identical to SEQ ID NO: 5533
  derived and/or modified protein sequence (wt) from hemagglutinin__InfluenzaA__AEK21369

SEQ ID NO: 6937 - protein, 565 aa, Artificial Sequence; identical to SEQ ID NO: 3616
  derived and/or modified protein sequence (wt) from hemagglutinin__InfluenzaA__AEK21380

SEQ ID NO: 6938 - protein, 566 aa, Artificial Sequence
  derived and/or modified protein sequence (wt) from hemagglutinin__InfluenzaA__AEK21396
MKAILVVLLYTFATANADTLCIGYHANNSTDTVDTVLEKNVTVTHSVDLLEDKHNGKLCKLRGVAPLHLGKCNIAGWILGNPECESLSTASSWSYIVETSSSDNGTCYPGDFIDYEELREQLSSVSSFERFEIFPKTSSWPNHDSNKGVTAACPHAGAKSFYKNLIWLVKKGNSYPKLSKSYINDKGKEVLVLWGIHHPSTSADQQSLYQNADAYVFVGTSKYSKKFKPEIAIRPKVRDQEGRMNYYWTLVEPGDKITFEATGNLLVPRYAFEMERKSGSGIIISDTPVHDCNTTCQTPKGAINTSLPFQNIHPITIGKCPKYVKSTKLRLATGLRNVPSIQSRGLFGAIAGFIEGGWTGMVDGWYGYHHQNEQGSGYAADLKSTQNAIDEITNKVNSVIEKMNTQFTAVGKEFNHLEKRIENLNKKVDDGFLDIWTYNAELLVLLENERTLDYHDSNVKNLYEKVRSQLKNNAKEIGNGCFEFYHKCDNTCMESVKNGTYDYPKYSEEAKLNREKIDGVKLESTRIYQILAIYSTVASSLVLVVSLGAISFWMCSNGSLQCRICI

SEQ ID NO: 6939 - protein, 566 aa, Artificial Sequence
  derived and/or modified protein sequence (wt) from hemagglutinin__InfluenzaA__AEK21406
MKAILVVLLYTFATANADTLCIGYHANNSTDTVDTVLEKNVTVTHSVNLLEDKHNGKLCKLRGVAPLHLGKCNIAGWILGNPECESLSTASSWSYIVETSSSDNGTCYPGDFIDYEELREQLSSMSSFERFEIFPKTSSWPDHDSNKGVTAACPHAGAKSFYKNLIWLVKKGNSYPKLSKSYINDKGKEVLVLWGIHHPSTSADQQSLYQNADAYVFVGTSRYSKKFKPEIAIRPKVRDQEGRMNYYWTLVEPGDKITFEATGNLVVPRYAFAMERNAGSGIIISDTPVHDCNTTCQTPKGAINTSLPFQNIHPITIGKCPKYVKSTKLRLATGLRNVPSIQSRGLFGAIAGFIEGGWTGMVDGWYGYHHQNEQGSGYAADLKSTQNAIDKITNKVNSVIEKMNTQFTAVGKEFNHLEKRIENLNKKVDDGFLDIWTYNAELLVLLENERTLDYHDSNVKNLYEKVRSQLKNNAKEIGNGCFEFYHKCDNTCMESVKNGTYDYPKYSEEAKLNREEIDGVKLESTRIYQILAIYSTVASSLVLVVSLGAISFWMCSNGSLQCRICI

SEQ ID NO: 6940 - protein, 566 aa, Artificial Sequence
  derived and/or modified protein sequence (wt) from hemagglutinin__InfluenzaA__AEK21416
MKAILVVLLYTFATANADTLCIGYHANNSTDTVDTVLEKNVTVTHSVNLLEDKHNGKLCKLRGVAPLHLGKCNIAGWILGNPECESLSTASSWSYIVETSSSDNGTCYPGVFIDYEELREQLSSVSSFERFEIFPKTSSWPNHDSNKGVTAACPHAGAKSFYKNLIWLVKKGNSYPKLSKSYINDKGKEVLVLWGIHHPSTTADQQSLYQNADAYVFVGTSRYSKKFKPEIAVRPKVRDQEGRMNYYWTLVEPGDKITFEATGNLVVPRYAFAMERNAGSGIIISDTPVHDCNTTCQTPKGAINTSLPFQNIHPITIGKCPKYVKSTKLRLATGLRNVPSIQSRGLFGAIAGFIEGGWTGMVDGWYGYHHQNEQGSGYAADLKSTQNAIDKITNKVNSVIEKMNTQFTAVGKEFNHLEKRIENLNKKVDDGFLDIWTYNAELLVLLENERTLDYHDSNVKNLYEKVRNQLKNNAKEIGNGCFEFYHKCDNTCMESVKNGTYDYPKYSEEAKLNREEIDGVKLESTRIYQILAIYSTVASSLVLVVSLGAISFWMCSNGSLQCRICI

SEQ ID NO: 6941 - protein, 566 aa, Artificial Sequence
  derived and/or modified protein sequence (wt) from hemagglutinin__InfluenzaA__AEK21426
MKAILVVLLYTFATANADTLCIGYHANNSTDTVDTVLEKNVTVTHSVNLLEDKHNGKLCKLRGVAPLHLGKCNIAGWILGNPECESLSTASSWSYIVETSSSDNGTCYPGNFIDYEELREQLSSVSSFERFEIFPKTSSWPDHDSNKGVTAACPHAGAKSFYKNLIWLVKKGNSYPKLSKSYINDKGKEVLVLWGIHHPSTSADQQSLYQNADAYVFVGTSRYSKKFKPEIAIRPKVRDQEGRMNYYWTLVEPGDKITFEATGNLVAPRYAFAMERNAGSGIIISDTPVHDCNTTCQTPKGAINTSLPFQNIHPITIGKCPKYVRSTKLRLATGLRNVPSIQSRGLFGAIAGFIEGGWTGMVDGWYGYHHQNEQGSGYAADLKSTQNAIDKITNKVNSVIEKMNTQFTAVGKEFNHLEKRIENLNKKVDDGFLDIWTYNAELLVLLENERTLDYHDSNVKNLYEKVRSQLKNNAKEIGNGCFEFYHKCDNTCMESVKNGTYDYPKYSEEAKLNREEIDGVKLESTRIYQILAIYSTVASSLVLVVSLGAISFWMCSNGSLQCRICI

SEQ ID NO: 6942 - protein, 566 aa, Artificial Sequence; identical to SEQ ID NO: 3833
  derived and/or modified protein sequence (wt) from hemagglutinin__InfluenzaA__AEK21436

SEQ ID NO: 6943 - protein, 566 aa, Artificial Sequence
  derived and/or modified protein sequence (wt) from hemagglutinin__InfluenzaA__AEK21456
MKAILVVLLYTFATANADTLCIGYHANNSTDTVDTVLEKNVTVTHSVNLLEDKHNGKLCKLRGVAPLHLGKCNIAGWILGNPECESLSTASSWSYIVETSSSDNGTCYPGDFIDYEELREQLSSVSSFERFEIFPKTSSWPNHDSNKGVTAACPHAGAKSFYKNLIWLVKKGNSYPKLSKSYINDKGKEVLVLWGIHHPSTSADQQSLYQNADAYVFVGTSRYSKKFKPEIAIRPKVRDQEGRMNYYWTLVEPGDKITFEATGNLVVPRYAFAMERNAGSGIIISDTPVHDCNTTCQTPKGAINTSLPFQNIHPITIGKCPKYVKSTKLRLATGLRNVPSIQSRGLFGAIAGFIEGGWTGMVDGWYGYHHQNEQGSGYAADLKSTQNAIDKITNKVNSVIEKMNTQFTAVGKEFNHLEKRIENLNKKVDDGFLDIWTYNAELLVLLENERTLDYHDSNVKNLYEKVRSQLKNNAKEIGNGCFEFYHKCDNTCMENVKNGTYDYPKYSEEAKLNREEIDGVKLESTRIYQILAIYSTVASSLVLVVSLGAISFWMCSNGSLQCRICI

SEQ ID NO: 6944 - protein, 566 aa, Artificial Sequence; identical to SEQ ID NO: 6881
  derived and/or modified protein sequence (wt) from hemagglutinin__InfluenzaA__AEK21466

SEQ ID NO: 6945 - protein, 566 aa, Artificial Sequence; identical to SEQ ID NO: 6881
  derived and/or modified protein sequence (wt) from hemagglutinin__InfluenzaA__AEK21476

SEQ ID NO: 6946 - protein, 566 aa, Artificial Sequence; identical to SEQ ID NO: 3833
  derived and/or modified protein sequence (wt) from hemagglutinin__InfluenzaA__AEK21486

SEQ ID NO: 6947 - protein, 566 aa, Artificial Sequence
  derived and/or modified protein sequence (wt) from hemagglutinin__InfluenzaA__AEK28774
MKTIIALSYILCLVFAQKLPGNDNSTATLCLGHHAVPNGTIVKTITNDQIEVTNATELVQSSSTGEICDSPHQILDGKNCTLIDALLGDPQCDGFQNKKWDLFVERSKAYSNCYPYDVPDYASLRSLVASSGTLEFNNESFNWTGVTQNGTSSACIRRSKNSFFSRLNWLTHLNFKYPALNVTMPNNEQFDKLYIWGVHHPGTDKDQIFLYAQASGRITVSTKRSQQTAIPNIGSRPRVRNIPSRISIYWTIVKPGDILLINSTGNLIAPRGYFKIRSGKSSIMRSDAPIGKCNSECITPNGSIPNDKPFQNVNRITYGACPRYVKQNTLKLATGMRNVPEKQTRGIFGAIAGFIENGWEGMVDGWYGFRHQNSEGRGQAADLKSTQAAIDQINGKLNRLIGKTNEKFHQIEKEFSEVEGRIQDLEKYVEDTKIDLWSYNAELLVALENQHTIHLTDSEMNKLFEKTKKQLRENAEDMGNGCFKIYHKCDNACIGSIRNGTYDHDVYRDEALNNRFQIKGVELKSGYKDWILWISFAISCFLLCVALLGFIMWACQKGNIRCNICI

SEQ ID NO: 6948 - protein, 566 aa, Artificial Sequence
  derived and/or modified protein sequence (wt) from hemagglutinin__InfluenzaA__AEK28785
MKTIIALSYILCLVFAQNLPGNDNSAATLCLGHHAVPNGTIVKTITNDQVEVTNATELVQNSSTGEICDSPHQILDGENCTLIDALLGDPQCDGFQNKKWDLFVERSKAYSNCYPYDVPDYASLRSLVASSGTLEFNNESFNWTGVTQNGTSSACIRRSNNSFFSRLNWLTHLNFKYPALNVTMPNNEQFDKLYIWGVHHPGTDKDQIFLYAQASGRITVSTKRSQQAVIPNIGSRPRVRNIPSRISIYWTIVKPGDILLINSTGNLIAPRGYFKIRSGKSSIMRSDAPIGKCNSECITPNGSIPNDKPFQNVNRITYGACPRYVKQNTLKLATGMRNVPEKQTRGIFGAIAGFIENGWEGMVDGWYGFRHQNSEGRGQAADLKSTQAAIDQINGKLNRLIGKTNEKFHQIEKEFSEVEGRIQDLEKYVEDTKIDLWSYNAELLVALENQHTIHLTDSEMNKLFEKTKKQLRENAEDMGNGCFKIYHKCDNACIGSIRNGTYDHDVYRDEALNNRFQIKGVELKSGYKDWILWISFAISCFLLCVALLGFIMWACQKGNIRCNICI

SEQ ID NO: 6949 - protein, 566 aa, Artificial Sequence
  derived and/or modified protein sequence (wt) from hemagglutinin__InfluenzaA__AEK28796
MKTIIALSYILCLVFAQKLPGNDNSTATLCLGHHAVPNGTIVKTITNDKIEVTNATELVQSSSTGEICDSPHQILDGKNCTLIDALLGDPQCDGFQNKKWDLFVERSKAYSNCYPYDVPDYASLRSLVASSGTLEFNNESFNWTGVTQDGTSSACIRGSKNSFFSRLNWLTHLNFKYPALNVTMPNNEQFDKLYIWGVHHPGTDKDQIFLYAQASGRITVSTKRSQQAAIPNIGSRPRVRNIPSRISIYWTIVKPGDILLINSTGNLIAPRGYFKIRSGKSSIMRSDAPIGKCNSECITPNGSIPNDKPFQNVNRITYGACPRYVKQNTLKLATGMRNVPEKQTRGIFGAIAGFIENGWEGMVDGWYGFRHQNSEGRGQAADLKSTQAAIDQINGKLNRLIGKTNEKFHQIEKEFSEVEGRIQDLEKYVEDTKIDLWSYNAELLVALENQHTIHLTDSEMNKLFEKTKKQLRENAEDMGNGCFKIYHKCDNACIGSIRNGTYDHDVYRDEALNNRFQIKGVELKSGYKDWILWISFAISCFLLCVALLGFIMWACQKGNIRCNICI

SEQ ID NO: 6950 - protein, 566 aa, Artificial Sequence
  derived and/or modified protein sequence (wt) from hemagglutinin__InfluenzaA__AEK28807
MKTIIALSYILCLVFAQKLPGNDNSTATLCLGHHAVPNGTIVKTITNDQIEVTNATELVQSSSTGEICDSPHQILDGENCTLIDALLGDPQCDGFQNKKWDLFVERSKAYGNCYPYDVPDYASLRSLVASSGTLEFNNESFNWTGVTQNGTSSACIRKSNNSFFSRLNWLTHLKFKYPALNVTMPNNEQFDKLYIWGVHHPGTDNDQIFLYAQASGRITVSTKRSQQTVIPNIGSRPRVRNIPSRISIYWTIVKPGDILLINSTGNLIAPRGYFKIRSGKSSIMRSDAPIGKCNSECITPNGSIPNDKPFQNVNRITYGACPRYVKQNTLKLATGMRNVPEKQTRGIFGAIAGFIENGWEGMVDGWYGFRHQNSEGRGQAADLKSTQAAIDQINGKLNRLIGKTNEKFHQIEKEFSEVEGRIQDLEKYVEDTKIDLWSYNAELLVALENQHTIHLTDSEMNKLFEKTKKQLRENAEDMGNGCFKIYHKCDNACIGSIRNGTYDHDVYRDEALNNRFQIKGVELKSGYKDWILWISFAISCFLLCVALLGFIMWACQKGNIRCNICI

SEQ ID NO: 6951 - protein, 566 aa, Artificial Sequence
  derived and/or modified protein sequence (wt) from hemagglutinin__InfluenzaA__AEK28818
MKTIIALSYILCLVFAQKLPGNDNSTATLCLGHHAVPNGTIVKTITNDQIEVTNATELVQSSSTGEICDSPHQILDGKNCTLIDALLGDPQCDGFQNKKWDLFVERSKAYSNCYPYDVPDYASLRSLVASSGTLEFNNESFNWTGVTQNGTSSACIRRSKNSFFSRLNWLTHLNFKYPALNVTMPNNEQFDKLYIWGVHHPGTDKDQIFLYAQASGRITVSTKRSQQTVIPNIGSRPRVRNIPSRISIYWTIVKPGDILLINNTGNLIAPRGYFKIRSGKSSIMRSDAPIGKCNSECITPNGSIPNDKPFQNVNRITYGACPRYVKQNTLKLATGMRNVPEKQTRGIFGAIAGFIENGWEGMVDGWYGFRHQNSEGRGQAADLKSTQAAIDQINGKLNRLIGKTNEKFHQIEKEFSEVEGRIQDLEKYVEDTKIDLWSYNAELLVALENQHTIHLTDSEMNKLFEKTKKQLRENAEDMGNGCFKIYHKCDNACIGSIRNGTYDHDVYRDEALNNRFQIKGVELKSGYKDWILWISFAISCFLLCVALLGFIMWACQKGNIRCNICI

SEQ ID NO: 6952 - protein, 566 aa, Artificial Sequence
  derived and/or modified protein sequence (wt) from hemagglutinin__InfluenzaA__AEK28828
MKTIIALSYILCLVFAQKLPGNDNSTATLCLGHHAVPNGTIVKTITNDQIEVTNATELVQSSSTGEICDSPHQILDGKNCTLIDALLGDPQCDGFQNKKWDLFVERSKAYSNCYPYDVPDYASLRSLVASSGTLEFNNESFNWTGVTQNGTSSACIRRSKNSFFSRLNWLTHLNFKYPALNVTMPNNEQFDKLYIWGVHHPGTDKDQIFLYAQASGRITVSTKRSQQTVIPNIGSRPRVRDIPSRISIYWTIVKPGDILLINSTGNLIAPRGYFKIRSGKSSIMRSDAPIGKCNSECITPNGSIPNDKPFQNVNRITYGACPRYVKQNTLKLATGMRNVPEKQTRGIFGAIAGFIENGWEGMVDGWYGFRHQNSEGRGQAADLKSTQAAIDQINGKLNRLIGKTNEKFHQIEKEFSEVEGRIQDLEKYVEDTKIDLWSYNAELLVALENQHTIHLTDSEMNKLFEKTKKQLRENAEDMGNGCFKIYHKCDNACIGSIRNGTYDHDVYRDEALNNRFQIKGVELKSGYKDWILWISFAISCFLLCVALLGFIMWVCQKGNIRCNICI

SEQ ID NO: 6953 - protein, 566 aa, Artificial Sequence; identical to SEQ ID NO: 2434
  derived and/or modified protein sequence (wt) from hemagglutinin__InfluenzaA__AEK28839

SEQ ID NO: 6954 - protein, 566 aa, Artificial Sequence
  derived and/or modified protein sequence (wt) from hemagglutinin__InfluenzaA__AEK28850
MKTIIALSYILCLVFAQKLPGNDNSTATLCLGHHAVPNGTIVKTITNDQIEVTNATELVQSSSTGEICDSPHQILDGENCTLIDALLGDPQCDGFQNKKWDLFVERSKAYSNCYPYDVPDYASLRSLVASSGTLEFNNESFNWTGVTQNGTSSACIRRSNNSFFSRLNWLTHLKFKYPALNVTMPNNEQFDKLYIWGVHHPGTDNDQIFLYAQASGRITVSTKRSQQTVIPNIGSRLRVRNIPSRISIYWTIVKPGDILLINSTGNLIAPRGYFKIRSGKSSIMRSDAPIGKCNSECITPNGSIPNDKPFQNVNRITYGACPRYVKQNTLKLATGMRNVPEKQTRGIFGAIAGFIENGWEGMVDGWYGFRHQNSEGRGQAADLKSTQAAIDQINGKLNRLIGKTNEKFHQIEKEFSEVEGRIQDLEKYVEDTKIDLWSYNAELLVALENQHTIDLTDSEMNKLFEKTKKQLRENAEDMGNGCFKIYHKCDNACIGSIRNGTYDHDVYRDEALNNRFQIKGVELKSGYKDWILWISFAISCFLLCVALLGFIMWACQKGNIRCNICI

SEQ ID NO: 6955 - protein, 566 aa, Artificial Sequence
  derived and/or modified protein sequence (wt) from hemagglutinin__InfluenzaA__AEK28861
MKTIIALSYILCLVFAQKLPGNDNSTATLCLGHHAVPNGTIVKTITNDQIEVTNATELVQSSSTGEICDSPHQILDGENCTLIDALLGDPQCDGFQNKKWDLFVERSKAYSNCYPYDVPDYASLRSLVASSGTLEFNNESFNWTGVTQNGTSSACIRRSNNSFFSRLNWLTHLKFKYPALNVTMPNNEQFDKLYIWGVHHPGTDNDQIFLYAQASGRITVSTKRSQQTVIPNIGSRPRVRNIPSRISIYWTIVKPGDILLINSTGNLIAPRGYFKIRSGKSSIMRSDAPIGKCNSECITPNGSIPNDKPFQNVNRITYGACPRYVKQNTLKLATGMRNVPEKQTRGIFGAIAGFIENGWEGMVDGWYGFRHQNSEGRGQAADLKSTQAAIDQINGKLNRLIGKTNEKFHQIEKEFSEVEGRIQDLEKYVEDTKIDLWSYNAELLVALENQHTIDLTDSEMNKLFEKTKKQLKENAEDMGNGCFKIYHKCDNACIGSIRNGTYDHDVYRDEALNNRFHIKGVELKSGYKDWILWISFATSCFLLCVALLGFIMWACQKGNIRCNICI

SEQ ID NO: 6956 - protein, 566 aa, Artificial Sequence
  derived and/or modified protein sequence (wt) from hemagglutinin__InfluenzaA__AEK28872
MKTIIALSYILCLVFAQKLPGNDNSTATLCLGHHAVPNGTIVKTITNDQIEVTNATELVQSSSTGEICDSPHQILDGENCTLIDALLGDPQCDGFQNKKWDLFVERSKAYSNCYPYDVPDYASLRSLVASSGTLEFNNESFNWTGVTQNGTSSACIRRSNNSFFSRLNWLTHLKFKYPALNVTMPNNEQFDKLYIWGVHHPGTDNDQIFLYAQASGRITVSTKRSQQTVIPNIGSRPRVRDIPSRISIYWTIVKPGDILLINSTGNLIAPRGYFKIRSGKSSIMRSDAPIGKCNSECITPNGSIPNDKPFQNVNRITYGACPRYVKQNTLKLATGMRNVPEKQTRGIFGAIAGFIENGWEGMVDGWYGFRHQNSEGRGQAADLKSTQAAIDQINGKLNRLIGKTNEKFHQIEKEFSEVEGRIQDLEKYVEDTKIDLWSYNAELLVALENQHTIHLTDSEMNKLFEKTKKQLRENAEDMGNGCFKIYHKCDNACIGSIRNGTYDHDVYRDEALNNRFQIKGVELKSGYKDWILWISFAISCFLLCVALLGFIMWACQKGNIRCNICI

SEQ ID NO: 6957 - protein, 566 aa, Artificial Sequence
  derived and/or modified protein sequence (wt) from hemagglutinin__InfluenzaA__AEK28883
MKTIIALSYILCLVFAQKLPGNDNSTATLCLGHHAVPNGTIVKTITNDQIEVTNATELVQSSSTGEICDSPHQILDGENCTLIDALLGDPQCDGFQNKKWDLFVERSKAYSNCYPYDVPDYASLRSLIASSGTLEFNNESFNWTGVTQNGTSSACIRRSSNSFFSRLNWLTHLKFKYPALNVTMPNNEQFDKLYIWGVHHPGTDNDQIFLYAQASGRITVSTKRSQQTVIPNIGSRPRVRNIPSRISIYWTIVKPGDILLINSTGNLIAPRGYFKIRSGKSSIMRSDAPIGKCNSECITPNGSIPNDKPFQNVNRITYGACPRYVKQNTLKLATGMRNVPEKQTRGIFGAIAGFIENGWEGMVDGWYGFRHQNSEGRGQAADLKSTQAAIDQINGKLNRLIGKTNEKFHQIEKEFSEVEGRIQDLEKYVEDTKIDLWSYNAELLVALENQHTIHLTDSEMNKLFEKTKKQLRENAEDMGNGCFKIYHKCDNACIGSIRNGTYDHDVYRDEALNNRFQIKGVELKSGYKDWILWISFAISCFLLCVALLGFIMWACQKGNIRCNICI

SEQ ID NO: 6958 - protein, 566 aa, Artificial Sequence
  derived and/or modified protein sequence (wt) from hemagglutinin__InfluenzaA__AEK28894
MKTIIALSYILCLVFAQKLPGNDNSTATLCLGHHAVPNGTIVKTITNDQIEVTNATELVQSSSTGEICDSPHQILDGENCTLIDALLGDPQCDGFQNKKWDLFVERSKAYSNCYPYDVPDYASLRSLVASSGTLEFNNESFNWTGVTQNGTSSACIRRSNNSFFSRLNWLTHLKFKYPALNVTMPNNEQFDKLYIWGVHHPGTDNDQIFLYAQASGRITVSTKRSQQTVIPNIGSRPRVRNIPSRISIYWTIVKPGDILLINSTGNLIAPRGYFKIRSGKSSIMRSDAPIGKCNSECITPNGSIPNDKPFQNVNRITYGACPRYVKQNTLKLATGMRNVPEKQTRGIFGAIAGFIENGWEGMVDGWYGFRHQNSEGRGQAADLKSTQAAIDQINGKLNRLIGKTNEKFHQIEKEFSEVEGRIQDLEKYVEDTKIDLWSYNAELLVALENQHTIHLTDSEMNKLFEKTKKQLRENAEDMGNGCFKIYHKCDNACIGSIRNGTYDHDVYRDEALNNRFQIKGVELKSGYKDWILWISFAISCFLLCVALLGFIMWACQKGNIRCNICI

SEQ ID NO: 6959 - protein, 566 aa, Artificial Sequence
  derived and/or modified protein sequence (wt) from hemagglutinin__InfluenzaA__AEK28905
MKTIIALSYILCLVFAQKLPGNDNSTATLCLGHHAVPNGTIVKTITNDQIEVTNATELVQSSSTGEICDSPHQILDGENCTLIDALLGDPQCDGFQNKKWDLFVERSKAYSNCYPYDVPDYASLRSLVASSGTLEFNNESFNWTGVTQNGTSSACIRRSNNSFFSRLNWLTHLRFKYPALNVTMPNNEQFDKLYIWGVHHPGTDNDQIFPYAQASGRITVSTKRSQQTVIPNIGSRPRVRNIPSRISIYWTIVKPGDILLINSTGNLIAPRGYFKIRSGKSSIMRSDAPIGKCNSECITPNGSIPNDKPFQNVNRITYGACPRYVKQNTLKLATGMRNVPEKQTRGIFGAIAGFIENGWEGMVDGWYGFRHQNSEGRGQAADLKSTQAAIDQINGKLNRLIGKTNEKFHQIEKEFSEVEGRIQDLEKYVEDTKIDLWSYNAELLVALENQHTIDLTDSEMNKLFEKTKKQLRENAEDMGNGCFKIYHKCDNACIGSIRNGTYDHDVYRDEALNNRFQIKGVELKSGYKDWILWISFAISCFLLCVALLGFIMWACQKGNIRCNICI

SEQ ID NO: 6960 - protein, 566 aa, Artificial Sequence
  derived and/or modified protein sequence (wt) from hemagglutinin__InfluenzaA__AEK28916
MKTIIALSYILCLVFAQKLPGNDNSTATLCLGHHAVPNGTIVKTITNDQIEVTNATELVQSSSTGEICDSPHQILDGENCTLIDALLGDPQCDGFQNKKWDLFVERSKAYSNCYPYDVPDYASLRSLVASSGTLEFNNESFNWTGVTQNGTSSACIRRSNNSFFSRLNWLTHLKFKYPALNVTMPNNEQFDKLYIWGVHHPGTDNDQIFLYAQASGRITVSTKRSQQTVIPNIGSRPRIRNIPSRISIYWTIVKPGDILLINSTGNLIAPRGYFKIRSGKSSVMRSDAPIGKCNSECITPNGSIPNDKPFQNVNRITYGACPRYVKQNTLKLATGMRNVPEKQTRGIFGAIAGFIENGWEGMVDGWYGFRHQNSEGRGQAADLKSTQAAIDQINGKLNRLIGKTNEKFHQIEKEFSEVEGRIQDLEKYVEDTKIDLWSYNAELLVALENQHTIDLTDSEMNKLFEKTKKQLRENAEDMGNGCFKIYHKCDNACIGSIRNGTYDHDVYRDEALNNRFQIKGVELKSGYKDWILWISFAISCFLLCVALLGFIMWACQKGNIRCNICI

SEQ ID NO: 6961 - protein, 566 aa, Artificial Sequence
  derived and/or modified protein sequence (wt) from hemagglutinin__InfluenzaA__AEK28927
MKTIIALSYILCLVFAQKLPGNDNSTATLCLGHHAVPNGTIVKTITNDQIEVTNATELVQSSSTGEICDSPHQILDGENCTLIDALLGDPQCDGFQNKKWDLFVERSKAYSNCYPYDVPDYASLRSLIASSGTLEFNNESFNWTGVTQNGTSSACIRRSNNSFFSRLNWLTHLKFKYPALNVTMPNNEQFDKLYIWGVHHPGTDNDQIFLYAQASGRITVSTKRSQQTVIPNIGSRPRVRNIPSRISIYWTIVKPGDILLINSTGNLIAPRGYFKIRSGKSSIMRSDAPIGKCNSECITPNGSIPNDKPFQNVNRITYGACPRYVKQNTLKLATGMRNVPEKQTRGIFGAIAGFIENGWEGMVDGWYGFRHQNSEGRGQAADLKSTQAAIDQINGKLNRLIGKTNEKFHQIEKEFSEVEGRIQDLEKYVEDTKIDLWSYNAELLVALENQHTIHLTDSEMNKLFEKTKKQLRENAEDMGNGCFKIYHKCDNACIGSIRNGTYDHDVYRDEALNNRFQIKGVELKSGYKDWILWISFAISCFLLCVALLGFIMWACQKGNIRCNICI

SEQ ID NO: 6962 - protein, 566 aa, Artificial Sequence
  derived and/or modified protein sequence (wt) from hemagglutinin__InfluenzaA__AEK28949
MKTIIALSYILCLVFAQKLPGNDNSTATLCLGHHAVPNGTIVKTITNDQIEVTNATELVQSSSTGEICDSPHQILDGENCTLIDALLGDPQCDGFQNKKWDLFVERSKAYSNCYPYDVPDYASLRSLVASSGTLEFNNESFNWTGVTQNGTSSACIRRSNNSFFSRLNWLTHLKFKYPALNVTMPNNEQFDKLYIWGVHHPGTDNDQIFLYAQASGRITVSTKRSQQTVIPNIGSRPRVRNIPSRISIYWTIVKPGDILLINSTGNLIAPRGYFKIRSGKSSIMRSDAPIGKCNSECITPNGSIPNDKPFQNVNRITYGACPRYVKQNTLKLATGMRNVPEKQTRGIFGAIAGFIENGWEGMVDGWYGFRHQNSEGRGQAADLKSTQAAIDQINGKLNRLIGKTNEKFHQIEKEFSEVEGRIQDLEKYVEDTKIDLWSYNAELLVALENQHTIDLTDSEMNKLFEKTKKQLRENAEDMGNGCLKIYHKCDNACIGSIRNGTYDHDVYRDEALNNRFQIKGVELKSGYKDWILWISFAISCFLLCVALLGFIMWACQKGNIRCNICI

SEQ ID NO: 6963 - protein, 566 aa, Artificial Sequence; identical to SEQ ID NO: 2434
  derived and/or modified protein sequence (wt) from hemagglutinin__InfluenzaA__AEK28960

SEQ ID NO: 6964 - protein, 566 aa, Artificial Sequence; identical to SEQ ID NO: 2434
  derived and/or modified protein sequence (wt) from hemagglutinin__InfluenzaA__AEK28971

SEQ ID NO: 6965 - protein, 566 aa, Artificial Sequence
  derived and/or modified protein sequence (wt) from hemagglutinin__InfluenzaA__AEK28982
MKTIIALSYILCLVFAQKLPGNYNSTATLCLGHHAVPNGTIVKTITNDQIEVTNATELVQSSSTGEICDSPHQILDGENCTLIDALLGDPQCDGFQNKKWDLFVERSKAYSNCYPYDVPDYASLRSLVASSGTLEFNNESFNWTGVTQNGTSSACIRRSNNSFFSRLNWLTHLKFKYPALNVTMPNNEQFDKLYIWGVHHPGTDNDQIFLYAQASGRITVSTKRSQQTVIPNIGSRPRVRNIPSRISIYWTIVKPGDILLINSTGNLIAPRGYFKIRSGKSSIMRSDAPIGKCNSECITPNGSIPNDKPFQNVNRITYGACPRYVKQNTLKLATGMRNVPEKQTRGIFGAIAGFIENGWEGMVDGWYGFRHQNSEGRGQAADLKSTQAAIDQINGKLNRLIGKTNEKFHQIEKEFSEVEGRIQDLEKYVEDTKIDLWSYNAELLVALENQHTIHLTDSEMNKLFEKTKKQLRENAEDMGNGCFKIYHKCDNACIGSIRNGTYDHDVYRDEALNNRFQIKGVELKSGYKDWILWISFAISCFLLCVALLGFIMWACQKGNIRCNICI

SEQ ID NO: 6966 - protein, 566 aa, Artificial Sequence
  derived and/or modified protein sequence (wt) from hemagglutinin__InfluenzaA__AEK28993
MKTIIALSYILCLVFAQKLPGNYNSTATLCLGHHAVPNGTIVKTITNDQIEVTNATELVQSSSTGEICDSPHQILDGENCTLIDALLGDPQCDGFQNKKWDLFVERSKAYSNCYPYDVPDYASLRSLVASSGTLEFNNESFNWTGVTQNGTSSACIRRSNNSFFSRLNWLTHLKFKYPALNVTMPNNEQFDKLYIWGVHHPGTDNDQIFLYAQASGRITVSTKRSQQTVIPNIGSRPRVRNIPSRISIYWTIVKPGDILLINSTGNLIAPRGYFKIRSGKSSIMRSDAPIGKCNSECITPNGSIPNDKPFQNVNRITYGACPRYVKQNTLKLATGMRNVPEKQTRGIFGAIAGFIENGWEGMVDGWYGFRHQNSEGRGQAADLKSTQAAIDQINGKLNRLIGKTNEKFHQIEKEFSEVEGRIQDLEKYVEDTKIDLWSYNAELLVALENQHTIDLTDSEMNKLFEKTKKQLRENAEDMGNGCFKIYHKCDNACIGSIRNGTYDHDVYRDEALNNRFQIKGVELKSGYKDWILWISFAISCFLLCVALLGFIMWACQKGNIRCNICI

SEQ ID NO: 6967 - protein, 566 aa, Artificial Sequence
  derived and/or modified protein sequence (wt) from hemagglutinin__InfluenzaA__AEK29004
MKTIIALSYILCLVFAQKLPGNDNSTATLCLGHHAVPNGTIVKTITNDQIEVTNATELVQSSSTGEICNSPHQILDGENCTLIDALLGDPQCDGFQNKKWDLFVERSKAHSNCYPYDVPDYVSLRSLVASSGTLEFNNESFNWTGVTQNGTSSACIRRSNNSFFSRLNWLTHLNFKYPALNVTMPNNEQFDKLYIWGVHHPGTDKDQIFLYAQASGRITVSTKRSQQAVIPNIGSRPRVRNIPSRVSIYWTIVKPGDILLINSTGNLIAPRGYFKIRSGKSSIMRSDAPIGKCNSACITPNGSIPNDKPFQNVNRITYGACPRYVKQNTLKLATGMRNVPEKQTRGIFGAIAGFIENGWEGMVDGWYGFRHQNSEGRGQAADLKSTQAAIDQINGKLNRLIGKTNEKFHQIEKEFSEVEGRIQDLEKYVEDTKIDLWSYNAELLVALENQHTIDLTDSEMNKLFEKTKKQLRENAEDMGNGCFKIYHKCDNACIGSIRNGTYDHDVYRDEALNNRFQIKGVELKSGYKDWILWISFAISCFLLCVALLGFIMWACQKGNIRCNICI

SEQ ID NO: 6968 - protein, 566 aa, Artificial Sequence
  derived and/or modified protein sequence (wt) from hemagglutinin__InfluenzaA__AEK29026
MKTIIALSYILCLVFAQKLPGNDNSTATLCLGHHAVPNGTIVKTITNDQIEVTNATELVQSSSTGEICDSPHQILDGKNCTLIDALLGDPQCDGFQDKKWDLFVERSKAYSNCYPYDVPDYASLRSLVASSGTLEFNNESFNWTGVTQNGTSSACIRRSKNSFFSRLNWLTHLNFKYSALNVTMPNNEQFDKLYIWGVHHPGTDKDQIFLYAQASGRITVSTKRSQQTVIPNIGSRPRVRNIPSRISIYWTIVKPGDILLINSTGNLIAPRGYFKMQSGKSSIMRSDAPIGKCNSECITPNGSIPNDKPFQNVNRITYGACPRYVKQNTLKLATGMRNVPEKQTRGIFGAIAGFIENGWEGMVDGWYGFRHQNSEGRGQAADLKSTQAAIDQINGKLNRLIGKTNEKFHQIEKEFSEVEGRIQDLEKYVEDTKIDLWSYNAELLVALENQHTIDLTDSEMNKLFEKTKKQLRENAEDMGNGCFKIYHKCDNACIGSIRNGTYDHDVYRDEALNNRFQIKGVELKSGYKDWILWISFAISCFLLCVALLGFIMWACQKGNIRCNICI

SEQ ID NO: 6969 - protein, 566 aa, Artificial Sequence
  derived and/or modified protein sequence (wt) from hemagglutinin__InfluenzaA__AEK29048
MKTIIALSYILCLVFAQKLPGNDNSTATLCLGHHAVPNGTIVKTITNDQIEVTNATELVQSSSTGEICNSPHQILDGENCTLIDALLGDPQCDGFQNKKWDLFVERSKAHSNCYPYDVPDYASLRSLVASSGTLEFNNESFNWTGVAQNGTSSACIRRSNNSFFSRLNWLTHLNFKYPALNVTMPNNEQFDKLYIWGVHHPGTDKDQIFLYAQAAGRITVSTKRSQQAVIPNIGSRPRVRNIPSRVSIYWTIVKPGDILLINSTGNLIAPRGYFKIRSGKSSIMRSDAPIGKCNSACITPNGSIPNDKPFQNVNRITYGACPRYVKQNTLKLATGMRNVPEKQTRGIFGAIAGFIENGWEGMVDGWYGFRHQNSEGRGQAADLKSTQAAIDQINGKLNRLIGKTNEKFHQIEKEFSEVEGRIQDLEKYVEDTKIDLWSYNAELLVALENQHTIDLTDSEMNKLFEKTKKQLRENAEDMGNGCFKIYHKCDNACIGSIRNGTYDHDVYRDEALNNRFQIKGVELKSGYKDWILWISFAISCFLLCVALLGFIMWACQKGNIRCNICI

SEQ ID NO: 6970 - protein, 566 aa, Artificial Sequence
  derived and/or modified protein sequence (wt) from hemagglutinin__InfluenzaA__AEK29070
MKTIIALSYILCLVFAQKLPGNDNSTATLCLGHHAVPNGTIVKTITNDQIEVTNATELVQSSSTGEICDSPHQILDGENCTLIDALLGDPQCDGFQNKKWDLFVERSKAYSNCYPYDVPDYASLRSLVASSGTLEFNNESFNWTGVTQNGTSSACIRRSNNSFFSRLNWLTHLNFKYPALNVTMPNNEQFDKLYIWGVHHPGTDKDQIFLYAQASGRITVSTKRSQQAVIPNIGSRPRVRNIPSRISIYWTIVKPGDILLINSTGNLIAPRGYFKIRSGKSSIMRSDAPIGKCNSECITPNGSIPNDKPFQNVNRITYGACPRYVKQNTLKLATGMRNVPEKQTRGIFGAIAGFIENGWEGMVDGWYGFRHQNSEGRGQAADLKSTQAAIDQINGKLNRLIGKTNEKFHQIEKEFSEVEGRIQDLEKYVEDTKIDLWSYNAELLVALENQHTIHLTDSEMNKLFEKTKKQLRENAEDMGNGCFKIYHKCDNACIGSIRNGTYDHDVYRDEALNNRFQIKGVELKSGYKDWILWISFAISCFLLCVALLGFIMWACQKGNIRCNICI

SEQ ID NO: 6971 - protein, 566 aa, Artificial Sequence
  derived and/or modified protein sequence (wt) from hemagglutinin__InfluenzaA__AEK29081
MKTIIALSYILCLVFAQKLPGNDNSTATLCLGHHAVPNGTIVKTITNDQIEVTNATELVQSSSTGEICDSPHQILDGENCTLIDALLGDPQCDGFQNKKWDLFVERSKAYSNCYPYDVPDYASLRSLVASSGTLEFNNESFNWTGVTQNGTSSSCIRRSNNSFFSRLNWLTHLNFKYPALNVTMPNNEQFDKLYIWGVHHPGTDKDQIFLYAQASGRITVSTKRSQQAVIPNIGSRPRVRNIPSRISIYWTIVKPGDILLINSTGNLIAPRGYFKIRSGKSSIMRSDAPIGKCNSECITPNGSIPNDKPFQNVNRITYGACPRYVKQNTLKLATGMRNVPEKQTRGIFGAIAGFIENGWEGMVDGWYGFRHQNSEGRGQAADLKSTQAAIDQINGKLNRLIGKTNEKFHQIEKEFSEVEGRIQDLEKYVEDTKIDLWSYNAELLVALENQHTIHLTDSEMNKLFEKTKKQLRENAEDMGNGCFKIYHKCDNACIGSIRNGTYDHDVYRDEALNNRFQIKGVELKSGYKDWILWISFAISCFLLCVALLGFIMWACQKGNIRCNICI

SEQ ID NO: 6972 - protein, 566 aa, Artificial Sequence; identical to SEQ ID NO: 5533
  derived and/or modified protein sequence (wt) from hemagglutinin__InfluenzaA__AEK29092

SEQ ID NO: 6973 - protein, 566 aa, Artificial Sequence; identical to SEQ ID NO: 6855
  derived and/or modified protein sequence (wt) from hemagglutinin__InfluenzaA__AEK29125

SEQ ID NO: 6974 - protein, 566 aa, Artificial Sequence; identical to SEQ ID NO: 6855
  derived and/or modified protein sequence (wt) from hemagglutinin__InfluenzaA__AEK29136

SEQ ID NO: 6975 - protein, 566 aa, Artificial Sequence; identical to SEQ ID NO: 6855
  derived and/or modified protein sequence (wt) from hemagglutinin__InfluenzaA__AEK29169

SEQ ID NO: 6976 - protein, 566 aa, Artificial Sequence; identical to SEQ ID NO: 6855
  derived and/or modified protein sequence (wt) from hemagglutinin__InfluenzaA__AEK29180

SEQ ID NO: 6977 - protein, 566 aa, Artificial Sequence; identical to SEQ ID NO: 6855
  derived and/or modified protein sequence (wt) from hemagglutinin__InfluenzaA__AEK29191

SEQ ID NO: 6978 - protein, 566 aa, Artificial Sequence; identical to SEQ ID NO: 6855
  derived and/or modified protein sequence (wt) from hemagglutinin__InfluenzaA__AEK29202

SEQ ID NO: 6979 - protein, 566 aa, Artificial Sequence; identical to SEQ ID NO: 6855
  derived and/or modified protein sequence (wt) from hemagglutinin__InfluenzaA__AEK29213

SEQ ID NO: 6980 - protein, 566 aa, Artificial Sequence; identical to SEQ ID NO: 6855
  derived and/or modified protein sequence (wt) from hemagglutinin__InfluenzaA__AEK29224

SEQ ID NO: 6981 - protein, 566 aa, Artificial Sequence; identical to SEQ ID NO: 6855
  derived and/or modified protein sequence (wt) from hemagglutinin__InfluenzaA__AEK29235

SEQ ID NO: 6982 - protein, 566 aa, Artificial Sequence
  derived and/or modified protein sequence (wt) from hemagglutinin__InfluenzaA__AEK29268
MKTIIALSYILCLVFAQKLPGNDNSTATLCLGHHAVPNGTIVKTITNDQIEVTNATELVQSSSTGEICNSPHQILDGENCTLIDALLGDPQCDGFQNKKWDLFVERSKAHSNCYPYDVPDYASLRSLVASSGTLEFNNESFNWTGVTQNGTSSACIRRSNNSFFSRLNWLTHLNFKYPALNVTMPNNEQFDKLYIWGVHHPGTDKDQIFLYAQASGRITVSTKRSQQAVIPNIGSRPRVRNIPSRVSIYWTIVKPGDILLINSTGNLIAPRGYFKIRSGKSSIMRSDAPIGKCNSACITPNGSIPNDKPFQNVNRITYGACPRYVKQNTLKLATGMRNVPEKQTRGIFGAIAGFIENGWEGMVDGWYGFRHQNSEGRGQAADLKSTQAAIDQINGKLNRLIGKTNEKFHQIEKEFSEVEGRIQDLEKYVEDTKIDLWSYNAELLVALENQHTIDLTDSEMNKLFEKTKKQLRENAEDMGNGCFKIYHKCDNACIGSIRNGTYDHDVYRDEALNNRFQIKGVELKSGYKDWILWISFAISCFLLCVALLGFIMWACQKGNIRCNICI

SEQ ID NO: 6983 - protein, 565 aa, Artificial Sequence
  derived and/or modified protein sequence (wt) from hemagglutinin__InfluenzaA__AEK59838
MKVKLLVLLCTFTATYADTICIGYHANNSTDTVDTVLEKNVTVTHSVNLLEDSHNGKLCLLKGIAPLQLGNCSVAGWILGNPECELLISKESWSYIVEKPDPENGTCYPGHFADYEELREQLSSVSSFERFEIFPKESSWPNHTVTGVSASCSHNGKSSFYKNLLWLTGKNGLYPNLSKSYANNKEKEVLVLWGVHHPPNIGDQKALYHTENAYVSVVSSHYSKKFTPEIAKRPKVRDQEGRINYYWTLLEPGNTIIFEANGNLIAPRYAFALSRGFGSGIINSNAPMDKCDAKCQTPQGAINSSLPFQNVHPVTIGECPKYVRSAKLRMVTGLRNIPSIQSRGLFGAIAGFIEGGWTGMVDGWYGYHHQNEQGSGYAADQKSTQNAINGITNKVNSVIEKMNTQFTAVGKEFNKLERRMENLNKKVDDGFIDIWTYNAELLVLLENERTLDFHDSNVKNLYEKVKSQLKNNAKEIGNGCFEFYHKCNDECMESVKNGTYDYPKYSEESKLNREKIDGVKLESMGVYQILAIYSTVASSLVLLVSLGAISFWMCSNGSLQCRICI

SEQ ID NO: 6984 - protein, 566 aa, Artificial Sequence
  derived and/or modified protein sequence (wt) from hemagglutinin__InfluenzaA__AEK98378
MKTIIALSYILCLVFAQKLPGNDNSTATLCLGHHAVPNGTIVKTITNDQIEVTNATELVQSSSTGEICDSPHQILDGENCTLIDALLGDPQCDGFQNKKWDLFVERSKAYSNCYPYDVPDYASLRSLVASSGTLEFNNESFNWTGVTQNGTSSACIRRSNNSFFSRLNWLTHLKFKYPALNVTMPNNEKFDKLYIWGVHHPGTDNDQIFPYAQASGRITVSTKRSQQTVIPNIGSRPRVRNIPSRISIYWTIVKPGDILLINSTGNLIAPRGYFKIQSGKSSIMRSDAPIGKCNSECITPNGSIPNDKPFQNVNRITYGACPRYVKQNTLKLATGMRNVPEKQTRGIFGAIAGFIENGWEGMVDGWYGFRHQNSEGIGQAADLKSTQAAIDQINGKLNRLIGKTNEKFHQIEKEFSEVEGRIQDLEKYVEDTKIDLWSYNAELLVALENQHTIDLTDSEMNKLFEKTKKQLRENAEDMGNGCFKIYHKCDNACIGSIRNGTYDHDVYRDEALNNRFQIKGVELKSGYKDWILWISFAISCFLLCVALLGFIMWACQKGNIRCNICI

SEQ ID NO: 6985 - protein, 566 aa, Artificial Sequence; identical to SEQ ID NO: 1915
  derived and/or modified protein sequence (wt) from hemagglutinin__InfluenzaA__AEK98380

SEQ ID NO: 6986 - protein, 566 aa, Artificial Sequence
  derived and/or modified protein sequence (wt) from hemagglutinin__InfluenzaA__AEK98382
MKTIIALSYILCLVFAQKLPGNDNSTATLCLGHHAVPNGTIVKTITNDQIEVTNATELVQNSSTGEICDSPHQILDGENCTLIDALLGDPQCDGFQNKKWDLFVERSKAYSNCYPYDVPDYASLRSLVASSGTLEFNNESFNWTGVTQNGTSSACIRRSNNSFFSRLNWLTHLKFKYPALNVTMPNNEKFDKLYIWGVHHPGTDNDQIFLYAQASGRITVSTKRSQQTVIPNIGSRPRIRNIPSRISIYWTIVKPGDILLINSTGNLIAPRGYFKIQIGKSSIMRSDAPIGKCNSECITPNGSIPNDKPFQNVNRITYGACPRYVKQNTLKLATGMRNVPEKQTRGIFGAIAGFIENGWEGMVDGWYGFRHQNSEGIGQAADLKSTQAAIDQINGKLNRLIGKTNEKFHQIEKEFSEVEGRIQDLEKYVEDTKIDLWSYNAELLVALENQHTIDLTDSEMNKLFEKTKKQLRENAEDMGNGCFKIYHKCDNACIGSIRNGTYDHDVYRDEALNNRFQIKGVELKSGYKDWILWISFAISCFLLCVALLGFIMWACQKGNIRCNICI

SEQ ID NO: 6987 - protein, 566 aa, Artificial Sequence
  derived and/or modified protein sequence (wt) from hemagglutinin__InfluenzaA__AEK98386
MKTIIALSYILCLVFAQKLPGNDNSTATLCLGHHAVPNGTIVKTITNDQIEVTNATELVQSSSTGEICNSPHQILDGENCTLIDALLGDPQCDGFQNKKWDLFVERSKAHSNCYPYDVPDYASLRSLVASSGTLEFNNESFNWTGVTQNGTSSACIRRSNNSFFSRLNWLTHLNFKYPALNVTMPNNEQFDKLYIWGVHHPGTDKDQIFLYAQASGRITVSTKRSQQAVIPNIGSRTRVRNIPSRVSIYWTIVKPGDILLINSTGNLIAPRGYFKIRSGKSSIMRSDAPIGKCNSACITPNGSIPNDKPFQNVNRITYGACPRYVKQNTLKLATGMRNVPEKQTRGIFGAIAGFIENGWEGMVDGWYGFRHQNSEGRGQAADLKSTQAAIDQINGKLNRLIGKTNEKFHQIEKEFSEVEGRIQDLEKYVEDTKIDLWSYNAELLVALENQHTIDLTDSEMNKLFEKTKKQLRENAEDMGNGCFKIYHKCDNACIGSIRNGTYDHDVYRDEALNNRFQIKGVELKSGYKDWILWISFAISCFLLCVALLGFIMWACQKGNIRCNICI

SEQ ID NO: 6988 - protein, 566 aa, Artificial Sequence
  derived and/or modified protein sequence (wt) from hemagglutinin__InfluenzaA__AEK98388
MKTIIALSYILCLVFAQKLPGNDNSTATLCLGHHAVPNGTIVKTITNDQIEVTNATELVQSSSTGEICDSPHQILDGKNCTLIDALLGDPQCDGLQNKKWDLFVERSKAYSNCYPYDVPDYASLRSLVASSGTLEFNNESFNWTGVTQNGTSSACIRRSKNSFFSRLNWLTHLNFKYPALNVTMPNNEQFDKLYIWGVHHPGTDKDQIFLYAQASGRITVSTKRSQQTAIPNIGSRPRVRNIPSRISIYWTIVKPGDILLINSTGNLIAPRGYFKIRSGKSSIMRSDAPIGKCNSECITPNGSIPNDKPFQNVNRITYGACPRYVKQNTLKLATGMRNVPEKQTRGIFGAIAGFIENGWEGMVDGWYGFRHQNSEGRGQAADLKSTQAAIDQINGKLNRLIGKTNEKFHQIEKEFSEVEGRIQDLEKYVEDTKIDLWSYNAELLVALENQHTIDLTDSEMNKLFEKTKKQLRENAEDMGNGCFKIYHKCDNACIGSIRNGTYDHDVYRDEALNNRFQIKGVELKSGYKDWILWISFAISCFLLCVALLGFIMWACQKGNIRCNICI

SEQ ID NO: 6989 - protein, 566 aa, Artificial Sequence
  derived and/or modified protein sequence (wt) from hemagglutinin__InfluenzaA__AEK98390
MKTIIALSYILCLVFAQELPGNDNSTATLCLGHHAVPNGTIVKTITNDQIEVTNATELVQSSSTGEICNSPHQILDGENCTLIDALLGDPQCDGFQNKKWDLFVERSKAHSNCYPYDVPDYASLRSLVASSGTLEFNNESFNWTGVTQNGTSSACIRRSNNSFFSRLNWLTHLNFKYPALNVTMPNNEQFDKLYIWGVHHPGTDKDQIFLYAQASGRITVSTKRSQQAVIPNIGSRPRVRNIPSRVSIYWTIVKPGDILLINSTGNLIAPRGYFKIRSGKSSIMRSDAPIGKCKSACITPNGSIPNDKTFQNVNRITYGACPRYVKQNTLKLATGMRNVPEKQTRGIFGAIAGFIENGWEGMVDGWYGFRHQNSEGRGQAADLKSTQAAIDQINGKLNRLIGKTNEKFHQIEKEFSEVEGRIQDLEKYVEDTKIDLWSYNAELLVALENQHTIDLTDSEMNKLFEKTKKQLRENAEDMGNGCFKIYHKCDNACIGSIRNGTYDHDVYRDEALNNRFQIKGVELKSGYKDWILWISFAISCFLLCVALLGFIMWACQKGNIRCNICI

SEQ ID NO: 6990 - protein, 566 aa, Artificial Sequence
  derived and/or modified protein sequence (wt) from hemagglutinin__InfluenzaA__AEK98392
MKTIIALSYILCLVFAQKLPGNDNSTATLCLGHHAVPNGTIVKTITDDQIEVTNATELVQSSSTGEICNSPHQILDGENCTLIDALLGDPQCDGFQNKKWDLFVERSKAHSNCYPYDVPDYASLRSLVASSGTLEFNNENFNWTGVTQNGTSSACIRRSNNSFFSRLNWLTHLNFKYPALNVTMPNNEQFDKLYIWGVHHPGTDKDQIFLYAQASGRITVSTKRSQQAVIPNIGSRLRVRNIPSRVSIYWTIVKPGDILLINSTGNLIAPRGYFKIRSGKSSIMRSDAPIGKCNSACITPNGSIPNDKPFQNVNRITYGACPRYVKQNTLKLATGMRNVPEKQTRGIFGAIAGFIENGWEGMVDGWYGFRHQNSEGRGQAADLKSTQAAIDQINGKLNRLIGKTNEKFHQIEKEFSEVEGRIQDLEKYVEDTKIDLWSYNAELLVALENQHTIDLTDSEMNKLFEKTKKQLRENAEDMGNGCFKIYHKCDNACIGSIRNGTYDHDVYRDEALNNRFQIKGVELKSGYKDWILWISFAISCFLLCVALLGFIMWACQKGNIRCNICI

SEQ ID NO: 6991 - protein, 566 aa, Artificial Sequence
  derived and/or modified protein sequence (wt) from hemagglutinin__InfluenzaA__AEK98394
MKTIIALSYILCLVFAQKLPGNDNSTATLCLGHHAVPNGTIVKTITNDQIEVTNATELVQSSSTGEICNSPHQILDGENCTLIDALLGDPQCDGFQNKKWDLFVERSKAHSNCYPYDVPDYASLRSLVASSGTLEFNNESFNWTGVTQNGTSSACIRRSNNSFFSRLNWLTHLNFKYPALNVTMPNNEQFDKLYIWGVHHPGTDKDQIFLYAQASGRITVSTKRSQQAVIPNIGSRLRVRNIPSRVSIYWTIVKPGDILLINSTGNLIAPRGYFKIRSGKSSIMRSDAPIGKCNSACITPNGSIPNDKPFQNVNRITYGACPRYVKQNTLKLATGMRNVPEKQTRGIFGAIAGFIENGWEGMVDGWYGFRHQNSEGRGQAADLKSTQAAIDQINGKLNRLIGKTNEKFHQIEKEFSEVEGRIQDLEKYVEDTKIDLWSYNAELLVALENQHTIDLTDSEMNKLFEKTKKQLRENAEDMGNGCFKIYHKCDNACIGSIRNGTYDHDVYRDEALNNRFQIKGVELKSGYKDWILWISFAISCFLLCVALLGFIMWACQKGNIRCNICI

SEQ ID NO: 6992 - protein, 566 aa, Artificial Sequence
  derived and/or modified protein sequence (wt) from hemagglutinin__InfluenzaA__AEK98396
MKTIIALSYILCLVFAQKLPGNDNSTATLCLGHHAVPNGTIVKTITNDQIEVTNATELVQSSSTGEICDSPHQILDGENCTLIDALLGDPQCDGFQNKKWDLFVERSKAYSNCYPYDVPDYASLRSLVASSGTLEFNNESFNWTGVTQNGTSSACIRRSNKSFFSRLNWLTHLKFKYPALNVTMPNNEQFDKLYIWGVHHPGTDNDQISLYAQASGRITVSTKRSQQTVIPNIGSRPRVRNIPSRISIYWTIVKPGDILLINSTGNLIAPRGYFKIRSGKSSIMRSDAPIGKCNSECITPNGSIPNDKPFQNVNRITYGACPRYVKQNTLKLATGMRNVPEKQTRGIFGAIAGFIENGWEGMVDGWYGFRHQNSEGRGQAADLKSTQAAIDQINGKLNRLIGKTNEKFHQIEKEFSEVEGRIQDLEKYVEDTKIDLWSYNAELLVALENQHTIDLTDSEMNKLFEKTKKQLRENAEDMGNGCFKIYHKCDNACIGSIRNGTYDHDVYRDEALNNRFQIKGVELKSGYKDWILWISFAISCFLLCIALLGFIMWACQKGNIRCNICI

SEQ ID NO: 6993 - protein, 566 aa, Artificial Sequence
  derived and/or modified protein sequence (wt) from hemagglutinin__InfluenzaA__AEK98398
MKTIIALSYILCLVFAQKLPGNDNSTATLCLGHHAVPNGTIVKTITNDQIEVTNATELVQSSSTGEICDSPHQILDGKNCTLIDALLGDPQCDGLQNKKWDLFVERSKAYSNCYPYDVPDYASLRSLVASSGTLEFNNESFNWTGVTQNGTSSACIRRSKNSFFSRLNWLTHLNFKYPALNVTMPNNEQFDKLYIWGVHHPGTDKDQIFLYAQASGRITVSTKRSQQTAIPNIGSRPRVRNIPSRISIYWTIVKPGDILLINSTGNLIAPRGYFKIRSGKSSIMRSDAPIGKCNSECITPNGSIPNDKPFQNVNRITYGACPRYVKQNTLKLATGMRNIPEKQTRGIFGAIAGFIENGWEGMVDGWYGFRHQNSEGRGQAADLKSTQAAIDQINGKLNRLIGKTNEKFHQIEKEFSEVEGRIQDLEKYVEDTKIDLWSYNAELLVALENQHTIDLTDSEMNKLFEKTKKQLRENAEDMGNGCFKIYHKCDNACIGSIRNGTYDHDVYRDEALNNRFQIKGVELKSGYKDWIIWISFAISCFLLCVALLGFIMWACQKGNIRCNICI

SEQ ID NO: 6994 - protein, 566 aa, Artificial Sequence
  derived and/or modified protein sequence (wt) from hemagglutinin__InfluenzaA__AEK98400
METIIALSYILSLVFAQKLPGNDNSTATLCLGHHAVPNGTIVKTITNDQIEVTNATELVQSSSTGEICDSPHQILDGENCTLIDALLGDPQCDGFQNKKWDLFVERSKAYSNCYPYDVPDYASLRSLVASSGTLEFNNENFNWTGVTQNGTSSACIRRSNNSFFSRLNWLTHLRFKYPALNVTMPNNEEFDKLYIWGVHHPGTDNDQIFLYAQASGRITVSTKRSQQTVIPNIGSRPRVRNIPSRISIYWTIVKPGDILLINSTGNLIAPRGYFKIRSGKSSIMRSDAPIGKCSSECITPNGSIPNDKPFQNVNRITYGACPRYVKQNTLKLATGMRNVPEKQTRGIFGAIAGFIENGWEGMVDGWYGFRHQNSEGIGQAADLKSTQAAIDQINGKLNRLIGKTNEKFHQIEKEFSEIEGRIQDLEKYVEDTKIDLWSYNAELLVALENQHTIDLTDSEMNKLFEKTKKQLRENAEDMGNGCFKIYHKCDNACIGSIRNGTYDHDVYRDEALNNRFQIKGVELKSGYKDWILWISFAISCFLLCVALLGFIMWACQKGNIRCNICI

SEQ ID NO: 6995 - protein, 566 aa, Artificial Sequence
  derived and/or modified protein sequence (wt) from hemagglutinin__InfluenzaA__AEK98402
MKTIIALSYILCLGFAQKLPGNDNSTATLCLGHHAVPNGTIVKTITNDQIEVTNATELVQSSSTGEICDSPHQILDGKNCTLIDALLGDPQCDGFQNKKWDLFVERSKAYSNCYPYDVPDYASLRSLVASSGTLEFNNESFNWTGVTQNGTSSACIRRSKNSFFSRLNWLTHLNFKYPALNVTMPNNEQFDKLYIWGVHHPGTDKDQIFLYAQASGRITVSTKRSQQTAIPNIGSRPRVRNIPSRISIYWTIVKPGDILLINSTGNLIAPRGYFKIRSGKSSIMRSDAPIGKCNSECITPNGSIPNDKPFQNVNRITYGACPRYVKQNTLKLATGMRNVPEKQTRGIFGAIAGFIENGWEGMVDGWYGFRHQNSEGRGQAADLKSTQAAINQINGKLNRLIGKTNEKFHQIEKEFSEVEGRIQDLEKYVEDTKIDLWSYNAELLVALENQHTIDLTDSEMNKLFEKTKKQLRENAEDMGNGCFKIYHKCDNACIGSIRNGTYDHDVYRDEALNNRFQIKGVELKSGYKDWILWISFAISCFLLCVALLGFIMWACQKGNIRCNICI

SEQ ID NO: 6996 - protein, 566 aa, Artificial Sequence
  derived and/or modified protein sequence (wt) from hemagglutinin__InfluenzaA__AEK98404
MKTIIALSYILSLVFAQKLPGNDNSTATLCLGHHAVPNGTIVKTITNDQIEVTNATELVQSSSTGEICDSPHQILDGENCTLIDALLGDPQCDGFQNKKWDLFVERSKAYSNCYPYDVPDYASLRSLVASSGTLEFNNENFNWTGVTQNGTSSACIRRSNNSFFSRLNWLTHLRFKYPALNVTMPNNEEFDKLYIWGVHHPGTDNDQIFLYAQASGRITVSTKRSQQTVIPNIGSRPRVRNIPSRISIYWTIVKPGDILLINSTGNLIAPRGYFKMRSGKSSIMRSDAPIGKCNSECITPNGSIPNDKPFQNVNRITYGACPRYVKQNTLKLATGMRNVPEKQTRGIFGAIAGFIENGWEGMVDGWYGFRHQNSEGIGQAADLKSTQAAIDQINGKLNRLIGKTNEKFHQIEKEFSEVEGRIQDLEKYVEDTKIDLWSYNAELLVALENQHTIDLTDSEMNKLFEKTKKQLRENAEDMGNGCFKIYHKCDNACIGSIRNGTYDHDVYRDEALNNRFQIKGVELKSGYKDWILWISFAISCFLLCVALLGFIMWACQKGNIRCNICI

SEQ ID NO: 6997 - protein, 566 aa, Artificial Sequence
  derived and/or modified protein sequence (wt) from hemagglutinin__InfluenzaA__AEK98406
MKTIIALSYILSLVFAQKLPGNDNSTATLCLGHHAVPNGTIVKTITNDQIEVTNATELVQSSSTGEICDSPHQILDGENCTLIDALLGDPQCDGFQNKKWDLFVERSKAYSNCYPYDVPDYASLRSLVASSGTLEFNNENFNWTGVTQNGTSSACIRRSNNSFFSRLNWLTHLRFKYPALNVTMPNNEELDKLYIWGVHHPGTDNDQIFLYAQASGRITVSTKRSQQTVIPNIGSRPRVRNIPSRISIYWTIVKPGDILLINSTGNLIAPRGYFKIRSGKSSIMRSDAPIGKCNSECITPNGSIPNDKPFQNVNRITYGACPRYVKQNTLKLATGMRNVPEKQTRGIFGAIAGFIENGWEGMVDGWYGFRHQNSEGIGQAADLKSTQAAIDQINGKLNRLIGKTNEKFHQIEKEFSEVEGRIQDLEKYVEDTKIDLWSYNAELLVALENQHTIDLTDSEMNKLFEKTKKQLRENAEDMGNGCFKIYHKCDNACIGSIRNGTYDHDVYRDEALNNRFQIKGVELKSGYKDWILWISFAISCFLLCVALLGFVMWACQKGNIRCNICI

SEQ ID NO: 6998 - protein, 566 aa, Artificial Sequence
  derived and/or modified protein sequence (wt) from hemagglutinin__InfluenzaA__AEL11687
MKTIIALSYILCLVFAQKLPGNDNSTATLCLGHHAVPNGTIVKTITNDQIEVTNATELVQSSSTGGICDSPHQILDGENCTLIDALLGDPQCDGFQNKKWDLFVERSKAYSNCYPYDVPDYASLRSLVASSGTLEFNNESFNWTGVTQNGTSSSCKRRSNNSFFSRLNWLTHLKFKYPALNVTMPNNEKFDKLYIWGVHHPVTDNDQIRLYAQASGRITVSTKRSQQTVIPNIGYRPRVRDIPSRISIYWTIVKPGDILLINSTGNLIAPRGYFKIRSGKSSIMRSDAPIGKCNSECITPNGSIPNDKPFQNVNRITYGACPRYVKQNTLKLATGMRNVPEKQTRGIFGAIAGFIENGWEGMVDGWYGFRHQNSEGIGQAADLKSTQAAINQINGKLNRLIGKTNEKFHQIEKEFSEVEGRIQDLEKYVEDTKIDLWSYNAELLVALENQHTIDLTDSEMNKLFERTKKQLRENAEDMGNGCFKIYHKCDNACIGSIRNGTYDHDVYRDEALNNRFQIKGVELKSGYKDWILWISFAISCFLLCVVLLGFIMWACQKGNIRCNICI

SEQ ID NO: 6999 - protein, 563 aa, Artificial Sequence
  derived and/or modified protein sequence (wt) from hemagglutinin__InfluenzaA__AEL31632
MEKIVLLLAIVSLVKSDQICIGYHANNSTEQVDTIMEKNVTVTHAQDILEKTHNGKLCNLDGVKPLILRDCSVAGWLLGNPMCDEFLNVPEWSYIVEKINPANDLCYPGNFNDYEELKHLLSRINHFEKIQIIPKSSWSDHEASGVSSVCPYQGRSSFFRNVVWLTKKDNAYPTIKRSYNNTNQEDLLVLWGIHHPNDAAEQTRLYQNPTTYISVGTSTLNQRLVPKIATRSKVNGQSGRMEFFWTILKSNDAINFESNGNFIAPENAYKIVKKGDSTIMKSELEYGNCNTKCQTPIGAINSSMPFHNIHPLTIGECPKYVKSNRLVLATGLRNSPQGETRGLFGAIAGFIEGGWQGMVDGWYGYHHSNEQGSGYAADKESTQKAIDGVTNKVNSIIDKMNTQFEAVGREFNNLERRIENLNKKMEDGFLDVWTYNAELLVLMENERTLDFHDSNVKNLYDKVRLQLRDNAKELGNGCFEFYHRCDNECMESVRNGTYDYPQYSEEARLKREEISGVKLESIGTYQILSIYSTVASSLALAIMVAGLFLWMCSNGSLQCRICI

SEQ ID NO: 7000 - protein, 566 aa, Artificial Sequence; identical to SEQ ID NO: 6920
  derived and/or modified protein sequence (wt) from hemagglutinin__InfluenzaA__AEL89297

SEQ ID NO: 7001 - protein, 566 aa, Artificial Sequence; identical to SEQ ID NO: 6920
  derived and/or modified protein sequence (wt) from hemagglutinin__InfluenzaA__AEL89307

SEQ ID NO: 7002 - protein, 566 aa, Artificial Sequence; identical to SEQ ID NO: 6920
  derived and/or modified protein sequence (wt) from hemagglutinin__InfluenzaA__AEL89317

SEQ ID NO: 7003 - protein, 566 aa, Artificial Sequence; identical to SEQ ID NO: 6920
  derived and/or modified protein sequence (wt) from hemagglutinin__InfluenzaA__AEL89327

SEQ ID NO: 7004 - protein, 566 aa, Artificial Sequence; identical to SEQ ID NO: 6920
  derived and/or modified protein sequence (wt) from hemagglutinin__InfluenzaA__AEL89337

SEQ ID NO: 7005 - protein, 566 aa, Artificial Sequence; identical to SEQ ID NO: 6920
  derived and/or modified protein sequence (wt) from hemagglutinin__InfluenzaA__AEL89347

SEQ ID NO: 7006 - protein, 566 aa, Artificial Sequence; identical to SEQ ID NO: 6920
  derived and/or modified protein sequence (wt) from hemagglutinin__InfluenzaA__AEL89357

SEQ ID NO: 7007 - protein, 566 aa, Artificial Sequence; identical to SEQ ID NO: 6920
  derived and/or modified protein sequence (wt) from hemagglutinin__InfluenzaA__AEL89367

SEQ ID NO: 7008 - protein, 566 aa, Artificial Sequence; identical to SEQ ID NO: 6920
  derived and/or modified protein sequence (wt) from hemagglutinin__InfluenzaA__AEL89391

SEQ ID NO: 7009 - protein, 566 aa, Artificial Sequence; identical to SEQ ID NO: 6920
  derived and/or modified protein sequence (wt) from hemagglutinin__InfluenzaA__AEL89401

SEQ ID NO: 7010 - protein, 566 aa, Artificial Sequence; identical to SEQ ID NO: 6920
  derived and/or modified protein sequence (wt) from hemagglutinin__InfluenzaA__AEL89411

SEQ ID NO: 7011 - protein, 566 aa, Artificial Sequence; identical to SEQ ID NO: 6920
  derived and/or modified protein sequence (wt) from hemagglutinin__InfluenzaA__AEL89421

SEQ ID NO: 7012 - protein, 566 aa, Artificial Sequence; identical to SEQ ID NO: 6920
  derived and/or modified protein sequence (wt) from hemagglutinin__InfluenzaA__AEL89441

SEQ ID NO: 7013 - protein, 566 aa, Artificial Sequence; identical to SEQ ID NO: 6920
  derived and/or modified protein sequence (wt) from hemagglutinin__InfluenzaA__AEL89451

SEQ ID NO: 7014 - protein, 566 aa, Artificial Sequence; identical to SEQ ID NO: 6920
  derived and/or modified protein sequence (wt) from hemagglutinin__InfluenzaA__AEL89461

SEQ ID NO: 7015 - protein, 566 aa, Artificial Sequence; identical to SEQ ID NO: 6920
  derived and/or modified protein sequence (wt) from hemagglutinin__InfluenzaA__AEL89471

SEQ ID NO: 7016 - protein, 566 aa, Artificial Sequence
  derived and/or modified protein sequence (wt) from hemagglutinin__InfluenzaA__AEL89481
MKVILVVLLYTFATANADTLCIGYHANNSTDTVDTVLEKNVTVTHSVNLLEDKHNGKLCKLRGVAPLHLGKCNIAGWILGNPECESLSTASSWSYIVETSSSDNGTCYPGDFIDYEELREQLSSVSSFERFEIFPKTSSWPNHDSNKGVTAACPHAGAKSFYKNLIWLVKKGNSYPKLSKSYINDKGKEVLVLWGIHHPSTSADQQSLYQNADAYVFVGTSRYSKKFKPEIAIRPKVRDQEGRMNYYWTLVEPGDKITFEATGNLVVPRYAFAMERNAGSGIIISDTPVHDCNTTCQTPKGAINTSLPFQNIHPITIGKCPKYVKSTKLRLATGLRNVPSIQSRGLFGAIAGFIEGGWTGMVDGWYGYHHQNEQGSGYAADLKSTQNAIDKITNKVNSVIEKMNTQFTAVGKEFNHLEKRIENLNKKVDDGFLDIWTYNAELLVLLENERTLDYHDSNVKNLYEKVRSQLKNNAKEIGNGCFEFYHKCDNTCMESVKNGTYDYPKYSEEAKLNREEIDGVKLESTRIYQILAIYSTVASSLVLVVSLGAISFWMCSNGSLQCRICI

SEQ ID NO: 7017 - protein, 566 aa, Artificial Sequence; identical to SEQ ID NO: 5584
  derived and/or modified protein sequence (wt) from hemagglutinin__InfluenzaA__AEL89491

SEQ ID NO: 7018 - protein, 566 aa, Artificial Sequence
  derived and/or modified protein sequence (wt) from hemagglutinin__InfluenzaA__AEL89501
MKAILVVLLYTFATANADTLCIGYHANNSTDTVDTVLEKNVTVTHSVNLLEDKHNGKLCKLRGVAPLHLGKCNIAGWILGNPECESLSTASSWSYIVETSSSDNGTCYPGDFIDYEELREQLSSVSSFERFEIFPKTSSWPDHDSNKGVTAACPHAGAKSFYKNLIWLVKKGNSYPKLSKSYINDEGKEVLVLWGIHHPSTSADQQSLYQNADAYVFVGTSRYSKKFKPEIAIRPKVRDQEGRMNYYWTLVEPGDKITFEATGNLVVPRYAFAMERNAGSGIIISDTPVHDCNTTCQTPKGAINTSLPFQNIHPITIGKCPKYVKSTKLRLATGLRNVPSIQSRGLFGAIAGFIEGGWTGMVDGWYGYHHQNEQGSGYAADLKSTQNAIDKITNKVNSVIEKMNTQFTAVGKEFNHLEKRIENLNKKVDDGFLDIWTYNAELLVLLENERTLDYHDSNVKNLYEKVRSQLKNNAKEIGNGCFEFYHKCDNTCMESVKNGTYDYPKYSEEAKLNREEIDGVKLESTRIYQILAIYSTVASSLVLVVSLGAISFWMCSNGSLQCRICI

SEQ ID NO: 7019 - protein, 566 aa, Artificial Sequence; identical to SEQ ID NO: 3833
  derived and/or modified protein sequence (wt) from hemagglutinin__InfluenzaA__AEL89511

SEQ ID NO: 7020 - protein, 566 aa, Artificial Sequence; identical to SEQ ID NO: 5584
  derived and/or modified protein sequence (wt) from hemagglutinin__InfluenzaA__AEL89521

SEQ ID NO: 7021 - protein, 566 aa, Artificial Sequence
  derived and/or modified protein sequence (wt) from hemagglutinin__InfluenzaA__AEL89531
MKAILVVLLYTFTTANADTLCIGYHANNSTDTVDTVLEKNVTVTHSVNLLEDKHNGKLCQLRGVAPLHLGKCNIAGWILGNPECESLSTASSWSYIVETSSSDNGTCYPGDFIDYEELREQLSSVSSFERFEMFPKTSSWPNHDSNKGVTAACPHAGAKSFYKNLIWLVKKGNSYPKLSKSYINDKGKEVLVLWGIHHPSTSADQQSLYQNADAYVFVGTSRYSKKFKPEIAIRPKVRDQEGRMNYYWTLVEPGDKITFEATGNLVVPRYAFAMERNAGSGIIISDTPVHDCNTTCQTPKGAINTSLPFQNIHPITIGKCPKYVKSTKLRLATGLRNVPSIQSRGLFGAIAGFIEGGWTGMVDGWYGYHHQNEQGSGYAADLKSTQNAIDKITNKVNSVIEKMNTQFTAVGKEFNHLEKRIENLNKKVDDGFLDIWTYNAELLVLLENERTLDYHDSNVKNLYEKVRSQLKNNAKEIGNGCFEFYHKCDNTCMESVKNGTYDYPKYSEEAKLNREEIDGVKLESTRIYQILAIYSTVASSLVLVVSLGAISFWMCSNGSLQCRICI

SEQ ID NO: 7022 - protein, 566 aa, Artificial Sequence; identical to SEQ ID NO: 5584
  derived and/or modified protein sequence (wt) from hemagglutinin__InfluenzaA__AEL89541

SEQ ID NO: 7023 - protein, 566 aa, Artificial Sequence
  derived and/or modified protein sequence (wt) from hemagglutinin__InfluenzaA__AEL89551
MKAILVVLLYTFATANADTLCIGYHANNSTDTVDTVLEKNVTVTHSVNLLEDKHNGKLCKLRGVAPLHLGKCNIAGWILGNPECESLSTASSWSYIVETSSSDNGTCYPGDFIDYEELREQLSSVSSFERFEIFPKTSSWPDHDSNKGVTAACPHAGAKSFYKNLIWLVKKGNSYPKLSKSYINDKGKEVLVLWGIHHPSTSADQQSLYQNADAYVFVGTSRYSKKFKPEIAIRPKVRDQEGRMNYYWTLVEPGDKITFEATGNLVVPRYAFAMERNAGSGIIISDTPAHDCNTTCQTPKGAINTSLPFQNIHPITIGKCPKYVKSTKLRLATGLRNVPSIQSRGLFGAIAGFIEGGWTGMVDGWYGYHHQNEQGSGYAADLKSTQNAIDKITNKVNSVIEKMNTQFTAVGKEFNHLEKRIENLNKKVDDGFLDIWTYNAELLVLLENERTLDYHDSNVKNLYEKVRSQLKNNAKEIGNGCFEFYHKCDNTCMESVKNGTYDYPKYSEEAKLNREEIDGVKLESTRIYQILAIYSTVASSLVLVVSLGAISFWMCSNGSLQCRICI

SEQ ID NO: 7024 - protein, 566 aa, Artificial Sequence
  derived and/or modified protein sequence (wt) from hemagglutinin__InfluenzaA__AEL89561
MKAILVVLLYTFATANADTLCIGYHANNSTDTVDTVLEKNVTVTHSVNLLEDKHNGKLCKLRGVAPLHLGKCNIAGWILGNPECESLSTASSWSYIVETSSSGNGTCYPGDFIDYEELREQLSSVSSFERFEIFPKTSSWPDHDSNKGVTAACPHAGAKSFYKNLIWLVKKGNSYPKLSKSYINDKGKEVLVLWGIHHPSTSADQQSLYQNADAYVFVGTSRYSKKFKPEIAIRPKVRDQEGRMNYYWTLVEPGDKITFEATGNLVVPRYAFAMERNAGSGIIISDTPVHDCNTTCQTPKGAINTSLPFQNIHPITIGKCPKYVKSTKLRLATGLRNVPSIQSRGLFGAIAGFIEGGWTGMVDGWYGYHHQNEQGSGYAADLKSTQNAIDKITNKVNSVIEKMNTQFTAVGKEFNHLEKRIENLNKKVDDGFLDIWTYNAELLVLLENERTLDYHDSNVKNLYEKVRSQLKNNAKEIGNGCFEFYHKCDNTCMESVKNGTYDYPKYSEEAKLNREEIDGVKLESTEIYQILAIYSTVASSLVLVVSLGAISFWMCSNGSLQCRICI

SEQ ID NO: 7025 - protein, 566 aa, Artificial Sequence; identical to SEQ ID NO: 5584
  derived and/or modified protein sequence (wt) from hemagglutinin__InfluenzaA__AEL89571

SEQ ID NO: 7026 - protein, 566 aa, Artificial Sequence
  derived and/or modified protein sequence (wt) from hemagglutinin__InfluenzaA__AEL89581
MKAILVVLLYTFATANADTLCIGYHANNSTDTVDTVLEKNVTVTHSVNLLEDKHNGKLCKLRGVAPLHLGKCNIAGWILGNPECESLSTASSWSYIVETSSSDNGTCYPGDFIDYEELREQLSSVSSFERFEMFPKTSSWPDHDSNKGVTAACPHAGAKSFYKNLIWLVKKGNSYPKLSKSYINDKGKEVLVLWGIHHPSTSADQQSLYQNADAYVFVGTSRYSKKFKPEIAIRPKVRDQEGRMNYYWTLVEPGDKITFEATGNLVVPRYAFAMERNAGSGIIISDTPVHDCNTTCQTPKGAINTSLPFQNIHPITIGKCPKYVKSTKLRLATGLRNVPSIQSRGLFGAIAGFIEGGWTGMVDGWYGYHHQNEQGSGYAADLKSTQNAIDKITNKVNSVIEKMNTQFTAVGKEFNHLEKRIENLNKKVDDGFLDIWTYNAELLVLLENERTLDYHDSNVKNLYEKVRSQLKNNAKEIGNGCFEFYHKCDNTCMESVKNGTYDYPKYSEEAKLNREEIDGVKLESTRIYQILAIYSTVASSLVLVVSLGAISFWMCSNGSLQCRICI

SEQ ID NO: 7027 - protein, 566 aa, Artificial Sequence; identical to SEQ ID NO: 6454
  derived and/or modified protein sequence (wt) from hemagglutinin__InfluenzaA__AEL89591

SEQ ID NO: 7028 - protein, 566 aa, Artificial Sequence
  derived and/or modified protein sequence (wt) from hemagglutinin__InfluenzaA__AEL89601
MKAILVVLLYTFATANADTLCIGYHANNSTDTVDTVLEKNVTVTHSVNLLEDKHNGKLCKLRGVAPLHLGKCNIAGWILGNPECESLSTASSWSYIVETSSSDNGTCYPGDFIDYEELREQLSSVSSFERFEIFPKTSSWPNHDSNKGVTTACPHAGAKSFYKNLIWLVKKGNSYPKLSKSYINDKGKEVLVLWGIHHPPTSADQQSLYQNADAYVFVGTSRYSKKFKPEIAIRPKVRDQEGRMNYYWTLVEPGDKITFEATGNLVVPRYAFAMERNAGSGIIISDTPVHDCNTTCQTPKGAINTSLPFQNIHPITIGKCPKYVKSTKLRLATGLRNVPSIQSRGLFGAIAGFIEGGWTGMVDGWYGYHHQNEQGSGYAADLKSTQNAIDEITNKVNSVIEKMNTQFTAVGKEFNHLEKRIENLNKKVDDGFLDIWTYNAELLVLLENERTLDYHDSKVKNLYEKVRSQLKNNAKEIGNGCFEFYHKCDNTCMESVKNGTYDYPKYSEEAKLNREEIDGVKLESTRIYQILAIYSTVASSLVLVVSLGAISFWMCSNGSLQCRICI

SEQ ID NO: 7029 - protein, 566 aa, Artificial Sequence; identical to SEQ ID NO: 6454
  derived and/or modified protein sequence (wt) from hemagglutinin__InfluenzaA__AEL89611

SEQ ID NO: 7030 - protein, 566 aa, Artificial Sequence; identical to SEQ ID NO: 6896
  derived and/or modified protein sequence (wt) from hemagglutinin__InfluenzaA__AEL89621

SEQ ID NO: 7031 - protein, 566 aa, Artificial Sequence; identical to SEQ ID NO: 5584
  derived and/or modified protein sequence (wt) from hemagglutinin__InfluenzaA__AEL89631

SEQ ID NO: 7032 - protein, 566 aa, Artificial Sequence; identical to SEQ ID NO: 6920
  derived and/or modified protein sequence (wt) from hemagglutinin__InfluenzaA__AEL89641

SEQ ID NO: 7033 - protein, 566 aa, Artificial Sequence
  derived and/or modified protein sequence (wt) from hemagglutinin__InfluenzaA__AEL89651
MKAILVVLLYTFATANADTLCIGYHANNSTDTVDTVLEKNVTVTHSVNLLEDKHNGKLCKLRGVAPLHLGKCNIAGWILGNPECESLSTASSWSYIVETSSSDNGTCYPGVFIDYEELREQLSSVSSFERFEIFPKTSSWPNHDSNKGVTAACPHAGAKSFYKNLIWLVKKGNSYPKLSKSYINDKGKEVLVLWGIHHPSTTADQQSLYQNADAYVFVGTSRYSKKFKPEIAIRPKVRDQEGRMNYYWTLVEPGDKITFEATGNLVVPRYAFAMERNAGSGIIISDTPVHDCNTTCQTPKGAINTSLPFQNIHPITIGKCPKFVKSTKLRLATGLRNVPSIQSRGLFGAIAGFIEGGWTGMVDGWYGYHHQNEQGSGYAADLKSTQNAIDKITNKVNSVIEKMNTQFTAVGKEFNHLEKRIENLNKKVDDGFLDIWTYNAELLVLLENERTLDYHDSNVKNLYEKVRNQLKNNAKEIGNGCFEFYHKCDNTCMESVKNGTYDYPKYSEEAKLNREEIDGVKLESTRIYQILAIYSTVASSLVLVVSLGAISFWMCSNGSLQCRICI

SEQ ID NO: 7034 - protein, 566 aa, Artificial Sequence; identical to SEQ ID NO: 6435
  derived and/or modified protein sequence (wt) from hemagglutinin__InfluenzaA__AEL89661

SEQ ID NO: 7035 - protein, 566 aa, Artificial Sequence
  derived and/or modified protein sequence (wt) from hemagglutinin__InfluenzaA__AEL89671
MKAILVVLLYTFATANADTLCIGYHANNSTDTVDTVLEKNVTVTHSVNLLEDKHNGKLCKLRGVAPLHLGKCNIAGWILGNPECESLSTASSWSYIVETSSSDNGTCYPGDFIDYEELREQLSSVSSFERFEIFPKTSSWPNHDSNKGVTAACPHAGAKSFYKNLIWLVKKGNSYPKLSKSYINDKGKEVLVLWGIHHPSTTADQQSLYQSADTYVFVGTSRYSKKFKPEIAIRPKVRDQEGRMNYYWTLVEPGDKITFEATGNLVVPRYAFAMERNAGSGIIISDTPVHDCNTTCQTPKGAINTSLPFQNIHPITIGKCPKYVKSTKLRLATGLRNVPSIQSRGLFGAIAGFIEGGWTGMVDGWYGYHHQNEQGSGYAADLKSTQNAIDKITNKVNSVIEKMNTQFTAVGKEFNHLEKRIENLNKKVDDGFLDIWTYNAELLVLLENERTLDYHDSNVKNLYEKVRNQLKNNAKEIGNGCFEFYHKCDNTCMESVKNGTYDYPKYSEEAKLNREEIDGVKLESTRIYQILAIYSTVASSLVLVVSLGAISFWMCSNGSLQCRICI

SEQ ID NO: 7036 - protein, 566 aa, Artificial Sequence; identical to SEQ ID NO: 6435
  derived and/or modified protein sequence (wt) from hemagglutinin__InfluenzaA__AEL89691

SEQ ID NO: 7037 - protein, 566 aa, Artificial Sequence
  derived and/or modified protein sequence (wt) from hemagglutinin__InfluenzaA__AEL89701
MKAILVVLLYTFATANADTLCIGYHANNSTDTVDTVLEKNVTVTHSVNLLEDKHNGKLCKLRGVAPLHLGKCNIAGWILGNPECESLSTASSWSYIVETSSSDNGTCYPGDFIDYEELREQLSSVSSFERFEIFPKTSSWPNHDSNKGVTTACPHAGAKSFYKNLIWLVKKGNSYPKLSKSYINDKGKEVLVLWGIHHPPTSADQQNLYQNADAYVFVGTSRYSKKFKPEIAIRPKVRDQEGRMNYYWTLVEPGDKITFEATGNLVVPRYAFAMERNAGSGIIISDTPVHDCNTTCQTPKGAINTSLPFQNIHPITIGKCPKYVKSTKLRLATGLRNVPSIQSRGLFGAIAGFIEGGWTGMVDGWYGYHHQNEQGSGYAADLKSTQNAIDGITNKVNSVIEKMNTQFTAVGKEFNHLEKRIENLNKKVDDGFLDIWTYNAELLVLLENERTLDYHDSNVKNLYEKVRSQLKNNAKEIGNGCFEFYHKCDNTCMESVKNGTYDYPKYSEEAKLNREEIDGVKLESTMIYQILAIYSTVASSLVLVVSLGAISFWMCSNGSLQCRICI

SEQ ID NO: 7038 - protein, 566 aa, Artificial Sequence; identical to SEQ ID NO: 7037
  derived and/or modified protein sequence (wt) from hemagglutinin__InfluenzaA__AEL89711

SEQ ID NO: 7039 - protein, 566 aa, Artificial Sequence; identical to SEQ ID NO: 6435
  derived and/or modified protein sequence (wt) from hemagglutinin__InfluenzaA__AEL89721

SEQ ID NO: 7040 - protein, 566 aa, Artificial Sequence
  derived and/or modified protein sequence (wt) from hemagglutinin__InfluenzaA__AEL89741
MKAILVVLLYTFATTNADTLCIGYHANNSTDTVDTVLEKNVTVTHSVNLLEDKHNGKLCKLRGVAPLHLGKCNIAGWILGNPECESLSTASSWSYIVETSSSDNGTCYPGDFIDYEELREQLSSVSSFERFEIFPKTSSWPNHDSNKGVTAACPHAGAKSFYKNLIWLVKKGNSYPKLSKSYINDKGKEVLVLWGIHHPSTTADQQSLYQNADTYVFVGTSRYSKKFKPEIAIRPKVRDQEGRMNYYWTLVEPGDKITFEATGNLVVPRYAFAMERNAGSGIIISDTPVHDCNTTCQTPKGAINTSLPFQNIHPITIGKCPKYVKSTKLRLATGLRNVPSIQSRGLFGAIAGFIEGGWTGMVDGWYGYHHQNEQGSGYAADLKSTQNAIDKITNKVNSVIEKMNTQFTAVGKEFNHLEKRIENLNKKVDDGFLDIWTYNAELLVLLENERTLDYHDSNVKNLYEKVRNQLKNNAKEIGNGCFEFYHKCDNTCMESVKNGTYDYPKYSEEAKLNREEIDGVKLESTRIYQILAIYSTVASSLVLVVSLGAISFWMCSNGSLQCRICI

SEQ ID NO: 7041 - protein, 566 aa, Artificial Sequence; identical to SEQ ID NO: 5584
  derived and/or modified protein sequence (wt) from hemagglutinin__InfluenzaA__AEL89751

SEQ ID NO: 7042 - protein, 566 aa, Artificial Sequence
  derived and/or modified protein sequence (wt) from hemagglutinin__InfluenzaA__AEL89761
MKAILVVLLYTFATANADTLCIGYHANNSTDTVDTVLEKNVTVTHSVNLLEDKHNGKLCKLRGVAPLHLGKCNIAGWILGNPECESLSTASSWSYIVETSSSDNGTCYPGDFIDYEELREQLSSVSSFERFEIFPKTSSWPNHDSNKGVTTACPHAGAKSFYKNLIWLVKKGNSYPKLSKSYINDKGKEVLVLWGIHHPPTSADQQSLYQNADAYVFVGTSRYSKKFKPEIAIRPKVRDQEGRMNYYWTLVEPGDKITFEATGNLVVPRYAFAMERNAGSGIIISDTPVHDCNTTCQTPKGAINTSLPFQNIHPITIGKCPKYVKSTKLRLATGLRNVPSIQSRGLFGAIAGFIEGGWTGMVDGWYGYHHQNEQGSGYAADLKSTQNAIDGITNKVNSVIEKMNTQFTAVGKEFNHLEKRIENLNKKVDDGFLDIWTYNAELLVLLENERTLDYHDSNVKNLYEKVRSQLKNNAKEIGNGCFEFYHKCDNTCMESVKNGTYDYPKYSEEAKLNREEIDGVKLESTMIYQILAIYSTVASSLVLVVSLGAISFWMCSNGSLQCRICI

SEQ ID NO: 7043 - protein, 566 aa, Artificial Sequence; identical to SEQ ID NO: 6920
  derived and/or modified protein sequence (wt) from hemagglutinin__InfluenzaA__AEL89771

SEQ ID NO: 7044 - protein, 566 aa, Artificial Sequence; identical to SEQ ID NO: 7042
  derived and/or modified protein sequence (wt) from hemagglutinin__InfluenzaA__AEL89781

SEQ ID NO: 7045 - protein, 566 aa, Artificial Sequence; identical to SEQ ID NO: 6435
  derived and/or modified protein sequence (wt) from hemagglutinin__InfluenzaA__AEL89791

SEQ ID NO: 7046 - protein, 566 aa, Artificial Sequence
  derived and/or modified protein sequence (wt) from hemagglutinin__InfluenzaA__AEL89801
MKAILVVLLYTFATANADTLCIGYHANNSTDTVDTVLEKNVTVTHSVNLLEDKHNGKLCKLRGVAPLHLGKCNIAGWILGNPECESLSTASSWSYIVETSSSDNGTCYPGVFIDYEELREQLSSVSSFERFEIFPKTSSWPNHDSNKGVTAACPHAGAKSFYKNLIWLVKKGNSYPKLSKSYINDKGKEVLVLWGIHHPSTTADQQSLYQNADAYVFVGTSRYSKKFKPEIAVRPKVRDQEGRMNYYWTLVEPGDKITFEATGNLVVPRYAFAMERNAGSGIIISDTPVHDCNTTCQTPKGAINTSLPFQNIHPITIGKCPKYVKSTKLRLATGLRNVPSIQSRGLFGAIAGFIEGGWTGMVDGWYGYHHQNEQGSGYAADLKSTQNAIDKITNKVNSVIEKMNTQFTAVGKEFNHLEKRIENLNKKVDDGFLDIWTYNAELLVLLENERTLDYHDSNVKNLYEKVRNQLKNNAKEIGNGCFEFYHKCDNTCMESVKNGTYDYPKYSEEAKLNREEIDGVKLESTRIYQILAIYSTVASSLILVVSLGAISFWMCSNGSLQCRICI

SEQ ID NO: 7047 - protein, 566 aa, Artificial Sequence
  derived and/or modified protein sequence (wt) from hemagglutinin__InfluenzaA__AEL89812
MKAILVVLLYTFATANADTLCIGYHANNSTDTVDTVLEKNVTVTHSVNLLEDKHNGKLCKLRGVAPLHLGKCNIAGWILGNPECESLSTASSWSYIVETSSSDNGTCYPGDFIDYEELREQLSSVSSFERFEIFPKTSSWPNHDSNKGVTTACPHAGAKSFYKNLIWLVKKGNSYPKLSKSYINDKGKEVLVLWGIHHPPTSADQQSLYQNADAYVFVGTSRYSKKFKPEIAIRPKVRDQEGRMNYYWTLVEPGDKITFEATGNLVVPRYAFAMERNAGSGIIISDTPVHDCNATCQTPKGVINTSLPFQNIHPITIGKCPKYVKSTKLRLATGLRNVPSIQSRGLFGAIAGFIEGGWTGMVDGWYGYHHQNEQGSGYAADLKSTQNAIDGITNKVNSVIEKMNTQFTAVGKEFNHLEKRIENLNKKVDDGFLDIWTYNAELLVLLENERTLDYHDSNVKNLYEKVRSQLKNNAKEIGNGCFEFYHKCDNTCMESVKNGTYDYPKYSEEAKLNREEIDGVKLESTMIYQILAIYSTVASSLVLVVSLGAISFWMCSNGSLQCRICI

SEQ ID NO: 7048 - protein, 566 aa, Artificial Sequence; identical to SEQ ID NO: 6435
  derived and/or modified protein sequence (wt) from hemagglutinin__InfluenzaA__AEL89832

SEQ ID NO: 7049 - protein, 566 aa, Artificial Sequence
  derived and/or modified protein sequence (wt) from hemagglutinin__InfluenzaA__AEL89842
MKAILVVLLYTLATANADTLCIGYHANNSTDTVDTVLEKNVTVTHSVNLLEDKHDGKLCKLRGVAPLHLGKCNIAGWILGNPECESLSTASSWSYIVETSSSDNGTCYPGDFIDYEELREQLSSVSSFERFEIFPKTSSWPNHDSNKGVTAACPHAGAKSFYKNLIWLVKKGNSYPKLSKSYINDKGKEVLVLWGIHHPSTSADQQSLYQNADAYVFVGTSRYSKKFKPEIAIRPKVRDQEGRMNYYWTLVEPGDKITFEATGNLVVPRYAFAMERNAGSGIIISDTPVHDCNATCQTPKGAINTSLPFQNVHPITIGKCPKYVKSTKLRLATGLRNVPSIQSRGLFGAIAGFIEGGWTGMVDGWYGYHHQNEQGSGYAADLKSTQNAIDKITNKVNSVIEKMNTQFTAVGKEFNHLEKRIENLNKKVDDGFLDIWTYNAELLVLLENERTLDYHDSNVKNLYEKVRSQLKNNAKEIGNGCFEFYHKCDNTCMESVKNGTYDYPKYSEEAKLNREEIDGVKLESTRIYQILAIYSTVASSLVLVVSLGAISFWMCSNGSLQCRICI

SEQ ID NO: 7050 - protein, 566 aa, Artificial Sequence
  derived and/or modified protein sequence (wt) from hemagglutinin__InfluenzaA__AEL89852
MKAILVVLLYTFATANADTLCIGYHANNSTDTVDTVLEKNVTVTHSVNLLEDKHNGKLCKLRGVAPLHLGKCNIAGWILGNPECESLSTASSWSYIVETSSSDNGTCYPGDFINYEELREQLSSVSSFERFEIFPKTSSWPNHDSNKGVTAACPHAGAKSFYKNLIWLVKKGNSYPKLSKSYINDKGKEVLVLWGIHHPSTSADQQSLYQNADAYVFVGTSKYSKKFKPEIAVRPKVRDQEGRMNYYWTLVEPGDKITFEATGNLLVPRYAFAMERNAGSGIIISDTPVHDCNTTCQTPKGAINTSLPFQNIHPITIGKCPKYVKSTKLRLATGLRNVPSIQSRGLFGAIAGFIEGGWTGMVDGWYGYHHQNEQGSGYAADLKSTQNAIDKITNKVNSVIEKMNTQFTAVGKEFNHLEKRIENLNKKVDDGFLDIWTYNAELLVLLENERTLDYHDSNVKNLYEKVRSQLKNNAKEIGNGCFEFYHKCDNTCMESVKNGTYDYPKYSEEAKLNREEIDGVKLESTRIYQILAIYSTVASSLVLVVSLGAISFWMCSNGSLQCRICI

SEQ ID NO: 7051 - protein, 566 aa, Artificial Sequence; identical to SEQ ID NO: 6454
  derived and/or modified protein sequence (wt) from hemagglutinin__InfluenzaA__AEL93568

SEQ ID NO: 7052 - protein, 566 aa, Artificial Sequence; identical to SEQ ID NO: 6435
  derived and/or modified protein sequence (wt) from hemagglutinin__InfluenzaA__AEL93578

SEQ ID NO: 7053 - protein, 566 aa, Artificial Sequence
  derived and/or modified protein sequence (wt) from hemagglutinin__InfluenzaA__AEL93598
MKAILVVLLYTFATANADTLCIGYHANNSTDTVDTVLEKNVTVTHSVNLLEDKHNGKLCKLRGVAPLHLGKCNIAGWILGNPECESLSTASSWSYIVETSSSDNGTCYPGVFIDYEELREQLSSVSSFERFEIFPKTSSWPNHDSNKGVTAACPHAGAKSFYKNLIWLVKKGNSYPKLSKSYINDKGKEVLVLWGIHHPSTTADQQSLYQNADAYVFVGTSRYSKKFKPEIAIRPKVRDQEGRMNYYWTLVEPGDKITFEATGNLVVPRYAFAMERNAGSGIIISDTPVHDCNTTCQTPKGAINTSLPFQNIHPITIGKCPKYVKSTKLRLATGLRNVPSIQSRGLFGAIAGFIEGGWTGMVDGWYGYHHQNEQGSGYAADLKSTQNAIDKITNKVNSVIEKMNTQFTAVGKEFNHLEKRIENLNKKVDDGFLDIWTYNAELLVLLENERTLDYHDSNVKNLYEKVRNQLKNNAKEIGNGCFEFYHKCDNTCMESVKNGTYDYPKYSEEAKLNREEIDGVKLESTRIYQILAIYSTVASSLVLVVSLGAISFWMCSNGSLQCRICI

SEQ ID NO: 7054 - protein, 566 aa, Artificial Sequence
  derived and/or modified protein sequence (wt) from hemagglutinin__InfluenzaA__AEL93618
MKAILVVMLYTFATANADTLCIGYHANNSTDTVDTVLEKNVTVTHSVNLLEDKHNGKLCKLRGVAPLHLGKCNIAGWILGNPECESLSTASSWSYIVETSSSDNGTCYPGDFIDYEELREQLSSVSSFERFEIFPKTSSWPNHDSNKGVTAACPHAGAKSFYKNLIWLVKKGNSYPKLSKSYINDKGKEVLVLWGIHHPSTTADQQSLYQNADTYVFVGTSRYSKKFKPEIAIRPKVRDQEGRMNYYWTLVEPGDKITFEATGNLVVPRYAFAMERNAGSGIIISDTPVHDCNTTCQTPKGAINTSLPFQNIHPITIGKCPKYVKSTKLRLATGLRNVPSIQSRGLFGAIAGFIEGGWTGMVDGWYGYHHQNEQGSGYAADLKSTQNAIDKITNKVNSVIEKMNTQFTAVGKEFNHLEKRIENLNKKVDDGFLDIWTYNAELLVLLENERTLDYHDSNVKNLYEKVRNQLKNNAKEIGNGCFEFYHKCDNTCMESVKNGTYDYPKYSEEAKLNREEIDGVKLESTRIYQILAIYSTVASSLVLVVSLGAISFWMCSNGSLQCRICI

SEQ ID NO: 7055 - protein, 566 aa, Artificial Sequence; identical to SEQ ID NO: 6435
  derived and/or modified protein sequence (wt) from hemagglutinin__InfluenzaA__AEL93628

SEQ ID NO: 7056 - protein, 566 aa, Artificial Sequence; identical to SEQ ID NO: 6870
  derived and/or modified protein sequence (wt) from hemagglutinin__InfluenzaA__AEL93638

SEQ ID NO: 7057 - protein, 566 aa, Artificial Sequence
  derived and/or modified protein sequence (wt) from hemagglutinin__InfluenzaA__AEL94870
MKAILVVLLYTFATANADTLCIGYHANNSTDTVDTVLEKNVTVTHSVNLLEDKHNGKLCKLRGVAPLHLGKCNIAGWILGNPECESLSTASSWSYIVETSSSDNGTCYPGDFIDYEELREQLSSVSSFERFEIFPKTSSWPDHDSNKGVTAACPHAGAKSFYKNLIWLVKKGNSYPKLSKSYINDKGKEVLVLWGIHHPSTSADQQSLYQNADAYVFVGTSRYSKKFKPEIAIRPKVRDQEGRMNYYWTLVEPGDKITFEATGNLVVPRYAFAMERNAGSGIIISDTPAHDCNTTCQTPKGAINTSLPFQNIHPITIGKCPKYVKSTKLRLATGLRNVPSIQSRGLFGAIAGFIEGGWTGMVDGWYGYHHQNEQGSGYAADLKSTQNAIDKITNKVNSVIKKMNTQFTAVGKEFNHLEKRIENLNKKVDDGFLDIWTYNAELLVLLENERTLDYHDSNVKNLYEKVRSQLKNNAKEIGNGCFEFYHKCDNTCMESVKNGTYDYPKYSEEAKLNREEIDGVKLESTRIYQILAIYSTVASSLVLVVSLGAISFWMCSNGSLQCRICI

SEQ ID NO: 7058 - protein, 566 aa, Artificial Sequence
  derived and/or modified protein sequence (wt) from hemagglutinin__InfluenzaA__AEL95426
MKAILVVLLYTFATANADTLCIGYHANNSTDTVDTVLEKNVTVTHSVNLLEDKHNGKLCKLRGVAPLHLGKCNIAGWILGNPECESLSTASSWSYIVETSSSDNGTCYPGDFIDYEELREQLSSVSSFERFEIFPKTSSWPNHDSNKGVTAACPHAGAKSFYKNLIWLVKKGNSYPKLSKSYINDKGKEVLVLWGIHHPSTTADQQSLYQNADTYVFVGTSRYSKKFKPEIATRPKVRDQEGRMNYYWTLVEPGDKITFEATGNLVVPRYAFAMERNAGSGIIISDTPVHDCNTTCQTPKGAINTSLPFQNIHPITIGKCPKYVKSTKLRLATGLRNVPSIQSRGLFGAIAGFIEGGWTGMVDGWYGYHHQNEQGSGYAADLKSTQNAIDKITNKVNSVIEKMNTQFTAVGKEFNHLEKRIENLNKKVDDGFLDIWTYNAELLVLLENERTLDYHDSNVKNLYEKVRNQLKNNAKEIGNGCFEFYHKCDNTCMESVKNGTYDYPKYSEEAKLNREEIDGVKLESTRIYQILAIYSTVASSLVLVVSLGAISFWMCSNGSLQCRICI

SEQ ID NO: 7059 - protein, 566 aa, Artificial Sequence
  derived and/or modified protein sequence (wt) from hemagglutinin__InfluenzaA__AEL97631
MKAILVVLLYTFATANADTLCIGYHANNSTDTVDTVLEKNVTVTHSVNILEDKHNGKLCKLRGVAPLHLGKCNIAGWILGNPECESLSTASSWSYIVETSSSDNGTCYPGDFIDYEELREQLSSVSSFKRFEIFPKTSSWPNHDSNKGVTAACPHAGAKSFYKNLIWLVKKGNSYPKLSKSYINDKGKEVLVLWGIHHPSTSADQQSLYQNADAYVFVGTSRYSKKFKPEIAIRPKVRDQEGRMNYYWTLVEPGDKITFEATGNLVVPRYAFAMERNAGSGIIISDTPVHDCNTTCQTPKGAINTSLPFQNIHPTTIGKCPKYVKSTKLRLATGLRNVPSIQSRGLFGAIAGFIEGGWTGMVDGWYGYHHQNEQGSGYAADLKSTQNAIDEITNKVNSVIEKMNTQFTAVGKEFNHLEKRIENLNKKVDDGFLDIWTYNAELLVLLENERTLDYHDSNVKNLYEKVRSQLKNNAKEIGNGCFEFYHKCDNTCMESVKNGTYDYPKYSEEAKLNREEIDGVKLESTRIYQILAIYSTVASSLVLVVSLGAISFWMCSNGSLQCRICI

SEQ ID NO: 7060 - protein, 566 aa, Artificial Sequence
  derived and/or modified protein sequence (wt) from hemagglutinin__InfluenzaA__AEL99664
MKAILVVLLYTFATANADTLCIGYHANNSTDTVDTILEKNVTVTHSVNLLEDKHNGKLCKLRGVAPLHLGKCNIAGWILGNPECESLSTASSWSYIVETSSSDNGTCYPGDFIDYEELREQLSSVSSFKRFEIFPKTSSWPNHDSNKGVTAACPHAGAKSFYKNLIWLVKKGNSYPKLSKSYINDKGKEVLVLWGIHHPSTSADQQSLYQNADAYVFVGTSRYSKKFKPEIAIRPKVRDQEGRMNYYWTLVEPGDKITFEATGNLVVPRYAFAMERNAGSGIIISDTSVHDCNTTCQTPKGAINTSLPFQNIHPITIGKCPKYVKSTKLRLATGLRNVPSIQSRGLFGAIAGFIEGGWTGMVDGWYGYHHQNEQGSGYAADLKSTQNAIDEITNKVNSVIEKMNTQFTAVGKEFNHLEKRIENLNKKVDDGFLDIWTYNAELLVLLENERTLDYHDSNVKNLYEKVRSQLKNNAKEIGNGCFEFYHKCDNTCMESVKNGTYDYPKYSEEAKLNREEIDGVKLESTRIYQILAIYSTVASSLVLVVSLGAISFWMCSNGSLQCRICI

SEQ ID NO: 7061 - protein, 566 aa, Artificial Sequence
  derived and/or modified protein sequence (wt) from hemagglutinin__InfluenzaA__AEL99674
MKAILVVLLYTFATANADTLCIGYHANNSTDTVDTVLEKNVTVTHSVNLLEDKHNGKLCKLRGVAPLHLGKCNIAGWILGNPECESLSTASSWSYIVETSSSDNGTCYPGDFIDYEELREQLSSVSSFERFEIFPKTSSWPNHDSNKGVTAACPHAGAKSFYKNLIWLVKKGNSYPKLSKSYINDKGKEVLVLWGIHHPSTSADQQSLYQNADAYVFVGTSRYSKKFKPEIAIRPKVRDQEGRMNYYWTLVEPGDKIIFEATGNLVVPRYAFAMERNAGSGIIISDTPVHDCNTTCQTPKGAINTSLPFQNIHPITIGKCPKYVKSTKLRLATGLRNVPSIQSRGLFGAIAGFIEGGWTGMVDGWYGYHHQNEQGSGYAADLKSTQNAIDEITNKVNSVIEKMNTQFTAVGKEFNHLEKRIENLNKKVDDGFLDIWTYNAELLVLLENERTLDYHDSNVKNLYEKVRSQLKNNAKEIGNGCFEFYHKCDNTCMESVKNGTYDYPKYSEEAKLNREEIDGVKLESTRIYQILAIYSTVASSLVLVVSLGAISFWMCSNGSLQCRICI

SEQ ID NO: 7062 - protein, 562 aa, Artificial Sequence; identical to SEQ ID NO: 6271
  derived and/or modified protein sequence (wt) from hemagglutinin__InfluenzaA__AEM53455

SEQ ID NO: 7063 - protein, 562 aa, Artificial Sequence; identical to SEQ ID NO: 1620
  derived and/or modified protein sequence (wt) from hemagglutinin__InfluenzaA__AEM53468

SEQ ID NO: 7064 - protein, 565 aa, Artificial Sequence; identical to SEQ ID NO: 2115
  derived and/or modified protein sequence (wt) from hemagglutinin__InfluenzaA__AEM60037

SEQ ID NO: 7065 - protein, 565 aa, Artificial Sequence
  derived and/or modified protein sequence (wt) from hemagglutinin__InfluenzaA__AEM60058
MKVKLLVLLCTFTATYADTICIGYHANNSTDTVDTVLEKNVTVTHSVNLLEESHNGKLCLLKGIAPLQLGNCSVAGWILGNPECELLISKESWSYIVETPNPENGTCYPGYFADYEELREQLSSVSSFERFEIFPKESSWPNHTVTGVSASCSHNGESSFYRNLLWLTGKNGLYPNLSKSYANNKEKDVLVLWGVHHPPNIGDQRALYHTENAYVSVVSSHYSRRFTPEIAKRPKVRDQEGRINYYWTLLEPGDTIIFEANGNLIAPRFAFALGRGFGSGIITSNAPMDKCDAKCQTPQGAINSSLPFQNVHPVTIGECPKYVRSTKLRMVTGLRNIPSIQSRGLFGAIAGFIEGGWTGMVDGWYGYHHQNEQGSGYAADQKSTQNAINGITNKVNSVIEKMNTQFTAVGKEFNKLERRMENLNKKVDDGFLDIWTYNAELLVLLENERTLDFHDSNVKNLYEKVKSQLKNNAKEIGNGCFEFYHKCNDECMESVKNGTYDYPKYSEESKLNREKIDGVKLESMGVYQILAIYSTVASSLVLLVSLGAISFWMCSNGSLQCRICI

SEQ ID NO: 7066 - protein, 566 aa, Artificial Sequence
  derived and/or modified protein sequence (wt) from hemagglutinin__InfluenzaA__AEM60069
MKTIIALSYIFCLVFAQKLPGNDNSTATLCLGHHAVPNGTLVKTITNDQIEVTNATELVQSSSTGRICDSPHRILDGKNCTLIDALLGDPHCDGFQNEKWDLFVERSKAYSNCYPYDVPDYASLRSLVASSGTLEFINEDFNWTGVTQSGGSYACKRGSVKSFFSRLNWLHESEYKYPALNVTMPNNGKFDKLYIWGVHHPSTDREQTNLYVRASGRVTVSTKRSQQTVIPNIGSRPWVRGLSSRISIYWTIVKPGDILLINSTGNLIAPRGYFKIRTGKSSIMRSDAPIGTCSSECITPNGSIPNDKPFQNVNKITYGACPRYVKQNTLKLATGMRNVPEKQTRGIFGAIAGFIENGWEGMVDGWYGFRHQNSEGTGQAADLKSTQAAIDQINGKLNRLIEKTNEKFHQIEKEFSEVEGRIQDLEKYVEDTKIDLWSYNAELLVALENQHTIDLTDSEMNKLFEKTRKQLRENAEDMGNGCFKIYHKCDNACIGSIRNGTYDHDVYRDEALNNRFQIKGVELKSGYKDWILWISFAISCFLLCVVLLGFIMWACQKGNIRCNICI

SEQ ID NO: 7067 - protein, 566 aa, Artificial Sequence
  derived and/or modified protein sequence (wt) from hemagglutinin__InfluenzaA__AEM92308
MKAILVVLLYTFATANADTLCIGYHANNSTDTVDTVLEKNVTVTHSVNLLEDKHNGKLCKLRGVAPLHLGKCNIAGWILGNPECESLSTASSWSYIVETSSSDNGTCYPGDFIDYEELREQLSSVSSFERFEIFPKTSSWPNHDSNKGVTAACPHAGAKSFYKNLIWLVKKRNSYPKLSKSYINDKGKEVLVLWGIHHPSTSADQQSLYQNADAYVFVGSSRYSKKFKPEIAIRPKVRDQEGRMNYYWTLVEPGDKITFEATENLVVPRYAFAMERNAGSGIIISDTPVHDCNTTCQTPKGAINTSLPFQNIHPITIGKCPKYVKSTKLRLATGLRNVPSIQSRGLFGAIAGFIEGGWTGMVDGWYGYHHQNEQGSGYAADLKSTQNAIDEITNKVNSVIEKMNTQFTAVGKEFNHLEKRIENLNKKVDDGFLDIWTYNAELLVLLENERTLDYHDSNVKNLYEKVRSQLKNNAKEVGNGCFEFYHKCDNTCMESVKNGTYDYPKYSEEAKLNREEIDGVKLESTRIYQILAIYSTAASSLVLVVSLGAISFWMCSNGSLQCRICI

SEQ ID NO: 7068 - protein, 566 aa, Artificial Sequence
  derived and/or modified protein sequence (wt) from hemagglutinin__InfluenzaA__AEM92318
MKAILVVLLYTFATANADTLCIGYHANNSTDTVDTVLEKNVTVTHSVDLLEDKHNGKLCKLRGVAPLHLGKCNIAGWILGNPECESLSTASSWSYIVETSSSDNGTCYPGDFIDYEELREQLSSVSSFERFEIFPKTSSWPNHDSNKGVTAACPHAGEKSFYKNLIWLVKKGNSYPKLNKSYINDKGKEVLVLWGIHHPSTSADQQSLYQNADAYVFVGTSRYSKKFKPEIAIRPKVRDQEGRMNYYWTLVEPGDKITFEATGNLVVPRYAFAMERNAGSGIIISDTPIHDCNTTCQTPKGAINTSLPFQNIHPITIGKCPKYVKSTKLRLATGLRNVPSIQSRGLFGAIAGFIEGGWTGMVDGWYGYHHQNEQGSGYAADLKSTQNAIDEITNKVNSVIEKMNTQFTAVGKEFNHLEKRIENLNKKVDDGFLDIWTYNAELLVLLENERTLDYHDSNVKNLYEKVRNQLKNNAKEIGNGCFEFYHKCDNTCMESVKNGTYDYPKYSEEAKLNREEIDGVKLESTRIYQILAIYSTVASSLVLVVSLGAISFWMCSNGSLQCRICI

SEQ ID NO: 7069 - protein, 566 aa, Artificial Sequence
  derived and/or modified protein sequence (wt) from hemagglutinin__InfluenzaA__AEM92328
MKAILVVLLYTFATANADTLCIGYHANNSTDTVDTVLEKNVTVTHSVNLLEDKHNGKLCKLRGVAPLHLGKCNIAGWILGNPECESLSTASSWSYIVETSSSDNGTCYPGDFIDYEELREQLSSVSSFERFEIFPKTSSWPNHDSNKGVTAACPHAGAKSFYKNLIWLVKKGNSYPKLNISYINDKGKEVLVLWGIHHPSTTADQQSLYQNADAYVFVGTSRYSKKFKPEIAIRPKVRDQEGRMNYYWTLVEPGDKITFEATGNLVVPRYAFAMERNAGSGIIISDTPVHDCNTTCQTPKGAINTSLPFQNIHPITIGKCPKYVKSTKLRLATGLRNVPSIQSRGLFGAIAGFIEGGWTGMVDGWYGYHHQNEQGSGYAADLKSTQNAIDKITNKVNSVIEKMNTQFTAVGKEFNHLEKRIENLNKKVDDGFLDIWTYNAELLVLLENERTLDYHDSNVKNLYEKVRNQLKNNAKEIGNGCFEFYHKCDNTCMESVKNGTYDYPKYSEEAKLNREEIDGVKLESTRIYQILAIYSTVASSLVLVVSLGAISFWMCSNGSLQCRICI

SEQ ID NO: 7070 - protein, 566 aa, Artificial Sequence
  derived and/or modified protein sequence (wt) from hemagglutinin__InfluenzaA__AEM92348
MKAILVVLLYTFATANADTLCIGYHANNSTDTVDTVLEKNVTVTHSVDLLEDKHNGKLCKLRGVAPLHLGKCNIAGWILGNPECESLSTASSWSYIVETSSSDNGTCYPGDFIDYEELREQLSSVSSFERFEIFPKTSSWPNHDSNKGVTAACPHAGEKSFYKNLIWLVKKGNSYPKLNKSYINDKGKEVLVLWGIHHPSTSADQQSLYQNADAYVFVGTSRYSKKFKPEIAIRPKVRDQEGRMNYYWTLVEPGDKITFEATGNLVVPRYAFAMERNAGSGIIISDTPIHDCNTTCQTPKGAINTSLPFQNIHPITIGKCPKYVKSTKLRLATGLRNVPSIQSRGLFGAIAGFIEGGWTGMVDGWYGYHHQNEQGSGYAADLKSTQNAIDEITNKVNSVIEKMNTQFTAVGKEFNHLEKRIENLNKKVDDGFLDIWTYNAELLVLLENERTLDYHDSNVKNLYEKVKSQLKNNAKEIGNGCFEFYHKCDNTCMESVKNGTYDYPKYSEEAKLNREKIDGVKLESTRIYQILAIYSTVASSLVLVVSLGAISFWMCSNGSLQCRICI

SEQ ID NO: 7071 - protein, 566 aa, Artificial Sequence
  derived and/or modified protein sequence (wt) from hemagglutinin__InfluenzaA__AEM92358
MKAILVVLLYTFATANADTLCIGYHANNSTDTVDTVLEKNVTVTHSVNLLEDKHNGKLCKLRGVAPLHLGKCNIAGWILGNPECESLSTASSWSYIVETSSSDNGTCYPGDFINYEELREQLSSVSSFERFEIFPKTSSWPNHDSNKGVTAACPHAGAKSFYKNLIWLVKEGNSYPKLSKSYINDKGKEVLVLWGIHHPSTTTDQQSLYQNADAYVFVGTSRYSKKFKPEIAIRPKMRDQEGRMNYYWTLVEPGDKITFEATGNLVVPRYAFAMERNAGSGIIISDTPVHDCNTTCQTPKGAINTSLPFQNIHPITIGKCPKYVKSTKLRLATGLRNVPSIQSRGLFGAIAGFIEGGWTGMVDGWYGYHHQNEQGSGYAADLKSTQNAIDKITNKVNSVIEKMNTQFTAVGKEFNHLEKRIENLNKKVDDGFLDIWTYNAELLVLLENERTLDYHDSNVKNLYEKVRNQLKNNAKEIGNGCFEFYHKCDNTCMESVKNGTYDYPKYSEEAKLNREEIDGVKLESTRIYQILAIYSTVASSLVLVVSLGAISFWMCSNGSLQCRICI

SEQ ID NO: 7072 - protein, 566 aa, Artificial Sequence
  derived and/or modified protein sequence (wt) from hemagglutinin__InfluenzaA__AEM92368
MKAILVVLLYTFATANADTLCIGYHANNSTDTVDTVLEKNVTVTHSVNLLEDKHNGKLCKLRGVAPLHLGKCNIAGWILGNPECESLSTASSWSYIVETSSSDNGTCYPGDFIDYEELREQLSSVSSFERFEIFPKTSSWPNHDSNKGVTAACPHAGAKSFYKNLIWLVKKGNSYPKLNKSYINDKGKEVLVLWGIHHPSTTADQQSLYQNADAYVFVGTSRYSKKFKPEIAIRPKVRDQEGRMNYYWTLVEPGDKITFEATGNLVVPRYAFAMERNAGSGIIISDTPVHDCNTTCQTPKGAINTSLPFQNIHPITIGKCPKYVKSTKLRLATGLRNVPSIQSRGLFGAIAGFIEGGWTGMVDGWYGYHHQNEQGSGYAADLKSTQNAIDKITNKVNSVIEKMNTQFTAVGKEFNHLEKRIENLNKKVDDGFLDIWTYNAELLVLLENERTLDYHDSNVKNLYEKVRNQLKNNAKEIGNGCFEFYHKCDNTCMESVKNGTYDYPKYSEEAKLNREEIDGVKLESTRIYQILAIYSTVASSLVLVVSLGAISFWMCSNGSLQCRICI

SEQ ID NO: 7073 - protein, 566 aa, Artificial Sequence
  derived and/or modified protein sequence (wt) from hemagglutinin__InfluenzaA__AEM92378
MKAILVVLLYTFATANADTLCIGYHANNSTDTVDTVLEKNVTVTHSVNLLEDKHNGKLCKLRGVAPLHLGKCNIAGWILGNPECESLSTASSWSYIVETSSSDNGTCYPGDFIDYEELREQLNSVSSFERFEIFPKTSSWPNHDSNKGVTAACPHAGAKSFYKNLIWLVKKGNSYPKLNKSYINDKGKEVLVLWGIHHPSTTADQQSLYQNADAYVFVGTSRYSKKFKPEIAIRPKVRDQEGRMNYYWTLVEPGDKITFEATGNLVVPRYAFAMERNAGSGIIISDTPVHDCNTTCQTPKGAINTSLPFQNIHPITIGKCPKYVKSTKLRLATGLRNVPSIQSRGLFGAIAGFIEGGWTGMVDGWYGYHHQNEQGSGYAADLKSTQNAIDKITNKVNSVIEKMNTQFTAVGKEFNHLEKRIENLNKKVDDGFLDIWTYNAELLVLLENERTLDYHDSNVKNLYEKVRNQLKNNAKEIGNGCFEFYHKCDNTCMESVKNGTYDYPKYSEEAKLNREEIDGVKLESTRIYQILAIYSTVASSLVLVVSLGAISFWMCSNGSLQCRICI

SEQ ID NO: 7074 - protein, 566 aa, Artificial Sequence
  derived and/or modified protein sequence (wt) from hemagglutinin__InfluenzaA__AEM92407
MKAILVVLLYTFATANADTLCIGYHANNSTDTVDTVLEKNVTVTHSVNLLEDKHNGKLCKLRGVAPLHLGKCNIAGWILGNPECESLSTANSWSYIVETSSSDNGTCYPGDFIDYEELREQLSSVSSFERFEIFPKTNSWPNHDSNKGVTAACPHAGAKSFYKNLIWLVKKGNSYPKLSKSYINDKGKEVLVLWGIHHPSTSTDQQSLYQNADAYVFVGTSRYSKKFKPEIAIRPKVRNQEGRMNYYWTLVEPGDKITFEATGNLVVPRYAFTIERNAGSGIIISDTPIHDCNTTCQTPKGAINTSLPFQNIHPITIGKCPKYVKSTKLRLATGLRNVPSIQSRGLFGAIAGFIEGGWTGMVDGWYGYHHQNEQGSGYAADLKSTQNAIDEITNKVNSVIEKMNTQFTAVGKEFNHLEKRIENLNKKVDDGFLDIWTHNAELLVLLENERTLDYHDSNVKNLYEKVRSQLKNNAKEIGNGCFEFYHKCDNTCMESVKNGTYDYPKYSEEAKLNREEIDGVKLESTRIYQILAIYSTVASSLVLVVSLGAISFWMCSMGSLQCRICI

SEQ ID NO: 7075 - protein, 566 aa, Artificial Sequence
  derived and/or modified protein sequence (wt) from hemagglutinin__InfluenzaA__AEM92417
MKAILVVLLYTFATANADTLCIGYHANNSTDTVDTVLEKNVTVTHSVNILEDKHNGKLCKLRGVAPLHLGKCNIAGWILGNPECESLSTASSWSYIVETSSSDNGTCYPGDFIDYEELREQLSSVSSFERFEIFPKASSWPNHDSNKGVTAACPHAGAKSFYKNLIWLVKKENSYPKLSKSYINDKGKEVLVLWGIHHPSTSADQQSLYQNADAYVFVGSSRYSKKFKPEIAIRPKVRDQEGRMNYYWTLVEPGDKITFEATGNLVVPRYAFAMERNAGSGIIISDTPVHDCNTTCQTPKGAINTSLPFQNIHPITIGKCPKYVKSTKLRLATGLRNVPSIQSRGLFGAIAGFIEGGWTGMVDGWYGYHHQNEQGSGYAADLKSTQNAIDEITNKVNSVIEKMNTQFTAVGKEFNHLEKRIENLNKKVDDGFLDIWTYNAELLVLLENERTLDYHDSNVKNLYEKVRSQLKNNAKEIGNGCFEFYHKCDNTCMESVKNGTYDYPKYSEEAKLNREEIDGVKLESTRIYQILAIYSTVASSLVLVVSLGAISFWMCSNGSLQCRICI

SEQ ID NO: 7076 - protein, 566 aa, Artificial Sequence
  derived and/or modified protein sequence (wt) from hemagglutinin__InfluenzaA__AEM92428
MKAILVVLLYTFATANADTLCIGYHANNSTDTVDTVLEKNVTVTHSVNLLEDKHNGKLCKLRGVAPLHLGKCNIAGWILGNPECESLSTASSWSYIVETSSSDNGTCYPGDFIDYEELREQLSSVSSFERFEIFPKTSSWPNHDSNKGVTAACPHAGAKSFYKNLIWLVKKGNSYPKLSKSYINDKGKEVLVLWGIHHPSTSADQQSLYQNADAYVFVGTSRYSKKFKPEIAIRPKVRDQEGRMNYYWTLVEPGDKITFEATGNLVVPRYAFAMERNAGSGIIISDTPVHDCNTTCQTPKGAINTSLPFQNIHPITIGKCPKYVKSTKLRLATGLRNVPSIQSRGLFGAIAGFIEGGWTGMVDGWYGYHHQNEQGSGYAADLKSTQNAIDEITNKVNSVIEKMNTQFTAVGKEFNHLEKRIENLNKKVDDGFLDIWTYNAELLVLLENERTLDYHDSNVKNLYEKVRSQLKNNAKEIGNGCFEFYHKCDNMCMESVKNGTYDYPKYSEEAKLNREEIDGVKLESTRIYQILAIYSTVASSLVLVVSLGAISFWMCSNGSLQCRICI

SEQ ID NO: 7077 - protein, 566 aa, Artificial Sequence
  derived and/or modified protein sequence (wt) from hemagglutinin__InfluenzaA__AEM92438
MKAILVVLLYTFATANADTLCIGYHANNSTDTVDTVLEKNVTVTHSVNLLEDKHNGKLCKLRGVAPLHLGKCNIAGWILGNPECESLSTASSWSYIVETSSSDNGTCYPGDFIDYEELREQLSSVSSFERFEIFPKTSSWPNHDSNKGVTAACPHAGAKGFYKNLIWLVKKGNSYPKLSKSYINDKGKEVLVLWGIHHPSTTADQQSLYQNADTYVFVGTSRYSKKFKPEIAIRPKVRDQEGRMNYYWTLVEPGDKITFEATGNLVVPRYAFAMERNAGSGIIISDTPVHDCNTTCQTPKGAINTSLPFQNIHPITIGKCPKYVKSTKLRLATGLRNVPSIQSRGLFGAIAGFIEGGWTGMVDGWYGYHHQNEQGSGYAADLKSTQNAIDKITNKVNSVIEKMNTQFTAVGKEFNHLEKRIENLNKKVDDGFLDIWTYNAELLVLLENERTLDYHDSNVKNLYEKIRNQLKNNAKEIGNGCFEFYHKCDNTCMESVKNGTYDYPKYSEEAKLNREEIDGVKLESTRIYQILAIYSTVASSLVLVVSLGAISFWMCSNGSLQCRICI

SEQ ID NO: 7078 - protein, 566 aa, Artificial Sequence; identical to SEQ ID NO: 6809
  derived and/or modified protein sequence (wt) from hemagglutinin__InfluenzaA__AEM92448

SEQ ID NO: 7079 - protein, 566 aa, Artificial Sequence; identical to SEQ ID NO: 6809
  derived and/or modified protein sequence (wt) from hemagglutinin__InfluenzaA__AEM92458

SEQ ID NO: 7080 - protein, 566 aa, Artificial Sequence
  derived and/or modified protein sequence (wt) from hemagglutinin__InfluenzaA__AEM92468
MKAILVVLLYTFATANADTLCIGYHANNSTDTVDTVLEKNVTVTHSVNLLEDKHNGKLCKLRGVAPLHLGKCNIAGWILGNPECESLSTASSWSYIVETSSSDNGTCYPGDFINYEELREQLSSVSSFERFEIFPKTSSWPNHDSNKGVTAACPHAGAKSFYKNLIWLVKKGNSYPKLSKSYINDKGKEVLVLWGIHHPSTSADQQSLYQNADAYVFVGTSKYSKEFKPEIAVRPKVRDQEGRMNYYWTLVEPGDKITFEATGNLLVPRYAFAMERNAGSGIIISDTPVHDCNTICQTPKGAINTSLPFQNIHPITIGKCPKYVKSTKLRLATGLRNVPSIQSRGLFGAIAGFIEGGWTGMVDGWYGYHHQNEQGSGYAADLKSTQNAIDKITNKVNSVIEKMNTQFTAVGKEFNHLEKRIENLNKKVDDGFLDIWTYNAELLVLLENERTLDYHDSNVKNLYEKVRSQLKNNAKEIGNGCFEFYHKCDNTCMESVKNGTYDYPKYSEEAKLNREEIDGVKLESTRIYQILAIYSTVASSLVLVVSLGAISFWMCSNGSLQCRICI

SEQ ID NO: 7081 - protein, 566 aa, Artificial Sequence
  derived and/or modified protein sequence (wt) from hemagglutinin__InfluenzaA__AEM92478
MKAILVVLLYTFATANADTLCIGYHANNSTDTVDTVLEKNVTVTHSVNLLEDKHNGKLCKLRGVAPLHLGKCNIAGWILGNPECESLSTASSWSYIVETSSSDNGTCYPGDFINYEELREQLSSVSSFERFEIFPKTSSWPNHDSNKGVTAACPHAGAKSFYKNLIWLVKKGNSYPKLSKSYINDKGKEVLVLWGIHHPSTSADQQSLYQNADAYVFVGTSKYSKKFKPEIAVRPKVRDQEGRMNYYWTLVEPGDKITFEATGNLLVPRYAFAMERNAGSGIIISDTPVHDCNTICQTPKGAINTSLPFQNIHPITIGKCPKYVKSTKLRLATGLRNVPSIQSRGLFGAIAGFIEGGWTGMVDGWYGYHHQNEQGSGYAADLKSTQNAIDKITNKVNSVIEKMNTQFTAVGKEFNHLEKRIENLNKKVDDGFLDIWTYNAELLVLLENERTLDYHDSNVKNLYEKVRSQLKNNAKEIGNGCFEFYHKCDNTCMESVKNGTYDYPKYSEEAKLNREEIDGVKLESTRIYQILAIYSTVASSLVLVVSLGAISFWMCSNGSLQCRICI

SEQ ID NO: 7082 - protein, 566 aa, Artificial Sequence
  derived and/or modified protein sequence (wt) from hemagglutinin__InfluenzaA__AEM92498
MKAILVVLLYTFATANADTLCIGYHANNSTDTVDTVLEKNVTVTHSVNLLEDKHNGKLCKLRGVAPLHLGKCNIAGWILGNPECESLSTANSWSYIVETSSSDNGTCYPGDFIDYEELREQLSSVSSFERFEIFPKTNSWPNHDSNKGVTAACPHAGAKSFYKNLIWLVKKGNSYPKLSKSYINDKGKEVLVLWGIHHPSTSADQQSLYQNADAYVFVGTSRYSKKFKPEIAIRPKVRDQEGRMNYYWTLVEPGDKITFEATGNLVVPRYAFAMERNAGSGIIISDTPAHDCNTTCQTPKGAINTSLPFQNIHPITIGKCPKYVKSTKLRLATGLRNVPSIQSRGLFGAIAGFIEGGWTGMVDGWYGYHHQNEQGSGYAADLKSTQNAIDKITNKVNSVIEKMNTQFTAVGKEFNHLEKRIENLNKKVDDGFLDIWTYNAELLVLLENERTLDYHDSNVKNLYEKVRSQLKNNAKEIGNGCFEFYHKCDNTCMESVKNGTYDYPKYSEEAKLNREEIDGVKLESTRIYQILAIYSTVASSLVLVVSLGAISFWMCSNGSLQCRICI

SEQ ID NO: 7083 - protein, 566 aa, Artificial Sequence
  derived and/or modified protein sequence (wt) from hemagglutinin__InfluenzaA__AEM92518
MKAILVVLLYTFATANADTLCIGYHANNSTDTVDTVLEKNVTVTHSVNLLEDKHNGKLCKLRGVAPLHLGKCNIAGWILGNPECESLSTASSWSYIVETSSSDNGTCYPGDFIDYEELREQLSSVSSFERFEIFPKTSSWPNHDSNKGVTTACPHAGAKSFYKNLIWLVKKGNSYPKLSKSYINDKRKEVLVLWGIHHPPTSADQQSLYQNADAYVFVGTSRYSKKFKPEIAIRPKVRDQEGRMNYYWTLVEPGDKITFEATGNLVVPRYAFAMERNAGSGIIISDTPVHDCNATCQTPKGAINTSLPFQNIHPITIGKCPKYVKSTKLRLATGLRNVPSIQSRGLFGAIAGFIEGGWTGMVDGWYGYHHQNEQGSGYAADLKSTQNAIDEITNKVNSVIEKMNTQFTAVGKEFNHLEKRIENLNKKVDDGFLDIWTYNAELLVLLENERTLDYHDSKVKNLYEKVRSQLKNNAKEIGNGCFEFYHKCDNTCMESVKNGTYDYPKYSEEAKLNREEIDGVKLESTRIYQILAIYSTVASSLVLVVSLGAISFWMCSNGSLQCRICI

SEQ ID NO: 7084 - protein, 566 aa, Artificial Sequence
  derived and/or modified protein sequence (wt) from hemagglutinin__InfluenzaA__AEM92528
MKAILVVLLYTFATANADTLCIGYHANNSTDTVDTVLEKNVTVTHSVNLLEDKHNGKLCKLRGVAPLHLGKCNIAGWILGNPECESLSTASSWSYIVETSSSDNGTCYPGDFIDYEELREQLSSVSSFERFEIFPKTSSWPNHDSNKGVTAACPHAGAKSFYKNLIWLVKKGNSYPKLNKSYINDKGKEVLVLWGIHHPSTSADQQSLYQNADAYVFVGTSRYSKKFKPEIAIRPKVRDQEGRMNYYWTLVEPGDKITFEATGNLVVPRYAFAMERNAGSGIIISDTPVHDCNTTCQTPKGAINTSLPFQNIHPITIGKCPKYVKSTKLRLATGLRNVPSIQSRGLFGAIAGFIEGGWTGMVDGWYGYHHQNEQGSGYAADLKSTQNAIDKITNKVNSVIEKMNTQFTAVGKAFNHLEKRIENLNKKVDDGFLDIWTYNAELLVLLENERTLDYHDSNVKNLYEKVRNQLKNNAKEIGNGCFEFYHKCDNTCMESVKNGTYDYPKYSEEAKLNREEIDGVKLESTRIYQILAIYSTVASSLVLVVSLGAISFWMCSNGSLQCRICI

SEQ ID NO: 7085 - protein, 566 aa, Artificial Sequence
  derived and/or modified protein sequence (wt) from hemagglutinin__InfluenzaA__AEM92548
MKAILVVLLYTFATATADTLCIGYHANNSTDTVDTVLEKNVTVTHSVNLLEDKHNGKLCKLRGVAPLHLGKCNIAGWILGNPECESLSTASSWSYIVETSSSDNGTCYPGDFINYEELREQLSSVSSFERFEIFPKTSSWPNHDSNKGVTAACPHAGAKSFYKNLIWLVKKGNSYPKLSKSYINDKGKEVLVLWGIHHPSTSADQQSLYQNADAYVFVGTSRYSKKFKPEIAIRPKVRDQEGRMNYYWTLVEPGDKITFEATGNLVVPRYAFAMERNAGSGIIISDTPVHDCNTTCQTPKGAINTSLPFQNIHPITIGKCPKYVKSTKLRLATGLRNVPSIQSRGLFGAIAGFIEGGWTGMVDGWYGYHHQNEQGSGYAADLKSTQNAIDKITNKVNSVIEKMNTQFTAVGKEFNHLEKRIENLNKKVDDGFLDIWTYNAELLVLLENERTLDYHDSNVKNLYEKVRNQLKNNAKEIGNGCFEFYHKCDNTCMESVKNGTYDYPKYSEEAKLNREEIDGVKLESTRIYQILAIYSTVASSLVLVVSLGAISFWMCSNGSLQCRICI

SEQ ID NO: 7086 - protein, 566 aa, Artificial Sequence
  derived and/or modified protein sequence (wt) from hemagglutinin__InfluenzaA__AEM92558
MKAILVVLLYTFATANADTLCIGYHANNSTDTVDTVLEKNVTVTHSVNLLEDKHNGKLCKLRGVAPLHLGKCSIAGWILGNPECESLSTASSWSYIVETSSSDNGTCYPGDFINYEELREQLSSVSSFERFEIFPKTSSWPNHDSNKGVTAACPHAGAKSFYKNLIWLVKKGNSYPKLSKSYINDKGKEVLVLWGIHHPSTTADQQSLYQNADAYVFVGTSRYSKKFKPEIAIRPKVRDQEGRMNYYWTLVEPGDKITFEATGNLVVPRYAFAMERNAGSGIIISDTPVHDCNTTCQTPKGAINTSLPFQNIHPITIGKCPKYVKSTKLRLATGLRNVPSIQSRGLFGAIAGFIEGGWTGMVDGWYGYHHQNEQGSGYAADLKSTQNAIDKITNKVNSVIEKMNTQFTAVGKEFNHLEKRIENLNKKVDDGFLDIWTYNAELLVLLENERTLDYHDSNVKNLYEKVRNQLKNNAKEIGNGCFEFYHKCDNTCMESVKNGTYDYPKYSEEAKLNREEIDGVKLESTRIYQILAIYSTVASSLVLVVSLGAISFWMCSNGSLQCRICI

SEQ ID NO: 7087 - protein, 566 aa, Artificial Sequence; identical to SEQ ID NO: 7086
  derived and/or modified protein sequence (wt) from hemagglutinin__InfluenzaA__AEM92568

SEQ ID NO: 7088 - protein, 566 aa, Artificial Sequence
  derived and/or modified protein sequence (wt) from hemagglutinin__InfluenzaA__AEM92578
MKAILVVLLYTFATANADTLCIGYHANNSTDTVDTVLEKNVTVTHSVNLLEDKHNGKLCKLRGVAPLHLGKCNIAGWILGNPECESLSTASSWSYIVETSISDNGTCYPGDFINYEELREQLSSVSSFERFEIFPKTSSWPNHDSNKGVTAACPHAGAKSFYKNLIWLVKKGNSYPKLSKSYINDKGKEVLVLWGIHHPSTSADQQSLYQNADAYVFVGTSRYSKKFKPEIAIRPKVRDQEGRMNYYWTLVEPGDKITFEATGNLVVPRYAFAMERNAGSGIIISDTPVHDCNTTCQTPKGAINTSLPFQNIHPITIGKCPKYVKSTKLRLATGLRNVPSIQSRGLFGAIAGFIEGGWTGMVDGWYGYHHQNEQGSGYAADLKSTQNAIDKITNKVNSVIEKMNTQFTAVGKEFNHLEKRIENLNKKVDDGFLDIWTYNAELLVLLENERTLDYHDSNVKNLYEKVRNQLKNNAKEIGNGCFEFYHKCDNTCMESVKNGTYDYPKYSEEAKLNREEIDGVKLESTRIYQILAIYSTVASSLVLVVSLGAISFWMCSNGSLQCRICI

SEQ ID NO: 7089 - protein, 566 aa, Artificial Sequence
  derived and/or modified protein sequence (wt) from hemagglutinin__InfluenzaA__AEM92608
MKAILVVLLYTFATANADTLCIGYHANNSTDTVDTVLEKNVTVTHSVNLLEDKHNGKLCKLRGVAPLHLGKCNIAGWILGNPECESLSTASSWSYIVETSSSDNGTCYPGDFIDYEELREQLSSVSSFERFEIFPKTSSWPNHDSNKGVTAACPHAGAKSFYKNLIWLVKKGNSYPKLSKSYINDKGKEVLVLWGIHHPSTTADQQSLYQNADAYVFVGTSRYSKKFKPEIAIRPKVRDQEGRMNYYWTLVEPGDKITFEATGNLVVPRYAFAMERNAGSGIIISDTPVHDCNTTCQTPKGAINTSLPFQNIHPITIGKCPKYVKSTKLRLATGLRNVPSIQSRGLFGAIAGFIEGGWTGMVDGWYGYHHQNEQGSGYAADLKSTQNAIDKITNKVNSVIEKMNTQFTAVGKEFNHLEKRIENLNKKVDDGFLDIWTYNAELLVLLENERTLDYHDSNVKNLYEKVRNQLKNNAKEIGNGCFEFYHKCDNTCMESVKNGTYDYPKYSEEAKLNREEIDGVKLESTRIYQILAIYSTVASSLVLVVSLGAISFWMCSNGSLQCRICI

SEQ ID NO: 7090 - protein, 566 aa, Artificial Sequence
  derived and/or modified protein sequence (wt) from hemagglutinin__InfluenzaA__AEM92618
MKAILVVLLYTFATANADTLCIGYHANNSTDTVDTVLEKNVTVTHSVNLLEDKHNGKLCKLRGVAPLHLGKCNIAGWILGNPECESLSTANSWSYIVETSSSDNGTCYPGDFIDYEELREQLSSVSSFERFEIFPKTNSWPNHDSNKGVTAACPHAGAKSFYKNLIWLVKTGNSYPKLSKSYINDKGKEVLVLWGIHHPSTSADQQSLYQNADAYVFVGTSRYSRKFKPEIAIRPKVRDQEGRMNYYWTLVEPGDKITFEATGNLVVPRYAFAMERNAGSGIIISDTPAHDCNTTCQTPKGAINTSLPFQNIHPITIGKCPKYVKSTKLRLATGLRNVPSIQSRGLFGAIAGFIEGGWTGMVDGWYGYHHQNEQGSGYAADLKSTQNAIDKITNKVNSVIEKMNTQFTAVGKEFNHLEKRIENLNKKVDDGFLDIWTYNAELLVLLENERTLDYHDSNVKNLYEKVRSQLKNNAKEIGNGCFEFYHKCDNTCMESVKNGTYDYPKYSEEAKLNREEIDGVKLESTRIYQILAIYSTVASSLVLVVSLGAISFWMCSNGSLQCRICI

SEQ ID NO: 7091 - protein, 566 aa, Artificial Sequence
  derived and/or modified protein sequence (wt) from hemagglutinin__InfluenzaA__AEM92638
MKAILVVLLYTFATANADTLCIGYHANNSTDTVDTVLEKNVTVTHSVNILEDKHNGKLCKLRGVAPLHLGKCNIAGWILGNPECESLSTASSWSYIVETSSSDNGTCYPGDFIDYEELREQLSSVSSFERFEIFPKTSSWPNHDTNKGVTAACPHAGAKSFYKNLIWLVKKGNSYPKLSKSYINDKGKEVLVLWGIHHPSTSADQQSLYQNADAYVFVGSSRYSKKFKPEIAIRPKVRDQEGRMNYYWTLVEPGDKITFEATGNLVVPRYAFAMEKNAGSGIIISDTPVHDCNTTCQTPKGAINTSLPFQNIHPITIGKCPKYVKSTKLRLATGLRNVPSIQSRGLFGAIAGFIEGGWTGMVDGWYGYHHQNEQGSGYAADLKSTQNAIDEITNKVNSVIEKMNTQFTAVGKEFNHLEKRIENLNKKVDDGFLDIWTYNAELLVLLENERTLDYHDSNVKNLYEKVRSQLKNNAKEVGNGCFEFYHKCDNTCMESVKNGTYDYPKYSEEAKLNREEIDGVKLESTRIYQILAIYSTAASSLVLVVSLGAISFWMCSNGSLQCRICI

SEQ ID NO: 7092 - protein, 566 aa, Artificial Sequence
  derived and/or modified protein sequence (wt) from hemagglutinin__InfluenzaA__AEM92648
MKAILVVLLYTFATANADTLCIGYHANNSTDTVDTVLEKNVTVTHSVNILEDKHNGKLCKLRGVAPLHLGKCNIAGWILGNPECESLSTASSWSYIVETSSSDNGTCYPGDFIDYEELREQLSSVSSFERFEIFPKTSSWPNHDTNKGVTAACPHAGAKSFYKNLIWLVKEGNSYPKLSKSYINDKGKEVLVLWGIHHPSTSADQQSLYQNADAYVFVGSSRYSKKFKPEIAIRPKVRDQEGRMNYYWTLVEPGDKITFEATGNLVVPRYAFAMEKNAGSGIIISDTPVHDCNTTCQTPKGAINTSLPFQNIHPITIGKCPKYVKSTKLRLATGLRNVPSIQSRGLFGAIAGFIEGGWTGMVDGWYGYHHQNEQGSGYAADLKSTQNAIDEITNKVNSVIEKMNTQFTAVGKEFNHLEKRIENLNKKVDDGFLDIWTYNAELLVLLENERTLDYHDSNVKNLYEKVRSQLKNNAKEVGNGCFEFYHKCDNTCMESVKNGTYDYPKYSEEAKLNREEIDGVKLESTRIYQILAIYSTAASSLVLVVSLGAISFWMCSNGSLQCRICI

SEQ ID NO: 7093 - protein, 566 aa, Artificial Sequence; identical to SEQ ID NO: 5533
  derived and/or modified protein sequence (wt) from hemagglutinin__InfluenzaA__AEM98407

SEQ ID NO: 7094 - protein, 566 aa, Artificial Sequence; identical to SEQ ID NO: 5533
  derived and/or modified protein sequence (wt) from hemagglutinin__InfluenzaA__AEM98418

SEQ ID NO: 7095 - protein, 566 aa, Artificial Sequence; identical to SEQ ID NO: 5533
  derived and/or modified protein sequence (wt) from hemagglutinin__InfluenzaA__AEM98429

SEQ ID NO: 7096 - protein, 566 aa, Artificial Sequence
  derived and/or modified protein sequence (wt) from hemagglutinin__InfluenzaA__AEN55398
MKAILVVLLYTFATANADTLCIGYHANNSTDTVDTVLEKNVTVTHSVNLLEDKHNGKLCKLRGVAPLHLGKCNIAGWILGNPECESLSTASSWSYIVETSSSDNGTCYPGNFIDYEELREQLSSVSSFERFEIFPKTSSWPDHDSNKGVTAACPHAGAKSFYKNLIWLVKKGNSYPKLSKSYINDKGKEVLVLWGIHHPSTSADQQSLYQNADAYVFVGTSRYSKKFKPEIAIRPKVRDQEGRMNYYWTLVEPGDKITFEATGNLVAPRYAFAMERNAGSGIIISDTPVHDCNTTCQTPKGAINTSLPFQNIHPITIGKCPKYVKSTKLRLVTGLRNVPSIQSRGLFGAIAGFIEGGWTGMVDGWYGYHHQNEQGSGYAADLKSTQNAIDKITNKVNSVIEKMNTQFTAVGKEFNHLEKRIENLNKKVDDGFLDIWTYNAELLVLLENERTLDYHDSNVKNLYEKVRSQLKNNAKEIGNGCFEFYHKCDNTCMESVKNGTYDYPKYSEEAKLNREEIDGVKLESTRIYQILAIYSTVASSLVLVVSLGAISFWMCSNGSLQCRICI

SEQ ID NO: 7097 - protein, 566 aa, Artificial Sequence; identical to SEQ ID NO: 6920
  derived and/or modified protein sequence (wt) from hemagglutinin__InfluenzaA__AEN55408

SEQ ID NO: 7098 - protein, 566 aa, Artificial Sequence; identical to SEQ ID NO: 6435
  derived and/or modified protein sequence (wt) from hemagglutinin__InfluenzaA__AEN55418

SEQ ID NO: 7099 - protein, 566 aa, Artificial Sequence; identical to SEQ ID NO: 5584
  derived and/or modified protein sequence (wt) from hemagglutinin__InfluenzaA__AEN55463

SEQ ID NO: 7100 - protein, 566 aa, Artificial Sequence
  derived and/or modified protein sequence (wt) from hemagglutinin__InfluenzaA__AEN55473
MKAILVVLLYTFATANADTLCIGYHANNSTDTVDTVLEKNVTVTHSVNLLEDKHNGKLCKLRGVAPLHLGKCNIAGWILGNPECESLSTASSWSYIVETSSSDNGTCYPGDFIDYEELREQLSSVSSFERFEIFPKTSSWPNHDSNKGVTAACPHAGAKSFYKNLIWLVKKGNSYPKLSKSYINDKGKEVLVLWGIHHPSTTTDQQSLYQTADTYVFVGTSRYSKKFKPEIAIRPKVRDQEGRMNYYWTLVEPGDKITFEATGNLVVPRYAFAMERNAGSGIIISDTPVHDCNTTCQTPKGAINTSLPFQNIHPITIGKCPKYVKSTKLRLATGLRNVPSIQSRGLFGAIAGFIEGGWTGMVDGWYGYHHQNEQGSGYAADLKSTQNAIDKITNKVNSVIEKMNTQFTAVGKEFNHLEKRIENLNKKVDDGFLDIWTYNAELLVLLENERTLDYHDSNVKNLYEKVRNQLKTNAKEIGNGCFEFYHKCDNTCMESVKNGTYDYPKYSEEAKLNREEIDGVKLESTRIYQILAIYSTVASSLVLVVSLGAISFWMCSNGSLQCRICI

SEQ ID NO: 7101 - protein, 566 aa, Artificial Sequence; identical to SEQ ID NO: 6435
  derived and/or modified protein sequence (wt) from hemagglutinin__InfluenzaA__AEN55483

SEQ ID NO: 7102 - protein, 566 aa, Artificial Sequence; identical to SEQ ID NO: 7042
  derived and/or modified protein sequence (wt) from hemagglutinin__InfluenzaA__AEN55493

SEQ ID NO: 7103 - protein, 566 aa, Artificial Sequence; identical to SEQ ID NO: 6435
  derived and/or modified protein sequence (wt) from hemagglutinin__InfluenzaA__AEN55503

SEQ ID NO: 7104 - protein, 566 aa, Artificial Sequence
  derived and/or modified protein sequence (wt) from hemagglutinin__InfluenzaA__AEN55513
MKAILVVLLYTFATANADTLCIGYHANNSTDTVDTVLEKNVTVTHSVNLLEDKHNGKLCKLRGVAPLHLGKCNIAGWILGNPECESLSTASSWSYIVETSSSDNGTCYPGDFIDYEELREQLSSVSSFERFEIFPKTSSWPNHDSNKGVTAACPHAGAKSFYKNLIWLVKKGNSYPKLSKSYINDKGKEVLVLWGIHHPSTTADQQNLYQNADTYVFVGTSRYSKKFKPEIAIRPKVRDQEGRMNYYWTLVEPGDKITFEATGNLVVPRYAFAMERNAGSGIIISDTPVHDCNTTCQTPKGAINTSLPFQNIHPITIGKCPKYVKSTKLRLATGLRNVPSIQSRGLFGAIAGFIEGGWTGMVDGWYGYHHQNEQGSGYAADLKSTQNAIDKITNKVNSVIEKMNTQFTAVGKEFNHLEKRIENLNKKVDDGFLDIWTYNAELLVLLENERTLDYHDSNVKNLYEKVRNQLKNNAKEIGNGCFEFYHKCDNTCMESVKNGTYDYPKYSEEAKLNREEIDGVKLESTRIYQILAIYSTVASSLVLVVSLGAISFWMCSNGSLQCRICI

SEQ ID NO: 7105 - protein, 566 aa, Artificial Sequence; identical to SEQ ID NO: 6435
  derived and/or modified protein sequence (wt) from hemagglutinin__InfluenzaA__AEN55523

SEQ ID NO: 7106 - protein, 566 aa, Artificial Sequence; identical to SEQ ID NO: 5224
  derived and/or modified protein sequence (wt) from hemagglutinin__InfluenzaA__AEN68904

SEQ ID NO: 7107 - protein, 566 aa, Artificial Sequence; identical to SEQ ID NO: 2669
  derived and/or modified protein sequence (wt) from hemagglutinin__InfluenzaA__AEN68905

SEQ ID NO: 7108 - protein, 566 aa, Artificial Sequence; identical to SEQ ID NO: 2669
  derived and/or modified protein sequence (wt) from hemagglutinin__InfluenzaA__AEN68906

SEQ ID NO: 7109 - protein, 566 aa, Artificial Sequence; identical to SEQ ID NO: 3771
  derived and/or modified protein sequence (wt) from hemagglutinin__InfluenzaA__AEN68907

SEQ ID NO: 7110 - protein, 566 aa, Artificial Sequence; identical to SEQ ID NO: 2669
  derived and/or modified protein sequence (wt) from hemagglutinin__InfluenzaA__AEN68908

SEQ ID NO: 7111 - protein, 566 aa, Artificial Sequence
  derived and/or modified protein sequence (wt) from hemagglutinin__InfluenzaA__AEN68909
MKAILVVLLYTFATANADTLCVGYHANNSTDTVDTVLEKNVTVTHSVNLLEDKHNGKLCKLRGVAPLHLGKCNIAGWILGNPECESLSTASSWSYIVETSSSDNGTCYPGDFIDYEELREQLSSVSSFERFEIFPKTSSWPNHDSNKGVTAACPHAGAKSFYKNLIWLVKKGNSYPKLSKSYINDKGKEVLVLWGIHHPSTSADQQSLYQNADAYVFVGTSRYSKKFKPEIAIRPKVRDQEGRMNYYWTLVEPGDKITFEATGNLVVPRYAFAMERNAGSGIIISDTPVHDCNTTCQTPKGAINTSLPFQNIHPITIGKCPKYVKSTKLRLATGLRNVPSIQSRGLFGAIAGFIEGGWTGMVDGWYGYHHQNEQGSGYAADLKSTQNAIDEITNKVNSVIEKMNTQFTAVGKEFNHLEKRIENLNKKVDDGFLDIWTYNAELLVLLENERTLDYHDSNVKNLYEKVRSQLKNNAKEIGNGCFEFYHKCDNTCMESVKNGTYDYPKYSEEAKLNREEIDGVKLESTRIYQILAIYSTVASSLVLVVSLGAISFWMCSNGSLQCRICI

SEQ ID NO: 7112 - protein, 566 aa, Artificial Sequence
  derived and/or modified protein sequence (wt) from hemagglutinin__InfluenzaA__AEN68910
MKAILVVLLYTFATANADTLCVGYHANNSTDTVDTVLEKNVTVTHSVNLLEDKHNGKLCKLRGVAPLHLGKCNIAGWILGNPECESLSTASSWSYIVETSSSDNGTCYPGDFIDYEELREQLSSVSSFERFEIFPKTSSWPNHDSNKGVTAACPHAGAKSFYKNLIWLVKKGNSYPKLSKSYINDKGKEVLVLWGIHHPSTSADQQSLYQNADAYVFVGTSRYSKKFKPEIAIRPKVRDQEGRMNYYWTLVEPGDKITFEATGNLVVPRYAFAMERNAGSGIIISDTPVHDCNTTCQTPKGAINTSLPFQNIHPITIGKCPKYVKGTKLRLATGLRNVPSIQSRGLFGAIAGFIEGGWTGMVDGWYGYHHQNEQGSGYAADLKSTQNAIDEITNKVNSVIEKMNTQFTAVGKEFNHLEKRIENLNKKVDDGFLDIWTYNAELLVLLENERTLDYHDSNVKNLYEKVRSQLKNNAKEIGNGCFEFYHKCDNTCMESVKNGTYDYPKYSEEAKLNREEIDGVKLESTRIYQILAIYSTVASSLVLVVSLGAISFWMCSNGSLQCRICI

SEQ ID NO: 7113 - protein, 566 aa, Artificial Sequence; identical to SEQ ID NO: 4785
  derived and/or modified protein sequence (wt) from hemagglutinin__InfluenzaA__AEN68911

SEQ ID NO: 7114 - protein, 566 aa, Artificial Sequence; identical to SEQ ID NO: 2669
  derived and/or modified protein sequence (wt) from hemagglutinin__InfluenzaA__AEN68912

SEQ ID NO: 7115 - protein, 566 aa, Artificial Sequence; identical to SEQ ID NO: 2760
  derived and/or modified protein sequence (wt) from hemagglutinin__InfluenzaA__AEN68913

SEQ ID NO: 7116 - protein, 566 aa, Artificial Sequence; identical to SEQ ID NO: 5335
  derived and/or modified protein sequence (wt) from hemagglutinin__InfluenzaA__AEN68914

SEQ ID NO: 7117 - protein, 566 aa, Artificial Sequence; identical to SEQ ID NO: 2669
  derived and/or modified protein sequence (wt) from hemagglutinin__InfluenzaA__AEN68915

SEQ ID NO: 7118 - protein, 566 aa, Artificial Sequence; identical to SEQ ID NO: 2669
  derived and/or modified protein sequence (wt) from hemagglutinin__InfluenzaA__AEN68916

SEQ ID NO: 7119 - protein, 566 aa, Artificial Sequence
  derived and/or modified protein sequence (wt) from hemagglutinin__InfluenzaA__AEN68917
MKAILGVLLYTFATANADTLCIGYHANNSTDTVDTVLEKNVTVTHSVNLLEDKHNGKLCKLRGVAPLHLGKCNIAGWILGNPECESLSTASSWSYIVETSSSDNGTCYPGDFIDYEELREQLSSVSSFERFEIFPKTSSWPNHDSNKGVTAACPHAGAKSFYKNLIWLVKKGNSYPKLSKSYINDKGKEVLVLWGIHHPSTSADQQSLYQNADAYVFVGTSRYSKKFKPEIAIRPKVRDQEGRMNYYWTLVEPGDKITFEATGNLVVPRYAFAMERNAGSGIIISDTPVHDCNTTCQTPKGAINTSLPFQNIHPVTIGKCPKYVKSTKLRLATGLRNVPSIQSRGLFGAIAGFIEGGWTGMVDGWYGYHHQNEQGSGYAADLKSTQNAIDKITNKVNSVIEKMNTQFTAVGKEFNHLEKRIENLNKKVDDGFLDIWTYNAELLVLLENERTLDYHDSNVKNLYEKVRSQLKNNAKEIGNGCFEFYHKCDNTCMESVKNGTYDYPKYSEEAKLNREEIDGVKLESTRIYQILAIYSTVASSLVLVVSLGAISFWMCSNGSLQCRICI

SEQ ID NO: 7120 - protein, 566 aa, Artificial Sequence
  derived and/or modified protein sequence (wt) from hemagglutinin__InfluenzaA__AEN68918
MKAILVVLLYTFATANADTLCIGYHANNSTDTVDTVLEKNVTVTHSVNLLEDKNNGKLCKLRGVAPLHLGKCNIAGWILGNPECESLSTASSWSYIVETSSSDNGTCYPGDFIDYEELREQLSSVSSFERFEMFPKTSSWPNHDSNKGVTAACPHAGAKSFYKNLIWLVKKGNSYPKLSKSYINDKGKEVLVLWGIHHPSTSADQQSLYQNADAYVFVGTSRYSKKFKPEIAIRPKVRDQEGRMNYYWTLVEPGDKITFEATGNLVVPRYAFAMERNAGSGIIISDTPVHDCNTTCQTPKGAINTSLPFQNIHPITIGKCPKYVKSTKLRLATGLRNVPSIQSRGLFGAIAGFIEGGWTGMVDGWYGYHHQNEQGSGYAADLKSTQNAIDEITNKVNSVIEKMNTQFTAVGKEFNHLEKRIENLNKKVDDGFLDIWTYNAELLVLLENERTLDYHDSNVKNLYEKVRSQLKNNAKEVGNGCFEFYHKCDNTCMESVKNGTYDYPKYSEEAKLNREEIDGVKLESTRIYQILAIYSTVASSLVLVVSLGAISFWMCSNGSLQCRICI

SEQ ID NO: 7121 - protein, 566 aa, Artificial Sequence; identical to SEQ ID NO: 5584
  derived and/or modified protein sequence (wt) from hemagglutinin__InfluenzaA__AEN68919

SEQ ID NO: 7122 - protein, 566 aa, Artificial Sequence; identical to SEQ ID NO: 4833
  derived and/or modified protein sequence (wt) from hemagglutinin__InfluenzaA__AEN68920

SEQ ID NO: 7123 - protein, 566 aa, Artificial Sequence; identical to SEQ ID NO: 3833
  derived and/or modified protein sequence (wt) from hemagglutinin__InfluenzaA__AEN68921

SEQ ID NO: 7124 - protein, 566 aa, Artificial Sequence; identical to SEQ ID NO: 3829
  derived and/or modified protein sequence (wt) from hemagglutinin__InfluenzaA__AEN68922

SEQ ID NO: 7125 - protein, 566 aa, Artificial Sequence; identical to SEQ ID NO: 3833
  derived and/or modified protein sequence (wt) from hemagglutinin__InfluenzaA__AEN68923

SEQ ID NO: 7126 - protein, 566 aa, Artificial Sequence; identical to SEQ ID NO: 3833
  derived and/or modified protein sequence (wt) from hemagglutinin__InfluenzaA__AEN68924

SEQ ID NO: 7127 - protein, 566 aa, Artificial Sequence
  derived and/or modified protein sequence (wt) from hemagglutinin__InfluenzaA__AEN68925
MKAILVVLLYTFATANADTLCIGYHANNSTDTVDTVLEKNVTVTHSVNLLEDKHNGKLCKLRGVAPLHLGKCNIAGWILGNPECESLSTASSWSYIVETSSSDNGTCYPGDFIDYEELREQLSSVSSFERFEIFPKTSSWPNHDSNKGVTAACPHAGAKSFYKNLIWLVKKGNSYPKLSKSYINDKGKEVLVLWGIHHPSTSADQQSLYQNADAYVFVETSRYSKKFKPEIAIRPKVRDQEGRMNYYWTLVEPGDKITFEATGNLVVPRYAFAMERNAGSGIIISDTPVHDCNTTCQTPKGAINTSLPFQNIHPITIGKCPKYVKSTKLRLATGLRNVPSIQSRGLFGAIAGFIEGGWTGMVDGWYGYHHQNEQGSGYAADLKSTQNAIDKITNKVNSVIEKMNTQFTAVGKEFNHLEKRIENLNKKVDDGFLDIWTYNAELLVLLENERTLDYHDSNVKNLYEKVRSQLKNNAKEIGNGCFEFYHKCDNTCMESVKNGTYDYPKYSEEAKLNREEIDGVKLESTRIYQILAIYSTVASSLVLVVSLGAISFWMCSNGSLQCRICI

SEQ ID NO: 7128 - protein, 566 aa, Artificial Sequence
  derived and/or modified protein sequence (wt) from hemagglutinin__InfluenzaA__AEN68926
MKAILVVLLYTFATANADTLCIGYHANNSTDTVDTVLEKNVTVTHSVNLLEDKHNGKLCKLRGVAPLHLGKCNIAGWILGNPECESLATASSWSYIVETSNSDNGTCYPGDFIDYEELREQLSSVSSFERFEIFPKTSSWPNHDSNKGVTAACPHAGAKSFYKNLIWLVKKGNSYPKLSKSYINDKGREVLVLWGIHHPSTSADQQSLYQNADTYVFVGTSRYSKKFKPEIAIRPKVRDQEGRMNYYWTLVEPGDKITFEATGNLVVPRYAFAMERNAGSGIIISDTPVHDCNTTCQTPKGAINTSLPFQNIHPITIGKCPKYVKSTKLRLATGLRNVPSIQSRGLFGAIAGFIEGGWTGMVDGWYGYHHQNEQGSGYAADLKSTQNAIDEITNKVNSVIEKMNTQFTAVGKEFNHLEKRIENLNKKVDDGFLDIWTYNAELLVLLENERTLDYHDSNVKNLYEKVRSQLKNNAKEIGNGCFEFYHKCDNTCMESVKNGTYDYPKYSEEAKLNREEIDGVKLESTRIYQILAIYSTVASSLVLVVSLGAISFWMCSNGSLQCRICI

SEQ ID NO: 7129 - protein, 566 aa, Artificial Sequence
  derived and/or modified protein sequence (wt) from hemagglutinin__InfluenzaA__AEN68927
MKAILVVLLYTFATANADTLCIGYHANNSTDTVDTVLEKNVTVTHSVNLLEDKHNGKLCKLRGVAPLHLGKCNIAGWILGNPECESLSTASSWSYIVETSSSDNGTCYPGDFIDYEELREQLSSVSSFERFEIFPKTSSWPDHDSNKGVTAACPHAGAKSFYKNLIWLVKKGNSYPKLSKSYINDKGKEVLVLWGIHHPSTSADQQSLYQNADAYVFVGTSRYSKKFKPEIAIRPKVRDQEGRMNYYWTLVEPGDKITFEATGNLVVPRYAFAMERNAGSGIIISDTPVHDCNTTCQTPKGAINTSLPFQNIHPITIGKCPKYVKSTKLRLATGLRNVPSIQSRGLFGAIAGFIEGGWTGMVDGWYGYHHQNEQGSGYAADLKSTQNAIDKITNKVNSVIEKMNTQFTAVGKEFNHLEKRIENLNKKVDDGFLDIWTYNAELLVLLENERTLDYHDSNVKNLYEKVRNQLKNNAKEIGNGCFEFYHKCDNTCMESVKNGTYDYPKYSEEAKLNREEIDGVKLESTRIYQILAIYSTVASSLVLVVSLGAISFWMCSNGSLQCRICI

SEQ ID NO: 7130 - protein, 566 aa, Artificial Sequence; identical to SEQ ID NO: 6255
  derived and/or modified protein sequence (wt) from hemagglutinin__InfluenzaA__AEN68928

SEQ ID NO: 7131 - protein, 566 aa, Artificial Sequence
  derived and/or modified protein sequence (wt) from hemagglutinin__InfluenzaA__AEN68929
MKAILVVLLYTFATANADTLCIGYHANNSTDTVDTVLEKNVTVTHSVNLLEDKHNGKLCKLRGIAPLHLGKCNIAGWILGNPECESLSTASSWSYIVETSSSDNGTCYPGDFIDYEELREQLSSVSSFERFEIFPKTSSWPNHDSNKGVTAACPHAGAKSFYKNLIWLVKKGNSYPKLSKSYINDKGKEVLVLWGIHHPSTSADQQSLYQNADAYVFVGTSRYSKKFKPEIAIRPKVRDQEGRMNYYWTLVEPGDKITFEATGNLVVPRYAFAMERNAGSGIIISDTPVHDCNTTCQTPKGAINTSLPFQNIHPITIGKCPKYVKSTKLRLATGLRNVPSIQSRGLFGAIAGFIEGGWTGMVDGWYGYHHQNEQGSGYAADLKSTQNAIDKITNKVNSVIEKMNTQFTAVGKEFNHLEKRIENLNKKVDDGFLDIWTYNAELLVLLENERTLDYHDSNVKNLYEKVRSQLKNNAKEIGNGCFEFYHKCDNTCMESVKNGTYDYPKYSEEAKLNREEIDGVKLESTRIYQILAIYSTVASSLVLVVSLGAISFWMCSNGSLQCRICI

SEQ ID NO: 7132 - protein, 566 aa, Artificial Sequence; identical to SEQ ID NO: 5584
  derived and/or modified protein sequence (wt) from hemagglutinin__InfluenzaA__AEN68930

SEQ ID NO: 7133 - protein, 566 aa, Artificial Sequence; identical to SEQ ID NO: 5584
  derived and/or modified protein sequence (wt) from hemagglutinin__InfluenzaA__AEN68931

SEQ ID NO: 7134 - protein, 566 aa, Artificial Sequence; identical to SEQ ID NO: 5584
  derived and/or modified protein sequence (wt) from hemagglutinin__InfluenzaA__AEN68932

SEQ ID NO: 7135 - protein, 566 aa, Artificial Sequence
  derived and/or modified protein sequence (wt) from hemagglutinin__InfluenzaA__AEN69426
MKAILVVLLYTFATSNADTLCIGYHANNSTDTVDTVLEKNVTVTHSVNLLEDKHNGKLCKLRGVAPLHLGKCNIAGWILGNPECESLSTASSWSYIVETSSSDNGTCYPGNFIDYEELREQLSSVSSFERFEIFPKTSSWPDHDSNKGVTAACPHAGAKSFYKNLIWLVKKGNSYPKLSKSYINDKGKEVLVLWGIHHPSTSADQQSLYQNADAYVFVGTSRYSKKFKPEIAIRPKVRDQEGRMNYYWTLVEPGDKITFEATGNLVAPRYAFAMERNAGSGIIISDTPVHDCNTTCQTPKGAINTSLPFQNIHPITIGKCPKYVKSTKLRLATGLRNVPSIQSRGLFGAIAGFIEGGWTGMVDGWYGYHHQNEQGSGYAADLKSTQNAIDKITNKVNSVIEKMNTQFTAVGKEFNHLEKRIENLNKKVDDGFLDIWTYNAELLVLLENERTLDYHDSNVKNLYEKVRSQLKNNAKEIGNGCFEFYHKCDNTCMESVKNGTYDYPKYSEEAKLNREEIDGVKLESTRIYQILAIYSTVASSLVLVVSLGAISFWMCSNGSLQCRICI

SEQ ID NO: 7136 - protein, 566 aa, Artificial Sequence; identical to SEQ ID NO: 6920
  derived and/or modified protein sequence (wt) from hemagglutinin__InfluenzaA__AEN69475

SEQ ID NO: 7137 - protein, 566 aa, Artificial Sequence; identical to SEQ ID NO: 6920
  derived and/or modified protein sequence (wt) from hemagglutinin__InfluenzaA__AEN69481

SEQ ID NO: 7138 - protein, 566 aa, Artificial Sequence; identical to SEQ ID NO: 2922
  derived and/or modified protein sequence (wt) from hemagglutinin__InfluenzaA__AEO01032

SEQ ID NO: 7139 - protein, 566 aa, Artificial Sequence; identical to SEQ ID NO: 3022
  derived and/or modified protein sequence (wt) from hemagglutinin__InfluenzaA__AEO01033

SEQ ID NO: 7140 - protein, 566 aa, Artificial Sequence; identical to SEQ ID NO: 3022
  derived and/or modified protein sequence (wt) from hemagglutinin__InfluenzaA__AEO01034

SEQ ID NO: 7141 - protein, 566 aa, Artificial Sequence; identical to SEQ ID NO: 2656
  derived and/or modified protein sequence (wt) from hemagglutinin__InfluenzaA__AEO01035

SEQ ID NO: 7142 - protein, 566 aa, Artificial Sequence; identical to SEQ ID NO: 3022
  derived and/or modified protein sequence (wt) from hemagglutinin__InfluenzaA__AEO01036

SEQ ID NO: 7143 - protein, 566 aa, Artificial Sequence; identical to SEQ ID NO: 2911
  derived and/or modified protein sequence (wt) from hemagglutinin__InfluenzaA__AEO01037

SEQ ID NO: 7144 - protein, 566 aa, Artificial Sequence; identical to SEQ ID NO: 3022
  derived and/or modified protein sequence (wt) from hemagglutinin__InfluenzaA__AEO01038

SEQ ID NO: 7145 - protein, 566 aa, Artificial Sequence; identical to SEQ ID NO: 2849
  derived and/or modified protein sequence (wt) from hemagglutinin__InfluenzaA__AEO01039

SEQ ID NO: 7146 - protein, 566 aa, Artificial Sequence
  derived and/or modified protein sequence (wt) from hemagglutinin__InfluenzaA__AEO01040
MKAILVVLLYTFATANADTLCIGYHANNSTDTVDTVLEKNVTVTHSVNLLEDKHNGKLCKLRGVAPLHLGKCNIAGWILGNPECESLSTASSWSYIVETSSSDNGTCYPGDFIDYEELREQLSSVSSFERFEIFPKTSSWPNHDSNKGVTAACPHAGAKSFYKNLIWLVKKGNSYPKLSKSYINDKGKKVLVLWGIHHPSTSADQQSLYQNADAYVFVGTSRYSKKFKPEIAIRPKVRDQEGRMNYYWTLIEPGDKITFEATGNLVVPRYAFTMERNAGSGIIISDTPVHDCNTTCQTPKGAINTSLPFQNIHPITIGKCPKYVKSTKLRLATGLRNVPSIQSRGLFGAIAGFIEGGWTGMVDGWYGYHHQNEQGSGYAADLKSTQNAIDEITNKVNSVIEKMNTQFTAVGKEFNHLEKRIENLNKKVDDGFLDIWTYNAELLVLLENERTLDYHDSNVKNLYEKVRSQLKNNAKEIGNGCFEFYHKCDNTCMESVKNGTYDYPKYSEEAKLNREEIDGVKLESTRIYQILAIYSTVASSLVLVVSLGAISFWMCSNGSLQCRICI

SEQ ID NO: 7147 - protein, 566 aa, Artificial Sequence; identical to SEQ ID NO: 2669
  derived and/or modified protein sequence (wt) from hemagglutinin__InfluenzaA__AEO01041

SEQ ID NO: 7148 - protein, 566 aa, Artificial Sequence; identical to SEQ ID NO: 3022
  derived and/or modified protein sequence (wt) from hemagglutinin__InfluenzaA__AEO01042

SEQ ID NO: 7149 - protein, 566 aa, Artificial Sequence
  derived and/or modified protein sequence (wt) from hemagglutinin__InfluenzaA__AEO01043
MKAILVVLLYTFATANADTLCIGYHANNSTDTVDTVLEKNVTVTHSVNLLEDKHNGKLCKLRGVAPLHLGKCNIAGWILGNPECESLSTASSWSYIVETSSSNNGTCYPGDFIDYEELREQLSSVSSFERFEIFPKTSSWPNHDSNKGVTAACPHAGAKSFYKNLIWLVKKGNSYPKLSKSYINDKGKEVLVLWGIHHPSTSADQQSLYQNADAYVFVGTSRYSKKFKPEIAIRPKVREQEGRMNYYWTLVEPGDKITFEATGNLVVPRYAFAMERNAGSGIIISDTPVHDCNTTCQTPKGAINTSLPFQNIHPITIGKCPKYVKSTKLRLATGLRNVPSIQSRGLFGAIAGFIEGGWTGMVDGWYGYHHQNEQGSGYAADLKSTQNAIDEITNKVNSVIEKMNTQFTAVGKEFNHLEKRIENLNKKVDDGFLDIWTYNAELLVLLENERTLDYHDSNVKNLYEKVRSQLKNNAKEIGNGCFEFYHKCDNTCMESVKNGTYDYPKYSEEAKLNREEIDGVKLESTRIYQILAIYSTVASSLVLVVSLGAISFWMCSNGSLQCRICI

SEQ ID NO: 7150 - protein, 566 aa, Artificial Sequence; identical to SEQ ID NO: 2669
  derived and/or modified protein sequence (wt) from hemagglutinin__InfluenzaA__AEO01044

SEQ ID NO: 7151 - protein, 566 aa, Artificial Sequence
  derived and/or modified protein sequence (wt) from hemagglutinin__InfluenzaA__AEO01045
MKAILVVLLYTFATANADTLCIGYHANNSTDTVDTVLEKNVTVTHSVNLLEDKHNGKLCKLRGVAPLHLGKCNIAGWILGNLECESLSTASSWSYIVETSSSDNGTCYPGDFIDYEELREQLSSVSSFERFEIFPKTSSWPNHDSNKGVTAACPHAGAKSFYKNLIWLVKKGNSYPKLSKSYINDKGKEVLVLWGIHHPSTSADQQSLYQNADAYVFVGTSRYSKKFKPEIAIRPKVRDQEGRMNYYWTLVEPGDKITFEATGNLVVPRYAFAMERNAGSGIIISDTPVHDCNTTCQTPKGAINTSLPFQNIHPITIGKCPKYVKSTKLRLATGLRNVPSIQSRGLFGAIAGFIEGGWTGMVDGWYGYHHQNEQGSGYAADLKSTQNAIDEITNKVNSVIEKMNTQFTAVGKEFNHLEKRIENLNKKVDDGFLDIWTYNAELLVLLENERTLDYHDSNVKNLYEKVRSQLKNNAKEIGNGCFEFYHKCDNTCMESVKNGTYDYPKYSEEAKLNREEIDGVKLESTRIYQILAIYSTVASSLVLVVSLGAISFWMCSNGSLQCRICI

SEQ ID NO: 7152 - protein, 566 aa, Artificial Sequence; identical to SEQ ID NO: 2669
  derived and/or modified protein sequence (wt) from hemagglutinin__InfluenzaA__AEO01046

SEQ ID NO: 7153 - protein, 566 aa, Artificial Sequence; identical to SEQ ID NO: 2669
  derived and/or modified protein sequence (wt) from hemagglutinin__InfluenzaA__AEO01047

SEQ ID NO: 7154 - protein, 566 aa, Artificial Sequence
  derived and/or modified protein sequence (wt) from hemagglutinin__InfluenzaA__AEO01048
MKAILVVLLYTFATANADTLCIGYHANNSTDTVDTVLEKNVTVTHSVNLLEDKHNGKLCKLRGVAPLHLGKCNIAGWILGNPECESLSTASSWSYIVETSSSDNGTCYPGDFIDYEELREQLSSVSSFERFEIFPKTSSWPNHDSNKGVTAACPHAGAKSFYKNLIWLVKKGNSYPKLSKSYINDKGKEVLVLWGIHHPSTSADQQSLYQNADAYVFVGTSRYSKKFKPEIAIRPKVRDQEGRMNYYWTLVEPGDKITFEATGNLVVPRYAFAMERNAGSGIIISDTPVHDCNTTCQTPKGAINTSLPFQNIHPITIGKCPKYVKSTKLRLATGLRNVPSIQSRGLFGAIAGFIEGGWTGMVDGWYGYHHQNEQGSGYAADLKSTQNAIDEITNKVNSVIEKMNTQFTAVGKEFNHLEKRIENLNKKVDDGFLDIWTYNAELLVLLENERTLDYHDSNVKNLYEKVRSQLKNNAKEIGNGCFEFYHKCDNTCMESVKNGTYDYPKYSEEAKLNREEIDGVKLESTRIYQILAIYSTVASSLVLVVSLGAISFWMCSNGSLQCKICI

SEQ ID NO: 7155 - protein, 566 aa, Artificial Sequence; identical to SEQ ID NO: 3567
  derived and/or modified protein sequence (wt) from hemagglutinin__InfluenzaA__AEO01049

SEQ ID NO: 7156 - protein, 566 aa, Artificial Sequence; identical to SEQ ID NO: 2669
  derived and/or modified protein sequence (wt) from hemagglutinin__InfluenzaA__AEO01050

SEQ ID NO: 7157 - protein, 566 aa, Artificial Sequence; identical to SEQ ID NO: 3022
  derived and/or modified protein sequence (wt) from hemagglutinin__InfluenzaA__AEO01051

SEQ ID NO: 7158 - protein, 566 aa, Artificial Sequence
  derived and/or modified protein sequence (wt) from hemagglutinin__InfluenzaA__AEO01052
MKAIIVVLLYTFATANADTLCIGYHANNSTDTVDTVLEKNVTVTHSVNLLEDKHNGKLCKLRGVAPLHLGKCNIAGWILGNPECESLSTASSWSYIVETSSSDNGTCYPGDFIDYEELREQLSSVSSFERFEIFPKTSSWPNHDSNKGVTAACPHAGAKSFYKNLIWLVKKGNSYPKLSKSYINDKGKEVLVLWGIHHPSTSADQQSLYQNADAYVFVGTSRYSKKFKPEIAIRPKVRDQEGRMNYYWTLVEPGDKITFEATGNLVVPRYAFAMERNAGSGIIISDTPVHDCNTTCQTPKGAINTSLPFQNIHPITIGKCPKYVKSTKLRLATGLRNVPSIQSRGLFGAIAGFIEGGWTGMVDGWYGYHHQNEQGSGYAADLKSTQNAIDKITNKVNSVIEKMNTQFTAVGKEFNHLEKRIENLNKKVDDGFLDIWTYNAELLVLLENERTLDYHDSNVKNLYEKVRSQLKNNAKEIGNGCFEFYHKCDNTCMESVKNGTYDYPKYSEEAKLNREEIDGVKLESTRIYQILAIYSTVASSLVLVVSLGAISFWMCSNGSLQCRICI

SEQ ID NO: 7159 - protein, 566 aa, Artificial Sequence; identical to SEQ ID NO: 3022
  derived and/or modified protein sequence (wt) from hemagglutinin__InfluenzaA__AEO01053

SEQ ID NO: 7160 - protein, 566 aa, Artificial Sequence; identical to SEQ ID NO: 2669
  derived and/or modified protein sequence (wt) from hemagglutinin__InfluenzaA__AEO01054

SEQ ID NO: 7161 - protein, 566 aa, Artificial Sequence; identical to SEQ ID NO: 3481
  derived and/or modified protein sequence (wt) from hemagglutinin__InfluenzaA__AEO01055

SEQ ID NO: 7162 - protein, 566 aa, Artificial Sequence; identical to SEQ ID NO: 3022
  derived and/or modified protein sequence (wt) from hemagglutinin__InfluenzaA__AEO01056

SEQ ID NO: 7163 - protein, 566 aa, Artificial Sequence; identical to SEQ ID NO: 2669
  derived and/or modified protein sequence (wt) from hemagglutinin__InfluenzaA__AEO01057

SEQ ID NO: 7164 - protein, 566 aa, Artificial Sequence; identical to SEQ ID NO: 2669
  derived and/or modified protein sequence (wt) from hemagglutinin__InfluenzaA__AEO01058

SEQ ID NO: 7165 - protein, 566 aa, Artificial Sequence; identical to SEQ ID NO: 2669
  derived and/or modified protein sequence (wt) from hemagglutinin__InfluenzaA__AEO01059

SEQ ID NO: 7166 - protein, 566 aa, Artificial Sequence; identical to SEQ ID NO: 2669
  derived and/or modified protein sequence (wt) from hemagglutinin__InfluenzaA__AEO01060

SEQ ID NO: 7167 - protein, 566 aa, Artificial Sequence; identical to SEQ ID NO: 2669
  derived and/or modified protein sequence (wt) from hemagglutinin__InfluenzaA__AEO01061

SEQ ID NO: 7168 - protein, 566 aa, Artificial Sequence; identical to SEQ ID NO: 2669
  derived and/or modified protein sequence (wt) from hemagglutinin__InfluenzaA__AEO01062

SEQ ID NO: 7169 - protein, 566 aa, Artificial Sequence; identical to SEQ ID NO: 2669
  derived and/or modified protein sequence (wt) from hemagglutinin__InfluenzaA__AEO01063

SEQ ID NO: 7170 - protein, 566 aa, Artificial Sequence; identical to SEQ ID NO: 2669
  derived and/or modified protein sequence (wt) from hemagglutinin__InfluenzaA__AEO01064

SEQ ID NO: 7171 - protein, 566 aa, Artificial Sequence; identical to SEQ ID NO: 2911
  derived and/or modified protein sequence (wt) from hemagglutinin__InfluenzaA__AEO01065

SEQ ID NO: 7172 - protein, 566 aa, Artificial Sequence; identical to SEQ ID NO: 3022
  derived and/or modified protein sequence (wt) from hemagglutinin__InfluenzaA__AEO01066

SEQ ID NO: 7173 - protein, 566 aa, Artificial Sequence
  derived and/or modified protein sequence (wt) from hemagglutinin__InfluenzaA__AEO01067
MKAILVVLLYTFATANADTLCIGYHANNSTDTVDTVLEKNVTVTHSVNLLEDKHNGKLCKLRGVAPLHLGKCNIAGWILGNPECESLSTASSWSYIVETSSSDNGTCYPGDFIDYEELREQLSSVSSFERFEIFPKTSSWPNHDSNKGVTAACPHAGAKSFYKNLIWLVKKGNSYPKLSKSYINDKGKEVLVLWGIHHPSTSADQQSLYQNADAYVFVGTSRYSKKFKPEMAIRPKVRDQEGRMNYYWTLVEPGDKITFEATGNLVVPRYAFAMERNAGSGIIISDTPVHDCNTTCQTPKGAINTSLPFQNIHPITIGKCPKYVKSTKLRLATGLRNVPSIQSRGLFGAIAGFIEGGWTGMVDGWYGYHHQNEQGSGYAADLKSTQNAIDEITNKVNSVIEKMNTQFTAVGKEFNHLEKRIENLNKKVDDGFLDIWTYNAELLVLLENERTLDYHDSNVKNLYEKVRSQLKNNAKEIGNGCFEFYHKCDNTCMESVKNGTYDYPKYSEEAKLNREEIDGVKLESTRIYQILAIYSTVASSLVLVVSLGAISFWMCSNGSLQCRICI

SEQ ID NO: 7174 - protein, 566 aa, Artificial Sequence; identical to SEQ ID NO: 3022
  derived and/or modified protein sequence (wt) from hemagglutinin__InfluenzaA__AEO01068

SEQ ID NO: 7175 - protein, 566 aa, Artificial Sequence; identical to SEQ ID NO: 2669
  derived and/or modified protein sequence (wt) from hemagglutinin__InfluenzaA__AEO01069

SEQ ID NO: 7176 - protein, 566 aa, Artificial Sequence; identical to SEQ ID NO: 3022
  derived and/or modified protein sequence (wt) from hemagglutinin__InfluenzaA__AEO01070

SEQ ID NO: 7177 - protein, 566 aa, Artificial Sequence; identical to SEQ ID NO: 2669
  derived and/or modified protein sequence (wt) from hemagglutinin__InfluenzaA__AEO01071

SEQ ID NO: 7178 - protein, 566 aa, Artificial Sequence
  derived and/or modified protein sequence (wt) from hemagglutinin__InfluenzaA__AEO01073
MKAILVVLLYTFATANADTLCIGYHANNSTDTVDTVLEKNVTVTHSVNLLEDKHNGKLCKLRGVAPLHLGKCNIAGWILGNPECESLSTASSWSYIVETSSSDNGTCYPGDFIDYEELREQLSSVSSFERFEIFPKTSSWPNHDSNKGVTAACPHAGAKSFYKNLIWLVKKGNSYPKLSKSYINDKGKEVLVLWGIHHPSTSADQQSLYQNADAYVFVGTSRYSKKFKPEIAIRPKVRDQEGRMNYYWTLVEPGDKITFEATGNLVVPRYAFAMERNAGSGIIISDTPVHDCNTTCQTPKGAVNTSLPFQNIHPITIGKCPKYVKSTKLRLATGLRNVPSIQSRGLFGAIAGFIEGGWTGMVDGWYGYHHQNEQGSGYAADLKSTQNAIDEITNKVNSVIEKMNTQFTAVGKEFNHLEKRIENLNKKVDDGFLDIWTYNAELLVLLENERTLDYHDSNVKNLYEKVRSQLKNNAKEIGNGCFEFYHKCDNTCMESVKNGTYDYPKYSEEAKLNREEIDGVKLESTRIYQILAIYSTVASSLVLVVSLGAISFWMCSNGSLQCRICI

SEQ ID NO: 7179 - protein, 566 aa, Artificial Sequence; identical to SEQ ID NO: 2911
  derived and/or modified protein sequence (wt) from hemagglutinin__InfluenzaA__AEO01074

SEQ ID NO: 7180 - protein, 566 aa, Artificial Sequence; identical to SEQ ID NO: 3022
  derived and/or modified protein sequence (wt) from hemagglutinin__InfluenzaA__AEO01075

SEQ ID NO: 7181 - protein, 566 aa, Artificial Sequence; identical to SEQ ID NO: 3022
  derived and/or modified protein sequence (wt) from hemagglutinin__InfluenzaA__AEO01076

SEQ ID NO: 7182 - protein, 566 aa, Artificial Sequence
  derived and/or modified protein sequence (wt) from hemagglutinin__InfluenzaA__AEO01077
MKAILVVLLYTFATANADTLCIGYHANNSTDTVDTVLEKNVTVTHSVNLLEDKHNGKLCKLRGVAPLHLGKCNIAGWILGNPECESLSTASSWSYIVETSSSDNGTCYPGDFIDYEELREQLSSVSSFERFEIFPKTSSWPNHDSNKGVTAACPHAGAKSFYKNLIWLVKKGNSYPKLSKSYINDKGKEVLVLWGIHHPSTSADQQSLYQNADAYVFVGTSRYSKKFKPEIAIRPKVREQEGRMNYYWTLVEPGDKITFEATGNLVVPRYAFAMERNAGSGIIISDTPVHDCNTTCQTPKGAINTSLPFQNIHPITIGKCPKYVKSTKLRLATGLRNVPSIQSRGLFGAIAGFIEGGWTGMVDGWYGYHHQNEQGSGYAADLKSTQNAIDEITNKVNSVIEKMNTQFTAVGKEFNHLEKRIENLNKKVDDGFLDIWTYNAELLVLLENERTLDYHDSNVKNLYEKVRSQLKNNAKEIGNGCFEFYHKCDNTCMENVKNGTYDYPKYSEEAKLNREEIDGVKLESTRIYQILAIYSTVASSLVLVVSLGAISFWMCSNGSLQCRICI

SEQ ID NO: 7183 - protein, 566 aa, Artificial Sequence; identical to SEQ ID NO: 2669
  derived and/or modified protein sequence (wt) from hemagglutinin__InfluenzaA__AEO01078

SEQ ID NO: 7184 - protein, 566 aa, Artificial Sequence; identical to SEQ ID NO: 2669
  derived and/or modified protein sequence (wt) from hemagglutinin__InfluenzaA__AEO01079

SEQ ID NO: 7185 - protein, 566 aa, Artificial Sequence; identical to SEQ ID NO: 2669
  derived and/or modified protein sequence (wt) from hemagglutinin__InfluenzaA__AEO01080

SEQ ID NO: 7186 - protein, 566 aa, Artificial Sequence; identical to SEQ ID NO: 3022
  derived and/or modified protein sequence (wt) from hemagglutinin__InfluenzaA__AEO01081

SEQ ID NO: 7187 - protein, 566 aa, Artificial Sequence; identical to SEQ ID NO: 2669
  derived and/or modified protein sequence (wt) from hemagglutinin__InfluenzaA__AEO01082

SEQ ID NO: 7188 - protein, 566 aa, Artificial Sequence; identical to SEQ ID NO: 2669
  derived and/or modified protein sequence (wt) from hemagglutinin__InfluenzaA__AEO01083

SEQ ID NO: 7189 - protein, 566 aa, Artificial Sequence; identical to SEQ ID NO: 2669
  derived and/or modified protein sequence (wt) from hemagglutinin__InfluenzaA__AEO01084

SEQ ID NO: 7190 - protein, 566 aa, Artificial Sequence; identical to SEQ ID NO: 3022
  derived and/or modified protein sequence (wt) from hemagglutinin__InfluenzaA__AEO01085

SEQ ID NO: 7191 - protein, 566 aa, Artificial Sequence; identical to SEQ ID NO: 2669
  derived and/or modified protein sequence (wt) from hemagglutinin__InfluenzaA__AEO01086

SEQ ID NO: 7192 - protein, 566 aa, Artificial Sequence; identical to SEQ ID NO: 3022
  derived and/or modified protein sequence (wt) from hemagglutinin__InfluenzaA__AEO01087

SEQ ID NO: 7193 - protein, 566 aa, Artificial Sequence; identical to SEQ ID NO: 2849
  derived and/or modified protein sequence (wt) from hemagglutinin__InfluenzaA__AEO01088

SEQ ID NO: 7194 - protein, 566 aa, Artificial Sequence; identical to SEQ ID NO: 3022
  derived and/or modified protein sequence (wt) from hemagglutinin__InfluenzaA__AEO01089

SEQ ID NO: 7195 - protein, 566 aa, Artificial Sequence; identical to SEQ ID NO: 3022
  derived and/or modified protein sequence (wt) from hemagglutinin__InfluenzaA__AEO01090

SEQ ID NO: 7196 - protein, 566 aa, Artificial Sequence; identical to SEQ ID NO: 3022
  derived and/or modified protein sequence (wt) from hemagglutinin__InfluenzaA__AEO01091

SEQ ID NO: 7197 - protein, 566 aa, Artificial Sequence
  derived and/or modified protein sequence (wt) from hemagglutinin__InfluenzaA__AEO01092
MKAILVVLLYTFATANADTLCIGYHANNSTDTVDTVLEKNVTVTHSVNLLEDKHNGKLCKLRGVAPLHLGKCNIAGWILGNPECESLSTASSWSYIVETSSSDNGTCYPGDFIDYEELREQLSSVSSFERFEIFPKTSSWPNHDSNKGVTAACPHAGAKSFYKNLIWLVKKGNSYPKLSKSYINDKGKEVLVLWGIHHPSTSADQQSLYQNADAYVFVGTSRYSKKFKPEIAIRPKVRDQEGRMNYYWTLVEPGDKITFEATGNLVVPRYAFAMERNAGSGIIISDTPVHDCNTTCQTPKGAINTSLPFQNIHPITIGKCPKYVKSTKLRLATGLRNVPSIQSRGLFGAIAGFIEGGWTGMVDGWYGYHHQNEQGSGYAADLKSTQNAIDEITNKVNSVIEKMNTQFTAVGKEFNHLEKRIENLNKKVDDGFLDIWTYNAELLVLLENERTLDYHDSNVKNLYERVRSQLKNNAKEIGNGCFEFYHKCDNTCMESVKNGTYDYPKYSEEAKLNREEIDGVKLESTRIYQILAIYSTVASSLVLVVSLGAISFWMCSNGSLQCRICI

SEQ ID NO: 7198 - protein, 566 aa, Artificial Sequence; identical to SEQ ID NO: 2669
  derived and/or modified protein sequence (wt) from hemagglutinin__InfluenzaA__AEO01093

SEQ ID NO: 7199 - protein, 566 aa, Artificial Sequence; identical to SEQ ID NO: 2669
  derived and/or modified protein sequence (wt) from hemagglutinin__InfluenzaA__AEO01094

SEQ ID NO: 7200 - protein, 566 aa, Artificial Sequence; identical to SEQ ID NO: 5876
  derived and/or modified protein sequence (wt) from hemagglutinin__InfluenzaA__AEO01095

SEQ ID NO: 7201 - protein, 566 aa, Artificial Sequence; identical to SEQ ID NO: 3022
  derived and/or modified protein sequence (wt) from hemagglutinin__InfluenzaA__AEO01096

SEQ ID NO: 7202 - protein, 566 aa, Artificial Sequence; identical to SEQ ID NO: 3022
  derived and/or modified protein sequence (wt) from hemagglutinin__InfluenzaA__AEO01097

SEQ ID NO: 7203 - protein, 566 aa, Artificial Sequence; identical to SEQ ID NO: 3022
  derived and/or modified protein sequence (wt) from hemagglutinin__InfluenzaA__AEO01098

SEQ ID NO: 7204 - protein, 566 aa, Artificial Sequence; identical to SEQ ID NO: 2669
  derived and/or modified protein sequence (wt) from hemagglutinin__InfluenzaA__AEO01099

SEQ ID NO: 7205 - protein, 566 aa, Artificial Sequence; identical to SEQ ID NO: 2911
  derived and/or modified protein sequence (wt) from hemagglutinin__InfluenzaA__AEO01100

SEQ ID NO: 7206 - protein, 566 aa, Artificial Sequence; identical to SEQ ID NO: 2669
  derived and/or modified protein sequence (wt) from hemagglutinin__InfluenzaA__AEO01101

SEQ ID NO: 7207 - protein, 566 aa, Artificial Sequence; identical to SEQ ID NO: 2669
  derived and/or modified protein sequence (wt) from hemagglutinin__InfluenzaA__AEO01102

SEQ ID NO: 7208 - protein, 566 aa, Artificial Sequence; identical to SEQ ID NO: 3022
  derived and/or modified protein sequence (wt) from hemagglutinin__InfluenzaA__AEO01103

SEQ ID NO: 7209 - protein, 566 aa, Artificial Sequence; identical to SEQ ID NO: 3022
  derived and/or modified protein sequence (wt) from hemagglutinin__InfluenzaA__AEO01104

SEQ ID NO: 7210 - protein, 566 aa, Artificial Sequence
  derived and/or modified protein sequence (wt) from hemagglutinin__InfluenzaA__AEO01105
MKAILVVLLYTFATANADTLCIGYHANNSTDTVDTVLEKNVTVTHSVNLLEDKHNGKLCKLRGVAPLHLGKCNIAGWILGNPECESLSTASSWSYIVETSSSDNGTCYPGDFIDYEELREQLSSVSSFERFEIFPKTSSWPNHDSSKGVTAACPHAGAKSFYKNLIWLVKKGNSYPKLSKSYINDKGKEVLVLWGIHHPSTSADQQSLYQNADAYVFVGTSRYSKKFKPEIAIRPKVRDQEGRMNYYWTLVEPGDKITFEATGNLVVPRYAFAMERNAGSGIIISDTPVHDCNTTCQTPKGAINTSLPFQNIHPITIGKCPKYVKSTKLRLATGLRNVPSIQSRGLFGAIAGFIEGGWTGMVDGWYGYHHQNEQGSGYAADLKSTQNAIDEITNKVNSVIEKMNTQFTAVGKEFNHLEKRIENLNKKVDDGFLDIWTYNAELLVLLENERTLDYHDSNVKNLYEKVRSQLKNNAKEIGNGCFEFYHKCDNTCMESVKNGTYDYPKYSEEAKLNREEIDGVKLESTRIYQILAIYSTVASSLVLVVSLGAISFWMCSNGSLQCRICI

SEQ ID NO: 7211 - protein, 566 aa, Artificial Sequence; identical to SEQ ID NO: 3022
  derived and/or modified protein sequence (wt) from hemagglutinin__InfluenzaA__AEO01106

SEQ ID NO: 7212 - protein, 566 aa, Artificial Sequence; identical to SEQ ID NO: 2669
  derived and/or modified protein sequence (wt) from hemagglutinin__InfluenzaA__AEO01107

SEQ ID NO: 7213 - protein, 566 aa, Artificial Sequence; identical to SEQ ID NO: 2669
  derived and/or modified protein sequence (wt) from hemagglutinin__InfluenzaA__AEO01108

SEQ ID NO: 7214 - protein, 566 aa, Artificial Sequence; identical to SEQ ID NO: 2669
  derived and/or modified protein sequence (wt) from hemagglutinin__InfluenzaA__AEO01109

SEQ ID NO: 7215 - protein, 566 aa, Artificial Sequence; identical to SEQ ID NO: 2669
  derived and/or modified protein sequence (wt) from hemagglutinin__InfluenzaA__AEO01110

SEQ ID NO: 7216 - protein, 566 aa, Artificial Sequence; identical to SEQ ID NO: 2669
  derived and/or modified protein sequence (wt) from hemagglutinin__InfluenzaA__AEO01111

SEQ ID NO: 7217 - protein, 566 aa, Artificial Sequence; identical to SEQ ID NO: 2669
  derived and/or modified protein sequence (wt) from hemagglutinin__InfluenzaA__AEO01112

SEQ ID NO: 7218 - protein, 566 aa, Artificial Sequence
  derived and/or modified protein sequence (wt) from hemagglutinin__InfluenzaA__AEO01113
MKAILVVLLYTFATANADTLCIGYHANNSTDTVDTVLEKNVTVTHSVNLLEDKHNGKLCKLRGVAPLHLGKCNIAGWILGNPECESLSTASSWSYIVETSSSDNGTCYPGDFIDYEELREQLSSVSSFERFEIFPKTSSWPNHDSNKGVTAACLHAGAKSFYKNLIWLVKKGNSYPKLSKSYINDKGKEVLVLWGIHHPSTSADQQSLYQNADAYVFVGTSRYSKKFKPEIAIRPKVRDQEGRMNYYWTLVEPGDKITFEATGNLVVPRYAFAMERNAGSGIIISDTPVHDCNTTCQTPKGAINTSLPFQNIHPITIGKCPKYVKSTKLRLATGLRNVPSIQSRGLFGAIAGFIEGGWTGMVDGWYGYHHQNEQGSGYAADLKSTQNAIDEITNKVNSVIEKMNTQFTAVGKEFNHLEKRIENLNKKVDDGFLDIWTYNAELLVLLENERTLDYHDSNVKNLYEKVRSQLKNNAKEIGNGCFEFYHKCDNTCMESVKNGTYDYPKYSEEAKLNREEIDGVKLESTRIYQILAIYSTVASSLVLVVSLGAISFWMCSNGSLQCRICI

SEQ ID NO: 7219 - protein, 566 aa, Artificial Sequence; identical to SEQ ID NO: 2911
  derived and/or modified protein sequence (wt) from hemagglutinin__InfluenzaA__AEO01114

SEQ ID NO: 7220 - protein, 566 aa, Artificial Sequence
  derived and/or modified protein sequence (wt) from hemagglutinin__InfluenzaA__AEO01115
MEAILVVLLYTFATANADTLCIGYHANNSTDTVDTVLEKNVTVTHSVNLLEDKHNGKLCKLRGVAPLHLGKCNIAGWILGNPECESLSTASSWSYIVETSSSDNGTCYPGDFIDYEELREQLSSVSSFERFEIFPKTSSWPNHDSNKGVTAACLHAGAKSFYKNLIWLVKKGNSYPKLSKSYINDKGKEVLVLWGIHHPSTSADQQSLYQNADAYVFVGTSRYSKKFKPEIAIRPKVRDQEGRMNYYWTLVEPGDKITFEATGNLVVPRYAFAMERNAGSGIIISDTPVHDCNTTCQTPKGAINTSLPFHNIHPITIGKCPKYVKSTKLRLATGLRNVPSIQSRGLFGAIAGFIEGGWTGMVDGWYGYHHQNEQGSGYAADLKSTQNAIDEITNKVNSVIEKMNTQFTAVGKEFNHLEKRIENLNKKVDDGFLDIWTYNAELLVLLENERTLDYHDSNVKNLYEKVRSQLKNNAKEIGNGCFEFYHKCDNTCMESVKNGTYDYPKYSEEAKLNREEIDGVKLESTRIYQILAIYSTVASSLVLVVSLGAISFWMCSNGSLQCRICI

SEQ ID NO: 7221 - protein, 566 aa, Artificial Sequence; identical to SEQ ID NO: 2669
  derived and/or modified protein sequence (wt) from hemagglutinin__InfluenzaA__AEO01116

SEQ ID NO: 7222 - protein, 566 aa, Artificial Sequence; identical to SEQ ID NO: 2669
  derived and/or modified protein sequence (wt) from hemagglutinin__InfluenzaA__AEO01117

SEQ ID NO: 7223 - protein, 566 aa, Artificial Sequence; identical to SEQ ID NO: 3535
  derived and/or modified protein sequence (wt) from hemagglutinin__InfluenzaA__AEO01118

SEQ ID NO: 7224 - protein, 566 aa, Artificial Sequence; identical to SEQ ID NO: 2669
  derived and/or modified protein sequence (wt) from hemagglutinin__InfluenzaA__AEO01119

SEQ ID NO: 7225 - protein, 566 aa, Artificial Sequence
  derived and/or modified protein sequence (wt) from hemagglutinin__InfluenzaA__AEO01120
MKAILVVLLYTFATANADTLCIGYHANNSTDTVDTVLEKNVTVTHSVNLLEDKHNGKLCKLRGVAPLHLGKCNIAGWILGNPECESLSTASSWSYIVETSSSDNGTCYPGDFIDYEELREQLSSVSSFERFEIFPKTSSWPNHDSNKGVTAACPHAGAKSFYKNLIWLVKKGNSYPKLSKSYINDKGKEVLVLWGIHHPSTSADQQSLYQNADAYVFVGTSRYSKKFKPEIAIRPKVREQEGRMNYYWTLVEPGDKITFEATGNLVVPRYAFAMERNAGSGIIISDTPVHDCNTTCQTPKGAINTSLPFQNIHPITIGKCPKYVKSTKLRLATGLRNIPSIQSRGLFGAIAGFIEGGWTGMVDGWYGYHHQNEQGSGYAADLKSTQNAIDEITNKVNSVIEKMNTQFTAVGKEFNHLEKRIENLNKKVDDGFLDVWTYNAELLVLLENERTLDYHDSNVKNLYEKVRSQLKNNAKEIGNGCFEFYHKCDNTCMESVKNGTYDYPKYSEEAKLNREEIDGVKLESTRIYQILAIYSTVASSLVLVVSLGAISFWMCSNGSLQCRICI

SEQ ID NO: 7226 - protein, 566 aa, Artificial Sequence; identical to SEQ ID NO: 2669
  derived and/or modified protein sequence (wt) from hemagglutinin__InfluenzaA__AEO01121

SEQ ID NO: 7227 - protein, 566 aa, Artificial Sequence; identical to SEQ ID NO: 3022
  derived and/or modified protein sequence (wt) from hemagglutinin__InfluenzaA__AEO01122

SEQ ID NO: 7228 - protein, 566 aa, Artificial Sequence; identical to SEQ ID NO: 2669
  derived and/or modified protein sequence (wt) from hemagglutinin__InfluenzaA__AEO01123

SEQ ID NO: 7229 - protein, 566 aa, Artificial Sequence; identical to SEQ ID NO: 2669
  derived and/or modified protein sequence (wt) from hemagglutinin__InfluenzaA__AEO01124

SEQ ID NO: 7230 - protein, 566 aa, Artificial Sequence; identical to SEQ ID NO: 3022
  derived and/or modified protein sequence (wt) from hemagglutinin__InfluenzaA__AEO01125

SEQ ID NO: 7231 - protein, 566 aa, Artificial Sequence
  derived and/or modified protein sequence (wt) from hemagglutinin__InfluenzaA__AEO01126
MKATLVVLLYTFATANADTLCIGYHANNSTDTVDTVLEKNVTVTHSVNLLEDKHNGKLCKLRGVAPLHLGKCNIAGWILGNPECESLSTASSWSYIVETSSSDNGTCYPGDFIDYEELREQLSSVSSFERFEIFPKTSSWPNHDSNKGVTAACPHAGAKSFYKNLIWLVKKGNSYPKLSKSYINDKGKEVLVLWGIHHPSTSADQQSLYQNADAYVFVGTSRYSKKFKPEIAIRPKVREQEGRMNYYWTLVEPGDKITFEATGNLVVPRYAFAMERNAGSGIIISDTPVHDCNTTCQTPKGAINTSLPFQNIHPITIGKCPKYVKSTKLRLATGLRNVPSIQSRGLFGAIAGFIEGGWTGMVDGWYGYHHQNEQGSGYAADLKSTQNAIDEITNKVNSVIEKMNTQFTAVGKEFNHLEKRIENLNKKVDDGFLDIWTYNAELLVLLENERTLDYHDSNVKNLYEKVRSQLKNNAKEIGNGCFEFYHKCDNTCMESVKNGTYDYPKYSEEAKLNREEIDGVKLESTRIYQILAIYSTVASSLVLVVSLGAISFWMCSNGSLQCRICI

SEQ ID NO: 7232 - protein, 566 aa, Artificial Sequence; identical to SEQ ID NO: 2669
  derived and/or modified protein sequence (wt) from hemagglutinin__InfluenzaA__AEO01127

SEQ ID NO: 7233 - protein, 566 aa, Artificial Sequence; identical to SEQ ID NO: 2669
  derived and/or modified protein sequence (wt) from hemagglutinin__InfluenzaA__AEO01128

SEQ ID NO: 7234 - protein, 566 aa, Artificial Sequence; identical to SEQ ID NO: 3022
  derived and/or modified protein sequence (wt) from hemagglutinin__InfluenzaA__AEO01129

SEQ ID NO: 7235 - protein, 566 aa, Artificial Sequence; identical to SEQ ID NO: 2669
  derived and/or modified protein sequence (wt) from hemagglutinin__InfluenzaA__AEO01130

SEQ ID NO: 7236 - protein, 566 aa, Artificial Sequence; identical to SEQ ID NO: 3022
  derived and/or modified protein sequence (wt) from hemagglutinin__InfluenzaA__AEO01131

SEQ ID NO: 7237 - protein, 566 aa, Artificial Sequence; identical to SEQ ID NO: 2669
  derived and/or modified protein sequence (wt) from hemagglutinin__InfluenzaA__AEO01132

SEQ ID NO: 7238 - protein, 566 aa, Artificial Sequence
  derived and/or modified protein sequence (wt) from hemagglutinin__InfluenzaA__AEO01133
MKAILVVLLYTFATANADTLCIGYHANNSTDTVDTVLEKNVTVTHSVNILEDKHNGKLCKLRGVAPLHLGKCNIAGWILGNPECESLSTASSWSYIVETSSSDNGTCYPGDFIDYEELREQLSSVSSFERFEIFPKTSSWPNHDSNKGVTAACPHAGAKSFYKNLIWLVKKGNSYPKLSKSYINDKGKEVLVLWGIHHPSTSADQQSLYQNADAYVFVGSSRYSKKFKPEIAIRPKVRDQEGRMNYYWTLVEPGDKITFEATGNLVVPRYAFAMERNAGSGIIISDTPVHDCNTTCQTPKGAINTSLPFQNIHPITIGKCPKYVKSTKLRLATGLRNVPSIQSRGLFGAIAGFIEGGWTGMVDGWYGYHHQNEQGSGYAADLKSTQNAIDEITNKVNSVIEKMNTQFTAVGKEFNHLEKRIENLNKKVDDGFLDIWTYNAELLVLLENERTLDYHDSNVKNLYEKVRSQLKNNAKEIGNGCFEFYHKCDNTCMESVKNGTYDYPKYSEEAKLNREEIDGVKLESTMIYQILAIYSTVASSLVLVVSLGAISFWMCSNGSLQCRICI

SEQ ID NO: 7239 - protein, 566 aa, Artificial Sequence; identical to SEQ ID NO: 3022
  derived and/or modified protein sequence (wt) from hemagglutinin__InfluenzaA__AEO01134

SEQ ID NO: 7240 - protein, 566 aa, Artificial Sequence; identical to SEQ ID NO: 3022
  derived and/or modified protein sequence (wt) from hemagglutinin__InfluenzaA__AEO01135

SEQ ID NO: 7241 - protein, 566 aa, Artificial Sequence; identical to SEQ ID NO: 2669
  derived and/or modified protein sequence (wt) from hemagglutinin__InfluenzaA__AEO01136

SEQ ID NO: 7242 - protein, 566 aa, Artificial Sequence; identical to SEQ ID NO: 3116
  derived and/or modified protein sequence (wt) from hemagglutinin__InfluenzaA__AEO01137

SEQ ID NO: 7243 - protein, 566 aa, Artificial Sequence; identical to SEQ ID NO: 3116
  derived and/or modified protein sequence (wt) from hemagglutinin__InfluenzaA__AEO01138

SEQ ID NO: 7244 - protein, 566 aa, Artificial Sequence; identical to SEQ ID NO: 2669
  derived and/or modified protein sequence (wt) from hemagglutinin__InfluenzaA__AEO01139

SEQ ID NO: 7245 - protein, 566 aa, Artificial Sequence; identical to SEQ ID NO: 2669
  derived and/or modified protein sequence (wt) from hemagglutinin__InfluenzaA__AEO01140

SEQ ID NO: 7246 - protein, 566 aa, Artificial Sequence; identical to SEQ ID NO: 2669
  derived and/or modified protein sequence (wt) from hemagglutinin__InfluenzaA__AEO01141

SEQ ID NO: 7247 - protein, 566 aa, Artificial Sequence; identical to SEQ ID NO: 2669
  derived and/or modified protein sequence (wt) from hemagglutinin__InfluenzaA__AEO01142

SEQ ID NO: 7248 - protein, 566 aa, Artificial Sequence
  derived and/or modified protein sequence (wt) from hemagglutinin__InfluenzaA__AEO01144
MKAILVVLLYTFATANADTLCIGYHANNSTDTVDTVLEKNVTVTHSVNLLEDKHNGKLCKLRGVAPLHLGKCNIAGWILGNPECESLSTASSWSYIVETSISDNGTCYPGDFIDYEELREQLSSVSSFERFEIFPKTSSWPNHDSNKGVTAACPHAGAKGFYKNLIWLVKKGNSYPKLSKSYINDKGKEVLVLWGIHHPSTSADQQSLYQNADAYVFVGTSRYSKKFKPEIAIRPKVRDQEGRMNYYWTLVEPGDKITFEATGNLVVPRYAFAMERNAGSGIIISDTPVHDCNTTCQTPKGAINTSLPFQNIHPITIGKCPKYVKSTKLRLATGLRNVPSIQSRGLFGAIAGFIEGGWTGMVDGWYGYHHQNEQGSGYAADLKSTQNAIDEITNKVNSVIEKMNTQFTAVGKEFNHLEKRIENLNKKVDDGFLDIWTYNAELLVLLENERTLDYHDSNVKNLYEKVRSQLKNNAKEIGNGCFEFYHKCDNTCMESVKNGTYDYPKYSEEAKLNREEIDGVKLESTRIYQILAIYSTVASSLVLVVSLGAISFWMCSNGSLQCRICI

SEQ ID NO: 7249 - protein, 566 aa, Artificial Sequence; identical to SEQ ID NO: 2849
  derived and/or modified protein sequence (wt) from hemagglutinin__InfluenzaA__AEO01145

SEQ ID NO: 7250 - protein, 566 aa, Artificial Sequence
  derived and/or modified protein sequence (wt) from hemagglutinin__InfluenzaA__AEO01146
MKAILVVLLYTFATANADTLCIGYHANNSTDTVDTVLEKNVTVTHSVNLLEDKHNGKLCKLRGVAPLHLGKCNIAGWILGNPECESLSTASSWSYIVETSSSDNGTCYPGDFIDYEELREQLSSVSSFERFEIFPKTSSWPNHDSNKGVTAACPHAGAKSFYKNLIWLVKKGNSYPKLSKSYINDKGKEVLVLWGIHHPSTSADQQSLYQNADAYVFVGTSRYSKKFNPEIAIRPKVRDQEGRMNYYWTLVEPGDKITFEATGNLVVPRYAFAMERNAGSGIIISDTPVHDCNTTCQTPKGAINTSLPFQNIHPITIGKCPKYVKSTKLRLATGLRNVPSIQSRGLFGAIAGFIEGGWTGMVDGWYGYHHQNEQGSGYAADLKSTQNAIDEITNKVNSVIEKMNTQFTAVGKEFNHLEKRIENLNKKVDDGFLDIWTYNAELLVLLENERTLDYHDSNVKNLYEKVRSQLKNNAKEIGNGCFEFYHKCDNTCMESVKNGTYDYPKYSEEAKLNREEIDGVKLESTRIYQILAIYSTVASSLVLVVSLGAISFWMCSNGSLQCRICI

SEQ ID NO: 7251 - protein, 566 aa, Artificial Sequence; identical to SEQ ID NO: 2669
  derived and/or modified protein sequence (wt) from hemagglutinin__InfluenzaA__AEO01147

SEQ ID NO: 7252 - protein, 566 aa, Artificial Sequence; identical to SEQ ID NO: 3022
  derived and/or modified protein sequence (wt) from hemagglutinin__InfluenzaA__AEO01148

SEQ ID NO: 7253 - protein, 566 aa, Artificial Sequence; identical to SEQ ID NO: 3022
  derived and/or modified protein sequence (wt) from hemagglutinin__InfluenzaA__AEO01149

SEQ ID NO: 7254 - protein, 566 aa, Artificial Sequence; identical to SEQ ID NO: 5876
  derived and/or modified protein sequence (wt) from hemagglutinin__InfluenzaA__AEO01150

SEQ ID NO: 7255 - protein, 566 aa, Artificial Sequence; identical to SEQ ID NO: 2669
  derived and/or modified protein sequence (wt) from hemagglutinin__InfluenzaA__AEO01151

SEQ ID NO: 7256 - protein, 566 aa, Artificial Sequence
  derived and/or modified protein sequence (wt) from hemagglutinin__InfluenzaA__AEO01152
MKAILIVLLYTFATANADTLCIGYHANNSTDTVDTVLEKNVTVTHSVNLLEDKHNGKLCKLRGVAPLHLGKCNIAGWILGNPECESLSTASSWSYIVETSSSDNGTCYPGDFIDYEELREQLSSVSSFERFEIFPKTSSWPNHDSNKGVTAACPHAGAKSFYKNLIWLVKKGNSYPKLSKSYINDKGKEVLVLWGIHHPSTSADQQSLYQNADAYVFVGTSRYSKKFKPEIAIRPKVRGQEGRMNYYWTLVEPGDKITFEATGNLVVPRYAFAMERNAGSGIIISDTPVHDCNTTCQTPKGAINTSLPFQNIHPITIGKCPKYVKSTKLRLATGLRNVPSIQSRGLFGAIAGFIEGGWTGMVDGWYGYHHQNEQGSGYAADLKSTQNAIDEITNKVNSVIEKMNTQFTAVGKEFNHLEKRIENLNKKVDDGFLDIWTYNAELLVLLENERTLDYHDSNVKNLYEKVRSQLKNNAKEIGNGCFEFYHKCDNTCMESVKNGTYDYPKYSEEAKLNREEIDGVKLESTRIYQILAIYSTVASSLVLVVSLGAISFWMCSNGSLQCRICI

SEQ ID NO: 7257 - protein, 566 aa, Artificial Sequence
  derived and/or modified protein sequence (wt) from hemagglutinin__InfluenzaA__AEO01153
MKAILVVLLYTFATANADTLCIGYHANNSTDTVDTVLEKNVTVTHSVNLLEDKHNGKLCKLRGVAPLHLGKCNIAGWILGNPECESLSTASSWSYIVETSSSDNGTCYPGDFIDYEELREQLSSVSSFERFEIFPKTSSWPNHDSNKGVTAACPHAGAKSFYKNLIWLVKKGNSYPKLSKSYINNKGKEVLVLWGIHHPSTSADQQSLYQNADAYVFVGTSRYSKKFKPEIAIRPKVRDQEGRMNYYWTLVEPGDKITFEATGNLVVPRYAFAMERNAGSGIIISNTPVHDCNTTCQTPKGAINTSLPFQNIHPITIGKCPKYVKSTKLRLATGLRNVPSIQSRGLFGAIAGFIEGGWTGMVDGWYGYHHQNEQGSGYAADLKSTQNAIDEITNKVNSVIEKMNTQFTAVGKEFNHLEKRIENLNKKVDDGFLDIWTYNAELLVLLENERTLDYHDSNVKNLYEKVRSQLKNNAKEIGNGCFEFYHKCDNTCMESVKNGTYDYPKYSEEAKLNREEIDGVKLESTRIYQILAIYSTVASSLVLVVSLGAISFWMCSNGSLQCRICI

SEQ ID NO: 7258 - protein, 566 aa, Artificial Sequence; identical to SEQ ID NO: 2669
  derived and/or modified protein sequence (wt) from hemagglutinin__InfluenzaA__AEO01154

SEQ ID NO: 7259 - protein, 566 aa, Artificial Sequence; identical to SEQ ID NO: 3022
  derived and/or modified protein sequence (wt) from hemagglutinin__InfluenzaA__AEO01155

SEQ ID NO: 7260 - protein, 566 aa, Artificial Sequence; identical to SEQ ID NO: 3022
  derived and/or modified protein sequence (wt) from hemagglutinin__InfluenzaA__AEO01156

SEQ ID NO: 7261 - protein, 566 aa, Artificial Sequence; identical to SEQ ID NO: 2669
  derived and/or modified protein sequence (wt) from hemagglutinin__InfluenzaA__AEO01157

SEQ ID NO: 7262 - protein, 566 aa, Artificial Sequence; identical to SEQ ID NO: 2669
  derived and/or modified protein sequence (wt) from hemagglutinin__InfluenzaA__AEO01158

SEQ ID NO: 7263 - protein, 566 aa, Artificial Sequence; identical to SEQ ID NO: 2669
  derived and/or modified protein sequence (wt) from hemagglutinin__InfluenzaA__AEO01159

SEQ ID NO: 7264 - protein, 566 aa, Artificial Sequence
  derived and/or modified protein sequence (wt) from hemagglutinin__InfluenzaA__AEO01160
MKAILVALLYTFATANADTLCIGYHANNSTDTVDTVLEKNVTVTHSVNLLEDKHNGKLCKLRGVAPLHLGKCNIAGWILGNPECESLSTASSWSYIVETSSSDNGTCYPGDFIDYEELREQLSSVSSFERFEIFPKTSSWPNHDSNKGVTAACPHAGAKSFYKNLIWLVKKGNSYPKLSKSYINDKGKEVLVLWGIHHPSTSADQQSLYQNADAYVFVGTSRYSKKFKPEIAIRPKVREQEGRMNYYWTLVEPGDKITFEATGNLVVPRYAFAMERNAGSGIIISDTPVHDCNTTCQTPKGAINTSLPFQNIHPITIGKCPKYVKSTKLRLATGLRNVPSIQSRGLFGAIAGFIEGGWTGMVDGWYGYHHQNEQGSGYAADLKSTQNAIDEITNKVNSVIEKMNTQFTAVGKEFNHLEKRIENLNKKVDDGFLDIWTYNAELLVLLENERTLDYHDSNVKNLYEKVRSQLKNNAKEIGNGCFEFYHKCDNTCMESVKNGTYDYPKYSEEAKLNREEIDGVKLESTRIYQILAIYSTVASSLVLVVSLGAISFWMCSNGSLQCRICI

SEQ ID NO: 7265 - protein, 566 aa, Artificial Sequence; identical to SEQ ID NO: 2669
  derived and/or modified protein sequence (wt) from hemagglutinin__InfluenzaA__AEO01161

SEQ ID NO: 7266 - protein, 566 aa, Artificial Sequence; identical to SEQ ID NO: 3022
  derived and/or modified protein sequence (wt) from hemagglutinin__InfluenzaA__AEO01162

SEQ ID NO: 7267 - protein, 566 aa, Artificial Sequence; identical to SEQ ID NO: 3022
  derived and/or modified protein sequence (wt) from hemagglutinin__InfluenzaA__AEO01163

SEQ ID NO: 7268 - protein, 566 aa, Artificial Sequence; identical to SEQ ID NO: 3022
  derived and/or modified protein sequence (wt) from hemagglutinin__InfluenzaA__AEO01164

SEQ ID NO: 7269 - protein, 566 aa, Artificial Sequence
  derived and/or modified protein sequence (wt) from hemagglutinin__InfluenzaA__AEO01165
MKAILVVLLYTFATANADTLCIGYHANNSTDTVDTVLEKNVTVTHSVNLLEDKHNGKLCKLRGVAPLHLGKCNIAGWILGNPECESLSTASSWSYIVETSSSDNGTCYPGDFIDYEELREQLSSVSSFERFEIFPKTSSWPNHDSNKGVTAACPHAGAKSFYKNLIWLVKKGNSYPKFSKSYINDKGKEVLVLWGIHHPSTSADQQSLYQNADAYVFVGTSRYSKKFKPEIAIRPKVRDQEGRMNYYWTLVEPGDKITFEATGNLVVPRYAFAMERNAGSGIIISDTPVHDCNTTCQTPKGAINTSLPFQNIHPITIGKCPKYVKSTKLRLATGLRNVPSIQSRGLFGAIAGFIEGGWTGMVDGWYGYHHQNEQGSGYAADLKSTQNAIDEITNKVNSVIEKMNTQFTAVGKEFNHLEKRIENLNKKVDDGFLDIWTYNAELLVLLENERTLDYHDSNVKNLYEKVRSQLKNNAKEIGNGCFEFYHKCDNTCMESVKNGTYDYPKYSEEAKLNREEIDGVKLESTRIYQILAIYSTVASSLVLVVSLGAISFWMCSNGSLQCRICI

SEQ ID NO: 7270 - protein, 566 aa, Artificial Sequence; identical to SEQ ID NO: 3022
  derived and/or modified protein sequence (wt) from hemagglutinin__InfluenzaA__AEO01166

SEQ ID NO: 7271 - protein, 566 aa, Artificial Sequence
  derived and/or modified protein sequence (wt) from hemagglutinin__InfluenzaA__AEO01167
MKAILVVLLYTFATANADTLCIGYHANNSTDTVDTVLEKNVTVTHSVNLLEDKHNGKLCKLRGVAPLHLGKCNIAGWILGNPECESLSTASSWSYIVETSSSDNGTCYPGDFIDYEELREQLSSVSSFERFEIFPKTSSWPNHDSNKGVTAACPHAGAKSFYKNLIWLVKKGNSYPKLSKSYINDKGKEVLVLWGIHHPSTSADQQSLYQNADAYVFVGTSRYSKKFKPEIAIRPKVREQEGRMNYYWTLVEPGDKITFEATGNLVVPRYAFAMERNAGSGIIISDTSVHDCNTTCQTPKGAINTSLPFQNIHPITIGKCPKYVKSTKLRLATGLRNVPSIQSRGLFGAIAGFIEGGWTGMVDGWYGYHHQNEQGSGYAADLKSTQNAIDEITNKVNSVIEKMNTQFTAVGKEFNHLEKRIENLNKKVDDGFLDIWTYNAELLVLLENERTLDYHDSNVKNLYEKVRSQLKNNAKEIGNGCFEFYHKCDNTCMESVKNGTYDYPKYSEEAKLNREEIDGVKLESTRIYQILAIYSTVASSLVLVVSLGAISFWMCSNGSLQCRICI

SEQ ID NO: 7272 - protein, 566 aa, Artificial Sequence; identical to SEQ ID NO: 2669
  derived and/or modified protein sequence (wt) from hemagglutinin__InfluenzaA__AEO01168

SEQ ID NO: 7273 - protein, 566 aa, Artificial Sequence; identical to SEQ ID NO: 3022
  derived and/or modified protein sequence (wt) from hemagglutinin__InfluenzaA__AEO01169

SEQ ID NO: 7274 - protein, 566 aa, Artificial Sequence; identical to SEQ ID NO: 3022
  derived and/or modified protein sequence (wt) from hemagglutinin__InfluenzaA__AEO01170

SEQ ID NO: 7275 - protein, 566 aa, Artificial Sequence; identical to SEQ ID NO: 3022
  derived and/or modified protein sequence (wt) from hemagglutinin__InfluenzaA__AEO01171

SEQ ID NO: 7276 - protein, 566 aa, Artificial Sequence; identical to SEQ ID NO: 2669
  derived and/or modified protein sequence (wt) from hemagglutinin__InfluenzaA__AEO01172

SEQ ID NO: 7277 - protein, 566 aa, Artificial Sequence
  derived and/or modified protein sequence (wt) from hemagglutinin__InfluenzaA__AEO01173
MKAILVVLLYTFATANADTLCIGYHANNSTDTVDTVLEKNVTVTHSVNLLEDKHNGKLCKLRGVAPLHLGKCNIAGWILGNPECESLSTASSWSYIVETSSSDNGTCYPGDFIDYEELREQLSSVSSFERFEIFPKTSSWPNHDSNKGVTAACPHAGAKSFYKNLIWLVKKGNSYPKLSKSYINDKGKEVLVLWGIHHPSTSADQQSLYQNADAYVFVGTSRYSKKFKPEIAIRPKVRDQEGRMNYYWTLVEPGGKITFEATGNLVVPRYAFAMERNAGSGIIISDTPVHDCNTTCQTPKGAINTSLPFQNIHPITIGKCPKYVKSTKLRLATGLRNVPSIQSRGLFGAIAGFIEGGWTGMVDGWYGYHHQNEQGSGYAADLKSTQNAIDEITNKVNSVIEKMNTQFTAVGKEFNHLEKRIENLNKKVDDGFLDIWTYNAELLVLLENERTLDYHDSNVKNLYEKVRSQLKNNAKEIGNGCFEFYHKCDNTCMESVKNGTYDYPKYSEEAKLNREEIDGVKLESTRIYQILAIYSTVASSLVLVVSLGAISFWMCSNGSLQCRICI

SEQ ID NO: 7278 - protein, 566 aa, Artificial Sequence
  derived and/or modified protein sequence (wt) from hemagglutinin__InfluenzaA__AEO01174
MKAILVVLLYTFATANADTLCIGYHANNSTDTVDTVLEKNVTVTHSVNLLEDKHNGKLCKLRGVAPLHLGKCNIAGWILGNPECESLSTASSWSYIVETSSSGNGTCYPGDFIDYEELREQLSSVSSFERFEIFPKTSSWPNHDSNKGVTAACPHAGAKSFYKNLIWLVKKGNSYPKLSKSYINDKGKEVLVLWGIHHPSTSADQQSLYQNADAYVFVGTSRYSKKFKPEIAIRPKVREQEGRMNYYWTLVEPGDKITFEATGNLVVPRYAFAMERNAGSGIIISDTPVHDCNTTCQTPKGAINTSLPFQNIHPITIGKCPKYVKSTKLRLATGLRNVPSIQSRGLFGAIAGFIEGGWTGMVDGWYGYHHQNEQGSGYAADLKSTQNAIDEITNKVNSVIEKMNTQFTAVGKEFNHLEKRIENLNKKVDDGFLDIWTYNAELLVLLENERTLDYHDSNVKNLYEKVRSQLKNNAKEIGNGCFEFYHKCDNTCMESVKNGTYDYPKYSEEAKLNREEIDGVKLESTRIYQILAIYSTVASSLVLVVSLGAISFWMCSNGSLQCRICI

SEQ ID NO: 7279 - protein, 566 aa, Artificial Sequence; identical to SEQ ID NO: 2669
  derived and/or modified protein sequence (wt) from hemagglutinin__InfluenzaA__AEO01176

SEQ ID NO: 7280 - protein, 566 aa, Artificial Sequence; identical to SEQ ID NO: 2669
  derived and/or modified protein sequence (wt) from hemagglutinin__InfluenzaA__AEO01177

SEQ ID NO: 7281 - protein, 566 aa, Artificial Sequence; identical to SEQ ID NO: 3022
  derived and/or modified protein sequence (wt) from hemagglutinin__InfluenzaA__AEO01179

SEQ ID NO: 7282 - protein, 566 aa, Artificial Sequence; identical to SEQ ID NO: 3022
  derived and/or modified protein sequence (wt) from hemagglutinin__InfluenzaA__AEO01180

SEQ ID NO: 7283 - protein, 566 aa, Artificial Sequence; identical to SEQ ID NO: 3022
  derived and/or modified protein sequence (wt) from hemagglutinin__InfluenzaA__AEO01181

SEQ ID NO: 7284 - protein, 566 aa, Artificial Sequence; identical to SEQ ID NO: 3022
  derived and/or modified protein sequence (wt) from hemagglutinin__InfluenzaA__AEO01182

SEQ ID NO: 7285 - protein, 566 aa, Artificial Sequence; identical to SEQ ID NO: 2669
  derived and/or modified protein sequence (wt) from hemagglutinin__InfluenzaA__AEO01183

SEQ ID NO: 7286 - protein, 566 aa, Artificial Sequence; identical to SEQ ID NO: 3022
  derived and/or modified protein sequence (wt) from hemagglutinin__InfluenzaA__AEO01184

SEQ ID NO: 7287 - protein, 566 aa, Artificial Sequence; identical to SEQ ID NO: 2669
  derived and/or modified protein sequence (wt) from hemagglutinin__InfluenzaA__AEO01185

SEQ ID NO: 7288 - protein, 566 aa, Artificial Sequence; identical to SEQ ID NO: 2669
  derived and/or modified protein sequence (wt) from hemagglutinin__InfluenzaA__AEO01186

SEQ ID NO: 7289 - protein, 566 aa, Artificial Sequence; identical to SEQ ID NO: 2669
  derived and/or modified protein sequence (wt) from hemagglutinin__InfluenzaA__AEO01187

SEQ ID NO: 7290 - protein, 566 aa, Artificial Sequence; identical to SEQ ID NO: 2669
  derived and/or modified protein sequence (wt) from hemagglutinin__InfluenzaA__AEO01188

SEQ ID NO: 7291 - protein, 566 aa, Artificial Sequence; identical to SEQ ID NO: 2669
  derived and/or modified protein sequence (wt) from hemagglutinin__InfluenzaA__AEO01189

SEQ ID NO: 7292 - protein, 566 aa, Artificial Sequence; identical to SEQ ID NO: 2669
  derived and/or modified protein sequence (wt) from hemagglutinin__InfluenzaA__AEO01191

SEQ ID NO: 7293 - protein, 566 aa, Artificial Sequence; identical to SEQ ID NO: 2669
  derived and/or modified protein sequence (wt) from hemagglutinin__InfluenzaA__AEO01192

SEQ ID NO: 7294 - protein, 566 aa, Artificial Sequence; identical to SEQ ID NO: 3983
  derived and/or modified protein sequence (wt) from hemagglutinin__InfluenzaA__AEO01193

SEQ ID NO: 7295 - protein, 566 aa, Artificial Sequence; identical to SEQ ID NO: 3022
  derived and/or modified protein sequence (wt) from hemagglutinin__InfluenzaA__AEO01194

SEQ ID NO: 7296 - protein, 566 aa, Artificial Sequence; identical to SEQ ID NO: 3022
  derived and/or modified protein sequence (wt) from hemagglutinin__InfluenzaA__AEO01195

SEQ ID NO: 7297 - protein, 566 aa, Artificial Sequence; identical to SEQ ID NO: 2669
  derived and/or modified protein sequence (wt) from hemagglutinin__InfluenzaA__AEO01196

SEQ ID NO: 7298 - protein, 566 aa, Artificial Sequence; identical to SEQ ID NO: 2669
  derived and/or modified protein sequence (wt) from hemagglutinin__InfluenzaA__AEO01197

SEQ ID NO: 7299 - protein, 566 aa, Artificial Sequence; identical to SEQ ID NO: 3022
  derived and/or modified protein sequence (wt) from hemagglutinin__InfluenzaA__AEO01198

SEQ ID NO: 7300 - protein, 566 aa, Artificial Sequence; identical to SEQ ID NO: 3535
  derived and/or modified protein sequence (wt) from hemagglutinin__InfluenzaA__AEO01200

SEQ ID NO: 7301 - protein, 566 aa, Artificial Sequence
  derived and/or modified protein sequence (wt) from hemagglutinin__InfluenzaA__AEO01201
MKAILVVLLYTFATANADTLCIGYHANNSTDTVDTVLEKNVTVTHSVNLLEEKHNGKLCKLRGVAPLHLGKCNIAGWILGNPECESLSTASSWSYIVETSSSDNGTCYPGDFIDYEELREQLSSVSSFERFEIFPKTSSWPNHDSNKGVTAACPHAGAKSFYKNLIWLVKKGNSYPKLSKSYINDKGKEVLVLWGIHHPSTSADQQSLYQNADAYVFVGTSRYSKKFKPEIAIRPKVREQEGRMNYYWTLVEPGDKITFEATGNLVVPRYAFAMERNAGSGIIISDTPVHDCNTTCQTPKGAINTSLPFQNIHPITIGKCPKYVKSTKLRLATGLRNVPSIQSRGLFGAIAGFIEGGWTGMVDGWYGYHHQNEQGSGYAADLKSTQNAIDEITNKVNSVIEKMNTQFTAVGKEFNHLEKRIENLNKKVDDGFLDIWTYNAELLVLLENERTLDYHDSNVKNLYEKVRSQLKNNAKEIGNGCFEFYHKCDNTCMESVKNGTYDYPKYSEEAKLNREEIDGVKLESTRIYQILAIYSTVASSLVLVVSLGAISFWMCSNGSLQCRICI

SEQ ID NO: 7302 - protein, 566 aa, Artificial Sequence; identical to SEQ ID NO: 2669
  derived and/or modified protein sequence (wt) from hemagglutinin__InfluenzaA__AEO01202

SEQ ID NO: 7303 - protein, 566 aa, Artificial Sequence; identical to SEQ ID NO: 4305
  derived and/or modified protein sequence (wt) from hemagglutinin__InfluenzaA__AEO01203

SEQ ID NO: 7304 - protein, 566 aa, Artificial Sequence; identical to SEQ ID NO: 2669
  derived and/or modified protein sequence (wt) from hemagglutinin__InfluenzaA__AEO01204

SEQ ID NO: 7305 - protein, 566 aa, Artificial Sequence; identical to SEQ ID NO: 2669
  derived and/or modified protein sequence (wt) from hemagglutinin__InfluenzaA__AEO01205

SEQ ID NO: 7306 - protein, 566 aa, Artificial Sequence; identical to SEQ ID NO: 2669
  derived and/or modified protein sequence (wt) from hemagglutinin__InfluenzaA__AEO01206

SEQ ID NO: 7307 - protein, 566 aa, Artificial Sequence; identical to SEQ ID NO: 2669
  derived and/or modified protein sequence (wt) from hemagglutinin__InfluenzaA__AEO01207

SEQ ID NO: 7308 - protein, 566 aa, Artificial Sequence; identical to SEQ ID NO: 2669
  derived and/or modified protein sequence (wt) from hemagglutinin__InfluenzaA__AEO01208

SEQ ID NO: 7309 - protein, 566 aa, Artificial Sequence; identical to SEQ ID NO: 3022
  derived and/or modified protein sequence (wt) from hemagglutinin__InfluenzaA__AEO01209

SEQ ID NO: 7310 - protein, 566 aa, Artificial Sequence; identical to SEQ ID NO: 2669
  derived and/or modified protein sequence (wt) from hemagglutinin__InfluenzaA__AEO01210

SEQ ID NO: 7311 - protein, 566 aa, Artificial Sequence; identical to SEQ ID NO: 3022
  derived and/or modified protein sequence (wt) from hemagglutinin__InfluenzaA__AEO01211

SEQ ID NO: 7312 - protein, 566 aa, Artificial Sequence; identical to SEQ ID NO: 2669
  derived and/or modified protein sequence (wt) from hemagglutinin__InfluenzaA__AEO01212

SEQ ID NO: 7313 - protein, 566 aa, Artificial Sequence; identical to SEQ ID NO: 2669
  derived and/or modified protein sequence (wt) from hemagglutinin__InfluenzaA__AEO01213

SEQ ID NO: 7314 - protein, 566 aa, Artificial Sequence
  derived and/or modified protein sequence (wt) from hemagglutinin__InfluenzaA__AEO01214
MKAILVVLLYTFATANADTLCIGYHANNSTDTVDTVLEKNVTVTHSVNLLEDKHNGKLCKLRGVAPLHLGKCNIAGWILGNPECESLSTASSWSYIVETSSSDNGTCYPGDFIDYEELREQLSSVSSFERFEIFPKTSSWPNHDSNKGVTAACPHAGAKSFYKNLIWLVKKGNSYPKLSKSYINDKGKEVLVLWGIHHPSTSADQQSLYQNADAYVFVGTSRYSKKFKPEIAIRPKVRDQEGRMNYYWTLVEPGDKITFEATGNLVAPRYAFAMERNAGSGIIISDTPVHDCNTTCQTPKGAINTSLPFQNIHPITIGKCPKYVKSTKLRLATGLRNVPSIQSRGLFGAIAGFIEGGWTGMVDGWYGYHHQNEQGSGYAADLKSTQNAIDEITNKVNSVIEKMNTQFTAVGKEFNHLEKRIENLNKKVDDGFLDIWTYNAELLVLLENERTLDYHDSNVKNLYEKVRSQLKNNAKEIGNGCFEFYHKCDNTCMESVKNGTYDYPKYSEEAKLNREEIDGVKLESTRIYQILAIYSTVASSLVLVVSLGAISFWMCSNGSLQCRICI

SEQ ID NO: 7315 - protein, 566 aa, Artificial Sequence; identical to SEQ ID NO: 3022
  derived and/or modified protein sequence (wt) from hemagglutinin__InfluenzaA__AEO01215

SEQ ID NO: 7316 - protein, 566 aa, Artificial Sequence
  derived and/or modified protein sequence (wt) from hemagglutinin__InfluenzaA__AEO01216
MKAILVVLLYTFATANADTLCIGYHANNSTDTVDTVLEKNVTVTHSVNLLEDKHNGKLCKLRGVAPLHLGKCNIAGWILGNPECESLSTASSWSYIVETSSSDNGTCYPGDFIDYEELREQLSSVSSFERFEIFPKTSSWPNHDSNKGVTAACPHAGAKSFYKNLIWLVKKGNSYPKLSKSYINDKGKEVLVLWGIHHPSTSADQQSLYQNADAYVFVGTSRYSKKFKPEIAIRPKVREQEGRMNYYWTLVEPGDKITFEATGNLVVPRYAFAMERNAGSGIIISDTPVHDCNTTCQTPKGAINTSLPFQNIHPITIGKCPKYVKSTKLRLATGLRNVPSIQSRGLFGAIAGFIEGGWTGMVDGWYGYHHQNEQGSGYAADLKSTQNAIDEITNKVNSVIEKMNTQFTAVGKEFNHLEKRVENLNKKVDDGFLDIWTYNAELLVLLENERTLDYHDSNVKNLYEKVRSQLKNNAKEIGNGCFEFYHKCDNTCMESVKNGTYDYPKYSEEAKLNREEIDGVKLESTRIYQILAIYSTVASSLVLVVSLGAISFWMCSNGSLQCRICI

SEQ ID NO: 7317 - protein, 566 aa, Artificial Sequence; identical to SEQ ID NO: 3022
  derived and/or modified protein sequence (wt) from hemagglutinin__InfluenzaA__AEO01217

SEQ ID NO: 7318 - protein, 566 aa, Artificial Sequence; identical to SEQ ID NO: 3022
  derived and/or modified protein sequence (wt) from hemagglutinin__InfluenzaA__AEO01218

SEQ ID NO: 7319 - protein, 566 aa, Artificial Sequence; identical to SEQ ID NO: 3022
  derived and/or modified protein sequence (wt) from hemagglutinin__InfluenzaA__AEO01219

SEQ ID NO: 7320 - protein, 566 aa, Artificial Sequence; identical to SEQ ID NO: 2760
  derived and/or modified protein sequence (wt) from hemagglutinin__InfluenzaA__AEO01220

SEQ ID NO: 7321 - protein, 566 aa, Artificial Sequence; identical to SEQ ID NO: 2669
  derived and/or modified protein sequence (wt) from hemagglutinin__InfluenzaA__AEO01221

SEQ ID NO: 7322 - protein, 566 aa, Artificial Sequence; identical to SEQ ID NO: 2669
  derived and/or modified protein sequence (wt) from hemagglutinin__InfluenzaA__AEO01222

SEQ ID NO: 7323 - protein, 566 aa, Artificial Sequence; identical to SEQ ID NO: 3022
  derived and/or modified protein sequence (wt) from hemagglutinin__InfluenzaA__AEO01223

SEQ ID NO: 7324 - protein, 566 aa, Artificial Sequence
  derived and/or modified protein sequence (wt) from hemagglutinin__InfluenzaA__AEO01224
MKAILVVLLYTFATANADTLCIGYHANNSTDTVDTVLEKNVTVTHSVNLLEDKHNGKLCKLRGVAPLHLGKCNIAGWILGNPECESLSTASSWSYIVETSSSDNGTCYPGDFIDYEELREQLSSVSSFERFEIFPKTSSWPNHDSNKGVTAACPHAGAKSFYKNLIWLVKKGNSYPKLSKSYINDKGKEVLVLWGIHHPSTSADQQSLYQNADAYVFVGTSRYSKKFKPEIAIRPKVRDQEGRMNYYWTLVEPGDKITFEATGNLVVPRYAFATERNAGSGIIISDTPVHDCNTTCQTPKGAINTSLPFQNIHPITIGKCPKYVKSTKLRLATGLRNVPSIQSRGLFGAIAGFIEGGWTGMVDGWYGYHHQNEQGSGYAADLKSTQNAIDEITNKVNSVIEKMNTQFTAVGKEFNHLEKRIENLNKKVDDGFLDIWTYNAELLVLLENERTLDYHDSNVKNLYEKVRSQLKNNAKEIGNGCFEFYHKCDNTCMESVKNGTYDYPKYSEEAKLNREEIDGVKLESTRIYQILAIYSTVASSLVLVVSLGAISFWMCSNGSLQCRICI

SEQ ID NO: 7325 - protein, 566 aa, Artificial Sequence
  derived and/or modified protein sequence (wt) from hemagglutinin__InfluenzaA__AEO01225
MKAILVVLLYTFATANADTLCIGYHANNSTDTVDTVLEKNVTVTHSVNLLEDKHNGKLCKLRGVAPLHLGKCNIAGWILGNPECESLSTASSWSYIVETSSSDNGTCYPGDFIDYEELREQLSSVSSFERFEIFPKTSSWPNHDSNKGVTAACPHAGAKSFYKNLIWLVKKGNSYPKLSKSYINDKGKEVLVLWGIHHPSTSADQQSLYQNADAYVFVGTSRYSKKFKPEIAIRPKVRDQEGRMNYYWTVVEPGDKITFEATGNLVVPRYAFAMERNAGSGIIISDTPVHDCNTTCQTPKGAINTSLPFQNIHPITIGKCPKYVKSTKLRLATGLRNVPSIQSRGLFGAIAGFIEGGWTGMVDGWYGYHHQNEQGSGYAADLKSTQNAIDEITNKVNSVIEKMNTQFTAVGKEFNHLEKRIENLNKKVDDGFLDIWTYNAELLVLLENERTLDYHDSNVKNLYEKVRSQLKNNAKEIGNGCFEFYHKCDNTCMESVKNGTYDYPKYSEEAKLNREEIDGVKLESTRIYQILAIYSTVASSLVLVVSLGAISFWMCSNGSLQCRICI

SEQ ID NO: 7326 - protein, 566 aa, Artificial Sequence
  derived and/or modified protein sequence (wt) from hemagglutinin__InfluenzaA__AEO01226
MKAILVVLLYTFATANADTLCIGYHANNSTDTVDTVLEKNVTVTHSVNLLEDKHNGKLCKLRGVAPLHLGKCNIAGWILGNPECESLSTASSWSYIVETSSSDNGTCYPGDFIDYEELREQLSSVSSFERFEIFPKTSSWPNHDSNKGVTAACPHAGAKSFYKNLIWLVKKGNSYPKLSKSYINDKGKEVLVLWGIHHPSTSADQQSLYQNADAYVFVGTSRYSKKFKPEIAIRPKVRDQEGRMNYYWTLVEPGDKITFEATGNLVVPRYAFAMERNDGSGIIISDTPVHDCNTTCQTPKGAINTSLPFQNIHPITIGKCPKYVKSTKLRLATGLRNVPSIQSRGLFGAIAGFIEGGWTGMVDGWYGYHHQNEQGSGYAADLKSTQNAIDEITNKVNSVIEKMNTQFTAVGKEFNHLEKRIENLNKKVDDGFLDIWTYNAELLVLLENERTLDYHDSNVKNLYEKVRSQLKNNAKEIGNGCFEFYHKCDNTCMESVKNGTYDYPKYSEEAKLNREEIDGVKLESTRIYQILAIYSTVASSLVLVVSLGAISFWMCSNGSLQCRICI

SEQ ID NO: 7327 - protein, 566 aa, Artificial Sequence; identical to SEQ ID NO: 4836
  derived and/or modified protein sequence (wt) from hemagglutinin__InfluenzaA__AEO01227

SEQ ID NO: 7328 - protein, 566 aa, Artificial Sequence; identical to SEQ ID NO: 2669
  derived and/or modified protein sequence (wt) from hemagglutinin__InfluenzaA__AEO01228

SEQ ID NO: 7329 - protein, 566 aa, Artificial Sequence; identical to SEQ ID NO: 2669
  derived and/or modified protein sequence (wt) from hemagglutinin__InfluenzaA__AEO01229

SEQ ID NO: 7330 - protein, 566 aa, Artificial Sequence
  derived and/or modified protein sequence (wt) from hemagglutinin__InfluenzaA__AEO01230
MKAILVVLLYTFATANADTLCIGYHANNSTDTVDTVLERNVTVTHSVNLLEDKHNGKLCKLRGVAPLHLGKCNIAGWILGNPECESLSTASSWSYIVETSSSDNGTCYPGDFIDYEELREQLSSVSSFERFEIFPKTSSWPNHDSNKGVTAACPHAGAKSFYKNLIWLVKKGNSYPKLSKSYINDKGKEVLVLWGIHHPSTSADQQSLYQNADAYVFVGTSRYSKKFKPEIAIRPKVRDQEGRMNYYWTLVEPGDKITFEATGNLVVPRYAFAMERNAGSGIIISDTPVHDCNTTCQTPKGAINTSLPFQNIHPITIGKCPKYVKSTKLRLATGLRNVPSIQSRGLFGAIAGFIEGGWTGMVDGWYGYHHQNEQGSGYAADLKSTQNAIDEITNKVNSVIEKMNTQFTAVGKEFNHLEKRIENLNKKVDDGFLDIWTYNAELLVLLENERTLDYHDSNVKNLYEKVRSQLKNNAKEIGNGCFEFYHKCDNTCMESVKNGTYDYPKYSKEAKLNREEIDGVKLESTRIYQILAIYSTVASSLVLVVSLGAISFWMCSNGSLQCRICI

SEQ ID NO: 7331 - protein, 566 aa, Artificial Sequence; identical to SEQ ID NO: 2669
  derived and/or modified protein sequence (wt) from hemagglutinin__InfluenzaA__AEO01231

SEQ ID NO: 7332 - protein, 566 aa, Artificial Sequence; identical to SEQ ID NO: 3022
  derived and/or modified protein sequence (wt) from hemagglutinin__InfluenzaA__AEO01232

SEQ ID NO: 7333 - protein, 566 aa, Artificial Sequence; identical to SEQ ID NO: 2669
  derived and/or modified protein sequence (wt) from hemagglutinin__InfluenzaA__AEO01233

SEQ ID NO: 7334 - protein, 566 aa, Artificial Sequence; identical to SEQ ID NO: 2669
  derived and/or modified protein sequence (wt) from hemagglutinin__InfluenzaA__AEO01234

SEQ ID NO: 7335 - protein, 566 aa, Artificial Sequence; identical to SEQ ID NO: 2669
  derived and/or modified protein sequence (wt) from hemagglutinin__InfluenzaA__AEO01235

SEQ ID NO: 7336 - protein, 566 aa, Artificial Sequence; identical to SEQ ID NO: 6541
  derived and/or modified protein sequence (wt) from hemagglutinin__InfluenzaA__AEO01236

SEQ ID NO: 7337 - protein, 566 aa, Artificial Sequence; identical to SEQ ID NO: 2669
  derived and/or modified protein sequence (wt) from hemagglutinin__InfluenzaA__AEO01237

SEQ ID NO: 7338 - protein, 566 aa, Artificial Sequence; identical to SEQ ID NO: 2669
  derived and/or modified protein sequence (wt) from hemagglutinin__InfluenzaA__AEO01238

SEQ ID NO: 7339 - protein, 566 aa, Artificial Sequence; identical to SEQ ID NO: 2669
  derived and/or modified protein sequence (wt) from hemagglutinin__InfluenzaA__AEO01240

SEQ ID NO: 7340 - protein, 566 aa, Artificial Sequence; identical to SEQ ID NO: 3022
  derived and/or modified protein sequence (wt) from hemagglutinin__InfluenzaA__AEO01241

SEQ ID NO: 7341 - protein, 566 aa, Artificial Sequence; identical to SEQ ID NO: 2669
  derived and/or modified protein sequence (wt) from hemagglutinin__InfluenzaA__AEO01242

SEQ ID NO: 7342 - protein, 566 aa, Artificial Sequence
  derived and/or modified protein sequence (wt) from hemagglutinin__InfluenzaA__AEO01244
MKAILVVLLYTFATANADTLCIGYHANNSTDTVDTVLEKNVTVTHSVNLLEDKHNGKLCKLRGVAPLHLGKCNIAGWILGNPECESLSTASSWSYIVETSSSDNGTCYPGDFIDYEELREQLSSVSSFERFEIFPKTSSWPNHDSNKGVTAACPHAGAKSFYKNLIWLVKKGNSYPKLSKSYINDKGKEVLVLWGIHHPSTSADQQSLYQNADAYVFVGTSKYSKKFKPEIAIRPKVRGQEGRMNYYWTLVEPGDKITFEATGNLVVPRYAFAMERNAGSGIIISDTPVHDCNTTCQTPKGAINTSLPFQNIHPITIGKCPKYVKSTKLRLATGLRNVPSIQSRGLFGAIAGFIEGGWTGMVDGWYGYHHQNEQGSGYAADLKSTQNAIDEITNKVNSVIEKMNTQFTAVGKEFNHLEKRIENLNKKVDDGFLDIWTYNAELLVLLENERTLDYHDSNVKNLYEKVRSQLKNNAKEIGNGCFEFYHKCDNTCMESVKNGTYDYPKYSEEAKLNREEIDGVKLESTRIYQILAIYSTVASSLVLVVSLGAISFWMCSNGSLQCRICI

SEQ ID NO: 7343 - protein, 566 aa, Artificial Sequence; identical to SEQ ID NO: 2669
  derived and/or modified protein sequence (wt) from hemagglutinin__InfluenzaA__AEO01245

SEQ ID NO: 7344 - protein, 566 aa, Artificial Sequence
  derived and/or modified protein sequence (wt) from hemagglutinin__InfluenzaA__AEO01247
MKAILVVLLYTFATANADTLCIGYHANNSTDTVDTVLEKNVTVTHSVNLLEDKHNGKLCKLRGVAPLHLGKCNIAGWILGNPECESLSTASSWSYIVETSSSDNGTCYPGDFIDYEELREQLSSVSSFERFEIFPKTSSWPNHDSNKGVTAACPHAGAKSFYKNLIWLVKKGNSYPKLSKSYINDKGKEVLVLWGIHHPSTSADQQSLYQNADAYVFVGTSRYSKKFKPEIAIRPKVRDQEGRMNYYWTLVEPGDKITFEATGNLVVPRYAFAMERNAGSGILISDTPVHDCNTTCQTPKGAINTSLPFQNIHPITIGKCPKYVKSTKLRLATGLRNVPSIQSRGLFGAIAGFIEGGWTGMVDGWYGYHHQNEQGSGYAADLKSTQHAIDEITNKVNSVIEKMNTQFTAVGKEFNHLEKRIENLNKKVDDGFLDIWTYNAELLVLLENERTLDYHDSNVKNLYEKVRSQLKNNAKEIGNGCFEFYHKCDNTCMESVKNGTYDYPKYSEEAKLNREEIDGVKLESTRIYQILAIYSTVASSLVLVVSLGAISFWMCSNGSLQCRICI

SEQ ID NO: 7345 - protein, 566 aa, Artificial Sequence; identical to SEQ ID NO: 2669
  derived and/or modified protein sequence (wt) from hemagglutinin__InfluenzaA__AEO01248

SEQ ID NO: 7346 - protein, 566 aa, Artificial Sequence; identical to SEQ ID NO: 2669
  derived and/or modified protein sequence (wt) from hemagglutinin__InfluenzaA__AEO01249

SEQ ID NO: 7347 - protein, 566 aa, Artificial Sequence
  derived and/or modified protein sequence (wt) from hemagglutinin__InfluenzaA__AEO01250
MKAILVVLLYTFATANADTLCIGYHANNSTDTVDTVLEKNVTVTHSVNLLEDKHNGKLCKLRGVAPLHLGKCNIAGWILGNPECESLSTASSWSYIVETSSSDNGTCYPGDFIDYEELREQLSSVSSFERFEIFPKTSSWPNHDSNKGVTAACPHAGAKSFYKNLIWLVKKGNSYPKLSKSYINDKGKEVLVLWGIHHPSTSADQQSLYQNEDAYVFVGTSRYSKKFKPEIAIRPKVRDQEGRMNYYWTLVEPGDKITFEATGNLVVPRYAFAMERNAGSGIIISDTPVHDCNTTCQTPKGAINTSLPFQNIHPITIGKCPKYVKSTKLRLATGLRNVPSIQSRGLFGAIAGFIEGGWTGMVDGWYGYHHQNEQGSGYAADLKSTQNAIDEITNKVNSVIEKMNTQFTAVGKEFNHLEKRIENLNKKVDDGFLDIWTYNAELLVLLENERTLDYHDSNVKNLYEKVRSQLKNNAKEIGNGCFEFYHKCDNTCMESVKNGTYDYPKYSEEAKLNREEIDGVKLESTRIYQILAIYSTVASSLVLVVSLGAISFWMCSNGSLQCRICI

SEQ ID NO: 7348 - protein, 566 aa, Artificial Sequence; identical to SEQ ID NO: 4266
  derived and/or modified protein sequence (wt) from hemagglutinin__InfluenzaA__AEO01251

SEQ ID NO: 7349 - protein, 566 aa, Artificial Sequence; identical to SEQ ID NO: 2669
  derived and/or modified protein sequence (wt) from hemagglutinin__InfluenzaA__AEO01252

SEQ ID NO: 7350 - protein, 566 aa, Artificial Sequence; identical to SEQ ID NO: 2669
  derived and/or modified protein sequence (wt) from hemagglutinin__InfluenzaA__AEO01253

SEQ ID NO: 7351 - protein, 566 aa, Artificial Sequence
  derived and/or modified protein sequence (wt) from hemagglutinin__InfluenzaA__AEO01254
MKAILVVLLYTFATANADTLCIGYHANNSTDTVDTVLEKNVTVTHSVNLLEDKHNGKLCKLRGVAPLHLGKCNIAGWILGNPECESLSTASSWSYIVETSSSDNGTCYPGDFIDYEELREQLSSVSSFERFEIFPKTSSWPNHDSNKGVTAACPHAGAKSFYKNLIWLVKKGNSYPKLSKSYINNKGKEVLVLWGIHHPSTSADQQSLYQNADAYVFVGTSRYSKKFKPEIAIRPKVRDQEGRMNYYWTLVEPGDKITFEATGNLVVPRYAFAMERNAGSGIIISDTPVHDCNTTCQTPKGAINTSLPFQNIHPITIGKCPKYVKSTKLRLATGLRNVPSIQSRGLFGAIAGFIEGGWTGMVDGWYGYHHQNEQGSGYAADLKSTQNAIDKITNKVNSVIEKMNTQFTAVGKEFNHLEKRIENLNKKVDDGFLDIWTYNAELLVLLENERTLDYHDSNVKNLYEKVRSQLKNNAKEIGNGCFEFYHKCDNTCMESVKNGTYDYPKYSEEAKLNREEIDGVKLESTRIYQILAIYSTVASSLVLVVSLGAISFWMCSNGSLQCRICI

SEQ ID NO: 7352 - protein, 566 aa, Artificial Sequence; identical to SEQ ID NO: 3116
  derived and/or modified protein sequence (wt) from hemagglutinin__InfluenzaA__AEO01256

SEQ ID NO: 7353 - protein, 566 aa, Artificial Sequence; identical to SEQ ID NO: 6088
  derived and/or modified protein sequence (wt) from hemagglutinin__InfluenzaA__AEO01257

SEQ ID NO: 7354 - protein, 566 aa, Artificial Sequence; identical to SEQ ID NO: 2669
  derived and/or modified protein sequence (wt) from hemagglutinin__InfluenzaA__AEO01258

SEQ ID NO: 7355 - protein, 566 aa, Artificial Sequence; identical to SEQ ID NO: 7351
  derived and/or modified protein sequence (wt) from hemagglutinin__InfluenzaA__AEO01259

SEQ ID NO: 7356 - protein, 566 aa, Artificial Sequence; identical to SEQ ID NO: 5224
  derived and/or modified protein sequence (wt) from hemagglutinin__InfluenzaA__AEO01260

SEQ ID NO: 7357 - protein, 566 aa, Artificial Sequence
  derived and/or modified protein sequence (wt) from hemagglutinin__InfluenzaA__AEO01261
MKAILVVLLYTFATANADTLCIGYHANNSTDTVDTVLEKNVTVTHSVNLLEDKHNGKLCKLRGVAPLHLGKCNIAGWILGNPECESLSTASSWSYIVETSSSDNGTCYPGDFIDYEELREQLSSVSSFERFEIFPKTSSWPNHDSNKGVTAACPHAGAKSFYKNLIWLVKKGNSYPKLSKSYINDKGKEVLVLWGIHHPSTSADQQSLYQNADAYVFVGTSRYSKKFKPEIAIRPKVRDQEGRMNYYWTLVEPGDKITFEATGNLVVPRYAFAMERNAGSGIIISDTPVHDCNTTCQTPKGAINTSLPFQNIHPITIGKCPKYVKSTKLRMATGLRNVPSIQSRGLFGAIAGFIEGGWTGMVDGWYGYHHQNEQGSGYAADLKSTQNAIDEITNKVNSVIEKMNTQFTAVGKEFNHLEKRIENLNKKVDDGFLDIWTYNAELLVLLENERTLDYHDSNVKNLYEKVRSQLKNNAKEIGNGCFEFYHKCDNTCMESVKNGTYDYPKYSEEAKLNREEIDGVKLESTGIYQILAIYSTVASSLVLVVSLGAISFWMCSNGSLQCRICI

SEQ ID NO: 7358 - protein, 566 aa, Artificial Sequence; identical to SEQ ID NO: 2669
  derived and/or modified protein sequence (wt) from hemagglutinin__InfluenzaA__AEO01262

SEQ ID NO: 7359 - protein, 566 aa, Artificial Sequence; identical to SEQ ID NO: 4351
  derived and/or modified protein sequence (wt) from hemagglutinin__InfluenzaA__AEO01263

SEQ ID NO: 7360 - protein, 566 aa, Artificial Sequence; identical to SEQ ID NO: 3022
  derived and/or modified protein sequence (wt) from hemagglutinin__InfluenzaA__AEO01264

SEQ ID NO: 7361 - protein, 566 aa, Artificial Sequence; identical to SEQ ID NO: 2669
  derived and/or modified protein sequence (wt) from hemagglutinin__InfluenzaA__AEO01265

SEQ ID NO: 7362 - protein, 566 aa, Artificial Sequence
  derived and/or modified protein sequence (wt) from hemagglutinin__InfluenzaA__AEO01266
MKAILVVLLYTFATANADTLCIGYHANNSTDTVDTVLEKNVTVTHSVNLLEDKHNGKLCKLRGVAPLHLGKCNIAGWILGNPECESLSTASSWSYIVETSSSDNGTCYPGDFIDYEELREQLSSVSSFERFEIFPKTSSWPNHDSNKGVTAACPHAGAKSFYKNLIWLVKKGNSYPKLSKSYINDKGKEVLVLWGIHHPSTSADQQSLYQNADAYVFVGTSRYSKKFKPEIAIRPKVRGQEGRMNYYWTLVEPGDKITFEATGNLVVPRYAFAMERNAGSGIIISDAPVHDCNTTCQTPKGAINTSLPFQNIHPITIGKCPKYVKSTKLRLATGLRNVPSIQSRGLFGAIAGFIEGGWTGMVDGWYGYHHQNEQGSGYAADLKSTQNAIDEITNKVNSVIEKMNTQFTAVGKEFNHLEKRIENLNKKVDDGFLDIWTYNAELLVLLENERTLDYHDSNVKNLYEKVRSQLKNNAKEIGNGCFEFYHKCDNTCMESVKNGTYDYPKYSEEAKLNREEIDGVKLESTRIYQILAIYSTVASSLVLVVSLGAISFWMCSNGSLQCRICI

SEQ ID NO: 7363 - protein, 566 aa, Artificial Sequence; identical to SEQ ID NO: 2669
  derived and/or modified protein sequence (wt) from hemagglutinin__InfluenzaA__AEO01267

SEQ ID NO: 7364 - protein, 566 aa, Artificial Sequence; identical to SEQ ID NO: 2669
  derived and/or modified protein sequence (wt) from hemagglutinin__InfluenzaA__AEO01268

SEQ ID NO: 7365 - protein, 566 aa, Artificial Sequence
  derived and/or modified protein sequence (wt) from hemagglutinin__InfluenzaA__AEO01269
MKAILVVLLYTFATANADTLCIGYHANNSTDTVDTVLEKNVTVTHSVNLLEDKHNGKLCKLRGVAPLHLGKCNIAGWILGNPECESLSTASSWSYIVETSSSDNGTCYPGDFIDYEELREQLSSVSSFERFEIFPKTSSWPNHDSNKGVTAACPHAGAKSFYKNLIWLVKKGNSYPKLSKSYINDKGKEVLVLWGIHHPSTSADQQSLYQNADAYVFVGTSRYSKKFKPEIAIRPKVREQEGRMNYYWTLVEPGDKITFEATGNLVVPRYAFAMERNAGSGIVISDTPVHDCNTTCQTPKGAINTSLPFQNIHPITIGKCPKYVKSTKLRLATGLRNVPSIQSRGLFGAIAGFIEGGWTGMVDGWYGYHHQNEQGSGYAADLKSTQNAIDEITNKVNSVIEKMNTQFTAVGKEFNHLEKRMENLNKKVDDGFLDIWTYNAELLVLLENERTLDYHDSNVKNLYEKVRSQLKNNAKEIGNGCFEFYHKCDNTCMESVKNGTYDYPKYSEEAKLNREEIDGVKLESTRIYQILAIYSTVASSLVLVVSLGAISFWMCSNGSLQCRICI

SEQ ID NO: 7366 - protein, 566 aa, Artificial Sequence; identical to SEQ ID NO: 3833
  derived and/or modified protein sequence (wt) from hemagglutinin__InfluenzaA__AEO01270

SEQ ID NO: 7367 - protein, 566 aa, Artificial Sequence
  derived and/or modified protein sequence (wt) from hemagglutinin__InfluenzaA__AEO01271
MKAILVVLLYTFATANADTLCIGYHANNSTDTVDTVLEKNVTVTHSVNLLEDKHNGKLCKLRGVAPLHLGKCDIAGWILGNPECESLSTASSWSYIVETPSSDNGTCYPGDFIDYEELREQLSSVSSFERFEIFPKTSSWPNHDSNKGVTAACPHAGAKSFYKNLIWLVKKGNSYPKLSKSYINDKGKEVLVLWGIHHPSTSADQQSLYQNADAYVFVGTSRYSKKFKPEIAIRPKVRDQEGRMNYYWTLVEPGDKITFEATGNLVVPRYAFAMERNAGSGIIISDTPVHDCNTTCQTPKGAINTSLPFQNIHPITIGKCPKYVKSTKLRLATGLRNVPSIQSRGLFGAIAGFIEGGWTGMVDGWYGYHHQNEQGSGYAADLKSTQHAIDEITNKVNSVIEKMNTQFTAVGKEFNHLEKRIENLNKKVDDGFLDIWTYNAELLVLLENERTLDYHDSNVKNLYEKVRSQLKNNAKEIGNGCFEFYHKCDNTCMESVKNGTYDYPKYSEEAKLNREEIDGVKLESTRIYQILAIYSTVASSLVLVVSLGAISFWMCSNGSLQCRICI

SEQ ID NO: 7368 - protein, 566 aa, Artificial Sequence; identical to SEQ ID NO: 2669
  derived and/or modified protein sequence (wt) from hemagglutinin__InfluenzaA__AEO01272

SEQ ID NO: 7369 - protein, 566 aa, Artificial Sequence; identical to SEQ ID NO: 2669
  derived and/or modified protein sequence (wt) from hemagglutinin__InfluenzaA__AEO01273

SEQ ID NO: 7370 - protein, 566 aa, Artificial Sequence; identical to SEQ ID NO: 2669
  derived and/or modified protein sequence (wt) from hemagglutinin__InfluenzaA__AEO01274

SEQ ID NO: 7371 - protein, 566 aa, Artificial Sequence; identical to SEQ ID NO: 4837
  derived and/or modified protein sequence (wt) from hemagglutinin__InfluenzaA__AEO01275

SEQ ID NO: 7372 - protein, 566 aa, Artificial Sequence
  derived and/or modified protein sequence (wt) from hemagglutinin__InfluenzaA__AEO01276
MKAILVVLLYTFATANADTLCIGYHANNSTDTVDTVLKKNVTVTHSVNLLEDKHNGKLCKLRGVAPLHLGKCNIAGWILGNPECESLSTASSWSYIVETSSSDNGTCYPGDFIDYEELREQLSSVSSFERFEIFPKTSSWPNHDSNKGVTAACPHAGAKSFYKNLIWLVKKGNSYPKLSKSYINDKGKEVLVLWGIHHPSTSADQQSLYQNADAYVFVGTSRYSKKFKPEIAIRPKVRDQEGRMNYYWTLVEPGDKITFEATGNLVVPRYAFAMERNAGSGIIISDTPVHDCNTTCQTPKGAINTSLPFQNIHPITIGKCPKYVKSTKLRLATGLRNVPSIQSRGLFGAIAGFIEGGWTGMVDGWYGYHHQNEQGSGYAADLKSTQNAIDEITNKVNSVIEKMNTQFTAVGKEFNHLEKRIENLNKKVDDGFLDIWTYNAELLVLLENERTLDYHDSNVKNLYEKVRSQLKNNAEEIGNGCFEFYHKCDNTCMESVKNGTYDYPKYSEEAKLNREEIDGVKLESTRIYQILAIYSTVASSLVLVVSLGAISFWMCSNGSLQCRICI

SEQ ID NO: 7373 - protein, 566 aa, Artificial Sequence; identical to SEQ ID NO: 2669
  derived and/or modified protein sequence (wt) from hemagglutinin__InfluenzaA__AEO01277

SEQ ID NO: 7374 - protein, 566 aa, Artificial Sequence
  derived and/or modified protein sequence (wt) from hemagglutinin__InfluenzaA__AEO01278
MKAILVVLLYTFATANADTLCIGYHANNSTDTVDTVLEKNVTVTHSVNLLEDKHNGKLCKLRGVAPLHLGKCDIAGWILGNPECESLSTASSWSYIVETSSSDNGTCYPGDFIDYEELREQLSSVSSFERFEIFPKTSSWPNHDSNKGVTAACPHAGAKSFYKNLIWLVKKGNSYPKLSKSYINDKGKEVLVLWGIHHPSTSADQQSLYQNADAYVFVGTSRYSKKFKPEIAIRPKVRDQEGRMNYYWTLVEPGDKITFEATGNLVVPRYAFAMERNAGSGIIISDTPVHDCNTTCQTPKGAINTSLPFQNIHPITIGKCPKYVKSTKLRLATGLRNVPSIQSRGLFGAIAGFIEGGWTGMVDGWYGYHHQNEQGSGYAADLKSTQHAIDEITNKVNSVIEKMNTQFTAVGKEFNHLEKRIANLNKKVDDGFLDIWTYNAELLVLLENERTLDYHDSNVKNLYEKVRSQLKNNAKEIGNGCFEFYHKCDNTCMESVKNGTYDYPKYSEEAKLNREEIDGVKLESTRIYQILAIYSTVASSLVLVVSLGAISFWMCSNGSLQCRICI

SEQ ID NO: 7375 - protein, 566 aa, Artificial Sequence
  derived and/or modified protein sequence (wt) from hemagglutinin__InfluenzaA__AEO01279
MKAILVVLLYTFATANADTLCIGYHANNSTDTVDTVLEKNVTVTHSVNLLEDKHNGKLCKLRGVAPLHLGKCNIAGWILGNPECESLSTASSWSYIVETSSSDNGTCYPGDFIDYEELREQLSSVSSFERFEIFPKTSSWPNHDSNKGVTAACPHAGAKSFYKNLIWLVKKGNSYPKLSKSYINDKGKEVLVLWGIHHPSTSADQQSLYQNADAYVFVGTSRYSKKFKPEIAIRPKVRDQEGRMNYYWTLVEPGDKITFEATGNLVVPRYAFAMERTAGSGIIISDTPVHDCNTTCQTPKGAINTSLPFQNIHPITIGKCPKYVKSTKLRLATGLRNVPSIQSRGLFGAIAGFIEGGWTGMVDGWYGYHHQNEQGSGYAADLKSTQNAIDKITNKVNSVIEKMNTQFTAVGKEFNHLEKRIENLNKKVDDGFLDIWTYNAELLVLLENERTLDYHDSNVKNLYEKVRSQLKNNAKEIGNGCFEFYHKCDNTCMESVKNGTYDYPKYSEEAKLNREEIDGVKLESTRIYQILAIYSTVASSLVLVVSLGAISFWMCSNGSLQCRICI

SEQ ID NO: 7376 - protein, 566 aa, Artificial Sequence
  derived and/or modified protein sequence (wt) from hemagglutinin__InfluenzaA__AEO01282
MKAILVVLLYTFATANADTLCIGYHANNSTDTVDTVLEKNVTVTHSVNLLEDKHNGKLCKLRGVAPLHLGKCNIAGWILGNPECESLSTASSWSYIVETSSSDNGTCYPGDFIDYEELREQLSSVSSFERFEIFPKTSSWPNHDSNKGVTAACPHAGAKSFYKNLIWLVKKGNSYPKLSKSYINDKGKEVLVLWGIHHPSTSADQQSLYQNADAYVFVGTSRYSKKFKPEIAIRPKVRDQEGRMNYYWTLVEPGDKITFEATGNLVVPRYAFAMERNAGSGIIISDTPVHDCNTTCQTPKGAINTSLPFQNIHPITIGKCPKYVKSTKLRLATGLRNVPSIQSRGLFGAIAGFIEGGWTGMVDGWYGYHHQNEQGSGYAADLKSTQNAIDEITNKVNSVIEKMNTQFTAVGKEFNHLEKRIENLNKKVDDGFLDIWTYNAELLVLLENERTLDYHDSNVKKLYEKVRSQLKNNAKEIGNGCFEFYHKCNNTCMESVKNGTYDYPKYSEEAKLNREEIDGVKLESTRIYQILAIYSTVASSLVLVVSLGAISFWMCSNGSLQCRICI

SEQ ID NO: 7377 - protein, 566 aa, Artificial Sequence; identical to SEQ ID NO: 3771
  derived and/or modified protein sequence (wt) from hemagglutinin__InfluenzaA__AEO01283

SEQ ID NO: 7378 - protein, 566 aa, Artificial Sequence
  derived and/or modified protein sequence (wt) from hemagglutinin__InfluenzaA__AEO01284
MKAILVVLLYTFAIANADTLCIGYHANNSTDTVDTVLEKNVTVTHSVNLLEDKHNGKLCKLRGVAPLHLGKCNIAGWILGNPECESLSTASSWSYIVETSSSDNGTCYPGDFIDYEELREQLSSVSSFERFEIFPKTSSWPNHDSNKGVTAACPHAGAKSFYKNLIWLVKKGNSYPKLSKSYINDKGKEVLVLWGIHHPSTSADQQSLYQNADAYVFVGTSRYSKKFKPEIAIRPKVRDQEGRMNYYWTLVEPGDKITFEATGNLVVPRYAFAMERNAGSGIIISDTPVHDCNTTCQTPKGAINTSLPFQNIHPITIGKCPKYVKSTKLRLATGLRNVPSIQSRGLFGAIAGFIEGGWTGMVDGWYGYHHQNEQGSGYAADLKSTQHAIDEITNKVNSVIEKMNTQFTAVGKEFNHLEKRIENLNKKVDDGFLDIWTYNAELLVLLENERTLDYHDSNVKNLYEKVRSQLKNNAKEIGNGCFEFYHKCDNTCMESVKNGTYDYPKYSEEAKLNREEINGVKLESTRIYQILAIYSTVASSLVLVVSLGAISFWMCSNGSLQCRICI

SEQ ID NO: 7379 - protein, 566 aa, Artificial Sequence; identical to SEQ ID NO: 3770
  derived and/or modified protein sequence (wt) from hemagglutinin__InfluenzaA__AEO01285

SEQ ID NO: 7380 - protein, 566 aa, Artificial Sequence; identical to SEQ ID NO: 3863
  derived and/or modified protein sequence (wt) from hemagglutinin__InfluenzaA__AEO01286

SEQ ID NO: 7381 - protein, 566 aa, Artificial Sequence
  derived and/or modified protein sequence (wt) from hemagglutinin__InfluenzaA__AEO01287
MKAILVVLLYTFATANSDTLCIGYHANNSTDTVDTVLEKNVTVTHSVNLLEDKHNGKLCKLRGVAPLHLGKCNIAGWILGNPECESLSTASSWSYIVETSSSDNGTCYPGDFIDYEELREQLSSVSSFERFEIFPKTSSWPNHDSNKGVTAACPHAGAKSFYKNLIWLVKKGNSYPKLSKSYINDKGKEVLVLWGIHHPSTSADQQSLYQNADAYVFVGTSRYSKKFKPEIAIRPKVRDQEGRMNYYWTLVEPGDKITFEATGNLVVPRYAFAMERNAGSGIIISDTPVHDCNTTCQTPKGAINTSLPFQNIHPITIGKCPKYVKSTKLRLATGLRNVPSIQSRGLFGAIAGFIEGGWTGMVDGWYGYHHQNEQGSGYAADLKSTQNAIDEITNKVNSVIEKMNTQFTAVGKEFNHLEKRIENLNKKVDDGFLDIWTYNAELLVLLENERTLDYHDSNVKNLYEKVRSQLKNNAKEIGNGCFEFYHKCDNTCMESVKNGTYDYPKYSEEAKLNREEIDGVKLESTRIYQILAIYSTVASSLVLVVSLGAISFWMCSNGSLQCRICI

SEQ ID NO: 7382 - protein, 566 aa, Artificial Sequence; identical to SEQ ID NO: 3022
  derived and/or modified protein sequence (wt) from hemagglutinin__InfluenzaA__AEO01288

SEQ ID NO: 7383 - protein, 566 aa, Artificial Sequence; identical to SEQ ID NO: 2669
  derived and/or modified protein sequence (wt) from hemagglutinin__InfluenzaA__AEO01289

SEQ ID NO: 7384 - protein, 566 aa, Artificial Sequence
  derived and/or modified protein sequence (wt) from hemagglutinin__InfluenzaA__AEO01290
MKAILVVLLYTFATANADTLCIGYHANNSTDTVDTVLEKNVTVTHSVNLLEDKHNGKLCKLRGVAPLHLGKCNIAGWILGNPECESLSTASSWSYIVETSSSDNGTCYPGDFIDYEELREQLSSVSSFERFEIFPKTSSWPNHDSNKGVTAACPHAGAKSFYKNLIWLVKKGNSYPKLSKSYINDKGKEVLVLWGIHHPSTSADQQSLYQNADAYVFVGTSRYSKKFKPEIAIRPKVRDQEGRMNYYWTLVEPGDKITFEATGNLVVPRYAFAMERNAGSGIIISDTPVHDCNTTCQTPKGAINTSLSFQNIHPITIGKCPKYVKSTKLRLATGLRNVPSIQSRGLFGAIAGFIEGGWTGMVDGWYGYHHQNEQGSGYAADLKSTQNAIDEITNKVNSVIEKMNTQFTAVGKEFNHLEKRIENLNKKVDDGFLDIWTYNAELLVLLENERTLDYHDSNVKNLYEKVRSQLKNNAKEIGNGCFEFYHKCDNTCMESVKNGTYDYPKYSEEAKLNREEIDGVKLESTRIYQILAIYSTVASSLVLVVSLGAISFWMCSNGSLQCRICI

SEQ ID NO: 7385 - protein, 566 aa, Artificial Sequence; identical to SEQ ID NO: 2669
  derived and/or modified protein sequence (wt) from hemagglutinin__InfluenzaA__AEO01291

SEQ ID NO: 7386 - protein, 566 aa, Artificial Sequence; identical to SEQ ID NO: 2669
  derived and/or modified protein sequence (wt) from hemagglutinin__InfluenzaA__AEO01292

SEQ ID NO: 7387 - protein, 566 aa, Artificial Sequence
  derived and/or modified protein sequence (wt) from hemagglutinin__InfluenzaA__AEO01294
MKAILVVLLYTFATANADTLCIGYHANNSTDTVDTVLEKNVTVTHSVNLLEDKHNGKLCKLRGVAPLHLGKCDIAGWILGNPECESLSTASSWSYIVETSSSDNGTCYPGDFIDYEELREQLSSVSSFERFEIFPKTSSWPNHDSNKGVTAACPHAGAKSFYKNLIWLVKKGNSYPKLSKSYINDKGKEVLVLWGIHHPSTSADQQSLYQNADAYVFVGTSRYSKKFKPEIAIRPKVRDQEGRMNYYWTLVEPGDKITFEATGNLVVPRYAFAMERNAGSGIIISDTPVHDCNTTCQTPKGAINTSLPFQNIHPITIGKCPKYVKSTKLRLATGLRNVPSIQSRGLFGAIAGFIEGGWTGMVDGWYGYHHQNEQGSGYAADLKSTQHAIDEITNKVNSVIEKMNTQFTAVGKEFNHLEKRIENLNKKVDDGFLDIWTYNAELLVLLENERTLDYHDSNVKNLYEKVRSQLKNNAKEIGNGCFEFYHKCDNTCMESVKNGTYDYPKYSEEAKLNREEIDGVKLESTRIYQILAIYSTVASSLVLVVSLGAISFWMCSNGSLQCRICI

SEQ ID NO: 7388 - protein, 566 aa, Artificial Sequence
  derived and/or modified protein sequence (wt) from hemagglutinin__InfluenzaA__AEO01295
MKAILVVLLYTFATANADTLCIGYHANNSTDTVDTVLEKNVTVTHSVNLLEDKHNGKLCKLRGVAPLHLGKCNIAGWILGNPECESLSTASSWSYIVETSNSDNGTCYPGDFIDYEELREQLSSVSSFERFEIFPKTSSWPNHDSNKGVTAACPHAGAKSFYKNLIWLVKKGNSYPKLSKSYINDKGKEVLVLWGIHHPSTSADQQSLYQNADAYVFVGTSRYSKKFKPEIAIRPKVRDQEGRMNYYWTLVEPGDKITFEATGNLVVPRYAFAMERNAGSGIIISDTPVHYCNTTCQTPKGAINTSLPFQNIHPITIGKCPKYVKSTKLRLATGLRNVPSIQSRGLFGAIAGFIEGGWTGMVDGWYGYHHQNEQGSGYAADLKSTQNAIDKITNKVNSVIEKMNTQFTAVGKEFNHLEKRIENLNKKVDDGFLDIWTYNAELLVLLENERTLDYHDSNVKNLYEKVRSQLKNNAKEIGNGCFEFYHKCDNTCMESVKNGTYDYPKYSEEAKLNREEIDGVKLESTRIYQILAIYSTVASSLVLVVSLGAISFWMCSNGSLQCRICI

SEQ ID NO: 7389 - protein, 566 aa, Artificial Sequence; identical to SEQ ID NO: 2669
  derived and/or modified protein sequence (wt) from hemagglutinin__InfluenzaA__AEO01296

SEQ ID NO: 7390 - protein, 566 aa, Artificial Sequence; identical to SEQ ID NO: 4351
  derived and/or modified protein sequence (wt) from hemagglutinin__InfluenzaA__AEO01297

SEQ ID NO: 7391 - protein, 566 aa, Artificial Sequence; identical to SEQ ID NO: 4356
  derived and/or modified protein sequence (wt) from hemagglutinin__InfluenzaA__AEO01298

SEQ ID NO: 7392 - protein, 566 aa, Artificial Sequence; identical to SEQ ID NO: 2669
  derived and/or modified protein sequence (wt) from hemagglutinin__InfluenzaA__AEO01299

SEQ ID NO: 7393 - protein, 566 aa, Artificial Sequence; identical to SEQ ID NO: 2669
  derived and/or modified protein sequence (wt) from hemagglutinin__InfluenzaA__AEO01300

SEQ ID NO: 7394 - protein, 566 aa, Artificial Sequence; identical to SEQ ID NO: 2669
  derived and/or modified protein sequence (wt) from hemagglutinin__InfluenzaA__AEO01301

SEQ ID NO: 7395 - protein, 566 aa, Artificial Sequence; identical to SEQ ID NO: 2669
  derived and/or modified protein sequence (wt) from hemagglutinin__InfluenzaA__AEO01302

SEQ ID NO: 7396 - protein, 566 aa, Artificial Sequence; identical to SEQ ID NO: 4266
  derived and/or modified protein sequence (wt) from hemagglutinin__InfluenzaA__AEO01303

SEQ ID NO: 7397 - protein, 566 aa, Artificial Sequence
  derived and/or modified protein sequence (wt) from hemagglutinin__InfluenzaA__AEO01304
MKAILVVLLYTFATANADTLCIGYHANNSTDTVDTVLEKNVTVTHSVNLLEDKHNGKLCKLRGVAPLHLGKCNIAGWILGNPECESLSTASSWSYIVETSSSDNGTCYPGDFIDYEELREQLSSVSSFERFEIFPKASSWPNHDSNKGVTAACPHAGAKSFYKNLIWLVKKGNSYPKLSKSYINDKGKGVLVLWGIHHPSTSADQQSLYQNADAYVFVGTSRYSKKFKPEIAIRPKVRDQEGRMNYYWTLVEPGDKITFEATGNLVVPRYAFAMERNAGSGIIISDTPVHDCNTTCQTPKGAINTSLPFQNIHPITIGKCPKYVKSTKLRLATGLRNVPSIQSRGLFGAIAGFIEGGWTGMVDGWYGYHHQNEQGSGYAADLKSTQNAIDEITNKVNSVIEKMNTQFTAVGKEFNHLEKRIENLNKKVDDGFLDIWTYNAELLVLLENERTLDYHDSNVKNLYEKVRSQLKNNAKEIGNGCFEFYHKCDNTCMESVKNGTYDYPKYSEEAKLNREEIDGVKLESTRIYQILAIYSTVASSLVLVVSLGAISFWMCSNGSLQCRICI

SEQ ID NO: 7398 - protein, 566 aa, Artificial Sequence
  derived and/or modified protein sequence (wt) from hemagglutinin__InfluenzaA__AEO01305
MKAILVVLLYTFATASADTLCIGYHANNSTDTVDTVLEKNVTVTHSVNLLEDKHNGKLCKLRGVAPLHLGKCNIAGWILGNPECESLSTASSWSYIVETSSSDNGTCYPGDFIDYEELREQLSSVSSFERFEIFPKTSSWPNHDSNKGVTAACPHAGAKSFYKNLIWLVKKGNSYPKLSKSYINDKGKEVLVLWGIHHPSTSADQQSLYQNADAYVFVGTSRYSKKFKPEIAIRPKVRDQEGRMNYYWTLVEPGDKITFEATGNLVVPRYAFAMERNAGSGIIISDTPVHDCNTTCQTPKGAINTSLPFQNIHPITIGKCPKYVKSTKLRLATGLRNVPSIQSRGLFGAIAGFIEGGWTGMVDGWYGYHHQNEQGSGYAADLKSTQNAIDEITNKVNSVIEKMNTQFTAVGKEFNHLEKRIENLNKKVDDGFLDIWTYNAELLVLLENERTLDYHDSNVKNLYEKVRSQLKNNAKEIGNGCFEFYHKCDNTCMESVKNGTYDYPKYSEEAKLNREEIDGVKLESTRIYQILAIYSTVASSLVLVVSLGAISFWMCSNGSLQCRICI

SEQ ID NO: 7399 - protein, 566 aa, Artificial Sequence; identical to SEQ ID NO: 2669
  derived and/or modified protein sequence (wt) from hemagglutinin__InfluenzaA__AEO01306

SEQ ID NO: 7400 - protein, 566 aa, Artificial Sequence; identical to SEQ ID NO: 2669
  derived and/or modified protein sequence (wt) from hemagglutinin__InfluenzaA__AEO01307

SEQ ID NO: 7401 - protein, 566 aa, Artificial Sequence; identical to SEQ ID NO: 2669
  derived and/or modified protein sequence (wt) from hemagglutinin__InfluenzaA__AEO01308

SEQ ID NO: 7402 - protein, 566 aa, Artificial Sequence
  derived and/or modified protein sequence (wt) from hemagglutinin__InfluenzaA__AEO01309
MKAILVVLLYTFAIANADTLCIGYHANNSTDTVDTVLEKNVTVTHSVNLLEDKHNGKLCKLRGVAPLHLGKCNIAGWILGNPECESLSTASSWSYIVETSSSDNGTCYPGDFIDYEELREQLSSVSSFERFEIFPKTSSWPNHDSNKGVTAACPHAGAKSFYKNLIWLVKKGNSYPKLSKSYINDKGKEVLVLWGIHHPSTSADQQSLYQNADAYVFVGTSRYSKKFKPEIAIRPKVRDQEGRMNYYWTLVEPGDKITFEATGNLVVPRYAFAMERNAGSGIIISDTPVHDCNTTCQTPKGAINTSLPFQNIHPITIGKCPKYVKSTKLRLATGLRNVPSIQSRGLFGAIAGFIEGGWTGMVDGWYGYHHQNEQGSGYAADLKSTQHAIDEITNKVNSVIEKMNTQFTAVGKEFNHLEKRIENLNKKVDDGFLDIWTYNAELLVLLENERTLDYHDSNVKNLYEKVRSQLKNNAKEIGNGCFEFYHKCDNTCMESVKNGTYDYPKYSKEAKLNREEINGVKLESTRIYQILAIYSTVASSLVLVVSLGAISFWMCSNGSLQCRICI

SEQ ID NO: 7403 - protein, 566 aa, Artificial Sequence
  derived and/or modified protein sequence (wt) from hemagglutinin__InfluenzaA__AEO01310
MKAILVVLLYTFATANADTLCIGYHANNSTDTVDTVLEKNVTVTHSVNLLEDKHNGKLCKLRGVAPLHLGKCNIAGWILGNPECESLSTASSWSYIVETSSSDNGTCYPGDFIDYEELREQLSSVSSFERFEIFPKTSSWPNHDSNKGVTAACPHAGAKSFYKNLIWLVKKGNSYPKLSKSYINDRGKEVLVLWGIHHPSTSADQQSLYQNADAYVFVGTSRYSKKFKPEIAIRPKVRDQEGRMNYYWTLVEPGDKITFEATGNLVVPRYAFAMERNAGSGIIISDTPVHDCNTTCQTPKGAINTSLPFQNIHPITIGKCPKYVKSTKLRLATGLRNVPSIQSRGLFGAIAGFIEGGWTGMVDGWYGYHHQNEQGSGYAADLKSTQNAIDEITNKVNSVIEKMNTQFTAVGKEFNHLEKRIENLNKKVDDGFLDIWTYNAELLVLLENERTLDYHDSNVKNLYEKVRSQLKNNAKEIGNGCFEFYHKCDNTCMESVKNGTYDYPKYSEEAKLNREEIDGVKLESTRIYQILAIYSTVASSLVLVVSLGAISFWMCSNGSLQCRICI

SEQ ID NO: 7404 - protein, 566 aa, Artificial Sequence; identical to SEQ ID NO: 2669
  derived and/or modified protein sequence (wt) from hemagglutinin__InfluenzaA__AEO01311

SEQ ID NO: 7405 - protein, 566 aa, Artificial Sequence
  derived and/or modified protein sequence (wt) from hemagglutinin__InfluenzaA__AEO01312
MKAILVVLLYTFATANADTLCIGYHANNSTDTVDTVLEKNVTVTHSVNLLEDKHNGKLCKLRGVAPLHLGKCNIAGWILGNPECESLSTASSWSYIVETSSSDNGTCYPGDFIDYEELREQLSSVSSFERFEIFPKTSSWPNHDSNKGVTAACPHAGAKSFYKNLIWLVKKGNSYPKLSKSYINDKGKEVLVLWGIHHPSTSADQQSLYQNADAYVFVGTSRYSKKFKPEIAIRPKVRDQEGRMNYYWTLVEPGDKITFEATGNLVVPRYAFAMERNAGSGIIISDTPVHDCNTTCQTPKGAINTSLPFQNIHPITIGKCPKYVKSTKLRLATGLRNVPSIQSRGLFGAIAGFIEGGWTGIVDGWYGYHHQNEQGSGYAADLKSTQNAIDEITNKVNSVIEKMNTQFTAVGKEFNHLEKRIENLNKKVDDGFLDIWTYNAELLVLLENERTLDYHDSNVKNLYEKVRSQLKNNAKEIGNGCFEFYHKCDNTCMESVKNGTYDYPKYSEEAKLNREEIDGVKLESTRIYQILAIYSTVASSLVLVVSLGAISFWMCSNGSLQCRICI

SEQ ID NO: 7406 - protein, 566 aa, Artificial Sequence; identical to SEQ ID NO: 3022
  derived and/or modified protein sequence (wt) from hemagglutinin__InfluenzaA__AEO01313

SEQ ID NO: 7407 - protein, 566 aa, Artificial Sequence; identical to SEQ ID NO: 3833
  derived and/or modified protein sequence (wt) from hemagglutinin__InfluenzaA__AEO01314

SEQ ID NO: 7408 - protein, 566 aa, Artificial Sequence
  derived and/or modified protein sequence (wt) from hemagglutinin__InfluenzaA__AEO01315
MKAILVVLLYTFATANADTLCIGYHANNSTDTVDTVLEKNVTVTHSVNLLEDKHNRKLCKLRGVAPLHLGKCNIAGWILGNPECESLSTASSWSYIVETSSSDNGTCYPGDFIDYEELREQLSSVSSFERFEIFPKTSSWPNHDSNKGVTAACPHAGAKSFYKNLIWLVKKGNSYPKLSKSYINDKGKEVLVLWGIHHPSTSADQQSLYQNADAYVFVGTSRYSKKFKPEIAIRPKVRDQEGRMNYYWTLVEPGDKITFEATGNLVVPRYAFAMERNAGSGIIISDTPVHDCNTTCQTPKGAINTSLPFQNIHPITIGKCPKYVKSTKLRLATGLRNVPSIQSRGLFGAIAGFIEGGWTGMVDGWYGYHHQNEQGSGYAADLKSTQNAIDEITNKVNSVIEKMNTQFTAVGKEFNHLEKRIENLNKKVDDGFLDIWTYNAELLVLLENERTLDYHDSNVKNLYEKVRSQLKNNAKEIGNGCFEFYHKCDNTCMESVKNGTYDYPKYSEEAKLNREEIDGVKLESTRIYQILAIYSTVASSLVLVVSLGAISFWMCSNGSLQCRICI

SEQ ID NO: 7409 - protein, 566 aa, Artificial Sequence; identical to SEQ ID NO: 2669
  derived and/or modified protein sequence (wt) from hemagglutinin__InfluenzaA__AEO01316

SEQ ID NO: 7410 - protein, 566 aa, Artificial Sequence; identical to SEQ ID NO: 2669
  derived and/or modified protein sequence (wt) from hemagglutinin__InfluenzaA__AEO01317

SEQ ID NO: 7411 - protein, 566 aa, Artificial Sequence; identical to SEQ ID NO: 2669
  derived and/or modified protein sequence (wt) from hemagglutinin__InfluenzaA__AEO01318

SEQ ID NO: 7412 - protein, 566 aa, Artificial Sequence; identical to SEQ ID NO: 2669
  derived and/or modified protein sequence (wt) from hemagglutinin__InfluenzaA__AEO01319

SEQ ID NO: 7413 - protein, 566 aa, Artificial Sequence
  derived and/or modified protein sequence (wt) from hemagglutinin__InfluenzaA__AEO01321
MKAILVVLLYTFATANADTLCIGYHANNSTDTVDTVLEKNVTVTHSVNILEDKHNGKLCKLRGVAPLHLGKCNIAGWILGNPECESLSTASSWSYIVETSSSDNGTCYPGDFIDYEELREQLSSVSSFERFEIFPKTSSWPNHDSNKGVTAACPHAGAKSFYKNLIWLVKKGNSYPKLSKSYINDKGKEVLVLWGIHHPSTSADQQSLYQNADAYVFVGTSRYSKKFKPEIAIRPKVRDQEGRMNYYWTLVEPGDKITFEATGNLVVPRYAFAMERNAGSGIIISDTPVHDCNTTCQTPKGAINTSLPFQNIHPITIGKCPKYVKSTKLRLATGLRNVPSIQSRGLFGAIAGFIEGGWTGMVDGWYGYHHQNEQGSGYAADLKSTQNAIDEITNKVNSVIEKMNTQFTAVGKEFNHLEKRIENLNKKVDDGFLDIWTYNAELLALLENERTLDYHDSNVKNLYEKVRSQLKNNAKEIGNGCFEFYHKCDNTCMESVKNGTYDYPKYSEEAKLNREEIDGVKLESTRIYQILAIYSTVASSLVLVVSLGAISFWMCSNGSLQCRICI

SEQ ID NO: 7414 - protein, 566 aa, Artificial Sequence; identical to SEQ ID NO: 2669
  derived and/or modified protein sequence (wt) from hemagglutinin__InfluenzaA__AEO01322

SEQ ID NO: 7415 - protein, 566 aa, Artificial Sequence; identical to SEQ ID NO: 4351
  derived and/or modified protein sequence (wt) from hemagglutinin__InfluenzaA__AEO01323

SEQ ID NO: 7416 - protein, 566 aa, Artificial Sequence; identical to SEQ ID NO: 4266
  derived and/or modified protein sequence (wt) from hemagglutinin__InfluenzaA__AEO01324

SEQ ID NO: 7417 - protein, 566 aa, Artificial Sequence; identical to SEQ ID NO: 2669
  derived and/or modified protein sequence (wt) from hemagglutinin__InfluenzaA__AEO01325

SEQ ID NO: 7418 - protein, 566 aa, Artificial Sequence
  derived and/or modified protein sequence (wt) from hemagglutinin__InfluenzaA__AEO01326
MKAILVVLLYTFATANADTLCIGYHANNSTDTVDTVLEKNVTVTHSVNLLEDKHNGKLCKLRGVAPLHLGKCNIAGWILGNPECESLSTASSWSYIVETSSSDNGTCYPGDFIDYEELREQLSSVSSFERFEIFPKTSSWPNHDSNKGVTAACPHAGAKSFYKNLIWLVKKGNSYPKLSKSYINDKGKEVLVLWGIHHPSTSADQQSLYQDADAYVFVGTSRYSKKFKPEIAIRPKVRDQEGRMNYYWTLVEPGDKITFEATGNLVVPRYAFAMERNAGSGIIISDTPVHDCNTTCQTPKGAINTSLPFQNIHPITIGKCPKYVKSTKLRLATGLRNVPSIQSRGLFGAIAGFIEGGWTGMVDGWYGYHHQNEQGSGYAADLKSTQNAIDEITNKVNSVIEKMNTQFTAVGKEFNHLEKRIENLNKKVDDGFLDIWTYNAELLVLLENERTLDYHDSNVKNLYEKVRSQLKNNAKEIGNGCFEFYHKCDNTCMESVKNGTYDYPKYSEEAKLNREEIDGVKLESTRIYQILAIYSTVASSLVLVVSLGAISFWMCSNGSLQCRICI

SEQ ID NO: 7419 - protein, 566 aa, Artificial Sequence; identical to SEQ ID NO: 2669
  derived and/or modified protein sequence (wt) from hemagglutinin__InfluenzaA__AEO01327

SEQ ID NO: 7420 - protein, 566 aa, Artificial Sequence; identical to SEQ ID NO: 7378
  derived and/or modified protein sequence (wt) from hemagglutinin__InfluenzaA__AEO01328

SEQ ID NO: 7421 - protein, 566 aa, Artificial Sequence; identical to SEQ ID NO: 2669
  derived and/or modified protein sequence (wt) from hemagglutinin__InfluenzaA__AEO01330

SEQ ID NO: 7422 - protein, 566 aa, Artificial Sequence
  derived and/or modified protein sequence (wt) from hemagglutinin__InfluenzaA__AEO01331
MKAILVVLLYTFATANADTLCIGYHANNSTDTVDTLLEKNVTVTHSVNLLEDKHNGKLCKLRGVAPLHLGKCNIAGWILGNPECESLSTASSWSYIVETSSSDNGTCYPGDFIDYEELREQLSSVSSFERFEIFPKTSSWPNHDSNKGVTAACPHAGAKSFYKNLIWLVKKGNSYPKLSKSYINDKGKEVLVLWGIHHPSTSADQQSLYQNADAYVFVGTSRYSKKFKPEIAIRPKVRDQEGRMNYYWTLVEPGDKITFEATGNLVVPRYAFAMERNAGSGIIISDTPVHDCNTTCQTPKGAINTSLPFQNIHPITIGKCPKYVKSTKLRLATGLRNVPSIQSRGLFGAIAGFIEGGWTGMVDGWYGYHHQNEQGSGYAADLKSTQNAIDEITNKVNSVIEKMNTQFTAVGKEFNHLEKRIENLNKKVDDGFLDIWTYNAELLVLLENERTLDYHDSNVKNLYEKVRSQLKNNAKEIGNGCFEFYHKCDNTCMESVKNGTYDYPKYSEEAKLNREEIDGVKLESTRIYQILAIYSTVASSLVLVVSLGAISFWMCSNGSLQCRICI

SEQ ID NO: 7423 - protein, 566 aa, Artificial Sequence
  derived and/or modified protein sequence (wt) from hemagglutinin__InfluenzaA__AEO01332
MKAILVVLLYTFATANADTLCIGYHANNSTDTVDTVLEKNVTVTHSVNLLEDKHNGKLCKLRGVAPLHLGKCNIAGWILGNPECESLSTASSWSYIVETSSSDNGTCYPGDFIDYEELREQLSSVSSFERFEIFPKTSSWPNHDSNKGVTAACPHAGAKSFYKNLIWLVKKGNSYPKLSKSYINDKGKEVLVLWGIHHPSTSADQQSLYQNADAYVFVGLSRYSKKFKPEIAIRPKVREQEGRMNYYWTLVEPGDKITFEATGNLVVPRYAFAMERNAGSGIVISDTPVHDCNTTCQTPKGAINTSLPFQNIHPITIGKCPKYVKSTKLRLATGLRNVPSIQSRGLFGAIAGFIEGGWTGMVDGWYGYHHQNEQGSGYAADLKSTQNAIDEITNKVNSVIEKMNTQFTAVGKEFNHLEKRMENLNKKVDDGFLDIWTYNAELLVLLENERTLDYHDSNVKNLYEKVRSQLKTNAKEIGNGCFEFYHKCDNTCMESVKNGTYDYPKYSEEAKLNREEIDGVKLESTRIYQILAIYSTVASSLVLVVSLGAISFWMCSNGSLQCRICI

SEQ ID NO: 7424 - protein, 566 aa, Artificial Sequence; identical to SEQ ID NO: 4837
  derived and/or modified protein sequence (wt) from hemagglutinin__InfluenzaA__AEO01333

SEQ ID NO: 7425 - protein, 566 aa, Artificial Sequence
  derived and/or modified protein sequence (wt) from hemagglutinin__InfluenzaA__AEO01334
MKAILVVLLYTFATANADTLCIGYHANNSTDTVDTILEKNVTVTHSVNLLEDKHNGKLCKLRGVAPLHLGKCNIAGWILGNPECESLSTASSWSYIVETSSSDNGTCYPGDFIDYEELREQLSSVSSFERFEIFPKTSSWPNHDSNKGVTAACPHAGAKSFYKNLIWLVKKGNSYPKLSKSYINDKGKEVLVLWGIHHPSTSADQQSLYQNADAYVFVGTSRYSKKFKPEIAIRPKVRDQEGRMNYYWTLVEPGDKITFEATGNLVVPRYAFAMERNAGSGIIISDTPVHDCNTTCQTPKGAINTSLPFQNIHPITIGKCPKYVKSTKLRLATGLRNVPSIQSRGLFGAIAGFIEGGWTGMVDGWYGYHHQNEQGSGYAADLKSTQNAIDEITNKVNSVIEKMNTQFTAVGKEFNHLEKRIENLNKKVDDGFLDIWTYNAELLVLLENERTLDYHDSNVKNLYEKVRSQLKNNAKEIGNGCFEFYHKCDNTCMESVKNGTYDYPKYSEEAKLNREEIDGVKLESTRIYQILAIYSTVASSLVLVVSLGAISFWMCSNGSLQCRICI

SEQ ID NO: 7426 - protein, 566 aa, Artificial Sequence; identical to SEQ ID NO: 4266
  derived and/or modified protein sequence (wt) from hemagglutinin__InfluenzaA__AEO01335

SEQ ID NO: 7427 - protein, 566 aa, Artificial Sequence
  derived and/or modified protein sequence (wt) from hemagglutinin__InfluenzaA__AEO01336
MKAILVVLLYTFATANADTLCIGYHANNSTDTVDTVLEKNVTVTHSVNLLEDKHNGKLCKLRGVAPLHLGKCNIAGWILGNPECESLSTASSWSYIVETSSSDNGTCYPGDFIDYEELREQLSSVSSFERFEIFPKTSSWPNHDSNKGVTAACPHAGAKSFYKNLIWLVKKGNSYPKLNKSYINDKGKEVLVLWGIHHPSTSADQQSLYQNADAYVFVGTSRYSKKFKPEIAIRPKVRDQEGRMNYYWTLVEPGDKITFEATGNLVVPRYAFAMERNAGSGIIISDTPVHDCNTTCQTPKGAINTSLPFQNIHPITIGECPKYVKSTKLRLATGLRNVPSIQSRGLFGAIAGFIEGGWTGMVDGWYGYHHQNEQGSGYAADLKSTQNAIDKITNKVNSVIEKMNTQFTAVGKEFNHLEKRIENLNKKVDDGFLDIWTYNAELLVLLENERTLDYHDSNVKNLYEKVRSQLKNNAKEIGNGCFEFYHKCDNTCMESVKNGTYDYPKYSEEAKLNREEIDGVKLESTRIYQILAIYSTVASSLVLVVSLGAISFWMCSNGSLQCRICI

SEQ ID NO: 7428 - protein, 566 aa, Artificial Sequence
  derived and/or modified protein sequence (wt) from hemagglutinin__InfluenzaA__AEO01337
MKAILVVLLYTFATANADTLCIGYHANNSTDTVDTVLEKNVTVTHSVNLLEDKHNGKLCKLRGVAPLHLGKCNIAGWILGNPECESLSTASSWSYIVETSSSDNGTCYPGDFIDYEELREQLSSVSSFERFEIFPKTSSWPNHDSNKGVTAACPHAGAKSFYKNLIWLVKKGNSYPKLSKSYINDKGKEVLVLWGIHHPSTSADQQSLYQNADAYVFVGTSRYSKKFKPEIAIRPKVRDQEGRMNYHWTLVEPGDKITFEATGNLVVPRYAFAMERNAGSGIIISDTPVHDCNTTCQTPKGAINTSLPFQNIHPITIGKCPKYVKSTKLRLATGLRNVPSIQSRGLFGAIAGFIEGGWTGMVDGWYGYHHQNEQGSGYAADLKSTQHAIDEITNKVNSVIEKMNTQFTAVGKEFNHLEKRIENLNKKVDDGFLDIWTYNAELLVLLENERTLDYHDSNVKNLYEKVRSQLKNNAKEIGNGCFEFYHKCDNTCMESVKNGTYDYPKYSEEAKLNREEIDGVKLESTRIYQILAIYSTVASSLVLVVSLGAISFWMCSNGSLQCRICI

SEQ ID NO: 7429 - protein, 566 aa, Artificial Sequence; identical to SEQ ID NO: 2669
  derived and/or modified protein sequence (wt) from hemagglutinin__InfluenzaA__AEO01338

SEQ ID NO: 7430 - protein, 566 aa, Artificial Sequence; identical to SEQ ID NO: 6541
  derived and/or modified protein sequence (wt) from hemagglutinin__InfluenzaA__AEO01339

SEQ ID NO: 7431 - protein, 566 aa, Artificial Sequence; identical to SEQ ID NO: 7387
  derived and/or modified protein sequence (wt) from hemagglutinin__InfluenzaA__AEO01340

SEQ ID NO: 7432 - protein, 566 aa, Artificial Sequence; identical to SEQ ID NO: 7387
  derived and/or modified protein sequence (wt) from hemagglutinin__InfluenzaA__AEO01341

SEQ ID NO: 7433 - protein, 566 aa, Artificial Sequence; identical to SEQ ID NO: 2669
  derived and/or modified protein sequence (wt) from hemagglutinin__InfluenzaA__AEO01342

SEQ ID NO: 7434 - protein, 566 aa, Artificial Sequence
  derived and/or modified protein sequence (wt) from hemagglutinin__InfluenzaA__AEO01343
MKAILVVLLYTFATANADTLCIGYHANNSTDTVDTVLEKNVTVTHSVNLLEDKHNGKLCKLRGVAPLHLGKCNIAGWILGNPECESLSTASSWSYIVETSNSDNGTCYPGDFIDYEELREQLSSVSSFERFEIFPKTSSWPNHDSNKGVTAACPHAGAKSFYKNLIWLVKKGNSYPKLSKSYINDKGKEVLVLWGIHHPSTSADQQSLYQNADAYVFVGTSRYSKKFKPEIAIRPKVRDQEGRMNYYWTLVEPGDKITFEATGNLVVPRYAFAMERNAGSGIIISDTPVHDCNTTCQTPKGAINTSLPFQNIHPITIGKCPKYVKSTKLRLATGLRNVPSIQSRGLFGAIAGFIEGGWTGMVDGWYGYHHQNEQGSGYAADLKSTQNAIDKITNKVNSVIEKMNTQFTAVGKEFNHLEKRIENLNKKVDDGFLDIWTYNAELLVLLENERTLDYHDSNVKNLYEKVRSQLKNNAKEIGNGCFEFYHKCDNTCMESVKNGTYDYPKYSEEAKLNREEIDGVKLESTRIYQILAIYSTVASSLVLVVSLGAISFWMCSNGSLQCRICI

SEQ ID NO: 7435 - protein, 566 aa, Artificial Sequence
  derived and/or modified protein sequence (wt) from hemagglutinin__InfluenzaA__AEO01344
MKAILVVLLYTFATANADTLCIGYHANNSTDTVDTVLEKNVTVTHSVNILEDKHNGKLCKLRGVAPLHLGKCNIAGWILGNPECESLSTASSWSYIVETSSSDNGTCYPGDFIDYEELREQLSSVSSFERFEIFPKTSSWPNHDSNKGVTAACPHAGAKSFYKNLIWLVKKGNSYPKLSKSYINDKGKEVLVLWGIHHPSTSADQQSLYQNADAYVFVGTSKYSKKFKPEIAIRPKVRDQEGRMNYYWTLVEPGDKITFEATGNLVVPRYAFAMERNAGSGIIISDTPVHDCNTTCQTPKGAINTSLPFQNIHPITIGKCPKYVKSTKLRLATGLRNVPSIQSRGLFGAIAGFIEGGWTGMVDGWYGYHHQNEQGSGYAADLKSTQNAIDEITNKVNSVIEKMNTQFTAVGKEFNHLEKRIENLNKKVDDGFLDIWTYNAELLVLLENERTLDYHDSNVKNLYEKVRSQLKNNAKEIGNGCFEFYHKCDNTCMESVKNGTYDYPKYSEEAKLNREEIDGVKLESTRIYQILAIYSTVASSLVLVVSLGAISFWMCSNGSLQCRICI

SEQ ID NO: 7436 - protein, 566 aa, Artificial Sequence; identical to SEQ ID NO: 6541
  derived and/or modified protein sequence (wt) from hemagglutinin__InfluenzaA__AEO01345

SEQ ID NO: 7437 - protein, 566 aa, Artificial Sequence; identical to SEQ ID NO: 2669
  derived and/or modified protein sequence (wt) from hemagglutinin__InfluenzaA__AEO01346

SEQ ID NO: 7438 - protein, 566 aa, Artificial Sequence
  derived and/or modified protein sequence (wt) from hemagglutinin__InfluenzaA__AEO01347
MKAILVVLLYTFATANADTLCIGYHANNSTDTVDTVLEKNVTVTHSVNLLEDKHNGKLCKLRGVAPLHLGKCNIAGWILGNPECESLSTASSWSYIVETSSSDNGTCYPGDFIDYEELREQLSSVSSFERFEIFPKTSSWPNHDSNKGVTAACPHAGAKSFYKNLIWLVKKGNSYPKLSKSYINDKGKEVLVLWGIHHPSTSADQQSLYQNADAYVFVGTSRYSKKFKPEIAIRPKVRDQEGRMNYYWTLVEPGDKITFEATGNLVVPRYAFAMERNAGSGIIISDTPVHDCNTTCQTPKGAINTSLPFQNIHPITIGECPKYVKSTKLRLATGLRNVPSIQSRGLFGAIAGFIEGGWTGMVDGWYGYHHQNEQGSGYAADLKSTQNAIDKITNKVNSVIEKMNTQFTAVGKEFNHLEKRIENLNKKVDDGFLDIWTYNAELLVLLENERTLDYHDSNVKNLYEKVRSQLKNNAKEIGNGCFEFYHKCDNTCMESVKNGTYDYPKYSEEAKLNREEIDGVKLESTRIYQILAIYSTVASSLVLVVSLGAISFWMCSNGSLQCRICI

SEQ ID NO: 7439 - protein, 566 aa, Artificial Sequence
  derived and/or modified protein sequence (wt) from hemagglutinin__InfluenzaA__AEO01348
MKAILVVLLYTFAIANADTLCIGYHANNSTDTVDTVLEKNVTVTHSVNLLEDKHNGKLCKLRGVAPLHLGKCNIAGWILGNPECESLSTASSWSYIVETSSSDNGTCYPGDFIDYEELREQLSSVSSFERFEIFPKTSSWPNHDSNKGVTAACPHAGAKSFYKNLIWLVKKGNSYPKLSKSYINDKGKEVLVLWGIHHPSTSADQQSLYQNADAYVFVGTSRYSKKFKPEIAIRPKVREQEGRMNYYWTLVEPGDKITFEATGNLVVPRYAFAMERNAGSGIIISDTPVHDCNTTCQTPKGAINTSLPFQNIHPITIGKCPKYVKSTKLRLATGLRNVPSIQSRGLFGAIAGFIEGGWTGMVDGWYGYHHQNEQGSGYAADLKSTQNAIDEITNKVNSVIEKMNTQFTAVGKEFNHLEKRIENLNKKVDDGFLDIWTYNAELLVLLENERTLDYHDSNVKNLYEKVRSQLKNNAKEIGNGCFEFYHKCDNTCMESVKNGTYDYPKYSEEAKLNREEIDGVKLESTRIYQILAIYSTVASSLVLVVSLGAISFWMCSNGSLQCRICI

SEQ ID NO: 7440 - protein, 566 aa, Artificial Sequence
  derived and/or modified protein sequence (wt) from hemagglutinin__InfluenzaA__AEO01349
MKAILVVLLYTFATANADTLCIGYHANNSTDTVDTVLEKNVTVTHSVNLLEDKHNGKLCKLRGVAPLHLGKCNIAGWILGNPECESLSTASSWSYIVETSSSENGTCYPGDFIDYEELREQLSSVSSFERFEIFPKTSSWPNHDSNKGVTAACPHAGAKSFYKNLIWLVKKGNSYPKLSKSYINDKGKEVLVLWGIHHPSTSADQQSLYQNADAYVFVGTSRYSKKFKPEIAIRPKVRDQEGRMNYYWTLVEPGDKITFEATGNLVVPRYAFAMERNAGSGIIISDTPVHDCNTTCQTPKGAINTSLPFQNIHPITIGKCPKYVKSTKLRLATGLRNVPSIQSRGLFGAIAGFIEGGWTGMVDGWYGYHHQNEQGSGYAADLKSTQNAIDEITNKVNSVIEKMNTQFTAVGKEFNHLEKRIENLNKKVDDGFLDIWTYNAELLVLLENERTLDYHDSNVKNLYEKVRSQLKNNAKEIGNGCFEFYHKCDNTCMESVKNGTYDYPKYSKEAKLNREEIDGVKLESTRIYQILAIYSTVASSLVLVVSLGAISFWMCSNGSLQCRICI

SEQ ID NO: 7441 - protein, 566 aa, Artificial Sequence
  derived and/or modified protein sequence (wt) from hemagglutinin__InfluenzaA__AEO01350
MKAILVVLLYTFATTNADTLCIGYHANNSTDTVDTVLEKNVTVTHSVNLLEDKHNGKLCKLRGVAPLHLGKCNIAGWILGNPECESLSTASSWSYIVETSSSDNGTCYPGDFIDYEELREQLSSVSSFERFEIFPKTSSWPNHDSNKGVTAACPHAGAKSFYKNLIWLVKKGNSYPKLSKSYINDKGKEVLVLWGIHHPSTSADQQSLYQNADAYVFVGTSRYSKKFKPEIAIRPKVRDQEGRMNYYWTLVEPGDKITFEATGNLVVPRYAFAMERNAGSGIIISDTPVHDCNTTCQTPKGAINTSLPFQNIHPITIGKCPKYVKSTKLRLATGLRNVPSIQSRGLFGAIAGFIEGGWTGMVDGWYGYHHQNEQGSGYAADLKSTQHAIDEITNKVNSVIEKMNTQFTAVGKEFNHLEKRIENLNKKVDDGFLDIWTYNAELLVLLENERTLDYHDSNVKNLYEKVRSQLKNNAKEIGNGCFEFYHKCDNTCMESVKNGTYDYPKYSEEAKLNREEIDGVKLESTRIYQILAIYSTVASSLVLVVSLGAISFWMCSNGSLQCRICI

SEQ ID NO: 7442 - protein, 566 aa, Artificial Sequence; identical to SEQ ID NO: 2669
  derived and/or modified protein sequence (wt) from hemagglutinin__InfluenzaA__AEO01351

SEQ ID NO: 7443 - protein, 566 aa, Artificial Sequence; identical to SEQ ID NO: 3833
  derived and/or modified protein sequence (wt) from hemagglutinin__InfluenzaA__AEO01352

SEQ ID NO: 7444 - protein, 566 aa, Artificial Sequence
  derived and/or modified protein sequence (wt) from hemagglutinin__InfluenzaA__AEO01353
MKAILVVLLYTFATANADTLCIGYHANNSTDTVDTVLEKNVTVTHSVNLLEDKHNGKLCKLRGVAPLHLGKCNIAGWILGNPECESLSTASSWSYIVETSSSDNGTCYPGDFIDYEELREQLSSVSSFERFEIFPKTSSWPNHDSNKGVTAACPHAGAKSFYKNLIWLVKKGNSYPKLSKSYINDKGKEVLVLWGIHHPSTSADQQSLYQNADAYVFVGTSRYSKKFKPEIAIRPKVRDQEGRMNYYWTLVEPGDKITFEATGNLVVPRYAFAMERNAGSGIIISDTPVHDCNTTCQTPKGAINTSLPFQNIHPITIGKCPKYVKSTKLRLATGLRNVPSIQSRGLFGAIAGFIEGGWTGMVDGWYGYHHQNEQGSGYAADLKSTQNAIDEITNKVNSVIEKMNTQFTAVGKEFNHLEKRIENLNKKVDDGFLDIWTYNAELLVLLENERTLDYHDSNVKNLYEKVRSQLKNNAKEIGNGCFEFYHKCDNTCMESVKNGTYDYPKYSEEAKLNREEIDGVKLESTRIYQILAIYSTVASSLVLVVFLGAISFWMCSNGSLQCRICI

SEQ ID NO: 7445 - protein, 566 aa, Artificial Sequence
  derived and/or modified protein sequence (wt) from hemagglutinin__InfluenzaA__AEO01354
MKAILVVLLYKFATANADTLCIGYHANNSTDTVDTVLEKNVTVTHSVNLLEDKHNGKLCKLRGVAPLHLGKCNIAGWILGNPECESLSTASSWSYIVETSSSDNGTCYPGDFIDYEELREQLSSVSSFERFEIFPKTSSWPNHDSNKGVTAACPHAGAKSFYKNLIWLVKKGNSYPKLSKSYINDKGKEVLVLWGIHHPSTSADQQSLYQNADAYVFVGTSRYSKKFKPEIAIRPKVRDQEGRMNYYWTLVEPGDKITFEATGNLVVPRYAFAMERNAGSGIIISDTPVHDCNTTCQTPKGAINTSLPFQNIHPITIGKCPKYVKSTKLRLATGLRNVPSIQSRGLFGAIAGFIEGGWTGMVDGWYGYHHQNEQGSGYAADLKSTQNAIDEITNKVNSVIEKMNTQFTAVGKEFNHLEKRIENLNKKVDDGFLDIWTYNAELLVLLENERTLDYHDSNVKNLYEKVRSQLKNNAKEIGNGCFEFYHKCDNTCMESVKNGTYDYPKYSEEAKLNREEIDGVKLESTRIYQILAIYSTVASSLVLVVSLGAISFWMCSNGSLQCRICI

SEQ ID NO: 7446 - protein, 566 aa, Artificial Sequence; identical to SEQ ID NO: 4089
  derived and/or modified protein sequence (wt) from hemagglutinin__InfluenzaA__AEO01355

SEQ ID NO: 7447 - protein, 566 aa, Artificial Sequence; identical to SEQ ID NO: 2669
  derived and/or modified protein sequence (wt) from hemagglutinin__InfluenzaA__AEO01356

SEQ ID NO: 7448 - protein, 566 aa, Artificial Sequence
  derived and/or modified protein sequence (wt) from hemagglutinin__InfluenzaA__AEO01358
MKAILVVLLYTFATANADTLCVGYHANNSTDTVDTVLEKNVTVTHSVNLLEDKHNGKLCKLRGVAPLHLGKCNIAGWILGNPECESLSTASSWSYIVETSSSDNGTCYPGDFIDYEELREQLSSVSSFERFEIFPKTSSWPNHDSNKGVTAACPHAGAKSFYKNLIWLVKKGNSYPKLSKSYINDKGKEVLVLWGIHHPSTSADQQSLYQNADAYVFVGTSRYSKKFKPEIAIRPKVRDQEGRMNYYWTLVEPGDKITFEATGNLVVPRYAFAMERNAGSGIIISDTPAHDCNTTCQTPKGAINTSLPFQNIHPITIGKCPKYVKSTKLRLATGLRNVPSIQSRGLFGAIAGFIEGGWTGMVDGWYGYHHQNEQGSGYAADLKSTQNAIDEITNKVNSVIEKMNTQFTAVGKEFNHLEKRIENLNKKVDDGFLDIWTYNAELLVLLENERTLDYHDSNVKNLYEKVRSQLKNNAKEIGNGCFEFYHKCDNTCMESVKNGTYDYPKYSEEAKLNREEIDGVKLESTRIYQILAIYSTVASSLVLVVSLGAISFWMCSNGSLQCRICI

SEQ ID NO: 7449 - protein, 566 aa, Artificial Sequence; identical to SEQ ID NO: 4089
  derived and/or modified protein sequence (wt) from hemagglutinin__InfluenzaA__AEO01359

SEQ ID NO: 7450 - protein, 566 aa, Artificial Sequence; identical to SEQ ID NO: 7422
  derived and/or modified protein sequence (wt) from hemagglutinin__InfluenzaA__AEO01360

SEQ ID NO: 7451 - protein, 566 aa, Artificial Sequence; identical to SEQ ID NO: 3022
  derived and/or modified protein sequence (wt) from hemagglutinin__InfluenzaA__AEO01361

SEQ ID NO: 7452 - protein, 566 aa, Artificial Sequence; identical to SEQ ID NO: 7422
  derived and/or modified protein sequence (wt) from hemagglutinin__InfluenzaA__AEO01362

SEQ ID NO: 7453 - protein, 566 aa, Artificial Sequence; identical to SEQ ID NO: 3833
  derived and/or modified protein sequence (wt) from hemagglutinin__InfluenzaA__AEO01363

SEQ ID NO: 7454 - protein, 566 aa, Artificial Sequence
  derived and/or modified protein sequence (wt) from hemagglutinin__InfluenzaA__AEO01365
MKAILVVLLYTFATANADTLCIGYHANNSTDTVDTVLKKNVTVTHSVNILEDKHNGKLCKLRGVAPLHLGKCNIAGWILGNPECESLSTASSWSYIVETSSSDNGTCYPGDFIDYEELREQLSSVSSFERFEIFPKTSSWPNHDSNKGVTAACPHAGAKSFYKNLIWLVKKGNSYPKLSKSYINDKGKEVLVLWGIHHPSTSADQQSLYQNADAYVFVGTSRYSKKFKPEIAIRPKVRDQEGRMNYYWTLVEPGDKITFEATGNLVVPRYAFAMERSAGSGIIISDTPVHDCNTTCQTPKGAINTSLPFQNIHPITIGKCPKYVKSTKLRLATGLRNVPSIQSRGLFGAIAGFIEGGWTGMVDGWYGYHHQNEQGSGYAADLKSTQNAIDEITNKVNSVIEKMNTQFTAVGKEFNHLEKRIENLNKKVDDGFLDIWTYNAELLVLLENERTLDYHDSNVKNLYEKVRSQLKNNAKEIGNGCFEFYHKCDNTCMESVKNGTYDYPKYSEEAKLNREEIDGVKLESTRIYQILAIYSTVASSLVLVVSLGAISFWMCSNGSLQCRICI

SEQ ID NO: 7455 - protein, 566 aa, Artificial Sequence
  derived and/or modified protein sequence (wt) from hemagglutinin__InfluenzaA__AEO01366
MKAILVVLLYTFATANADTLCIGYHANNSTDTVDTVLEKNVTVTHSVNLLEDKHNGKLCKLRGVAPLHLGKCNIAGWILGNPECESLSTASSWSYIVETSSSDNGTCYPGDFIDYEELREQLSSVSSFERFEIFPKTSSWPNHDSNKGVTAACPHAGAKSFYKNLIWLVKKGNSYPKLSKSYINDKGKEVLVLWGIHHPSTSADQQSLYQNADAYVFVGTSRYSKKFKPEIAIRPKVRDQEGRMNYYWTLVEPGDKITFEATGNLVVPRYAFAMERNAGSGIIISDTPVHDCSTTCQTPKGAINTSLPFQNVHPITIGKCPKYVKSTKLRLATGLRNVPSIQSRGLFGAIAGFIEGGWTGMVDGWYGYHHQNEQGSGYAADLKSTQNAIDEITNKVNSVIEKMNTQFTAVGKEFNHLEKRIENLNKKVDDGFLDIWTYNAELLVLLENERTLDYHDSNVKNLYEKVRSQLKNNAKEIGNGCFEFYHKCDNTCMESVKNGTYDYPKYSEEAKLNREEIDGVKLESTRIYQILAIYSTVASSLVLVVSLGAISFWMCSNGSLQCRICI

SEQ ID NO: 7456 - protein, 566 aa, Artificial Sequence; identical to SEQ ID NO: 7427
  derived and/or modified protein sequence (wt) from hemagglutinin__InfluenzaA__AEO01367

SEQ ID NO: 7457 - protein, 566 aa, Artificial Sequence
  derived and/or modified protein sequence (wt) from hemagglutinin__InfluenzaA__AEO01368
MKAILVVLLYTFATANADTLCIGYHANNSTDTVDTVLEKNVTVTHSVNLLEDKHNGKLCKLRGVAPLHLGKCNIAGWILGNPECESLSTASSWSYIVETSSSDNGTCYPGDFIDYEELREQLSSVSSFERFEIFPNTSSWPNHDSNKGVTAACPHAGAKSFYKNLIWLVKKGNSYPKLSKSYINDKGKEVLVLWGIHHPSTSADQQSLYQNADAYVFVGTSRYSKKFKPEIAIRPKVRDQEGRMNYYWTLVEPGDKITFEATGNLVVPRYAFAMERNAGSGIIISDTPVHDCNTTCQTPKGAINTSLPFQNIHPITIGKCPKYVKSTKLRLATGLRNVPSIQSRGLFGAIAGFIEGGWTGMVDGWYGYHHQNEQGSGYAADLKSTQNAIDKITNKVNSVIEKMNTQFTAVGKEFNHLEKRIENLNKKVDDGFLDIWTYNAELLVLLENERTLDYHDSNVKNLYEKVRSQLKNNAKEIGNGCFEFYHKCDNTCMESVKNGTYDYPKYSEEAKLNREEIDGVKLESTRIYQILAIYSTVASSLVLVVSLGAISFWMCSNGSLQCRICI

SEQ ID NO: 7458 - protein, 566 aa, Artificial Sequence; identical to SEQ ID NO: 2669
  derived and/or modified protein sequence (wt) from hemagglutinin__InfluenzaA__AEO01369

SEQ ID NO: 7459 - protein, 566 aa, Artificial Sequence; identical to SEQ ID NO: 7387
  derived and/or modified protein sequence (wt) from hemagglutinin__InfluenzaA__AEO01370

SEQ ID NO: 7460 - protein, 566 aa, Artificial Sequence; identical to SEQ ID NO: 7434
  derived and/or modified protein sequence (wt) from hemagglutinin__InfluenzaA__AEO01371

SEQ ID NO: 7461 - protein, 566 aa, Artificial Sequence; identical to SEQ ID NO: 4266
  derived and/or modified protein sequence (wt) from hemagglutinin__InfluenzaA__AEO01372

SEQ ID NO: 7462 - protein, 566 aa, Artificial Sequence; identical to SEQ ID NO: 4266
  derived and/or modified protein sequence (wt) from hemagglutinin__InfluenzaA__AEO01373

SEQ ID NO: 7463 - protein, 566 aa, Artificial Sequence
  derived and/or modified protein sequence (wt) from hemagglutinin__InfluenzaA__AEO01374
MKAILVVLLYTFATANADTLCIGYHANNSTDTVDTVLEKNVTVTHSVNLLEDKHNGKLCKLRGVAPLHLGKCDIAGWILGNPECESLSTASSWSYIVETSSSDNGTCYPGDFIDYEELREQLSSVSSFERFEIFPKTSSWPNHDSNKGVTAACPHAGAKSFYKNLIWLVKKGNSYPKLSKSYINDKGKEVLVLWGIHHPSTSADQQSLYQNADAYVFVGTSRYSKKFKPEIAIRPKVRDQEGRMNYYWTLVEPGDKITFEATGNLVVPRYAFAMERNAGSGIIISDTPVHDCNTTCQTPKGAINTSLPFQNIHPITIGKCPKYIKSTKLRLATGLRNVPSIQSRGLFGAIAGFIEGGWTGMVDGWYGYHHQNEQGSGYAADLKSTQHAIDEITNKVNSVIEKMNTQFTAVGKEFNHLEKRIENLNKKVDDGFLDIWTYNAELLVLLENERTLDYHDSNVKNLYEKVRSQLKNNAKEIGNGCFEFYHKCDNTCMESVKNGTYDYPKYSEEAKLNREEIDGVKLESTRIYQILAIYSTVASSLVLVVSLGAISFWMCSNGSLQCRICI

SEQ ID NO: 7464 - protein, 566 aa, Artificial Sequence; identical to SEQ ID NO: 7438
  derived and/or modified protein sequence (wt) from hemagglutinin__InfluenzaA__AEO01375

SEQ ID NO: 7465 - protein, 566 aa, Artificial Sequence; identical to SEQ ID NO: 2669
  derived and/or modified protein sequence (wt) from hemagglutinin__InfluenzaA__AEO01376

SEQ ID NO: 7466 - protein, 566 aa, Artificial Sequence; identical to SEQ ID NO: 4837
  derived and/or modified protein sequence (wt) from hemagglutinin__InfluenzaA__AEO01377

SEQ ID NO: 7467 - protein, 566 aa, Artificial Sequence
  derived and/or modified protein sequence (wt) from hemagglutinin__InfluenzaA__AEO01378
MKAILVVLLYTFATANADTLCIGYHANNSTDTVDTVLEKNVTVTHSVNLLEDKHNGKLCKLRGVAPLHLGKCNIAGWILGNPECESLSTASSWSYIVETPSSDNGTCYPGDFIDYEELREQLSSVSSFERFEIFPKTSSWPNHDSNKGVTAACPHAGAKSFYKNLIWLVKKGNSYPKLSKSYINDKGKEVLVLWGIHHPSTSADQQSLYQNADAYVFVGTSRYSKKFKPEIAIRPKVRDQEGRMNYYWTLVEPGDKITFEATGNLVVPRYAFAMERNAGSGIIISDTPVHDCNTTCQTPKGAINTSLPFQNIHPITIGKCPKYVKSTKLRLATGLRNVPSIQSRGLFGAIAGFIEGGWTGMVDGWYGYHHQNEQGSGYAADLKSTQNAIDEITNKVNSVIEKMNTQFTAVGKEFNHLEKRIENLNKKVDDGFLDIWTYNAELLVLLENERTLDYHDSNVKNLYEKVRSQLKNNAKEIGNGCFEFYHKCDNTCMESVKNGTYDYPKYSEEAKLNREEIDGVKLESTRIYQILAIYSTVASSLVLVVSLGAISFWMCSNGSLQCRICI

SEQ ID NO: 7468 - protein, 566 aa, Artificial Sequence; identical to SEQ ID NO: 3833
  derived and/or modified protein sequence (wt) from hemagglutinin__InfluenzaA__AEO01379

SEQ ID NO: 7469 - protein, 566 aa, Artificial Sequence; identical to SEQ ID NO: 7438
  derived and/or modified protein sequence (wt) from hemagglutinin__InfluenzaA__AEO01380

SEQ ID NO: 7470 - protein, 566 aa, Artificial Sequence; identical to SEQ ID NO: 7438
  derived and/or modified protein sequence (wt) from hemagglutinin__InfluenzaA__AEO01381

SEQ ID NO: 7471 - protein, 566 aa, Artificial Sequence; identical to SEQ ID NO: 3833
  derived and/or modified protein sequence (wt) from hemagglutinin__InfluenzaA__AEO01382

SEQ ID NO: 7472 - protein, 566 aa, Artificial Sequence; identical to SEQ ID NO: 4266
  derived and/or modified protein sequence (wt) from hemagglutinin__InfluenzaA__AEO01383

SEQ ID NO: 7473 - protein, 566 aa, Artificial Sequence
  derived and/or modified protein sequence (wt) from hemagglutinin__InfluenzaA__AEO01384
MKAILVVLLYTFATANADTLCIGYHANNSTDTVDTVLEKNVTVTHSVNLLEDKHNGKLCKLRGVSPLHLGKCNIAGWILGNPECESLSTASSWSYIVETSSSDNGTCYPGDFIDYEELREQLSSVSSFERFEIFPKTSSWPNHDSNKGVTAACPHAGAKSFYKNLIWLVKKGNSYPKLSKSYINDKGKEVLVLWGIHHPSTSADQQSLYQNADAYVFVGTSRYSKKFKPEIAIRPKVRDQEGRMNYYWTLVEPGDKITFEATGNLVVPRYAFAMERNAGSGIIISDTPVHDCNTTCQTPKGAINTSLPFQNIHPITIGKCPKYVKSTKLRLATGLRNVPSIQSRGLFGAIAGFIEGGWTGMVDGWYGYHHQNEQGSGYAADLKSTQNAIDEITNKVNSVIEKMNTQFTAVGKEFNHLEKRIENLNKKVDDGFLDIWTYNAELLVLLENERTLDYHDSNVKNLYEKVRSQLKNNAKEIGNGCFEFYHKCDNTCMESVKNGTYDYPKYSEEAKLNREEIDGVKLESTRIYQILAIYSTVASSLVLVVSLGAISFWMCSNGSLQCRICI

SEQ ID NO: 7474 - protein, 566 aa, Artificial Sequence
  derived and/or modified protein sequence (wt) from hemagglutinin__InfluenzaA__AEO01385
MKAILVVLLYTFATANADTLCIGYHANNSTDTVDTVLEKNVTVTHSVNILEDKHNGKLCKLRGVAPLHLGKCNIAGWILGNPECESLSTASSWSYIVETSSSDNGTCYPGDFIDYEELREQLSSVSSFERFEIFPKTSSWPNHDSNKGVTAACPHAGAKSFYKNLIWLVKKGNSYPKLSKSYINDKGKEVLVLWGIHHPSTSADQQSLYQNANAYVFVGTSRYSKKFKPEIAIRPKVRDQEGRMNYYWTLVEPGDKITFEATGNLVVPRYAFAMERNAGSGIIISDTPVHDCNTTCQTPKGAINTSLPFQNIHPITIGKCPKYVKSTKLRLATGLRNVPSIQSRGLFGAIAGFIEGGWTGMVDGWYGYHHQNEQGSGYAADLKSTQNAIDEITNKVNSVIEKMNTQFTAVGKEFNHLEKRIENLNKKVDDGFLDIWTYNAELLVLLENERTLDYHDSNVKNLYEKVRSQLKNNAKEIGNGCFEFYHKCDNTCMESVKNGTYDYPKYSEEAKLNREEIDGVKLESTRIYQILAIYSTVASSLVLVVSLGAISFWMCSNGSLQCRICI

SEQ ID NO: 7475 - protein, 566 aa, Artificial Sequence; identical to SEQ ID NO: 7378
  derived and/or modified protein sequence (wt) from hemagglutinin__InfluenzaA__AEO01386

SEQ ID NO: 7476 - protein, 566 aa, Artificial Sequence
  derived and/or modified protein sequence (wt) from hemagglutinin__InfluenzaA__AEO01387
MKAILVVLLYTFATANADTLCIGYHANNSTDTVDTVLEKNVTVTHSVNILEDKHNGKLCKLRGVAPLHLGKCNIAGWILGNPECESLSTASSWSYIVETSSSDNGTCYPGDFIDYEELREQLSSVSSFERFEIFPKTSSWPNHDSNKGVTAACPHAGAKSFYKNLIWLVKKGNSYPKLSKSYINDKGKEVLVLWGIHHPSTSADQQSLYQNADAYVFVGTSRYSKKFKPEIAIRPKVRDQEGRMNYYWTLVEPGDKITFEATGNLVVPRYAFAMERNAGSGIIISDTPVHDCNTTCQTPKGAINTSLPFQNIHPITIGKCPKYVKSTKLRLATGLRNVPSIQSRGLFGAIAGFIEGGWTGMVDGWYGYHHQNEQGSGYAADLKSTQNAIDEITNKVNSVIEKMNIQFTAVGKEFNHLEKRIENLNKKVDDGFLDIWTYNAELLVLLENERTLDYHDSNVKNLYEKVRSQLKNNAKEIGNGCFEFYHKCDNTCMESVKNGTYDYPKYSEEAKLNREEIDGVKLESTRIYQILAIYSTVASSLVLVVSLGAISFWMCSNGSLQCRICI

SEQ ID NO: 7477 - protein, 566 aa, Artificial Sequence
  derived and/or modified protein sequence (wt) from hemagglutinin__InfluenzaA__AEO01388
MKAILVVLLYTFATANADTLCIGYHANNSTDTVDTVLEKNVTVTHSVNLLEDKHNGKLCKLRGVAPLHLGKCNIAGWILGNPECESLSTASSWSYIVETSSSDNGTCYPGDFIDYEELREQLSSVSSFEKFEIFPKTSSWPNHDSNKGVTAACPHAGAKSFYKNLIWLVKKGNSYPKLSKSYINDKGKEVLVLWGIHHPSTSADQQSLYQNADAYVFVGTSRYSKKFKPEIAIRPKVRDQEGRMNYYWTLVEPGDKITFEATGNLVVPRYAFAMERNAGSGIIISDTPVHDCNTTCQTPKGAINTSLPFQNIHPITIGKCPKYVKSTKLRLATGLRNVPSIQSRGLFGAIAGFIEGGWTGMVDGWYGYHHQNEQGSGYAADLKSTQNAIDKITNKVNSVIEKMNTQFTAVGKEFNHLEKRIENLNKKVDDGFLDIWTYNAELLVLLENERTLDYHDSNVKNLYEKVRSQLKTNAKEIGNGCFEFYHKCDNTCMESVKNGTYDYPKYSEEAKLNREEIDGVKLESTRIYQILAIYSTVASSLVLVVSLGAISFWMCSNGSLQCRICI

SEQ ID NO: 7478 - protein, 566 aa, Artificial Sequence
  derived and/or modified protein sequence (wt) from hemagglutinin__InfluenzaA__AEO01389
MKAILVVLLYTFATANADTLCIGYHANNSTDTVDTVLEKNVTVTHSVNLLEDKHNGKLCKLRGVAPLHLGKCNIAGWILGNPECESLSTASSWSYIVETSSSDNGTCYPGDFIDYEELREQLSSVSSFERFEIFPKTSSWPNHDSNKGVTAACPHAGTKSFYKNLIWLVKKGNSYPKLSKSYINDKGKEVLVLWGIHHPSTSADQQSLYQNADAYVFVGTSRYSKKFKPEIAIRPKVRDQEGRMNYYWTLVEPGDKITFEATGNLVVPRYAFAMERNAGSGIIISDTPVHDCNTTCQTPKGAINTSLPFQNIHPITIGKCPKYVKSTKLRLATGLRNVPSIQSRGLFGAIAGFIEGGWTGMVDGWYGYHHQNEQGSGYAADLKSTQNAIDKITNKVNSVIEKMNTQFTAVGKEFNHLEKRIENLNKKVDDGFLDIWTYNAELLVLLENERTLDYHDSNVKNLYEKVRSQLKNNAKEIGNGCFEFYHKCDNTCMESVKNGTYDYPKYSEEAKLNREEIDGVKLESTRIYQILAIYSTVASSLVLVVSLGAISFWMCSNGSLQCRICI

SEQ ID NO: 7479 - protein, 566 aa, Artificial Sequence
  derived and/or modified protein sequence (wt) from hemagglutinin__InfluenzaA__AEO01390
MKAILVVLLYTFAIANADTLCIGYHANNSTDTVDTVLEKNVTVTHSVNLLEDKHNGKLCKLRGVAPLHLGKCNIAGWILGNPECESLSTASSWSYIVETSSSDNGTCYPGDFIDYEELREQLSSVSSFERFEIFPKTSSWPNHDSNKGVTAACPHAGAKSFYKNLIWLVKKGNSYPKLSKSYINDKGKEVLVLWGIHHPSTSADQQSLYQNADAYVFVETSRYSKKVKPEIAIRPRVRDQEGRMNYYWTLVEPGDKITFEATGNLVVPRYAFAMERNAGSGIIISDTPVHDCNTTCQTPKGAINTSLPFQNIHPITIGKCPKYVKSTKLRLATGLRNVPSIQSRGLFGAIAGFIEGGWTGMVDGWYGYHHQNEQGSGYAADLKSTQHAIDEITNKVNSVIEKMNTQFTAVGKEFNHLEKRIENLNKKVDDGFLDIWTYNAELLVLLENERTLDYHDSNVKNLYEKVRSQLKNNAKEIGNGCFEFYHKCDNTCMESVKNGTYDYPKYSEVAKLNREEINGVKLESTRIYQILAIYSTVASSLVLVVSLGAISFWMCSNGSLQCRICI

SEQ ID NO: 7480 - protein, 566 aa, Artificial Sequence; identical to SEQ ID NO: 7378
  derived and/or modified protein sequence (wt) from hemagglutinin__InfluenzaA__AEO01391

SEQ ID NO: 7481 - protein, 566 aa, Artificial Sequence; identical to SEQ ID NO: 7387
  derived and/or modified protein sequence (wt) from hemagglutinin__InfluenzaA__AEO01392

SEQ ID NO: 7482 - protein, 566 aa, Artificial Sequence; identical to SEQ ID NO: 4266
  derived and/or modified protein sequence (wt) from hemagglutinin__InfluenzaA__AEO01393

SEQ ID NO: 7483 - protein, 566 aa, Artificial Sequence; identical to SEQ ID NO: 3770
  derived and/or modified protein sequence (wt) from hemagglutinin__InfluenzaA__AEO01394

SEQ ID NO: 7484 - protein, 566 aa, Artificial Sequence
  derived and/or modified protein sequence (wt) from hemagglutinin__InfluenzaA__AEO01395
MKAILVVLLYTFATANADTLCIGYHANNSTDTVDTVLEKNVTVTHSVNLLEDKHNGKLCKLRGVAPLHLGKCNIAGWILGNPECESLSTASSWSYIVETSSSDNGTCYPGDFLDYEELREQLSSVSSFERFEIFPKTSSWPNHDSNKGVTAACPHAGAKSFYKNLIWLVKKGNSYPKLSKSYINDKGKEVLVLWGIHHPSTSADQQSLYQNADAYVFVGTSRYSKKFKPEIAIRPKVREQEGRMNYYWTLVEPGDKITFEATGNLVVPRYAFAMERNAGSGIIISDTPVHDCNTTCQTPKGAINTSLPFQNIHPITIGKCPKYVKSTKLRLATGLRNVPSIQSRGLFGAIAGFIEGGWTGMVDGWYGYHHQNEQGSGYAADLKSTQNAIDEITNKVNSVIEKMNTQFTAVGKEFNHLEKRIENLNKKVDDGFLDIWTYNAELLVLLENERTLDYHDSNVKNLYEKVRSQLKNNAKEIGNGCFEFYHKCDNTCMESVKNGTYDYPKYSEEAKLNREEIDGVKLESTRIYQILAIYSTVASSLVLVVSLGAISFWMCSNGSLQCRICI

SEQ ID NO: 7485 - protein, 566 aa, Artificial Sequence; identical to SEQ ID NO: 3770
  derived and/or modified protein sequence (wt) from hemagglutinin__InfluenzaA__AEO01396

SEQ ID NO: 7486 - protein, 566 aa, Artificial Sequence
  derived and/or modified protein sequence (wt) from hemagglutinin__InfluenzaA__AEO01397
MKAILVVLLYTFATANADTLCIGYHANNSTDTVDTVLEKNVTVTHSVNILEDKHNGKLCKLRGVAPLHLGKCNIAGWILGNPECESLSTASSWSYIVETSSSDNGTCYPGDFIDYEELREQLSSVSSFERFEIFPKTSSWPNHDSNKGVTAACPHAGAKSFYKNLIWLVKKGNSYPKLSKSYINDKGKEVLVLWGIHHPSTSADQQSLYQNTDAYVFVGTSRYSKKFKPEIAIRPKVRDQEGRMNYYWTLVEPGDKITFEATGNLVVPRYAFAMERNAGSGIIISDTPVHDCNTTCQTPKGAINTSLPFQNIHPITIGKCPKYVKSTKLRLATGLRNVPSIQSRGLFGAIAGFIEGGWTGMVDGWYGYHHQNEQGSGYAADLKSTQNAIDEITNKVNSVIEKMNTQFTAVGKEFNHLEKRIENLNKKVDDGFLDIWTYNAELLVLLENERTLDYHDSNVKNLYEKVRSQLKNNAKEIGNGCFEFYHKCDNTCMESVKNGTYDYPKYSEEAKLNREEIDGVKLESTRIYQILAIYSTVASSLVLVVSLGAISFWMCSNGSLQCRICI

SEQ ID NO: 7487 - protein, 566 aa, Artificial Sequence
  derived and/or modified protein sequence (wt) from hemagglutinin__InfluenzaA__AEO01398
MKAILVVLLYTFATANADTLCIGYHANNSTDTVDTVLEKNVTVTHSVNLLEDKHNGKLCKLRGVAPLHLGKCNIAGWILGNPECESLSTASSWSYIVETSSSDNGTCYPGDFIDYEELREQLSSVSSFERFEIFPKTSSWPNHDSNKGVTAACPHAGAKSFYKNLIWLVKKGNSYPKLSKSYINDKGKEVLVLWGIHHPSTSADQQSLYQNADANVFVGTSRYSKKFKPEIAIRPKVRGQEGRMNYYWTLVEPGDKITFEATGNLVVPRYAFAMERNAGSGIIISDTPVHDCNTTCQTPKGAINTSLPFQNIHPITIGKCPKYVKSTKLRLATGLRNVPSIQSRGLFGAIAGFIEGGWTGMVDGWYGYHHQNEQGSGYAADLKSTQNAIDEITNKVNSVIEKMNTQFTAVGKEFNHLEKRIENLNKKVDDGFLDIWTYNAELLVLLENERTLDYHDSNVKNLYEKVRNQLKNNAKEIGNGCFEFYHKCDNTCMESVKNGTYDYPKYSEEAKLNREEIDGVKLESTRIYQILAIYSTVASSLVLVVSLGAISFWMCSNGSLQCRICI

SEQ ID NO: 7488 - protein, 566 aa, Artificial Sequence; identical to SEQ ID NO: 7387
  derived and/or modified protein sequence (wt) from hemagglutinin__InfluenzaA__AEO01399

SEQ ID NO: 7489 - protein, 566 aa, Artificial Sequence; identical to SEQ ID NO: 2669
  derived and/or modified protein sequence (wt) from hemagglutinin__InfluenzaA__AEO01402

SEQ ID NO: 7490 - protein, 566 aa, Artificial Sequence; identical to SEQ ID NO: 3833
  derived and/or modified protein sequence (wt) from hemagglutinin__InfluenzaA__AEO01403

SEQ ID NO: 7491 - protein, 566 aa, Artificial Sequence; identical to SEQ ID NO: 2669
  derived and/or modified protein sequence (wt) from hemagglutinin__InfluenzaA__AEO01404

SEQ ID NO: 7492 - protein, 566 aa, Artificial Sequence
  derived and/or modified protein sequence (wt) from hemagglutinin__InfluenzaA__AEO01405
MKAILVVLLYTFATANADTLCIGYHANNSTDTVDTVLEKNVTVTHSVNLLEDKHNGKLCKLRGVAPLHLGKCNIAGWILGNPECESLSTASSWSYIVETSSSDNGTCYPGDFIDYEELREQLSSVSSFERFEIFPKTSSWPNHDSNKGVTAACPHAGAKSFYKNLIWLVKKGNSYPKLSKSYINDKGKEVLVLWGIHHPSTSADQQSLYQNADAYVFVGTSRYSKKFKPEIAIRPKVRDQEGRMNYYWTLVEPGDKITFEATGNLVVPRYAFAMERNAGSGIIISDTPVHDCNTTCQTPKGAINTSLPFQNIHPITIGKCPKYVKSTKLRLATGLRNVPSIQSRGLFGAIAGFIEGGWTGMVDGWYGYHHQNEQGSGYAADLKSTQNAIDEITNKVNSVIEKMNTQFTAVGKEFNHLEKRIENLNKKVDDGFLDIWTYNAELLVLLENERTLDYHDSNVKNLYEKVRSQLKNNAKEIGNGCFEFYHKCDNTCMESVKNGTYDYPKYSEEAKLNREEIDGVKLESTMIYQILAIYSTVASSLVLVVSLGAISFWMCSNGSLQCRICI

SEQ ID NO: 7493 - protein, 566 aa, Artificial Sequence
  derived and/or modified protein sequence (wt) from hemagglutinin__InfluenzaA__AEO01407
MKAILVVLLYTFATANADTLCIGYHANNSTDTVDTVLEKNVTVTHSVNLLEDKHNGKLCKLRGVAPLHLGKCNIAGWILGNPECESLSTASSWSYIVETSSSDNGTCYPGDFIDYEELREQLSSVSSFERFEIFPKTSSWPNHDSNKGVTAACPHAGAKSFYKNLIWLVKKGNSYPKLSKSYINDKGKEVLVLWGIHHPSTSADQQSLYQNADAYVFVGTSRYSKKFKPEIAIRPKVRDQEGRMNYYWTLVEPGDKITFEATGNLVVPRYAFAMERNAGSGIIISDTPVHDCNTTCQTPKGAINTSLPFQNIHPITIGKCPKYVKSTKLRLATGLRNVPSIQSRGLFGAIAGFIEGGWTGMVDGWYGYHHQNEQGSGYAADLKSTQHAIDEITNKVNSVIEKMNTQFTAVGKEFNHLEKRIENLNKKVDDGFLDIWTYNAELLVLLENERTLDYHDSNVKNLYEKVRSQLKNNAKEIGNGCFEFYHKCDNTCMESVKNGTYDYPKYSEEAKLNREEINGVKLESTRIYQILAIYSTVASSLVLVVSLGAISFWMCSNGSLQCRICI

SEQ ID NO: 7494 - protein, 566 aa, Artificial Sequence
  derived and/or modified protein sequence (wt) from hemagglutinin__InfluenzaA__AEO01408
MKAILVVLLYTFATANADTLCIGYHANNSTDTVDTVLEKNVTVTHSVNLLEDKHNGKLCKLRGVAPLHLGKCNIAGWILGNPECESLSTASSWSYIVETSSSDNGTCYPGDFIDYEELREQLSSVSSFERFEIFPKTSSWPNHDSNKGVTAACPHAGAKSFYKNLIWLVKKGNSYPKLSKSYINDKGKEVLVLWGIHHPSTSADQQSLYQNADAYVFVGTSRYSKKFKPEIAIRPKVREQEGRMNYYWTLVEPGDKITFEATGNLVVPRYAFAMERNAGSGIIISDTPVHDCNTTCQTPKGAINTSLPFQNIHPITIGKCPKYVKSTKLRLATGLRNVPSIQSRGLFGAIAGFIEGGWTGMVDGWYGYHHQNEQGSGYAADLKSTQNAIDEITNKVNSVIEKMNTQFTAVGKEFNHLEKRIENLNKKIDDGFLDIWTYNAELLVLLENERTLDYHDSNVKNLYEKVRSQLKNNAKEIGNGCFEFYHKCDNTCMESVKNGTYDYPKYSEEAKLNREEIDGVKLESTRIYQILAIYSTVASSLVLVVSLGAISFWMCSNGSLQCRICI

SEQ ID NO: 7495 - protein, 566 aa, Artificial Sequence; identical to SEQ ID NO: 3771
  derived and/or modified protein sequence (wt) from hemagglutinin__InfluenzaA__AEO01409

SEQ ID NO: 7496 - protein, 566 aa, Artificial Sequence; identical to SEQ ID NO: 7387
  derived and/or modified protein sequence (wt) from hemagglutinin__InfluenzaA__AEO01410

SEQ ID NO: 7497 - protein, 566 aa, Artificial Sequence; identical to SEQ ID NO: 6088
  derived and/or modified protein sequence (wt) from hemagglutinin__InfluenzaA__AEO01411

SEQ ID NO: 7498 - protein, 566 aa, Artificial Sequence; identical to SEQ ID NO: 3022
  derived and/or modified protein sequence (wt) from hemagglutinin__InfluenzaA__AEO01412

SEQ ID NO: 7499 - protein, 566 aa, Artificial Sequence
  derived and/or modified protein sequence (wt) from hemagglutinin__InfluenzaA__AEO01413
MKAILVVLLYTFATANADTLCIGYHANNSTDTVDTVLEKNVTVTHSVNLLEDKHNGKLCKLRGVAPLHLGKCNIAGWILGNPECESLSTASSWSYIVETSSSDNGTCYPGDFIDYEELREQLSSVSSFERFEIFPKTSSWPNHDSNKGVTAACPHAGAKSFYKNLIWLVKKGNSYPKLSKSYINDKGKEVLVLWGIHHPSTSADQQSLYQNADAYVFVGTSRYSKKFKPEIAIRPKVRDQEGRMNYYWTLVEPGDKITFEATGNLVVPRYAFAMERNAGSGIIISDTPVHDCNTTCQTPKGAINTSLPFQNIHPITIGKCPKYVKSTKLRLATGLRNVPSIQSRGLFGAIAGFIEGGWTGMVDGWYGYHHQNEQGSGYAADLKSTQNAIDKITNKVNSVIEKMNTQFTAVGKEFNHLEKRIENLNKKVDDGFLDIWTYNAELLVLLENERTLDYHDSNVKNLYEKVRSQLKSNAKEIGNGCFEFYHKCDNTCMESVKNGTYDYPKYSEEAKLNREEIDGVKLESTRIYQILAIYSTVASSLVLVVSLGAISFWMCSNGSLQCRICI

SEQ ID NO: 7500 - protein, 566 aa, Artificial Sequence
  derived and/or modified protein sequence (wt) from hemagglutinin__InfluenzaA__AEO01414
MKAILVVLLYTFATANADTLCIGYHANNSTDTVDTVLEKNVTVTHSVNLLEDKHNGKLCKLRGVAPLHLGKCNIAGWILGNPECESLSTASSWSYIVETSSSDNGTCYPGDFIDYEELREQLSSVSSFERFEIFPKTSSWPNHDSNKGVTAACPHAGAKSFYKNLIWLVKKGNSYPKLSKSYINDKGKEVLVLWGIHHPSTSADQQSLYQNADAYVFVGTSRYSKKFKPEIAIRPKVRDQEGRMNYYWTLVEPGDKITFEATGNLVVPRYAFAMERNTGSGIIISDTPVHDCSTTCQTPKGAINTSLPFQNVHPITIGKCPKYVKSTKLRLATGLRNVPSIQSRGLFGAIAGFIEGGWTGMVDGWYGYHHQNEQGSGYAADLKSTQNAIDEITNKVNSVIEKMNTQFTAVGKEFNHLEKRIENLNKKVDDGFLDIWTYNAELLVLLENERTLDYHDSNVKNLYEKVRSQLKNNAKEIGNGCFEFYHKCDNTCMESVKNGTYDYPKYSEEAKLNREEIDGVKLESTRIYQILAIYSTVASSLVLVVSLGAISFWMCSNGSLQCRICI

SEQ ID NO: 7501 - protein, 566 aa, Artificial Sequence; identical to SEQ ID NO: 6300
  derived and/or modified protein sequence (wt) from hemagglutinin__InfluenzaA__AEO01416

SEQ ID NO: 7502 - protein, 566 aa, Artificial Sequence; identical to SEQ ID NO: 3833
  derived and/or modified protein sequence (wt) from hemagglutinin__InfluenzaA__AEO01418

SEQ ID NO: 7503 - protein, 566 aa, Artificial Sequence; identical to SEQ ID NO: 3833
  derived and/or modified protein sequence (wt) from hemagglutinin__InfluenzaA__AEO01419

SEQ ID NO: 7504 - protein, 566 aa, Artificial Sequence
  derived and/or modified protein sequence (wt) from hemagglutinin__InfluenzaA__AEO01420
MKAILVVLLYTFATANADTLCIGYHANNSTDTVDTVLEKNVTVTHSVNLLEYKHNGKLCKLRGVAPLHLGKCNIAGWILGNPECESLSTASSWSYIVETSNSDNGTCYPGDFIDYEELREQLSSVSSFERFEIFPKTSSWPNHDSNKGVTAACPHAGAKSFYKNLIWLVKKGNSYPKLSKSYINDKGKEVLVLWGIHHPSTSADQQSLYQNADAYVFVGTSRYSKKFKPEIAIRPKVRDQEGRMNYYWTLVEPGDKITFEATGNLVVPRYAFAMERNAGSGIIISDTPVHDCNTTCQTPKGAINTSLPFQNIHPITIGKCPKYVKSTKLRLATGLRNVPSIQSRGLFGAIAGFIEGGWTGMVDGWYGYHHQNEQGSGYAADLKSTQNAIDEITNKVNSVIEKMNTQFTAVGKEFNHLEKRIENLNKKVDDGFLDIWTYNAELLVLLENERTLDYHDSNVKNLYEKVRSQLKNNAKEIGNGCFEFYHKCDNTCMESVKNGTYDYPKYSEEAKLNREEIDGVKLESTRIYQILAIYSTVASSLVLVVSLGAISFWMCSNGSLQCRICI

SEQ ID NO: 7505 - protein, 566 aa, Artificial Sequence
  derived and/or modified protein sequence (wt) from hemagglutinin__InfluenzaA__AEO01421
MKAILVVLLYTFATANADTLCIGYHANNSTDTVDTVLEKNVTVTHSVNLLEDKHNGKLCKLRGVAPLHLGKCNIAGWILGNPECESLSTASSWSYIVETSSSDNGTCYPGDFIDYEELREQLSSVSSFEKFEIFPKTSSWPNHDSNKGVTAACPHAGAKSFYKNLIWLVKKGNSYPKLSKSYINDKGKEVLVLWGIHHPSTSADQQSLYQNADAYVFVGTSRYSKKFKPEIAIRPKVRDQEGRMNYYWTLVEPGDKITFEATGNLVVPRYAFAMERNAGSGIIISDTPVHDCNTTCQTPKGAINTSLPFQNIHPITIGKCPKYVKSTKLRLATGLRNVPSIQSRGLFGAIAGFIEGGWTGMVDGWYGYHHQNEQGSGYAADLKSTQNAIDKITNKVNSVIEKMNTQFTAVGKEFNHLEKRIENLNKKVDDGFLDIWTYNAELLVLLENERTLDYHDSNVKNLYEKVRSQLKNNAKEIGNGCFEFYHKCDNTCMESVKNGTYDYPKYSEEAKLNREEIDGVKLESTRIYQILAIYSTVASSLVLVVSLGAISFWMCSNGSLQCRICI

SEQ ID NO: 7506 - protein, 566 aa, Artificial Sequence
  derived and/or modified protein sequence (wt) from hemagglutinin__InfluenzaA__AEO01422
MKAILVVLLYTFAIANADTLCIGYHANNSTDTVDTVLEKNVTVTHSVNLLEDKHNGKLCKLRGVAPLHLGKCNIAGWILGNPECESLSTASSWSYIVETSSSDNGTCYPGDFIDYEELREQLSSVSSFERFEIFPKTSSWPNHDSNKGVTAACPHAGAKSFYKNLIWLVKKGNLYPKLSKSYINDKGKEVLVLWGIHHPSTSADQQSLYQNADAYVFVGTSRYSKKFKPEIAIRPKVRDQEGRMNYYWTLVEPGDKITFEATGNLVVPRYAFAMERNAGSGIIISDTPVHDCNTTCQTPKGAINTSLPFQNIHPITIGKCPKYVKSTKLRLATGLRNVPSIQSRGLFGAIAGFIEGGWTGMVDGWYGYHHQNEQGSGYAADLKSTQHAIDEITNKVNSVIEKMNTQFTAVGKEFNHLEKRIENLNKKVDDGFLDIWTYNAELLVLLENERTLDYHDSNVKNLYEKVRSQLKNNAKEIGNGCFEFYHKCDNTCMESVKNGTYDYPKYSEEAKLNREEINGVKLESTRIYQILAIYSTVASSLVLVVSLGAISFWMCSNGSLQCRICI

SEQ ID NO: 7507 - protein, 566 aa, Artificial Sequence
  derived and/or modified protein sequence (wt) from hemagglutinin__InfluenzaA__AEO01423
MKAILIVLLYTFATANADTLCIGYHANNSTDTVDTVLEKNVTVTHSVNLLEDKHNGKLCKLRGVAPLHLGKCNIAGWILGNPECESLSTASSWSYIVETSSSDNGTCYPGDFIDYEELREQLSSVSSFERFEIFPKTSSWPNHDSNKGVTAACPHAGAKSFYKNLIWLVKKGNSYPKLSKSYINDKGKEVLVLWGIHHPSTSADQQSLYQNADAYVFVGTSRYSKKFKPEITIRPKVRDQEGRMNYYWTLVEPGDKITFEATGNLVVPRYAFAMERNAGSGIIISDTPVHDCNTTCQTPKGAINTSLPFQNIHPITIGKCPKYVKSTKLRLATGLRNVPSIQSRGLFGAIAGFIEGGWTGMVDGWYGYHHQNEQGSGYAADLKSTQNAIDEITNKVNSVIEKMNTQFTAVGKEFNHLEKRIENLNKKVDDGFLDIWTYNAELLVLLENERTLDYHDSNVKNLYEKVRSQLKNNAKEIGNGCFEFYHKCDNTCMESVKNGTYDYPKYSEEAKLNREEIDGVKLESTRIYQILAIYSTVASSLVLVVSLGAISFWMCSNGSLQCRICI

SEQ ID NO: 7508 - protein, 566 aa, Artificial Sequence; identical to SEQ ID NO: 7505
  derived and/or modified protein sequence (wt) from hemagglutinin__InfluenzaA__AEO01424

SEQ ID NO: 7509 - protein, 566 aa, Artificial Sequence; identical to SEQ ID NO: 7505
  derived and/or modified protein sequence (wt) from hemagglutinin__InfluenzaA__AEO01425

SEQ ID NO: 7510 - protein, 566 aa, Artificial Sequence; identical to SEQ ID NO: 2669
  derived and/or modified protein sequence (wt) from hemagglutinin__InfluenzaA__AEO01426

SEQ ID NO: 7511 - protein, 566 aa, Artificial Sequence
  derived and/or modified protein sequence (wt) from hemagglutinin__InfluenzaA__AEO01427
MKAILVVLLYTFATANSDTLCIGYHANNSTDTVDTVLEKNVTVTHSVNLLEDKHNGKLCKLRGVAPLHLGKCNIAGWILGNPECESLSTASSWSYIVETSSSDNGTCYPGDFIDYEELREQLSSVSSFERFEIFPKTSSWPNHDSNKGVTAACPHAGAKSFYKNLIWLVKKGNSYPKLSKSYINDKGKEVLVLWGIHHPSTSADQQSLYQNADAYVFVGTSRYSKKFKPEIAIRPKVRDQEGRMNYYWTLVEPGDKITFEATGNLVVPRYAFAMERNAGSGIIISDTPVHDCNTTCQTPKGAINTSLPFQNIHPITIGKCPKYVKSTKLRLATGLRNVPSIQSRGLFGAIAGFIEGGWTGMVDGWYGYHHQNEQGSGYAADLKSTQNAIDKITNKVNSVIEKMNTQFTAVGKEFNHLEKRIENLNKKVDDGFLDIWTYNAELLVLLENERTLDYHDSNVKNLYEKVRSQLKNNAKEIGNGCFEFYHKCDNTCMESVKNGTYDYPKYSEEAKLNREEIDGVKLESTRIYQILAIYSTVASSLVLVVSLGAISFWMCSNGSLQCRICI

SEQ ID NO: 7512 - protein, 566 aa, Artificial Sequence
  derived and/or modified protein sequence (wt) from hemagglutinin__InfluenzaA__AEO01428
MKAILVVLLYTFATANADTLCIGYHANNSTDTVDTVLEKNVTVTHSVNLLEDKHNGKLCKLRGVAPLHLGKCNIAGWILGNPECESLSTASSWSYIVETSSSDNGTCYPGDFIDYEELREQLSSVSSFERFEIFPKTSSWPDHDSNKGVTAACPHAGAKSFYKNLIWLVKKGNSYPKLSKSYINDKGKEVLVLWGIHHPSTSADQQSLYQNADAYVFVGTSRYSKKFKPEIAIRPKVRDQEGRMNYYWTLVEPGDKITFEATGNLVVPRYAFAMERNAGSGIIISDTPVHDCNTTCQTPKGAINTSLPFQNIHPITIGKCPKYVKSTKLRMATGLRNVPSIQSRGLFGAIAGFIEGGWTGMVDGWYGYHHQNEQGSGYAADLKSTQNAIDEITNKVNSVIEKMNTQFTAVGKEFNHLEKRIENLNKKVDDGFLDIWTYNAELLVLLENERTLDYHDSNVKNLYEKVRSQLKNNAKEIGNGCFEFYHKCDNTCMESVKNGTYDYPKYSEEAKLNREEIDGVKLESTRIYQILAIYSTVASSLVLVVSLGAISFWMCSNGSLQCRICI

SEQ ID NO: 7513 - protein, 566 aa, Artificial Sequence; identical to SEQ ID NO: 3833
  derived and/or modified protein sequence (wt) from hemagglutinin__InfluenzaA__AEO01429

SEQ ID NO: 7514 - protein, 566 aa, Artificial Sequence
  derived and/or modified protein sequence (wt) from hemagglutinin__InfluenzaA__AEO01430
MKAILVVLLYTFATANADTLCIGYHANNSTDTVDTVLEKNVTVTHSVNLLEDKHNGKLCKLRGVAPLHLGKCNIAGWILGNPECESLSTASSWSYIVETSSSDNGTCYPGDFIDYEELREQLSSVSSFERFEIFPKTSSWPNHDSNKGVTAACPHDGAKSFYKNLIWLVKKGNSYPKLSKSYINDKGKEVLVLWGIHHPSTSADQQSLYQNADAYVFVGTSRYSKKFKPEIAIRPKVRDQEGRMNYYWTLVEPGDKITFEATGNLVVPRYAFAMERNAGSGIIISDTPVHDCNTTCQTPKGAINTSLPFQNIHPITIGKCPKYVKSTKLRLATGLRNVPSIQSRGLFGAIAGFIEGGWTGMVDGWYGYHHQNEQGSGYAADLKSTQNAIDEITNKVNSVIEKMNTQFTAVGKEFNHLEKRIENLNKKVDDGFLDIWTYNAELLVLLENERTLDYHDSNVKNLYEKVRSQLKNNAKEIGNGCFEFYHKCDNTCMESVKNGTYDYPKYSEEAKLNREEIDGVKLESTRIYQILAIYSTVASSLVLVVSLGAISFWMCSNGSLQCRICI

SEQ ID NO: 7515 - protein, 566 aa, Artificial Sequence; identical to SEQ ID NO: 7387
  derived and/or modified protein sequence (wt) from hemagglutinin__InfluenzaA__AEO01431

SEQ ID NO: 7516 - protein, 566 aa, Artificial Sequence; identical to SEQ ID NO: 2669
  derived and/or modified protein sequence (wt) from hemagglutinin__InfluenzaA__AEO01432

SEQ ID NO: 7517 - protein, 566 aa, Artificial Sequence
  derived and/or modified protein sequence (wt) from hemagglutinin__InfluenzaA__AEO01434
MKAILVVLLYTFATANADTLCIGYHANNSTDTVDTVLEKNVTVTHSVNLLEDKHNGKLCKLRGVAPLHLGECNIAGWILGNPECESLSTASSWSYIVETSSSDNGTCYPGDFIDYEELREQLSSVSSFERFEIFPKTSSWPNHDSNKGVTAACPHAGAKSFYKNLIWLVKKGNSYPKLNKSYINDKGKEVLVLWGIHHPSTSADQQSLYQNADAYVFVGTSRYSKKFKPEIAIRPKVRDQEGRMNYYWTLVEPGDKITFEATGNLVVPRYAFAMERNAGSGIIISDTPVHDCNTTCQTPKGAINTSLPFQNIHPITIGECPKYVKSTKLRLATGLRNVPSIQSRGLFGAIAGFIEGGWTGMVDGWYGYHHQNEQGSGYAADLKSTQNAIDKITNKVNSVIEKMNTQFTAVGKEFNHLEKRIENLNKKVDDGFLDIWTYNAELLVLLENERTLDYHDSNVKNLYEKVRSQLKNNAKEIGNGCFEFYHKCDNTCMESVKNGTYDYPKYSEEAKLNREEIDGVKLESTRIYQILAIYSTVASSLVLVVSLGAISFWMCSNGSLQCRICI

SEQ ID NO: 7518 - protein, 566 aa, Artificial Sequence
  derived and/or modified protein sequence (wt) from hemagglutinin__InfluenzaA__AEO01435
MKAILVVLLYTFATANADTLCIGYHANNSTDTVDTVLEKNVTVTHSVNLLEDKHNGKLCKLRGVAPLHLGKCNIAGWILGNPECESLSTASSWSYIVETSSSDNGTCYPGDFIDYEELREQLSSVSSFERFEIFPKTSSWPNHDSNKGVTAACPHAGAKSFYKNLIWLVKKGNSYPKLSKSYINDKGKEVLVLWGIHHPSTSADQQSLYQNADAYVFVGTSRYSKKFKPEIAIRPKVRDQEGRMNYYWTLVEPGDKITFEATGNLVVPRYAFAMERNAGSGIIISDTPVYDCNTTCQTPKGAINTSLPFQNIHPITIGKCPKYVKSTKLRLATGLRNVPSIQSRGLFGAIAGFIEGGWTGMVDGWYGYHHQNEQGSGYAADLKSTQNAIDKITNKVNSVIEKMNTQFTAVGKEFNHLEKRIENLNKKVDDGFLDIWTYNAELLVLLENERTLDYHDSNVKNLYEKVRNQLKNNAKEIGNGCFEFYHKCDNTCMESVKNGTYDYPKYSEEAKLNREEIDGVKLESTRIYQILAIYSTVASSLVLVVSLGAISFWMCSNGSLQCRICI

SEQ ID NO: 7519 - protein, 566 aa, Artificial Sequence; identical to SEQ ID NO: 7505
  derived and/or modified protein sequence (wt) from hemagglutinin__InfluenzaA__AEO01436

SEQ ID NO: 7520 - protein, 566 aa, Artificial Sequence; identical to SEQ ID NO: 7387
  derived and/or modified protein sequence (wt) from hemagglutinin__InfluenzaA__AEO01437

SEQ ID NO: 7521 - protein, 566 aa, Artificial Sequence; identical to SEQ ID NO: 7438
  derived and/or modified protein sequence (wt) from hemagglutinin__InfluenzaA__AEO01438

SEQ ID NO: 7522 - protein, 566 aa, Artificial Sequence; identical to SEQ ID NO: 3022
  derived and/or modified protein sequence (wt) from hemagglutinin__InfluenzaA__AEO01440

SEQ ID NO: 7523 - protein, 566 aa, Artificial Sequence
  derived and/or modified protein sequence (wt) from hemagglutinin__InfluenzaA__AEO01441
MKAILVVLLYTFATANADTLCIGYHANNSTDTVDTVLEKNVTVTHSVNLLEDKHNGKLCKLRGVAPLHLGKCNIAGWILGNPECESLSTASSWSYIVETSSSDNGTCYPGDFIDYEELREQLSSVSSFERFEIFPKTSSWPNHDSNKGVTAACPHAGAKSFYKNLIWLVKKGNSYPKLSKSYINDKGKEVLVLWGIHHPSTSADQQSLYQNADAYVFVGTSRYSKKFKPEIAIRPKVRDQEGRMNYYWTLVEPGDKITFEATGNLVVPRYAFAMERNDGSGIIISDTPVHDCNTTCQTPKGAINTSLPFQNIHPITIGKCPKYVKSTKLRLATGLRNVPSIQSRGLFGAIAGFIEGGWTGMVDGWYGYHHQNEQGSGYAADLKSTQNAIDKITNKVNSVIEKMNTQFTAVGKEFNHLEKRIENLNKKVDDGFLDIWTYNAELLVLLENERTLDYHDSNVKNLYEKVRSQLKNNAKEIGNGCFEFYHKCDNTCMESVKNGTYDYPKYSEEAKLNREEIDGVKLESTRIYQILAIYSTVASSLVLVVSLGAISFWMCSNGSLQCRICI

SEQ ID NO: 7524 - protein, 566 aa, Artificial Sequence; identical to SEQ ID NO: 4089
  derived and/or modified protein sequence (wt) from hemagglutinin__InfluenzaA__AEO01442

SEQ ID NO: 7525 - protein, 566 aa, Artificial Sequence
  derived and/or modified protein sequence (wt) from hemagglutinin__InfluenzaA__AEO01443
MKAILVVLLYTFATANADTLCIGYHANNSTDTVDTVLEKNVTVTHSVNLLEDKHNGKLCKLRGVAPLHLGKCNIAGWILGNPECESLSTASSWSYIVETSSSDNGTCYPGDFIDYEELREQLSSVSSFERFEIFPKTSSWPNHDSNKGVTAACPHAGAKSFYKNLIWLVKKENSYPKLSKSYINDKGKEVLVLWGIHHPSTSADQQSLYQNADAYVFVGTSRYSKKFKPEIAIRPKVRDQEGRMNYYWTLVEPGDKITFEATGNLVVPRYAFAMERNAGSGIIISDTPVHDCNTTCQTPKGAINTSLPFQNIHPITIGKCPKYVKSTKLRLATGLRNVPSIQSRGLFGAIAGFIEGGWTGMVDGWYGYHHQNEQGSGYAADLKSTQNAIDKITNKVNSVIEKMNTQFTAVGKEFNHLEKRIENLNKKVDDGFLDIWTYNAELLVLLENERTLDYHDSNVKNLYEKVRSQLKNNAKEIGNGCFEFYHKCDNTCMESVKNGTYDYPKYSEEAKLNREEIDGVKLESTRIYQILAIYSTVASSLVLVVSLGAISFWMCSNGSLQCRICI

SEQ ID NO: 7526 - protein, 566 aa, Artificial Sequence
  derived and/or modified protein sequence (wt) from hemagglutinin__InfluenzaA__AEO01444
MKAILVVLLYTFATANADTLCIGYHANNSTDTVDTVLEKNVTVTHSVNLLEDKHNGKLCKLRGVAPLHLGKCNIAGWILGNPECESLSTASSWSYIVETSNSDNGTCYPGDFIDYEELREQLSSVSSFERFEIFPKTSSWPNHDSDKGVTAACPHAGAKSFYKNLIWLVKKGNSYPKLSKSYINDKGKEVLVLWGIHHPSTSADQQSLYQNADAYVFVGTSRYSKKFKPEIAIRPKVRDQEGRMNYYWTLVEPGDKITFEATGNLVVPRYAFAMERNAGSGIIISDTPVHDCNTTCQTPKGAINTSLPFQNIHPITIGKCPKYVKSTKLRLATGLRNVPSIQSRGLFGAIAGFIEGGWTGMVDGWYGYHHQNEQGSGYAADLKSTQNAIDKITNKVNSVIEKMNTQFTAVGKEFNHLEKRIENLNKKVDDGFLDIWTYNAELLVLLENERTLDYHDSNVKNLYEKVRSQLKNNAKEIGNGCFEFYHKCDNTCMESVKNGTYDYPKYSEEAKLNREEIDGVKLESTRIYQILAIYSTVASSLVLVVSLGAISFWMCSNGSLQCRICI

SEQ ID NO: 7527 - protein, 566 aa, Artificial Sequence; identical to SEQ ID NO: 4837
  derived and/or modified protein sequence (wt) from hemagglutinin__InfluenzaA__AEO01445

SEQ ID NO: 7528 - protein, 566 aa, Artificial Sequence; identical to SEQ ID NO: 7387
  derived and/or modified protein sequence (wt) from hemagglutinin__InfluenzaA__AEO01446

SEQ ID NO: 7529 - protein, 566 aa, Artificial Sequence
  derived and/or modified protein sequence (wt) from hemagglutinin__InfluenzaA__AEO01447
MKAILVVLLYTFATANADTLCIGYHANNSTDTVDTVLEKNVTVTHSVNLLEDKHNGKLCKLRGVAPLHLGKCNIAGWILGNPECESLSTASSWSYIVETSSSDNGTCYPGDFIDYEELREQLSSVSSFERFEIFPKTSSWPNHDSNKGVTAACPHAGAKSFYKNLIWLVKKGNSYPKLSKSYINDKGKEVLVLWGIHHPSTSADQQSLYQNADAYVFVGTSRYSKKFKPEIAIRPKVRDQEGRMNYYWTLVEPGDKITFEATGNLVVPRYAFAMERNAGSGIIISDTPVHDCNTTCQTPKGAINTSLPFQNIHPITIGKCPKYVKSTKLRLATGLRNVPSIQSRGLFGAIAGFIEGGWTGMVDGWYGYHHQNEQGSGYAADLKSTQNAIDEITNKVNSVIEKMNTQFTAVGKEFNHLEKRIENLNKKVDDGFLDIWTYNAELLVLLENERTLDYHDSNVKNLYEKVRSQLKNNAKEIGNGCFEFYHKCDNTCMESVKNGTYDYPKYSEEAKLNREEIDGVKLESTRIYQILAIYSTIASSLVLVVSLGAISFWMCSNGSLQCRICI

SEQ ID NO: 7530 - protein, 566 aa, Artificial Sequence; identical to SEQ ID NO: 3022
  derived and/or modified protein sequence (wt) from hemagglutinin__InfluenzaA__AEO01448

SEQ ID NO: 7531 - protein, 566 aa, Artificial Sequence; identical to SEQ ID NO: 7505
  derived and/or modified protein sequence (wt) from hemagglutinin__InfluenzaA__AEO01449

SEQ ID NO: 7532 - protein, 566 aa, Artificial Sequence
  derived and/or modified protein sequence (wt) from hemagglutinin__InfluenzaA__AEO01450
MKAILVVLLYTFATANADTLCIGYHANNSTDTVDTVLEKNVTVTHSVNLLEDKHNGKLCKLRGVAPLHLGKCNIAGWILGNPECESLSTASSWSYIVETSSSDNGTCYPGDFIDYEELREQLSSVSSFERFEIFPKTSSWPNHDSNKGVTAACPHAGAKSFYKNLIWLVKKGNSYPKLSKSYINDKGKEVLVLWGIHHPSTSTDQQSLYQNADAYVFVGTSRYSKKFKPEIAIRPKVRDQEGRMNYYWTLVEPGDKITFEATGNLVVPRYAFAMERNAGSGIIISDTPVHDCNTTCQTPKGAINTSLPFQNIHPITIGKCPKYVKSTKLRLATGLRNVPSIQSRGLFGAIAGFIEGGWTGMVDGWYGYHHQNEQGSGYAADLKSTQHAIDEITNKVNSVIEKMNTQFTAVGKEFNHLEKRIENLNKKVDDGFLDIWTYNAELLVLLENERTLDYHDSNVKNLYEKVRSQLKNNAKEIGNGCFEFYHKCDNTCMESVKNGTYDYPKYSEEAKLNREEIDGVKLESTRIYQILAIYSTVASSLVLVVSLGAISFWMCSNGSLQCRICI

SEQ ID NO: 7533 - protein, 566 aa, Artificial Sequence; identical to SEQ ID NO: 2669
  derived and/or modified protein sequence (wt) from hemagglutinin__InfluenzaA__AEO01451

SEQ ID NO: 7534 - protein, 566 aa, Artificial Sequence
  derived and/or modified protein sequence (wt) from hemagglutinin__InfluenzaA__AEO01452
MKAILVVLLYTFATANADTLCIGYHANNSTDTVDTVLEKNVTVTHSVNLLEDKHNGKLCKLRGVAPLHLGKCNIAGWILGNPECESLSTASSWSYIVETSSSDNGTCYPGDFIDYEELREQLSSVSSFERFEIFPKTSSWPNHDSNKGVTAACPHAEAKSFYKNLIWLVKKGNSYPKLSKSYINDKGKEVLVLWGIHHPSTSADQQSLYQNADAYVFVGTSRYSKKFKPEIAIRPKVRDQEGRMNYYWTLVEPGDKITFEATGNLVVPRYAFAMERNAGSGIIISDTPAHDCNTTCQTPKGAINTSLPFQNIHPITIGKCPKYVKSTKLRLATGLRNVPSIQSRGLFGAIAGFIEGGWTGMVDGWYGYHHQNEQGSGYAADLKSTQNAIDEITNKVNSVIEKMNTQFTAVGKEFNHLEKRIENLNKKVDDGFLDIWTYNAELLVLLENERTLDYHDSNVKKLYEKVRSQLKNNAKEIGNGCFEFYHKCDNTCMESVKNGTYDYPKYSEEAKLNREEIDGVKLESTRIYQILAIYSTVASSLVLVVSLGAISFWMCSNGSLQCRICI

SEQ ID NO: 7535 - protein, 566 aa, Artificial Sequence
  derived and/or modified protein sequence (wt) from hemagglutinin__InfluenzaA__AEO01453
MKAILVVLLYTFAIANADTLCIGYHANNSTDTVDTVLEKNVTVTHSVNLLEDKHNGKLCKLRGVAPLHLGKCNIAGWILGNPECESLSTASSWSYIVETSSSDNGTCYPGDFIDYEELREQLSSVSSFERFEIFPKTSSWPNHDSNKGVTAACPHAGAKSFYKNLIWLVKKGNSYPKLSKSYINDKGKEVLVLWGVHHPSTSADQQSLYQNADAYVFVGTSRYSKKFKREIAIRPKVRDQEGRMNYYWTLVEPGDKITFEATGNLVVPRYAFAMERNAGSGIIISDTPVHDCNTTCQTPKGAINTSLPFQNIHPITIGKCPKYVKSTKLRLATGLRNVPSIQSRGLFGAIAGFIEGGWTGMVDGWYGYHHQNEQGSGYAADLKSTQHAIDEITNKVNSVIEKMNTQFTAVGKEFNHLEKRIENLNKKVDDGFLDIWTYNAELLVLLENERTLDYHDSNVKNLYEKVRSQLKNNAKEIGNGCFEFYHKCDNTCMESVKNGTYDYPKYSEEAKLNREEINGVKLESTRIYQILAIYSTVASSLVLVVSLGAISFWMCSNGSLQCRICI

SEQ ID NO: 7536 - protein, 566 aa, Artificial Sequence
  derived and/or modified protein sequence (wt) from hemagglutinin__InfluenzaA__AEO01454
MKAILVVLLYTFATANADTLCIGYHANNSTDTVDTVLEKNVTVTHSVNILEDKHNGKLCKLRGVAPLHLGKCNIAGWILGNPECESLSTASSWSYIVETSSSDNGTCYPGDFIDYEELREQLSSVSSFERFEIFPKTSSWPNHDSNKGVTAACPHAGAKSFYKNLIWLVKKGNSYPKLSKSYINDKGKEVLVLWGIHHPSTSADQQSLYQNADAYVFVGTSRYSKKFKPEIAIRPKVRDQEGRMNYYWTLVEPGDKITFEATGNLVVPRYAFAMERNAGSGIIISDTPVHDCNTTCQTPKGAINTSLPFQNIHPTTIGKCPKYVKSTKLRLATGLRNVPSIQSRGLFGAIAGFIEGGWTGMVDGWYGYHHQNEQGSGYAADLKSTQNAIDEITNKVNSVIEKMNTQFTAVGKEFNHLEKRIENLNKKVDDGFLDIWTYNAELLVLLENERTLDYHDSNVKNLYEKVRSQLKNNAKEIGNGCFEFYHKCDNTCMESVKNGTYDYPKYSEEAKLNREEIDGVKLESTRIYQILAIYSTVASSLVLVVSLGAISFWMCSNGSLQCRICI

SEQ ID NO: 7537 - protein, 566 aa, Artificial Sequence
  derived and/or modified protein sequence (wt) from hemagglutinin__InfluenzaA__AEO01455
MKAILVVLLYTFATANADTLCIGYHANNSTDTVDTVLEKNVTVTHSVNLLEDKHNGKLCKLRGVAPLHLGKCNIAGWILGNPECESLSTASSWSYIVETSSSDNGTCYPGDFIDYEELREQLSSVSSFERFEIFPKTSSWPNHDSNKGVTAACPHAGAKSFYKNLIWLVKKGNSYPKLSKSYINDKGKEVLVLWGIHHPSTSADQQSLYQNADAYVFVGTSRYSKKFKPEIAIRPKVREQEGRMNYYWTLVEPGDKITFEATGNLVVPRYAFAMERNAGSGIIISDTPVHDCNTTCQTPKGAINTSLPFQNIHPITIGKCPKYVKSTKLRLATGLRNIPSIQSRGLFGAIAGFIEGGWTGMVDGWYGYHHQNEQGSGYAADLKSTQNAIDEITNKVNSVIEKMNTQFTAVGKEFNHLEKRIENLNKKVDDGFLDIWTYNAELLVLLENERTLDYHDSNVKNLYEKVRSQLKNNAKEIGNGCFEFYHKCDNTCMESVKNGTYDYPKYSEEAKLNREEIDGVKLESTRIYQILAIYSTVASSLVLVVSLGAISFWMCSNGSLQCRICI

SEQ ID NO: 7538 - protein, 566 aa, Artificial Sequence
  derived and/or modified protein sequence (wt) from hemagglutinin__InfluenzaA__AEO01456
MKAILIVLLYTFATANADTLCIGYHANNSTDTVDTLLEKNVTVTHSVNLLEDKHNGKLCKLRGVAPLHLGKCNIAGWILGNPECESLSTASSWSYIVETSSSDNGTCYPGDFIDYEELREQLSSVSSFERFEIFPKTSSWPNHDSNKGVTAACPHAGAKSFYKNLIWLVKKGNSYPKLSKSYINDKGKEVLVLWGIHHPSTSADQQSLYQNADAYVFVGTSRYSKKFKPEIAIRPKVRDQEGRMNYYWTLVEPGDKITFEATGNLVVPRYAFAMDRNAGSGIIISDAPVHDCNTTCQTPKGAINTSLPFQNIHPITIGKCPKYVKSTKLRLATGLRNVPSIQSRGLFGAIAGFIEGGWTGMVDGWYGYHHQNEQGSGYAADLKSTQNAIDEITNKVNSVIEKMNTQFTAVGKEFNHLEKRIENLNKKVDDGFLDIWTYNAELLVLLENERTLDYHDSNVKNLYEKVRSQLKNNAKEIGNGCFEFYHKCDNTCMESVKNGTYDYPKYSEEAKLNREEIDGVKLESTRIYQILAIYSTVASSLVLVVSLGAISFWMCSNGSLQCRICI

SEQ ID NO: 7539 - protein, 566 aa, Artificial Sequence; identical to SEQ ID NO: 7438
  derived and/or modified protein sequence (wt) from hemagglutinin__InfluenzaA__AEO01457

SEQ ID NO: 7540 - protein, 566 aa, Artificial Sequence; identical to SEQ ID NO: 7434
  derived and/or modified protein sequence (wt) from hemagglutinin__InfluenzaA__AEO01458

SEQ ID NO: 7541 - protein, 566 aa, Artificial Sequence; identical to SEQ ID NO: 7434
  derived and/or modified protein sequence (wt) from hemagglutinin__InfluenzaA__AEO01459

SEQ ID NO: 7542 - protein, 566 aa, Artificial Sequence; identical to SEQ ID NO: 4089
  derived and/or modified protein sequence (wt) from hemagglutinin__InfluenzaA__AEO01461

SEQ ID NO: 7543 - protein, 566 aa, Artificial Sequence; identical to SEQ ID NO: 3770
  derived and/or modified protein sequence (wt) from hemagglutinin__InfluenzaA__AEO01462

SEQ ID NO: 7544 - protein, 566 aa, Artificial Sequence; identical to SEQ ID NO: 3022
  derived and/or modified protein sequence (wt) from hemagglutinin__InfluenzaA__AEO01463

SEQ ID NO: 7545 - protein, 566 aa, Artificial Sequence
  derived and/or modified protein sequence (wt) from hemagglutinin__InfluenzaA__AEO01464
MKAILVVLLYTFATANADTLCIGYHANNSTDTVDTLLEKNVTVTHSVNLLEDKHNGKLCKLRGVAPLHLGKCNIAGWILGNPECESLSTASSWSYIVETSSSDNGTCYPGDFIDYEELREQLSSVSSFERFEIFPKTSSWPNHDSNKGVTAACPHAGAKSFYKNLIWLVKKGNSYPKLSKSYINDKGKEVLVLWGIHHPSTSADQQSLYQNADAYVFVGTSRYSKKFKPEIAIRPKVRDQEGRMNYYWTLVEPGDKITFEATGNLVVPRYAFAMDRNAGSGIIISDTSVHDCNTTCQTPKGAINTSLPFQNIHPITIGKCPKYVKSTKLRLATGLRNVPSIQSRGLFGAIAGFIEGGWTGMVDGWYGYHHQNEQGSGYAADLKSTQNAIDEITNKVNSVIEKMNTQFTAVGKEFNHLEKRIENLNKKVDDGFLDIWTYNAELLVLLENERTLDYHDSNVKNLYEKVRSQLKNNAKEIGNGCFEFYHKCDNTCMESVKNGTYDYPKYSEEAKLNREEIDGVKLESTRIYQILAIYSTVASSLVLVVSLGAISFWMCSNGSLQCRICI

SEQ ID NO: 7546 - protein, 566 aa, Artificial Sequence; identical to SEQ ID NO: 7525
  derived and/or modified protein sequence (wt) from hemagglutinin__InfluenzaA__AEO01465

SEQ ID NO: 7547 - protein, 566 aa, Artificial Sequence; identical to SEQ ID NO: 4541
  derived and/or modified protein sequence (wt) from hemagglutinin__InfluenzaA__AEO01466

SEQ ID NO: 7548 - protein, 566 aa, Artificial Sequence; identical to SEQ ID NO: 3022
  derived and/or modified protein sequence (wt) from hemagglutinin__InfluenzaA__AEO01467

SEQ ID NO: 7549 - protein, 566 aa, Artificial Sequence; identical to SEQ ID NO: 3833
  derived and/or modified protein sequence (wt) from hemagglutinin__InfluenzaA__AEO01468

SEQ ID NO: 7550 - protein, 566 aa, Artificial Sequence; identical to SEQ ID NO: 2669
  derived and/or modified protein sequence (wt) from hemagglutinin__InfluenzaA__AEO01469

SEQ ID NO: 7551 - protein, 566 aa, Artificial Sequence
  derived and/or modified protein sequence (wt) from hemagglutinin__InfluenzaA__AEO01470
MKAILVVLLYTFATANADTLCIGYHANNSTDTVDTVLEKNVTVTHSVNLLEDKHNGKLCKLRGVAPLHLGKCNIAGWILGNPECESLSTASSWSYIVETSSSDNGTCYPGDFIDYEELREQLSSVSSFERFEIFPKTSSWPNHDSNKGVTAACPHAGAKSFYKNLIWLVKKGNSYPKLSKSYINDKGKEVLVLWGIHHPSTSADQQSLYQNADAYVFVGTSRYSKKFKPEIAIRPKVRDQEGRMNYYWTLVEPGDKITFEATGNLVIPRYAFAMERNAGSGIIISDTPVHDCNTTCQTPKGAINTSLPFQNIHPITIGKCPKYVKSTKLRLATGLRNVPSIQSRGLFGAIAGFIEGGWTGMVDGWYGYHHQNEQGSGYAADLKSTQNAIDEITNKVNSVIEKMNTQFTAVGKEFNHLEKRIENLNKKVDDGFLDIWTYNAELLVLLENERTLDYHDSNVKNLYEKVRSQLKNNAKEIGNGCFEFYHKCDNTCMESVKNGTYDYPKYSEEAKLNREEIDGVKLESTRIYQILAIYSTVASSLVLVVSLGAISFWMCSNGSLQCRICI

SEQ ID NO: 7552 - protein, 566 aa, Artificial Sequence; identical to SEQ ID NO: 7378
  derived and/or modified protein sequence (wt) from hemagglutinin__InfluenzaA__AEO01471

SEQ ID NO: 7553 - protein, 566 aa, Artificial Sequence; identical to SEQ ID NO: 4296
  derived and/or modified protein sequence (wt) from hemagglutinin__InfluenzaA__AEO01472

SEQ ID NO: 7554 - protein, 566 aa, Artificial Sequence
  derived and/or modified protein sequence (wt) from hemagglutinin__InfluenzaA__AEO01473
MKAILVVLLYTFATANADTLCIGYHANNSTDTVDTVLEKNVTVTHSVNLLEDKHNGKLCKLRGVAPLHLGKCNIAGWILGNPECESLSTASSWSYIVETSSSDNGTCYPGDFIDYEELREQLSSVSSFERFEIFPKTSSWPNHDSNKGVTAACPHAGAKSFYKNLIWLVKKGNSYPKLNKSYINDKGKEVLVLWGIHHPSTSADQQSLYQNADAYVFVGTSRYSKKFKPEIAIRPKVRDQEGRMNYYWTLVEPGDKITFEATGNLVVPRYAFAMERNAGSGIIISDTPVHDCNTTCQTPEGAINTSLPFQNIHPITIGECPKYVKSTKLRLATGLRNVPSIQSRGLFGAIAGFIEGGWTGMVDGWYGYHHQNEQGSGYAADLKSTQNAIDKITNKVNSVIEKMNTQFTAVGKEFNHLEKRIENLNKKVDDGFLDIWTYNAELLVLLENERTLDYHDSNVKNLYEKVRSQLKNNAKEIGNGCFEFYHKCDNTCMESVKNGTYDYPKYSEEAKLNREEIDGVKLESTRIYQILAIYSTVASSLVLVVSLGAISFWMCSNGSLQCRICI

SEQ ID NO: 7555 - protein, 566 aa, Artificial Sequence
  derived and/or modified protein sequence (wt) from hemagglutinin__InfluenzaA__AEO01474
MKAILVVLLYTFATANADTLCIGYHANNSTDTVDTVLEKNVTVTHSVNLLEDKHNGKLCKLRGVAPLHLGKCNIAGWILGNPECESLSTASSWSYIVETSSSDNGTCYPGDFIDYEELREQLSSVSSFERFEIFPKTSSWPNHDSDKGVTAACPHAGAKSFYKNLIWLVKKGNSYPKLSKSYINDKGKEVLVLWGIHHPSTSADQQSLYQNADAYVFVGTSRYSKKFKPEIAIRPKVRDQEGRMNYYWTLVEPGDKITFEATGNLVVPRYAFAMERNAGSGIIISDTPVHDCNTTCQTPKGAINTSLPFQNIHPITIGKCPKYVKSTKLRLATGLRNVPSIQSRGLFGAIAGFIEGGWTGMVDGWYGYHHQNEQGSGYAADLKSTQNAIDKITNKVNSVIEKMNTQFTAVGKEFNHLEKRIENLNKKVDDGFLDIWTYNAELLVLLENERTLDYHDSNVKNLYEKVRSQLKNNAKEIGNGCFEFYHKCDNTCMESVKNGTYDYPKYSEEAKLNREEIDGVKLESTRIYQILAIYSTVASSLVLVVSLGAISFWMCSNGSLQCRICI

SEQ ID NO: 7556 - protein, 566 aa, Artificial Sequence
  derived and/or modified protein sequence (wt) from hemagglutinin__InfluenzaA__AEO01475
MKAILVVLLYTFATANADTLCIGYHANNSTDTVDTVLEKNVTVTHSVNLLEDKHNGKLCKLRGVAPLHLGKCNIAGWILGNPECESLSTASSWSYIVETSNSDNGTCYPGDFIDYEELREQLSSVSSFERFEIFPKTSSWPNHDSNKGVTAACPHAGAKSFYKNLIWLVKKGNSYPKLSKSYINDKGKEVLVLWGIHHPSTSADQQSLYQNADAYVFVGTSRYSKKFKPEIAIRPKVRDQEGRMNYYWTLVEPGDKITFEATGNLVVPRYAFAMERNAGSGIIISDTPVHDCNTTCQTPKGAINTSLPFQNIHPITIGKCPKYVKSTKLRLATGLRNVPSIQSRGLFGAIAGFIEGGWTGMVDGWYGYHHQNEQGSGYAADLKSTQHAIDEITNKVNSVIEKMNTQFTAVGKEFNHLEKRIENLNKKVDDGFLDIWTYNAELLVLLENERTLDYHDSNVKNLYEKVRSQLKNNAKEIGNGCFEFYHKCDNTCMESVKNGTYDYPKYSEEAKLNREEIDGVKLESTRIYQILAIYSTVASSLVLVVSLGAISFWMCSNGSLQCRICI

SEQ ID NO: 7557 - protein, 566 aa, Artificial Sequence
  derived and/or modified protein sequence (wt) from hemagglutinin__InfluenzaA__AEO01476
MKAILVVLLYTFSTANADTLCIGYHANNSTDTVDTVLEKNVTVTHSVNLLEDKHNGKLCKLRGVAPLHLGKCNIAGWILGNPECESLSTASSWSYIVETSSSDNGTCYPGDFIDYEELREQLSSVSSFERFEIFPKTSSWPNHDSNKGVTAACPHAGAKSFYKNLIWLVKKGNSYPKLSKSYINDKGKEVLVLWGIHHPSTSADQQSLYQNADAYVFVGTSRYSKKFKPEIAIRPKVRDQEGRMNYYWTLVEPGDKITFEATGNLVVPRYAFAMERNAGSGIIISDTPVHDCNTTCQTPKGAINTSLPFQNIHPITIGKCPKYVKSTKLRLATGLRNVPSIQSRGLFGAIAGFIEGGWTGMVDGWYGYHHQNEQGSGYAADLKSTQNAIDEITNKVNSVIEKMNTQFTAVGKEFNHLEKRIENLNKKVDDGFLDIWTYNAELLVLLENERTLDYHDSNVKNLYEKVRSQLKNNAKEIGNGCFEFYHKCDNTCMESVKNGTYDYPKYSEEAKLNREEIDGVKLESTRIYQILAIYSTVASSLVLVVSLGAISFWMCSNGSLQCRICI

SEQ ID NO: 7558 - protein, 566 aa, Artificial Sequence
  derived and/or modified protein sequence (wt) from hemagglutinin__InfluenzaA__AEO01477
MKAILVVLLYTFATANADTLCIGYHANNSTDTVDTVLEKNVTVTHSVNLLEDKHNGKLCKLRGVAPLHLGKCNIAGWILGNPECESLSTASSWSYIVETSSSDNGTCYPGDFIDYEELREQLSSVSSFERFEIFPKTSSWPNHDSNKGVTAACPHAGAKSFYKNLIWLVKKGNSYPKLSKSYINDKGKEVLVLWGIHHPSTSADQQSLYQNADAYAFVGTSRYSKKFKPEIAIRPKVREQEGRMNYYWTLVEPGDKITFEATGNLVVPRYAFAMERNAGSGIIISDTPVHDCNTTCQTPKGAINTSLPFQNIHPITIGKCPKYVKSTKLRLATGLRNVPSIQSRGLFGAIAGFIEGGWTGMVDGWYGYHHQNEQGSGYAADLKSTQNAIDEITNKVNSVIEKMNTQFTAVGKEFNHLEKRIENLNKKVDDGFLDIWTYNAELLVLLENERTLDYHDSNVKNLYEKVRSQLKNNAKEIGNGCFEFYHKCDNTCMESVKNGTYDYPKYSEEAKLNREEIDGVKLESTRIYQILAIYSTVASSLVLVVSLGAISFWMCSNGSLQCRICI

SEQ ID NO: 7559 - protein, 566 aa, Artificial Sequence; identical to SEQ ID NO: 3997
  derived and/or modified protein sequence (wt) from hemagglutinin__InfluenzaA__AEO01478

SEQ ID NO: 7560 - protein, 566 aa, Artificial Sequence; identical to SEQ ID NO: 7387
  derived and/or modified protein sequence (wt) from hemagglutinin__InfluenzaA__AEO01479

SEQ ID NO: 7561 - protein, 566 aa, Artificial Sequence; identical to SEQ ID NO: 7434
  derived and/or modified protein sequence (wt) from hemagglutinin__InfluenzaA__AEO01480

SEQ ID NO: 7562 - protein, 566 aa, Artificial Sequence
  derived and/or modified protein sequence (wt) from hemagglutinin__InfluenzaA__AEO01482
MKAILVVLLYTFATANADTLCIGYHANNSTDTVDTVLEKNVTVTHSVNLLEDKHNGKLCKLRGVAPLHLGKCNIAGWILGNPECESLSTASSWSYIVETSSSDNGTCYPGDFIDYEELREQLSSVSSFERFEIFPKTSSWPNHDSNKGVTAACPHAGAKSFYKNLIWLVKKGNSYPKLSKSYINDKGKEVLVLWGIHHPSTSADQQSLYQNADAYVFVGTSRYSKKFKPEIAIRPKVRDQEGRMNYYWTLVEPGDKITFEATGNLVVPRYAFAMERNAGSGIIISDTPVHDCNTTCQTPKGAINTSLPFQNIHPITIGKCPKYVKSTKLRLATGLRNVPSIQSRGLFGAIAGFIEGGWTGMVDGWYGYHHQNEQGSGYAADLKSTQNAIDKITNKVNSVIEKMNTQFTAVGKEFNHLEKRIENLNKKVDDGFLDIWTYNAELLVLLENERTLDYHDSNVKNLYEKVRSQLKNNAKEIGNGCFEFYHKCNNTCMESVKNGTYDYPKYSEEAKLNREEIDGVKLESTRIYQILAIYSTVASSLVLVVSLGAISFWMCSNGSLQCRICI

SEQ ID NO: 7563 - protein, 566 aa, Artificial Sequence
  derived and/or modified protein sequence (wt) from hemagglutinin__InfluenzaA__AEO01483
MKAILVVLLYTFATANADTLCIGYHANNSTDTVDTVLEKNVTVTHSVNLLEDKHNGKLCKLRGVAPLHLGKCNIAGWILGNPECESLSTASSWSYIVETSNSDNGTCYPGDFIDYEELREQLSSVSSFERFEIFPKTSSWPNHDSNKGVTAACPHAGAKSFYKNLIWLVKKGNSYPKLSKSYINDKGKEVLVLWGIHHPSTSADQQSLYQNADAYVFVGTSRYSKKFKPEIAIRPKVRDQEGRMNYYWTLVEPGDKITFEATGNLVVPRYAFAMERNAGSGIIISDTPVHDCNTTCQTPKGAINTSLPFQNIHPITIGKCPKYVKSTKLRLATGLRNVPSIQSRGLFGAIAGFIEGGWTGMVDGWYGYHHQNEQGSGYAADLKSTQNAIDKITNKVNSVIEKMNTQFTAVGKEFNHLEKRIENLNKKVDDGFLDIWTYNAELLVLLENERTLDYHDSNVKNLYEKVRSQLKNNAKEIGNGCFEFYHKCDNTCMESVKNGTYDYPKYSEEAKLNREEIDGVKLESTRIYQILAIYSTAASSLVLVVSLGAISFWMCSNGSLQCRICI

SEQ ID NO: 7564 - protein, 566 aa, Artificial Sequence
  derived and/or modified protein sequence (wt) from hemagglutinin__InfluenzaA__AEO01484
MKAILVVLLYTFATANADTLCIGYHANNSTDTVDTVLEKNVTVTHSVNLLEDKHNGKLCKLKGVAPLHLGKCDIAGWILGNPECESLSTASSWSYIVETSSSDNGTCYPGDFIDYEELREQLSSVSSFERFEIFPKTSSWPNHDSNKGVTAACPHAGAKSFYKNLIWLVKKGNSYPKLSKSYINDKGKEVLVLWGIHHPSTSADQQSLYQNADAYVFVGTSRYSKKFKPEIAIRPKVRDQEGRMNYYWTLVEPGDKITFEATGNLVVPRYAFAMERNAGSGIIISDTPVHDCNTTCQTPKGAINTSLPFQNIHPITIGKCPKYVKSTKLRLATGLRNVPSIQSRGLFGAIAGFIEGGWTGMVDGWYGYHHQNEQGSGYAADLKSTQHAIDEITNKVNSVIEKMNTQFTAVGKEFNHLEKRIENLNKKVDDGFLDIWTYNAELLVLLENERTLDYHDSNVKNLYEKVRSQLKNNAKEIGNGCFEFYHKCDNTCMESVKNGTYDYPKYSEEAKLNREEIDGVKLESTRIYQILAIYSTVASSLVLVVSLGAISFWMCSNGSLQCRICI

SEQ ID NO: 7565 - protein, 566 aa, Artificial Sequence
  derived and/or modified protein sequence (wt) from hemagglutinin__InfluenzaA__AEO01485
MKAILVVLLYTFATANADTLCIGYHANNSTDTVDTVLEKNVTVTHSVNLLEDKHNGKLCKLRGVAPLHLGKCNIAGWILGNPECESLSTASSWSYIVETSSSDNGTCYPGDFIDYEELREQLSSVSSFERFEIFPKTSSWPNHDSNKGVTAACPHAGAKSFYKNLIWLVKKGNSYPKLSKSYINDKGKEVLVLWGIHHPSTSADQQSLYQNADAYVFVGTSRYSKKFKPEITIRPKVRDQEGRMNYYWTLVEPGDKITFEATGNLVVPRYAFAMERNAGSGIIISDTPVHDCNTTCQTPKGAINTSLPFQNIHPITIGKCPKYVKSTKLRLATGLRNVPSIQSRGLFGAIAGFIEGGWTGMVDGWYGYHHQNEQGSGYAADLKSTQNAIDEITNKVNSVIEKMNTQFTAVGKEFNHLEKRIENLNKKVDDGFLDIWTYNAELLVLLENERTLDYHDSNVKNLYEKVRSQLKNNAKEIGNGCFEFYHKCDNTCMESVKNGTYDYPKYSEEAKLNREEIDGVKLESTRIYQILAIYSTVASSLVLVVSLGAISFWMCSNGSLQCRICI

SEQ ID NO: 7566 - protein, 566 aa, Artificial Sequence
  derived and/or modified protein sequence (wt) from hemagglutinin__InfluenzaA__AEO01487
MKAILVVLLYTFATANADTLCIGYHANNSTDTVDTVLEKNVTVTHSVNLLEDKHNGKLCKLRGVAPLHLGKCNIAGWILGNPECESLSTASSWSYIVETSSSDNGTCYPGDFIDYEELREQLSSVSSFERFEIFPKTSSWPNHDSNKGVTAACPHAGAKSFYKNLIWLVKKGNSYPKLSKSYINDKGKEVLVLWGIHHPSTSADQQSLYQNADAYVFVGTSRYSKKFKPEIAIRPKVRDQEGRMNYYWTLVEPGDKITFEATGNLVVPRYAFAMERNAGSGIIISDTPVHDCNTTCQTPKGAINTSLPFQNIHPITIGKCPKYVKSTKLRLATGLRNVPSIQSRGLFGAIAGFIEGGWTGMVDGWYGYHHQNEQGSGYAADLKSTQNAIDEITNKVNSVIEKMNTQFTAVGKEFNHLEKRIENLNKKVDDGFLDIWTYNAELLVLLENERTLDYHDSNVKNLYEKVRSQLKNNAKEIGNGCFEFYHKCDNTCMESVKNGTYDYPKYSEEAKLNREEIDGVTLESTRIYQILAIYSTVASSLVLVVSLGAISFWMCSNGSLQCRICI

SEQ ID NO: 7567 - protein, 566 aa, Artificial Sequence
  derived and/or modified protein sequence (wt) from hemagglutinin__InfluenzaA__AEO01488
MKAILVVLLYTFATANADTLCIGYHANNSTDTVDTVLEKNVTVTHSVNLLEDKHNGKLCKLRGVAPLHLGKCNIAGWILGNPECESLSTASSWSYIVETSSSDNGTCYPGDFIDYEELREQLSSVSSFERFEIFPKTSSWPNHDSNKGVTAACPHAGAKSFYKNLIWLVKKGNSYPKLSKSYINDKGKEVLVLWGIHHPSTSADQQSLYQNADAYVFVGTSRYSKKFKPEIAIRPKVRDQEGRMNYYWTLVEPGDKITFEATGNLVVPRYAFTMERNAGSGIIISDTPVHDCNTTCQTPKGAINTSLPFQNIHPITIGKCPKYVKSTKLRLATGLRNVPSIQSRGLFGAIAGFIEGGWTGMVDGWYGYHHQNEQGSGYAADLKSTQNAIDGITNKVNSVIEKMNTQFTAVGKEFNHLEKRIENLNKKVDDGFLDIWTYNAELLVLLENERTLDYHDSNVKNLYEKVRSQLKNNAKEIGNGCFEFYHKCDNTCMESVKNGTYDYPKYSEEAKLNREEIDGVKLESTRIYQILAIYSTVASSLVLVVSLGAISFWMCSNGSLQCRICI

SEQ ID NO: 7568 - protein, 566 aa, Artificial Sequence
  derived and/or modified protein sequence (wt) from hemagglutinin__InfluenzaA__AEO01489
MKAILVVLLYTFATANADTLCIGYHANNSTDTVDTVLEKNVTVTHSVNLLEDKHNGKLCKLRGVAPLHLGKCNIAGWILGNPECESLSTASSWSYIVETSSSDNGTCYPGDFIDYEELREQLSSVSSFERFEIFPKTSSWPNHDSNKGVTAACPHAGAKSFYKNLIWLVKKGNSYPKLSKSYINDKGKEVLVLWGIHHPSTSADQQSLYQNADAYVFVGTSRYSKKFRPEIAIRPKVRDQEGRMNYYWTLVEPGDKITFEATGNLVVPRYAFAMERNAGSGIIISDTPVHDCNTTCQTPKGAINTSLPFQNIHPITIGKCPKYVKSTKLRLATGLRNVPSIQSRGLFGAIAGFIEGGWTGMVDGWYGYHHQNEQGSGYAADLKSTQNAIDEITNKVNSVIEKMNTQFTAVGKEFNHLEKRIENLNKKVDDGFLDIWTYNAELLVLLENERTLDYHDSNVKNLYEKVRSQLKNNAKEIGNGCFEFYHKCDNTCMESVKNGTYDYPKYSEEAKLNREEIDGVKLESTRIYQILAIYSTVASSLVLVVSLGAISFWMCSNGSLQCRICI

SEQ ID NO: 7569 - protein, 566 aa, Artificial Sequence
  derived and/or modified protein sequence (wt) from hemagglutinin__InfluenzaA__AEO01490
MKAILVVLLYTFATANADTLCIGYHANNSTDTVDTVLEKNVTVTHSVNLLEDKHNGKLCKLRGVAPLHLGKCNIAGWILGNPECESLSTASSWSYIVETSSSDNGTCYPGDFIDYEELREQLSSVSSFERFEIFPKTSSWPNHDSNKGVTAACPHAGAKSFYKNLIWLVKKGNSYPKLSKSYINDKGKEVLVLWGIHHPSTSADQQSLYQNADAYVFVGTSRYSKKFKPEIAIRPKVRDQEGRMNYYWTLVEPGDKITFEATGNLVVPRYAFAMERNAGSGIIISDTPVHDCNTTCQTPKGAINTSLPFQNIHPITIGKCPKYVKSTKLRMATGLRNVPSIQSRGLFGAIAGFIEGGWTGMVDGWYGYHHQNEQGSGYAADLKSTQNAIDEITNKVNSVIEKMNTQFTAVGKEFNHLEKRIENLNKKVDDGFLDIWTYNAELLVLLENERTLDYHDSNVKNLYEKVRNQLKNNAKEIGNGCFEFYHKCDNTCMESVKNGTYDYPKYSEEAKLNREEIDGVKLESTRIYQILAIYSTVASSLVLVVSLGAISFWMCSNGSLQCRICI

SEQ ID NO: 7570 - protein, 566 aa, Artificial Sequence
  derived and/or modified protein sequence (wt) from hemagglutinin__InfluenzaA__AEO01491
MKAILVVLLYTFATANADTLCIGYHANNSTDTVDTVLEKNVTVTHSVNLLEDKYNGKLCKLRGVAPLHLGKCNIAGWILGNPECESLSTASSWSYIVETSSSDNGTCYPGDFIDYEELREQLSSVSSFERFEIFPKTSSWPNHDSNKGVTAACPHAGAKSFYKNLIWLVKKGNSYPKLSKSYINDKGKEVLVLWGIHHPSTSADQQSLYQNADAYVFVGTSRYSKKFKPEIAIRPKVRDQEGRMNYHWTLVEPGDKITFEATGNLVVPRYAFAMERNAGSGIIISDTPVHDCNTTCQTPKGAINTSLPFQNIHPITIGKCPKYVKSTKLRLATGLRNVPSIQSRGLFGAIAGFIEGGWTGMVDGWYGYHHQNEQGSGYAADLKSTQNAIDEITNKVNSVIEKMNTQFTAVGKEFNHLEKRIENLNKKVDDGFLDIWTYNAELLVLLENERTLDYHDSNVKNLYEKVRSQLKNNAKEIGNGCFEFYHKCDNTCMESVKNGTYDYPKYSEEAKLNREEIDGVKLESTRIYQILAIYSTVASSLVLVVSLGAISFWMCSNGSLQCRICI

SEQ ID NO: 7571 - protein, 566 aa, Artificial Sequence; identical to SEQ ID NO: 7438
  derived and/or modified protein sequence (wt) from hemagglutinin__InfluenzaA__AEO01492

SEQ ID NO: 7572 - protein, 566 aa, Artificial Sequence
  derived and/or modified protein sequence (wt) from hemagglutinin__InfluenzaA__AEO01493
MKAILVVLLYTFATANADTLCIGYHANNSTDTVDTVLEKNVTVTHSVNILEDKHNGKLCKLRGVAPLHLGKCNIAGWILGNPECESLSTASSWSYIVETSSSDNGTCYPGDFIDYEELREQLSSVSSFERFEIFPKTSSWPNHDSNKGVTAACPHAGAKSFYKNLIWLVKKGNSYPKLSKSYINDKGKEVLVLWGIHHPSTSADQQSLYQNADAYVFVGTSRYSKKFKPEIAIRPKVRDQEGRMNYYWTLVEPGDKITFEATGNLVVPRYAFAMERSAGSGIIISDTPVHDCNTTCQTPKGAINTSLPFQNIHPITIGKCPKYVKSTKLRLATGLRNVPSIQSRGLFGAIAGFIEGGWTGMVDGWYGYHHQNEQGSGYAADLKSTQNAIDEITNKVNSVIEKMNTQFTAVGKEFNHLEKRIENLNKKVDDGFLDIWTYNAELLVLLENERTLDYHDSNVKNLYEKVRSQLKNNAKEIGNGCFEFYHKCDNTCMESVKNGTYDYPKYSEEAKLNREEIDGVKLESTRIYQILAIYSTVASSLVLVVSLGAISFWMCSNGSLQCRICI

SEQ ID NO: 7573 - protein, 566 aa, Artificial Sequence
  derived and/or modified protein sequence (wt) from hemagglutinin__InfluenzaA__AEO01494
MKAILVVLLYTFATANADTLCTGYHANNSTDTVDTVLEKNVTVTHSVNLLEDKHNGKLCKLRGVAPLHLGKCNIAGWILGNPECESLSTASSWSYIVETSSSDNGTCYPGDFIDYEELREQLSSVSSFERFEIFPKTSSWPNHDSNKGVTAACPHAGAKSFYKNLIWLVKKGNSYPKLSKSYINDKGKEVLVLWGIHHPSTSADQQSLYQNADAYVFVGTSRYSKKFKPEIAIRPKVRDQEGRMNYYWTLVEPGDKITFEATGNLVVPRYAFAMERNAGSGIIISDTPVHDCNTTCQTPKGAINTSLPFQNIHPITIGKCPKYVKSTKLRLATGLRNVPSIQSRGLFGAIAGFIEGGWTGMVDGWYGYHHQNEQGSGYAADLKSTQNAIDEITNKVNSVIEKMNTQFTAVGKEFNHLEKRIENLNKKVDDGFLDIWTYNAELLVLLENERTLDYHDSNVKNLYEKVRNQLKNNAKEIGNGCFEFYHKCDNTCMESVKNGTYDYPKYSEEAKLNREEIDGVKLESTRIYQILAIYSTVASSLVLVVSLGAISFWMCSNGSLQCRICI

SEQ ID NO: 7574 - protein, 566 aa, Artificial Sequence; identical to SEQ ID NO: 4266
  derived and/or modified protein sequence (wt) from hemagglutinin__InfluenzaA__AEO01496

SEQ ID NO: 7575 - protein, 566 aa, Artificial Sequence; identical to SEQ ID NO: 3022
  derived and/or modified protein sequence (wt) from hemagglutinin__InfluenzaA__AEO01497

SEQ ID NO: 7576 - protein, 566 aa, Artificial Sequence; identical to SEQ ID NO: 4266
  derived and/or modified protein sequence (wt) from hemagglutinin__InfluenzaA__AEO01498

SEQ ID NO: 7577 - protein, 566 aa, Artificial Sequence
  derived and/or modified protein sequence (wt) from hemagglutinin__InfluenzaA__AEO01499
MKAILVVLLYTFAIANADTLCIGYHANNSTDTVDTVLEKNVTVTHSVNLLEDKHNGKLCKLRGVAPLHLGKCNIAGWILGNPECESLSTASSWSYIVETSSSDNGTCYPGDFIDYEELREQLSSVSSFERFEIFPKTSSWPNHDSNKGVTAACPHAGAKSFYKNLIWLVKKGNSYPKLSKSYINDKGKEVLVLWGIHHPYTSADQQSLYQNADAYVFVGTSRYSKKFKPEIAIRPKVRDQEGRMNYYWTLVEPGDKITFEATGNLVVPRYAFAMERNAGSGIIISDTPVHDCNTTCQTPKGAINTSLPFQNIHPITIGKCPKYVKSTKLRLATGLRNVPSIQSRGLFGAIAGFIEGGWTGMVDGWYGYHHQNEQGSGYAADLKSTQHAIDEITNKVNSVIEKMNTQFTAVGKEFNHLEKRIENLNKKVDDGFLDIWTYNAELLVLLENERTLDYHDSNVKNLYEKVRSQLKNNAKEIGNGCFEFYHKCDNTCMESVKNGTYDYPKYSEEAKLNREEINGVKLESTRIYQILAIYSTVASSLVLVVSLGAISFWMCSNGSLQCRICI

SEQ ID NO: 7578 - protein, 566 aa, Artificial Sequence; identical to SEQ ID NO: 3770
  derived and/or modified protein sequence (wt) from hemagglutinin__InfluenzaA__AEO01500

SEQ ID NO: 7579 - protein, 566 aa, Artificial Sequence; identical to SEQ ID NO: 3833
  derived and/or modified protein sequence (wt) from hemagglutinin__InfluenzaA__AEO01501

SEQ ID NO: 7580 - protein, 566 aa, Artificial Sequence; identical to SEQ ID NO: 3833
  derived and/or modified protein sequence (wt) from hemagglutinin__InfluenzaA__AEO01502

SEQ ID NO: 7581 - protein, 566 aa, Artificial Sequence; identical to SEQ ID NO: 4089
  derived and/or modified protein sequence (wt) from hemagglutinin__InfluenzaA__AEO01503

SEQ ID NO: 7582 - protein, 566 aa, Artificial Sequence; identical to SEQ ID NO: 4266
  derived and/or modified protein sequence (wt) from hemagglutinin__InfluenzaA__AEO01505

SEQ ID NO: 7583 - protein, 566 aa, Artificial Sequence; identical to SEQ ID NO: 3770
  derived and/or modified protein sequence (wt) from hemagglutinin__InfluenzaA__AEO01506

SEQ ID NO: 7584 - protein, 566 aa, Artificial Sequence; identical to SEQ ID NO: 7378
  derived and/or modified protein sequence (wt) from hemagglutinin__InfluenzaA__AEO01507

SEQ ID NO: 7585 - protein, 566 aa, Artificial Sequence; identical to SEQ ID NO: 4266
  derived and/or modified protein sequence (wt) from hemagglutinin__InfluenzaA__AEO01508

SEQ ID NO: 7586 - protein, 566 aa, Artificial Sequence; identical to SEQ ID NO: 3997
  derived and/or modified protein sequence (wt) from hemagglutinin__InfluenzaA__AEO01510

SEQ ID NO: 7587 - protein, 566 aa, Artificial Sequence
  derived and/or modified protein sequence (wt) from hemagglutinin__InfluenzaA__AEO01511
MKAILVVLLYTFATANADTLCIGYHANNSTDTVDTVLEKNVTVTHSVNLLEDKHNGKLCKLRGVTPLHLGKCNIAGWILGNPECESLSTTSSWSYIVETSSSDNGTCYPGDFIDYEELREQLSSVSSFERFEIFPKTSSWPNHDSNKGVTAACPHAGAKSFYKNLIWLVKKGNSYPKLSKSYINDKGKEVLVLWGIHHPSTSADQQSLYQNADAYVFVGTSRYSKKFKPEIAIRPKVREQEGRMNYYWTLVEPGDKITFEATGNLVVPRYAFAMERNAGSGIIISDTPVHDCNTTCQTPKGAINTSLPFQNIHPITIGKCPKYVKSTKLRLATGLRNVPSIQSRGLFGAIAGFIEGGWTGMVDGWYGYHHQNEQGSGYAADLKSTQNAIDKITNKVNSVIEKMNTQFTAVGKEFNHLEKRIENLNKKVDDGFLDIWTYNAELLVLLENERTLDYHDSNVKNLYEKVRSQLKNNAKEIGNGCFEFYHKCDNTCMESVKNGTYDYPKYSEEAKLNREEIDGVKLESTRIYQILAIYSTVASSLVLVVSLGAISFWMCSNGSLQCRICI

SEQ ID NO: 7588 - protein, 566 aa, Artificial Sequence
  derived and/or modified protein sequence (wt) from hemagglutinin__InfluenzaA__AEO01512
MKAILVVLLYTFATANADTLCIGYHANNSTDTVDTVLEKNVTVTHSVNLLEDKHNGKLCKLRGVAPLHLGKCNIAGWILGNPECESLSTASSWSYIVETSSSDNGTCYPGDFIDYEELREQLSSVSSFERFEIFPKTSSWPNHDSNKGVTAACPHAGAKSFYKNLIWLVKKGNSYPKLSKSYINDKGKEVLVLWGIHHPSTSADQQSLYQNADAYVFVGTSRYSKKFKPEIAIRPKVREQEGRMNYYWTLVEPGDKITFEATGNLVVPRYAFAMERNAGSGIIISDTPVHDCNTTCQTPKGAINTSLPFQNIHPITIGKCPKYVKSTKLRLATGLRNVPSIQSRGLFGAIAGFIEGGWTGMVDGWYGYHHQNEQGSGYAADLKSTQNAIDEITNKVNSVIEKMNTQFTAVGKEFNHLEKRIENLNKKVDDGFLDIWTYNAELLVLLENERTLDYHDSNVKNLYEKVRSQLKNNAKEIGNGCFEFYHKCDNKCMESVKNGTYDYPKYSEEAKLNREEIDGVKLESTRIYQILAIYSTVASSLVLVVSLGAISFWMCSNGSLQCRICI

SEQ ID NO: 7589 - protein, 566 aa, Artificial Sequence
  derived and/or modified protein sequence (wt) from hemagglutinin__InfluenzaA__AEO01513
MKAILAVLLYTFATANADTLCIGYHANNSTDTVDTVLEKNVTVTHSVNILEDKHNGKLCKLRGVAPLHLGKCNIAGWILGNPECESLSTASSWSYIVETSSSDNGTCYPGDFIDYEELREQLSSVSSFERFEIFPKTSSWPNHDSNKGVTAACPHAGAKSFYKNLIWLVKKGNSYPKLSKSYINDKGKEVLVLWGIHHPSTSADQQSLYQNADAYVFVGSSRYSKKFKPEIAIRPKVRDQEGRMNYYWTLVEPGDKITFEATGNLVVPRYAFAMERNAGSGIIISDTPVHDCNTTCQTPKGAINTSLPFQNIHPVTIGKCPKYVKSTKLRLATGLRNVPSIQSRGLFGAIAGFIEGGWTGMVDGWYGYHHQNEQGSGYAADLKSTQNAIDEITNKVNSVIEKMNTQFTAVGKEFNHLEKRIENLNKKVDDGFLDIWTYNAELLVLLENERTLDYHDSNVKNLYEKVRSQLKNNAKEIGNGCFEFYHKCDNTCMESVKNGTYDYPKYSEEAKLNREEIDGVKLESTRIYQILAIYSTVASSLVLVVSLGAISFWMCSNGSLQCRICI

SEQ ID NO: 7590 - protein, 566 aa, Artificial Sequence
  derived and/or modified protein sequence (wt) from hemagglutinin__InfluenzaA__AEO01514
MKAILVVLLYTFATANADTLCIGYHANNSTDTVDTVLEKNVTVTHSVNLLEDMHNGKLCKLRGVAPLHLGKCNIAGWILGNPECESLSTASSWSYIVETSSSDNGTCYPGDFIDYEELREQLSSVSSFERFEIFPKTSSWPNHDSNKGVTAACPHAGAKSFYKNLIWLVKKGNSYPKLSKSYINDKGKEVLVLWGIHHPSTSADQQSLYQNADAYVFVGTSRYSKKFKPEIAIRPKVREQEGRMNYYWTLVEPGDKITFEATGNLVVPRYAFAMERNAGSGIIISDTPVHDCNTTCQTPKGAINTSLPFQNIHPITIGKCPKYVKSTKLRLATGLRNVPSIQSRGLFGAIAGFIEGGWTGMVDGWYGYHHQNEQGSGYAADLKSTQNAIDKITNKVNSVIEKMNTQFTAVGKEFNHLEKRIENLNKKVDDGFLDIWTYNAELLVLLENERTLDYHDSNVKNLYEKVRSQLKNNAKEIGNGCFEFYHKCDNTCMESVKNGTYDYPKYSEEAKLNREEIDGVKLESTRIYQILAIYSTVASSLVLVVSLGAISFWMCSNGSLQCRICI

SEQ ID NO: 7591 - protein, 566 aa, Artificial Sequence; identical to SEQ ID NO: 4856
  derived and/or modified protein sequence (wt) from hemagglutinin__InfluenzaA__AEO01515

SEQ ID NO: 7592 - protein, 566 aa, Artificial Sequence; identical to SEQ ID NO: 7438
  derived and/or modified protein sequence (wt) from hemagglutinin__InfluenzaA__AEO01516

SEQ ID NO: 7593 - protein, 566 aa, Artificial Sequence
  derived and/or modified protein sequence (wt) from hemagglutinin__InfluenzaA__AEO01517
MKAILVVLLYTFATANADTLCIGYHANNSTDTVDTVLEKNVTVTHSVNLLEDKHNGKLCKLRGVAPLHLGKCNIAGWILGNPECESLSTASSWSYIVETSSSDNGTCYPGDFIDYEELREQLSSVSSFERFEIFPKTSSWPNHDSNKGVTAACPHAGAKSFYKNLIWLVKKENSYPKLSKSYINDKGKEVLVLWGIHHPSTSADQQSLYQNADAYVFVGTSRYSKKFKPEIAIRPKVRDQEGRMNYYWTLVEPGDKITFEATGNLVVPRYAFAMERNAGSGIIISDTPVHDCNTTCQTPEGAINTSLPFQNIHPITIGKCPKYVKSTKLRLATGLRNVPSIQSRGLFGAIAGFIEGGWTGMVDGWYGYHHQNEQGSGYAADLKSTQNAIDEITNKVNSVIEKMNTQFTAVGKEFNHLEKRIENLNKKVDDGFLDIWTYNAELLVLLENERTLDYHDSNVKNLYEKVRSQLKNNAKEIGNGCFEFYHKCDNTCMESVKNGTYDYPKYSEEAKLNREEIDGVKLESTRIYQILAIYSTVASSLVLVVSLGAISFWMCSNGSLQCRICI

SEQ ID NO: 7594 - protein, 566 aa, Artificial Sequence
  derived and/or modified protein sequence (wt) from hemagglutinin__InfluenzaA__AEO01518
MKAILVVLLYTFATANADTLCIGYHANNSTDTVDTVLEKNVTVTHSVNLLEDKHNGKLCKLRGVAPLHLGKCNIAGWILGNPECESLSTASSWSYIVETSSSDNGTCYPGDFIDYEELREQLSSVSSFERFEIFPKTSSWPNHDSNKGVTAACPHAGAKSFYKNLIWIVKKGNSYPKLNKSYINDKGKEVLVLWGIHHPSTSADQQSLYQNADAYVFVGTSRYSKKFKPEIAIRPKVRDQEGRMNYYWTLVEPGDKITFEATGNLVVPRYAFAMERNAGSGIIISDTPVHDCNTTCQTPKGAINTSLPFQNIHPITIGECPKYVKSTKLRLATGLRNVPSIQSRGLFGAIAGFIEGGWTGMVDGWYGYHHQNEQGSGYAADLKSTQNAIDKITNKVNSVIEKMNTQFTAVGKEFNHLEKRIENLNKKVDDGFLDIWTYNAELLVLLENERTLDYHDSNVKNLYEKVRSQLKNNAKEIGNGCFEFYHKCDNTCMESVKNGTYDYPKYSEEAKLNREEIDGVKLESTRIYQILAIYSTVASSLVLVVSLGAISFWMCSNGSLQCRICI

SEQ ID NO: 7595 - protein, 566 aa, Artificial Sequence
  derived and/or modified protein sequence (wt) from hemagglutinin__InfluenzaA__AEO01519
MKAILVVLLYTFATANADTLCIGYHANNSTDTVDTVLEKNVTVTHSVNLLEDKHNGKLCKLRGVAPLHLGKCNIAGWILGNPECESLSTASSWSYIVETSSSDNGTCYPGDFIDYEELREQLSSVSSFERFEIFPKTSSWPNHDSNKGVTAACPHAGAKSFYKNLIWLVKKGNSYPKLSKSYINDKGKEVLVLWGIHHPSTSADQQSLYQNADAYVFVGTSRYSKKFRPEIAIRPKVREQEGRMNYYWTLVEPGDKITFEATGNLVVPRYAFAMERNAGSGIIISDTPVHDCNTTCQTPKGAINTSLPFQNIHPITIGKCPKYVKSTKLRLATGLRNIPSIQSRGLFGAIAGFIEGGWTGMVDGWYGYHHQNEQGSGYAADLKSTQNAIDEITNKVNSVIEKMNTQFTAVGKEFNHLEKRIENLNKKVDDGFLDIWTYNAELLVLLENERTLDYHDSNVKNLYEKVRSQLKNNAKEIGNGCFEFYHKCDNTCMESVKNGTYDYPKYSEEAKLNREEIDGVKLESTRIYQILAIYSTVASSLVLVVSLGAISFWMCSNGSLQCRICI

SEQ ID NO: 7596 - protein, 566 aa, Artificial Sequence; identical to SEQ ID NO: 5574
  derived and/or modified protein sequence (wt) from hemagglutinin__InfluenzaA__AEO01520

SEQ ID NO: 7597 - protein, 566 aa, Artificial Sequence; identical to SEQ ID NO: 4296
  derived and/or modified protein sequence (wt) from hemagglutinin__InfluenzaA__AEO01521

SEQ ID NO: 7598 - protein, 566 aa, Artificial Sequence; identical to SEQ ID NO: 6088
  derived and/or modified protein sequence (wt) from hemagglutinin__InfluenzaA__AEO01522

SEQ ID NO: 7599 - protein, 566 aa, Artificial Sequence; identical to SEQ ID NO: 3833
  derived and/or modified protein sequence (wt) from hemagglutinin__InfluenzaA__AEO01523

SEQ ID NO: 7600 - protein, 566 aa, Artificial Sequence; identical to SEQ ID NO: 7427
  derived and/or modified protein sequence (wt) from hemagglutinin__InfluenzaA__AEO01524

SEQ ID NO: 7601 - protein, 566 aa, Artificial Sequence
  derived and/or modified protein sequence (wt) from hemagglutinin__InfluenzaA__AEO01525
MKAILVVLLYTFATANADTLCIGYHANNSTDTVDTVLEKNVTVTHSVNLLEDKHNGKLCKLRGVAPLHLGKCNIAGWILGNPECESLSTASSWSYIVETSSSGNGTCYPGDFIDYEELREQLSSVSSFERFEIFPKTSSWPNHDSNKGVTAACPHAGAKSFYKNLIWLVKKGNSYPRLSKSYINDKGKEVLVLWGIHHPSTSADQQSLYQNADAYVFVGTSRYSKKFKPEIAIRPKVRDQEGRMNYYWTLVEPGDKITFEATGNLVVPRYAFAMERNAGSGIIISDTPVHDCNTTCQTPKGAINTSLPFQNIHPITIGKCPKYVKSTKLRLATGLRNVPSIQSRGLFGAIAGFIEGGWTGMVDGWYGYHHQNEQGSGYAADLKSTQNAIDEITNKVNSVIEKMNTQFTAVGKEFNHLEKRIENLNKKVDDGFLDIWTYNAELLVLLENERTLDYHDSNVKNLYEKVRSQLKNNAKEIGNGCFEFYHKCDNTCMESVKNGTYDYPKYSEEAKLNREEIDGVKLESTRIYQILAIYSTVASSLVLVVSLGAISFWMCSNGSLQCRICI

SEQ ID NO: 7602 - protein, 566 aa, Artificial Sequence; identical to SEQ ID NO: 3833
  derived and/or modified protein sequence (wt) from hemagglutinin__InfluenzaA__AEO01526

SEQ ID NO: 7603 - protein, 566 aa, Artificial Sequence; identical to SEQ ID NO: 6610
  derived and/or modified protein sequence (wt) from hemagglutinin__InfluenzaA__AEO01527

SEQ ID NO: 7604 - protein, 566 aa, Artificial Sequence
  derived and/or modified protein sequence (wt) from hemagglutinin__InfluenzaA__AEO01529
MKAILVVLLYTFATANADTLCIGYHANNSTDTVDTVLEKNVTVTHSVNILEDKHNGKLCKLRGVAPLHLGKCNIAGWILGNPECESLSTASSWSYIVETSSSDNGTCYPGDFIDYEELREQLSSVSSFERFEIFPKTSSWPNHDSNKGVTAACPHAGAKSFYKNLIWLVKKGNSYPKLSKSYINDKGKEVLVLWGIHHPSTSADQQSLYQNADAYVFVGSSRYSKKFKPEIAIRPKVRDQEGRMNYYWTLVEPGDKITFEATGNLVVPRYAFAMERNAGSGIIISDTPVHDCNTTCQTPKGAINTSLPFQNIHPITIGKCPKYVKSTKLRLATGLRNVPSIQSRGLFGAIAGFIEGGWTGMVDGWYGYHHQNEQGSGYAADLKSTQNAIDEITNKVNSVIEKMNTQFTAVGKEFNHLEKRIENLNKKVDDGFLDIWTYNAELLVLLENERTLDYHDSNVKNLYEKVRSQLKNNAKEVGNGCFEFYHKCDNTCMESVKNGTYDYPKYSEEAKLNREKIDGVKLESTRIYQILAIYSTAASSLVLVVSLGAISFWMCSNGSLQCRICI

SEQ ID NO: 7605 - protein, 566 aa, Artificial Sequence; identical to SEQ ID NO: 3833
  derived and/or modified protein sequence (wt) from hemagglutinin__InfluenzaA__AEO01530

SEQ ID NO: 7606 - protein, 566 aa, Artificial Sequence
  derived and/or modified protein sequence (wt) from hemagglutinin__InfluenzaA__AEO01531
MKAILVVLLYTFATANTDTLCIGYHANNSTDTVDTVLEKNVTVTHSVNLLEDKHNGKLCKLRGVAPLHLGKCNIAGWILGNPECESLSTASSWSYIVETSSSDNGTCYPGDFIDYEELREQLSSVSSFERFEIFPKTSSWPNHDSNKGVTAACPHAGAKSFYKNLIWLVKKGNSYPKLSKSYINDKGKEVLVLWGIHHPSTSADQQSLYQNADAYVFVGTSRYSKKFKPEIAIRPKVREQEGRMNYYWTLVEPGDKITFEATGNLVVPRYAFAMERNAGSGIIISDTPVHDCNTTCQTPKGAINTSLPFQNIHPITIGKCPKYVKSTKLRLATGLRNVPSIQSRGLFGAIAGFIEGGWTGMVDGWYGYHHQNEQGSGYAADLKSTQNAIDKITNKVNSVIEKMNTQFTAVGKEFNHLEKRIENLNKKVDDGFLDIWTYNAELLVLLENERTLDYHDSNVKNLYEKVRSQLKNNAKEIGNGCFEFYHKCDNTCMESVKNGTYDYPKYSEEAKLNREEIDGVKLESTRVYQILAIYSTVASSLVLVVSLGAISFWMCSNGSLQCRICI

SEQ ID NO: 7607 - protein, 566 aa, Artificial Sequence; identical to SEQ ID NO: 7438
  derived and/or modified protein sequence (wt) from hemagglutinin__InfluenzaA__AEO01532

SEQ ID NO: 7608 - protein, 566 aa, Artificial Sequence
  derived and/or modified protein sequence (wt) from hemagglutinin__InfluenzaA__AEO01533
MKAILVVLLYTFATANADTLCIGYHANNSTDTVDTVLEKNVTVTHSVDLLEDKHNGKLCKLRGVAPLHLGKCNIAGWILGNPECESLSTASSWSYIVETSSSDNGTCYPGDFIDYEELREQLSSVSSFERFEIFPKTSSWPNHDSNKGVTAACPHAGAKSFYKNLIWLVKKGNSYPKLSKSYINDKGKEVLVLWGIHHPSTSADQQSLYQNADAYVFVGTSRYSKKFKPEIAIRPKVRDQEGRMNYYWTLVEPGDKITFEATGNLVVPRYAFAMERNAGSGIIISDTPVHDCNTTCQTPKGAINTSLPFQNIHPITIGKCPKYVKSTKLRLATGLRNVPSIQSRGLFGAIAGFIEGGWTGMVDGWYGYHHQNEQGSGYAADLKSTQNAIDEITNKVNSVIEKMNTQFTAVGKEFNHLEKRIENLNKKVDDGFLDIWTYNAELLVLLENERTLDYHDSNVKNLYEKVRSQLKNNAKEIGNGCFEFYHKCDNTCMESVKNGTYDYPKYSEEAKLNREEIDGVKLESTRIYQILAIYSTVASSLVLVVSLGAISFWMCSNGSLQCRICI

SEQ ID NO: 7609 - protein, 566 aa, Artificial Sequence
  derived and/or modified protein sequence (wt) from hemagglutinin__InfluenzaA__AEO01534
MKAILVVLLYTFATANADTLCIGYHANNSTDTVDTVLEKNVTVTHSVNLLEDKHNGKLCKLRGVAPLHLGKCNIAGWILGNPECESLSTARSWSYIVETSSSDNGTCYPGDFIDYEELREQLSSVSSFERFEIFPKTSSWPNHDSNKGVTAACPHAGAKSFYKNLIWLVKKGNSYPKLSKSYINDKGKEVLVLWGIHHPSTSADQQSLYQNADAYVFVGTSRYSKKFKPEIAIRPKVRDQEGRMNYYWTLVEPGDKITFEATGNLVVPRYAFAMERNAGSGIIISDTPVHDCNTTCQTPKGAINTSLPFQNIHPITIGKCPKYVKSTKLRLATGLRNVPSIQSRGLFGAIAGFIEGGWTGMVDGWYGYHHQNEQGSGYAADLKSTQHAIDEITNKVNSVIEKMNTQFTAVGKEFNHLEKRIENLNKKVDDGFLDIWTYNAELLVLLENERTLDYHDSNVKNLYEKVRSQLKNNAKEIGNGCFEFYHKCDNTCMESVKNGTYDYPKYSEEAKLNREEIDGVKLESTRIYQILAIYSTVASSLVLVVSLGAISFWMCSNGSLQCRICI

SEQ ID NO: 7610 - protein, 566 aa, Artificial Sequence; identical to SEQ ID NO: 4318
  derived and/or modified protein sequence (wt) from hemagglutinin__InfluenzaA__AEO01535

SEQ ID NO: 7611 - protein, 566 aa, Artificial Sequence; identical to SEQ ID NO: 3833
  derived and/or modified protein sequence (wt) from hemagglutinin__InfluenzaA__AEO01536

SEQ ID NO: 7612 - protein, 566 aa, Artificial Sequence; identical to SEQ ID NO: 5574
  derived and/or modified protein sequence (wt) from hemagglutinin__InfluenzaA__AEO01537

SEQ ID NO: 7613 - protein, 566 aa, Artificial Sequence
  derived and/or modified protein sequence (wt) from hemagglutinin__InfluenzaA__AEO01538
MKAILVVLLYTFATANADTLCIGYHANNSTDTVDTVLEKNVTVTHSVNLLEDKHNGKLCKLGGVAPLHLGKCNIAGWILGNPECESLSTASSWSYIVETSSSDNGTCYPGDFIDYEELREQLSSVSSFERFEIFPKTSSWPNHDSNKGVTAACPHAGAKSFYKNLIWLVKKGNSYPKLSKSYINDKGKEVLVLWGIHHPSTSADQQSLYQNADAYVFVGTSRYSKKFKPEIAIRPKVRDQEGRMNYYWTLVEPGDKITFEATGNLVVPRYAFAMERNAGSGIIISDTPVHDCNTTCQTPKGAINTSLPFQNIHPITIGKCPKYVKSTKLRLATGLRNVPSIQSRGLFGAIAGFIEGGWTGMVDGWYGYHHQNEQGSGYAADLKSTQNAIDEITNKVNSVIEKMNTQFTAVGKEFNHLEKRIENLNKKVDDGFLDIWTYNAELLVLLENERTLDYHDSNVKNLYEKVRSQLKNNAKEIGNGCFEFYHKCDNTCMESVKNGTYDYPKYSEEAKLNREEIDGVKLESTRIYQILAIYSTVASSLVLVVSLGAISFWMCSNGSLQCRICI

SEQ ID NO: 7614 - protein, 566 aa, Artificial Sequence; identical to SEQ ID NO: 4296
  derived and/or modified protein sequence (wt) from hemagglutinin__InfluenzaA__AEO01539

SEQ ID NO: 7615 - protein, 566 aa, Artificial Sequence
  derived and/or modified protein sequence (wt) from hemagglutinin__InfluenzaA__AEO01540
MKAILVVLLYTFAIANADTLCIGYHANNSTDTVDTVLEKNVTVTHSVNLLEDKHNEKLCKLRGVAPLHLGKCNIAGWILGNPECESLSTASSWSYIVETSSSDNGTCYPGDFIDYEELREQLSSVSSFERFEIFPKTSSWPNHDSNKGVTAACPHAGAKSFYKNLIWLVKKGNSYPKLSKSYINDKGKEVLVLWGIHHPSTSADQQSLYQNADAYVFVGTSRYSKKFKPEIAIRPKVRDQEGRMNYYWTLVEPGDKITFEATGNLVVPRYAFAMERNAGSGIIISDTPVHDCNTTCQTPKGAINTSLPFQNIHPITIGKCPKYVKSTKLRLATGLRNVPSIQSRGLFGAIAGFIEGGWTGMVDGWYGYHHQNEQGSGYAADLKSTQHAIDEITNKVNSVIEKMNTQFTAVGKEFNHLEKRIENLNKKVDDGFLDIWTYNAELLVLLENERTLDYHDSNVKNLYEKVRSQLKNNAKEIGNGCFEFYHKCDNTCMESVKNGTYDYPKYSEEAKLNREEINGVKLESTRIYQILAIYSTVASSLVLVVSLGAISFWMCSNGSLQCRICI

SEQ ID NO: 7616 - protein, 566 aa, Artificial Sequence; identical to SEQ ID NO: 4089
  derived and/or modified protein sequence (wt) from hemagglutinin__InfluenzaA__AEO01541

SEQ ID NO: 7617 - protein, 566 aa, Artificial Sequence; identical to SEQ ID NO: 3833
  derived and/or modified protein sequence (wt) from hemagglutinin__InfluenzaA__AEO01542

SEQ ID NO: 7618 - protein, 566 aa, Artificial Sequence; identical to SEQ ID NO: 3770
  derived and/or modified protein sequence (wt) from hemagglutinin__InfluenzaA__AEO01543

SEQ ID NO: 7619 - protein, 566 aa, Artificial Sequence; identical to SEQ ID NO: 3770
  derived and/or modified protein sequence (wt) from hemagglutinin__InfluenzaA__AEO01544

SEQ ID NO: 7620 - protein, 566 aa, Artificial Sequence
  derived and/or modified protein sequence (wt) from hemagglutinin__InfluenzaA__AEO01545
MKAILVVLLYTFATANADTLCIGYHANNSTDTVDTVLEKNVTVTHSVNLLEDKHSGKLCKLRGVAPLHLGKCNIAGWILGNPECESLSTASSWSYIVETSSSDNGTCYPGDFVDYEELREQLSSVSSFERFEIFPKTSSWPNHDSNKGVTAACPHAGAKSFYKNLIWLVKKGNSYPKLSKSYINDKGKEVLVLWGIHHPSTSADQQSLYQNADAYVFVGTSRYSKKFKPEIAIRPKVRDQEGRMNYYWTLVEPGDKITFEATGNLVVPRYAFAMERNAGSGIIISDTPVHDCNTTCQTPKGAINTSLPFQNIHPITIGKCPKYVKSTKLRLATGLRNVPSIQSRGLFGAIAGFIEGGWTGMVDGWYGYHHQNEQGSGYAADLKSTQNAIDKITNKVNSVIEKMNTQFTAVGKEFNHLEKRIENLNKKVDDGFLDIWTYNAELLVLLENERTLDYHDSNVKNLYEKVRSQLKNNAKEIGNGCFEFYHKCDNTCMESVKNGTYDYPKYSEEAKLNREEIDGVKLESTRIYQILAIYSTVASSLVLVVSLGAISFWMCSNGSLQCRICI

SEQ ID NO: 7621 - protein, 566 aa, Artificial Sequence; identical to SEQ ID NO: 2656
  derived and/or modified protein sequence (wt) from hemagglutinin__InfluenzaA__AEO01546

SEQ ID NO: 7622 - protein, 566 aa, Artificial Sequence; identical to SEQ ID NO: 2656
  derived and/or modified protein sequence (wt) from hemagglutinin__InfluenzaA__AEO01547

SEQ ID NO: 7623 - protein, 566 aa, Artificial Sequence; identical to SEQ ID NO: 2849
  derived and/or modified protein sequence (wt) from hemagglutinin__InfluenzaA__AEO01548

SEQ ID NO: 7624 - protein, 566 aa, Artificial Sequence; identical to SEQ ID NO: 2760
  derived and/or modified protein sequence (wt) from hemagglutinin__InfluenzaA__AEO01549

SEQ ID NO: 7625 - protein, 566 aa, Artificial Sequence; identical to SEQ ID NO: 2669
  derived and/or modified protein sequence (wt) from hemagglutinin__InfluenzaA__AEO01550

SEQ ID NO: 7626 - protein, 566 aa, Artificial Sequence; identical to SEQ ID NO: 2669
  derived and/or modified protein sequence (wt) from hemagglutinin__InfluenzaA__AEO01551

SEQ ID NO: 7627 - protein, 566 aa, Artificial Sequence; identical to SEQ ID NO: 2669
  derived and/or modified protein sequence (wt) from hemagglutinin__InfluenzaA__AEO01552

SEQ ID NO: 7628 - protein, 566 aa, Artificial Sequence; identical to SEQ ID NO: 2669
  derived and/or modified protein sequence (wt) from hemagglutinin__InfluenzaA__AEO01553

SEQ ID NO: 7629 - protein, 566 aa, Artificial Sequence; identical to SEQ ID NO: 2669
  derived and/or modified protein sequence (wt) from hemagglutinin__InfluenzaA__AEO01554

SEQ ID NO: 7630 - protein, 566 aa, Artificial Sequence; identical to SEQ ID NO: 2849
  derived and/or modified protein sequence (wt) from hemagglutinin__InfluenzaA__AEO01555

SEQ ID NO: 7631 - protein, 566 aa, Artificial Sequence; identical to SEQ ID NO: 2669
  derived and/or modified protein sequence (wt) from hemagglutinin__InfluenzaA__AEO01557

SEQ ID NO: 7632 - protein, 566 aa, Artificial Sequence; identical to SEQ ID NO: 2669
  derived and/or modified protein sequence (wt) from hemagglutinin__InfluenzaA__AEO01558

SEQ ID NO: 7633 - protein, 566 aa, Artificial Sequence
  derived and/or modified protein sequence (wt) from hemagglutinin__InfluenzaA__AEO01559
MKAILVVLLYTFATANADTLCIGYHANNSTDTVDTVLEKNVTVTHSVNLLEDKHNGKLCKLRGVAPLHLGKCNIAGWILGNPECESLSTASSWSYIVETSSSDNGTCYPGDFIDYEELREQLSSVSSFERFEIFPKTSSWPNHDSNKGVTAACPHAGAKSFYKNLIWLVKKGNSYPKLSKSYINDKGKEVLVLWGIHHPSTSADQQSLYQNADAYVFVGTSRYSKKFKPEIAIRPKVRDQEGRMNYYWTLVEPGDKITFEATGNLVVPRYAFAMERNAGSGIIISDTPVQDCNTTCQTPKGAINTSLPFQNIHPITIGKCPKYVKSTKLRLATGLRNVPSIQSRGLFGAIAGFIEGGWTGMVDGWYGYHHQNEQGSGYAADLKSTQNAIDEITNKVNSVIEKMNTQFTAVGKEFNHLEKRIENLNKKVDDGFLDIWTYNAELLVLLENERTLDYHDSNVKNLYEKVRSQLKNNAKEIGNGCFEFYHKCDNTCMESVKNGTYDYPKYSEEAKLNREEIDGVKLESTRIYQILAIYSTVASSLVLVVSLGAISFWMCSNGSLQCRICI

SEQ ID NO: 7634 - protein, 566 aa, Artificial Sequence; identical to SEQ ID NO: 2669
  derived and/or modified protein sequence (wt) from hemagglutinin__InfluenzaA__AEO01560

SEQ ID NO: 7635 - protein, 566 aa, Artificial Sequence; identical to SEQ ID NO: 2669
  derived and/or modified protein sequence (wt) from hemagglutinin__InfluenzaA__AEO01561

SEQ ID NO: 7636 - protein, 566 aa, Artificial Sequence; identical to SEQ ID NO: 2669
  derived and/or modified protein sequence (wt) from hemagglutinin__InfluenzaA__AEO01562

SEQ ID NO: 7637 - protein, 566 aa, Artificial Sequence; identical to SEQ ID NO: 2669
  derived and/or modified protein sequence (wt) from hemagglutinin__InfluenzaA__AEO01563

SEQ ID NO: 7638 - protein, 566 aa, Artificial Sequence; identical to SEQ ID NO: 2669
  derived and/or modified protein sequence (wt) from hemagglutinin__InfluenzaA__AEO01564

SEQ ID NO: 7639 - protein, 566 aa, Artificial Sequence; identical to SEQ ID NO: 2669
  derived and/or modified protein sequence (wt) from hemagglutinin__InfluenzaA__AEO01565

SEQ ID NO: 7640 - protein, 566 aa, Artificial Sequence; identical to SEQ ID NO: 2656
  derived and/or modified protein sequence (wt) from hemagglutinin__InfluenzaA__AEO01566

SEQ ID NO: 7641 - protein, 566 aa, Artificial Sequence; identical to SEQ ID NO: 2911
  derived and/or modified protein sequence (wt) from hemagglutinin__InfluenzaA__AEO01567

SEQ ID NO: 7642 - protein, 566 aa, Artificial Sequence; identical to SEQ ID NO: 2851
  derived and/or modified protein sequence (wt) from hemagglutinin__InfluenzaA__AEO01568

SEQ ID NO: 7643 - protein, 566 aa, Artificial Sequence; identical to SEQ ID NO: 2851
  derived and/or modified protein sequence (wt) from hemagglutinin__InfluenzaA__AEO01569

SEQ ID NO: 7644 - protein, 566 aa, Artificial Sequence; identical to SEQ ID NO: 2911
  derived and/or modified protein sequence (wt) from hemagglutinin__InfluenzaA__AEO01570

SEQ ID NO: 7645 - protein, 566 aa, Artificial Sequence; identical to SEQ ID NO: 2851
  derived and/or modified protein sequence (wt) from hemagglutinin__InfluenzaA__AEO01571

SEQ ID NO: 7646 - protein, 566 aa, Artificial Sequence; identical to SEQ ID NO: 2911
  derived and/or modified protein sequence (wt) from hemagglutinin__InfluenzaA__AEO01572

SEQ ID NO: 7647 - protein, 566 aa, Artificial Sequence; identical to SEQ ID NO: 2656
  derived and/or modified protein sequence (wt) from hemagglutinin__InfluenzaA__AEO01573

SEQ ID NO: 7648 - protein, 566 aa, Artificial Sequence; identical to SEQ ID NO: 2669
  derived and/or modified protein sequence (wt) from hemagglutinin__InfluenzaA__AEO01574

SEQ ID NO: 7649 - protein, 566 aa, Artificial Sequence; identical to SEQ ID NO: 2656
  derived and/or modified protein sequence (wt) from hemagglutinin__InfluenzaA__AEO01575

SEQ ID NO: 7650 - protein, 566 aa, Artificial Sequence; identical to SEQ ID NO: 2656
  derived and/or modified protein sequence (wt) from hemagglutinin__InfluenzaA__AEO01576

SEQ ID NO: 7651 - protein, 566 aa, Artificial Sequence; identical to SEQ ID NO: 2656
  derived and/or modified protein sequence (wt) from hemagglutinin__InfluenzaA__AEO01577

SEQ ID NO: 7652 - protein, 566 aa, Artificial Sequence; identical to SEQ ID NO: 2911
  derived and/or modified protein sequence (wt) from hemagglutinin__InfluenzaA__AEO01578

SEQ ID NO: 7653 - protein, 566 aa, Artificial Sequence; identical to SEQ ID NO: 2911
  derived and/or modified protein sequence (wt) from hemagglutinin__InfluenzaA__AEO01579

SEQ ID NO: 7654 - protein, 566 aa, Artificial Sequence; identical to SEQ ID NO: 2656
  derived and/or modified protein sequence (wt) from hemagglutinin__InfluenzaA__AEO01581

SEQ ID NO: 7655 - protein, 566 aa, Artificial Sequence; identical to SEQ ID NO: 2656
  derived and/or modified protein sequence (wt) from hemagglutinin__InfluenzaA__AEO01582

SEQ ID NO: 7656 - protein, 566 aa, Artificial Sequence; identical to SEQ ID NO: 2656
  derived and/or modified protein sequence (wt) from hemagglutinin__InfluenzaA__AEO01583

SEQ ID NO: 7657 - protein, 566 aa, Artificial Sequence; identical to SEQ ID NO: 2656
  derived and/or modified protein sequence (wt) from hemagglutinin__InfluenzaA__AEO01584

SEQ ID NO: 7658 - protein, 566 aa, Artificial Sequence; identical to SEQ ID NO: 2656
  derived and/or modified protein sequence (wt) from hemagglutinin__InfluenzaA__AEO01585

SEQ ID NO: 7659 - protein, 566 aa, Artificial Sequence; identical to SEQ ID NO: 2656
  derived and/or modified protein sequence (wt) from hemagglutinin__InfluenzaA__AEO01586

SEQ ID NO: 7660 - protein, 566 aa, Artificial Sequence; identical to SEQ ID NO: 2656
  derived and/or modified protein sequence (wt) from hemagglutinin__InfluenzaA__AEO01587

SEQ ID NO: 7661 - protein, 566 aa, Artificial Sequence; identical to SEQ ID NO: 2656
  derived and/or modified protein sequence (wt) from hemagglutinin__InfluenzaA__AEO01588

SEQ ID NO: 7662 - protein, 566 aa, Artificial Sequence; identical to SEQ ID NO: 2669
  derived and/or modified protein sequence (wt) from hemagglutinin__InfluenzaA__AEO01589

SEQ ID NO: 7663 - protein, 566 aa, Artificial Sequence; identical to SEQ ID NO: 2669
  derived and/or modified protein sequence (wt) from hemagglutinin__InfluenzaA__AEO01590

SEQ ID NO: 7664 - protein, 566 aa, Artificial Sequence; identical to SEQ ID NO: 2669
  derived and/or modified protein sequence (wt) from hemagglutinin__InfluenzaA__AEO01591

SEQ ID NO: 7665 - protein, 566 aa, Artificial Sequence; identical to SEQ ID NO: 2656
  derived and/or modified protein sequence (wt) from hemagglutinin__InfluenzaA__AEO01592

SEQ ID NO: 7666 - protein, 566 aa, Artificial Sequence; identical to SEQ ID NO: 2669
  derived and/or modified protein sequence (wt) from hemagglutinin__InfluenzaA__AEO01593

SEQ ID NO: 7667 - protein, 566 aa, Artificial Sequence; identical to SEQ ID NO: 2656
  derived and/or modified protein sequence (wt) from hemagglutinin__InfluenzaA__AEO01594

SEQ ID NO: 7668 - protein, 566 aa, Artificial Sequence; identical to SEQ ID NO: 2656
  derived and/or modified protein sequence (wt) from hemagglutinin__InfluenzaA__AEO01595

SEQ ID NO: 7669 - protein, 566 aa, Artificial Sequence; identical to SEQ ID NO: 2849
  derived and/or modified protein sequence (wt) from hemagglutinin__InfluenzaA__AEO01596

SEQ ID NO: 7670 - protein, 566 aa, Artificial Sequence; identical to SEQ ID NO: 2669
  derived and/or modified protein sequence (wt) from hemagglutinin__InfluenzaA__AEO01597

SEQ ID NO: 7671 - protein, 566 aa, Artificial Sequence
  derived and/or modified protein sequence (wt) from hemagglutinin__InfluenzaA__AEO01598
MKAILVVLLYTFATANADTLCIGYHANNSTDTVDTVLEKNVTVTHSVNLLEDKHNGKLCKLRGVAPLHLGKCNIAGWILGNPECESLSTASSWSYIVETSSSDNGTCYPGDFIDYEELREQLSSVSSFERFEMFPKTSSWPNHDSNNGVTAACPHAGAKSFYKNLIWLVKKGNSYPKLSKSYINDKGKEVLVLWGIHHPSTSADQQSLYQNADAYVFVGSSRYSKKFKPEIAIRPKVRDQEGRMNYYWTLVEPGDKITFEATGNLVVPRYAFAMERNAGSGIIISDTPVHDCNTTCQTPKGAINTSLPFQNIHPITIGKCPKYVKSTKLRLATGLRNVPSIQSRGLFGAIAGFIEGGWTGMVDGWYGYHHQNEQGSGYAADLKSTQNAIDEITNKVNSVIEKMNTQFTAVGKEFNHLEKRIENLNKKVDDGFLDIWTYNAELLVLLENERTLDYHDSNVKNLYEKVRSQLKNNAKEIGNGCFEFYHKCDNTCMESVKNGTYDYPKYSEEAKLNREEIDGVKLESTRIYQILAIYSTVASSLVLVVSLGAISFWMCSNGSLQCRICI

SEQ ID NO: 7672 - protein, 566 aa, Artificial Sequence; identical to SEQ ID NO: 2669
  derived and/or modified protein sequence (wt) from hemagglutinin__InfluenzaA__AEO01599

SEQ ID NO: 7673 - protein, 566 aa, Artificial Sequence; identical to SEQ ID NO: 2669
  derived and/or modified protein sequence (wt) from hemagglutinin__InfluenzaA__AEO01600

SEQ ID NO: 7674 - protein, 566 aa, Artificial Sequence; identical to SEQ ID NO: 2669
  derived and/or modified protein sequence (wt) from hemagglutinin__InfluenzaA__AEO01601

SEQ ID NO: 7675 - protein, 566 aa, Artificial Sequence; identical to SEQ ID NO: 2669
  derived and/or modified protein sequence (wt) from hemagglutinin__InfluenzaA__AEO01602

SEQ ID NO: 7676 - protein, 566 aa, Artificial Sequence; identical to SEQ ID NO: 2669
  derived and/or modified protein sequence (wt) from hemagglutinin__InfluenzaA__AEO01603

SEQ ID NO: 7677 - protein, 566 aa, Artificial Sequence; identical to SEQ ID NO: 2669
  derived and/or modified protein sequence (wt) from hemagglutinin__InfluenzaA__AEO01604

SEQ ID NO: 7678 - protein, 566 aa, Artificial Sequence; identical to SEQ ID NO: 2669
  derived and/or modified protein sequence (wt) from hemagglutinin__InfluenzaA__AEO01605

SEQ ID NO: 7679 - protein, 566 aa, Artificial Sequence
  derived and/or modified protein sequence (wt) from hemagglutinin__InfluenzaA__AEO01606
MKAILVVLLYTFATANADTLCIGYHANNSTDTVDTVLEKNVTVTHSVNLLEDKHNGKLCKLRGVAPLHLGKCNIAGWILGNPECESLSTASSWSYIVETSSSDNGTCYPGDFIDYEELREQLSSVSSFERFEIFPKTSSWPNHDSNKGVTAACPHAGAKSFYKNLIWLVKKGNSYPKLSKSYINDKGKEVLVLWGIHHPSTSADQQSLYQNADAYVFVGTSRYSKKFKPEIAIRPKVRDQEGRMNYYWTLVEPGDKITFEATGNLVVPRYAFAMERNAGSGIIISDTPVHDCNTTCQTPKGAINTSLPFQNIHPITIGKCPKYVKSTKLRLATGLRNVPSIQSRGLFGAIAGFIEGGWTGMVDGWYGYHHQNEQGSGYAADLKSTQNAIDEITNKVNSVIEKMNTQFTAVGKEFNHLEKRIENLNKKVDDGFLDIWTYNAELLVLLENERTLDYHDSNVKNLYEKVKSQLKNNAKEIGNGCFEFYHKCDNTCMESVKNGTYDYPKYSEEAKLNREEIDGVKLESTRIYQILAIYSTVASSLVLVVSLGAISFWMCSNGSLQCRICI

SEQ ID NO: 7680 - protein, 566 aa, Artificial Sequence; identical to SEQ ID NO: 2911
  derived and/or modified protein sequence (wt) from hemagglutinin__InfluenzaA__AEO01607

SEQ ID NO: 7681 - protein, 566 aa, Artificial Sequence; identical to SEQ ID NO: 5574
  derived and/or modified protein sequence (wt) from hemagglutinin__InfluenzaA__AEO01608

SEQ ID NO: 7682 - protein, 566 aa, Artificial Sequence; identical to SEQ ID NO: 7434
  derived and/or modified protein sequence (wt) from hemagglutinin__InfluenzaA__AEO01609

SEQ ID NO: 7683 - protein, 566 aa, Artificial Sequence
  derived and/or modified protein sequence (wt) from hemagglutinin__InfluenzaA__AEO01610
MKAILVVLLYTFATTNADTLCIGYHANNSTDTVDTVLEKNVTVTHSVNLLEDKHNGKLCKLRGVAPLHLGKCNIAGWILGNPECESLSTASSWSYIVETSSSDNGTCYPGDFIDYEELREQLSSVSSFERFEIFPKTSSWPNHDSNKGVTAACPHAGAKSFYKNLIWLVKKGNSYPKLSKSYINDKGKEVLVLWGIHHPSTSADQQSLYQNADAYVFVGTSRYSKKFKPEIAIRPKVRDQEGRMNYYWTLVEPGDKITFEATGNLVVPRYAFAMERNAGSGIIISDTPVHDCNTTCQTPKGAINTSLPFQNIHPITIGKCPKYVKSTKLRLATGLRNVPSIQSRGLFGAIAGFIEGGWTGMVDGWYGYHHQNEQGSGYAADLKSTQHAIDEITNKVNSVIEKMNTQFTAVGKEFNHLEKRIENLNKKVDDGFLDIWTYNAELLVLLENERTLDYHDSNVKNLYEKVRSQLKNNAKEIGNGCFEFYHKCDNTCMESVKNGTYDYPKYSEEAKLNREEIDGVKLESTRIYQILAIYSTVASSLVLVVSLGAISFWMCSNGSLQCRVCI

SEQ ID NO: 7684 - protein, 566 aa, Artificial Sequence
  derived and/or modified protein sequence (wt) from hemagglutinin__InfluenzaA__AEO01611
MKAILVVLLYTFATANADTLCIGYHANNSTDTVDTVLEKNVTVTHSVNLLEDKHNGKLCKLRGVAPLHLGKCNIAGWILGNPECESLSTASSWSYIVETSSSDNGTCYPGDFIDYEELREQLSSVSSFERFEIFPKTSSWPNHDSNKGVTAACPHAGAKSFYKNLIWLVKKGNSYPKLSKSYINDKGREVLVLWGIHHPSTSADQQSLYQNADAYVFVGTSRYSKKFKPEIAIRPKVRDQEGRMNYYWTLVEPGDKITFEATGNLVVPRYAFAMERNAGSGIIISDTPVHDCNTTCQTPKGAINTSLPFQNIHPITIGECPKYVKSTKLRLATGLRNVPSIQSRGLFGAIAGFIEGGWTGMVDGWYGYHHQNEQGSGYAADLKSTQNAIDKITNKVNSVIEKMNTQFTAVGKEFNHLEKRIENLNKKVDDGFLDIWTYNAELLVLLENERTLDYHDSNVKNLYEKVRSQLKNNAKEIGNGCFEFYHKCDNTCMESVKNGTYDYPKYSEEAKLNREEIDGVKLESTRIYQILAIYSTAASSLVLVVSLGAISFWMCSNGSLQCRICI

SEQ ID NO: 7685 - protein, 566 aa, Artificial Sequence
  derived and/or modified protein sequence (wt) from hemagglutinin__InfluenzaA__AEO01612
MKAILVVLLYTFATANADTLCIGYHANNSTDTVDTVLEKNVTVTHSVNLLEDKHNGKLCKLRGVAPLHLGKCNIAGWILGNPECESLSTASSWSYIVETSSSDNGTCYPGDFIDYEELREQLSSVSSFERFEIFPKTSSWPNHDSNKGATAACPHAGAKSFYKNLIWLVKKGNSYPKLSKSYINDKGKEVLVLWGIHHPSTSADQQSLYQNADAYVFVGTSRYSKKFKPEIAIRPKVRDQEGRMNYYWTLVEPGDKITFEATGNLVVPRYAFAMERNAGSGIIISDTPVHDCNTTCQTPKGAINTSLPFQNIHPITIGKCPKYVKSTKLRLATGLRNVPSIQSRGLFGAIAGFIEGGWTGMVDGWYGYHHQNEQGSGYAADLKSTQNAIDEITNKVNSVIEKMNTQFTAVGKEFNHLEKRIENLNKKVDDGFLDIWTYNAELLVLLENERTLDYHDSNVKNLYEKVRSQLKNNAKEIGNGCFEFYHKCDNTCMESVKNGTYDYPKYSEEAKLNREEIDGVKLESTRIYQILAIYSTVASSLVLVVSLGAISFWMCSNGSLQCRICI

SEQ ID NO: 7686 - protein, 566 aa, Artificial Sequence; identical to SEQ ID NO: 5266
  derived and/or modified protein sequence (wt) from hemagglutinin__InfluenzaA__AEO01613

SEQ ID NO: 7687 - protein, 566 aa, Artificial Sequence
  derived and/or modified protein sequence (wt) from hemagglutinin__InfluenzaA__AEO01614
MKAILVVLLYTFATANADTLCIGYHANNSTDTVDTVLEKNVTVTHSVNLLEDKHNGKLCKLKGVAPLHLGKCNIAGWILGNPECESLSTASSWSYIVETSSSDNGTCYPGDFIDYEELREQLSSVSSFERFEIFPKTSSWPNHDSNKGVTAACPHAGAKSFYKNLIWLVKKGNSYPKLSKSYINDKGKEVLVLWGIHHPSTSADQQSLYQNADAYVFVGTSRYSKKFKPEIAIRPKVRDQEGRMNYYWTLVEPGDKITFEATGNLVVPRYAFAMERNAGSGIIISDTPVHDCNTTCQTPKGAINTSLPFQNIHPITIGKCPKYVKSTKLRLATGLRNIPSIQSRGLFGAIAGFIEGGWTGMVDGWYGYHHQNEQGSGYAADLKSTQNAIDEITNKVNSVIEKMNTQFTAVGKEFNHLEKRIENLNKKVDDGFLDIWTYNAELLVLLENERTLDYHDSNVKNLYEKVRSQLKNNAKEIGNGCFEFYHKCDNTCMESVKNGTYDYPKYSEEAKLNREEIDGVKLESTRIYQILAIYSTVASSLVLVVSLGAISFWMCSNGSLQCRICI

SEQ ID NO: 7688 - protein, 566 aa, Artificial Sequence
  derived and/or modified protein sequence (wt) from hemagglutinin__InfluenzaA__AEO01615
MKAILVVLLYTFATANADTLCIGYHANNSTDTVDTVLEKNVTVTHSVNLLEDKHNGKLCKLRGVAPLHLGKCNIAGWILGNPECESLSTASSWSYIVETSSSDNGTCYPGDFIDYEELREQLSSVSSFERFEIFPKTSSWPNHDSNKGVTAACPHAGAKSFYKNLIWLVKKGNSYPKLSKYYINDKGKEVLVLWGIHHPSTSADQQSLYQNADAYVFVGTSRYSKKFKPEIAIRPKVREQEGRMNYYWTLVEPGDKITFEATGNLVVPRYAFAMERNAGSGIIISDTPVHDCNTTCQTPKGAINTSLPFQNIHPITIGKCPKYVKSTKLRLATGLRNVPSIQSRGLFGAIAGFIEGGWTGMVDGWYGYHHQNEQGSGYAADLKSTQNAIDKITNKVNSVIEKMNTQFTAVGKEFNHLEKRIENLNKKVDDGFLDIWTYNAELLVLLENERTLDYHDSNVKNLYEKVRSQLKNNAKEIGNGCFEFYHKCDNTCMESVKNGTYDYPKYSEEAKLNREEIDGVKLESTRIYQILAIYSTVASSLVLVVSLGAISFWMCSNGSLQCRICI

SEQ ID NO: 7689 - protein, 566 aa, Artificial Sequence; identical to SEQ ID NO: 3022
  derived and/or modified protein sequence (wt) from hemagglutinin__InfluenzaA__AEO01616

SEQ ID NO: 7690 - protein, 566 aa, Artificial Sequence; identical to SEQ ID NO: 3833
  derived and/or modified protein sequence (wt) from hemagglutinin__InfluenzaA__AEO01617

SEQ ID NO: 7691 - protein, 566 aa, Artificial Sequence; identical to SEQ ID NO: 4266
  derived and/or modified protein sequence (wt) from hemagglutinin__InfluenzaA__AEO01619

SEQ ID NO: 7692 - protein, 566 aa, Artificial Sequence; identical to SEQ ID NO: 7378
  derived and/or modified protein sequence (wt) from hemagglutinin__InfluenzaA__AEO01620

SEQ ID NO: 7693 - protein, 566 aa, Artificial Sequence; identical to SEQ ID NO: 7525
  derived and/or modified protein sequence (wt) from hemagglutinin__InfluenzaA__AEO01621

SEQ ID NO: 7694 - protein, 566 aa, Artificial Sequence
  derived and/or modified protein sequence (wt) from hemagglutinin__InfluenzaA__AEO01625
MKTIIALSYILCLVSAQKLPGNDNSTATLCLGHHAVPNGTIVKTITNDQIEVTNATELVQSSSTGEICDSPHQVLDGENCTLIDALLGDPQCDGFQNKKWDLFVERSKAYSNCYPYDVPDYASLRSLVASSGTLEFNNESFNWTGVTQNGTSSACIRRSNNSFFSRLNWLTHSKFKYPALNVTMPNNEEFDKLYIWGVHHPGTDNDQIFLYAQASGRITVSTKRSQQTVIPNIGSRPRVRNIPSRISIYWTIVKPGDILLINSTGNLIAPRGYFKIRSGKSSIMRSDAPIGKCNSECITPNGSIPNDKPFQNVNRITYGACPRYVKQNTLKLATGMRNVPEKQTRGIFGAIAGFIENGWEGMVDGWYGFRHQNSEGIGQAADLKSTQAAIDQINGKLNRLIGKTNEKFHQIEKEFSEVEGRIQDLEKYVEDTKIDLWSYNAELLVALENQHTIDLTDSEMNKLFEKTKKQLRENAEDMGNGCFKIYHKCDNACIGSIRNGTYDHEVYRDEALNNRFQIKGVELKSGYKDWILWISFAISCFLLCVALLGFIMWACQKGNIRCNICI

SEQ ID NO: 7695 - protein, 566 aa, Artificial Sequence
  derived and/or modified protein sequence (wt) from hemagglutinin__InfluenzaA__AEO01636
MKSIIALSYILCLVSAQKLPGNDNSTATLCLGHHAVPNGTIVKTITNDQIEVTNATELVQSSSTGEICDSPHQVLDGENCTLIDALLGDPQCDGFQNKKWDLFVERSKAYSNCYPYDVPDYASLRSLVASSGTLEFNNESFNWTGVTQNGTSSACIRRSNNSFFSRLNWLTHSKFKYPALNVTMPNNEEFDKLYIWGVHHPGTDNDQIFLYAQASGRITVSTKRSQQTVIPNIGSRPRVRNIPSRISIYWTIVKPGDILLINSTGNLIAPRGYFKIRSGKSSIMRSDAPIGKCNSECITPNGSIPNDKPFQNVNRITYGACPRYVKQNTLKLATGMRNVPEKQTRGIFGAIAGFIENGWEGMVDGWYGFRHQNSEGIGQAADLKSTQAAIDQINGKLNRLIGKTNEKFHQIEKEFSEVEGRIQDLEKYVEDTKIDLWSYNAELLVALENQHTIDLTDSEMNKLFEKTKKQLRENAEDMGNGCFKIYHKCDNACIGSIRNGTYDHDVYRDEALNNRFQIKGVELKSGYKDWILWISFAISCFLLCVALLGFIMWACQKGNIRCNICI

SEQ ID NO: 7696 - protein, 566 aa, Artificial Sequence
  derived and/or modified protein sequence (wt) from hemagglutinin__InfluenzaA__AEO01642
MKTIIALSYILCLVSAQKLPGNDNSTATLCLGHHAVPNGTIVKTITNDQIEVTNATELVQSSSTGEICNSPHQILDGENCTLIDALLGDPQCDGFQNKKWDLFVERSKAYSNCYPYDVPDYASLRSLVASSGTLEFNNESFNWTGVTQNGTSSACIRRSNNSFFSRLNWLTHLKFKYPALNVTMPNNEEFDKLYIWGVHHPGTDNDQIFLYAQASGRITVSTKRSQQTVIPNIGSRPRVRNIPSRISIYWTIVKPGDILLINSTGNLIAPRGYFKIRSGKSSIMRSDAPIGKCNSKCITPNGSIPNDKPFQNVNRVTYGACPRYVKQNTLKLATGMRNVPEKQTRGIFGAIAGFIENGWEGMVDGWYGFRHQNSEGIGQAADLKSTQAAIDQINGKLNRLIGKTNEKFHQIEKEFSEVEGRIQDLEKYVEDTKIDLWSYNAELLVALENQHTIDLTDSEMNKLFEKTKKQLRENAEDMGNGCFKIYHKCDNACIGSIRNGTYDHDVYRDEALNNRFQIKGVELKSGYKDWILWISFAISCFLLCVALLGFIMWACQKGNIRCNICI

SEQ ID NO: 7697 - protein, 565 aa, Artificial Sequence
  derived and/or modified protein sequence (wt) from hemagglutinin__InfluenzaA__AEO01663
MKVKLLVLLCTFAATYADTICIGYHANNSTDTVDTVLEKNVTVTHSVNLLENSHNGKLCLLKGIAPLQLGNCSVAGWILGNPECELLISKESWSYIVEKPNPENGTCYPGHFADYEELREQLSSVSSFERFEIFPKESSWPNHTVTGVSASCSHNGESSFYRNLLWLTGKNGLYPNLSKSYANNKEKEVLVLWGVHHPPNIGDQKALYHTENAYVSVVSSHYSRKFTPEIAKRPKVRDQEGRINYYWTLLEPGDTIIFEANGNLRAPRYAFALSRGFGSGIINSNAPMDKCDAKCQTPQGAINSSLPFQNVHPVPIGECPKYVRSAKLRMVTGLRNIPSIQSRGLFGAIAGFIEGGWTGMVDGWYGYHHQNEQGSGYAADQKSTQNAINGITNKVNSVIEKMNTQFTAVGKEFNKLERRMENLNKKVDDGFIDIWTYNAELLVLLENERTLDFHDSNVKNLYEKVKSQLKNNAKEIGNGCFEFYHKCNDECMESVKNGTYDYPKYSEESKLNREKIDGVRLESMGVYQILAIYSTVASSLVLLVSLGAISFWMCSNGSLQCRICI

SEQ ID NO: 7698 - protein, 565 aa, Artificial Sequence
  derived and/or modified protein sequence (wt) from hemagglutinin__InfluenzaA__AEO01674
MKVKLLVLLCTFTATYADTICIGYHANNSTDTVDTVLEKNVTVTHSVNLLENSHNGKLCLLKGIAPLQLGNCSVAGWILGNPECELLISKESWSYIVEKPNPENGTCYPGHFADYEELREQLSSVSSFERFEIFPKESSWPNHTVTGVSASCSHNGESSFYRNLLWLTGKNGLYPNLSKSYANNKEKEVLVLWGVHHPPNIGDQKALYHTENAYVSVVSSHYSRKFTPEIAKRPKVRDQEGRINYYWTLLEPGDTIIFEANENLKAPRYAFALSRGFGSGIINSKAPMDKCDAKCQTPQGAINSSLPFQNVHPVTIGECPKYVRSAKLRMVTGLRNIPSIQSRGLFGAIAGFIEGGWTGMVDGWYGYHHQNEQGSGYAADQKSTQNAINGITNKVNSVIEKMNTQFTAVGKEFNKLERRMENLNKKVDDGFIDIWTYNAELLVLLENERTLDFHDSNVKNLYEKVKSQLKNNAKEIGNGCFEFYHKCNDECMESVKNGTYDYPKYSEESKLNREKIDGVRLESMGVYQILAIYSTVASSLVLLVSLGAISFWMCSNGSLQCRICI

SEQ ID NO: 7699 - protein, 566 aa, Artificial Sequence; identical to SEQ ID NO: 7694
  derived and/or modified protein sequence (wt) from hemagglutinin__InfluenzaA__AEO01691

SEQ ID NO: 7700 - protein, 565 aa, Artificial Sequence
  derived and/or modified protein sequence (wt) from hemagglutinin__InfluenzaA__AEO01699
MKVKLLVLLCTFTATYADTICIGYHANNSTDTVDTVLEKNVTVTHSVNLLENSHNGKLCLLKGIAPLQLGNCSVAGWILGNPECELLISKESWSYIVEKPNPENGTCYPGHFADYEELREQLSSVSSFERFEIFPKESSWPNHTVTGVSASCSHNGESSFYRNLLWLTGKNGLYPNLSKSYANNKEKEVLVLWGVHHPPNIGDQKALYHTENAYVSVVSSHYSRKFTPEIAKRPKVRDQEGRINYYWTLLEPRDTIIFEANGNLIAPRYAFALSRGFGSGIINSNAPMDKCDAKCQTPQGAINSSLPFQNVHPVTIGECPKYVRSAKLRMVTGLRNIPSIPSRGLFGAIAGFIEGGWTGMVDGWYGYHHQNEQGSGYAADQKSTQNAINGITNKVNSVIEKMNTQFTAVGKEFNKLERRMENLNKKVDDGFIDIWTYNAELLVLLENERTLDFHDSNVKNLYEKVKSQLKNNAKEIGNGCFEFYHKCNDECMESVKNGTYDYPKYSEESKLNREKIDGVKLESMGAYQILAIYSTGASSLVLLVSLGAISFWMCSNGSLQRRICI

SEQ ID NO: 7701 - protein, 565 aa, Artificial Sequence
  derived and/or modified protein sequence (wt) from hemagglutinin__InfluenzaA__AEO01709
MKVKLLVLLCTFTATYADTICIGYHANNSTDTVDTVLEKNVTVTHSVNLLENSHNGKLCLLKGIAPLQLGNCSVAGWILGNPECELLISKESWSYIVEKPNPENGTCYPGHFADYEELREQLSSVSSFERFEIFPKESSWPNHTVTGVSASCSHNGESSFYRNLLWLTGKNGLYPNLSKSYANNKEKEVLVLWGVHHPPNIGDQKALYHTENAYVSVVSSHYSRKFTPEIAKRPKLRDQDGRINYYWTLLEPGDTTIFEANGNLIAPRYAFALSRGFGSGIINSNAPMDKCDAKCQTPQGAINSSLPFQNVHPVTIGECPKYVRSAKLRMVTGLRNIPSIQSRGLFGAIAGFIEGGWTGMVDGWYGYHHQNEQGSGYAADQKSTQNAINGITNKVNSVIEKMNTQFTAVGKEFNKLERRMENLNKKVDDGFIDIWTYNAELLVLLENERTLDFHDSNVKNLYEKVKSQLKNNAKEIGNGCFELYLKCNGECMESVKNGTYDYPKYSEESKLNREKIDGVKLESMGVYQILAIYSTVASSLVLLVSLGAISFWMCSNGSLQCRICI

SEQ ID NO: 7702 - protein, 566 aa, Artificial Sequence; identical to SEQ ID NO: 3833
  derived and/or modified protein sequence (wt) from hemagglutinin__InfluenzaA__AEO37530

SEQ ID NO: 7703 - protein, 566 aa, Artificial Sequence
  derived and/or modified protein sequence (wt) from hemagglutinin__InfluenzaA__AEO72176
MKAILVVLLYTFATANADTLCIGYHANNSTDTVDTVLEKNVTVTHSVNLLEDKHNGKLCKLRGVAPLHLGKCNIAGWILGNPECESLSTASSWSYIVETSSSDNGTCYPGDFIDYEELREQLSSVSSFERFEIFPKTSSWPNHDSNKGVTAACPHAGAKSFYKNLIWLVKKGNSYPKLSKSYINDKGKEVLVLWGIHHPSTTADQQSLYQNADTYVFVGTSRYSKKFKPEIAIRPKVRDQEGRMNYYWTLVEPGDKITFEATGNLVVPRYAFAMERNAGSGIIISDTPVHDCNTTCQTPKGAINTSLPFQNIHPITIGKCPKYVKSTKLRLATGLRNVPSIQSRGLFGAIAGFIEGGWTGMVDGWYGYHHQNEQGSGYAADLKSTQNAIDKITNKVNSVIEKMNTQFTAVGKEFNHLEKRIENLNKKVDDGFLDIWTYNAELLVLLENERTLDYHDSNVKNLYEKVRNQLKNNAKEIGNGCFEFYHKCDNTCMESVKNGTYDYPKYSEEAKLNREEIDGVKLESTRIYQILAIYSTVASSLVLAVSLGAISFWMCSNGSLQCRICI

SEQ ID NO: 7704 - protein, 567 aa, Artificial Sequence
  derived and/or modified protein sequence (wt) from hemagglutinin__InfluenzaA__AEO88980
MEKIVLLLAIVSLVKSDQICIGYHANNSTEQVDTIMEKNVTVTHAQDILEKTHNGKLCDLDGVKPLILRDCSVAGWLLGNPMCDEFINVPEWSYIVEKANPANDLCYPGNFNDYEELKHLLSRINHFEKIQIIPKSSWSDHEASSGVSSACPYQGTPSFFRNVVWLIKKNNTYPTIKRSYNNTNQEDLLILWGIHHSNDAAEQTKLYQNPTTYISVGTSTLNQRLVPKIATRSKVNGQSGRMDFFWTILKPNDAINFESNGNFIAPEYAYKIVKKGDSAIMKSEVEYGNCNTKCQTPIGAINSSMPFHNIHPLTIGECPKYVKSNKLVLATGLRNSPLRERRRKRGLFGAIAGFIEGGWQGMVDGWYGYHHSNEQGSGYAADKESTQKAIDGVTNKVNSIIDKMNTQFEAVGREFNNLERRIENLNKKMEDGFLDVWTYNAELLVLMENERTLDFHDSNVKNLYDKVRLQLRDNAKELGNGCFEFYHKCDNECMESVRNGTYDYPQYSEEARLKREEISGVKLESIGTYQILSIYSTVASSLALAIMVAGLSLWMCSNGSLQCRICI

SEQ ID NO: 7705 - protein, 567 aa, Artificial Sequence
  derived and/or modified protein sequence (wt) from hemagglutinin__InfluenzaA__AEO89021
MEKIVLLLAIVSLVKSDQICIGYHANNSTEQVDTIMEKNVTVTHAQDILEKTHNGKLCDLDGVKPLILRDCSVAGWLLGNPMCDEFINVPEWSYIVEKANPANDLCYPGNFNDYEELKHLLSRINHFEKIPIIPKSSWSDHEASSGVSSACPYQGTPSFFRNVVWLIKKNNTYPTIKRSYNNTNQEDLLILWGIHHSNNAAEQTKLYQNPTTYISVGTSTLNLRLVPKIATRSKVNGQSGRMDFFWTILKPNDAINFESNGNFIAPEYAYKIVKKGDSAIMKSEVEYGNCNTKCQTPIGAINSSMPFHNIHPLTIGECPKYVKSNKLVLATGLRNSPLRERRRKRGLFGAIAGFIEGGWQGMVDGWYGYHHSNEQGSGYAADKESTQKAIDGVTNKVNSIIDKMNTQFEAVGREFNNLERRIENLNKKMEDGFLDVWTYNAELLVLMENERTLDFHDSNVKNLYDKVRLQLRDNAKELGNGCFEFYHKCDNECMESVRNGTYDYPQYSEEARLKREEISGVKLESIGTYQILSIYSTVASSLALAIMVAGLSLWMCSNGSLQCRICI

SEQ ID NO: 7706 - protein, 567 aa, Artificial Sequence
  derived and/or modified protein sequence (wt) from hemagglutinin__InfluenzaA__AEO89030
MEKIVLLLAIVSLVKSDQICIGYHANNSTEQVDTIMEKNVTVTHAQDILEKTHNGKLCDLDGVKPLILRDCSVAGWLLGNPMCDEFINVPEWSYIVEKANPANDLCYPGNFNDYEELKHLLSRINHFEKIQIIPKSSWSDHEASSGVSSVCPYQGTPSFFRNVVWLIKKNNTYPTIKRSYNNTNQEDLLILWGIHHSNDAAEQTKLYQNPTTYISVGTSTLNQRLVPKIATRSKVNGQSGRMDFFWTVLKPNDAINFESNGNFIAPEYAYKIVKKGDSAIMKSEVEYGNCNTKCQTPIGAINSSMPFHNIHPLTIGECPKYVKSNKLVLATGLRNSPLRERRRKRGLFGAIAGFIEGGWQGMVDGWYGYHHSNEQGSGYAADKESTQKAIDGVTNKVNSIIDKMNTQFEAVGREFNNLERRIENLNKKMEDGFLDVWTYNAELLVLMENERTLDFHDSNVKNLYDKVRLQLRDNAKELGNGCFEFYHKCDNECMESVRNGTYDYPQYSEEARLKREEISGVKLESIGTYQILSIYSTVASSLALAIMVAGLSLWMCSNGSLQCRICI

SEQ ID NO: 7707 - protein, 567 aa, Artificial Sequence
  derived and/or modified protein sequence (wt) from hemagglutinin__InfluenzaA__AEO89048
MEKIVFLLAIVSLVKSDQICIGYHANNSTEQVDTIMEKNVTVTHAQDILEKTHNGKLCDLDGVKPLILRDCSVAGWLLGNPMCDEFINVPEWSYIVEKANPANDLCYPGNFNDYEELKHLLSRINHFEKIQIIPKSSWSDHEASSGVSSACPYQGTPSFFRNVIWLIKKNNTYPTIKRSYNNTNQEDLLILWGIHHSNDAAEQTKLYQNPTTYISVGTSTLNQRLVPKIATRSKVNGQSGRMDFFWTILKPNDAINFESNGNFIAPEYAYKIVKKGDSAILKSEVEYGNCNTKCQTPIGAINSSMPFHNIHPLTIGECPKYVKSNKLVLATGLRNSPLRERRRKRGLFGAIAGFIEGGWQGMVDGWYGYHHSNEQGSGYAADKESTQKAIDGVTNKVNSIIDKMNTQFEAVGREFNNLERRIENLNKKMEDGFLDVWTYNAELLVLMENERTLDFHDSNVKNLYDKVRLQLRDNAKELGNGCFEFYHKCDNECMESVRNGTYDYPQYSEEARLKREEISGVKLESIGTYQILSIYSTVASSLALAIMVAGLSLWMCSNGSLQCRICI

SEQ ID NO: 7708 - protein, 567 aa, Artificial Sequence
  derived and/or modified protein sequence (wt) from hemagglutinin__InfluenzaA__AEO89065
MEKIVLLLAIVSLVKSDQICIGYHANNSTEQVDTIMEKNVTVTHAQDILEKTHNGKLCDLDGVKPLILRDCSVAGWLLGNPMCDEFINVPEWSYIVEKANPANDLCYPGNFNDYEELKHLLSRINHFEKIQIIPKSSWSDHEASSGVSSVCPYQGTPSFFRNVVWLIKKNNTYPTIKRSYNNTNQEDLLILWGIHHSNDAAEQTKLYQNPTTYISVGTSTLNLRLVPKIATRSKVNGQSGRMDFFWTILKPSDAINFESNGNFIAPEYAYKIVKKGDSAIMKSEVEYGNCNTKCQTPIGAINSSMPFHNIHPLTIGECPKYVKSNKLVLATGLRNSPLRERRRKRGLFGAIAGFIEGGWQGMVDGWYGYHHSNEQGSGYAADKESTQKAIDGVTNKVNSIIDKMNTQFEAVGREFNNLERRIENLNKKMEDGFLDVWTYNAELLVLMENERTLDFHDSNVKNLYDKVRLQLRDNAKELGNGCFEFYHKCDNECMESVRNGTYDYPQYSEEARLKREEISGVKLESIGTYQILSIYSTVASSLALAIMVAGLSLWMCSNGSLQCRICI

SEQ ID NO: 7709 - protein, 567 aa, Artificial Sequence
  derived and/or modified protein sequence (wt) from hemagglutinin__InfluenzaA__AEO89082
MEKIVLLLAIVSLVKSDQICIGYHANNSTEQVDTIMEKNVTVTHAQDILEKTHNGKLCDLDGVKPLILRDCSVAGWLLGNPMCDEFINVPEWSYIVEKANPANDLCYPGNFNDYEELKHLLSRINHFEKIQIIPKSSWSDHDTSSGVSSACPYQGTPSFFRNVVWLIKKNNTYPTIKRSYNNTNKEDLLILWGIHHSNDAAEQTKLYQNPTTYISVGTSTLNQRLVPKIATRSKVNGQSGRMDFFWTILKPNDAINFESNGNFIAPEYAYKIVKKGDSAIMKSEVEYGNCNTKCQTPIGAINSSMPFHNIHPLTIGECPKYVKSNKLVLATGLRNSPLRERRRKRGLFGAIAGFIEGGWQGMVDGWYGYHHSNEQGSGYAADKESTQKAIDGVTNKVNSIIDKMNTQFEAVGREFNNLERRIENLNKKMEDGFLDVWTYNAELLVLMENERTLDFHDSNVKNLYDKVRLQLRDNAKELGNGCFEFYHKCDNECMESVRNGTYDYPQYSEEARLKREEISGVKLESIGTYQILSIYSTVASSLALAIMVAGLSLWMCSNGSLQCRICI

SEQ ID NO: 7710 - protein, 567 aa, Artificial Sequence
  derived and/or modified protein sequence (wt) from hemagglutinin__InfluenzaA__AEO89091
MEKTVFLLAIVSLVKSDQICIGYHANNSTEQVDTIMEKNVTVTHAQNILEKTHNGKLCDIDGVKPLILKDCSVAGWLLGNPMCDEFINVPEWSYIVEKANPANDLCYPGNFNDYEELKHLLSRINHFEKIQIIPKSSWSDHEASSGVSSTCPYQGTPSFFRNVVWLIKKNNTYPTIKRSYNNTNQEDLLILWGIHHSNDEAEQAKLYQNPTTYISVGTSTLNQRLVPKIATRSKVNGQSGRMDFFWTILKPNDAINFESNGNFIAPEYAYKIVKKGDSAIMKSEVEYGNCNTKCQTPIGAINSSMPFHNIHPLTIGECPKYVKSNKLVLATGLRNSPLRERRRKRGLFGAIAGFIEGGWQGMVDGWYGYHHSNEQGSGYAADKESTQKAIDGVTNKVNSIIDKMNTQFEAVGREFNNLERRIENLNKKMEDGFLDVWTYNAELLVLMENERTLDFHDSNVKNLYDKVRLQLRDNAKELGNGCFEFYHKCDDECMESVRNGTYDYPQYSEEARLKREEISGVKLESIGTYQILSIYSTVASSLALAIMMAGLSLWMCSNGSLQCRICI

SEQ ID NO: 7711 - protein, 567 aa, Artificial Sequence
  derived and/or modified protein sequence (wt) from hemagglutinin__InfluenzaA__AEO89100
MEKIVPFLAIISLVKSDQICIGYHANNSTEQVDTIMEKNVTVTHAQDILEKTHNGKLCDLDGVKPLILRDCSVAGWLLGNPMCDEFINVPEWSYIVEKANPANDLCYPGNFNDYEELKHLLSRINHFEKIQIIPKNSWSDHEASSGVSSACPYQGTPSFFRNVVWLIKKNNTYPTIKRSYNNTNQEDLLILWGIHHSNDAAEQTKLYQNPTTYISVGTSTLNQRLVPKIATRSKVNGQSGRMDFFWTILKPNDAINFESNGNFIAPEYAYKIVKKGDSAIMKSEVEYGNCNTKCQTPIGAINSSMPFHNIHPLTIGECPKYVKSNKLVLATGLRNSPLRERRRKRGLFGAIAGFIEGGWQGMVDGWYGFHHSNEQGSGYAADKESTQKAIDGVTNKVNSIIDKMNTQFEAVGREFNNLERRIENLNKKMEDGFLDVWTYNAELLVLMENERTLDFHDSNVKNLYDKVRLQLRDNAKELGNGCFEFYHKCDDECMESVKNGTYDYPQYSEEARLKREEISGVKLESIGTYQILSIYSTVASSLALAIMVAGLSLWMCSNGSLQCRICI

SEQ ID NO: 7712 - protein, 567 aa, Artificial Sequence
  derived and/or modified protein sequence (wt) from hemagglutinin__InfluenzaA__AEO89109
MEKIVLLLAIVSLVKSDQICIGYHANNSTEQVDTIMEKNVTVTHAQDILEKTHNGKLCDLDGVKPLILRDCSVAGWLLGNPMCDEFINVPEWSYIVEKANPANDLCYPGNFNDYEELKHLLSRINHFEKIQIIPKSSWSDHEASSGVSSACPYQGTPSFFRNVVWLIKKNNTYPTIKRSYNNTNQENLLILWGIHHSNDAAEQIKLYQNPTTYISVGTSTLNQRLVTKIATRPKVNGQSGRMDFFWTILKPNDAINFESNGNFIAPEYAYKIVKEGDSAIMKSEVEYGNCNTKCQTPIGAINSSMPFHNIHPLTIGECPKYVKSNKLVLATGLRNSPLRERRRKRGLFGAIAGFIEGGWQGMVDGWYGYHHSNEQGSGYAADKESTQKAIDGVTNKVNSIIDKMNTQFEAVGREFNNLERRIENLNKKMEDGFLDVWTYNAELLVLMENERTLDFHDSNVKNLYDKVRLQLRDNAKELGNGCFEFYHKCDNECMESVRNGTYDYPQYSEEARLKREEISGVKLESIGTYQILSIYSTVASSLALAIMVAGLSLWMCSNGSLQCRICI

SEQ ID NO: 7713 - protein, 567 aa, Artificial Sequence
  derived and/or modified protein sequence (wt) from hemagglutinin__InfluenzaA__AEO89127
MEKIVLLLAIISLVKSDQICIGYHANNSTEQVDTIMEKNVTVTHAQDILEKTHNGKLCDLDGVKPLILRDCSVAGWLLGNPMCDEFINVPEWSYIVEKANPANDLCYPGNFNDYEELKHLLSRINHFEKIQIIPKSSWSDHEASSGVSSACPYQGTPSFFRNVVWLIKKNNTYPTIKRSYNNTNQENLLILWGIHHSNDAAEQIKLYQNPTTYISVGTSTLNQRLVPKIATRSKVNGQSGRMDFFWTILKPNDAINFESNGNFIAPEYAYKIVKEGDSAIMKSEVEYGNCNTKCQTPIGAINSSMPFHNIHPLTIGECPKYVKSNKLVLATGLRNSPLRERRRRRGLFGAIAGFIEGGWQGMVDGWYGYHHSNEQGSGYAADKESTQKAIDGVTNKVNSIIDKMNTQFEAVGREFNNLERRIENLNKKMEDGFLDVWTYNAELLVLMENERTLDFHDSNVKNLYDKVRLQLRDNAKELGNGCFEFYHKCDNECMESVRNGTYDYPQYSEEARLKREEISGIKLESMGTYQILSIYSTVASSLALAIMVAGLSLWMCSNGSLQCRICI

SEQ ID NO: 7714 - protein, 567 aa, Artificial Sequence
  derived and/or modified protein sequence (wt) from hemagglutinin__InfluenzaA__AEO89145
MEKIVLLLAIVSLVKSDQICIGYHANNSTEQVDTIMEKNVTVTHAQDILEKTHNGKLCDLDGVKPLILGDCSVAGWLLGNPMCDKFINVPEWSYIVEKANPANDLCYPGNFNDYEELKHLLSRINHFEKIQIIPKSSWSDHEASSGVSSACPYQGTPSFFRNVVWLTKKNNTYPTIKRSYNNTNQEDLLILWGIHHSNNAAEQEKLYQNPTTYISVGTSTLNQRLVPKIATRSKVNGQSGRMDFFWTILKPNDAINFESNGNFIAPEYAYKIVKKGDSAIMKSGVEYGNCNTKCQTPIGAINSSMPFHNIHPLTIGECPKYVKSNKLVLATGLRNSPLRERRRKRGLFGAIAGFIEGGWQGMVDGWYGYHHSNEQGSGYAADKESTQKAIDGVTNKVNSIIDKMNTQFEAVGREFNNLERRIENLNKKMEDGFLDVWTYNAELLVLMENERTLDFHDSNVKNLYDKVRLQLRDNAKELGNGCFEFYHKCDNECMESVRNGTYDYPQYSEEARLKREEISGVKLESIGTYQILSIYSTAASSLALAIMVAGLSLWMCSNGSLQCRICI

SEQ ID NO: 7715 - protein, 568 aa, Artificial Sequence
  derived and/or modified protein sequence (wt) from hemagglutinin__InfluenzaA__AEO89163
MEKIVLLFAIVSLVKSDHICIGYHANNSTEQVDTIMEKNVTVTHAQDILEKTHNGKLCDLNGVKPLILKDCSVAGWLLGNPMCDEFIDVPEWSYIVEKANPANDLCYPGNFNDYEELKHLLSRINHFEKIQIIPKDSWPDHEASLGVSSACPYQGNSSFFRNVVWLIKKGNAYPTIKKSYNNTNKEDLLILWGIHHPNDEAEQTRLYQNPTTYISIGTSTLNQRLVPRIATRSKVNGQSGRIDFFWTILKPNDAINFESNGNFIAPEYAYKIVKKGDSTIMKSEVEYGNCNTRCQTPMGAINSSMPFHNIHPLTIGECPKYVKSNKLVLATGLRNSPQRERRRRKRGLFGAIAGFIEGGWQGMVDGWYGYHHSNEQGSGYAADKESTQKAIDGVTNKVNSIIDKMNTQFEAVGREFNNLERRIENLNKKMEDGFLDVWTYNAELLVLMENERTLDFHDSNVKNLYDKVRLQLRDNAKELGNGCFEFYHKCDNECMESVRNGTYDYPQYSEEARLKREEISGVKLESIGTYQILSIYSTVASSLVLAIMVAGLSLWMCSNGSLQCRICI

SEQ ID NO: 7716 - protein, 567 aa, Artificial Sequence
  derived and/or modified protein sequence (wt) from hemagglutinin__InfluenzaA__AEO89172
MEKIVLLLAIVSLVRSDQICIGYHANNSTEQVDTIMEKNVTVTHAQNILEKTHNGKLCDLDGVKPLILRDCSVAGWLLGNPMCDEFINVPEWSYIVEKANPANDLCYPGNFNDYEELKHLLSRINHFEKIQIIPKSSWSDHEASSGVSSACPYQGTPSFFRNVVWLIKKNNTYPTIKRSYNNTNQEDLLVLWGIHHSNDATEQIKLYQNPTTYVSVGTSTLNQRLVPKIATRSKVNGQSGRMDFFWTILKSNDAINFESNGNFIAPEYAYKIVKKGDSAIMKSEVEYGNCSTKCQTPIGAINSSMPFHNIHPLTIGECPKYVKSNKLVLATGLRNSPLRERRRKRGLFGAIAGFIEGGWQGMVDGWYGYHHSNEQGSGYAADKESTQKAIDGVTNKVNSIIDKMNTQFEAVGREFNNLERRIENLNKKMEDGFLDVWTYNAELLVLMENERTLDFHDSNVKNLYDKVRLQLRDNAKELGNGCFEFYHKCDNECMESVRNGTYDYPQYSEEARLKREEISGVKLESIGTYQILSIYSTVASSLALAIMVAGLSLWMCSNGSLQCRICI

SEQ ID NO: 7717 - protein, 567 aa, Artificial Sequence
  derived and/or modified protein sequence (wt) from hemagglutinin__InfluenzaA__AEO89181
MEKIVLLFATISLVKSDHICIGYHANNSTEQVDTIMEKNVTVTHAQDILEKTHNGKLCDLNGVKPLILKDCSVAGWLLGNPMCDEFINVPEWSYIVEKANPANDLCYPGNFNDYEELKHLLSRINHFEKIQIIPKNSWSDHEASLGVSAACPYQGKSSFFRNVVWLIKKDNAYPTIKKGYNNTNQEDLLVLWGIHHPNDEAEQTRLYQNPTTYISIGTSTLNQRLVPKIATRSKINGQSGRIDFFWTILKPNDAIHFESNGNFIAPEYAYKIVKKGDSTIMKSEVEYGNCNTRCQTPIGAINSSMPFHNIHPLTIGECPKYVKSNKLVLATGLRNSPQRERRRKRGLFGAIAGFIEGGWQGMVDGWYGYHHSNEQGSGYAADKESTQKAIDGVTNKVNSIIDKMNTQFEAVGREFNNLERRIENLNKKMEDGFLDVWTYNAELLVLMENERTLDFHDSNVRNLYDKVRLQLKDNAKELGNGCFEFYHKCDNECMESVRNGTYDYPQYSEEARLKREEISGVKLESIGIYQILSIYSTVASSLVLAIMMAGLSLWMCSNGSLQCRICI

SEQ ID NO: 7718 - protein, 567 aa, Artificial Sequence
  derived and/or modified protein sequence (wt) from hemagglutinin__InfluenzaA__AEO89192
MEKIVLLLAIVSLVKSDQICIGYHANNSTEQVDTIMEKNVTVTHAQDILEKTHNGKLCDLDGVKPLILRDCSVAGWLLGNPMCDEFINVPEWSYIVEKANPANDLCYPGNFNDYEELKHLLSRINHFEKIQIIPKSSWSDHEASSGVSSACPYQGTPSFFRNVVWLIKKNNTYPTIKRSYNNTNQENLLILWGIHHSNDAAEQIKLYQNPTTYVSIGTSTLNQRLVPKIATRSKVNGQSGRMDFFWTILKPNDAINFESNGNFIAPEYAYKIVKEGDSAIMKSEVEYGNCNTKCQTPIGAINSSMPFHNIHPLTIGECPKYVKSNKLVLATGLRNSPLRERRRKRGLFGAIAGFIEGGWQGMVDGWYGYPHSNEQGSGYAADKESTQKAIDGVTNKVNSIIDKMNTQFEAVGREFNNLERRIENLNKKMEDGFLDVWTYNAELLVLMENERTLDFHDSNVKNLYDKVRLQLRDNAKELGNGCFEFYHKCDNECMESVRNGTYDYPQYSEEARLKREEINGVKLESIGTYQILSIYSTVASSLALAIMVAGLSLWMCSNGSLQCRICI

SEQ ID NO: 7719 - protein, 567 aa, Artificial Sequence
  derived and/or modified protein sequence (wt) from hemagglutinin__InfluenzaA__AEO89203
MEKIVLLLAIVSLVKSDQICIGYHANNSTEQVDTIMEKNVTVTHAQDILEKTHNGKLCDLDGVKPLILRDCSVAGWLLGNPMCDEFINVPEWSYIVEKANPANDLCYPGNFNDYEELKHLLSRINHFEKIQIIPKSSWSDHEASSGVSSACPYQGTPSFFRNVVWLIKKNNTYPTIKRSYNNTNQENLLILWGIHHSNDAAEQIKLYQNPTTYVSIGTSTLNQRLVPKIATRSKVNGQSGRMDFFWTILKPNDAINFESNGNFIAPEYAYKIVKEGDSAIMKSEVEYGNCNTKCQTPIGAINSSMPFHNIHPLTIGECPKYVKSNKLVLATGLRNSPLRERRRKRGLFGAIAGFIEGGWQGMVDGWYGYHHSNEQGSGYAADKESTQKAIDGVTNKVNSIIDKMNTQFEAVGREFNNLERRIENLNKKMEDGFLDVWTYNAELLVLMENERTLDFHDSNVKNLYDKVRLQLRDNAKELGNGCFEFYHKCDNECMESVRNGTYDYPQYSEEARLKREEINGVKLESIGTYQILSIYSTVASSLALAIMVAGLSLWMCSNGSLQCRICI

SEQ ID NO: 7720 - protein, 567 aa, Artificial Sequence; identical to SEQ ID NO: 7719
  derived and/or modified protein sequence (wt) from hemagglutinin__InfluenzaA__AEO89213

SEQ ID NO: 7721 - protein, 567 aa, Artificial Sequence; identical to SEQ ID NO: 7719
  derived and/or modified protein sequence (wt) from hemagglutinin__InfluenzaA__AEO89224

SEQ ID NO: 7722 - protein, 567 aa, Artificial Sequence
  derived and/or modified protein sequence (wt) from hemagglutinin__InfluenzaA__AEO89235
MEKIVLLLAMVSLVRSDQICIGYHANNSTEQVDTIMEKNVTVTHAQDILEKTHNGKLCDLDGVKPLILRDCSVAGWLLGNPMCDEFINVPEWSYIVEKANPANDLCYPGNLNDYEELKHLLSRINHFEKIQIIPKSSWSDHEASLGVSSACPYQGTPSFFRNVIWLIKKNNTYPTIKRSYNNTNQEDLLILWGIHHSNDEAEQIKLYQNPTTYISVGTSTLNQRLVPKIATRSKVNGQSGRMDFFWTILKPDDAINFESNGNFIAPEYAYKIVKKGDSAIMKSEVEYGNCNTKCQTPIGAINSSMPFHNIHPLTIGECPKYVKSNKLVLATGLRNSPLREKRRKRGLFGAIAGFIEGGWQGMVDGWYGYHHSNEQGSGYAADKESTQKAIDGVTNKVNSIIDKMNTQFEAVGREFNNLERRIENLNKKMEDGFLDVWTYNAELLVLMENERTLDFHDSNVKNLYDKVRLQLRDNAKELGNGCFEFYHKCDNECMESVRNGTYDYPQYSEEARLKREEISGVKLESIGTYQILSIYSTVASSLALAIMVAGLSLWMCSNGSLQCRICI

SEQ ID NO: 7723 - protein, 567 aa, Artificial Sequence
  derived and/or modified protein sequence (wt) from hemagglutinin__InfluenzaA__AEO89246
MEKIVPLLAMVSLVKSDQICIGYHANNSTEQVDTIMEKNVTVTHAQDILEKTHNGKLCDLDGVKPLILRDCSVAGWLLGNPMCDEFINVPEWSYIVEKANPANDLCYPGNLNDYEELKHLLSRINHFEKIQIIPKSSWSDHEASLGVSSACPYQGTPSFFRNVVWLIKKNNTYPTIKRSYNNTNQEDLLILWGIHHSNDEAEQIKLYQNPTTYISVGTSTLNQRLVPKIATRSKVNGQSGRMDFFWTILKPDDAINFESNGNFIAPEYAYKIVKKGDSAIMKSEVEYGNCNTKCQTPIGAINSSMPFHNIHPLTIGECPKYVKSNKLVLATGLRNSPLRERRRKRGLFGAIAGFIEGGWQGMVDGWYGYHHSNEQGSGYAADKESTQKAIDGVTNKVNSIIDKMNTQFEAVGREFSNLERRIENLNKKMEDGFLDVWTYNAELLVLMENERTLDFHDSNVKNLYDKVRLQLRDNAKELGNGCFEFYHKCDNECMESVRNGTYDYPQYSEEARLKREEISGVKLESIGTYQILSIYSTVASSLALAIMVAGLSLWMCSNGSLQCRICI

SEQ ID NO: 7724 - protein, 567 aa, Artificial Sequence
  derived and/or modified protein sequence (wt) from hemagglutinin__InfluenzaA__AEO89257
MEKIVLLLAIVSLVRSDQICIGYHANNSTEQVDTIMEKNVTVTHAQDILEKTHNGKLCDLDGVKPLILRDCSVAGWLLGNPMCDEFINVPEWSYIVEKANPANDLCYPGNFNDYEELKHLLSRINHFEKIQIIPKSSWSDHEASSGVSSACPYQGTPSFFRNVVWLIKKNNTYPTIKRSYNNTNQEDLLVLWGIHHSNDAAEQIKLYQNPTTYVSVGTSTLNQRLVPKIATRSKVNGQSGRMDFFWTILKSNDAINFESNGNFIAPEYAYKIVKKGDSAIMKSEVEYGNCSTKCQTPIGAINSSMPFHNIHPLTIGECPKYVKSNKLVLATGLRNSPLRERRRKRGLFGAIAGFIEGGWQGMVDGWYGYHHSNEQGSGYAADKESTQKAIDGVTNKVNSIIDKMNTQFEAVGREFNNLERRIENLNKKMEDGFLDVWTYNAELLVLMENERTLDFHDSNVKNLYDKVRLQLRDNAKELGNGCFEFYHKCDNECMESVRNGTYDYPQYSEEARLKREEISGVKLESIGTYQILSIYSTVASSLVLAIMVAGLSLWMCSNGSLQCRICI

SEQ ID NO: 7725 - protein, 567 aa, Artificial Sequence; identical to SEQ ID NO: 7724
  derived and/or modified protein sequence (wt) from hemagglutinin__InfluenzaA__AEO89268

SEQ ID NO: 7726 - protein, 567 aa, Artificial Sequence
  derived and/or modified protein sequence (wt) from hemagglutinin__InfluenzaA__AEO89279
MEKIVLLLAIVSLVKSDQICIGYHANNSTEQVDTIMEKNVTVTHAQDILEKTHNGKLCDLDGVKPLILGDCSVAGWLLGNPMCDKFINVPEWSYIVEKANPANDLCYPGNFNDYEELKHLLSRINHFEKIQIIPKSSWSDHEASSGVSSACPYQGTPSFFRNVVWLIKKNNTYPTIKRSYNNTNQEDLLILWGIHHSNNAAEQEKLYQNPTTYISVGTSTLNQRLVPKIATRSKVNGQSGRMDFFWTILKPNDAINFESNGNFIAPEYAYKIVKKGDSAIMKSGVKYGNCNTKCQTPIGAINSSMPFHNIHPLTIGECPKYVKSNKLVLATGLRNSPLRERRRKRGLFGAIAGFIEGGWQGMVDGWYGYHHSNEQGSGYAADKESTQKAIDGVTNKVNSIIDKMNTQFEAVGREFNNLERRIENLNKKMEDGFLDVWTYNAELLVLMENERTLDFHDSNVKNLYDKVRLQLRDNAKELGNGCFEFYHKCDNECMESVRNGTYDYPQYSEEARLKREEISGVKLESIGTYQILSIYSTAASSLALAIMVAGLSLWMCSNGSLQCRICI

SEQ ID NO: 7727 - protein, 567 aa, Artificial Sequence
  derived and/or modified protein sequence (wt) from hemagglutinin__InfluenzaA__AEO89289
MEKIVLLLAIVSLAKSDQICIGYHANNSTEQVDTIMEKNVTVTHAQDILEKTHNGKLCDLDGVKPLILGDCSVAGWLLGNPMCDKFINVPEWSYIVEKVNPANDLCYPGNFNDYEELKHLLSRINHFEKIKIIPKSSWSDHEASSGVSSACPYQGTPSFFRNVVWLIKKNNTYPTIKRSYNNTNQEDLLILWGIHHSNNVAEQEKLYQNPTTYISVGTSTLNQRLVPKIATRSKVNGQSGRMDFFWTILKPNDTINFESNGNFIAPEYAYKIVKKGDSAIMKSGVEYGNCNTKCQTPIGAINSSMPFHNIHPLTIGECPKYVKSNKLVLATGLRNSPLRERRRKRGLFGAIAGFIEGGWQGMVDGWYGYHHSNEQGSGYAADKESTQKAIDGVTNKVNSIIDKMNTQFEAVGREFNNLERRIENLNKKMEDGFLDVWTYNAELLVLMENERTLDFHDSNVKNLYDKVRLQLRDNAKELGNGCFEFYHKCDNECMESVRNGTYDYPRYSEEARLKREEISGVKLESIGTYQILSIYSTAASSLALAIMVAGLSLWMCSNGSLQCRICI

SEQ ID NO: 7728 - protein, 567 aa, Artificial Sequence
  derived and/or modified protein sequence (wt) from hemagglutinin__InfluenzaA__AEO89300
MEKIVLLLAIVSLVKSDQICIGYHANNSTEQVDTIMEKNVTVTHAQDILEKTHNGKLCDLDGVKPLILRDCSVAGWLLGNPMCDEFINVPEWSYIVEKANPANDLCYPGNFNDYEELKHLLSRINHFEKIQIIPKSSWSDHEASSGVSSACPYQGTPSFFRNVVWLIKKNNTYPTIKRSYNNTNQENLLILWGIHHSNDAAEQIKLYQHPTTYISVGTSTLNQRLVPKIATRSKVNGQSGRMDFFWTILKPNDAINFESNGNFIAPEYAYKIVKEGDSAIMKSEVEYGNCNTKCQTPIGAINSSMPFHNIHPLTIGECPKYVKSNKLVLATGLRNSPLRERRRKRGLFGAIAGFIEGGWQGMVDGWYGYHHSNEQGSGYAADKESTQKAIDGVTNKVNSIIDKMNTQFEAVGREFNNLERRIENLNKKMEDGFLDVWTYNAELLVLMENERTLDFHDSNVKNLYDKVRLQLRDNAKELGNGCFEFYHKCDNECMESVRNGTYDYPQYSEEARLKREEINGVKLESMGTYQILSIYSTVASSLALAIMVAGLSFWMCSNGSLQCRICI

SEQ ID NO: 7729 - protein, 567 aa, Artificial Sequence
  derived and/or modified protein sequence (wt) from hemagglutinin__InfluenzaA__AEO89311
MEKIVLLFAIVSLVKSDHICIGYHANNSTEQVDTIMEKNVTVTHAQDILEKTHNGKLCDLNGVKPLILKDCSVAGWLLGNPMCDEFINVPEWSYIVEKANPANDLCYPGNFNDYEELKHLLSRINHFEKIQIIPKDSWSDHEASLGVSAACPYQGNSSFFRNVVWLIKKDNAYPTIKKSYNNTNQEDLLILWGIHHPNDEAEQTRLYQNPTTYISIGTSTLNQRLVPKIATRSKVNGQSGRIDFFWTILKPNDAIHFESNGNFIAPEYAYKIVKKGDSTIMKSEVEYGNCNTRCQTPMGAINSSMPFHNIHPLTIGECPKYVKSTKLVLATGLRNSPQRERRRKRGLFGAIAGFIEGGWQGMVDGWYGYHHSNEQGSGYAADKESTQKAIDGVTNKVNSIIDKMNTQFEAVGREFNKLERRIENLNKKMEDGFLDVWTYNAELLVLMENERTLDFHDSNVKNLYDKVRLQLRDNAKELGNGCFEFYHKCNNECMESVRNGTYDYPQYSEEARLKREEISGVKLESIGIYQILSIYSTVASSLVLAIMMAGLSLWMCSNGSLQCRICI

SEQ ID NO: 7730 - protein, 566 aa, Artificial Sequence; identical to SEQ ID NO: 1928
  derived and/or modified protein sequence (wt) from hemagglutinin__InfluenzaA__AEO99215

SEQ ID NO: 7731 - protein, 565 aa, Artificial Sequence
  derived and/or modified protein sequence (wt) from hemagglutinin__InfluenzaA__AEQ38187
MKVKLLVLLCTFTATYADTICIGYHANNSTDTVDTVLEKNVTVTHSVNLLENSHNGKLCLLKGIAPLQLGNCSVAGWILGNPECELLISKESWSYIVEKPNPENGTCYPGHFADYEELREQLSSVSSFERFEIFPKESSWPNHTVTGASASCSHNGENSFYRNLLWLTGKNGLYPNLSKSYANNKEKEVLVLWGVHHPPNIADQKTLYHTENAYVSVVSSHYSRKFTPEIAKRPKVRDQEGRINYYWTLLEPGDTIIFEANGNLIAPRYAFALSRGFGSGIINSNAPMDKCDAKCQTPQGAINSSLPFQNVHPVTIGECPKYVRSAKLRMVTGLRNIPSIQSRGLFGAIAGFIEGGWTGMVDGWYGYHHQNEQGSGYAADQKSTQNAINGITNKVNSVIEKMNTQFTAVGKEFNKLERRMENLNKKVDDGFIDIWTYNAELLVLLENERTLDFHDSNVKNLYEKVKSQLKNNAKEIGNGCFEFYHKCNDECMESVKNGTYDYPKYSEESKLNREKIDGVKLESMGVYQILAIYSTVASSLVLLVSLGAISFWMCSNGSLQCRICI

SEQ ID NO: 7732 - protein, 565 aa, Artificial Sequence; identical to SEQ ID NO: 7731
  derived and/or modified protein sequence (wt) from hemagglutinin__InfluenzaA__AEQ38188

SEQ ID NO: 7733 - protein, 565 aa, Artificial Sequence
  derived and/or modified protein sequence (wt) from hemagglutinin__InfluenzaA__AEQ38189
MKVKLLVLLCTFTATYADTICIGYHANNSTDTVDTVLEKNVTVTHSVNLLENSHNGKLCLLKGIAPLQLGNCSVAGWILGNPECELLISKESWSYIVEKPNPENGTCYPGHFADYEELREQLSSVSSFERFEIFPKESSWPNHTVTGVSASCSHNGENSFYRNLLWLTGKNGLYPNLSKSYANNKEKEVLVLWGVHHPPNIANQKTLYHTENAYVSVVSSHYSRKFTPEIAKRPKVRDQEGRINYYWTLLEPGDTIIFEANGNLIAPRYAFALSRGFGSGIINSNAPMDKCDAKCQTPQGAINSSLPFQNVHPVTIGECPKYVRSAKLRMVTGLRNIPSIQSRGLFGAIAGFIEGGWTGMVDGWYGYHHQNEQGSGYAADQKSTQNAINGITNKVNSVIEKMNTQFTAVGKEFNKLERRMENLNKKVDDGFIDIWTYNAELLVLLENERTLDFHDSNVKNLYEKVKSQLKNNAKEIGNGCFEFYHKCNDECMESVKNGTYDYPKYSEESKLNREKIDGVKLESMGVYQILAIYSTVASSLVLLVSLGAISFWMCSNGSLQCRICI

SEQ ID NO: 7734 - protein, 565 aa, Artificial Sequence
  derived and/or modified protein sequence (wt) from hemagglutinin__InfluenzaA__AEQ38190
MKVKLLVLLCTFTATYADTICIGYHANNSTDTVDTVLEKNVTVTHSVNLLENSHNGKLCLLKGIAPLQLGNCSVAGWILGNPECELLISKESWSYIVEKPNPENGTCYPGHFADYEELREQLSSVSSFERFEIFPKESSWPNHTVTGVSASCSHNGENSFYRNLLWLTGKNGLYPNLSKPYANNKEKEVLVLWGVHHPPNIAVQKTLYHTENAYVSVVSSHYSRKFTPEIAKRPKVRDQEGRINYYWTLLEPGDTIIFEANGNLIAPRYAFALSRGFGSGIINSNAPMDKCDAKCQTPQGAINSSLPFQNVHPVTIGECPKYVRSAKLRMVTGLRNIPSIQSRGLFGAIAGFIEGGWTGMVDGWYGYHHQNEQGSGYAADQKSTQNAINGITNKVNSVIEKMNTQFTAVGKEFNKLERRMENLNKKVDDGFIDIWTYNAELLVLLENERTLDFHDSNVKNLYEKVKSQLKNNAKEIGNGCFEFYHKCNDECMESVKNGTYDYPKYSEESKLNREKIDGVKLESMGVYQILAIYSTVASSLVLLVSLGAISFWMCSNGSLQCRICI

SEQ ID NO: 7735 - protein, 565 aa, Artificial Sequence; identical to SEQ ID NO: 3626
  derived and/or modified protein sequence (wt) from hemagglutinin__InfluenzaA__AEQ38191

SEQ ID NO: 7736 - protein, 565 aa, Artificial Sequence
  derived and/or modified protein sequence (wt) from hemagglutinin__InfluenzaA__AEQ38192
MKVKLLVLLCTFTATYADTICIGYHANNSTDTVDTVLEKNVTVTHSVNLLENSHNGKLCLLKGIAPLQLGNCSVAGWILGNPECELLISKESWSYIVEKPNPENGTCYPGHFADYEELREQLSSVSSFERFEIFPKESSWPNHTVTGVSASCSHNGESSFYRNLLWLTGKNGLYPNLSKSYANNKEKEVLVLWGVHHPPSISDQKTLYHTENAYVSVVSSHYSRKFTPEITKRPKVRDQEGRINYYWTLLEPGDTIIFEANGNLIAPRYAFALSRGFGSGIINSNTPMDKCDTKCQTPQGAINSSLPFQNVHPVTIGECPKYVRSAKLRMVTGLRNIPSIQSRGLFGAIAGFIEGGWTGMVDGWYGYHHQNEQGSGYAADQKSTQNAINGITNKVNSVIEKMNTQFTAVGKEFNKLERRMENLNKKVDDGFIDIWTYNAELLVLLENERTLDFHDSNVKNLYEKVKSQLKNNAKEIGNGCFEFYHKCNDECMESVKNGTYDYPKYSEESKLNREKIDGVKLESMGVYQILAIYSTVASSLVLLVSLGAISFWMCSNGSLQCRICI

SEQ ID NO: 7737 - protein, 565 aa, Artificial Sequence
  derived and/or modified protein sequence (wt) from hemagglutinin__InfluenzaA__AEQ38193
MKVKLLILLCTFTATYADTICIGYHANNSTDTVDTVLEKNVTVTHSVNLLENSHNGKLCLLKGIAPLQLGNCSVAGWILGNPECELLISKESWSYIVEKPNPENGTCYPGHFADYEELREQLSSVSSFERFEIFPKESSWPNHTVTGVSASCSHNGESSFYRNLLWLTGKNGLYPNLSKSYANNKEKEVLVLWGVHHPPNIVDQKTLYRTENAYVSVVSSHYSRKFTPEIAKRPKVRDQEGRINYYWTLLEPGDTIIFEANGNLIAPRYAFALSRGFGSGIINSNAPMDKCDAKCQTPQGAINSSLPFQNVHPVTIGECPKYVRSAKLRMVTGLRNIPSIQSRGLFGAIAGFIEGGWTGMVDGWYGYHHQNEQGSGYAADQKSTQNAINGITNKVNSVIEKMNTQFTAVGKEFNKLERRMENLNKKVDDGFIDIWTYNAELLVLLENERTLDFHDSNVKNLYEKVKSQLKNNAKEIGNGCFEFYHKCNDECMESVKNGTYDYPKYSEESKLNREKIDGVKLESMGVYQILAIYSTVASSLVLLVSLGAISFWMCSNGSLQCRICI

SEQ ID NO: 7738 - protein, 565 aa, Artificial Sequence
  derived and/or modified protein sequence (wt) from hemagglutinin__InfluenzaA__AEQ38194
MKVKLLVLLCTFTATYADTICIGYHANNSTDTVDTVLEKNVTVTHSVNLLENSHNGKLCLLKGIAPLQLGNCSVAGWILGNPECELLISKESWSYIVEKPNPENGTCYPGHFADYEELREQLSSVSSFERFEIFPKESSWPNHTVTGVSASCSHNGESSFYRNLLWLTGKNGLYPNLSKSYANNKEKEVLVLWGVHHPPSISDQKTLYHTENAYVSVVSSHYSRKFTPEIAKRPKVRDQEGRINYYWTLLEPGDTIIFEASGNLIAPRYAFALSRGFGSGIINSNAPMDKCDAKCQTPQGAINSSLPFQNVHPVTIGECPKYVRSAKLRMVTGLRNIPSIQSRGLFGAIAGFIEGGWTGMVDGWYGYHHRNEQGSGYAADQKSTQNAINGITNKVNSVIEKMNTQFTAVGKEFNKLERRMENLNKRVDDGFIDIWTYNAELLVLLENERTLDFHDSNVKNLYEKVKSQLKNNAKEIGNGCFEFYHKCNDECMESVKNGTYDYPKYSEESKLNREKIDGVKLESMGVYQILAIYSTVASSLVLLVSLGAISFWMCSNGSLQCRICI

SEQ ID NO: 7739 - protein, 565 aa, Artificial Sequence
  derived and/or modified protein sequence (wt) from hemagglutinin__InfluenzaA__AEQ38195
MKVKLLVLLCTFTATYADTICIGYHANNSTDTVDTVLEKNVTVTHSVNLLENSHNGKLCLLKGIAPLQLGNCSVAGWILGNPECELLISKESWSYIVEKPNPENGTCYPGHFADYEELREQLSSVSSFERFEIFPKESSWPNHTVTGASASCSHNGENSFYRNLLWLTGKNGLYPNLSKSYANNKEKEVLVLWGVHHPPNIANQKTLYHTENAYVSVVSSHYSRKFTPEIAKRPKVRDQEGRINYYWTLLEPGDTIIFEANGNLIAPRYAFALSRGFGSGIINSNAPMDKCDAKCQTPQGAINSSLPFQNVHPVTIGECPKYVRSAKLRMVTGLRNIPSIQSRGLFGAIAGFIEGGWTGMVDGWYGYHHQNEQGSGYAADQKSTQNAINGITNKVNSVIEKMNTQFTAMGKEFNKLERRMENLNKKVDDGFIDIWTYNAELLVLLENERTLDFHDSNVKNLYEKVKSQLKNNAKEIGNGCFEFYHKCNDECMESVKNGTYDYPKYSEESKLNREKIDGVKLESMGVYQILAIYSTVASSLVLLVSLGAISFWMCSNGSLQCRICI

SEQ ID NO: 7740 - protein, 565 aa, Artificial Sequence
  derived and/or modified protein sequence (wt) from hemagglutinin__InfluenzaA__AEQ38196
MKVKLLVLLCTFTATYADTICIGYHANNSTDTVDTVLEKNVTVTHSVNLLENSHNGKLCLLKGIAPLQLGNCSVAGWILGNPECELLISKESWSYIVEKPNPENGTCYPGHFADYEELREQLSSVSSFERFEIFPKESSWPNHTVTGASASCSHNGENSFYRNLLWLTGKNGLYPNLSKSYANNKEKEVLVLWGVHHPPNIADQKTLYHTENAYVSVVSSHYSRKFTPEIAKRPKVRDQEGRINYYWTLLEPGDTIIFEANGNLIAPRYAFALSRGFGSGIINSNAPMDKCDAKCQTPQGAINSSLPFQNVHPVTIGECPKYVRSAKLRMVTGLRNIPSIQSRGLFGAIAGFIEGGWTGMVDGWYGYHHQNEQGSGYAADQKSTQNAINGITNKVNSVIEKMNTQFTAVGKEFNKLERRMENLNKKVDDGFIDIWTYNAELLVLLENERTLDFHDSNVKNLYEKVKSQLKNNAKEIGNGCFEFYHKCNDECMESVKNGTYEYPKYSEESKLNREKIDGVKLESMGVYQILAIYSTVASSLVLLVSLGAISFWMCSNGSLQCRICI

SEQ ID NO: 7741 - protein, 565 aa, Artificial Sequence; identical to SEQ ID NO: 7731
  derived and/or modified protein sequence (wt) from hemagglutinin__InfluenzaA__AEQ38197

SEQ ID NO: 7742 - protein, 565 aa, Artificial Sequence; identical to SEQ ID NO: 7731
  derived and/or modified protein sequence (wt) from hemagglutinin__InfluenzaA__AEQ38198

SEQ ID NO: 7743 - protein, 566 aa, Artificial Sequence; identical to SEQ ID NO: 7050
  derived and/or modified protein sequence (wt) from hemagglutinin__InfluenzaA__AEQ62909

SEQ ID NO: 7744 - protein, 566 aa, Artificial Sequence
  derived and/or modified protein sequence (wt) from hemagglutinin__InfluenzaA__AEQ62910
MKAILVVMLYTFATANADTLCIGYHANNSTDTVDTVLEKNVTVTHSVNLLEDKHNGKLCKLRGVAPLHLGKCNIAGWILGNPECESLSTASSWSYIVETASPDNGTCYPGDFIDYEELREQLSSVSSFERFEIFPKTSSWPNHDSNKGVTAACPHAGAKSFYKNLMWLVKKGNSYPKLSKSYINDKGKEVLVLWGIHHPPTSADQQSLYQNADAYVFVGTSRYSKKFKPEIAIRPKVRGQEGRMNYYWTLVEPGDKITFEATGNLVVPRYAFAMERNAGSGIIISDTPVHDCNTTCQSPKGAINTSLPFQNIHPITIGECPKYVKSTKLRLATGLRNVPSVQSRGLFGAIAGFIEGGWTGMVDGWYGYHHQNEQGSGYAADLKSTQNAIDEITNKVNSVIEKMNTQFTAVGKEFNQLEKRIENLNKKVDDGFLDIWTYNAELLVLLENERTLDYHDSNVKNLYEKVRSQLKNNAKEIGNGCFEFYHKCDNTCMESVKNGTYDYPKYSEEAKLNREEIDGVKLESTRIYQILAIYSTVASSLVLVVSLGAISFWMCSNGSLQCRICI

SEQ ID NO: 7745 - protein, 566 aa, Artificial Sequence; identical to SEQ ID NO: 6867
  derived and/or modified protein sequence (wt) from hemagglutinin__InfluenzaA__AEQ62911

SEQ ID NO: 7746 - protein, 566 aa, Artificial Sequence; identical to SEQ ID NO: 7050
  derived and/or modified protein sequence (wt) from hemagglutinin__InfluenzaA__AEQ62912

SEQ ID NO: 7747 - protein, 566 aa, Artificial Sequence
  derived and/or modified protein sequence (wt) from hemagglutinin__InfluenzaA__AEQ62915
MKAILVVLLYTFATANADTLCIGYHANNSTDTVDTVLEKNVTVTHSVNLLEDKHNGKLCKLRGVAPLHLGKCNIAGWILGNPECESLSTASSWSYIVETSSSDNGTCYPGDFINYEELREQLSSVSSFERFEIFPKTSSWPNHDSNKGVTAACPHAGAKSFYKNLIWLVKKGNSYPKLSKSYINDKGKEVLVLWGIHHPSTTADQQSLYQNADAYVFVGTSRYSKKFKPEIAIRPKVRDQEGRMNYYWTLVEPGDKITFEATGNLVVPRYAFAMERNAGSGIIISDTPVHDCNTTCQTPKGAINTSLPFQNIHPITIGKCPKYVKSTKLRLATGLRNVPSIQSRGLFGAIAGFIEGGWTGMVDGWYGYHHQNEQGSGYAADLKSTQNAIDKITNKVNSVIEKMNTQFTAVGKEFNHLEKRIENLNKKVDDGFLDIWTYNAELLVLLENERTLDYHDSNVKNLYEKVRNQLKTNAKEIGNGCFEFYHKCDNTCMESVKNGTYDYPKYSEEAKLNREEIDGVKLESTRIYQILAIYSTVASSLVLVVSLGAISFWMCSNGSLQCRICI

SEQ ID NO: 7748 - protein, 566 aa, Artificial Sequence; identical to SEQ ID NO: 3411
  derived and/or modified protein sequence (wt) from hemagglutinin__InfluenzaA__AER08646

SEQ ID NO: 7749 - protein, 566 aa, Artificial Sequence; identical to SEQ ID NO: 5419
  derived and/or modified protein sequence (wt) from hemagglutinin__InfluenzaA__AER08648

SEQ ID NO: 7750 - protein, 566 aa, Artificial Sequence
  derived and/or modified protein sequence (wt) from hemagglutinin__InfluenzaA__AER08652
MKTIIALSYILCLVFAQKLPGNDNSTATLCLGHHAVPNGTIVKTITNDQIEVTNATELVQSSSTGEICDSPHQILDGKNCTLIDALLGDPQCDGFQNKKWDLFVERSKAYSNCYPYDVPDYASLRSLVASSGTLEFNNESFNWTGVTQNGTSSACIRRSKNSFFSRLNWLTHLNFKYPALNVTMPNNEQFDKLYIWGVHHPGTDKDQIFLYAQASGRITVSTKRSQQTAIPNIGSRPRVRNIPSRISIYWTIVKPGDILLINSTGNLIAPRGYFKIRSGKSSIMRSDAPIGKCNSECITPNGSIPSDKPFQNVNRITYGACPRYVKQNTLKLATGMRNVPEKQTRGIFGAIAGFIENGWEGMVDGWYGFRHQNSEGRGQAADLKSTQAAIDQINGKLNRLIGKTNEKFHQIEKEFSEVEGRIQDLEKYVEDTKIDLWSYNAELLVALENQHTIDLTDSEMNKLFEKTKKQLRENAEDMGNGCFKIYHKCDNACIGSIRNGTYDHDVYRDEALNNRFQIKGVELKSGYKDWILWISFAISCFLLCVALLGFIMWACQKGNIRCNICI

SEQ ID NO: 7751 - protein, 566 aa, Artificial Sequence; identical to SEQ ID NO: 7750
  derived and/or modified protein sequence (wt) from hemagglutinin__InfluenzaA__AER08654

SEQ ID NO: 7752 - protein, 566 aa, Artificial Sequence
  derived and/or modified protein sequence (wt) from hemagglutinin__InfluenzaA__AER08656
MKTIIALSYILCLVFAQKLPGNDNSTATLCLGHHAVPNGTIVKTITNDQIEVTNATELVQSSSTGEICDSPHQILDGKNCTLIDALLGDPQCDGFQNKKWDLFVERSKAYSNCYPYDVPDYASLRSLVASSGTLEFNNESFNWTGVTQNGTSSACIRRSKNSFFSRLNWLTHLNFKYPALNVTMPNNEQFDKLYIWGVHHPGTDKDQIFLYAQASGRITVSTKRSQQTVIPNIGSRPRVRNIPSRISIYWTIVKPGDILLINSTGNLIAPRGYFKMQSGKSSIMRSDAPIGKCNSECITPNGSIPNDKPFQNVNRITYGACPRYVKQNTLKLATGMRNVPEKQTRGIFGAIAGFIENGWEGMVDGWYGFRHQNSEGRGQAADLKSTQAAIDQINGKLNRLIGKTNEKFHQIEKEFSEVEGRIQDLEKYVEDTKIDLWSYNAELLVALENQHTIDLTDSEMNKLFEKTKKQLRENAEDMGNGCFKIYHKCDNACIGSIRNGTYDHDVYRDEALNNRFQIKGVELKSGYKDWILWISFAISCFLLCVALLGFIMWACQKGNIRCNICI

SEQ ID NO: 7753 - protein, 566 aa, Artificial Sequence
  derived and/or modified protein sequence (wt) from hemagglutinin__InfluenzaA__AER08660
MKTIIALSYILCLVFAQKLPGNDNSTATLCLGHHAVPNGTIVKTITNDQIEVTNATELVQSSSTGEICNSPHQILDGENCTLIDALLGDPQCDGFQNKKWDLFVERSKAYSNCYPYDVPDYASLRSLVASSGTLEFNNESFNWTGVTQNGTSSACIRRSNNSFFSRLNWLTHLNFKYPALNVTMPNNEQFDKLYIWGVHHPGTDKDQIFLYAQASGRITVSTKRSQQAVIPNIGSRPRVRNIPSRISIYWTIVKPGDILLINSTGNLIAPRGYFKIRSGKSSIMRSDAPIGKCNSACITPNGSIPNDKPFQNVNRITYGACPRYVKQNTLKLATGMRNVPEKQTRGIFGAIAGFIENGWEGMVDGWYGFRHQNSEGRGQAADLKSTQAAIDQINGKLNRLIGKTNEKFHQIEKEFSEVEGRIQDLEKYVEDTKIDLWSYNAELLVALENQHTIDLTDSEMNKLFEKTKKQLRENAEDMGNGCFKIYHKCDNACIGSIRNGTYDHDVYRDEALNNRFQIKGVELKSGYKDWILWISFAISCFLLCVALLGFIMWACQKGNIRCNICI

SEQ ID NO: 7754 - protein, 566 aa, Artificial Sequence
  derived and/or modified protein sequence (wt) from hemagglutinin__InfluenzaA__AER08664
MKTIIALSYILCLVFAQKLPGNDNSTATLCLGHHAVPNGTIVKTITNDQIEVTNATELVQSSSTGEICDSPHQILDGENCTLIDALLGDPQCDGFQNKKWDLFVERSKAYSNCYPYDVPDYASLRSLVASSGTLEFNSESFNWTGVTQNGTSSACIRRSNNSFFSRLNWLTHLNFKYPALNVTMPNNEQFDKLYIWGVHHPGTDKDQIFLYAQASGRITVSTKRSQQAVIPNIGSRPRVRNIPSRISIYWTIVKPGDILLINSTGNLIAPRGYFKIRSGKSSIMRSDAPIGKCNSECITPNGSIPNDKPFQNVNRITYGACPRYVKQSTLKLATGMRNVPEKQTRGIFGAIAGFIENGWEGMVDGWYGFRHQNSEGRGQAADLKSTQAAIDQINGKLNRLIGKTNEKFHQIEKEFSEVEGRIQDLEKYVEDTKIDLWSYNAELLVALENQHTIDLTDSEMNKLFEKTKKQLRENAEDMGNGCFKIYHKCDNACIGSIRNGTYDHDVYRDEALNNRFQIKGVELKSGYKDWILWISFAISCFLLCVALLGFIMWACQKGNIRCNICI

SEQ ID NO: 7755 - protein, 566 aa, Artificial Sequence; identical to SEQ ID NO: 6982
  derived and/or modified protein sequence (wt) from hemagglutinin__InfluenzaA__AER08668

SEQ ID NO: 7756 - protein, 566 aa, Artificial Sequence
  derived and/or modified protein sequence (wt) from hemagglutinin__InfluenzaA__AER08670
MKTIIALSYILCLVFAQKLPGNDNSTATLCLGHHAVPNGTIVKTITNDQIEVTNATELVQSSSTGEICNSPHQILDGENCTLIDALLGDPQCDGFQNKKWDLFVERSKAHSNCYPYDVPDYASLRSLVASSGTLEFNNESFNWTGVTQNGTSSACIRRSNNSFFSRLNWLTHLNFKYPALNVTMPNNEQFDKLYIWGVHHPGTDKDQIFLYAQASGRITVSTKRSQQAVIPNIGSRPRVRNIPSRVSIYWTIVKPGDILLINSTGNLIAPRGYFKIRSGKSSIMKSDAPIGKCNSACITPNGSIPNDKPFQNVNRITYGACPRYVKQNTLKLATGMRNVPEKQTRGIFGAIAGFIENGWEGMVDGWYGFRHQNSEGRGQAADLKSTQAAIDQINGKLNRLIGKTNEKFHQIEKEFSEVEGRIQDLEKYVEDTKIDLWSYNAELLVALENQHTIDLTDSEMNKLFEKTKKQLRENAEDMGNGCFKIYHKCDNACIGSIRNGTYDHDVYRDEALNNRFQIKGVELKSGYKDWILWISFAISCFLLCVALLGFIMWACQKGNIRCNICI

SEQ ID NO: 7757 - protein, 566 aa, Artificial Sequence
  derived and/or modified protein sequence (wt) from hemagglutinin__InfluenzaA__AER08672
MKTIIALSYILCLVFAQKLPGNDNSTATLCLGHHAVPNGTIVKTITNDQIEVTNATELVQSSSTGGICDSPHQILDGGNCTLIDALLGDPQCDGFQNKKWDLFVERSKAYSNCYPYDVPDYASLRSLVASSGTLEFNSESFNWTGVTQNGTSSACIRRSNNSFFSRLNWLTHLNFKYPALNVTMPNNEQFDKLYIWGVHHPGTDKDQIFLYAQASGRITVSTKRSQQAVIPNIGSRPRVRNIPSRISIYWTIVKPGDILLINSTGNLIAPRGYFKIRSGKSSIMRSDAPIGKCNSECITPNGSIPNDKPFQNVNRITYGACPRYVKQSTLKLATGMRNVPEKQTRGIFGAIAGFIENGWEGMVDGWYGFRHQNSEGRGQAADLKSTQAAIDQINGKLNRLIGKTNEKFHQIEKEFSEVEGRIQDLEKYVEDTKIDLWSYNAELLVALENQHTIDLTDSEMNKLFEKTKKQLRENAEDMGNGCFKIYHKCDNACIGSIRNGTYDHDVYRDEALNNRFQIKGVELKSGYKDWILWISFAISCFLLCVALLGFIMWACQKGNIRCNICI

SEQ ID NO: 7758 - protein, 566 aa, Artificial Sequence
  derived and/or modified protein sequence (wt) from hemagglutinin__InfluenzaA__AER08674
MKTIIALSYILCLVFAQKLPGNDNSTATLCLGHHAVPNGTMVKTITNDQIEVTNATELVQSSSTGEICNSPHQILDGENCTLIDALLGDPQCDGFQNKKWDLFVERSKAHSNCYPYDVPDYASLRSLVASSGTLEFNNESFNWTGVTQNGTSSACIRRSNNSFFSRLNWLTHLNFKYPALNVTMPNNEQFDKLYIWGVHHPGTDKDQIFLYAQASGRITVSTKRSQQAVIPNIGSRPRVRNIPSRVSIYWTIVKPGDILLINSTGNLIAPRGYFKIRSGKSSIMRSDAPIGKCNSACITPNGSIPNDKPFQNVNRITYGACPRYVKQNTLKLATGMRNVPEKQTRGIFGAIAGFIENGWEGMVDGWYGFRHQNSEGRGQAADLKSTQAAIDQINGKLNRLIGKTNEKFHQIEKEFSEVEGRIQDLEKYVEDTKIDLWSYNAELLVALENQHTIDLTDSEMNKLFEKTKKQLRENAEDMGNGCFKIYHKCDNACIGSIRNGTYDHDVYRDEALNNRFQIKGVELKSGYKDWILWISFAISCFLLCVALLGFIMWACQKGNIRCNICI

SEQ ID NO: 7759 - protein, 566 aa, Artificial Sequence; identical to SEQ ID NO: 6982
  derived and/or modified protein sequence (wt) from hemagglutinin__InfluenzaA__AER08676

SEQ ID NO: 7760 - protein, 566 aa, Artificial Sequence; identical to SEQ ID NO: 6982
  derived and/or modified protein sequence (wt) from hemagglutinin__InfluenzaA__AER08678

SEQ ID NO: 7761 - protein, 566 aa, Artificial Sequence
  derived and/or modified protein sequence (wt) from hemagglutinin__InfluenzaA__AER08680
MKTIIALSYILCLVFAQKLPGNDNSTATLCLGHHAVPNGTIVKTITNDQIEVTNATELVQSSSAGEICDSPHQILDGENCTLIDALLGDPQCDGFQNKKWDLFVERSRAHSNCYPYDVPDYASLRSLVASSGTLEFNNESFNWTGVTQNGTSSACIRRSNNSFFSRLNWLTHLNFKYPALNVTMPNNEQFDKLYIWGVHHPGTDKDQIFLYAQASGRITVSTKRSQQAVIPNIGSRPRVRNIPSRISIYWTIVKPGDILLINSTGNLIAPRGYFKIRSGKSSIMRSDAPIGKCNSECITPNGSIPNDKPFQNVNRITYGACPRYVKQSTLKLATGMRNVPEKQTRGIFGAIAGFIENGWEGMMDGWYGFRHQNSEGRGQAADLKSTQAAIDQINGKLNRLIGKTNEKFHQIEKEFSEVEGRIQDLEKYVEDTKIDLWSYNAELLVALENQHTIDLTDSEMNKLFEKTKKQLRENAEDMGNGCFKIYHKCDNACIGSIRNGTYDHDVYRDEALNNRFQIKGVELKSGYKDWILWISFAISCFLLCVALLGFIMWACQKGNIRCNICI

SEQ ID NO: 7762 - protein, 566 aa, Artificial Sequence
  derived and/or modified protein sequence (wt) from hemagglutinin__InfluenzaA__AER08682
MKTVIALSYILCLVFAQKLPGNDNSTATLCLGHHAVPNGTIVKTITNDQIEVTNATELVQSSSTGEICNSPHQILDGENCTLIDALLGDPQCDGFQNKKWDLFVERSKAHSNCYPYDVPDYASLRSLVASSGTLEFNNESFNWTGVTQNGTSSACIRRSNNSFFSRLNWLTHLNFKYPALNVTMPNNEQFDKLYIWGVHHPGTDKDQIFLYAQASGRITVSTKRSQQAVIPNIGSRPRVRNIPSRVSIYWTIVKPGDILLINSTGNLIAPRGYFKIRSGKSSIMRSDAPIGKCNSACITPNGSIPNDKPFQNVNRITYGACPRYVKQNTLKLATGMRNVPEKQTRGIFGAIAGFIENGWEGMVDGWYGFRHQNSEGRGQAADLKSTQAAIDQINGKLNRLIGKTNEKFHQIEKEFSEVEGRIQDLEKYVEDTKIDLWSYNAELLVALENQHTIDLTDSEMNKLFEKTKKQLRENAEDMGNGCFKIYHKCDNACIGSIRNGTYDHDVYRDEALNNRFQIKGVELKSGYKDWILWISFAISCFLLCVALLGFIMWACQKGNIRCNICI

SEQ ID NO: 7763 - protein, 566 aa, Artificial Sequence
  derived and/or modified protein sequence (wt) from hemagglutinin__InfluenzaA__AER08684
MKTIIALSYILCLVFAQKLPGNDNSTATLCLGHHAVPNGTIVKTITNDQIEVTNATELVQSSSTGEICNSPHQILDGENCTLIDALLGDPQCDGFQNKKWDLFVERSKAHSNCYPYDVPDYASLRSLVASSGTLEFNNESFNWTGVTQNGTSSACIRRSNNSFFSRLNWLTHLNFKYPALNVTMPNNEQFDKLYIWGVHHPGTDKDQIFLYAQASGRITVSTKRSQQAVIPNIGSRPRVRNIPSRVSIYWTIVKPGDILLINSTGNLIAPRGYFKIRSGKSSIMRSDAPIGKCNSTCITPNGSIPNDKPFQNVNRITYGACPRYVKQNTLKLATGMRNVPEKQTRGIFGAIAGFIENGWEGMVDGWYGFRHQNSEGRGQAADLKSTQAAIDQINGKLNRLIGKTNEKFHQIEKEFSEVEGRIQDLEKYVEDTKIDLWSYNAELLVALENQHTIDLTDSEMNKLFEKTKKQLRENAEDMGNGCFKIYHKCDNACIGSIRNGTYDHDVYRDEALNNRFQIKGVELKSGYKDWILWISFAISCFLLCVALLGFIMWACQKGNIRCNICI

SEQ ID NO: 7764 - protein, 566 aa, Artificial Sequence
  derived and/or modified protein sequence (wt) from hemagglutinin__InfluenzaA__AER08686
MKTIIALSYILCLVFAQKLPGNDNSTATLCLGHHAVPNGTIVKTITNDQIEVTNATELVQSSSTGEICNSPHQILDGENCTLIDALLGDPQCDGFQNKKWDLFVERSKAHSNCYPYDVPDYASLRSLVASSGTLEFNNESFNWTGVTQNGTSSACIRRSNNSFFSRLNWLTHLNFKYPALNVTMPNNEQFDKLYIWGVHHPGTDKDQIFLYAQASGRITVSTKRSQQAVIPNIGSRPRVRNIPSRVSIYWTIVKPGDILLINSTGNLIAPRGYFKIRSGKSSIMRSDAPIGKCNSTCITPNGSIPNDKPFQNVNRITYGACPRYVKQNTLKLATGMRNVPEKQTRGIFGAIAGFIENGWEGMVDGWYGFRHQNSEGRGQAADLKSTQAAIDQINGKLNRLIGKTNEKFHQIEKEFSEVEGRIQDLEKYIEDTKIDLWSYNAELLVALENQHTIDLTDSEMNKLFEKTKKQLRENAEDMGNGCFKIYHKCDNACIGSIRNGTYDHDVYRDEALNNRFQIKGVELKSGYKDWILWISFAISCFLLCVALLGFIMWACQKGNIRCNICI

SEQ ID NO: 7765 - protein, 566 aa, Artificial Sequence; identical to SEQ ID NO: 6982
  derived and/or modified protein sequence (wt) from hemagglutinin__InfluenzaA__AER08688

SEQ ID NO: 7766 - protein, 566 aa, Artificial Sequence
  derived and/or modified protein sequence (wt) from hemagglutinin__InfluenzaA__AER08690
MKTIIALSYILCLVFAQKLPENDNSTATLCLGHHAVPNGTIVKTITNDQIEVTNATELVQSSSTGEICNSPHQILDGENCTLIDALLGDPQCDGFQNKKWDLFVERSKAHSNCYPYDVPDYASLRSLVASSGTLEFNNESFNWTGVTQNGTSSACIRRSNNSFFSRLNWLTHLNFKYPALNVTMPNNEQFDKLYIWGVHHPGTDKDQIFLYAQASGRITVSTKRSQQAVIPNIGSRPRVRNIPSRVSIYWTIVKPGDILLINSTGNLIAPRGYFKIRSGKSSIMRSDAPIGKCNSTCITPNGSIPNDKPFQNVNRITYGACPRYVKQNTLKLATGMRNVPEKQTRGIFGAIAGFIENGWEGMVDGWYGFRHQNSEGRGQAADLKSTQAAIDQINGKLNRLIGKTNEKFHQIEKEFSEVEGRIQDLEKYVEDTKIDLWSYNAELLVALENQHTIDLTDSEMNKLFEKTKKQLRENAEDMGNGCFKIYHKCDNACIGSIRNGTYDHDVYRDEALNNRFQIKGVELKSGYKDWILWISFAISCFLLCVVLLGFIMWACQKGNIRCNICI

SEQ ID NO: 7767 - protein, 566 aa, Artificial Sequence; identical to SEQ ID NO: 6982
  derived and/or modified protein sequence (wt) from hemagglutinin__InfluenzaA__AER08692

SEQ ID NO: 7768 - protein, 566 aa, Artificial Sequence
  derived and/or modified protein sequence (wt) from hemagglutinin__InfluenzaA__AER08698
MKTTIALSHILCLVFAQKLPGNDNSTATLCLGHHAVPNGTIVKTITNDQIEVTNATELVQSSSAGEICDSPHQILDGENCTLIDALLGDPQCDGFQNKKWDLFVERSRAYSNCYPYDVPDYASLRSLVASSGTLEFNNESFNWTGVTQNGTSSACIRRSNNSFFSRLNWLTHLNFKYPALNVTMPNNEQFDKLYIWGVHHPGTDKDQIFLYAQASGRITVSTKRSQQAVIPNIGSRPRVRNIPSRISIYWTIVKPGDILLINSTGNLIAPRGYFKIRSGKSSIMRSDAPIGKCNSECITPNGSIPNDKPFQNVNRITYGACPRYVKQSTLKLATGMRNVPEKQTRGIFGAIAGFIENGWEGMVDGWYGFRHQNSEGRGQAADLKSTQAAIDQINGKLNRLIGKTNEKFHQIEKEFSEVEGRIQDLEKYVEDTKIDLWSYNAELLVALENQHTIDLTDSEMNKLFEKTKKQLRENAEDMGNGCFKIYHKCDNACIGSIRNGTYDHDVYRDEALNNRFQIKGVELKSGYKDWILWISFAISCFLLCVALLGFIMWACQKGNIRCNICI

SEQ ID NO: 7769 - protein, 566 aa, Artificial Sequence; identical to SEQ ID NO: 6982
  derived and/or modified protein sequence (wt) from hemagglutinin__InfluenzaA__AER08700

SEQ ID NO: 7770 - protein, 566 aa, Artificial Sequence
  derived and/or modified protein sequence (wt) from hemagglutinin__InfluenzaA__AER92712
MKAILVVLLYTFATANADTLCIGYHANNSTDTVDTVLEKNVTVTHSVDLLEDKHNGKLCKLRGVAPLHLGKCNIAGWILGNPECESLSTASSWSYIVETSNSDNGTCYPGDFIDYEELREQLSSVSSFERFEIFPKTSSWPNHDSNKGVTAACPHAGAKSFYKNLIWLVKKGNSYPKLNKSYINDKGKEVLVLWGIHHPSTSTDQQSLYQNADAYVFVGTSRYSKKFKPEIAIRPKVRNQEGRMNYYWTLVEPGDKITFEATGNLVVPRYAFTIERNAGSGIIISDTPIHDCNTTCQTPKGAINTSLPFQNIHPITIGKCPKYVKSTKLRLATGLRNVPSIQSRGLFGAIAGFIEGGWTGMVDGWYGYHHQNEQGSGYAADLKSTQNAIDEITNKVNSVIEKMNTQFTAVGKEFNHLEKRIENLNKKVDDGFLDIWTYNAELLVLLENERTLDYHDSNVKNLYEKVRSQLKNNAKEIGNGCFEFYHKCDNTCMESVKNGTYDYPKYSEEAKLNREEIDGVKLESTRIYQILAIYSTVASSLVLVVSLGAISFWMCSNGSLQCRICI

SEQ ID NO: 7771 - protein, 566 aa, Artificial Sequence; identical to SEQ ID NO: 5533
  derived and/or modified protein sequence (wt) from hemagglutinin__InfluenzaA__AET10090

SEQ ID NO: 7772 - protein, 566 aa, Artificial Sequence; identical to SEQ ID NO: 5533
  derived and/or modified protein sequence (wt) from hemagglutinin__InfluenzaA__AET10091

SEQ ID NO: 7773 - protein, 566 aa, Artificial Sequence; identical to SEQ ID NO: 5533
  derived and/or modified protein sequence (wt) from hemagglutinin__InfluenzaA__AET10092

SEQ ID NO: 7774 - protein, 566 aa, Artificial Sequence
  derived and/or modified protein sequence (wt) from hemagglutinin__InfluenzaA__AET10094
MKTIIALSCILCLVFAQKLPGNDNSTATLCLGHHAVPNGTIVKTITNDQIEVTNATELVQSSSTGEICDSPHQILDGENCTLIDALLGDPQCDGFQNKKWDLFVERSKAYSSCYPYDVPDYASLRSLVASSGTLEFNNESFNWTGVTQNGTSSACIRRSNNSFFSRLNWLTHLNFKYPALNVTMPNNEQFDKLYIWGVHHPGTDKDQIFLYAQASGRITVSTKRSQQAVIPNIGSRPRVRNIPSRISIYWTIVKPGDILLINSTGNLIAPRGYFKIRSGKSSIMRSDAPIGKCNSECITPNGSIPNDKPFQNVNRITYGACPRYVKQSTLKLATGMRNVPEKQTRGIFGAIAGFIENGWEGMVDGWYGFRHQNSEGRGQAADLKSTQAAIDQINGKLNRLIGKTNEKFHQIEKEFSEVEGRIQDLEKYVEDTKIDLWSYNAELLVALENQHTIDLTDSEMNKLFEKTKKQLRENAEDMGNGCFTIYHKCDNACIGSIRNGTYDHNVYRDEALNNRFQIKGVELKSGYKDWILWISFAISCFLLCVALLGFIMWACQKGNIRCNICI

SEQ ID NO: 7775 - protein, 566 aa, Artificial Sequence
  derived and/or modified protein sequence (wt) from hemagglutinin__InfluenzaA__AET10095
MKTIIALSYILCLVFAQKLPGNDNSTATLCLGHHAVPNGTIVKTITNDQIEVTNATELVQSSSTGEICDSPHQILDGENCTLIDALLGDPQCDGFQNKKWDLFVERSKAYSNCYPYDVPDYASLRSLVASSGTLEFNNESFNWTGVTQNGTSSACIRRSNNSFFSRLNWLTHLNFKYPALNVTMPNNEQFDKLYIWGVHHPGTDKDQIFLYAQASGRITVSTKRSQQAVIPNIGSRPRVRNIPSRISIYWTIVKPGDILLINSTGNLIAPRGYFKIRSGKSSIMRSDTPIGKCNSECITPNGSIPNDKPFQNVNRITYGACPRYVKQNTLKLATGMRNVPEKQTRGIFGAIAGFIENGWEGMVDGWYGFRHQNSEGRGQAADLKSTQAAIDQINGKLNRLIGKTNEKFHQIEKEFSEVEGRIQDLEKYVEDTKIDLWSYNAELLVALENQHTIDLTDSEMNKLFEKTKKQLRENAEDMGNGCFKIYHKCDNACIESIRNGTYDHDVYRDEALNNRFQIKGVELKSGYKDWILWISFAISCFLLCVALLGFIMWACQKGNIRCNICI

SEQ ID NO: 7776 - protein, 566 aa, Artificial Sequence
  derived and/or modified protein sequence (wt) from hemagglutinin__InfluenzaA__AET10096
MKTIIALSYILCLVFAQKFPGNDNSTATLCLGHHAVPNGTIVKTITNDQIEVTNATELVQNSSTGEICDSPHQIIDGENCTLIDALLGDPQCDGFQNKKWNLFVERSKAYSNCYPYDVPDYASLRSLVASSGTLEFNNESFNWTGVTQNGTSSACIRRSNNSFFSRLNWLTHLNFKYPALNVTMPNNEQFDKLYIWGVHHPGTDKDQIFLYAQASGRITVSTKRSQQAVIPNIGSRPRVRNIPSRISIYWTIVKPGDILLINSTGNLIAPRGYFKIRSGKSSIMRSDAPIGKCNSECITPNGSIPNDKPFQNVNRITYGACPRYVKQNTLKLATGMRNVPEKQTRGIFGAIAGFIENGWEGMVDGWYGFRHQNSEGRGQAADLKSTQAAIDQINGKLNRLIGKTNEKFHQIEKEFSEVEGRIQDLEKYVEDTKIDLWSYNAELLVALENQHTIDLTDSEMNKLFEKTKKQLRENAEDMGNGCFKIYHKCDNACIGSIRNGTYDHDVYRDEALNNRFQIKGVELKSGYKDWILWISFAISCFLLCVALLGFIMWACQKGNIRCNICI

SEQ ID NO: 7777 - protein, 566 aa, Artificial Sequence
  derived and/or modified protein sequence (wt) from hemagglutinin__InfluenzaA__AET10098
MKTIIALSYILCLVFAQKFPGNDNSTATLCLGHHAVPNGTIVKTITNDQIEVTNATELVQNSSTGEICDSPHQIIDGENCTLIDALLGDPQCDGFQNKKWDLFVERSKAYSNCYPYDVPDYASLRSLVASSGTLEFNNESFNWTGVTQNGTSSACIRRSNNSFFSRLNWLTHLNFKYPALNVTMPNNEQFDKLYIWGVHHPGTDKDQIFLYAQASGRITVSTKRSQQAVIPNIGSRPRVRNIPSRISIYWTIVKPGDILLINSTGNLIAPRGYFKIRSGKSSIMRSDAPIGKCNSECITPNGSIPNDKPFQNVNRITYGACPRYVKQNTLKLATGMRNVPEKQTRGIFGAIAGFIENGWEGMVDGWYGFRHQNSEGRGQAADLKSTQAAIDQINGKLNRLIGKTNEKFHQIEKEFSEVEGRIQDLEKYVEDTKIDLWSYNAELLVALENQHTIDLTDSEMNKLFEKTKKQLRENAEDMGNGCFKIYHKCDNACIGSIRNGTYDHDVYRDEALNNRFQIKGVELKSGYKDWILWISFAISCFLLCVALLGFIMWACQKGNIRCNICI

SEQ ID NO: 7778 - protein, 566 aa, Artificial Sequence; identical to SEQ ID NO: 6855
  derived and/or modified protein sequence (wt) from hemagglutinin__InfluenzaA__AET10099

SEQ ID NO: 7779 - protein, 566 aa, Artificial Sequence; identical to SEQ ID NO: 6982
  derived and/or modified protein sequence (wt) from hemagglutinin__InfluenzaA__AET10100

SEQ ID NO: 7780 - protein, 566 aa, Artificial Sequence
  derived and/or modified protein sequence (wt) from hemagglutinin__InfluenzaA__AET10101
MKTIIALSCILCLVFAQKLPGNDNSTATLCLGHHAVPNGTIVKTITNDQIEVTNATELVQSSSTGEICDSPHQILDGENCTLIDALLGDPQCDGFQNKKWDLFVERSKAYSNCYPYDVPDYASLRSLVASSGTLEFNNESFNWTGVTQNGTSSACIRRSNNSFFSRLNWLTHLNFKYPALNVTMPNNEQFDKLYIWGVHHPGADKDQIFLYAQASGRITVSTKRSQQAVIPNIGSRPRVRNIPSRISIYWTIVKPGDILLINSTGNLIAPRGYFKIRSGKSSIMRSDAPIGKCNSECITPNGSIPNDKPFQNVNRITYGACPRYVKQSTLKLATGMRNVPEKQTRGIFGAIAGFIENGWEGMVDGWYGFRHQNSEGRGQAADLKSTQAAIDQINGKLNRLIGKTNEKFHQIEKEFSEVEGRIQDLEKYVEDTKIDLWSYNAELLVALENQHTIDLTDSEMNKLFEKTKKQLRENAEDMGNGCFTIYHKCDNACIGSIRNGTYDHNVYRDEALNNRFQIKGVELKSGYKDWILWISFAISCFLLCVALLGFIMWACQKGNIRCNICI

SEQ ID NO: 7781 - protein, 566 aa, Artificial Sequence
  derived and/or modified protein sequence (wt) from hemagglutinin__InfluenzaA__AET10102
MKTIIALSYILCLVFTQKLPGNDNSTATLCLGHHAVPNGTIVKTITNDQIEVTNATELVQSSSTGEICDSPHQILDGKNCTLIDALLGDPQCDGFQNKKWDLFVERSKAYSNCYPFDVPDYASLRSLVASSGTLEFNNESFNWTGVTQNGTSSACMRRSKSSFFSRLNWLTHLNFKYPALNVTMPNDEQFDKLYIWGVHHPGTDKDQIFLYAQASGRITVSTKRSQQTVIPNIGSRPRIRNIPSRISIYWTIVKPGDILLINSTGNLIAPRGYFKIRSGKSSIMRSDAPIGKCNSECITPNGSIPNDKPFQNVNRITYGACPRYVKQNTLKLATGMRNVPEKQTRGIFGAIAGFIENGWEGMVDGWYGFRHQNSEGRGQAADLKSTQAAIDQINGKLNRLIGRTNEKFHQIEKEFSEVEGRIQDLEKYVEDTKIDLWSYNAELLVALENQHTIDLTDSEMNKLFEKTRKQLRENAEDMGNGCFKIYHKCDNACIGSIRNGTYDHDVYRDEALNNRFQIKGVELKSGYKDWILWISFAISCFLLCVASLGFIMWACQKGNIRCNICI

SEQ ID NO: 7782 - protein, 566 aa, Artificial Sequence
  derived and/or modified protein sequence (wt) from hemagglutinin__InfluenzaA__AET10103
MKTIIALSYILCLVFAQKLPGNDNSTATLCLGHHAVPNGTIVKTITNDQIEVTNATELVQNSSTGEICDSPHQILDGENCTLIDALLGDPQCDGFQNKKWDLFVERSKAYSNCYPYDVPDYASLRSLVASSGTLEFNNESFNWTGVTQNGTSSACIRRSNNSFFSRLNWLTHLNFKYPALNVTMPNNEQFDKLYIWGVHHPGTDKDQIFLYAQASGRITVSTKRSQQAVIPNIGSRPRVRNIPSRISIYWTIVKPGDILLINSTGNLIAPRGYFKIRSGKSSIMRSDAPIGKCNSECITPNGSIPNDKPFQNVNRITYGACPRYVKQNTLKLATGMRNVPEKQTRGIFGAIAGFIENGWEGMVDGWYGFRHQNSEGRGQAADLKSTQAAIDQINGKLNRLIGKTNEKFHQIEKEFSEVEGRIQDLEKYVEDTKIDLWSYNAELLVALENQHTIDLTDSEMNKLFEKTKKQLRENAEDMGNGCFKIYHKCDNACIGSIRNGTYDHDVYRDEALNNRFQIKGVELKSGYKDWILWISFAISCFLLCVALLGFIMWACQKGNIRCNICI

SEQ ID NO: 7783 - protein, 566 aa, Artificial Sequence
  derived and/or modified protein sequence (wt) from hemagglutinin__InfluenzaA__AET10104
MKTIIALSYILCLVFAQKFPGNDNSTATLCLGHHAVPNGTIVKTITNDQIEVTNATELVQNSSTGEICDSPHQIIDGENCTLIDALLGDPQCDGFQNKKWDLFVERSKAYSNCYPYDVPDYASLRSLVASSGTLEFNNESFNWTGVTQNGTSSACIRRSNNSFFSRLNWLTHLNFKYPALNVTMPNNEQFDKLYIWGVHHPGTDKDQIFLYAQASGRITVSTKRSQQAVIPNIGSRPRVRNIPSRISIYWTIVKPGDILLINSTGNLIAPRGYFKIRSGKSSIMRSDAPIGKCNSECITPNGSIPNDKPFQNVNRITYGACPRYVKQNTLKLATGMRNVPEKQTRGIFGAIAGFIENGWEGMVDGWYGFRHQNSEGRGQAADLKSTQAAIDQINGKLNRLIGKTNEKFHQIEKEFSEVEGRIQDLGKYVEDTKIDLWSYNAELLVALENQHTIDLTDSEMNKLFEKTKKQLRENAEDMGNGCFKIYHKCDNACIGSIRNGTYDHDVYRDEALNNRFQIKGVELKSGYKDWILWISFAISCFLLCVALLGFIMWACQKGNIRCNICI

SEQ ID NO: 7784 - protein, 566 aa, Artificial Sequence
  derived and/or modified protein sequence (wt) from hemagglutinin__InfluenzaA__AET10105
MKTIIALSYILCLVFAQELPGNDNSTATLCLGHHAVPNGTIVKTITNDQIEVTNATELVQSSSTGEICNSPHQILDGENCTLIDALLGDPQCDGFQNKKWDLFVERSKAHSNCYPYDVPDYASLRSLVASSGTLEFNNESFNWTGVTQNGTSSACIRRSNNSFFSRLNWLTHLNFKYPALNVTMPNNEQFDKLYIWGVHHPGTDKDQIFLYAQAAGRITVSTKRSQQAVIPNIGSRPRVRNIPSRVSIYWTIVKPGDILLINSTGNLIAPRGYFKIRSGKSSIMRSDAPIGKCNSACITPNGSIPNDKPFQNVNRITYGACPRYVKQNTLKLATGMRNVPEKQTRGIFGAIAGFIENGWEGMVDGWYGFRHQNSEGRGQAADLKSTQAAIDQINGKLNRLIGKTNEKFHQIEKEFSEVEGRIQDLEKYVEDTKIDLWSYNAELLVALENQHTIDLTDSEMNKLFEKTKKQLRENAEDMGNGCFKIYHKCDNACIGSIRNGTYDHDVYRDEALNNRFQIKGVELKSGYKDWILWISFAISCFLLCVALLGFIMWACQKGNIRCNICI

SEQ ID NO: 7785 - protein, 566 aa, Artificial Sequence
  derived and/or modified protein sequence (wt) from hemagglutinin__InfluenzaA__AET10106
MKTIIALSYILCLVFAQKLPGNYNSTATLCLGHHAVPNGTIVKTITNDQIEVTNATELVQSSSTGEICNSPHQILDGENCTLIDALLGDPQCDGFQNKKWDLFVERSKAHSNCYPYDVPDYASLRSLVASSGTLEFNNESFNWTGVTQNGTSSACIRRSNNSFFSRLNWLTHLNFKYPALNVTMPNNEQFDKLYIWGVHHPGTDKDQIFLYAQASGRITVSTKRSQQAVIPNIGSRPRVRNIPSRVSIYWTIVKPGDILLINSTGNLIAPRGYFKIRSGKSSIMRSDAPIGKCNSACITPNGSIPNDKPFQNVNRITYGACPRYVKQNTLKLATGMRNVPEKQTRGIFGAIAGFIENGWEGMVDGWYGFRHQNSEGRGQAADLKSTQAAIDQINGKLNRLIGKTNEKFHQIEKEFSEVEGRIQDLEKYVEDTKIDLWSYNAELLVALENQHTIDLTDSEMNKLFEKTKKQLRENAEDMGNGCFKIYHKCDNACIGSIRNGTYDHDVYRDEALNNRFQIKGVELKSGYKDWILWISFAISCFLLCVALLGFIMWACQKGNIRCNICI

SEQ ID NO: 7786 - protein, 566 aa, Artificial Sequence
  derived and/or modified protein sequence (wt) from hemagglutinin__InfluenzaA__AET10107
MKTIIALSYILCLVFAQEIPGNDNSTATLCLGHHAVPNGTIVKTITNDQIEVTNATELVQSSSTGEICNSPHQILDGENCTLIDALLGDPQCDGFQNKKWDLFVERSKAHSNCYPYDVPDYASLRSLVASSGTLEFNNESFNWTGVTQNGTSSACIRRSNNSFFSRLNWLTHLNFKYPALNVTMPNNEQFDKLYIWGVHHPGTDKDQIFLYAQASGRITVSTKRSQQAVIPNIGSRPRVRNIPSRVSIYWTIVKPGDILLINSTGNLIAPRGYFKIRSGKSSIMRSDAPIGKCNSACITPNGSIPNDKPFQNVNRITYGACPRYVKQNTLKLATGMRNVPEKQTRGIFGAIAGFIENGWEGMVDGWYGFRHQNSEGRGQAADLKSTQAAIDQINGKLNRLIGKTNEKFHQIEKEFSEVEGRIQDLEKYVEDTKIDLWSYNAELLVALENQHTIDLTDSEMNKLFEKTKKQLRENAEDMGNGCFKIYHKCDNACIGSIRNGTYDHDVYRDEALNNRFQIKGVELKSGYKDWILWISFAISCFLLCVALLGFIMWACQKGNIKCNICI

SEQ ID NO: 7787 - protein, 566 aa, Artificial Sequence; identical to SEQ ID NO: 3411
  derived and/or modified protein sequence (wt) from hemagglutinin__InfluenzaA__AET10108

SEQ ID NO: 7788 - protein, 566 aa, Artificial Sequence; identical to SEQ ID NO: 6982
  derived and/or modified protein sequence (wt) from hemagglutinin__InfluenzaA__AET10109

SEQ ID NO: 7789 - protein, 566 aa, Artificial Sequence
  derived and/or modified protein sequence (wt) from hemagglutinin__InfluenzaA__AET10110
MKTIIALSYILCLVFAQKLPGNDNSTATLCLGHHAVPNGTIVKTITNDQIEVTNATELVQSSSTGEICNSPHQILDGENCTLIDALLGDPQCDGFQNKKWDLFVERSKAYSNCYPYDVPDYASLRSLVASSGTLEFNNESFNWTGVTQNGTSSACIRRSNNSFFSRLNWLTHLNFKYPALNVTMPNNEQFDKLYIWGVHHPGTDKDQIFLYAQASGRITVSTKRSQQAVIPNIGSRPRVRNIPSRVSIYWTIVKPGDILLINSTGNLIAPRGYFKIRSGKSSIMRSDAPIGKCNSACITPNGSIPNDKPFQNVNRITYGACPRYVKQNTLKLATGMRNVPEKQTRGIFGAIAGFIENGWEGMVDGWYGFRHQNSEGRGQAADLKSTQAAIDQINGKLNRLIGKTNEKFHQIEKEFSEVEGRIQDLEKYVEDTKIDLWSYNAELLVALENQHTIDLTDSEMNKLFEKTKKQLRENAEDMGNGCFKIYHKCDNACIGSIRNGTYDHDVYRDEALNNRFQIKGVELKSGYKDWILWISFAISCFLLCVALLGFIMWACQKGNIKCNICI

SEQ ID NO: 7790 - protein, 566 aa, Artificial Sequence
  derived and/or modified protein sequence (wt) from hemagglutinin__InfluenzaA__AET10111
MKTIIALSYILCLVFAQEIPGNDNSTATLCLGHHAVPNGTIVKTITNDQIEVTNATELVQSSSTGEICNSPHQILDGENCTLIDALLGDPQCDGFQNKKWDLFVERSKAHSNCYPYDVPDYASLRSLVASSGTLEFNNESFNWTGVTQNGTSSACIRRSNNSFFSRLNWLTHLNFKYPALNVTMPNNEQFDKLYIWGVHHPGTDKDQIFLYAQASGRITVSTKRSQQAVIPNIGSRPRVRNIPSRVSIYWTIVKPGDILLSNSTGNLIGPRGYFKIRSGKSSIMRSDAPIGKCNSACITPNGSIPNDKPFQNVNRITYGACPRYVKQNTLKLATGMRNVPEKQTRGIFGAIAGFIENGWEGMVDGWYGFRHQNSEGRGQAADLKSTQAAIDQINGKLNRLIGKTNEKFHQIEKEFSEVEGRIQDLEKYVEDTKIDLWSYNAELLVALENQHTIDLTDSEMNKLFEKTKKQLRENAEDMGNGCFKIYHKCDNACIGSIRNGTYDHDVYRDEALNNRFQIKGVELKSGYKDWILWISFAISCFLLCVALLGFIMWACQKGNIRCNICI

SEQ ID NO: 7791 - protein, 566 aa, Artificial Sequence
  derived and/or modified protein sequence (wt) from hemagglutinin__InfluenzaA__AET10113
MKTIIALSYILCLVFAQELPGNDNSTATLCLGHHAVQNGTIVKTITNDQIEVTNATELVQSSSTGEICNSPHQILDGENCTLIDALLGDPQCDGFQNKKWDLFVERSKAHSNCYPYDVPDYASLRSLVASSGTLEFNNESFNWTGVTQNGTSSACIRRSNNSFFSRLNWLTHLNFKYPALNVTMPNNEQFDKLYIWGVHHPGTDKDQIFLYAQASGRITVSTKRSQQAVIPNIGSRPRVRNIPSRVSIYWTIVKPGDILLINSTGNLIAPRGYFKIRSGKSSIMRSDAPIGKCNSACITPNGSIPNDKPFQNVNRITYGACPRYVKQNTLKLATGMRNVPEKQTRGIFGAIAGFIENGWEGMVDGWYGFRHQNSEGRGQAADLKSTQAAIDQINGKLNRLIGKTNEKFHQIEKEFSEVEGRIQDLEKYVEDTKIDLWSYNAELLVALENQHTIDLTDSEMNKLFEKTKKQLRENAEDMGNGCFKIYHKCDNACIGSIRNGTYDHDVYRDEALNNRFQIKGVELKSGYKDWILWISFAISCFLLCVALLGFIMWACQKGNIRCNICI

SEQ ID NO: 7792 - protein, 566 aa, Artificial Sequence
  derived and/or modified protein sequence (wt) from hemagglutinin__InfluenzaA__AET10114
MKTIIALSYILCLVFAQELPGNDDSTATLCLGHHAVPNGTIVKTITNDQIEVTNATELVQSSSTGEICNSPHQILDGENCTLIDALLGDPQCDGFQNKKWDLFVERSKAHSNCYPYDVPDYASLRSLVASSGTLEFNNESFNWTGVTQNGTSSACIRRSNNSFFSRLNWLTHLNFKYPALNVTMPNNEQFDKLYIWGVHHPGTDKDQIFLYAQASGRITVSTKRSQQAVIPNIGSRPRVRNIPSRVSIYWTIVKPGDILLINSTGNLIAPRGYFKIRSGKSSIMRSDAPIGKCNSACITPNGSISNDKPFQNVNRITYGACPRYVKQNTLKLATGMRNVPEKQTRGIFGAIAGFIENGWEGMVDGWYGFRHQNSEGRGQAADLKSTQAAIDQINGKLNRLIGKTNEKFHQIEKEFSEVEGRIQDLEKYVEDTKIDLWSYNAELLVALENQHTIDLTDSEMNKLFEKTKKQLRENAEDMGNGCFKIYHKCDNACIGSIRNGTYDHDVYRDEALNNRFQIKGVELKSGYKDWILWISFAISCFLLCVALLGFIMWACQKGNIMCNICI

SEQ ID NO: 7793 - protein, 565 aa, Artificial Sequence
  derived and/or modified protein sequence (wt) from hemagglutinin__InfluenzaA__AET50439
MKVKLLVLLCTFTATYADTICIGYHANNSTDTVDTVLEKNVTVTHSVNLLENSHNGKLCLLKGIAPLQLGNCSVAGWILGNPECELLISKESWSYIVEKPNPENGTCYPGHFADYEELREQLSSVSSFERFEIFPKESSWPNHTVTGVSASCSHNGESSFYRNLLWLTGKNGLYPNLSKSYANNKEKEVLVLWGVHHPPNIGNQKALYHTENAYVSVVSSHYSRKFTPEIAKRPKVRDQEGRINYYWTLLEPGDTIIFEANGNLIAPRYAFALSRGFGSGIINSNAPMDKCDAKCQTPQGAINSSLPFQNVHPVTIGECPKYVRSAKLRMVTGLRNIPSIQSRGLFGAIAGFIEGGWTGMVDGWYGYHHQNEQGSGYAADQKSTQNAINGITNKVNSVIEKMNTQFTAVGKEFNKLERRMENLNKKVDDGFIDIWTYNAELLVLLENERTLDFHDSNVKNLYEKVKSQLKNNAKEIGNGCFEFYHKCNDECMESVKNGTYDYPKYSEESKLNREKIDGVKLESMGVYQILAIYSTVASSLVLLVSLGAISFWMCSNGSLQCRICI

SEQ ID NO: 7794 - protein, 565 aa, Artificial Sequence
  derived and/or modified protein sequence (wt) from hemagglutinin__InfluenzaA__AET50440
MKVKLLVLLCTFTATYADTICIGYHANNSTDTVDTVLEKNVTVTHSVNLLENSHNGKLCLLKGIAPLQLGNCSVAGWILGNPECELLISKESWSYIVEKPNPENGTCYPGHFADYEELREQLSSVSSFERFEIFPKESSWPTHTVTGVSASCSHNGESSFYRNLLWLTGKNGLYPNLSKSYANNKEKEVLVLWGVHHPPNIGNQKALYHTENAYVSVVSSHYSRKFTPEIAKRPKVRDQEGRINYYWTLLEPGDTIIFEANGNLIAPRYAFALSRGFGSGIINSNAPMDKCDAKCQTPQGAINSSLPFQNVHPVTIGECPKYVRSAKLRMVTGLRNIPSIQSRGLFGAIAGFIEGGWTGMVDGWYGYHHQNEQGSGYAADQKSTQNAINGITNKVNSVIEKMNTQFTAVGKEFNKLERRMENLNKKVDDGFIDIWTYNAELLVLLENERTLDFHDSNVKNLYEKVKSQLKNNAKEIGNGCFEFYHKCNDECMESVKNGTYDYPKYSEESKLNREKIDGVKLESMGVYQILAIYSTVASSLVLLVSLGAISFWMCSNGSLQCRICI

SEQ ID NO: 7795 - protein, 565 aa, Artificial Sequence
  derived and/or modified protein sequence (wt) from hemagglutinin__InfluenzaA__AET50441
MKVKLLVLLCTFTATYADTICIGYHANNSTDTVDTVLEKNVTVTHSVNLLENSHNGKLCLLKGIAPLQLGNCSVAGWILGNPECELLISKESWSYIVEKPNPENGTCYPGHFADYEELREQLSSVSSFERFEIFPKESSWPTHTVTGVSASCSHNGESSFYRNLLWLTGKNGLYPNLSKSYANNKEKEVLVLWGVHHPPNIGNQKALYHTENAYVSVVSSHYSRKFTPEIAKRPKVRGQEGRINYYWTLLEPGDTIIFEANGNLIAPRYAFALSRGFGSGIINSNAPMDKCDAKCQTPQGAINSSLPFQNVHPVTIGECPKYVRSAKLRMVTGLRNIPSIQSRGLFGAIAGFIEGGWTGMVDGWYGYHHQNEQGSGYAADQKSTQNAINGITNKVNSVIEKMNTQFTAVGKEFNKLERRMENLNKKVDDGFIDIWTYNAELLVLLENERTLDFHDSNVKNLYEKVKSQLKNNAKEIGNGCFEFYHKCNDECMESVKNGTYDYPKYSEESKLNREKIDGVKLESMGVYQILAIYSTVASSLVLLVSLGAISFWMCSNGSLQCRICI

SEQ ID NO: 7796 - protein, 565 aa, Artificial Sequence
  derived and/or modified protein sequence (wt) from hemagglutinin__InfluenzaA__AET50442
MKVKLLVLLCTFTATYADTICIGYHANNSTDTVDTVLEKNVTVTHSVNLLENSHNGKLCLLKGIAPLQLGNCSVAGWILGNPECELLISKESWSYIVEKPNPENGICYPGHFADYEELREQLSSVSSFERFEIFPKESSWPTHTVTGVSASCSHNGESSFYRNLLWLTGKNGLYPNLSKSYANNKEKEVLVLWGVHHPPNIGNQKALYHTENAYVSVVSSHYSRKFTPEIAKRPKVRGQEGRINYYWTLLEPGDTIIFEANGNLIAPRYAFALSRGFGSGIINSNAPMDKCDAKCQTPQGAINSSLPFQNVHPVTIGECPKYVRSAKLRMVTGLRNIPSIQSRGLFGAIAGFIEGGWTGMVDGWYGYHHQNEQGSGYAADQKSTQNAINGITNKVNSVIEKMNTQFTAVGKEFNKLERRMENLNKKVDDGFIDIWTYNAELLVLLENERTLDFHDSNVKNLYEKVKSQLKNNAKEIGNGCFEFYHKCNDECMESVKNGTYDYPKYSEESKLNREKIDGVKLESMGVYQILAIYSTVASSLVLLVSLGAISFWMCSNGSLQCRICI

SEQ ID NO: 7797 - protein, 565 aa, Artificial Sequence
  derived and/or modified protein sequence (wt) from hemagglutinin__InfluenzaA__AET84163
MKVKLLVLLCTFTATYADTICIGYHANNSTDTVDTVLEKNVTVTHSVNLLENSHNGKLCLLKGIAPLQLGNCSVAGWILGNPECESLISKESWSYIVEKPNPENGTCYPGHFADYEELREQLSSVSSFERFEIFPKESSWPNHTVTGVSASCSHNGESSFYRNLLWLTGKNGLYPNLSKSYANNKEKEVLVLWGVHHPPSISNQKTLYHTENAYVSVVSSHYSRKFTPEVAKRPKVRDQEGRINYYWTLLEPGDTIIFEANGNLIAPRYAFALSRGFGSGIINSNAPMDKCDAKCQTPQGAINSSLPFQNVHPVTIGECPKYVRSAKLRMVTGLRNIPSIQSRGLFGAIAGFIEGGWTGMVDGWYGYHHQNEQGSGYAADQKSTQNAINGITNKVNSVIEKMNTQFTAVGKEFNKLERRMENLNKKVDDGFIDIWTYNAELLVLLENERTLDFHDSNVKNLYEKVKSQLKNNAKEIGNGCFEFYHKCNDECMESVKNGTYDYPKYSEESKLNREKIDGVKLESMGVYQILAIYSTVASSLVLLVSLGAISFWMCSNGSLQCRICI

SEQ ID NO: 7798 - protein, 565 aa, Artificial Sequence
  derived and/or modified protein sequence (wt) from hemagglutinin__InfluenzaA__AET84174
MKVKLLVLLCTFTATYADTICIGYHANNSTDTVDTVLEKNVTVTHSVNLLENSHNGKLCLLKGIAPLQLGNCSVAGWILGNPECELLISKESWSYIVEKPNPENGTCYPGHFADYEELREQLSSVSSFERFEIFPKESSWPNHTVTGVSASCSHNGESSFYRNLLWLTGKNGLYPNLSKSYANNKEKEVLVLWGVHHPPNIVDQKTLYRTENAYVSVVSSHYSRKFTPEIAKRPKVRDQEGRINYYWTLLEPGDTIIFEANGNLIAPRYAFALIRGFGSGIINSNAPMGKCDAKCQTPQGAINSSLPFQNVHPVTIGECPKYVRSAKLRMVTGLRNIPSIQSRGLFGAIAGFIEGGWTGMVDGWYGYHHQNEQGSGYAADQKSTQNAINGITNKVNSVIEKMNTQFTAVGKEFNKLERRMENLNKKVDDGFIDIWTYNAELLVLLENERTLDFHDSNVKNLYEKVKSQLKNNAKEIGNGCFEFYHKCNDECMESVKNGTYDYPKYSEESKLNREKIDGVKLESMGVYQILAIYSTVASSLVLLVSLGAISFWMCSNGSLQCRICI

SEQ ID NO: 7799 - protein, 565 aa, Artificial Sequence
  derived and/or modified protein sequence (wt) from hemagglutinin__InfluenzaA__AET84196
MKVKLLVLLCTFTATYADTICIGYHANNSTDTVDTVLEKNVTVTHSVNLLENSHNGKLCLLKGIAPLQLGNCSVAGWILGNPECESLISKESWSYIVEKPNPENGTCYPGHFADYEELREQLSSVSSFERFEIFPKESSWPNHTVTGVSASCSHNGESSFYRNLLWLTRKNGLYPTLSKSYANNKEKEVLVLWGVHHPPSINDQKTLYHTENAYVSVVSSHYSRKFTPEIAKRPKVRDQEGRINYYWTLLEPGDTIIFEANGNLIAPRYAFALSRGFGSGIINSSAPMDKCDAKCQTPQGAINSSLPFQNVHPVTIGECPKYVRSAKLRMVTGLRNIPSIQSRGLFGAIAGFIEGGWTGMVDGWYGYHHQNEQGSGYAADQKSTQNAINGITNKVNSVIEKMNTQFTAVGKEFNKLERRMENLNKKVDDGFIDIWTYNAELLVLLENERTLDFHNSNVKNLYEKVKSQLKNNAKEIGNGCFEFYHKCNDECMESVKNGTYDYPKYSEESKLNREKIDGVKLESMGVYQILAIYSTVASSLVLLVSLGAISFWMCSNGSLQCRICI

SEQ ID NO: 7800 - protein, 565 aa, Artificial Sequence
  derived and/or modified protein sequence (wt) from hemagglutinin__InfluenzaA__AET84207
MKVKLLVLLCTFTATYADTICIGYHANNSTDTVDTVLEKNVTVTHSVNLLENSHNGKLCLLKGIAPLQLGNCSVAGWILGNPECELLISKESWSYIVEKPNPENGTCYPGHFADYEELREQLSSVPSFERFEIFPKESSWPNHTVTGVSASCSHNGESSFYRNLLWLTGKNGLYPNLSKSYANNKEKEVLVLWGVHHPPSINDQKTLYHTENAYVSVVSSHYSRKFTPEIAKRPKVRDQEGRINYYWTLLEPRDTIIFEANGNLIAPRYAFALSRGFGSGIINSNAPMDKCDAKCQTPQGAINSSLPFQNVHPVTIGECPKYVRSAKLRMVTGLRNIPSIQSRGLFGAIAGFIEGGWTGMVDGWYGYHHQNEQGSGYAADQKSTQNAINGITNKVNSVIEKMNTQFTAVGKEFNKLERRMENLNKKVDDGFIDIWTYNAELLVLLENERTLDFHDSNVKNLYEKVKSQLKNNAKEIGNGCFEFYHKCNDECMESVKNGTYDYPKYSEESKLNREKIDGVKLESMGVYQILAIYSTVASSLVLLVSLGAISFWMCSNGSLQCRICI

SEQ ID NO: 7801 - protein, 565 aa, Artificial Sequence
  derived and/or modified protein sequence (wt) from hemagglutinin__InfluenzaA__AET84218
MKVKLLVLLCTFTATYADTICIGYHANNSTDTVDTVLEKNVTVTHSVNLLENSHNGKLCLLKGIAPLQLGNCSVAGWILGNPECELLISKESWSYIVEKPNPENGTCYPGHFADYEELREQLSSVSSFERFEIFPKESSWPNHTVTGVSASCSHNGESSFYRNLLWLTGKNGLYPNLSKSYANNKEKEVLVLWGVHHPPNISNQKTLYHTENAYVSVVSSHYSRKFTPEIAKRPKVRDQEGRINYYWTLLEPGDTIIFEASGNLIAPRYAFALSRGFGSGIINSNAPMDKCDAKCQTPQGAINSSLPFQNVHPVTIGECPKYVRSAKLRMVTGLRNIPSIQSRGLFGAIAGFIEGGWTGMVDGWYGYHHQNEQGSGYAADQKSTQNAINGITNKVNSVIEKMNTQFTAVGKEFNKLERRMENLNKKVDDGFIDIWTYNAELLVLLENERTLDFHDSNVKNLYEKVKSQLKNNAKEIGNGCFEFYHKCNDECMESVKNGTYDYPKYSEESKLNREKIDGVKLESMGVYQILAIYSTVASSLVLLVSLGAISFWMCSNGSLQCRICI

SEQ ID NO: 7802 - protein, 565 aa, Artificial Sequence
  derived and/or modified protein sequence (wt) from hemagglutinin__InfluenzaA__AET84229
MKVKLLVLLCTFTATYADTICIGYHANNSTDTVDTVLEKNVTVTHSVNLLENSHNGKLCLLKGIAPLQLGNCSVAGWILGNPECELLISKESWSYIVEKPNPENGTCYPGHFADYEELREQLSSVSSFERFEIFPKESSWPNHTVTGVSASCSHNGESSFYRNLLWLTGKNGLYPTLSKSYANNKEKEVLVLWGVHHPPNIVDQKTLYRTENAYVSVVSSHYSRKFTPEIAKRPKVRDQEGRINYYWTLLEPGDTIIFEANGNLIAPRYAFALSRGFGSGIINSNAPMGKCDAKCQTPQGAINSSLPFQNVHPVTIGECPKYVRSAKLRMVTGLRNIPPIQSRGLFGAIAGFIEGGWTGMVDGWYGYHHQNEQGSGYAADQKSTQNAINGITNKVNSVIEKMNTQFTAVGKEFNKLERRMENLNKKVDDGFIDIWTYNAELLVLLENERTLDFHDSNVKNLYEKVKSQLKNNAKEIGNGCFEFYHKCNDECMESVKNGTYDYPKYSEESKLNREKIDGVKLESMGVYQILAIYSTVASSLVLLVSLGAISFWMCSNGSLQCRICI

SEQ ID NO: 7803 - protein, 565 aa, Artificial Sequence
  derived and/or modified protein sequence (wt) from hemagglutinin__InfluenzaA__AET84240
MKVKLLVLLCTFTATYADTICIGYHANNSTDTVDTVLEKNVTVTHSVNLLENSHNGKLCLLKGIAPLQLGNCSVAGWILGNPECELLISKESWSYIVEKPNPENGTCYPGYFADYEELREQLSSVSSFERFEIFPKESSWPNHTVTGVSASCSHNGESSFYRNLLWLTGKNGLYPNLSKSYANNKEKEVLVLWGVHHPPNIVDQKTLYRTENAYVSVVSSHYSRKFTPEIAKRPKVRDQEGRINYYWTLLEPGDTIIFEANGNLIAPRYAFALSRGFGSGIINSNAPMGKCDAKCQTPQGAINSSLPFQNVHPVTIGECPKYVRSAKLRMVTGLRNIPSIQSRGLFGAIAGFIEGGWTGMVDGWYGYHHQNEQGSGYAADQKSTQNAINGITNKVNSVIEKMNTQFTAVGKEFNKLERRMENLNKKVDDGFIDIWTYNAELLVLLENERTLDFHDSNVKNLYEKVKSQLKNNAKEIGNGCFEFYHKCNNECMESVKNGTYDYPKYSEESKLNREKIDGVKLESMGVYQILAIYSTVASSLVLLVSLGAISFWMCSNGSLQCRICI

SEQ ID NO: 7804 - protein, 565 aa, Artificial Sequence
  derived and/or modified protein sequence (wt) from hemagglutinin__InfluenzaA__AET84251
MKVKLLVLLCTFTATYADTICIGYHANNSTDTVDTVLEKNVTVTHSVNLLENSHNGKLCLLKGIAPLQLGNCSVAGWILGNPECELLISKESWSYIVEKPNPENGTCYPGHFADYEELREQLSSVSSFERFEIFPKESSWPNHTVTGVSASCSHNGESSFYRNLLWLTGKNGLYPNLSKSYANNKEKEVLVLWGVHHPPNIVNQKTLYRTENAYVSVVSSHYSRKFTPEIAKRPKVRDQEGRINYYWTLLEPGDTIIFEANGNLIAPRYAFALSRGFGSGIINSNAPMGKCDAKCQTPHGAINSCLPFQNVHPVTIGECPKYVRSAKLRMVTGLRNIPSIQSRGLFGAIAGFIEGGWTGMVDGWYGYHHQNEQGSGYAADQKSTQNAINGITNKVNSVIEKMNTQFTAVGKEFNKLERRMENLNKKVDDGFIDIWTYNAELLVLLENERTLDFHDSNVKNLYEKVKSQLKNNAKEIGNGCFEFYHKCNDECMESVKNGTYDYPKYSEESKLNKEKIDGVKLESMGVYQILAIYSTVASSLVLLVSLGAISFWMCSNGSLQCRICI

SEQ ID NO: 7805 - protein, 565 aa, Artificial Sequence
  derived and/or modified protein sequence (wt) from hemagglutinin__InfluenzaA__AET84262
MKVKLLVLLCTFTATYADTICIGYHANNSTDTVDTVLEKNVTVTHSVNLLENSHNGKLCLLKGIAPLQLGNCSVAGWILGNPECELLISKESWSYIVEKPNPENGTCYPGHFADYEELREQLSSVSSFERFEIFPKESSWPNHTVTGVSASCSHNGESSFYRNLLWLTGKNGLYPNLSKSYANNKEKEVLVLWGVHHPPNIVDQKTLYRTENAYVSVVSSHYSRKFTPEIAKRPKVRDQEGRINYYWTLLEPGDTIIFEANGNLIAPRYAFALSRGFGSGIINSNAPMDKCDAKCQTPHGAINSCLPFQNVHPVTIGECPKYVRSAKLRMVTGLRNIPSIQSRGLFGAIAGFIEGGWTGMVDGWYGYHHQNEQGSGYAADQKSTQNAINGITNKVNSVIEKMNTQFTAVGKEFNKLERRMENLNKKVDDGFIDIWTYNAELLVLLENERTLDFHDSNVKNLYEKVKSQLKNNAKEIGNGCFEFYHKCNDECMESVKNGTYDYPKYSEESKLNREKIDGVKLESMGVYQILAIYSTVASSLVLLVSLGAISFWMCSNGSLQCRICI

SEQ ID NO: 7806 - protein, 565 aa, Artificial Sequence; identical to SEQ ID NO: 7733
  derived and/or modified protein sequence (wt) from hemagglutinin__InfluenzaA__AET84284

SEQ ID NO: 7807 - protein, 565 aa, Artificial Sequence
  derived and/or modified protein sequence (wt) from hemagglutinin__InfluenzaA__AET84306
MKVKLLVLLCTFTATYADTICIGYHANNSTDTVDTVLEKNVTVTHSVNLLENSHNGKLCLLKGIAPLQLGNCSVAGWILGNPECELLISKESWSYIVEKPNPENGTCYPGHFADYEELREQLSSVSSFERFEIFPKESSWPNHTVTGVSASCSHNGESSFYRNLLWLTGKNGLYPNLSKSYANNKEKEVLVLWGVHHPPNIGNQKALYHTENAYVSVVSSHYSIKFTPEIAKRPKVRDQEGRINYYWTLLEPGDTIIFEANGNLIAPRYAFALSRGFGSGIINSNAPMDKCDAKCQTPQGAINSSLPFQNVHPVTIGECPKYVRSAKLRMVTGLRNIPSIQSRGLFGAIAGFIEGGWTGMVDGWYGYHHQNEQGSGYAADQKSTQNAINGITNKVNSVIEKMNTQFTAVGKEFNKLERRMENLNKKVDDGFIDIWTYNAELLVLLENERTLDFHDSNVKNLYEKVKSQLKNNAKEIGNGCFEFYHKCNDECMESVKNGTYDYPKYSEESKLNREKIDGVKLESMGVYQILAIYSTVASSLVLLVSLGAISFWMCSNGSLQCRICI

SEQ ID NO: 7808 - protein, 565 aa, Artificial Sequence
  derived and/or modified protein sequence (wt) from hemagglutinin__InfluenzaA__AET84339
MKVKLLVLLCTFTATYADTICIGYHANNSTDTVDTVLEKNVTVTHSVNLLENSHNGKLCLLKGIAPLQLGNCSVAGWILGNPECELLISKESWSYIVEKPNPENGTCYPGHFADYEELREQLSSVSSFERFEIFPKESSWPNHTVTGVSASCSHNGERSFYRNLLWLTGKNGLYPNLSKSYANNKEKEVLVLWGVHHPPNIGNQKTLYHTENAYVSVVSSHYSRKFTPEIAKRPKVRDQEGRINYYWTLLEPGDTIIFEANGNLIAPRYAFALSRGFGSGIINSNAPMDKCDAKCQTPQGAINSSLPFQNVHPVTIGECPKYVRSAKLRMVTGLRNIPSIQSRGLFGAIAGFIEGGWTGMVDGWYGYHHQNEQGSGYAADQKSTQNAINGITNKVNSVIEKMNTQFTAVGKEFNKLERRMENLNKKVDDGFIDIWTYNAELLVLLENERTLDFHDSNVKNLYEKVKSQLKNNAKEIGNGCFEFYHKCNDECMESVKNGTYDYPKYSEESKLNREKIDGVKLESMGVYQILAIYSTVASSLVLLVSLGAISFWMCSNGSLQCRICI

SEQ ID NO: 7809 - protein, 565 aa, Artificial Sequence; identical to SEQ ID NO: 7808
  derived and/or modified protein sequence (wt) from hemagglutinin__InfluenzaA__AET84361

SEQ ID NO: 7810 - protein, 565 aa, Artificial Sequence
  derived and/or modified protein sequence (wt) from hemagglutinin__InfluenzaA__AET84372
MKVKLLVLLCTFTATYADTICIGYHANNSTDTVDTVLEKNVTVTHSVNLLENSHNGKLCLLKGIAPLQLGNCSVAGWILGNPECELLISKESWSYIVEKPNPENGTCYPGHFADYEELREQLSSVSSFERFEIFPKESSWPNHTVTGVSASCSHNGERSFYRNLLWLTGKNGLYPNLSKSYANNKEKEVLVLWGVHHPPNIGDQKTLYHTENAYVSVVSSHYSRKFTPEIAKRPKVRDQEGRINYYWTLLEPGDTIIFEANGNLIAPRYAFALSRGFGSGIINSNAPMDKCDAKCQTPQGAINSSLPFQNVHPVTIGECPKYVRSAKLRMVTGLRNIPSIQSRGLFGAIAGFIEGGWTGMVDGWYGYHHQNEQGSGYAADQKSTQNAINGITNKVNSVIEKMNTQFTAVGKEFNKLERRMENLNKKVDDGFIDIWTYNAELLVLLENERTLDFHDSNVKNLYEKVKSQLKNNAKEIGNGCFEFYHKCNDECMESVKNGTYDYPKYSEESKLNREKIDGVKLESMGVYQILAIYSTVASSLVLLVSLGAISFWMCSNGSLQCRICI

SEQ ID NO: 7811 - protein, 565 aa, Artificial Sequence
  derived and/or modified protein sequence (wt) from hemagglutinin__InfluenzaA__AET84394
MKVKLLVLLCTFTATYADTICIGYHANNSTDTVDTVLEKNVTVTHSVNLLENSHNGKLCLLKGIAPLQLGNCSVAGWILGNPECELLISKESWSYIVEKPNPENGTCYPGHFADYEELREQLSSVSSFERFEIFPKESSWPNHTVTGVSASCSHNGERSFYRNLLWLTGKNGLYPNLSKSYANNKEKEVLVLWGVHHPPDIGNQKTLYHTENAYVSVVSSHYSRKFTPEIAKRPKVRDQEGRINYYWTLLEPGDTIIFEANGNLIAPRYAFALSRGFGSGIINSNAPMDKCDAKCQTPQGAINSSLPFQNVHPVTIGECPKYVRSEKLRMVTGLRNIPSIQSRGLFGAIAGFIEGGWTGMVDGWYGYHHQNEQGSGYAADQKSTQNAINGITNKVNSVIEKMNTQFTAVGKEFNKLERRMENLNKKVDDGFIDIWTYNAELLVLLENERTLDFHDSNVKNLYEKVKSQLKNNAKEIGNGCFEFYHKCNDECMESVKNGTYDYPKYSEESKLNREKIDGVKLESMGVYQILAIYSTVASSLVLLVSLGAISFWMCSNGSLQCRICI

SEQ ID NO: 7812 - protein, 565 aa, Artificial Sequence; identical to SEQ ID NO: 5516
  derived and/or modified protein sequence (wt) from hemagglutinin__InfluenzaA__AET84405

SEQ ID NO: 7813 - protein, 565 aa, Artificial Sequence
  derived and/or modified protein sequence (wt) from hemagglutinin__InfluenzaA__AET84416
MKVKLLVLLCTFTATYADTICIGYHANNSTDTVDTVLEKNVTVTHSVNLLENSHNGKLCLLKGIAPLQLGNCSVAGWILGNPECELLISKESWSYIVEKPNPENGTCYPGHFADYEELREQLSSVSSFERFEIFPKESSWPNHTVTGVSASCSHNGERSFYRNLLWLTGKNGLYPTLSKSYANNKEKEVLVLWGVHHPPDIGDQKTLYHTENAYVSVVSSHYSRKFTPEIAKRPKVRDQEGRINYYWTLLEPGDTIIFEANGNLIAPRYAFALSRGFGSGIINSNAPMDKCDAKCQTPQGAINSSLPFQNVHPVTIGECPKYVRSAKLRMVTGLRNIPSIQSRGLFGAIAGFIEGGWTGMVDGWYGYHHQNEQGSGYAADQKSTQNAINGITNKVNSVIEKMNTQFTAVGKEFNKLERRMENLNKKVDDGFIDIWTYNAELLVLLENERTLDFHDSNVKNLYEKVKSQLKNNAKEIGNGCFEFYHKCNDECMESVKNGTYDYPKYSEESKLNREKIDGVKLESMGVYQILAIYSTVASSLVLLVSLGAISFWMCSNGSLQCRICI

SEQ ID NO: 7814 - protein, 565 aa, Artificial Sequence
  derived and/or modified protein sequence (wt) from hemagglutinin__InfluenzaA__AET84427
MKVKLLVLLCTFTATYADTICIGYHANNSTDTVDTVLEKNVTVTHSVNLLENSHNGKLCLLKGIAPLQLGNCSVAGWILGNPECELLISKESWSYIVEKPNPENGTCYPGHFADYEELREQLSSVSSFERFEIFPKESSWPNHTVTGVSASCSHNGESSFYRNLLWLTGKNGLYPNLSKSYANNKEKEVLVLWGVHHPPNIGNQKTLYHTENAYVSVVSSHYSRKFTPEIAKRPKVRDQEGRINYYWTLLEPGDTIIFEANGNLIAPRYAFALSRGFGSGIINSNAPMDKCDAKCQTPQGAINSSLPFQNVHPVTIGECPKYVRSAKLRMVTGLRNIPSIQSRGLFGAIAGFIEGGWTGMVDGWYGYHHQNEQGSGYAADQKSTQNAINGITNKVNSVIEKMNTQFTAVGKEFNKLERRMENLNKKVDDGFIDIWTYNAELLVLLENERTLDFHDSNVKNLYEKVKSQLKNNAKEIGNGCFEFYHKCNDECMESVKNGTYDYPKYSEESKLNREKIDGVKLESMGVYQILAIYSTVASSLVLLVSLGAISFWMCSNGSLQCRICI

SEQ ID NO: 7815 - protein, 565 aa, Artificial Sequence
  derived and/or modified protein sequence (wt) from hemagglutinin__InfluenzaA__AET84438
MKVKLLVLLCTFTATYADTICIGYHANNSTDTVDTVLEKNVTVTHSVNLLENSHNGKLCLLKGIAPLQLGNCSVAGWILGNPECELLISKESWSYIVEKPNPENGTCYPGHFADYEELREQLSSVSSFERFEIFPKESSWPNHTVTGVSASCSHNGESSFYRNLLWLTGKNGLYPNLSKSYANNKEKEVLVLWGVHHPPNIGVQKTLYNTENAYVSVVSSHYSRKFTPEIAKRPKVRDQEGRINYYWTLLEPGDTIMFEANGNLIAPRYAFALSRGFGSGIINSNAPMDKCDAKCQTPQGAINSSLPFQNVHPVTIGECPKYVRSAKLRMVTGLRNIPSIQSRGLFGAIAGFIEGGWTGMVDGWYGYHHQNEQGSGYAADQKSTQNAINGITNKVNSVIEKMNTQFTAVGKEFNKLERRMENLNKKVDDGFIDIWTYNAELLVLLENERTLDFHDSNVKNLYEKVKSQLKNNAKEIGNGCFEFYHKCNDECMESVKNGTYDYPKYSEESKLNREKIDGVKLESMGVYQILAIYSTVASSLVLLVSLGAISFWMCSNGSLQCRICI

SEQ ID NO: 7816 - protein, 565 aa, Artificial Sequence
  derived and/or modified protein sequence (wt) from hemagglutinin__InfluenzaA__AET84449
MKVKLLVLLCTFTATYADTICIGYHANNSTDTVDTVLEKNVTVTHSVNLLEDSHNGKLCLLKGIAPLQLGNCSVAGWILGNPECELLISRESWSYIVEKPNPENGTCYPGHFADYEELREQLSSVSSFERFEIFPKESSWPNHTTTGVSASCSHNGESSFYKNLLWLTGKNGLYPNLSKSYANNKEKEVLVLWGVHHPPNIGDQRALYHTENAYVSVVSSHYSRKFTPEIAKRPKVRDQEGRINYYWTLLEPGDTIIFEANGNLIAPRYAFALSRGFGSGIINSNAPMDGCDAKCQTPQGAINSSLPFQNVHPVTIGECPKYVRSAKLRMVTGLRNIPSIQSRGLFGAIAGFIEGGWTGMVDGWYGYHHQNEQGSGYAADQKSTQNAINGITNKVNSVIEKMNTQFTAVGKEFNKLERRMENLNKKVDDGFIDIWTYNAELLVLLENERTLDFHDSNVKNLYEKVKSQLKNNAKEIGNGCFEFYHKCNDECMESVKNGTYDYPKYSEESKLNREKIDGVKLESMGVYQILAIYSTVASSLVLLVSLGAISFWMCSNGSLQCRICI

SEQ ID NO: 7817 - protein, 566 aa, Artificial Sequence
  derived and/or modified protein sequence (wt) from hemagglutinin__InfluenzaA__AET98600
MKTIIALSYILCLVFAQKLPGNDNSTATLCLGHHAVPNGTIVKTITNDQIEVTNATELVQSSSTGEICDSPHQILDGENCTLIDALLGDPQCDGFQNKKWDLFVERSKAYSNCYPYDVPDYASLRSLVASSGTLEFNNESFNWTGVTQNGTSSACIRRSNNSFFSRLNWLTHLNFKYPALNVTVPNNEQFDKLYIWGVHHPGTDKDQIFLYAQASGRITVSTKRSQQAVIPNIGSRPRVRNIPSRISIYWTIVKPGDILLINSTGNLIAPRGYFKIRSGKSSIMRSDAPIGKCNSECITPNGSIPNDKPFQNVNRITYGACPRYVKQSTLKLATGMRNVPEKQTRGIFGAIAGFIENGWEGMVDGWYGFRHQNSEGRGQAADLKSTQAAIDQINGKLNRLIGKTNEKFHQIEKEFSEVEGRIQDLEKYVEDTKIDLWSYNAELLVALENQHTIDLTDSEMNKLFEKTKKQLRENAEDMGNGCFTIYHKCDNACIGSIRNGTYDHNVYRDEALNNRFQIKGVELKSGYKDWILWISFAISCFLLCVALLGFIMWACQKGNIRCNICI

SEQ ID NO: 7818 - protein, 566 aa, Artificial Sequence
  derived and/or modified protein sequence (wt) from hemagglutinin__InfluenzaA__AEV76874
MKAILVVLLYTFATANADTLCIGYHANNSTDTVDTVLEKNVTVTHSVNLLEDKHNGKLCKLRGVAPLHLGKCNIAGWILGNPECESFSTASSWSYIVETSSSDNGTCYPGDFIDYEELREQLSSVSSFERFEIFPKTSSWPNHDSNKGVTAACPHAGAKGFYKNLIWLVKKGNSYPKLSKSYINDKGKEVLVLWGIHHPSTTADQQSLYQNADTYVFVGTSRYSKKFNPEIEIRPKVRDQEGRMNYYWTLVEPGDKITFEATGNLVVPRYAFAMERNAGSGIIISDTPVHDCNTTCQTPKGAINTSLPFQNIHPITIGKCPKYVKSTKLRLATGLRNVPSIQSRGLFGAIAGFIEGGWTGMVDGWYGYHHQNEQGSGYAADLKSTQNAIDKITNKVNSVIEKMNTQFTAVGKEFNHLEKRIENLNKKVDDGFLDIWTYNAELLVLLENERTLDYHDSNVKNLYEKVRNQLKNNAKEIGNGCFEFYHKCDNTCMESVKNGTYDYPKYSEEAKLNREEIDGVKLESTRIYQILAIYSTVASSLVLVVSLGAISFWMCSNGSLQCRICI

SEQ ID NO: 7819 - protein, 566 aa, Artificial Sequence; identical to SEQ ID NO: 2669
  derived and/or modified protein sequence (wt) from hemagglutinin__InfluenzaA__AEW10574

SEQ ID NO: 7820 - protein, 566 aa, Artificial Sequence; identical to SEQ ID NO: 2669
  derived and/or modified protein sequence (wt) from hemagglutinin__InfluenzaA__AEW10584

SEQ ID NO: 7821 - protein, 566 aa, Artificial Sequence; identical to SEQ ID NO: 3022
  derived and/or modified protein sequence (wt) from hemagglutinin__InfluenzaA__AEW10594

SEQ ID NO: 7822 - protein, 566 aa, Artificial Sequence; identical to SEQ ID NO: 3022
  derived and/or modified protein sequence (wt) from hemagglutinin__InfluenzaA__AEW10604

SEQ ID NO: 7823 - protein, 566 aa, Artificial Sequence; identical to SEQ ID NO: 3022
  derived and/or modified protein sequence (wt) from hemagglutinin__InfluenzaA__AEW10614

SEQ ID NO: 7824 - protein, 566 aa, Artificial Sequence; identical to SEQ ID NO: 3022
  derived and/or modified protein sequence (wt) from hemagglutinin__InfluenzaA__AEW10624

SEQ ID NO: 7825 - protein, 566 aa, Artificial Sequence; identical to SEQ ID NO: 2669
  derived and/or modified protein sequence (wt) from hemagglutinin__InfluenzaA__AEW10634

SEQ ID NO: 7826 - protein, 566 aa, Artificial Sequence; identical to SEQ ID NO: 2656
  derived and/or modified protein sequence (wt) from hemagglutinin__InfluenzaA__AEW10644

SEQ ID NO: 7827 - protein, 566 aa, Artificial Sequence
  derived and/or modified protein sequence (wt) from hemagglutinin__InfluenzaA__AEW10654
MKAILVVLLYTFATANADTLCIGYHANNSTDTVDTVLEKNVTVTHSVNLLEDKHNGKLCKLRGVAPLHLGKCNIAGWILGNPECESLSTASSWSYIVETSSSDNGTCYPGDFIDYEELREQLSSVSSFERFEIFPKTSSWPNHDSNKGVTAACPHAGAKSFYKNLIWLVKKGNSYPKLNKSYINDKGKEVLVLWGIHHPSTSADQQSLYQNADAYVFVGSSRYSKKFKPEIAIRPKVRDQEGRMNYYWTLVEPGDKITFEATGNLVVPRYAFAMERNAGSGIIISDTPVHDCNTTCQTPKGAINTSLPFQNIHPITIGKCPKYVKSTKLRLATGLRNVPSIQSRGLFGAIAGFIEGGWTGMVDGWYGYHHQNEQGSGYAADLKSTQNAIDEITNKVNSVIEKMNTQFTAVGKEFNHLEKRIENLNKKVDDGFLDIWTYNAELLVLLENERTLDYHDSNVKNLYEKVRSQLKNNAKEIGNGCFEFYHKCDNTCMESVKNGTYDYPKYSEEAKLNREEIDGVKLESTRIYQILAIYSTVASSLVLVVSLGAISFWMCSNGSLQCRICI

SEQ ID NO: 7828 - protein, 566 aa, Artificial Sequence; identical to SEQ ID NO: 2656
  derived and/or modified protein sequence (wt) from hemagglutinin__InfluenzaA__AEW10664

SEQ ID NO: 7829 - protein, 566 aa, Artificial Sequence
  derived and/or modified protein sequence (wt) from hemagglutinin__InfluenzaA__AEW10674
MKAILVVLLYTFATANADTLCIGYHANNSTDTVDTVLEKNVTVTHSVNLLEDKHNGKLCKLRGVAPLHLGKCNIAGWILGNPECESLSTASSWSYIVETSSSDNGTCYPGDFIDYEELREQLSSVSSFERFEIFPKTSSWPNHDSNKGVTAACPHAEAKSFYKNLIWLVKKGNSYPKLSKSYINDKGKEVLVLWGIHHPSTSADQQSLYQNADAYVFVGTSRYSKKFKPEIAIRPKVRDQEGRMNYYWTLVEPGDKITFEATGNLVVPRYAFAMERNAGSGIIISDTPVHDCNTTCQTPKGAINTSLPFQNIHPITIGKCPKYVKSTKLRLATGLRNVPSIQSRGLFGAIAGFIEGGWTGMVDGWYGYHHQNEQGSGYAADLKSTQNAIDEITNKVNSVIEKMNTQFTAVGKEFNHLEKRIENLNKKVDDGFLDIWTYNAELLVLLENERTLDYHDSNVKNLYEKVRSQLKNNAKEIGNGCFEFYHKCDNTCMESVKNGTYDYPKYSEEAKLNREEIDGVKLESTRIYQILAIYSTVASSLVLVVSLGAISFWMCSNGSLQCRICI

SEQ ID NO: 7830 - protein, 566 aa, Artificial Sequence; identical to SEQ ID NO: 2669
  derived and/or modified protein sequence (wt) from hemagglutinin__InfluenzaA__AEW10684

SEQ ID NO: 7831 - protein, 566 aa, Artificial Sequence; identical to SEQ ID NO: 2656
  derived and/or modified protein sequence (wt) from hemagglutinin__InfluenzaA__AEW10694

SEQ ID NO: 7832 - protein, 566 aa, Artificial Sequence; identical to SEQ ID NO: 2656
  derived and/or modified protein sequence (wt) from hemagglutinin__InfluenzaA__AEW10704

SEQ ID NO: 7833 - protein, 566 aa, Artificial Sequence; identical to SEQ ID NO: 7827
  derived and/or modified protein sequence (wt) from hemagglutinin__InfluenzaA__AEW10724

SEQ ID NO: 7834 - protein, 566 aa, Artificial Sequence; identical to SEQ ID NO: 2669
  derived and/or modified protein sequence (wt) from hemagglutinin__InfluenzaA__AEW10734

SEQ ID NO: 7835 - protein, 566 aa, Artificial Sequence
  derived and/or modified protein sequence (wt) from hemagglutinin__InfluenzaA__AEW10744
MKAILVVLLYTFATANADTLCIGYHANNSTDTVDTVLEKNVTVTHSVNILEDKHNGKLCKLRGVAPLHLGKCNIAGWILGNPECESLSTASSWSYIVETSSSDNGTCYPGDFIDYEELREQLSSVSSFERFEIFPKTSSWPNHDSNKGVTAACPHAGAKSFYKNLIWLVKKGNSYPKLSKSYINDKGKEVLVLWGIHHPSTSADQQSLYQNADAYVFVGSSRYSKKFKPEIAIRPKVRDQEGRMNYYWTLVEPGDKITFEATGNLVVPRYAFAMERNAGSGIIISDTPVHDCNTTCQTPKGAINTSLPFQNIHPITIGKCPKYVKSTKLRLATGLRNVPSILSRGLFGAIAGFIEGGWTGMVDGWYGYHHQNEQGSGYAADLKSTQNAIDEITNKVNSVIEKMNTQFTAVGKEFNHLEKRIENLNKKVDDGFLDIWTYNAELLVLLENERTLDYHDSNVKNLYEKVRSQLKNNAKEIGNGCFEFYHKCDNTCMESVKNGTYDYPKYSEEAKLNREEIDGVKLESTRIYQILAIYSTVASSLVLVVSLGAISFWMCSNGSLQCRICI

SEQ ID NO: 7836 - protein, 566 aa, Artificial Sequence; identical to SEQ ID NO: 7835
  derived and/or modified protein sequence (wt) from hemagglutinin__InfluenzaA__AEW10754

SEQ ID NO: 7837 - protein, 566 aa, Artificial Sequence
  derived and/or modified protein sequence (wt) from hemagglutinin__InfluenzaA__AEW10764
MKAILVVLLYTFATANADTLCIGYHANNSTDTVDTVLEKNVTVTHSVNILEDKHNGKLCKLRGVAPLHLGKCNIAGWILGNPECESLSTASSWSYIVETSSSDNGTCYPGDFIDYEELREQLSSVSSFERFEIFPKTSSWPNHDSNKGVTAACPHAGAKSFYKNLIWLVKKGNSYPKLSKSYINDKGKEVLVLWGIHHPSTSADQQSLYQNANAYVFVGSSRYSKKFKPEIAIRPKVRDQEGRMNYYWTLVEPGDKITFEATGNLVVPRYAFAMERNAGSGIIISDTPVHDCNTTCQTPKGAINTSLPFQNIHPITIGKCPKYVKSTKLRLATGLRNVPSIQSRGLFGAIAGFIEGGWTGMVDGWYGYHHQNEQGSGYAADLKSTQNAIDEITNKVNSVIEKMNTQFTAVGKEFNHLEKRIENLNKKVDDGFLDIWTYNAELLVLLENERTLDYHDSNVKNLYEKVRSQLKNNAKEIGNGCFEFYHKCDNTCMESVKNGTYDYPKYSEEAKLNREEIDGVKLESTRIYQILAIYSTVASSLVLVVSLGAISFWMCSNGSLQCRICI

SEQ ID NO: 7838 - protein, 566 aa, Artificial Sequence; identical to SEQ ID NO: 2913
  derived and/or modified protein sequence (wt) from hemagglutinin__InfluenzaA__AEW10774

SEQ ID NO: 7839 - protein, 566 aa, Artificial Sequence; identical to SEQ ID NO: 2656
  derived and/or modified protein sequence (wt) from hemagglutinin__InfluenzaA__AEW10784

SEQ ID NO: 7840 - protein, 566 aa, Artificial Sequence; identical to SEQ ID NO: 2656
  derived and/or modified protein sequence (wt) from hemagglutinin__InfluenzaA__AEW10794

SEQ ID NO: 7841 - protein, 566 aa, Artificial Sequence; identical to SEQ ID NO: 2849
  derived and/or modified protein sequence (wt) from hemagglutinin__InfluenzaA__AEW10804

SEQ ID NO: 7842 - protein, 566 aa, Artificial Sequence; identical to SEQ ID NO: 2667
  derived and/or modified protein sequence (wt) from hemagglutinin__InfluenzaA__AEW10814

SEQ ID NO: 7843 - protein, 566 aa, Artificial Sequence; identical to SEQ ID NO: 2760
  derived and/or modified protein sequence (wt) from hemagglutinin__InfluenzaA__AEW10824

SEQ ID NO: 7844 - protein, 566 aa, Artificial Sequence; identical to SEQ ID NO: 2656
  derived and/or modified protein sequence (wt) from hemagglutinin__InfluenzaA__AEW10834

SEQ ID NO: 7845 - protein, 566 aa, Artificial Sequence; identical to SEQ ID NO: 2849
  derived and/or modified protein sequence (wt) from hemagglutinin__InfluenzaA__AEW10844

SEQ ID NO: 7846 - protein, 566 aa, Artificial Sequence
  derived and/or modified protein sequence (wt) from hemagglutinin__InfluenzaA__AEW10854
MKAILVVLLYTFATANADTLCIGYHANNSTDTVDTVLEKNVTVTHSVNILEDKHNGKLCKLRGVAPLHLGKCNIAGWILGNPECESLSTASSWSYIVETSSSDNGTCYPGDFIDYEELREQLSSVSSFERFEIFPKTSSWPNHDSNKGVTAACPHAGAKSFYKNLIWLVKKGNSYPKLSKSYINDKGKEVLVLWGIHHPSTSADQQSLYQNADAYVFVGSSRYSKKFKPEITIRPKVRDQEGRMNYYWTLVEPGDKITFEATGNLVVPRYAFAMERNAGSGIIISDTPVHDCNTTCQTPKGAINTSLPFQNIHPITIGKCPKYVKSTKLRLATGLRNVPSIQSRGLFGAIAGFIEGGWTGMVDGWYGYHHQNEQGSGYAADLKSTQNAIDEITNKVNSVIEKMNTQFTAVGKEFNHLEKRIENLNKKVDDGFLDIWTYNAELLVLLENERTLDYHDSNVKNLYEKVRSQLKNNAKEIGNGCFEFYHKCDNTCMESVKNGTYDYPKYSEEAKLNREEIDGVKLESTRIYQILAIYSTVASSLVLVVSLGAISFWMCSNGSLQCRICI

SEQ ID NO: 7847 - protein, 566 aa, Artificial Sequence; identical to SEQ ID NO: 2849
  derived and/or modified protein sequence (wt) from hemagglutinin__InfluenzaA__AEW10864

SEQ ID NO: 7848 - protein, 566 aa, Artificial Sequence; identical to SEQ ID NO: 2849
  derived and/or modified protein sequence (wt) from hemagglutinin__InfluenzaA__AEW10874

SEQ ID NO: 7849 - protein, 566 aa, Artificial Sequence; identical to SEQ ID NO: 2849
  derived and/or modified protein sequence (wt) from hemagglutinin__InfluenzaA__AEW10884

SEQ ID NO: 7850 - protein, 566 aa, Artificial Sequence; identical to SEQ ID NO: 2656
  derived and/or modified protein sequence (wt) from hemagglutinin__InfluenzaA__AEW10894

SEQ ID NO: 7851 - protein, 566 aa, Artificial Sequence; identical to SEQ ID NO: 2849
  derived and/or modified protein sequence (wt) from hemagglutinin__InfluenzaA__AEW10904

SEQ ID NO: 7852 - protein, 566 aa, Artificial Sequence; identical to SEQ ID NO: 2849
  derived and/or modified protein sequence (wt) from hemagglutinin__InfluenzaA__AEW10914

SEQ ID NO: 7853 - protein, 566 aa, Artificial Sequence; identical to SEQ ID NO: 2656
  derived and/or modified protein sequence (wt) from hemagglutinin__InfluenzaA__AEW10924

SEQ ID NO: 7854 - protein, 566 aa, Artificial Sequence; identical to SEQ ID NO: 2656
  derived and/or modified protein sequence (wt) from hemagglutinin__InfluenzaA__AEW10934

SEQ ID NO: 7855 - protein, 566 aa, Artificial Sequence; identical to SEQ ID NO: 2849
  derived and/or modified protein sequence (wt) from hemagglutinin__InfluenzaA__AEW10944

SEQ ID NO: 7856 - protein, 566 aa, Artificial Sequence; identical to SEQ ID NO: 2669
  derived and/or modified protein sequence (wt) from hemagglutinin__InfluenzaA__AEW10954

SEQ ID NO: 7857 - protein, 566 aa, Artificial Sequence; identical to SEQ ID NO: 2669
  derived and/or modified protein sequence (wt) from hemagglutinin__InfluenzaA__AEW10964

SEQ ID NO: 7858 - protein, 566 aa, Artificial Sequence; identical to SEQ ID NO: 2849
  derived and/or modified protein sequence (wt) from hemagglutinin__InfluenzaA__AEW10974

SEQ ID NO: 7859 - protein, 566 aa, Artificial Sequence; identical to SEQ ID NO: 2669
  derived and/or modified protein sequence (wt) from hemagglutinin__InfluenzaA__AEW10984

SEQ ID NO: 7860 - protein, 566 aa, Artificial Sequence; identical to SEQ ID NO: 2669
  derived and/or modified protein sequence (wt) from hemagglutinin__InfluenzaA__AEW10994

SEQ ID NO: 7861 - protein, 566 aa, Artificial Sequence; identical to SEQ ID NO: 2669
  derived and/or modified protein sequence (wt) from hemagglutinin__InfluenzaA__AEW11004

SEQ ID NO: 7862 - protein, 566 aa, Artificial Sequence; identical to SEQ ID NO: 2669
  derived and/or modified protein sequence (wt) from hemagglutinin__InfluenzaA__AEW11014

SEQ ID NO: 7863 - protein, 566 aa, Artificial Sequence; identical to SEQ ID NO: 2669
  derived and/or modified protein sequence (wt) from hemagglutinin__InfluenzaA__AEW11024

SEQ ID NO: 7864 - protein, 566 aa, Artificial Sequence; identical to SEQ ID NO: 2669
  derived and/or modified protein sequence (wt) from hemagglutinin__InfluenzaA__AEW11034

SEQ ID NO: 7865 - protein, 566 aa, Artificial Sequence; identical to SEQ ID NO: 2849
  derived and/or modified protein sequence (wt) from hemagglutinin__InfluenzaA__AEW11044

SEQ ID NO: 7866 - protein, 566 aa, Artificial Sequence; identical to SEQ ID NO: 2669
  derived and/or modified protein sequence (wt) from hemagglutinin__InfluenzaA__AEW11054

SEQ ID NO: 7867 - protein, 566 aa, Artificial Sequence; identical to SEQ ID NO: 2656
  derived and/or modified protein sequence (wt) from hemagglutinin__InfluenzaA__AEW11064

SEQ ID NO: 7868 - protein, 566 aa, Artificial Sequence; identical to SEQ ID NO: 2656
  derived and/or modified protein sequence (wt) from hemagglutinin__InfluenzaA__AEW11074

SEQ ID NO: 7869 - protein, 566 aa, Artificial Sequence
  derived and/or modified protein sequence (wt) from hemagglutinin__InfluenzaA__AEW11084
MKAILVVLLYTFATANADTLCIGYHANNSTDTVDTVLEKNVTVTHSVNLLEDKHNGKLCKLRGVAPLHLGKCNIAGWILGNPECESLSTASSWSYIVETSSSDNGTCYPGDFIDYEELREQLSSVSSFERFEIFPKTSSWPNHDSNKGVTAACLHAGAKSFYKNLIWLVKKGNSYPKLSKSYINDKGKEVLVLWGIHHPSTSADQQSLYQNADAYVFVGSSRYSKKFKPEIAIRPKVRDQEGRMNYYWTLVEPGDKITFEATGNLVVPRYAFAMERNAGSGIIISDTPVHDCNTTCQTPKGAINTSLPFQNIHPITIGKCPKYVKSTKLRLATGLRNVPSIQSRGLFGAIAGFIEGGWTGMVDGWYGYHHQNEQGSGYAADLKSTQNAIDEITNKVNSVIEKMNTQFTAVGKEFNHLEKRIENLNKKVDDGFLDIWTYNAELLVLLENERTLDYHDSNVKNLYEKVRSQLKNNAKEIGNGCFEFYHKCDNTCMESVKNGTYDYPKYSEEAKLNREEIDGVKLESTRIYQILAIYSTVASSLVLVVSLGAISFWMCSNGSLQCRICI

SEQ ID NO: 7870 - protein, 566 aa, Artificial Sequence; identical to SEQ ID NO: 2656
  derived and/or modified protein sequence (wt) from hemagglutinin__InfluenzaA__AEW11094

SEQ ID NO: 7871 - protein, 566 aa, Artificial Sequence; identical to SEQ ID NO: 2656
  derived and/or modified protein sequence (wt) from hemagglutinin__InfluenzaA__AEW11104

SEQ ID NO: 7872 - protein, 566 aa, Artificial Sequence; identical to SEQ ID NO: 2669
  derived and/or modified protein sequence (wt) from hemagglutinin__InfluenzaA__AEW11114

SEQ ID NO: 7873 - protein, 566 aa, Artificial Sequence
  derived and/or modified protein sequence (wt) from hemagglutinin__InfluenzaA__AEW11124
MKAILVVLLYTFATANADTLCIGYHANNSTDTVDTVLEKNVTVTHSVNLLEDKHNGKLCKLRGVAPLHLGKCNIAGWILGNPECESLSTASSWSYIVETSSSDNGTCYPGDFIDYEELREQLSSVSSFERFEIFPKTSSWPNHDSNKGVTAACPHAGAKSFYKNLIWLVKKGNSYPKLSKSYINDKGKEVLVLWGIHHPSTSADQQSLYQNADAYVFVGSSRYSKKFKPEIAIRPKVRDQEGRMNYYWTLVEPGDKITFEATGNLVVPRYAFAMERNAGSGIIISDTPVHDCNTTCQTPKGAINTSLPFQNIHPITIGKCPKFVKSTKLRLATGLRNVPSIQSRGLFGAIAGFIEGGWTGMVDGWYGYHHQNEQGSGYAADLKSTQNAIDEITNKVNSVIEKMNTQFTAVGKEFNHLEKRIENLNKKVDDGFLDIWTYNAELLVLLENERTLDYHDSNVKNLYEKVRSQLKNNAKEIGNGCFEFYHKCDNTCMESVKNGTYDYPKYSEEAKLNREEIDGVKLESTRIYQILAIYSTVASSLVLVVSLGAISFWMCSNGSLQCRICI

SEQ ID NO: 7874 - protein, 566 aa, Artificial Sequence
  derived and/or modified protein sequence (wt) from hemagglutinin__InfluenzaA__AEW11134
MKAILVVLLYTFATANADTLCIGYHANNSTDTVDTVLEKNVTVTHSVNILEDKHNGKLCKLRGVAPLHLGKCNIAGWILGNPECESLSTASSWSYIVETSSSDNGTCYPGDFIDYEELREQLSSVSSFERFEIFPKTSSWPNHDSNKGVTAACPHAGAKSFYKNLIWLVKKGNSYPKLSKSYINDKGKEVLVLWGIHHPSTSADQQSLYQNADAYVFVGSSRYSKKFKPEIAIRPKVRDQEGRMNYYWTLVEPGDKITFEATGNLVVPRYAFAMERNAGSGIIISDTPVHDCNTTCQTPKGAINTSLPFQNIHPITIGKCPKYVKSTKLRLATGLRNVPSIQSRGLFGAIAGFIEGGWTGMVDGWYGYHHQNEQGSGYAADLKSTQNAIDEITNKVNSVIEKMNTQFTAVGKEFNHLEKRIENLNKKVDDGFLDIWTYNAELLVLLENERTLDYHDSNVKNLYEKVRSQLKNNAKEIGNGCFEFYHKCDNTCMESVKNGTYDYPKYSEEAKLNKEEIDGVKLESTRIYQILAIYSTVASSLVLVVSLGAISFWMCSNGSLQCRICI

SEQ ID NO: 7875 - protein, 566 aa, Artificial Sequence; identical to SEQ ID NO: 2669
  derived and/or modified protein sequence (wt) from hemagglutinin__InfluenzaA__AEW11144

SEQ ID NO: 7876 - protein, 566 aa, Artificial Sequence; identical to SEQ ID NO: 2669
  derived and/or modified protein sequence (wt) from hemagglutinin__InfluenzaA__AEW11154

SEQ ID NO: 7877 - protein, 566 aa, Artificial Sequence; identical to SEQ ID NO: 7869
  derived and/or modified protein sequence (wt) from hemagglutinin__InfluenzaA__AEW11164

SEQ ID NO: 7878 - protein, 566 aa, Artificial Sequence; identical to SEQ ID NO: 7869
  derived and/or modified protein sequence (wt) from hemagglutinin__InfluenzaA__AEW11174

SEQ ID NO: 7879 - protein, 566 aa, Artificial Sequence; identical to SEQ ID NO: 2669
  derived and/or modified protein sequence (wt) from hemagglutinin__InfluenzaA__AEW11184

SEQ ID NO: 7880 - protein, 566 aa, Artificial Sequence; identical to SEQ ID NO: 2656
  derived and/or modified protein sequence (wt) from hemagglutinin__InfluenzaA__AEW11194

SEQ ID NO: 7881 - protein, 566 aa, Artificial Sequence; identical to SEQ ID NO: 2669
  derived and/or modified protein sequence (wt) from hemagglutinin__InfluenzaA__AEW11204

SEQ ID NO: 7882 - protein, 566 aa, Artificial Sequence; identical to SEQ ID NO: 2669
  derived and/or modified protein sequence (wt) from hemagglutinin__InfluenzaA__AEW11214

SEQ ID NO: 7883 - protein, 566 aa, Artificial Sequence; identical to SEQ ID NO: 2849
  derived and/or modified protein sequence (wt) from hemagglutinin__InfluenzaA__AEW11224

SEQ ID NO: 7884 - protein, 566 aa, Artificial Sequence; identical to SEQ ID NO: 2669
  derived and/or modified protein sequence (wt) from hemagglutinin__InfluenzaA__AEW11234

SEQ ID NO: 7885 - protein, 566 aa, Artificial Sequence; identical to SEQ ID NO: 2669
  derived and/or modified protein sequence (wt) from hemagglutinin__InfluenzaA__AEW11244

SEQ ID NO: 7886 - protein, 566 aa, Artificial Sequence
  derived and/or modified protein sequence (wt) from hemagglutinin__InfluenzaA__AEW11254
MKAILVVLLYTFATANADTLCIGYHANNSTDTVDTVLEKNVTVTHSVNLLEDKHNGKLCKLRGVAPLHLGKCNIAGWILGNPECESLSTASSWSYIVETSSSDNGTCYPGDFIDYEELREQLSSVSSFERFEIFPKTSSWPNHDSNKGVTAACLHAGAKSFYKNLIWLVKKGNSYPKLSKSYINDKGKEVLVLWGIHHPSASADQQSLYQNADAYVFVGSSRYSKKVKPEIAIRPKVRDQEGRMNYYWTLVEPGDKITFEATGNLVVPRYAFAMERNAGSGIIISDTPVHDCNTTCQTPKGAINTSLPFQNIHPITIGKCPKYVKSTKLRLATGLRNVPSIQSRGLFGAIAGFIEGGWTGMVDGWYGYHHQNEQGSGYAADLKSTQNAIDEITNKVNSVIEKMNTQFTAVGKEFNHLEKRIENLNKKVDDGFLDIWTYNAELLVLLENERTLDYHDSNVKNLYEKVRSQLKNNAKEIGNGCFEFYHKCDNTCMESVKNGTYDYPKYSEEAKLNREEIDGVKLESTRIYQILAIYSTVASSLVLVVSLGAISFWMCSNGSLQCRICI

SEQ ID NO: 7887 - protein, 566 aa, Artificial Sequence; identical to SEQ ID NO: 2656
  derived and/or modified protein sequence (wt) from hemagglutinin__InfluenzaA__AEW11263

SEQ ID NO: 7888 - protein, 566 aa, Artificial Sequence; identical to SEQ ID NO: 2656
  derived and/or modified protein sequence (wt) from hemagglutinin__InfluenzaA__AEW11273

SEQ ID NO: 7889 - protein, 566 aa, Artificial Sequence; identical to SEQ ID NO: 2656
  derived and/or modified protein sequence (wt) from hemagglutinin__InfluenzaA__AEW11283

SEQ ID NO: 7890 - protein, 566 aa, Artificial Sequence; identical to SEQ ID NO: 2656
  derived and/or modified protein sequence (wt) from hemagglutinin__InfluenzaA__AEW11293

SEQ ID NO: 7891 - protein, 566 aa, Artificial Sequence
  derived and/or modified protein sequence (wt) from hemagglutinin__InfluenzaA__AEW11303
MKAILVVLLYTFATANADTLCIGYHANNSTDTVDTVLEKNVTVTHSVNLLEDKHNGKLCKLRGVAPLHLGKCNIAGWILGNPECESLSTASSWSYIVETSSSDNGTCYPGDFIDYEELREQLSSVSSFERFEIFPKTSSWPNHDSNKGVTTACPHAGAKSFYKNLIWLVKKGNSYPKLSKSYINDKGKEVLVLWGIHHPSTSADQQSLYQNADAYVFVGTSRYSKKFKPEIAIRPKVRDQEGRMNYYWTLVEPGDKITFEATGNLVVPRYAFAMERNAGSGIIISDTPVHDCNTTCQTPKGAINTSLPFQNIHPITIGKCPKYVKSTKLRLATGLRNVPSIQSRGLFGAIAGFIEGGWTGMVDGWYGYHHQNEQGSGYAADLKSTQNAIDEITNKVNSVIEKMNTQFTAVGKEFNHLEKRIENLNKKVDDGFLDIWTYNAELLVLLENERTLDYHDSNVKNLYEKVRSQLKNNAKEIGNGCFEFYHKCDNTCMESVKNGTYDYPKYSEEAKLNREEIDGVKLESTRIYQILAIYSTVASSLVLVVSLGAISFWMCSNGSLQCRVCI

SEQ ID NO: 7892 - protein, 566 aa, Artificial Sequence; identical to SEQ ID NO: 2656
  derived and/or modified protein sequence (wt) from hemagglutinin__InfluenzaA__AEW11313

SEQ ID NO: 7893 - protein, 566 aa, Artificial Sequence
  derived and/or modified protein sequence (wt) from hemagglutinin__InfluenzaA__AEW11323
MKAILVVLLYTFATANADTLCIGYHANNSTDTVDTVLEKNVTVTHSVNLLEDKHNGKLCKLRGVAPLHLGKCNIAGWILGNPECESLSTASSWSYIVETSSSDNGTCYPGDFIDYEELREQLSSVSSFERFEIFPKTSSWPNHDSNKGVTAACPHAGAKSFYKNLIWLVKKGNSYPKLSKSYINDKGKEVLVLWGIHHPSTSADQQSLYQNADAYVFVGTSRYSKKFKPEIAIRPKVRGQEGRMNYYWTLVEPGDKITFEATGNLVVPRYAFAMERNAGSGIIISDTPVHDCNTTCQTPKGAVNTSLPFQNIHPITIGKCPKYVKSTKLRLATGLRNVPSIQSRGLFGAIAGFIEGGWTGMVDGWYGYHHQNEQGSGYAADLKSTQNAIDEITNKVNSVIEKMNTQFTAVGKEFNHLEKRIENLNKKVDDGFLDIWTYNAELLVLLENERTLDYHDSNVKNLYEKVRSQLKNNAKEIGNGCFEFYHKCDNTCMESVKNGTYDYPKYSEEAKLNREEIDGVKLESTRIYQILAIYSTVASSLVLVVSLGAISFWMCSNGSLQCRICI

SEQ ID NO: 7894 - protein, 566 aa, Artificial Sequence
  derived and/or modified protein sequence (wt) from hemagglutinin__InfluenzaA__AEW22712
MKAILVVLLYTFATANADTLCIGYHANNSTDTIDTVLEKNVTVTHSVNLLEDKHNGKLCKLRGVAPLHLGKCNIAGWILGNPECESLSTASSWSYIVETSSSDNGTCYPGDFIDYEELREQLSSVSSFERFEIFPKTSSWPNHDSNKGVTAACPHAGAKGFYKNLIWLVKKGNSYPKLSKSYINDKGKEVLVLWGIHHPSTTADQQSLYQNADTYVFVGTSRYSKKFKPEIAIRPKVRDQEGRMNYYWTLVKPGDKITFEATGNLVVPRYAFAMERNAGSGIIISDTPVHDCNTTCQTPKGAINTSLPFQNIHPITIGKCPKYVKSTKLRLATGLRNVPSIQSRGLFGAIAGFIEGGWTGMVDGWYGYHHQNEQGSGYAADLKSTQNAIDKITNKVNSVIEKMNTQFTAVGKEFNHLEKRIENLNKKVDDGFLDIWTYNAELLVLLENERTLDYHDSNVKNLYEKVRNQLKNNAKEIGNGCFEFYHKCDNTCMESVKNGTYDYPKYSEEAKLNREEIDGVKLESTRIYQILAIYSTVASSLVLVVSLGAISFWMCSNGSLQCRICI

SEQ ID NO: 7895 - protein, 566 aa, Artificial Sequence
  derived and/or modified protein sequence (wt) from hemagglutinin__InfluenzaA__AEW22718
MKAILVVLLYTFATANADTLCIGYHANNSTDTVDTVLEKNVTVTHSVNLLEDKHNGKLCKLRGVAPLHLGKCNIAGWILGNPECESLSTASSWSYIVETSSSDNGTCYPGDFIDYEELREQLSSVSSFERFEIFPKTSSWPNHDSNKGVTAACPHAGAKGFYKNLIWLVKKGNSYPKLSKSYINDKGKEVLVLWGIHHPSTTADQQSLYQNADTYVFVGTSRYSKKFKPEIAIRPKVRDQEGRMNYYWTLVKPGDKITFEATGNLVVPRYAFAMERNAGSGIIISDTPVHDCNTTCQTPKGAINTSLPFQNIHPITIGKCPKYVKSTKLRLATGLRNVPSIQSRGLFGAIAGFIEGGWTGMVDGWYGYHHQNEQGSGYAADLKSTQNAIDKITNKVNSVIEKMNTQFTAVGKEFNHLEKRIENLNKKVDDGFLDIWTYNAELLVLLENERTLDYHDSNVKNLYEKVRNQLKNNAKEIGNGCFEFYHKCDNTCMESVKNGTYDYPKYSEEAKLNREEIDGVKLESTRIYQILAIYSTVASSLVLVVSLGAISFWMCSNGSLQCRICI

SEQ ID NO: 7896 - protein, 566 aa, Artificial Sequence; identical to SEQ ID NO: 6454
  derived and/or modified protein sequence (wt) from hemagglutinin__InfluenzaA__AEW22720

SEQ ID NO: 7897 - protein, 566 aa, Artificial Sequence; identical to SEQ ID NO: 6454
  derived and/or modified protein sequence (wt) from hemagglutinin__InfluenzaA__AEW22722

SEQ ID NO: 7898 - protein, 566 aa, Artificial Sequence
  derived and/or modified protein sequence (wt) from hemagglutinin__InfluenzaA__AEW22724
MKAILVVLLYTFATANADTLCIGYHANNSTDTVDTVLEKNVTVTHSVNLLEDKHNGKLCKLRGVAPLHLGKCNIAGWILGNPECESLSTASSWSYIVETSSSDNGTCYPGDFIDYEELREQLSSVSSFERFEIFPKTSSWPNHDSNKGVTAACPHAGAKGFYKNLIWLVKKGNSYPKLSKSYINDKGKEVLVLWGIHHPSTTADQQSLYQNADTYVFVGTSRYSKKFKPEIAIRPKVRDQEGRMNYYWTLVEPGDKITFEATGNLVVPRYAFAMERNAGSGIIISDTPVHDCNTTCQTPKGAINTSLPFQNIHPITIGKCPKYVKSTKLRLATGLRNVPSIQSRGLFGAIAGFIEGGWTGMVDGWYGYHHQNEQGSGYAADLKSTQNAIDKITNKVNSVIEKMNTQFTAVGKEFNHLEKRIENLNKKVDDGFLDIWTYNAELLVLLENERTLDYHDSNVKNLYEKVRNQLKNNAREIGNGCFEFYHKCDNTCMESVKNGTYDYPKYSEEAKLNREEIDGVKLESTRIYQILAIYSTVASSLVLVVSLGAISFWMCSNGSLQCRICI

SEQ ID NO: 7899 - protein, 566 aa, Artificial Sequence
  derived and/or modified protein sequence (wt) from hemagglutinin__InfluenzaA__AEW25297
MKAILVVLLYTFATANADTLCIGYHANNSTDTVDTVLEKNVTVTHSVNLLEDKHNGKLCKLRGVAPLHLGKCNIAGWIPGNPECESLSTASSWSYIVETSSSDNGTCYPGDFIDYEELREQLSSVSSFERFEIFPKTSSWPNHDPNKGVTAACPHAGAKSFYKNLIWLVKKGNSYPKLSKSYINDKGKEVLVLWGIHHPSTSADQQSLYQNADAYVFVGTSRYSKKFKPEIAIRPKVRDQEGRMNYYWTLVEPGDKITFEATGNLVVPRYAFAMERNAGSGIIISDTPVHDCNTTCQTPRGAINTSLPFQNIHPITIGKCPKYVKSTKLRLATGLRNVPSIQSRGLFGAIAGFIEGGWTGMVDGWYGYHHQNEQGSGYAADLKSTQNAIDEITNKVNSVIEKMNTQFTAVGKEFNHLEKRIENLNKKVDDGFLDIWTYNAELLVLLENERTLDYHDSNVKNLYEKVRSQLKNNAKEIGNGCFEFYHKCDNTCMESVKNGTYDYPKYSEEAKLNREEIDGVKLESTRIYQILAIYSTVASSLVLVVSLGAISFWMCSNGSLQCRICI

SEQ ID NO: 7900 - protein, 566 aa, Artificial Sequence; identical to SEQ ID NO: 3467
  derived and/or modified protein sequence (wt) from hemagglutinin__InfluenzaA__AEW25306

SEQ ID NO: 7901 - protein, 566 aa, Artificial Sequence
  derived and/or modified protein sequence (wt) from hemagglutinin__InfluenzaA__AEW25315
MKAILVVLLYTFATANADTLCIGYHANNSTDTVDTVLEKNVTVTHSVNLLEDKHNGKLCKLRGVAPLHLGKCNIAGWILGNPECESLSTASSWSYIVETSSSDNGTCYPGDFIDYEELREQLSSVSSFERFEIFPKTSSWPNHDPNKGVTAACPHAGAKSFYKNLIWLVKKGNSYPKLSKSYINDKGKEVLVLWGIHHPSTSADQQSLYQNADAYVFVGTSRYSKKFKPEIAIRPKVRDQEGRMNYYWTLVEPGDKITFEATGNLVVPRYAFAMERNAGSGIIISDTPVHDCNTTCQTPKGAINTSLPFQNIHPITIGKCPKYVKSTKLRLATGLRNVPSIQSRGLFGAIAGFIEGGWTGMVDGWYGYHHQNEQGSGYAADLKSTQNAIDEITNKVNSVIEKMNTQFTAVGKEFNHLEKRIENLNKKVDDGFLDIWTYNAELLVLLENERTLDYHDSNVKNLYEKVRSQLKNNAKEIGNGCFEFYHKCDNTCMESVKNGTYDYPKYSEEAKLNREEIDGVKLESTRIYQILAIYSTVASSLVLVVSLGAISFWVCSNGSLQCRICI

SEQ ID NO: 7902 - protein, 566 aa, Artificial Sequence
  derived and/or modified protein sequence (wt) from hemagglutinin__InfluenzaA__AEW25331
MKAILVVLLYTFATANADTLCIGYHANNSTDTVDTVLEKNVTVTHSVNLLEDKHNGKLCKLRGVAPLHLGKCNIAGWILGNPECESFSTSSSWSYIVETSSSDNGTCYPGDFIDYEELREQLSSVSSFERFEIFPKTSSWPNHDSNKGVTAACPHAGAKSFYKNLIWLVKKGNSYPKLSKSYINDKGKEVLVLWGIHHPSTSADQQSLYQNADAYVFVGTSRYSKKFKPEIAIRPKVRDQEGRMNYYWTLVEPGDKITFEATGNLVVPRYAFAMERNAGSGIIISDTPVHDCNTTCQTPKGAINTSLPFQNIPPITIGKCPKYVKSTKLRLATGLRNVPSIQSRGLFGAIAGFIEGGWTGMVDGWYGYHHQNEQGSGYAADLKSTQNAIDEITNKVNSVIEKMNTQFTAVGKEFNHLEKRIENLNKKVDDGFLDIWTYNAELLVLLENERTLDYHDSNVKNLYEKVRSQLKNNAKEIGNGCFEFYHKCDNTCMESVKNGTYDYPKYSEEAKLNREEIDGVKLESTRIYQILAIYSTVASSLVLVVSLGAISFWMCSNGSLQCRICI

SEQ ID NO: 7903 - protein, 566 aa, Artificial Sequence
  derived and/or modified protein sequence (wt) from hemagglutinin__InfluenzaA__AEW25349
MKAILVVLLYTFATANADTLCIGYHANNSTDTVDTVLEKNVTVTHSVNLLEDKHNGKLCKLRGVAPLHLGKCNIAGWILGNPECESFSTSSSWSYIVETSSSDNGTCYPGDFIDYEELREQLSSVSSFERFEIFPKTSSWPNHDSNKGVTAACPHAGAKSFYKNLIWLVKKGNSYPKLSKSYINDKGKEVLVLWGIHHPSTSADQQSLYQNADAYVFVGTSRYSKKFKPEIAIRPKVRDQEGRMNYYWTLVEPGDKITFEATGNLVVPRYAFAMERNAGSGIIISDTPVHDCNTTCQTPKGAINTSLPFQNIHPITIGKCPKYVKSTKLRLATGLRNVPSIQSRGLFGAIAGFIEGGWTGMVDGWYGYHHQNEQGSGYAADLKSTQNAIDEITNKVNSVIEKMNTQFTAVGKEFNHLEKRIENLNKKVDDGFLDIWTYNAELLVLLENERTLDYHDSNVKNLYEKVRSQLKNNAKEIGNGCFEFYHKCDNTCMESVKNGTYDYPKYSEEAKLNREEIDGVKLESTRIYQILAIYSTVASSLVLVVSLGAISFWMCSNGSLQCRICI

SEQ ID NO: 7904 - protein, 566 aa, Artificial Sequence
  derived and/or modified protein sequence (wt) from hemagglutinin__InfluenzaA__AEW25367
MKAILVVLLYTFATANADTLCIGYHANNSTDTVDTVLEKNVTVTHSVNLLEDKHNGKLCKLRGVAPLHLGKCNIAGWILGNPECESFSTSSSWSYIVETSSSDNGTCYPGDFIDYEELREQLSSVSSFERFEIFPKTSSWPNHDSNKGVTAACPHAGAKSFYKNLIWLVKKGNSYPKLSKSYINDKGKEVLVLWGIHHPSTSADQQRLYQNADAYVFVGTSRYSKKFKPEIAIRPKVRDQEGRMNYYWTLVEPGDKITFEATGNLVVPRYAFAMERNAGSGIIISDTPVHDCNTTCQTPKGAINTSLPFQNIHPITIGKCPKYVKSTKLRLATGLRNVPSIQSRGLFGAIAGFIEGGWTGMVDGWYGYHHQNEQGSGYTADLKSTQNAIDEITNKVNSVIEKMNTQFTAVGKEFNHLEKRIENLNKKVDDGFLDIWTYNAELLVLLENERTLDYHDSNVKNLYEKVRSQLKNNAKEIGNGCFEFYHKCDNTCMESVKNGTYDYPKYSEEAKLNREEIDGVKLESTRIYQILAIYSTVASSLVLVVSLGAISFWMCSNGSLQCRICI

SEQ ID NO: 7905 - protein, 566 aa, Artificial Sequence
  derived and/or modified protein sequence (wt) from hemagglutinin__InfluenzaA__AEW25377
MKAILVVLLYTFATANADTLCIGYHANNSTDTVDTVLEKNVTVTHSVNLLEDKHNGKLCKLRGVAPLHLGKCNIAGWILGNPECESLSTASSWSYIVETSSSDNGTCYPGDFIDYEELREQLSSVSSFERFEIFPKTSSWPNHDSNKGVTTACPHAGAKSFYKNLIWLVKKGNSYPKLSKSYINDKGKEVLVLWGIHHPSTSADQQSLYQNADAYVFVGTSRYSKKFKPEIAIRPKVRDQEGRMNYYWTLVEPGDKITFEATGNLVVPRYAFAMERNAGSGIIISDTPVHDCNTTCQTPKGAINTSLPFQNIHPITIGKCPKYVKSTKLRLATGLRNVPSIQSRGLFGAIAGFIEGGWTGMVDGWYGYHHQNEQGSGYAADLKSTQNAIDEITNKVNSVIEKMNTQFTAVGKEFNHLEKRIENLNKKVDDGFLDIWTYNAELLVLLENERTLDYHDSNVKNLYEKVKSQLKNNAKEIGNGCFEFYHKCDNACMESVKNGTYDYPKYSEEAKLNREEIDGVKLESTRIYQILAIYSTVASSLVLVVSLGAISFWMCSNGSLQCRICI

SEQ ID NO: 7906 - protein, 566 aa, Artificial Sequence
  derived and/or modified protein sequence (wt) from hemagglutinin__InfluenzaA__AEW25385
MKAILVVLLYTFATANADTLCIGYHANNSTDTVDTVLEKNVTVTHSVNLLEDKHNGKLCKLRGVAPLHLGKCNIAGWILGNPECESLSTASSWSYIVETSSSDNGTCYPGDFIDYEELREQLSSVPSFERFEIFPKTSSWPNHDSNKGVTAACPHAGAKSFYKNLIWLVKKGNSYPKLSKSYINDKGKEVLVLWGIHHPSTSADQQSLYQNADAYVFVGTSRYSKKFKPEIAIRPKVRDQEGRMNYYWTLVEPGDKITFEATGNLVVPRYAFAMERNAGSGIIISDTPVHDCNTTCQTPKGAINTSLPFQNIHPITIGKCPKYVKSTKLRLATGLRNVPSIQSRGLFGAIAGFIEGGWTGMVDGWYGYHHQNEQGSGYAADLKSTQNAIDKITNKVNSVIEKMNTQFTAVGKEFNHLEKRIENLNKKVDDGFLDIWTYNAELLVLLENERTLDYHDSNVKNLYEKVRSQLKNNAKEIGNGCFEFYHKCDNTCMESVKNGTYDYPKYSEEAKLNREEIDGVKLESTRIYQILAIYSTVASSLVLVVSLGAISFWMCSNGSLQCRICI

SEQ ID NO: 7907 - protein, 566 aa, Artificial Sequence; identical to SEQ ID NO: 7903
  derived and/or modified protein sequence (wt) from hemagglutinin__InfluenzaA__AEW25416

SEQ ID NO: 7908 - protein, 566 aa, Artificial Sequence
  derived and/or modified protein sequence (wt) from hemagglutinin__InfluenzaA__AEW25446
MKAILVVLLYTFATANADTLCIGYHANNSTDTVDTVLEKNVTVTHSVNLLEDKHNGKLCKLRGVAPLHLGKCNIAGWILGNPECESLSTASSWSYIVETSSSDNGTCYPGDFIDYEELREQLSSVSSFERFEIFPKTSSWPNHDPNKGVTAACPHAGAKSFYKNLIWLVKKGNSYPKLSKSYINDKGKEVLVLWGIHHPSTSADQQSLYQNADAYVFVGTSRYSKKFKPEIAIRPKVRDQEGRMNYYWTLVEPGDKITFEATGNLVVPRYAFAMERNAGSGIIISDTPVHDCNTTCQTPKGAINTSLPFQNIHPITIGKCPKYVKSTKLRLATGLRNVPSIQSRGLFGAIAGFIEGGWTGMVDGWYGYHHQNEQGSGYAADLKSTQNAIDEITNKVNSVIEKMNKQFTAVGKEFNHLEKRIENLNKKVDDGFLDIWTYNAELLVLLENERTLDYHDSNVKNLYEKVRSQLKNNAKEIGNGCFEFYHKCDNTCMESVKNGTYDYPKYSEEAKLNREEIDGVKLESTRIYQILAIYSTVASSLVLVVSLGAISFWMCSNGSLQCRICI

SEQ ID NO: 7909 - protein, 566 aa, Artificial Sequence; identical to SEQ ID NO: 7903
  derived and/or modified protein sequence (wt) from hemagglutinin__InfluenzaA__AEW25454

SEQ ID NO: 7910 - protein, 566 aa, Artificial Sequence
  derived and/or modified protein sequence (wt) from hemagglutinin__InfluenzaA__AEW25462
MKAILVVLLYTFATANADTLCIGYHANNSTDTVDTVLEKNVTVTHSVNLLEDKHNGKLCKLRGVAPLHLGKCNIAGWILGNPECESLSTASSWSYIVETSSSDNGTCYPGDFIDYEELREQLSSVSSFERFEIFPKTSSWPNHDPNKGVTAACPHAGAKSFYKNLIWLVKKGNSYPKLSKPYTNDKGKEVLVLWGIHHPSTSADQQSLYQNADAYVFVGTSRYSKKFKPEIAIRPKVRDQEGRMNYYWTLVEPGDKITFEATGNLVVPRYAFAMERNAGSGIIISDTPVHDCNTTCQTPKGAINTSLPFQNIHPITIGKCPKYVKSTKLRLATGLRNVPSIQSRGLFGAIAGFIEGGWTGMVDGWYGYHHQNEQGSGYAADLKSTQNAIDEITNKVNSVIEKMNTQFTAVGKEFNHLEKRIENLNKKVDDGFLDIWTYNAELLVLLENERTLDYHDSNVKNLYEKVRSQLKNNAKEIGNGCFEFYHKCDNTCMESVKNGTYDYPKYSEEAKLNREEIDGVKLESTRIYQILAIYSTVASSLVLVVSLGAISFWMCSNGSLQCRICI

SEQ ID NO: 7911 - protein, 566 aa, Artificial Sequence; identical to SEQ ID NO: 3467
  derived and/or modified protein sequence (wt) from hemagglutinin__InfluenzaA__AEW25472

SEQ ID NO: 7912 - protein, 566 aa, Artificial Sequence
  derived and/or modified protein sequence (wt) from hemagglutinin__InfluenzaA__AEW25482
MKAILVVLLYTFATANADTLCIGYHANNSTDTVDTVLEKKVTVTHSVNLLEDKHNGKLCKLRGVAPLHLGKCNIAGWILGNPECESLSTASSWSYIVETSNSDNGTCYPGDFIDYEELREQLSSVSSFERFEIFPKTSSWPNHDPNKGVTAACPHAGAKSFYKNLIWLVKKGNSYPKLSKSYINDKGKEVLVLWGIHHPSTSADQQSLYQNADAYVFVGTSRYSKKFKPEIAIRPKVRDQGGRMNYYWTLVEPGDKITFEATGNLVVPRYAFAMERNAGSGIIISDTPVHDCNTTCQTPKGAINTSLPFQNIHPITIGKCPKYVKSTKLRLATGLRNVPSIQSRGLFGAIAGFIEGGWTGMVDGWYGYHHQNEQGSGYAADLKSTQNAIDEITNKVNSVIEKMNTQFTAVGKEFNHLEKRIENLNKKVDDGFLDIWTYNAELLVLLENERTLDYHDSNVKNLYEKVRSQLKNNAKEIGNGCFELYHKCDNTCMESVKNGTYDYPKYSEEAKLNREEIDGVKLESTRIYQILAIYSTVASSLVLVVSLGAISFWMCSNGSLQCRICI

SEQ ID NO: 7913 - protein, 566 aa, Artificial Sequence
  derived and/or modified protein sequence (wt) from hemagglutinin__InfluenzaA__AEW25492
MKAILVVLLYTFATANADTLCIGYHANNSTDTVDTVLEKNVTVTHSVNLLEDKHNGKLCKLRGVAPLHLGKCNIAGWILGNPECESLSTASSWSYIVETSSSDNGTCYPGDFIDYEELREQLSSVSSFERFEIFPKTSSWPNHDPNKGVTAACPHAGAKSFYKNLIWLVKKGNSYPKLSKSYINDKGKEVLVLWGIHHPSTSADQQSLYQNADAYIFVGTSRYSKKFKPEIAIRPKVRDQEGRMNYYWTLVEPGDKITFEATGNLVVPRYAFAMERNAGSGIIISDTPVHDCNTTCQTPKGAINTSLPFQNIHPITIGKCPKYVKSTKLRLATGLRNVPSIQSRGLFGAIAGFIEGGWTGMVDGWYGYHHQNEQGSGYAADLKSTQNAIDEITNKVNSVIEKMNTQFTAVGKEFNHLEKRIENLNKKVDDGFLDIWTYNAELLVLLENERTLDYHDSNVKNLYEKVRSQLKNNAKEIGNGCFEFYHKCDNTCMESVKNGTYDYPKYSEEAKLNREEIDGVKLESTRIYQILAIYSTVASSLVLVVSLGAISFWMCSNGSLQCRICI

SEQ ID NO: 7914 - protein, 566 aa, Artificial Sequence
  derived and/or modified protein sequence (wt) from hemagglutinin__InfluenzaA__AEW25501
MKAILVVLLYTFATANADTLCIGYHANNSTDTVDTVLEKNVTVTHSVNLLEDKHNGKLCKLRGVAPLHLGKCNIAGWILGNPECESLSTASSWSYIVETSSSDNGTCYPGDFIDYEELREQLSSVSSFEKFEIFPKTSSWPNHDSNKGVTAACPHAGAKSFYKNLICLVKKGNSYPKLSKSYINDKGKEVLVLWGIHHPSTSADQQSLYQNADAYVFVGTSRYSKKFKPEIAIRPKVRDQEGRMNYYWTLVEPGDKITFEATGNLVVPRYAFAMERNAGSGIIISDTPVHDCNTTCQTPKGAINTSLPFQNIHPITIGKCPKYVKSTKLRLATGLRNVPSIQSRGLFGAIAGFIEGGWTGMVDGWYGYHHQNEQGSGYAADLKSTQNAIDKITNKVNSVIEKMNTQFTAVGKEFNHLEKRIENLNKKVDDGFLDIWTYNAELLVLLENERTLDYHDSNVKNLYEKVRSQLKNNAKEIGNGCFEFYHKCDNTCMESVKNGTYDYPKYSEEAKLNREEIDGVKLESTRIYQILAIYSTVASSLVLVVSLGAISFWMCSNGSLQCRICI

SEQ ID NO: 7915 - protein, 566 aa, Artificial Sequence; identical to SEQ ID NO: 7903
  derived and/or modified protein sequence (wt) from hemagglutinin__InfluenzaA__AEW25509

SEQ ID NO: 7916 - protein, 566 aa, Artificial Sequence
  derived and/or modified protein sequence (wt) from hemagglutinin__InfluenzaA__AEW25519
MKAILVVLLYTFATANADTLCIGYHANNSTDTVDTVLEKNVTVTHSVNLLEDKHNGKLCKLRGVAPLHLGKCNIAGWILGNPECESLSTASSWSYIVETSSSDNGTCYPGDFIDYEELREQLSSVSSFERFEIFPKTSSWPNHDPNKGVTAACPHTGAKSFYKNLIWLVKKGNSYPKLSKSYINDKGKEVLVLWGIHHPSTSADQQSLYQNADAYVFVGTSRYSKKFKPEIAIRPKVRDQEGRMNYYWTLVEPGDKITFEATGNLVVPRYAFAMERNAGSGIIISDTPVHDCNTTCQTPKGAINTSLPFQNIHPITIGKCPKYVKSTKLRLATGLRNVPSIQSRGLFGAIAGFIEGGWTGMVDGWYGYHHQNEQGSGYAADLKSTQNAIDEITNKVNSVIEKMNTQFTAVGKEFNHLEKRIENLNKKVDDGFLDIWTYNAELLVLLENERTLDYHDSNVKNLYEKVRSQLKNNAKEIGNGCFEFYHKCDNTCMESVKNGTYDYPKYSEEAKLNREKIDGVKLESTRIYQILAIYSTVASSLVLVVSLGAISFWMCSNGSLQCRICI

SEQ ID NO: 7917 - protein, 566 aa, Artificial Sequence
  derived and/or modified protein sequence (wt) from hemagglutinin__InfluenzaA__AEW25528
MKAILVVLLYTFATANADTLCIGYHANNSTDTVDTVLEKNVTVTHSVNLLEDKHNGKLCKLRGVAPLHLGKCNIAGWILGNPECESFSTSSSWSYIVETSSSDNGTCYPGDFIDYEELREQLSSVSSFERFEIFPKTSSWPNHDSNKGVTAACPHAGAKSFYKNLIWLVKKGNSYPKLSKSYINDKGKEVLVLWGIHHPSTSADQQSLYQNADAYVFVGTSRYSKKFKPEIAIRPKVRDQERRMNYYWTLVEPGDKITFEATGNLVVPRYAFAMERNAGSGIIISDTPVHDCNTTCQTPKGAINTSLPFQNIHPITIGKCPKYVKSTKLRLATGLRNVPSIQSRGLFGAIAGFIEGGWTGMVDGWYGYHHQNEQGSGYAADLKSTQNAIDEITNKVNSVIEKMNTQFTAVGKEFNHLEKRIENLNKKVDDGFLDIWTYNAELLVLLENERTLDYHDSNVKNLYEKVRSQLKNNAKEIGNGCFEFYHKCDNTCMESVKNGTYDYPKYSEEAKLNREEIDGVKLESTRIYQILAIYSTVASSLVLVVSLGAISFWMCSNGSLQCRICI

SEQ ID NO: 7918 - protein, 566 aa, Artificial Sequence
  derived and/or modified protein sequence (wt) from hemagglutinin__InfluenzaA__AEW25545
MKAILVVLLYTFATANADTLCIGYHANNSTDTVDTVLEKNVTVTHSVNLLEDKHNGKLCKLRGVAPLHLGKCNIAGWILGNPECESLSTASSWSYIVETSSSDNGTCYPGDFIDYEELREQLSSVSSFERFEIFPKTSSWPNHDPNKGVTAACPHAGAKSFYKNLIWLVKKGNSYPKLSKSYINDKGKEVLVLWGIHHPSTSADQQSLYQNADAYVFVGTSRYSKKFKPEIAIRPKVRDQEGRMNYYWTLVEPGDKITFEATGNLVVPRYAFAMERNAGSGIIISDTPVHDCNTTCQTPKGAINTSLPFQNIHPITIGKCPKYVKSTKLRLATGLRNVPSIQSRGLFGAIAGFIEGGWTGMVDGWYGYHHQNEQGSGYAADLKSTQNAIDKITNKVNSVIEKMNTQFTAVGKEFNHLEKRIENLNKKVDDGFLDIWTYNAELLVLLENERTLDYHDSNVKNLYEKVRSQLKNNAKEIGNGCFEFYHKCDNTCMESVKNGSYDYPKYSEEAKLNREEIDGVKLESTRIYQILAIYSTVASSLVMVVSLGAISFWMCSNGSLQCRICI

SEQ ID NO: 7919 - protein, 566 aa, Artificial Sequence
  derived and/or modified protein sequence (wt) from hemagglutinin__InfluenzaA__AEW25555
MKAILVVLLYTFATANADTLCIGYHANNSTDTVDTVLEKNVTVTHSVNLLEDKHNGKLCKLRGVAPLHLGKCNIAGWILGNPECESLSTASSWSYIVETSSSDNGTCYPGDFIDYEELREQLSSVSSFERFEIFPKTSSWPNHDPNKGVTAACPHAGAKSFYKNLIWLVKKGNSYPKLSKSYINDKGKEVLVLWGIHHPSTSADQQSLYQNADAYVFVGTSRYSKKFKPEIAIRPKVRDQEGRMNYYWTLVEPGDKITFEATGNLVVPRYAFAMERNAGSGIIISDTPVHYCNTTCQTPKGAINTSLPFQNIHPITIGKCPKYVKSTKLRLATGLRNVPSIQSRGLFGAIAGFIEGGWTGMVDGWYGYHHQNEQGSGYAADLKSTQNAIDEITNKVNSVIEKMNTQFTAVGKEFNHLEKRIENLNKKVDDGFLDIWTYNAELLVLLENERTLDYHDSNVKNLYEKVRSQLKNNAKEIGNGCFEFYHKCDNTCMESVKNGTYDYPKYSEEAKLNREEIDGVKLESTRIYQILAIYSTVASSLVLVVSLGAISFWMCSNGSLQCRICI

SEQ ID NO: 7920 - protein, 566 aa, Artificial Sequence
  derived and/or modified protein sequence (wt) from hemagglutinin__InfluenzaA__AEW25564
MKAILVVLLYTFATANADTLCIGYHANNSTDTVDTVLEKNVTVTHSVNLLEDKHNGKLCKLRGVAPLHLGKCNIAGWILGNPECESLSTASSWSYIVETSSSDNGTCYPGDFIDYEELREQLSSVSSFERFEIFPKTSSWPNHDSNKGVTAACPHAGAKSFYKNLIWLVKKGNSYPKLSKSYINDKGKEVLVLWGIHHPSTSADQQSLYQNADAYVFVGTSRYSKKFKPEIAIRPKVRDQEGRMNYYWTLVEPGDKITFEATGNLVVPRYAFAMERNAGSGIIISDTPVHDCNTTCQTPKGALNTSLPFQNIHPITIGKCPKYVKSTKLRLATGLRNVPSIQSRGLFGAIAGFIEGGWTGMVDGWYGYHHQNEQGSGYAADLKSTQNAIDEITNKVNSVIEKMNTQFTAVGKEFNHLEKRIENLNRKVDDGFLDIWTYNAELLVLLENERTLDYHDSNVKNLYEKVRSQLKNNAKEIGNGCFEFYHKCDNTCMESVKNGTYDYPKYSEEAKLNREEIDGVKLESTGIYQILAIYSTVASSLVLVVSLGAISFWMCSNGSLQCRICI

SEQ ID NO: 7921 - protein, 566 aa, Artificial Sequence; identical to SEQ ID NO: 3467
  derived and/or modified protein sequence (wt) from hemagglutinin__InfluenzaA__AEW25573

SEQ ID NO: 7922 - protein, 566 aa, Artificial Sequence
  derived and/or modified protein sequence (wt) from hemagglutinin__InfluenzaA__AEW25582
MKAILVVLLYTFATANADTLCIGYHANNSTDTVDTVLEKNVTVTHSVNLLEDKHNGKLCKLRGVAPLHLGKCNIAGWILGNPECESLSTASSWSYIVETSSSDNGTCYPGDFIDYEELREQLSSVSSFERFEIFPKTSSWPNHDSNKGVTAACPHAGAKSFYKNLIWLVKKGNSYPKLSKSYINDKGKEVLVLWGIHHPSTSADQQSLYQNADAYVFVGTSRYSKKFKPEIAIRPKVRDQEGRMNYYWTLVEPGDKITFEATGNLVVPRYAFAMERNAGSGIILSDTPVHDCNTTCQTPKGAINTSLPFQNIHPITIGKCPKYVKSTKLRLATGLRNVPSIQSRGLFGAIAGFIEGGWTGMVDGWYGYHHQNGQGSGYAADLKSTQNAIDKITNKVNSVIEKMNTQFTAVGKEFNHLEKRIENLNKKVDDGFLDIWTYNAELLVLLENERTLDYHDSNVKNLYEKVRSQLKNNAKEIGNGCFEFYHKCDNTCMESVKNGTYDYPKYSEEAKLNREEIDGVKLESTRIYQILAIYSTVASSLVLVVSLGAISFWMCSNGSLQCRICI

SEQ ID NO: 7923 - protein, 566 aa, Artificial Sequence
  derived and/or modified protein sequence (wt) from hemagglutinin__InfluenzaA__AEW25590
MKAILVVLLYTFATANADTLCIGYHANNSTDTVDTVLEKNVTVTQSVNLLEDKHNGKLCKLRGVAPLHLGKCNIAGWILGNPECESLSTASSWSYIVETSSSDNGTCYPGDFIDYEELREQLSSVSSFERFEIFPKTSSWPNHDSNKGVTAACPHAGAKSFYKNLIWLVKKGNSYPKLSKSYINDKGKEVLVLWGIHHPSTSADQQSLYQNADAYVFVGTSRYSKKFKPEIAIRPKVRDQEARMNYYWTLVEPGDKITFEATGNLVVPRYAFAMERDAGSGIIISDTPVHDCNTTCQTPKGAINTSLPFQNIHPITIGKCPKYVKSTKLRLATGLRNVPSIQSRGLFGAIAGFIEGGWTGMVDGWYGYHHQNEQGSGYAADLKSTQNAIDEITNKVNSVIEKMNTQFTAVGKEFNHLEKRIENLNKKVDDGFLDIWTYNAELLVLLENERTLDYHDSNVKNLHEKVRSQLKNNAKEIGNGCFEFYHKCDNTCMESVKNGTYDYPKYSEEAKLNREEIDGVKLESTRIYQILAIYSTVASSLVLVVSLGAISFWMCSNGSLQCRICI

SEQ ID NO: 7924 - protein, 566 aa, Artificial Sequence; identical to SEQ ID NO: 3467
  derived and/or modified protein sequence (wt) from hemagglutinin__InfluenzaA__AEW25600

SEQ ID NO: 7925 - protein, 566 aa, Artificial Sequence; identical to SEQ ID NO: 3467
  derived and/or modified protein sequence (wt) from hemagglutinin__InfluenzaA__AEW25620

SEQ ID NO: 7926 - protein, 566 aa, Artificial Sequence
  derived and/or modified protein sequence (wt) from hemagglutinin__InfluenzaA__AEW25629
MKAILVVLLYTFATANADTLCIGYHANNSTDTVDTVLEKNVTVTHSVNLLEDKHNGKLCKLRGVAPLHLGKCNIAGWILGNPECESLSTASSWSYIVETSSSDNGTCYPGDFIDYEELREQLSSVSSFERFEIFPKTSSWPNHDPNKGVTAACPHAEAKSFYKNLIWLVKKGNSYPKLSKSYINDKGKEVLVLWGIHHPSTSADQQSLYQNADAYVFVGTSRYSKKFKPEIAIRPKVRDQEGRMNYYWTLVEPGDKITFEATGNLVVPRYAFAMERNAGSGIIISDTPVHDCNTTCQTPKGAINTSLPFQNIHPITIGKCPKYVKSTKLRLATGLRNVPSIQSRGLFGAIAGFIEGGWTGMVDGWYGYHHQNEQGSGYAADLKSTQNAIDEITNKVNSVIEKMNTQFTAVGKEFNHLEKRIENLNKKVDDGFLDIWTYNAELLVLLENERTLDYHDSNVKNLYEKVRSQLKNNAKEIGNGCFEFYHKCDNMCMESVKNGTYDYPKYSEEAKLNREEIDGVKLESTRIYQILAIYSTVASSLVLVVSLGAISFWMCSNGSLQCRICI

SEQ ID NO: 7927 - protein, 566 aa, Artificial Sequence; identical to SEQ ID NO: 2669
  derived and/or modified protein sequence (wt) from hemagglutinin__InfluenzaA__AEW25637

SEQ ID NO: 7928 - protein, 566 aa, Artificial Sequence
  derived and/or modified protein sequence (wt) from hemagglutinin__InfluenzaA__AEW25646
MKAILVVLLYTFATANADTLCIGYHANNSTDTVDTVLEKNVTVTHSVNLLEDKHNGKLCKLRGVAPLHLGKCNIAGWILGNPECESLSTASSWSYIVETSSSDNGTCYPGDFIDYEELREQLSSVSSFERFEIFPKTSSWPNHDPNKGVTAACPHAGAKSFYKNLIWLVKKGNSYPKLSKSYINDKGKEVLVLWGIHHPSTSADQQSLYQNADAYVFVGTSRYSKKFKPEIAIRPKVRDQEGRMNYYWTLVEPGDKITFEATGNLVVPRYAFAMERNAGSGIIISDTPVHDCNTTCQTPKGAINTSLPFQNIHPITIGKCPKYVKSTKLRLATGLRNVPSIQSRGLFGAIAGFIEGGWTGMVDGWYGYHHQNEQGSGYAADLKSTQNAIDKITNKVNSVIEKMNTQFTAVGKEFNHLEKRIENLNKKVDDGFLDIWTYNAELLVLLENERTLDYHDSNVKNLYEKVRSQLKNNAKEIGNGCFEFYHKCDNTCMESVKNGTYDYPKYSEEAKLNREEIDGVKLESTRIYQILAIYSTVASSLVLVVSLGAISFWMCSNGSLQCRICI

SEQ ID NO: 7929 - protein, 566 aa, Artificial Sequence
  derived and/or modified protein sequence (wt) from hemagglutinin__InfluenzaA__AEW25654
MKAILVVLLYTFATANADTLCIGYHANNSTDTVDTVLEKNVTVTHSVNLLEDKHNGKLCKLRGVAPLHLGKCNIAGWILGNPECESLSTASSWSYIVETSSSDNGTCYPGDFIDYEELREQLSSVSSFERFEIFPKTSSWPNHDSNKGVTAACPHAGAKSFYKNLIWLVKKGNSYPKLSKSYINDKGKEVLVLWGIHHPSTSADQQSLYQNADAYVFVGTSRYSKKFKPEIAIRPKVRDQEGRMNYYWTLVEPGDKITFEATGNLVVPRYAFAMERNAGSGIIISDTPVHDCNTTCQTPKGAINTSPPFQNIHPITIGKCPKYVKSTKLRLATGLRNIPSIQSRGLFGAIAGFIEGGWTGMVDGWYGYHHQNEQGSGYAADLKSTQNAIDEITNKVNSVIEKMNTQFTAVGKEFNHLEKRIENLNKKVDDGFLDIWTYNAELLVLLENERTLDYHDSNVKNLYEKVRSQLKNNAKEIGNGCFEFYHKCDNTCMESVKNGTYDYPKYSEEAKLNREEIDGVKLESTRIYQILAIYSTVASSLVLVVSLGAISFWMCSNGSLQCRICI

SEQ ID NO: 7930 - protein, 566 aa, Artificial Sequence
  derived and/or modified protein sequence (wt) from hemagglutinin__InfluenzaA__AEW25662
MKAILVVLLYTFATANADTLCIGYHANNSTDTVDTVLEKNVTVTHSVNLLEDKHNGKLCKLRGVAPLHLGKCNIAGWILGNPECESLSTASSWSYIVETSSSDNGTCYPGDFIDYEELREQLSSVSSFERFEIFPKTSSWPNHDPNKGITAACPHAGAKSFYKNLIWLVKKGNSYPKLSKSYINDKGKEVLVLWGIHHPSTSADQQSLYQNADAYVFVGTSRYSKKFKPEIAIRPKVRDQEGRMNYYWTLVEPGDKITFEATGNLVVPRYAFAMERNAGSGIIISDTPVHDCNTTCQTPKGAINTSLPFQNIHPITIGKCPKYVKSTKLRLATGLRNVPSIQSRGLFGAIAGFIEGGWTGMVDGWYGYHHQNEQGSGYAADLKSTQNAIDEITNKVNSVIEKMNTQFTAVGKEFNHLEKRIENLNKKVDDGFLDIWTYNAELLVLLENERTLDYHDSNVKNLYEKVRSQLKNNAKEIGNGCFEFYHKCDNTCMESVKNGTYDYPKYSEEAKLNREEIDGVKLESTRIYQILAIYSTVASSLVLVVSLGAISFWMCSNGSLQCRICI

SEQ ID NO: 7931 - protein, 566 aa, Artificial Sequence
  derived and/or modified protein sequence (wt) from hemagglutinin__InfluenzaA__AEW25669
MKAILVVLLYTFATANADTLCIGYHANNSTDTVDTVLEKNVTVTHSVNLLEDKHNGKLCKLRGVAPLHLGKCNIAGWILGNPECESLSTASSWSYIVETSSSDNGTCYPGDFIDYEELREQLSSVSSFERFEIFPKTSSWPNHDPNKGVTAACPHAGAKSFYKNLIWLVKKGNSYPKLSKSYINDKGKEVLVLWGIHHPSTSADQQSLYQNADAYVFVGTSRYSKKFKPEIAIRPKVRDQEGRMNYYWTLVEPGDKITFEATGNLVVPRYAFAMERNAGSGIIISDTPVHDCNTTCQTPKGAINTSLPFQNIHPITIGKCPKYVKSTKLRLATGLRNVPSIQSRGLFGAIAGFIEGGWTGMVEGWYGYHHQNEQGSGYAADLKSTQNAIDEITNKVNSVIEKMNTQFTAVGKEFNHLEKRIENLNKKVDDGFLDIWTYNAELLVLLENERTLDYHDSNVKNLYEKVRSQLKNNAKEIGNGCFEFYHKCDNTCMESVKNGTYDYPKYSEEAKLNREEIDGVKLESTRIYQILAIYSTVASSLVLVVSLGAISFWMCSNGSLQCRICI

SEQ ID NO: 7932 - protein, 566 aa, Artificial Sequence
  derived and/or modified protein sequence (wt) from hemagglutinin__InfluenzaA__AEW25678
MKAILVVLLYTFATANADTLCIGYHANNSTDTVDTVLEKNVTVTHSVNLLEDKHNGKLCKLRGVAPLHLGKCNIAGWILGNPECESLSTASSWSYIVETSSSDNGTCYPGDFIDYEELREQLSSVSSFEKFEIFPKTSSWPNHDSNKGVTAACPHAGAKSFYKNLIWLVKKGNSYPKLSKSYINDKGKEVLVLWGIHHPSTSADQQSLYQNADAYVFVGTSRYSKKFKPEIAIRPKVRDQEGRMNYYWTLVEPGDKITFEATGNLVVPRYAFAMERNAGSGIIISDTPVHDCNTTCQTPKGAINTSLPFQNIHPITIGKCPKYVKSTKLRLATGLRNVPSIQSRGLFGAIAGFIEGGWTGMVDGWYGYHHQNEQGSGYAADLKSTQNAIDEITNKVNSVIEKMNTQFTAVGKEFNHLEKRIENLNKKVDDGFLDIWTYNAELLVLLENERTLDYHDSNVKNLYEKVRSQLKNNAKEIGNGCFEFYHKCDNTCMESVKNGTYDYPKYSEEAKLNREEIDGVKLESTRIYQILAIYSTVASSLVLVVSLRAISFWMCSNGSLQCRICI

SEQ ID NO: 7933 - protein, 566 aa, Artificial Sequence
  derived and/or modified protein sequence (wt) from hemagglutinin__InfluenzaA__AEW25687
MKAILVVLLYTFATANADTLCIGYHANNSTDTVDTVLEKNVTVTHSVNLLEDKHNGKLCKLRGVAPLHLGKCNIAGWILGNPECESLSTASSWSYIVETSSSDNGTCYPGDFIDYEELREQLSSVSSFERFEIFPKTSSWPNHDPNKGVTAACPYAGAKSFYKNLIWLVKKGNSYPKLSKSYINDKGKEVLVLWGIHHPSTSADQQSLYQNADAYVFVGTSRYSKKFKPEIAIRPKVRDQEGRMNYYWTLVEPGDKITFEATGNLVVPRYAFAMERNAGSGIIISDTPVHDCNTTCQTPKGAINTSLPFQNIHPITIGKCPKYVKSTKLRLATGLRNVPSIQSRGLFGAIAGFIEGGWTGMVDGWYGYHHQNEQGSGYAADLKSTQNAIDKITNKVNSVIEKMNTQFTAVGKEFNHLEKRIENLNKKVDDGFLDIWTYNAELLVLLENERTLDYHDSNVKNLYEKVRSQLKNNAKEIGNGCFEFYHKCDNTCMESVKNGTYDYPKYSEEAKLNREEIDGVKLESTRIYQILAIYSTVASSLVLVVSLGAISFWMCSNGSLQCRICI

SEQ ID NO: 7934 - protein, 566 aa, Artificial Sequence; identical to SEQ ID NO: 7903
  derived and/or modified protein sequence (wt) from hemagglutinin__InfluenzaA__AEW25696

SEQ ID NO: 7935 - protein, 566 aa, Artificial Sequence; identical to SEQ ID NO: 3467
  derived and/or modified protein sequence (wt) from hemagglutinin__InfluenzaA__AEW25706

SEQ ID NO: 7936 - protein, 564 aa, Artificial Sequence
  derived and/or modified protein sequence (wt) from hemagglutinin__InfluenzaA__AEW91908
MEKIVLLFATISLVKSDHICIGYHANNSTEQVDTIMEKNVTVTHAQDILEKTHNGKLCDLNGVKPLILKDCSVAGWLLGNPMCDEFINVPEWSYIVEKANPANDLCYPGNFNDYEELKHLLSRINHFEKIQIIPKNSWSDHEASLGVSAACPYQGKSSFFRNVVWLIKKDNAYPTIKKGYNNTNQEDLLVLWGIHHPNDEAEQTRLYQNPTTYISIGTSTLNQRLVPKIATRSKINGQSGRIDFFWTILKPNDAIHFESNGNFIAPEYAYKIVKKGDSTIMKSEVEYGNCNTRCQTPIGAINSSMPFHNIHPLTIGECPKYVKSNKLVLATGLRNSPQGETRGLFGAIAGFIEGGWQGMVDGWYGYHHSNEQGSGYAADKESTQKAIDGVTNKVNSIIDKMNTQFEAVGREFNNLERRIENLNKKMEDGFLDVWTYNAELLVLMENERTLDFHDSNVRNLYDKVRLQLKDNAKELGNGCFEFYHKCDNECMESVRNGTYDYPQYSEEARLKREEISGVKLESIGIYQILSIYSTVASSLVLAIMMAGLSLWMCSNGSLQCRICI

SEQ ID NO: 7937 - protein, 566 aa, Artificial Sequence
  derived and/or modified protein sequence (wt) from hemagglutinin__InfluenzaA__AEX09175
MKAILVVLLYTFATANADTLCIGYHANNSTDTVDTVLEKNVAVTHSVNLLEDKHNGKLCKLRGVAPLHLGKCNIAGWILGNPECESLSTASSWSYIVETSSSDNGTCYPGDFIDYEELREQLSSVSSFERFEIFPKTSSWPNHDSNKGVTAACPHAGAKSFYKNLIWLVKKGNSYPKLSKSYINDKGKEVLVLWGIHHPSTSADQQSLYQNADAYVFVGTSRYSKKFKPEIAIRPKVRDREGRMNYYWTLVEPGDKITFEATGNLVVPRYAFAMERNAGSGIIISDTPVHDCNTTCQTPKGAINTSLPFQNIHPITIGKCPKYVKSTKLRLATGLRNVPSIQSRGLFGAIAGFIEGGWTGMVDGWYGYHHQNEQGSGYAADLKSTQNAIDEITNKVNSVIEKMNTQFTAVGKEFNHLEKRIENLNKKVDDGFLDIWTYNAELLVLLENERTLDYHDSNVKNLYEKVRSQLKNNAKEIGNGCFEFYHKCDNTCMESVKNGTYDYPKYSEEAKLNREEIDGVKLESTRIYQILAIYSTVASSLVLVVSLGAISFWMCSNGSLQCRICI

SEQ ID NO: 7938 - protein, 566 aa, Artificial Sequence; identical to SEQ ID NO: 2669
  derived and/or modified protein sequence (wt) from hemagglutinin__InfluenzaA__AEX25795

SEQ ID NO: 7939 - protein, 566 aa, Artificial Sequence
  derived and/or modified protein sequence (wt) from hemagglutinin__InfluenzaA__AEX25797
MEAILVVLLYTFATANADTLCIGYHANNSTDTVDTVLEKNVTVTHSVNLLEDKHNGKLCKLRGVAPLHLGKCNIAGWILGNPECESLSTASSWSYIVETSNSDNGTCYPGDFIDYEELREQLSSVSSFERFEIFPKTSSWPNHDSNKGVTAACPHAGAKSFYKNLIWLVKKGNSYPKLSKSYINDKGKEVLVLWGIHHPSTSADQQSLYQNADAYVFVGSSRYSKKFKPEIAIRPKVRDQEGRMNYYWTLVEPGDKITFEATGNLVVPRYAFAMERNAGSGIIISDTPVHDCNTTCQTPKGAINTSLPFHNIHPITIGKCPKYVKSTKLRLATGLRNVPSIQSRGLFGAIAGFIEGGWTGMVDGWYGYHHQNEQGSGYAADLKSTQNAIDEITNKVNSVIEKMNTQFTAVGKEFNHLEKRIENLNKKVDDGFLDIWTYNAELLVLLENERTLDYHDSNVKNLYEKVRSQLKNNAKEIGNGCFEFYHKCDNTCMESVKNGTYDYPKYSEEAKLNREEIDGVKLESTRIYQILAIYSTVASSLVLVVSLGAISFWMCSNGSLQCRICI

SEQ ID NO: 7940 - protein, 566 aa, Artificial Sequence
  derived and/or modified protein sequence (wt) from hemagglutinin__InfluenzaA__AEX25798
MKAILVVLLYTFATANADTLCIGYHANNSTDTVDTVLEKNVTVTHSVNLLEDKHNGKLCKLRGVAPLHLGKCNIAGWILGNPECESLSTASSWSYIVETSSSDNGTCYPGDFINYEELREQLSSVSSFERFEIFPKTSSWPNHDSNKGVTAACPHAGAKSFYKNLIWLVKKGNSYPKLSKSYINDKGKEVLVLWGIHHPSTSADQQSLYQNADAYVFVGTSRYSKKFKPEIAIRPKVRDQEGRMNYYWTLVEPGDKITFEATGNLVVPRYAFAMERNAGSGIIISDTPVHDCNTTCQTPKGAINTSLPFHNIHPITIGKCPKYVKSTKLRLATGLRNVPSIQSRGLFGAIAGFIEGGWTGMVDGWYGYHHQNEQGSGYAADLKSTQNAIDEITNKVNSVIEKMNTQFTAVGKEFNHLEKRIENLNKKVDDGFLDIWTYNAELLVLLENERTLDYHDSNVKNLYEKVRSQLKNNAKEIGNGCFEFYHKCDNTCMESVKNGTYDYPKYSEEAKLNREEIDGVKLESTRIYQILAIYSTVASSLVLVVSLGAISFWMCSNGSLQCRICI

SEQ ID NO: 7941 - protein, 566 aa, Artificial Sequence; identical to SEQ ID NO: 2669
  derived and/or modified protein sequence (wt) from hemagglutinin__InfluenzaA__AEX25800

SEQ ID NO: 7942 - protein, 566 aa, Artificial Sequence; identical to SEQ ID NO: 2669
  derived and/or modified protein sequence (wt) from hemagglutinin__InfluenzaA__AEX25803

SEQ ID NO: 7943 - protein, 566 aa, Artificial Sequence; identical to SEQ ID NO: 2911
  derived and/or modified protein sequence (wt) from hemagglutinin__InfluenzaA__AEX25808

SEQ ID NO: 7944 - protein, 566 aa, Artificial Sequence; identical to SEQ ID NO: 5639
  derived and/or modified protein sequence (wt) from hemagglutinin__InfluenzaA__AEX25810

SEQ ID NO: 7945 - protein, 566 aa, Artificial Sequence
  derived and/or modified protein sequence (wt) from hemagglutinin__InfluenzaA__AEX25811
MEAILVVLLYTFATANADTLCIGYHANNSTDTVDTVLEKNVTVTHSVNLLEDKHNGKLCKLRGVAPLHLGKCNIAGWILGNPECESLFTASSWSYIVETSSSDNGTCYPGDFIDYEELREQLSSVSSFERFEIFPKTSSWPNHDSNKGVTAACPHAGAKSFYKNLIWLVKKGNSYPKLSKSYINDKGKEVLVLWGIHHPSTSADQQSLYQNADAYVFVGSSRYSKKFKPEIAIRPKVRDQEGRMNYYWTLVEPGDKITFEATGNLVVPRYAFAMERKAGSGIIISDTPVHDCNTTCQTPKGAINTSLPFHNIHPITIGKCPKYVKSTKLRLATGLRNVPSIQSRGLFGAIAGFIEGGWTGMVDGWYGYHHQNEQGSGYAADLKSTQNAIDEITNKVNSVIEKMNTQFTAVGKEFNHLEKRIENLNKKVDDGFLDIWTYNAELLVLLENERTLDYHDSNVKNLYEKVRSQLKNNAKEIGNGCFEFYHKCDNTCMESVKNGTYDYPKYSEEAKLNREEIDGVKLESTRIYQILAIYSTVASSLVLVVSLGAISFWMCSNGSLQCRICI

SEQ ID NO: 7946 - protein, 566 aa, Artificial Sequence; identical to SEQ ID NO: 5639
  derived and/or modified protein sequence (wt) from hemagglutinin__InfluenzaA__AEX25814

SEQ ID NO: 7947 - protein, 566 aa, Artificial Sequence
  derived and/or modified protein sequence (wt) from hemagglutinin__InfluenzaA__AEX25816
MKAILVVLLYTFATANADTLCIGYHANNSTDTVDTVLEKNVTVTHSVNLLEDKHNGKLCKLRGVAPLHLGKCNIAGWILGNPECESLSTANSWSYIVETSSSDNGTCYPGDFINYEELREQLSSVSSFERFEIFPKTSSWPNHDSNKGVTAACPHAGAKSFYKNLIWLVKKGNSYPKLSKSYINDKGKEVLVLWGIHHPSTSADQQSLYQNADAYVFVGTSRYSKKFKPEIAIRPKVRDQEGRMNYYWTLVEPGDKITFEATGNLVVPRYAFAMERNAGSGIIISDTPVHDCNTTCQTPKGAINTSLPFQNIHPITIGKCPKYVKSTKLRLATGLRNVPSIQSRGLFGAIAGFIEGGWTGMVDGWYGYHHQNEQGSGYAADLKSTQNAIDEITNKVNSVIEKMNTQFTAVGKEFNHLEKRIENLNKKVDDGFLDIWTYNAELLVLLENERTLDYHDSNVKNLYEKVRSQLKNNAKEIGNGCFEFYHKCDNTCMESVKNGTYDYPKYSEEAKLNREEIDGVKLESTRIYQILAIYSTVASSLVLVVSLGAISFWMCSNGSLQCRICI

SEQ ID NO: 7948 - protein, 566 aa, Artificial Sequence
  derived and/or modified protein sequence (wt) from hemagglutinin__InfluenzaA__AEX25818
MEAILVVLLYTFATANADTLCIGYHANNSTDTVDTVLEKNVTVTHSVNLLEDKHNGKLCKLRGVAPLHLGKCNIAGWILGNPECESLSTASSWSYIVETSNSDNGTCYPGDFIDYEELREQLSSVSSFERFEIFPKTSSWPNHDSNKGVTAACPHAGAKSFYKNLIWLVKKGNSYPKLSKSYINDKGKEVLVLWGIHHQSTSADQQSLYQNADAYVFVGSSRYSKKFKPEIAIRPKVRDQEGRMNYYWTLVEPGDKITFEATGNLVVPRYAFAMERNAGSGIIISDTPVHDCNTTCQTPKGAINTSLPFHNIHPITIGKCPKYVKSTKLRLATGLRNVPSIQSRGLFGAIAGFIEGGWTGMVDGWYGYHHQNEQGSGYAADLKSTQNAIDEITNKVNSVIEKMNTQFTAVGKEFNHLEKRIENLNKKVDDGFLDIWTYNAELLVLLENERTLDYHDSNVKNLYEKVRSQLKNNAKEIGNGCFEFYHKCDNTCMESVKNGTYDYPKYSEEAKLNREEIDGVKLESTRIYQILAIYSTVASSLVLVVSLGAISFWMCSNGSLQCRICI

SEQ ID NO: 7949 - protein, 566 aa, Artificial Sequence
  derived and/or modified protein sequence (wt) from hemagglutinin__InfluenzaA__AEX25824
MKAILVVLLYTFATANADTLCIGYHANNSTDTVDTVLEKNVTVTHSVNLLEDKHNGKLCKLRGVAPLHLGKCNIAGWILGNPECESLSTASSWSYIVETSSSDNGTCYPGDFIDYEELREQLSSVSSFERFEIFPKTSSWPNHDSNKGVTAACPHAGAKSFYKNLIWLVKKGNSYPKLSKSYINDKGKEVLVLWGIHHPSTSADQQSLYQNADAYVFVGTSRYSKKFKPEIAIRPKVRDQEGRMNYYWTLVEPGDKITFEATGNLVVPRYAFAMERNAGSGIIISDTPVHDCNTTCQTPKGAINTSLPFQNIHPITIGKCPKYVESTKLRLATGLRNVPSIQSRGLFGAIAGFIEGGWTGMVDGWYGYHHQNEQGSGYAADLKSTQNAIDEITNKVNSVIEKMNTQFTAVGKEFNHLEKRIENLNKKVDDGFLDIWTYNAELLVLLENERTLDYHDSNVKNLYEKVRSQLKNNAKEIGNGCFEFYHKCDNTCMESVKNGTYDYPKYSEEAKLNREEIDGVKLESTRIYQILAIYSTVASSLVLVVSLGAISFWMCSNGSLQCRICI

SEQ ID NO: 7950 - protein, 565 aa, Artificial Sequence
  derived and/or modified protein sequence (wt) from hemagglutinin__InfluenzaA__AEX33420
MKVKLLVLLCIFTATYADTICIGYHANNSTDTVDTVLEKNVTVTHSVNLLEDSHNGKLCLLKGIAPLQLGNCSVAGWILGNPECELLISKESWSYIVETPNPENGTCYPGYFADYEELREQLSSVSSFERFEIFPKESSWPNHTVTGVSASCSHNGKSSFYRNLLWLTGKSGLYPNLSKSYANNKEKEVLVLWGVHHPPNIGDQRALYHTENAYVSVVSSHYSRRFTPEIAKRPKVRDQEGRINYYWTLLEPGDTIIFEANGNLIAPRYAFALSRGFGSGIITSNAPMDECDAKCQTPQGAINSSLPFQNVHPVTIGECPKYVKSAKLRMVTGLRNIPSIQSRGLFGAIAGFIEGGWTGMVDGWYGYHHQNEQGSGYAADQKSTQNAINGITNKVNSVIEKMNTQFTAVGKEFNKLERRMENLNKKVDDGFLDIWTYNAELLVLLENERTLDFHDSNVKNLYEKVKSQLKNNAKEIGNGCFEFYHKCNDECMESVKNGTYDYPKYSEESKLNREKIDGVKLESMGVYQILAIYSTVASSLVLLVSLGAISFWMCSNGSLQCRICI

SEQ ID NO: 7951 - protein, 566 aa, Artificial Sequence
  derived and/or modified protein sequence (wt) from hemagglutinin__InfluenzaA__AEX33453
MKTIIALSYILCLVFAQKLPGNDNSTATLCLGHHAVPNGTIVKTITNDQIEVTNATELVQSSSTGGICDSPHQILDGENCTLIDALLGDPQCDGFQNKKWDLFVERSKAYSNCYPYDVPDYASLRSLVASSGTLEFNNESFNWTGVTQNGTSSACKRRSDKSFFSRLNWLTHLKYKYPALNVTMPNNEKFDKLYIWGVHHPGTDSDQISLYAQASGRITVSTKRSQQTVIPNIGSRPRVRDVSSRISIYWTIVKPGDILLINSTGNLIAPRGYFKIRSGKSSIMRSDAPIGKCNSECITPNGSIPNDKPFQNVNRITYGACPRYVKQNTLKLATGMRNVPEKQTRGIFGAIAGFIENGWEGMVDGWYGFRHQNSEGTGQAADLKSTQAAINQINGKLNRLIGKTNEKFHQIEKEFSEVEGRIQDLEKYVEDTKIDLWSYNAELLVALENQHTIDLTDSEMNKLFERTKKQLRENAEDMGNGCFKIYHKCDNACIGSIRNGTYDHDVYRDEALNNRFQIKGVELKSGYKDWILWISFAISCFLLCVALLGFIMWACQKGNIRCNICI

SEQ ID NO: 7952 - protein, 566 aa, Artificial Sequence; identical to SEQ ID NO: 1795
  derived and/or modified protein sequence (wt) from hemagglutinin__InfluenzaA__AEX33464

SEQ ID NO: 7953 - protein, 566 aa, Artificial Sequence; identical to SEQ ID NO: 1795
  derived and/or modified protein sequence (wt) from hemagglutinin__InfluenzaA__AEX33475

SEQ ID NO: 7954 - protein, 566 aa, Artificial Sequence; identical to SEQ ID NO: 1795
  derived and/or modified protein sequence (wt) from hemagglutinin__InfluenzaA__AEX33486

SEQ ID NO: 7955 - protein, 566 aa, Artificial Sequence; identical to SEQ ID NO: 1795
  derived and/or modified protein sequence (wt) from hemagglutinin__InfluenzaA__AEX33497

SEQ ID NO: 7956 - protein, 566 aa, Artificial Sequence; identical to SEQ ID NO: 1795
  derived and/or modified protein sequence (wt) from hemagglutinin__InfluenzaA__AEX33508

SEQ ID NO: 7957 - protein, 566 aa, Artificial Sequence; identical to SEQ ID NO: 1795
  derived and/or modified protein sequence (wt) from hemagglutinin__InfluenzaA__AEX33519

SEQ ID NO: 7958 - protein, 566 aa, Artificial Sequence
  derived and/or modified protein sequence (wt) from hemagglutinin__InfluenzaA__AEX33541
MKTIIALSYILCLVFAQKLPGNDNSTATLCLGHHAVPNGTIVKTITNDQIEVTNATELVQISSTGGICDSPHQILDGENCTLIDALLGDPQCDGFQNKKWDLFVERSKAYSNCYPYDVPDYASLRSLVASSGTLEFNNESFDWTGVTQNGTSSSCKRRSNKSFFSRLNWLTHLKYKYPALNVTMPNNEKFDKLYIWGVHHPGTDSDQISLYAQASGRITVSTKRSQQTVIPNIGSRPRVRDVSSRISIYWTIVKPGDILLINSTGNLIAPRGYFKIRSGKSSIMRSDAPIGKCNSECITPNGSIPNDKPFQNVNRITYGACPRYVKQNTLKLATGMRNVPEKQTRGIFGAIAGFIENGWEGMVDGWYGFRHQNSEGTGQAADLKSTQAAINQINGKLNRLIGKTNEKFHQIEKEFSEVEGRIQDLEKYVEDTKIDLWSYNAELLVALENQHTIDLTDSEMNKLFERTKKQLRENAEDMGNGCFKIYHKCDNACIGSIRNGTYDHDVYRDEALNNRFQIKGVELKSGYKDWILWISFAISCFLLCVALLGFIMWACQKGNIRCNICI

SEQ ID NO: 7959 - protein, 566 aa, Artificial Sequence
  derived and/or modified protein sequence (wt) from hemagglutinin__InfluenzaA__AEX33574
MKTIIALSYILCLVFAQKLPGNDNSTATLCLGHHAVPNGTIVKTITNDQIEVTNATELVQSSSTGGICDSPHQILDGENCTLIDALLGDPQCDGFQNKKWDLFVERSKAYSNCYPYDVPDYASLRSLVASSGTLEFNNESFNWTGVTQNGTSSACKRRSNKSFFSRLNWLTHLKFKYPALNVTMPNNEKFDKLYIWGVHHPGTDNDQISLYAQASGRITVSTKRSQQTVIPNIGSRPRVRDVPSRISIYWTIVKPGDILLINSTGNLIAPRGYFKIRSGKSSIMRSDAPIGKCNSECITPNGSIPNDKPFQNVNRITYGACPRYVKQNTLKLATGMRNVPEKQTRGIFGAIAGFIENGWEGMVDGWYGFRHQNSEGTGQAADLKSTQAAINQINGKLNRLIGKTNEKFHQIEKEFSEVEGRIQDLEKYVEDTKIDLWSYNAELLVALENQHTIDLTDSEMNKLFERTKKQLRENAEDMGNGCFKIYHKCDNDCIGSIRNGTYDHDVYRDEALNNRFQIKGVELKSGYKDWILWISFAISCFLLCVALLGFIMWACQKGNIRCNICI

SEQ ID NO: 7960 - protein, 566 aa, Artificial Sequence; identical to SEQ ID NO: 1795
  derived and/or modified protein sequence (wt) from hemagglutinin__InfluenzaA__AEX33585

SEQ ID NO: 7961 - protein, 566 aa, Artificial Sequence
  derived and/or modified protein sequence (wt) from hemagglutinin__InfluenzaA__AEX33596
MKTIIALSYILCLVFAQKLPGNDNSTATLCLGHHAVPNGTIVKTITNDQIEVTNATELVQSSSTGGICDSPHQILDGENCTLIDALLGDPQCDGFQNKKWDLFVERSKAYSNCYPYDVPDYASLRSLVASSGTLEFNNESFNWTGVTQNGTSSACKRRSNKSFFSRLNWLTHLKFKYPALNVTMPNNEKFDKLYIWGVHHPGTDNDQISLYAQASGRITVSTKRSQQTVIPNIGSRPRVRDIPSRISIYWTIVKPGDILLINSTGNLIAPRGYFKIRSGKSSIMRSDAPIGKCNSECITPNGSIPNDKPFQNVNRITYGACPRYVKQNTLKLATGMRNVPEKQTRGIFGAIAGFIENGWEGMVDGWYGFRHQNSEGTGQAADLKSTQAAINQINGKLNRLIGKTNEKFHQIEKEFSEVEGRIQDLEKYVEDTKIDLWSYNAELLVALENQHTIDLTDSEMNKLFERTKKQLRENAEDMGNGCFKIYHKCDNACIGSIRNGTYDHDVYRDEALNNRFQIKGVELKSGYKDWILWISFAISCFLLCVALLGFIMWACQKGNIRCNICI

SEQ ID NO: 7962 - protein, 566 aa, Artificial Sequence; identical to SEQ ID NO: 1795
  derived and/or modified protein sequence (wt) from hemagglutinin__InfluenzaA__AEX33618

SEQ ID NO: 7963 - protein, 566 aa, Artificial Sequence; identical to SEQ ID NO: 1795
  derived and/or modified protein sequence (wt) from hemagglutinin__InfluenzaA__AEX33629

SEQ ID NO: 7964 - protein, 566 aa, Artificial Sequence; identical to SEQ ID NO: 7961
  derived and/or modified protein sequence (wt) from hemagglutinin__InfluenzaA__AEX33640

SEQ ID NO: 7965 - protein, 566 aa, Artificial Sequence
  derived and/or modified protein sequence (wt) from hemagglutinin__InfluenzaA__AEX33836
MKTIIALSYILCLVFAQKLPGNDNSTATLCLGHHAVPNGTIVKTITNDQIEVTNATELVQSSSTGGICDSPHQILDGENCTLIDALLGDPQCDGFQNKKWDLFVERSKAYSNCYPYDVPDYASLRSLVASSGTLEFNNESFNWTGVTQNGTSSACKRRSNNSFFSRLNWLTHLKFKYPALNVTMPNNEKFDKLYIWGVHHPGTDNDQIFLYAQASGRITVSTKRSQQTVIPNIGSRPRVRNIPSRISIYWTIVKPGDIFLINSTGNLIAPRGYFKIRSGKSSIMRSDAPIGKCNSECITPNGSIPNDKPFQNVNRITYGACPRYVKQNTLKLATGMRNVPEKQTRGIFGAIAGFIENGWEGMVDGWYGFRHQNSEGIGQAADLKSTQAAINQINGKLNRLIGKTNEKFHQIEKEFSEVEGRIQDLEKYVEDTKIDLWSYNAELLVALENQHTIDLTDSEMNKLFERTKKQLRENAEDMGNGCFKIYHKCDNACIGSIRNGTYDHDVYRDEALNNRFQIKGVELKSGYKDWILWISFAISCFLLCVALLGFIMWACQKGNIRCNICI

SEQ ID NO: 7966 - protein, 566 aa, Artificial Sequence; identical to SEQ ID NO: 630
  derived and/or modified protein sequence (wt) from hemagglutinin__InfluenzaA__AEX33880

SEQ ID NO: 7967 - protein, 565 aa, Artificial Sequence
  derived and/or modified protein sequence (wt) from hemagglutinin__InfluenzaA__AEX33913
MKVKLLVLLCTFTATYADTICIGYHANNSTDTVDTVLEKNVTVTHSVNLLEDSHNGKLCLLKGIAPLQLGNCSVAGWILGNPECELLISRESWSYIVEKPNPENGTCYPGHFADYEELREQLSSVSSFERFEIFPKENSWPNHTTTGVSASCSHNGESSFYKNLLWLTGKNGLYPNLSKSYANNKKKEVLVLWGVHHPPNIGNQRALYHTENAYVSVVSSHYSRKFTPEIAKRPKVRDQEGRINYYWTLLEPGDTIIFEANGNLIAPRYAFALSRGFGSGIINSNAPMDECDAKCQTPQGAINSSLPFQNVHPVTIGECPKYVRSAKLRMVTGLRNIPSIQSRGLFGAIAGFIEGGWTGMVDGWYGYHHQNEQGSGYAADQKSTQNAINGITNKVNSVIEKMNTQFTAVGKEFNKLERRMENLNKKVDDGFIDIWTYNAELLVLLENERTLDFHDSNVKNLYEKVKSQLKNNAKEIGNGCFEFYHKCNDECMESVKNGTYDYPKYSEESKLNREKIDGVKFESMGVYQILAIYSTVASSLVLLVSLGAISFWMCSNGSLQCRICI

SEQ ID NO: 7968 - protein, 565 aa, Artificial Sequence
  derived and/or modified protein sequence (wt) from hemagglutinin__InfluenzaA__AEX33924
MKVKLLVLLCTFTATYADTICIGYHANNSTDTVDTVLEKNVTVTHSVNLLEDSHNGKLCLLKGIAPLQLGNCSVAGWILGNPECESLISRESWSYIVEKPSPENGTCYPGHFADYEELREQLSSVSSFERFEIFPKESSWPNHTATGVSASCSHNGKSSFYKNLLWLTGKNGLYPNLSKSYANNKEKEVLVLWGVHHPPNIGDQRALYHTENAYVSVVSSHYSRKFTPEIAKRPKVRDQKGRINYYWTLLEPGDTIIFEANGNLIAPRYAFALSRGFGSGIINSNAPMDECDAKCQTPQGAINSSLPFQNVHPVTIGECPKYVRSAKLRMVTGLRNIPSIQSRGLFGAIAGFIEGGWTGMVDGWYGYHHQNEQGSGYAADQKSTQNAINGITNKVNSVIEKMNTQFTAVGKEFNKLERRMENLNKKVDDGFIDIWTYNAELLVLLENERTLDFHDSNVKNLYEKVKSQLKNNAKEIGNGCFEFYHKCNDECMESVKNGTYDYPKYSEESKLNREKIDGVKLESMGVYQILAIYSTVASSLVLLVSLGAISFWMCSNGSLQCRICI

SEQ ID NO: 7969 - protein, 566 aa, Artificial Sequence
  derived and/or modified protein sequence (wt) from hemagglutinin__InfluenzaA__AEX33957
MKTIIALSYILCLVFAQKLPGIDNSTATLCLGHHAVPNGTIVKTITNDQVEVTNATELVQNSSTGGICDSPHQILDGENCTLIDALLGDPQCDGFQNKKWDLFVERSKAYSNCYPYDVPDYASLRSLVASSGTLEFNNESFNWTGVTQNGTSSACKRGSNNSFFSRLNWLTHSKFKYPALNVTMPNNEEFDKLYIWGVHHPGTDNDQIFLYAQASGRITVSTKRSQQTVIPNIGSRPRVRNIPSRISIYWTIVKPGDILLINSTGNLIAPRGYFKIRSGKSSIMRSDAPIGKCNSECITPNGSIPNDKPFQNVNRITYGACPRYVKQNTLKLATGMRNVPEKQTRGIFGAIAGFIENGWEGMVDGWYGFRHQNSEGIGQAADLKSTQAAIDQINGKLNRLIGKTNEKFHQIEKEFSEVEGRIQDLEKYVEDTKIDLWSYNAELLVALENQHTIDLTDSEMNKLFEKTKKQLRENAEDMGNGCFKIYHKCDNACIGSIRNGTYDHDVYRDEALNNRFQIKGVELKSGYKDWILWISFAISCFLLCVALLGFIMWACQKGNIRCNICI

SEQ ID NO: 7970 - protein, 566 aa, Artificial Sequence
  derived and/or modified protein sequence (wt) from hemagglutinin__InfluenzaA__AEX33968
MKTIIALSYILCLVFAQKLPGIDNSTATLCLGHHAVPNGTIVKTITNDQIEVTNATELVQNSSTGGICDSPHQILDGENCTLIDALLGDPQCDGFQNKKWDLFVERSKAYSNCYPYDVPDYASLRSLVASSGTLEFNNESFNWTGVTQNGTSSACKRGSNNSFFSRLNWLTHSKFKYPALNVTMPNNEEFDKLYIWGVHHPGTDNDQIFLHAQASGRITVSTKRSQQTVIPNIGSRPRVRNIPSRISIYWTIVKPGDILLINSTGNLIAPRGYFKIRSGKSSIMRSDAPIGKCNSECITPNGSIPNDKPFQNVNRITYGACPRYVKQNTLKLATGMRNVPEKQTRGIFGAIAGFIENGWEGMVDGWYGFRHQNSEGIGQAADLKSTQAAIDQINGKLNRLIGKTNEKFHQIEKEFSEVEGRIQDLEKYVEDTKIDLWSYNAELLVALENQHTIDLTDSEMNKLFEKTKKQLRENAEDMGNGCFKIYHKCDNACIGSIRNGTYDHDVYRDEALNNRFQIKGVELKSGYKDWILWISFAISCFLLCVALLGFIMWACQKGNIRCNICI

SEQ ID NO: 7971 - protein, 566 aa, Artificial Sequence
  derived and/or modified protein sequence (wt) from hemagglutinin__InfluenzaA__AEX33979
MKTIIALSYILCLVFAQKLPGNDNSTATLCLGHHAVPNGTIVKTITNDQIEVTNATELVQSSSTGEICDSPHQILDGENCTLIDALLGDPQCDGFQNKKWDLFVERSKAYSNCYPYDVPDYASLRSLVASSGTLEFNNESFNWTGVTQNGTSSACIRRSNNSFFSRLNWLTHLKFKYPALNVTMPNNEKFDKLYIWGVHHPGTDNDQIFLYAQASGRITVSTKRSQQTVIPNIGSRPRVRNIPSRISIYWTIVKPGDILLINSTGNLIAPRGYFKIRSGKSSIMRSDAPIGKCNSECITPNGSIPNDKPFQNVNRITYGACPRYVKQNTLKLATGMRNVPEKQTRGIFGAIAGFIENGWEGMVDGWYGFRHQNSEGIGQAADLKSTQAAIDQINGKLNRLIGKTNEKFHQIEKEFSEVEGRIQDLEKYVEDTKIDLWSYNAELLVALENQHTIDLTDSEMNKLFEKTKKQLRENAEDMGNGCFKIYHKCDNACIGSIRNGTYDHDVYRDEALNNRFQINGVELKSGYKDWILWISFAISCFLLCVALLGFIMWACQKGNIRCNICI

SEQ ID NO: 7972 - protein, 566 aa, Artificial Sequence
  derived and/or modified protein sequence (wt) from hemagglutinin__InfluenzaA__AEX33990
MKTIIALSYILYLVFAQKLPGNDNSTATLCLGHHAVPNGTIVKTITNDQIEVTNATELVQSSSTGEICDSPHQILDGENCTLIDALLGDPQCDGFQNKKWDLFVERSKAYSNCYPYDVPDYASLRSLVASSGTLEFNNESFNWTGVTQNGTSSACIRRSNNSFFSRLNWLTHLKFKYPALNVTMPNNEKFDKLYIWGVHHPGTDNDQIFLYAQASGRITVSTKRSQQTVIPNIGSRPRVRNIPSRISIYWTIVKPGDILLINSTGNLIAPRGYFKIQSGKSSIMRSDAPIGKCNSECITPNGSIPNDKPFQNVNRITYGACPRYVKQDTLKLATGMRNVPEKQTRGIFGAIAGFIENGWEGMVDGWYGFRHQNSEGIGQAADLKSTQAAIDQINGKLNRLIGKTNEKFHQIEKEFSEVEGRIQDLEKYVEDTKIDLWSYNAELLVALENQHTIDLTDSEMNKLFEKTKKQLRENAEDMGNGCFKIYHKCDNACIGSIRNGTYDHDVYRDEALNNRFQIKSVELKSGYKDWILWISFAISCFLLCVALLGFIMWACQKGNIRCNICI

SEQ ID NO: 7973 - protein, 566 aa, Artificial Sequence
  derived and/or modified protein sequence (wt) from hemagglutinin__InfluenzaA__AEX34001
MKTIIALSYILCLVFAQKLPGNDNSTATLCLGHHAVPNGTIVKTITNDQIEVTNATELVQSSSTGGICDSPHQILDGENCTLIDALLGDPQCDGFQNKKWDLFVERSKAYSNCYPYDVPDYASLRSLVASSGTLEFNSESFNWTGVTQNGTSSACKRRSNNSFFSRLNWLTHLKFKYPALNVTMPNNEKFDKLYIWGVHHPGTDNDQIFLYAQASGRITVSTKRSQQTVIPNIGSRPRVRNIPSRISIYWTIVKPGDILLINSTGNLIAPRGYFKIRSGKSSIMRSDAPIGKCNSECITPNGSIPNDKPFQNVNRITYGACPRYVKQNTLKLATGMRNVPEKQTRGIFGAIAGFIENGWEGMVDGWYGFRHQNAEGIGQAADLKSTQAAINQINGKLNRLIGKTNEKFHQIEKEFSEVEGRIQDLEKYVEDTKIDLWSYNAELLVALENQHTIDLTDSEMNKLFERTKKQLRENAEDMGNGCFKIYHKCDNACIGSIRNGTYDHDVYRDEALNNRFQIKGVELKSGYKDWILWISFAISCFLLCVALLGFIMWACQKGNIRCNICI

SEQ ID NO: 7974 - protein, 566 aa, Artificial Sequence
  derived and/or modified protein sequence (wt) from hemagglutinin__InfluenzaA__AEX34012
MKTIIALSYILYLVFAQKLPGNDNSTATLCLGHHAVPNGTIVKTITNDQIEVTNATELVQSSSTGEICDSPHQILDGENCTLIDALLGDPQCDGFQNKKWDLFVERSKAYSNCYPYDVPDYASLRSLVASSGTLEFNNESFNWTGVTQNGTSSACIRRSNNSFFSRLNWLTHLKFKYPALNVTMPNNEKFDKLYIWGVHHPGTDNDQIFLYAQASGRITVSTKRSQQTVIPNIGSRPRVRNIPSRISIYWTIVKPGDILLINSTGNLIAPRGYFKIQSGKSSIMRSDAPIGKCNSECITPNGSIPNDKPFQNVNRITYGACPRYVKQNTLKLATGMRNVPEKQTRGIFGAIAGFIENGWEGMVDGWYGFRHQNSEGIGQAADLKSTQAAIDQINGKLNRLIGKTNEKFHQIEKEFSEVEGRIQDLEKYVEDTKIDLWSYNAELLVALENQHTIDLTDSEMNKLFEKTKKQLRENAEDMGNGCFKIYHKCDNACIGSIRNGTYDHDVYRDEALNNRFQIKGVELKSGYKDWILWISFAISCFLLCVALLGFIMWACQKGNIRCNICI

SEQ ID NO: 7975 - protein, 566 aa, Artificial Sequence; identical to SEQ ID NO: 2434
  derived and/or modified protein sequence (wt) from hemagglutinin__InfluenzaA__AEX34023

SEQ ID NO: 7976 - protein, 566 aa, Artificial Sequence
  derived and/or modified protein sequence (wt) from hemagglutinin__InfluenzaA__AEX34044
MKTIIAFSYILCLVFAQKLPGIDNSTATLCLGHHAVPNGTIVKTITNDQIEVTNATELVQSSSTGGICDSPHQILDGENCTLIDALLGDPQCDGFQNKKWDLFVERSKAYSNCYPYDVPDYASLRSLVASSGTLEFNNESFNWTGVTQNGTSSACKRGSNNSFFSRLNWLTHSKFKYPALNVTMPNNEEFDKLYIWGVHHPGTDNDQIFLYAQASGRITVSTKRSQQTVIPNIGSRPRVRNIPSRISIYWTIVKPGDILLINSTGNLIAPRGYFKIRSGKSSIMRSDAPIGKCNSECITPNGSIPNDKPFQNVNRITYGACPRYVKQNTLKLATGMRNVPEKQTRGIFGAIAGFIENGWEGMVDGWYGFRHQNSEGIGQAADLKSTQAAIDQINGKLNRLIGKTNEKFHQIEKEFSEVEGRIQDLEKYVEDTKIDLWSYNAELLVALENQHTIDLTDSEMNKLFEKTKKQLRENAEDMGNGCFKIYHKCDNACIGSIRNGTYDHDVYRDEALNNRFQIKGVELKSGYKDWILWISFAISCFLLCVALLGFIMWACQKGNIRCNICI

SEQ ID NO: 7977 - protein, 566 aa, Artificial Sequence
  derived and/or modified protein sequence (wt) from hemagglutinin__InfluenzaA__AEX34089
MKTIIALSYILCLVFAQKLPGIDNSTATLCLGHHAVPNGTIVKTITNDQIEVTNATELVQNSSTGGICDSPHQILDGENCTLIDALLGDPQCDGFQNKKWDLFVERSKAYSNCYPYDVPDYASLRSLVASSGTLEFNNESFNWTGVTQNGTSSACKRGSSNSFFSRLNWLTHSKFKYPALNVTMPNNEEFDKLYIWGVHHPGTDNDQIFLYAQASGRITVSTKRSQQTVIPNIGSRPRVRNIPSRISIYWTIVKPGDILLINSTGNLIAPRGYFKIRSGKSSIMRSDAPIGKCNSECITPNGSIPNDKPFQNVNRITYGACPRYVKQNTLKLATGMRNVPEKQTRGIFGAIAGFIENGWEGMVDGWYGFRHQNSEGIGQAADLKSTQAAIDQINGKLNRLIGKTNEKFHQIEKEFSEVEGRIQDLEKYVEDTKIDLWSYNAELLVALENQHTIDLTDSEMNKLFEKTKKQLRENAEDMGNGCFKIYHKCDNACIGSIRNGTYDHDVYRDEALNNRFQIKGVELKSGYKDWILWISFAISCFLLCVALLGFIMWACQKGNIRCNICI

SEQ ID NO: 7978 - protein, 566 aa, Artificial Sequence
  derived and/or modified protein sequence (wt) from hemagglutinin__InfluenzaA__AEX34123
MKTIIALSYILCLVFAQKLPGIDNSTATLCLGHHAVPNGTIVKTITNDQIEVTNATELVQNSSTGGICDSPHQILDGENCTLIDALLGDPQCDGFQNKKWDLFVERSKAYSNCYPYDVPDYASLRSLVASSGTLEFNNESFNWTGVTQNGTSSACKRGSNNSFFSRLNWLTHSKFKYPALNVTMPNNEEFDKLYIWGVHHPGTDNDQIFLYAQASGRITVSTKRSQQTVIPNIGSRPRVRNIPSRISIYWTIVKPGDILLINSTGNLIAPRGYFKIRSGKSSIMRSDAPIGKCNSECITPNGSIPNDKPFQNVNRITYGACPRYVKQNTLKLATGMRNVPEKQTRGIFGAIAGFIENGWEGMVDGWYGFRHQNSEGIGQAADLKSTQAAIDQINGKLNRLIGKTNEKFHQIEKEFSEVEGRIQDLEKYVEDTKIDLWSYNAELLVALENQHTIDLTDSEMNKLFEKTKKQLRENAEDMGNGCFKIYHKCDNACIGSIRNGTYDHDVYRDEALNNRFQIKGVELKSGYKDWILWISFAISCFLLCVALLGFIMWACQKGNIRCNICI

SEQ ID NO: 7979 - protein, 566 aa, Artificial Sequence
  derived and/or modified protein sequence (wt) from hemagglutinin__InfluenzaA__AEX34134
MKTIIALSYILCLVFAQKLPGNDNSMATLCLGHHAVPNGTIVKTITNDQIEVTNATELVQSSSTGEICDSPHQILDGENCTLIDALLGDPQCDGFQNKKWDLFVERSKAYSNCYPYDVPDYASLRSLVASSGTLEFNNESFNWTGVTQNGTSSACIRRSNNSFFSRLNWLTHLKFKYPALNVTMPNNEKFDKLYIWGVHHPGTDNDQIFLYAQASGRITVSTKRSQQTVIPNIGSRPRVRNIPSRISIYWTIVKPGDILLINSTGNLIAPRGYFKIRSGKSSIMRSDAPIGKCNSECITPNGSIPNDKPFQNVNRITYGACPRYVKQNTLKLATGMRNVPEKQTRGIFGAIAGFIENGWEGMVDGWYGFRHQNSEGIGQAADLKSTQAAIDQINGKLNRLIGKTNEKFHQIEKEFSEVEGRIQDLEKYVEDTKIDLWSYNAELLVALENQHTIDLTDSEMNKLFEKTKKQLRENAEDMGNGCFKIYHKCDNACIGSIRNGTYDHDVYRDEALNNRFQIKGVELKSGYKDWILWISFAISCFLLCVALLGFIMWACQKGNIRCNICI

SEQ ID NO: 7980 - protein, 566 aa, Artificial Sequence; identical to SEQ ID NO: 7978
  derived and/or modified protein sequence (wt) from hemagglutinin__InfluenzaA__AEX34145

SEQ ID NO: 7981 - protein, 566 aa, Artificial Sequence
  derived and/or modified protein sequence (wt) from hemagglutinin__InfluenzaA__AEX34156
MKTIIALSYILCLVFAQKLPGNDNSTATLCLGHHAVPNGTIVKTITNDQIEVTNATELVQSSSTGEICGSPHQILDGENCTLIDALLGDPQCDGFQNKKWDLFVERSKAYSNCYPYDVPDYASLRSLVASSGTLEFNNESFNWTGVTQNGTSSACIRRSNNSFFSRLNWLTHLKFKYPALNVTMPNNEKFDKLYIWGVHHPGTDNDQIFLYAQASGRITVSTKRSQQTVIPNIGSRPRVRNIPSRISIYWTIVKPGDILLINSTGNLIAPRGYFKIRSGKSSIMRSDAPIGKCNSECITPNGSIPNDKPFQNVNRITYGACPRYVKQNTLKLATGMRNVPEKQTRGIFGAIAGFIENGWEGMVDGWYGFRHQNSEGTGQAADLKSTQAAIDQINGKLNRLIGKTNEKFHQIEKEFSEVEGRIQDLEKYVEDTKIDLWSYNAELLVALENQHTIDLTDSEMNKLFEKTKKQLRENAEDMGNGCFKIYHKCDNACIGSIRNGTYDHDVYRDEALNNRFQIKGVELKSGYKDWILWISFAISCFLLCVVLLGFIMWACQKGNIRCNICI

SEQ ID NO: 7982 - protein, 566 aa, Artificial Sequence; identical to SEQ ID NO: 1928
  derived and/or modified protein sequence (wt) from hemagglutinin__InfluenzaA__AEX34178

SEQ ID NO: 7983 - protein, 566 aa, Artificial Sequence
  derived and/or modified protein sequence (wt) from hemagglutinin__InfluenzaA__AEX34188
MKTIIALSYILCLVFAQKFPGNDNSTATLCLGHHAVPNGTIVKTITNDQIEVTNATELVQSSSTGEICDSPHQILDGENCTLIDALLGDPQCDGFQNKNWDLFVERSKAYSNCYPYDVPDYASLRSLVASSGTLEFNNESFNWTGVTQNGTSSACIRRSNNSFFSRLNWLTHLKFKYPALNVTMPNNENFDKLYIWGVHHPGTDNDQIFLYAQASGRITVSTKRSQQTVIPNIGSRPRVRNIPSRISIYWTIVKPGDILLINSTGNLIAPRGYFKIRSGKSSIMRSDAPIGKCNSECITPNGSIPNDKPFQNVNRITYGACPRYVKQNTLKLATGMRNVPEKQTRGIFGAIAGFIENGWEGMVDGWYGFRHQNSEGIGQAADLKSTQAAIDQINGKLNRLIGKTNEKFHQIEKEFSEVEGRIQDLEKYVEDTKIDLWSYNAELLVALENQHTIDLTDSEMNKLFEKTKKQLRENAEDMGNGCFKIYHKCDNACIGSIRNGTYDHDVYRDEALNNRFQIKGVELKSGYKDWILWISFAISCFLLCIALLGFIMWACQKGNIRCNICI

SEQ ID NO: 7984 - protein, 566 aa, Artificial Sequence; identical to SEQ ID NO: 2434
  derived and/or modified protein sequence (wt) from hemagglutinin__InfluenzaA__AEX34199

SEQ ID NO: 7985 - protein, 566 aa, Artificial Sequence
  derived and/or modified protein sequence (wt) from hemagglutinin__InfluenzaA__AEX34221
MKTIIALSYILCLVFAQKLPGIDNSTATLCLGHHAVPNGTIVKTITNDQIEVTNATELVQSSSTGGICDSPHQILDGENCTLIDALLGDPQCDGFQNKKWDLFVERSKAYSNCYPYDVPDYASLRSLVASSGTLEFNNESFNWTGVTQNGTSSACKRGSNNSFFSRLNWLTHSKFKYPALNVTMPNNEEFDKLYIWGVHHPGTDNDQIFLYAQASGRITVSTKRSQQTVIPNIGSRPRVRNIPSRISIYWTIVKPGDILLINSTGNLIAPRGYFKIRSGKSSIMRSDAPIGKCDSECITPNGSIPNDKPFQNVNRITYGACPRYVKQNTLKLATGMRNVPEKQTRGIFGAIAGFIENGWEGMVDGWYGFRHQNSEGIGQAADLKSTQAAIDQINGKLNRLIGKTNEKFHQIEKEFSEVEGRIQDLEKYVEDTKIDLWSYNAELLVALENQHTIDLTDSEMNKLFEKTKKQLRENAEDMGNGCFKIYHKCDNACIGSIRNGTYDHDVYRDEALNNRFQIKGVELKSGYKDWILWISFAISCFLLCVALLGFIMWACQKGNIRCNICI

SEQ ID NO: 7986 - protein, 566 aa, Artificial Sequence; identical to SEQ ID NO: 1928
  derived and/or modified protein sequence (wt) from hemagglutinin__InfluenzaA__AEX34243

SEQ ID NO: 7987 - protein, 566 aa, Artificial Sequence; identical to SEQ ID NO: 7983
  derived and/or modified protein sequence (wt) from hemagglutinin__InfluenzaA__AEX34254

SEQ ID NO: 7988 - protein, 566 aa, Artificial Sequence; identical to SEQ ID NO: 1928
  derived and/or modified protein sequence (wt) from hemagglutinin__InfluenzaA__AEX34265

SEQ ID NO: 7989 - protein, 566 aa, Artificial Sequence
  derived and/or modified protein sequence (wt) from hemagglutinin__InfluenzaA__AEX34275
MKTIIALSYILCLVFAQKLPGIDNSTATLCLGHHAVPNGTIVKTITNDQIEVTNATELVQNSSTGGICDSPHQILDGENCTLIDALLGDPQCDGFQNKKWDLFVERSKAYSNCYPYDVPDYASLRSLVASSGTLEFNNESFNWTGVTQNGTSSACKRGSNNSFFSRLNWLTHSKFKYPALNVTMPNNEEFDKLYIWGVLHPGTDNDQIFLYAQASGRITVSTKRSQQTVIPNIGSRPRVRNIPSRISIYWTIVKPGDILLINSTGNLIAPRGYFKIRSGKSSIMRSDAPIGKCNSECITPNGSIPNDKPFQNVNRITYGACPRYVKQNTLKLATGMRNVPEKQTRGIFGAIAGFIENGWEGMVDGWYGFRHQNSEGIGQAADLKSTQAAIDQINGKLNRLIGKTNEKFHQIEKEFSEVEGRIQDLEKYVEDTKIDLWSYNAELLVALENQHTIDLTDSEMNKLFEKTKKQLRENAEDMGNGCFKIYHKCDNACIGSIRNGTYDHYVYRDEALNNRFQIKGVELKSGYKDWILWISFAISCFLLCVALLGFIMWACQKGNIRCNICI

SEQ ID NO: 7990 - protein, 565 aa, Artificial Sequence; identical to SEQ ID NO: 2488
  derived and/or modified protein sequence (wt) from hemagglutinin__InfluenzaA__AEX34318

SEQ ID NO: 7991 - protein, 565 aa, Artificial Sequence
  derived and/or modified protein sequence (wt) from hemagglutinin__InfluenzaA__AEX34329
MKVKLLVLLCTFTATYADTICIGYHANNSTDTVDTVLEKNVTVTHSVNLLENSHNGKLCLLKGIAPLQLGNCSVAGWILGNPECELLVSKESWSYIVEKPNPENGTCYPGHFADYEELREQLSSVSSFERFEIFPKESSWPNHTVTGVSASCSHNGESSFYRNLLWLTGKNGLYPNLSKSYANNKEKEVLVLWGVHHPPNIGDQKALYHTENAYVSVVSSHYSRKFTPEIAKRPKVRDQEGRINYYWTLLEPGDTIIFEANGNLIAPRYAFALSRGFGSGIINSNAPMDKCDAKCQTPQGAINSSLPFQNVHPVTIGECPKYVRSAKLRMVTGLRNIPSIQSRGLFGAIAGFIEGGWTGMVDGWYGYHHQNEQGSGYAADQKSTQNAINGITNKVNSVIEKMNTQFTAVGKEFNKLERRMENLNKKVDDGFIDIWTYNAELLVLLENERTLDFHDSNVKNLYEKVKSQLKNNAKEIGNGCFEFYHKCNDECMESVKNGTYDYPKYSEESKLNREKIEGVKLESMGVYQILAIYSTVASSLVLLVSLGAISFWMCSNGSLQCRICI

SEQ ID NO: 7992 - protein, 566 aa, Artificial Sequence
  derived and/or modified protein sequence (wt) from hemagglutinin__InfluenzaA__AEX34352
MKTIIALSYILCLVFAQKLPGNDNSTATLCLGHHAVPNGTIVKTITNDQIEVTNATELVQSSSTGEICDSPHQILDGENCTLIDALLGDPQCDGFQNKKWDLFVERSKAYSNCYPYDVPDYASLRSLVASSGTLEFNNESFNWTGVTQNGTSSACIRRSNNSFFSRLNWLTHLKFKYPALNVTMPNNEKFDKLYIWGVHHPGTDNDQIFLYAQASGRITVSTKRSQQTVIPNIGSRPRVRNIPSRISIYWTIVKPGDILLINSTGNLIAPRGYFKIRSGKSSIMRSDAPIGKCNSECITPNGSILNDKPFQNVNRITYGACPRYVKQNTLKLATGMRNVPEKQTRGIFGAIAGFIENGWEGMVDGWYGFRHQNSEGIGQAADLKSTQAAIDQINGKLNRLIGKTNEKFHQIEKEFSEVEGRIQDLEKYVEDTKIDLWSYNAELLVALENQHTIDLTDSEMNKLFEKTKKQLRENAEDMGNGCFKIYHKCDNACIGSIRNGTYDHDVYRDEALNNRFQIKGVELKSGYKDWILWISFAISCFLLCVALLGFIMWACQKGNIRCNICI

SEQ ID NO: 7993 - protein, 566 aa, Artificial Sequence; identical to SEQ ID NO: 2434
  derived and/or modified protein sequence (wt) from hemagglutinin__InfluenzaA__AEX34364

SEQ ID NO: 7994 - protein, 566 aa, Artificial Sequence; identical to SEQ ID NO: 2434
  derived and/or modified protein sequence (wt) from hemagglutinin__InfluenzaA__AEX34375

SEQ ID NO: 7995 - protein, 566 aa, Artificial Sequence
  derived and/or modified protein sequence (wt) from hemagglutinin__InfluenzaA__AEX34386
MKTIIALSYILCLVFAQKLPGNDNSTATLCLGHHAVPNGTIVKTITNDQIEVTNATELVQSSSTGEICDSPHQILDGENCTLIDALLGDPQCDGFQNKKWDLFIERSKAYSNCYPYDVPDYASLRSLVASSGTLEFNNESFNWTGVTQNGTSSACIRRSNNSFFSRLNWLTHLKFKYPALNVTMPNNEQFDKLYIWGVHHPGTDNDQIFLYAQASGRITVSTKRSQQTVIPNIGSRPRVRNIPSRISIYWTIVKPGDILLINSTGNLIAPRGYFKIRSGKSSIMRSDAPIGKCNSECITPNGSIPNDKPFQNVNRITYGACPRYVKQNTLKLATGMRNVPEKQTRGIFGAIAGFIENGWEGMVDGWYGFRHQNSEGRGQAADLKSTQAAIDQINGKLNRLIGKTNEKFHQIEKEFSEVEGRIQDLEKYVEDTKIDLWSYNAELLVALENQHTIDLTDSEMNKLFEKTKKQLRENAEDMGNGCFKIYHKCDNACIGSIRNGTYDHDVYRDEALNNRFQIKGVELKSGYKDWILWISFAISCFLLCVALLGFIMWACQKGNIRCNICI

SEQ ID NO: 7996 - protein, 566 aa, Artificial Sequence
  derived and/or modified protein sequence (wt) from hemagglutinin__InfluenzaA__AEX34407
MKTIIALSYILCLVFAQKLPGNDNSMATLCLGHHAVPNGTIVKTITNDQIEVTNATELVQSSSTGEICDSPHQILDGENCTLIDALLGDPQCDGFQNKKWDLFVERSKAYSNCYPYDVPDYASLRSLVASSGTLEFNNESFNWTGVTQNGTSSACIRRSNNSFFSRLNWLTHLKFKYPALNVTMPNNEQFDKLYIWGVHHPGTDNDQIFLYAQASGRITVSTKRSQQTVIPNIGSRPRVRNIPSRISIYWTIVKPGDILLINSTGNLIAPRGYFKILSGKSSIMRSDAPIGKCNSECITPNGSIPNDKPFQNVNRITYGACPRYVKQNTLKLATGMRNVPEKQTRGIFGAIAGFIENGWEGMVDGWYGFRHQNSEGRGQAADLKSTQAAIDQINGKLNRLIGKTNEKFHQIEKEFSEVEGRIQDLEKYVEDTKVDLWSYNAELLVALENQHTIDLTDSEMNKLFEKTKKQLRENAEDMGNGCFKIYHKCDNACIGSIRNGTYDHDVYRDEALNNRFQIKGVELKSGYKDWILWISFAISCFLLCVALLGFIMWACQKGNIRCNICI

SEQ ID NO: 7997 - protein, 565 aa, Artificial Sequence
  derived and/or modified protein sequence (wt) from hemagglutinin__InfluenzaA__AEX34440
MKVKLLVLLCTFTATYADTICIGYHANNSTDTVDTVLEKNVTVTHSVNLLEDSHNGKLCLLKGIAPLQLGNCSVAGWILGNPECELLTSRESWSYIVEKPNPENGTCYPGHFADYEELREQLSSVSSFERFEIFPKESSWPNHTTTGVSASCSHNGESSFYKNLLWLTGKNGLYPNLSKSYANNKEKEVLVLWGVHHPPNIGNQRALYHTENAYVSVVSSHYSRKFTPEIAKRPKVRDQEGRINYYWTLLEPGDTIIFEANGNLIAPRYAFALSRGFGSGIINSNAPMDECDAKCQTPQGAINSSLPFQNVHPVTIGECPKYVRSAKLRMVTGLRNIPSIQSRGLFGAIAGFIEGGWTGMVDGWYGYHHQNEQGSGYAADQKSTQNAINGITNKVNSVIEKMNTQFTAVGKEFNKLERRMENLNKKVDDGFIDIWTYNAELLVLLENERTLDFHDSNVKNLYEKVKSQLKNNAKEIGNGCFEFYHKCNDECMESVKNGTYDYPKYSEESKLNREKIDGVKLESMGVYQILAIYSTVASSLVLLVSLGAISFWMCSNGSLQCRICI

SEQ ID NO: 7998 - protein, 565 aa, Artificial Sequence; identical to SEQ ID NO: 299
  derived and/or modified protein sequence (wt) from hemagglutinin__InfluenzaA__AEX34462

SEQ ID NO: 7999 - protein, 565 aa, Artificial Sequence
  derived and/or modified protein sequence (wt) from hemagglutinin__InfluenzaA__AEX34473
MKVKLLVLLCTFTATYADTICIGYHANNSTDTVDTVLEKNVTVTHSVNLLEDSHNGKLCLLKGIAPLQLGNCSVAGWILGNPECELLISKESWSYIVETPNPENGTCYPGYFADYEELREQLSSVSSFERFEIFPKESSWPNHTVTGVSASCSHNGKSSFYRNLLWLTGKSGLYPNLSKSYANNKEKEVLVLWGVHHPPNIGDQRALYHTENAYVSVVSSHYSRRFTPEIAKRPKVRDQEGRINYYWTLLEPGDTIIFEANGNLIAPRYAFALSRGFGSGIITSNAPMDECDAKCQTPQGAINSSLPFQNVHPVTIGECPKYVKSAKLRMVTGLRNIPSIQSRGLFGAIAGFIEGGWTGMVDGWYGYHHQNEQGSGYAADQKSTQSAINGITNKVNSVIEKMNTQFTAVGKEFNKLERRMENLNKKVDDGFLDIWTYNAELLVLLENERTLDFHDSNVKNLYEKVKSQLKNNAKEIGNGCFEFYHKCNDECMESVKNGTYDYPKYSEESKLNREKIDGVKLESMGVYQILAIYSTVASSLVLLVSLGAISFWMCSNGSLQCRICI

SEQ ID NO: 8000 - protein, 565 aa, Artificial Sequence
  derived and/or modified protein sequence (wt) from hemagglutinin__InfluenzaA__AEX34495
MKVKLLVLLCIFTATYADTICIGYHANNSTDTVDTVLEKNVTVTHSVNLLEDSHNGKLCLLKGIAPLQLGNCSVAGWILGNPECELLISKESWSYIVETPNPENGTCYPGYFADYEELREQLSSVSSFERFEIFPKESSWPNHTVTGVSASCSHNGKSSFYRNLLWLTGKSGLYPNLSKSYANNKEKEVLVLWGVHHPPNIGVQRALYHTENAYVSVVSSHYSRRFTPEIAKRPKVRDQEGRINYYWTLLEPGDTIIFEANGNLIAPRYAFALSRGFGSGIITSNAPMDECDAKCQTPQGAINSSLPFQNVHPVTIGECPKYVKSAKLRMVTGLRNIPSIQSRGLFGAIAGFIEGGWTGMVDGWYGYHHQNEQGSGYAADQKSTQNAINGITNKVNSVIEKMNTQFTAVGKEFNKLERRMENLNKKVDDGFLDIWTYNAELLVLLENERTLDFHDSNVKNLYEKVKSQLKNNAKEIGNGCFEFYHKCNDECMESVKNGTYDYPKYSEESKLNREKIDGVKLESMGVYQILAIYSTVASSLVLLVSLGAISFWMCSNGSLQCRICI

SEQ ID NO: 8001 - protein, 565 aa, Artificial Sequence; identical to SEQ ID NO: 8000
  derived and/or modified protein sequence (wt) from hemagglutinin__InfluenzaA__AEX34506

SEQ ID NO: 8002 - protein, 565 aa, Artificial Sequence; identical to SEQ ID NO: 8000
  derived and/or modified protein sequence (wt) from hemagglutinin__InfluenzaA__AEX34517

SEQ ID NO: 8003 - protein, 565 aa, Artificial Sequence; identical to SEQ ID NO: 8000
  derived and/or modified protein sequence (wt) from hemagglutinin__InfluenzaA__AEX34528

SEQ ID NO: 8004 - protein, 565 aa, Artificial Sequence; identical to SEQ ID NO: 8000
  derived and/or modified protein sequence (wt) from hemagglutinin__InfluenzaA__AEX34539

SEQ ID NO: 8005 - protein, 565 aa, Artificial Sequence; identical to SEQ ID NO: 8000
  derived and/or modified protein sequence (wt) from hemagglutinin__InfluenzaA__AEX34550

SEQ ID NO: 8006 - protein, 565 aa, Artificial Sequence; identical to SEQ ID NO: 8000
  derived and/or modified protein sequence (wt) from hemagglutinin__InfluenzaA__AEX34561

SEQ ID NO: 8007 - protein, 565 aa, Artificial Sequence; identical to SEQ ID NO: 8000
  derived and/or modified protein sequence (wt) from hemagglutinin__InfluenzaA__AEX34572

SEQ ID NO: 8008 - protein, 565 aa, Artificial Sequence; identical to SEQ ID NO: 8000
  derived and/or modified protein sequence (wt) from hemagglutinin__InfluenzaA__AEX34583

SEQ ID NO: 8009 - protein, 565 aa, Artificial Sequence; identical to SEQ ID NO: 8000
  derived and/or modified protein sequence (wt) from hemagglutinin__InfluenzaA__AEX34594

SEQ ID NO: 8010 - protein, 565 aa, Artificial Sequence; identical to SEQ ID NO: 8000
  derived and/or modified protein sequence (wt) from hemagglutinin__InfluenzaA__AEX34605

SEQ ID NO: 8011 - protein, 565 aa, Artificial Sequence; identical to SEQ ID NO: 8000
  derived and/or modified protein sequence (wt) from hemagglutinin__InfluenzaA__AEX34616

SEQ ID NO: 8012 - protein, 565 aa, Artificial Sequence; identical to SEQ ID NO: 8000
  derived and/or modified protein sequence (wt) from hemagglutinin__InfluenzaA__AEX34627

SEQ ID NO: 8013 - protein, 565 aa, Artificial Sequence; identical to SEQ ID NO: 8000
  derived and/or modified protein sequence (wt) from hemagglutinin__InfluenzaA__AEX34638

SEQ ID NO: 8014 - protein, 565 aa, Artificial Sequence
  derived and/or modified protein sequence (wt) from hemagglutinin__InfluenzaA__AEX34650
MKVKLLVLLCTFTATYADTICIGYHANNSTDTVDTVLEKNVTVTHSVNLLEDSHNGKLCLLKGIAPLQLGNCSVAGWILGNPECELLISKESWSYIVETPNPENGTCYPGYFADYEELREQLSSVSSFERFEIFPKESSWPNHTVTGVSASCSHNGKSSFYRNLLWLTGKNGLYPNLSKSYANNKEKEVLVLWGVHHPPNIGNQRSLYHTENAYVSVVSSHYSRRFTPEIAKRPKVRDQEGRINYYWTLLEPGDTIIFEANGNLIAPRFAFALSRGFGSGIITSNAPMDECDAKCQTPQGAINSSLPFQNVHPVTIGECPKYVRSAKLRMVTGLRNIPSIQSRGLFGAIAGFIEGGWTGMVDGWYGYHHQNEQGSGYAADQKSTQNAINGITNKVNSVIEKMNTQFTAVGKEFNKLERRMENLNKKVDDGFLDIWTYNAELLVLLENERTLDFHDSNVKNLYEKVKSQLKNNAKEIGNGCFEFYHKCNDECMESVKNGTYDYPKYSEESKLNREKIDGVKLESMGVYQILAIYSTVASSLVLLVSLGAISFWMCSNGSLQCRICI

SEQ ID NO: 8015 - protein, 565 aa, Artificial Sequence
  derived and/or modified protein sequence (wt) from hemagglutinin__InfluenzaA__AEX34661
MKVKLLVLLCTFTATYADTICIGYHANNSTDTVDTVLEKNVTVTHSVNLLEDSHNGKLCLLKGIAPLQLGNCSVAGWILGNPECELLISKESWSYIVETPNPENGTCYPGYFADYEELREQLSSVSSFERFEIFPKESSWPNHTVTGVSASCSHNGKSSFYRNLLWLTGKKGLYPNLSKSYANNKEKEVLVLWGVHHPPNIGDQRALYHTENAYVSVVSSHYSRRFTPEIAKRPKVRDQEGRINYYWTLLEPGDTIIFEANGNLIAPRFAFALSRGFGSGIITSNAPMDECDAKCQTPQGAINSSLPFQNVHPVTIGECPKYVRSAKLRMATGLRNIPSIQSRGLFGAIAGFIEGGWTGMVDGWYGYHHQNEQGSGYAADQKSTQNAINGITKKVNSVIEKMNTQFTAVGKEFSKLERRMENLNKKVDDGFLDIWTYNAELLVLLENERTLDFHDSNVKNLYEKVKSQLKNNAKEIGNGCFEFYHKCNDECMESVKNGTYDYPKYSEESKLNREKIDGVKLESMGVYQILAIYSTVASSLVLLVSLGAISFWMCSNGSLQCRICI

SEQ ID NO: 8016 - protein, 565 aa, Artificial Sequence
  derived and/or modified protein sequence (wt) from hemagglutinin__InfluenzaA__AEX34672
MKVKLLVLLCTFTATYADTICIGYHANNSTDTVDTVLDKNVTVTHSVNLLEDSHNGKLCLLKGIAPLQLGNCSVAGWILGNPECELLISRESWSYIVEKPNPENGTCYPGHFADYEELREQLSSVSSFERFEIFPKESSWPNHTTTGVSASCSHDGESSFYKNLLWLTGKNGLYPNLSKSYANNKEKEVLVLWGVHHPPNIGVQRALYHTENAYVSVVSSHYSRKFTPEIAKRPKVRDQEGRINYYWTLLEPGDTIIFEANGNLIAPRYAFALSRGFGSGIINSNAPMDECDAKCQTPQGAINSSLPFQNVHPVTIGECPKYVRSAKLRMVTGLRNIPSIQSRGLFGAIAGFIEGGWTGMVDGWYGYHHQNEQGSGYAADQKSTQNAINGITNKVNSVIEKMNTQFTAVGKEFNKLERRMENLNKKVDDGFIDIWTYNAELLVLLENERTLDFHDSNVKNLYEKVKSQLKNNAKEIGNGCFEFYHKCNDECMESVKNGTYDYPKYSEESKLNREKIDGVKLESMGVYQILAIYSTVASSLVLLVSLGAISFWMCSNGSLQCRICI

SEQ ID NO: 8017 - protein, 565 aa, Artificial Sequence
  derived and/or modified protein sequence (wt) from hemagglutinin__InfluenzaA__AEX34683
MKVKLLVLLCTFTATYADTICIGYHANNSTDTVDTVLEKNVTVTHSVNLLEDSHNGKLCLLKGIAPLQLGNCSVAGWILGNPECELLISRESWSYIVEKPNPENGTCYPGHFADYEELREQLSSVSSFERFEIFPKESSWPYHTTTGVSASCSHNGESSFYKNLLWLTGKNGLYPNLSKSYANNKEKEVLVLWGVHHPPNIGDQRALYHTENAYVSVVSSHYSRKFTPEIAKRPKVRDQEGRINYYWTLLEPGDTIIFEANGNLIAPRYAFALSRGFGSGIINSNAPMDECDAKCQTPQGAINSSLPFQNVHPVTIGECPKYVRSAKLRMVTGLRNIPSIQSRGLFGAIAGFIEGGWTGMVDGWYGYHHQNEQGFGYAADQKSTQNAINGITNKVNSVIEKMNTQFTAVGKEFNKLERRMENLNKKVDDGFIDIWTYNAELLVLLENERTLDFHDSNVKNLYEKVKSQLKNNAKEIGNGCFEFYHKCNDECMESVKNGTYDYPKYSEESKLNREKIDGVKLESMGVYQILAIYSTVASSLVLLVSLGAISFWMCSNGSLQCRICI

SEQ ID NO: 8018 - protein, 565 aa, Artificial Sequence
  derived and/or modified protein sequence (wt) from hemagglutinin__InfluenzaA__AEX34757
MKVKLLVLLCTFTATYADTICIGYHANNSTDTVDTVLEKNVTVTHSVNLLEDSHNGKLCLLKGIAPLQLGNCSVAGWILGNPECELLISRESWSYIVEKPNPENGTCYPGHFADYEELREQLSSVSSFERFEIFPKESSWPNHTTTGVSASCSHNGGSSFYKNLLWLTRKNGLYPNLSKSYANNKEKEVLVLWGVHHPPNIGDQRALYHTENAYVSVVSSHYSRKFTPEIAKRPKVRDQEGRINYYWTLLEPGDTIIFEANGNLIAPRYAFALSRGFGSGIINSNAPMDECDAKCQTPQGAINSSLPFQNVHPVTIGECPKYVRSAKLRMVTGLRNIPSIQSRGLFGAIAGFIEGGWTGMVDGWYGYHHQNEQGSGYAADQKSTQNAINGITNKVNSVIEKMNTQFTAVGKEFNKLERRMENLNKKVDDGFIDIWTYNAELLVLLENERTLDFHDSNVKNLYEKVKSQLKNNAKEIGNGCFEFYHKCNDECMESVKNGTYDYPKYSEESKLNREKIDGVKLESMGVYQILAIYSTVASSLVLLVSLGAISFWMCSNGSLQCRICI

SEQ ID NO: 8019 - protein, 565 aa, Artificial Sequence
  derived and/or modified protein sequence (wt) from hemagglutinin__InfluenzaA__AEX34768
MKVKLLVLLCTFTATYADTICIGYHANNSTDTVDTVLEKNVTVTHSVNLLEDSHNGKLCLLKGIAPLQLGNCSVAGWILGNPECELLISRESWSYIVEKPNPENGTCYPGHFADYEELREQLSSVSSFERFEIFPKDSSWPNHTTTGVSASCSHNGESSFYKNLLWLTGKNGLYPNLSKSYANNKEKEVLVLWGVHHPPNIGDQRALYHTENAYVSVVSSHYSRKFTPEIAKRPKVRDQGGRINYYWTLLEPGDTIIFEANGNLIAPRYAFALSRGFGSGIINSNAPMDECDAKCQTPQGAINSSLPFQNVHPVTIGECPKYVRSAKLRMVTGLRNIPSIQSRGLFGAIAGFIEGGWTGMVDGWYGYHHQNEQGSGYAADQKSTQNAINGITNKVNSVIEKMNTQFTAVGKEFNKLERRMENLNKKVDDGFIDIWTYNAELLVLLENERTLDFHDSNVKNLYEKVKSQLKNNAKEIGNGCFEFYHKCNDECMESVKNGTYDYPKYSEESKLNREKIDGVKLESMGVYQILAIYSTVASSLVLLVSLGAISFWMCSNGSLQCRICI

SEQ ID NO: 8020 - protein, 565 aa, Artificial Sequence
  derived and/or modified protein sequence (wt) from hemagglutinin__InfluenzaA__AEX34779
MKVKLLVLLCTFTATYADTICIGYHANNSTDTVDTVLEKNVTVTHSVNLLENSHNGKLCLLKGIAPLQLGNCSVAGWILGNPECELLISKESWSYIVEKPNPENGTCYPGHFADYEELREQLSSVSSFERFEIFPKESSWPNHTVTGVSASCSHNGERSFYRNLLWLTGKNGLYPNLSKSYANNKEKEVLVLWGVHHPPNIGNQKALYHTENAYVSVVSSHYSRKFTPEIAKRPKVRDQEGRINYYWTLLEPGDTIIFEANGNLIAPRYAFALSRGFGSGIINSNAPMDKCDAKCQTPQGAINSSLPFQNVHPVTIGECPKYVRSAKLRMVTGLRNIPSIQSRGLFGAIAGFIEGGWTGMVDGWYGYHHQNEQGSGYAADQKSTQNAINGITNKVNSVIEKMNTQFTAVGKEFNKLERRMENLNKKVDDGFIDIWTYNAELLVLLENERTLDFHDSNVKNLYEKVKSQLKNNAKEIGNGCFEFYHKCNDECMESVKNGTYDYPKYSEESKLNREKIDGVKLESMGVYQILAIYSTVASSLVLLVSLGAISFWMCSNGSLQCRICI

SEQ ID NO: 8021 - protein, 565 aa, Artificial Sequence; identical to SEQ ID NO: 4097
  derived and/or modified protein sequence (wt) from hemagglutinin__InfluenzaA__AEX34790

SEQ ID NO: 8022 - protein, 565 aa, Artificial Sequence
  derived and/or modified protein sequence (wt) from hemagglutinin__InfluenzaA__AEX34801
MKVKLLVLLCTFTATYADTICIGYHANNSTDTVDTVLEKNVTVTHSVNLLEDNHNGKLCLLKGIAPLQLGNCSVAGWILGNPECELLISKESWSYIVEKPNPENGACYPGHFADYEELREQLSSVSSFKRFEIFPKESSWPNHTVTGVSASCSHNGESSFYKNLLWLTGKNGLYPNLSKSYANNKEKEVLVLWGVHHPPNIGDQMTLYHKENAYVSVVSSHYSRKFTPEIAKRPKVRDQEGRINYYWTLLEPGDTIIFEASGNLIAPRYAFALSRGFGSGIINSDAPMDECDAKCQTPQGAINSSLPFQNVHPVTIGECPKYVRSAKLRMVTGLRNIPSIQSRGLFGAIAGFIEGGWTGMVDGWYGYHHQNEQGSGYAADQKSTQNAINGITNKVNSVIEKMNTQFTAVGKEFNKLERRMENLNKKVDDGFIDVWTYNAELLVLLENERTLDFHDSNVKNLYEKVKNQLKNNAKEIGNGCFEFYHKCNDECMESVKNGTYDYPKYSEESKLSREKIDGVKLESMGVYQILAIYSTVASSLVLLVSLGAISFWMCSNGSLQCRICI

SEQ ID NO: 8023 - protein, 565 aa, Artificial Sequence
  derived and/or modified protein sequence (wt) from hemagglutinin__InfluenzaA__AEX34812
MKVKLLVLLCTFTATYADTICIGYHANNSTDTVDTVLEKNVTVTHSVNLLENSHNGKLCLLKGIAPLQLGNCSVAGWILGNPECELLISKESWSYIVEKPNPENGTCYPGHFADYEELREQLSSVSSFERFEIFPKESSWPNHTVTGVSASCSHNGESSFYRNLLWLTGKNGLYPNLSKSYANNKEKEVLVLWGVHHPPNIGDQKALYHTENAYVSVVSSHYSRKFTPEIAKRPKVRDQEGRINYYWTLLEPGDTIIFEANGNLIAPRYAFALSRGFGSGIINSNAPMDKCDAKCQTPQGAINSSLPFQNVHPVTIGECPKYVRSAKLRMVTGLRNIPSIQSRGLFGAIAGFIEGGWTGMVDGWYGYHHQNEQGSGYAADQKSTQNAIDGITNKVNSVIEKMNTQFTAVGKEFNKLERRMENLNKKVDDGFIDIWTYNAELLVLLENERTLDFHDSNVKNLYEKVKSQLKNNAKEIGNGCFEFYHKCNDECMESVKNGTYDYPKYSEESKLNREKIDGVKLESMGVYQILAIYSTVASSLVLLVSLGAISFWMCSNGSLQCRICI

SEQ ID NO: 8024 - protein, 565 aa, Artificial Sequence
  derived and/or modified protein sequence (wt) from hemagglutinin__InfluenzaA__AEX34834
MKVKLLVLLCTFTATYADTICIGYHANNSTDTVDTVLEKNVTVTHSVNLLEDNHNGKLCLLKGIAPLQLGNCSVAGWILGNPECELLNSKESWSYIVEKPNPENGTCYPGHFADYEELREQLSSVSSFKRFEIFPKESSWPNHTVTGVSASCSHNGESSFYKNLLWLTGKNGLYPNLSKSYANNKEKEVLVLWGVHHPPNIGDQMTLYHKENAYVSVVSSHYSRKFTPEITKRPKVRDQEGRINYYWTLLEPGDTIIFEASGNLIAPRYAFALSRGFGSGIINSNAPMDECDAKCQTPQGAINSSLPFQNVHPVTIGECPKYVRSAKLRMVTGLRNIPSIQSRGLFGAIAGFIEGGWTGMVDGWYGYHHQNEQGSGYAADQKSTQNAINGITNKVNSVIEKMNTQFTAVGKEFNKLERRMENLNKKVDDGFIDVWTYNAELLVLLENERTLDFHDSNVKNLYEKVKNQLKNNAKEIGNGCFEFYHKCNDECMESVKNGTYDYPKYSEESKLSREKIDGVKLESMGVYQILAIYSTVASSLVLLVSLGAISFWMCSNGSLQCRICI

SEQ ID NO: 8025 - protein, 565 aa, Artificial Sequence
  derived and/or modified protein sequence (wt) from hemagglutinin__InfluenzaA__AEX34845
MKVKLLVLLCTFTATYADTICIGYHANNSTDTVDTVLEKNVTVTHSVNLLENSHNGKLCLLKGIAPLQLGNCSVAGWILGNPECELLVPKESWSYIVEKPNPENGTCYPGHFADYEELREQLSSVSSFERFEIFPKESSWPNHTVTGVSASCSHNGESSFYRNLLWLTGKNGLYPNLSKSYANNKEKEVLVLWGVHHPPNIGDQKALYHTENAYVSVVSSHYSRKFTPEIAKRPKVRDQEGRINYYWTLLEPGDTIIFEANGNLIAPRYAFALSRGFGSGIINSNAPMDKCDAKCQTPQGAINSSLPFQNVHPVTIGECPKYVRSAKLRMVTGLRNIPSIQSRGLFGAIAGFIEGGWTGMVDGWYGYHHQNEQGSGYAADQKSTQNAINGITNKVNSVIEKMNTQFTAVGKEFNKLERRMENLNKKVDDGFIDIWTYNAELLVLLENERTLDFHDSNVKNLYEKVKSQLKNNAKEIGNGCFEFYHKCNDECMESVKNGTYDYPKYSEESKLNREKIEGVKLESMGVYQILAIYSTVASSLVLLVSLGAISFWMCSNGSLQCRICI

SEQ ID NO: 8026 - protein, 565 aa, Artificial Sequence; identical to SEQ ID NO: 4097
  derived and/or modified protein sequence (wt) from hemagglutinin__InfluenzaA__AEX34856

SEQ ID NO: 8027 - protein, 565 aa, Artificial Sequence
  derived and/or modified protein sequence (wt) from hemagglutinin__InfluenzaA__AEX34867
MKVKLLVLLCTFTATYADTICIGYHANNSTDTVDTVLEKNVTVTHSVNLLENSHNGKLCLLKGIAPLQLGNCSVAGWILGNPECELLVSKESWSYIVEKPNPENGTCYPGHFADYEELREQLISVSSFERFEIFPKESSWPNHTVTGVSASCSHNGESSFYRNLLWLTGKNGLYPNLSKSYANNKEKEVLVLWGVHHPPNIGDQKALYHTENAYVSVVSSHYSRKFTPEIAKRPKVRDQEGRINYYWTLLEPGDTIIFEANGNLIAPRYAFALSRGFGSGIINSNAPMDKCDAKCQTPRGAINSSLPFQNVHPVTIGECPKYVRSAKLRMVTGLRNIPSIQSRGLFGAIAGFIEGGWTGMVDGWYGYHHQNEQGSGYAADQKSTQNAINGITNKVNSVIEKMNTQFTAVGKEFNKLERRMENLNKKVDDGFIDIWTYNAELLVLLENERTLDFHDSNVKNLYEKVKSQLKNNAKEIGNGCFEFYHKCNDECMESVKNGTYDYPKYSEESKLNREKIEGVKLESMGVYQILAIYSTVASSLVLLVSLGAISFWMCSNGSLQCRICI

SEQ ID NO: 8028 - protein, 565 aa, Artificial Sequence; identical to SEQ ID NO: 4097
  derived and/or modified protein sequence (wt) from hemagglutinin__InfluenzaA__AEX34878

SEQ ID NO: 8029 - protein, 565 aa, Artificial Sequence
  derived and/or modified protein sequence (wt) from hemagglutinin__InfluenzaA__AEX34889
MKVNLLVLLCTFTATYADTICIGYHANNSTDTVDTVLEKNVTVTHSVNLLENSHNGKLCLLKGIAPLQLGNCSVAGWILGNPECELLISKESWSYIVEKPNPENGTCYPGHFADYEELREQLSSVSSFERFEIFPKESSWPNHTVTGVSASCSHNGESSFYRNLLWLTGKNGLYPNLSKSYANNKEKEVLVLWGVHHPPNIGDQKALYHTENAYVSVVSSHYSRKFTPEIAKRPKVRDQEGRINYYWTLLEPGDTIIFEANGNLIAPRYAFALSRGFGSGIINSNAPMDKCDAKCQTPQGAINSSLPFQNVHPVTIGECPKYVRSAKLRMVTGLRNIPSIQSRGLFGAIAGFIEGGWTGMVDGWYGYHHQNEQGSGYAADQKSTQNAINGITNKVNSVIEKMNTQFTAVGKEFNKLERRMENLNKKVDDGFIDIWTYNAELLVLLENERTLDFHDSNVKNLYEKVKSQLKNNAKEIGNGCFEFYHKCNDECMESVKNGTYDYPKYSEESKLNREKIDGVKLESMGVYQILAIYSTVASSLVLLVSLGAISFWMCSNGSLQCRICI

SEQ ID NO: 8030 - protein, 565 aa, Artificial Sequence
  derived and/or modified protein sequence (wt) from hemagglutinin__InfluenzaA__AEX34900
MKVKLLVLLCTFTATYADTICIGYHANNSTDTVDTVLEKNVTVTHSVNLLEDNHNGKLCLLKGIAPLQLGNCSVAGWILGNPECELLISKESWSYIVEKPNPENGTCYPGHFADYEELREQLSSVSSFERFEIFPKESSWPNHTVTGVSASCSHNGESSFYKNLLWLTGKNGLYPNLSKSYANNKEKEVLVLWGVHHPPNIGDQMTLYHKENAYVSVVSSHYSRKFTPEIAKRPKVRDQEGRINYYWTLLEPGDTIIFEASGNLIAPRYAFALSRGFGSGIINSNAPMDECDAKCQTPQGAINSSLPFQNVHPVTIGECPKYVRSAKLRMVTGLRNIPSIQSRGLFGAIAGFIEGGWTGMVDGWYGYHHQNEQGSGYAADQKSTQNAINGVTNKVNSVIEKMNTQFTAVGKEFNKLERRMENLNKKVDDGFIDVWTYNAELLVLLENERTLDFHDSNVKNLYEKVKNQLKNNAKEIGNGCFEFYHKCNDECMESVKNGTYDYPKYSEESKLSREKIDGVELESMGVYQILAIYSTVASSLVLLVSLGAISFWMCSNGSLQCRICI

SEQ ID NO: 8031 - protein, 565 aa, Artificial Sequence
  derived and/or modified protein sequence (wt) from hemagglutinin__InfluenzaA__AEX34911
MKVKLLVLLCTFTATYADTICIGYHANNSTDTVDTVLEKNVTVTHSVNLLENSHNGKLCLLKGIAPLQLGNCSVAGWILGNPECELLISQESWSYIVEKPNPENGTCYPGHFADYEELREQLSSVSSFERFEIFPKESSWPNHTVTGVSASCSHNGESSFYRNLLWLTGKNGLYPNLSKSYANNKEKEVLVLWGVHHPPNIGDQKALYHTENAYVSVVSSHYSRKFTPEIAKRPKVRDQEGRINYYWTLLEPGDTIIFEANGNLIAPRYAFALSRGFGSGIINSNAPMDKCDAKCQTPQGAINSSLPFQNVHPVTIGECPKYVRSAKLRMVTGLRNIPSIQSRGLFGAIAGFIEGGWTGMVDGWYGYHHQNEQGSGYAADQKSTQNAINGITNKVNSVIEKMNTQFTAVGKEFNKLERRMENLNKKVDDGFIDIWTYNAELLVLLENERTLDFHDSNVKNLYEKVKSQLKNNAKEIGNGCFEFYHKCNDECMESVKNGTYDYPKYSEESKLNREKIDGVKLGSMGVYQILAIYSTVASSLVLLVSLGAISFWMCSNGSLQCRICI

SEQ ID NO: 8032 - protein, 565 aa, Artificial Sequence
  derived and/or modified protein sequence (wt) from hemagglutinin__InfluenzaA__AEX34922
MKVKLLVLLCTFTATYADTICIGYHANNSTDTVDTVLEKNVTVTHSVNLLENSHNGKLCLLKGIAPLQLGNCSVAGWILGNPECELLISKESWSYIVEKPNPENGTCYPGHFADYEELREQLSSVSSFERFEIFPKESSWPNHTVTGVSASCSHNGESSFYRNLLWLTGKNGLYPNLSKSYANNKEKEVLVLWGVHHPPNIGDQKALYHTENAYVSVVSSHYSRRFTPEIAKRPKVRDQEGRINYYWTLLEPGDTIIFEANGNLIAPRYAFALSRGFGSGIINSNAPMDKCDAKCQTPQGAINSSLPFQNVHPVTIGECPKYVRSAKLRMVTGLRNIPSIQSRGLFGAIAGFIEGGWTGMVDGWYGYHHQNEQGSGYAADQKSTQNAINGITNKVNSVIEKMNTQFTAVGKEFNKLERRMENLDKKVDDGFIDIWTYNAELLVLLENERTLDFHDSNVKNLYEKVKSQLKNNAKEIGNGCFEFYHKCNDECMESVKNGTYDYPKYSEESKLNREKIDGVKLESMGVYQILAIYSTVASSLVLLVSLGAISFWMCSNGSLQCRICI

SEQ ID NO: 8033 - protein, 565 aa, Artificial Sequence; identical to SEQ ID NO: 2488
  derived and/or modified protein sequence (wt) from hemagglutinin__InfluenzaA__AEX34933

SEQ ID NO: 8034 - protein, 565 aa, Artificial Sequence; identical to SEQ ID NO: 2488
  derived and/or modified protein sequence (wt) from hemagglutinin__InfluenzaA__AEX34944

SEQ ID NO: 8035 - protein, 565 aa, Artificial Sequence
  derived and/or modified protein sequence (wt) from hemagglutinin__InfluenzaA__AEX34955
MKAKLLVLLCTFTATYADTICIGYHANNSTDTVDTVLEKNVTVTHSVNLLENSHNGKLCLLKGIAPLQLGNCSVAGWILGNPECELLISKESWSYIVEKPNPENGTCYPGHFADYEELREQLSSVSSFERFEIFPKESSWPNHTVTGVSASCSHNGESSFYRNLLWLTGKNGLYPNLSKSYANNKEKEVLVLWGVHHPPNIGDQKALYHTENAYVSVVSSHYSRKFTPEIAKRPKVRDQEGRINYYWTLLEPGDTIIFEANGNLIAPRYAFALSRGFGSGIINSNAPMDKCDAKCQTPQGAINSSLPFQNVHPVTIGECPKYVRSAKLRMVTGLRNIPSIQSRGLFGAIAGFIEGGWTGMVDGWYGYHHQNEQGSGYAADQKSTQNAINGITNKVNSVIEKMNTQFTAVGKEFNKLERRMENLNKKVDDGFIDIWTYNAELLVLLENERTLDFHDSNVKNLYEKVKSQLKNNAKEIGNGCFEFYHKCNDECMESVKNGTYDYPKYSEESKLNREKIDGVKLESMGVYQILAIYSTVASSLVLLVSLGAISFWMCSNGSLQCRICI

SEQ ID NO: 8036 - protein, 565 aa, Artificial Sequence
  derived and/or modified protein sequence (wt) from hemagglutinin__InfluenzaA__AEX34966
MKVKLLVLLCTFTATYADTICIGYHANNSTDTVDTVLEKNVTVTHSVNLLENSHNGKLCLLKGIAPLQLGNCSVAGWILGNPECELLISKESWSYIVEKPNPENGTCYPGHFADYEELREQLSSVSSFERFEIFPKESSWPNHTVTGVSASCSHNGESSFYRNLLWLTGKNGLYPNLSKSYANNKEKEVLVLWGVHHPPNIGDQKALYHTENAYVSVVSSHYSRKFTPEIAKRPKVRDQEGRINYYWTLLEPGDTIMFEANGNLIAPRYAFALSRGFGSGIINSNAPMDKCDAKCQTPQGAINSSLPFQNVHPVTIGECPKYVRSAKLRMVTGLRNIPSIQSRGLFGAIAGFIEGGWTGMVDGWYGYHHQNEQGSGYAADQKSTQNAINGITNKVNSVIEKMNTQFTAVGKEFNKLERRMENLNKKVDDGFIDIWTYNAELLVLLENERTLDFHDSNVKNLYEKVKSQLKNNAKEIGNGCFEFYHKCNDECMESVKNGTYDYPKYSEESKLNREKIDGVKLESMGVYQILAIYSTVASSLVLLVSLGAISFWMCSNGSLQCRICI

SEQ ID NO: 8037 - protein, 565 aa, Artificial Sequence; identical to SEQ ID NO: 8036
  derived and/or modified protein sequence (wt) from hemagglutinin__InfluenzaA__AEX34977

SEQ ID NO: 8038 - protein, 565 aa, Artificial Sequence; identical to SEQ ID NO: 8036
  derived and/or modified protein sequence (wt) from hemagglutinin__InfluenzaA__AEX34988

SEQ ID NO: 8039 - protein, 565 aa, Artificial Sequence; identical to SEQ ID NO: 4097
  derived and/or modified protein sequence (wt) from hemagglutinin__InfluenzaA__AEX34999

SEQ ID NO: 8040 - protein, 565 aa, Artificial Sequence; identical to SEQ ID NO: 8036
  derived and/or modified protein sequence (wt) from hemagglutinin__InfluenzaA__AEX35010

SEQ ID NO: 8041 - protein, 565 aa, Artificial Sequence; identical to SEQ ID NO: 8036
  derived and/or modified protein sequence (wt) from hemagglutinin__InfluenzaA__AEX35032

SEQ ID NO: 8042 - protein, 565 aa, Artificial Sequence; identical to SEQ ID NO: 8036
  derived and/or modified protein sequence (wt) from hemagglutinin__InfluenzaA__AEX35043

SEQ ID NO: 8043 - protein, 565 aa, Artificial Sequence
  derived and/or modified protein sequence (wt) from hemagglutinin__InfluenzaA__AEX35054
MKVKLLVLLCTFTATYADTICIGYHANNSTDTVDTVLEKNVTVTHSVNLLENSHNGKLCLLKGIAPLQLGNCSVAGWILGNPECELLISKESWSYIVEKPNPENGTCYPGHFADYEELREQLSSVSSFERFEIFPKESSWPNHTVTGVSASCSHNGESSFYRNLLWLTGKNGLYPNLSKSYANNKEKEVLVLWGVHHPPNIGDQKALYHTENAYVSVVSSHYSRKFTPEIAKRPKVRDQEGRINYYWTLLEPGDTIMFEANGNLIAPRYAFALNRGFGSGIINSNAPMDKCDAKCQTPQGAINSSLPFQNVHPVTIGECPKYVRSAKLRMVTGLRNIPSIQSRGLFGAIAGFIEGGWTGMVDGWYGYHHQNEQGSGYAADQKSTQNAINGITNKVNSVIEKMNTQFTAVGKEFNKLERRMENLNKKVDDGFIDIWTYNAELLVLLENERTLDFHDSNVKNLYEKVKSQLKNNAKEIGNGCFEFYHKCNDECMESVKNGTYDYPKYSEESKLNREKIDGVKLESMGVYQILAIYSTVASSLVLLVSLGAISFWMCSNGSLQCRICI

SEQ ID NO: 8044 - protein, 565 aa, Artificial Sequence; identical to SEQ ID NO: 8036
  derived and/or modified protein sequence (wt) from hemagglutinin__InfluenzaA__AEX35065

SEQ ID NO: 8045 - protein, 565 aa, Artificial Sequence; identical to SEQ ID NO: 2488
  derived and/or modified protein sequence (wt) from hemagglutinin__InfluenzaA__AEX35076

SEQ ID NO: 8046 - protein, 565 aa, Artificial Sequence
  derived and/or modified protein sequence (wt) from hemagglutinin__InfluenzaA__AEX35087
MKVKLLVLLCTFTATYADTICIGYHANNSTDTVDTVLEKNVTVTHSVNLLEDNHNGKLCLLKGIAPLQLGNCSVAGWILGNPECELLISKESWSYIVEKPNPENGTCYPGHFADYEELREQLSSVSSFKRFEIFPKESSWPNHTVTGVSASCSHNGESSFYKNLLWLTGKNGLYPNLSKSYANNKEKEVLVLWGVHHPPNIGDQMTLYHKENAYVSVVSSHYSRKFTPEIAKRPKVRDQEGRINYYWTLLEPGDTIIFEASGNLIAPRYAFALSRGFGSGIINSNAPMDECDAKCQTPQGAINSSLPFQNVHPVTIGECPKYVRSAKLRMVTGLRNIPSIQSRGLFGAIAGFIEGGWTGMVDGWYGYHHQNEQGSGYAADQKSTQNAINGITNKVNSVIEKMNTQFTAVGKEFNKLERRMENLNKKVDDGFIDVWTYNAELLVLLENERTLDFHDSNVKNLYEKVKNQLKNNAKEIGNGCFEFYHKCNDECMESVKNGTYDYPKYSEESKLSREKIDGVKLESMGVYQILAIYSTVASSLVLLVSLGAISFWMCSNGSLQCRICI

SEQ ID NO: 8047 - protein, 565 aa, Artificial Sequence
  derived and/or modified protein sequence (wt) from hemagglutinin__InfluenzaA__AEX35098
MKVKLLVLLCTFTATYADTICIGYHANNSTDTVDTVLEKNVTVTHSVNLLENSHNGKLCLLKGIAPLQLGNCSVAGWILGNPECELLISKESWSYIVEKPNPENGTCYPGHFADYEELREQLSSVSSFERFEIFPKESSWPNHTVTGVSASCSHNGESSFYRNLLWLTGKNGLYPNLSKSYANNKEKEVLVLWGVHHPPNIGDQKALYHTENAYVSVMSSHYSRKFTPEIAKRPKVRDQEGRINYYWTLLEPGDTIIFEANGNLIAPRYAFALSRGFGSGIINSNAPMDKCDAKCQTPQGAINSSLPFQNVHPVTIGECPKYVRSAKLRMVTGLRNIPSIQSRGLFGAIAGFIEGGWTGMVDGWYGYHHQNEQGSGYAADQKSTQNAINGITNKVNSVIEKMNTQFTAVGKEFNKLERRMENLNKKVDDGFIDIWTYNAELLVLLENERTLDFHDSNVKNLYEKVKSQLKNNAKEIGNGCFEFYHKCNDECMESVKNGTYDYPKYSEESKLNREKIDGVKLESMGVYQILAIYSTVASSLVLLVSLGAISFWMCSNGSLQCRICI

SEQ ID NO: 8048 - protein, 565 aa, Artificial Sequence
  derived and/or modified protein sequence (wt) from hemagglutinin__InfluenzaA__AEX35109
MKVKLLVLLCTFTATYADTICIGYHANNSTDTVDTVLEKNVTVTHSVNLLENSHNGKLCLLKGIAPLQLGNCSVAGWILGNPECELLISKESWSYIVEKPNPENGTCYPGHFADYEELREQLSSVSSFERFEIFPKESSWPNHTVTGVSASCSHNGESSFYRNLLWLTGKNGLYPNLSKSYANNKEKEVLVLWGVHQPPNIGDQKALYHTENAYVSVVSSHYSRKFTPEIAKRPKVRDQEGRINYYWTLLEPGDTIIFEANGNLIAPRYAFALSRGFGSGIINSNAPMDKCDAKCQTPQGAINSSLPFQNVHPVTIGECPKYVRSAKLRMVTGLRNIPSIQSRGLFGAIAGFIEGGWTGMVDGWYGYHHQNEQGSGYAADQKSTQNAINGITNKVNSVIEKMNTQFTAVGKEFNKLERRMENLNKKVDDGFIDIWTYNAELLVLLENERTLDFHDSNVKNLYEKVKSQLKNNAKEIGNGCFEFYHKCNDECMESVKNGTYDYPKYSEESKLNREKIDGVKLESMGVYQILAIYSTVASSLVLLVSLGAISFWMCSNGSLQCRICI

SEQ ID NO: 8049 - protein, 565 aa, Artificial Sequence
  derived and/or modified protein sequence (wt) from hemagglutinin__InfluenzaA__AEX35120
MKVKLLVLLCTFTATYADTICIGYHANNSTDTVDTVLEKNVTVTHSVNLLENSHNGKLCLLKGIAPLQLGNCSVAGWILGNPECELLISKESWSYIVEKPNPENGTCYPGHFADYEELREQLSSVSSFERFEIFPKESSWPNHTVTGVSASCSHNGESSFYRNLLWLTGKNGLYPNLSKSYANNKEKEVLVLWGVHHPPNIGDQKALYHTENAYVSVVSSHYSRKFTPEIAKRPKVRDREGRINYYWTLLEPGDTIIFEANGNLIAPRYAFALSRGFGSGIINSNAPMDKCDAKCQTPQGAINSSLPFQNVHPVTIGECPKYVRSAKLRMVTGLRNIPSIQSRGLFGAIAGFIEGGWTGMVDGWYGYHHQNEQGSGYAADQKSTQNAINGITNKVNSVIEKMNTQFTAVGKEFNKLERRMENLNKKVDDGFIDIWTYNAELLVLLENERTLDFHDSNVKNLYEKVKSQLKNNAKEIGNGCFEFYHKCNDECMESVKNGTYDYPKYSEESKLNREKIDGVKLESMGVYQILAIYSTVASSLVLLVSLGAISFWMCSNGSLQCRICI

SEQ ID NO: 8050 - protein, 565 aa, Artificial Sequence; identical to SEQ ID NO: 7793
  derived and/or modified protein sequence (wt) from hemagglutinin__InfluenzaA__AEX35131

SEQ ID NO: 8051 - protein, 565 aa, Artificial Sequence; identical to SEQ ID NO: 7793
  derived and/or modified protein sequence (wt) from hemagglutinin__InfluenzaA__AEX35142

SEQ ID NO: 8052 - protein, 565 aa, Artificial Sequence
  derived and/or modified protein sequence (wt) from hemagglutinin__InfluenzaA__AEX35153
MKVKLLVLLCTFTATYADTICIGYHANNSTDTVDTVLEKNVTVTHSVNLLEDNHNGKLCLLKGIAPLQLGNCSVAGWILGNPECELLISKESWSYIVEKPNPENGTCYPGHFADYEELREQLSSVSSFERFEIFPKESSWPNHTVTGVSASCSHNGESSFYKNLLWLTGKNGLYPNLSKSYANNKEKEVLVLWGVHHPPNIGNQMTLYHKENAYVSVVSSHYSRKFTPEIAKRPKVRDQEGRINYYWTLLEPGDTIIFEASGNLIAPRYAFALSRGFGSGIINSNAPMDECDAKCQTPQGAINSNLPFQNVHPVTIGECPKYVRSAKLRMVTGLRNIPSIQSRGLFGAIAGFIEGGWTGMVDGWYGYHHQNEQGSGYAADQKSTQNAINGITNKVNSVIEKMNTQFTAVGKEFNKLERRMENLNKKVDDGFIDVWTYNAELLVLLENERTLDFHDSNVKSLYEKVKNQLKNNAKEIGNGCFEFYHKCNDECMESVKNGTYDYPKYSEESKLSREKIDGVKLESMGVYQILAIYSTVASSLVLLVSLGAISFWMCSNGSLQCRICI

SEQ ID NO: 8053 - protein, 565 aa, Artificial Sequence
  derived and/or modified protein sequence (wt) from hemagglutinin__InfluenzaA__AEX35164
MKVKLLVLLCAFTATYADTICIGYHANNSTDTVDTVLEKNVTVTHSVNLLENSHNGKLCLLKGIAPLQLGNCSVAGWILGNPECELLISKESWSYIVEKPNPENGTCYPGHFADYEELREQLSSVSSFERFEIFPKESSWPNHTVTGVSASCSHNGESSFYRNLLWLTGKNGLYPNLSKSYANNKEKEVLVLWGVHHPPNIGVQKALYHTENAYVSVVSSHYSRKFTPEIAKRPKVRDQEGRINYYWTLLEPGDTIIFEANGNLIAPRYAFALSRGFGSGIINSNAPMDKCDAKCQTPQGAINSSLPFQNVHPVTIGECPKYVRSAKLRMVTGLRNIPSIQSRGLFGAIAGFIEGGWTGMVDGWYGYHHQNEQGSGYAADQKSTQNAINGITNKVNSVIEKMNTQFTAVGKEFNKLERRMENLNKKVDDGFIDIWTYNAELLVLLENERTLDFHDSNVKNLYEKVKSQLKNNAKEIGNGCFEFYHKCNDECMESVKNGTYDYPKYSEESKLNREKIDGVKLESMGVYQILAIYSTVASSLVLLVSLGAISFWMCSNGSLQCRICI

SEQ ID NO: 8054 - protein, 565 aa, Artificial Sequence
  derived and/or modified protein sequence (wt) from hemagglutinin__InfluenzaA__AEX35175
MKVKLLVLLCTFTATYADTICIGYHANNSTDTVDTVLEKNVTVTHSVDLLEDSHNGKLCLLKGIAPLQLGNCSVAGWILGNPECELLISKESWSYIVETPNPENGTCYPGYFADYEELREQLSSVSSFERFEIFPKESSWPNHTVTGVTASCSHNGKSSFYRNLLWLTGKNGLYPNLSKSYANNKEKEVLVLWGVHHPPNIGDQRALYHTENAYVSVVSSHYSRRFTPEIAKRPKVRDQEGRINYYWTLLEPGDTIIFEANGNLIAPRFAFALNRGFGSGIITSNAPMDGCDAKCQTPQGAINSSLPFQNVHPVTIGECPKYVRSAKLRMATGLRNIPSIQSRGLFGAIAGFIEGGWTGMVDGWYGYHHQNEQGSGYAADQKSTQNAINGITNKVNSVIEKMNTQFTAVGKEFSKLERRMENLNKKVDDGFLDIWTYNAELLVLLENERTLDFHDSNVKNLYEKVKSQLKNNAKEIGNGCFEFYHKCNDECMESVKNGTYDYPKYSEESKLNREKIDGVKLESMGVYQILAIYSTVASSLVLLVSLGAISFWMCSNGSLQCRICI

SEQ ID NO: 8055 - protein, 565 aa, Artificial Sequence
  derived and/or modified protein sequence (wt) from hemagglutinin__InfluenzaA__AEX35186
MKVKLLVLLCTFTATYADTICIGYHANNSTDTVDTVLEKNVTVTHSVNLLEDSHNGKLCLLKGIAPLQLGNCSVAGWILGNPECELLISRESWSYIVEKPNPENGTCYPGHFADYEELREQLSSVSSFERFEIFPKESSWPNHTTTGVSASCSHNGESSFYKNLLWLTGKNGLYPNLSKSYANNKEKEVLVLWGVHHPPNIGNQRALYHTENAYVSVVSSHYSRKFTPEIAKRPKVRDQEGRINYYWTLLEPGDTIIFEANGNLIAPRYAFALSRGFGSGIINSNAPMDECDAKCQTPQGAINSSLPFQNVHPVTIGECPKYVRSAKLRMVTGLRNIPSIQSRGLFGAIAGFIEGGWTGMVDGWYGYHHQNEQGSGYAADQKSTQNAINGITNKVNSVIEKMNTQFTAVGKEFNKLERRMENLNKKVDDGFIDIWTYNAELLVLLENERTLDFHDSNVKNLYEKVKSQLKNNAKEIGNGCFEFYHKCNDECMESVKNGTYDYPKYSEESKLNREKIDGVKLESMGVYQILAIYSTVASSLVLLVSLGAISFWMCSNGSLQCRICI

SEQ ID NO: 8056 - protein, 565 aa, Artificial Sequence; identical to SEQ ID NO: 8055
  derived and/or modified protein sequence (wt) from hemagglutinin__InfluenzaA__AEX35197

SEQ ID NO: 8057 - protein, 565 aa, Artificial Sequence; identical to SEQ ID NO: 2488
  derived and/or modified protein sequence (wt) from hemagglutinin__InfluenzaA__AEX35208

SEQ ID NO: 8058 - protein, 566 aa, Artificial Sequence
  derived and/or modified protein sequence (wt) from hemagglutinin__InfluenzaA__AEX35219
MKTIIALSYILCLVFAQKLPGNDNSTATLCLGHHAVPNGTLVKTITNDQIEVTNATELVQSSSTGGICDSPHQILDGENCTLIDALLGDPHCDGFQNKEWDLFVERSKAYSNCYPYDVPDYASLRSLVASSGTLEFNNESFNWTGVAQNGTSSACKRRSNKSFFSRLNWLHQLKYKYPALNVTMPNNEKFDKLYIWGVHHPSTDSDQISLYAQASGRVTVSTKRSQQTVIPNIGSRPWVRDVSSRISIYWTIVKPGDILLINSTGNLIAPRGYFKIRSGKSSIMRSDAPIGKCNSECITPNGSIPNDKPFQNVNRITYGACPRYVKQNTLKLATGMRNVPEKQTRGIFGAIAGFIENGWEGMVDGWYGFRHQNSEGTGQAADLKSTQAAINQINGKLNRLIGKTNEKFHQIEKEFSEVEGRIQDLEKYVEDTKIDLWSYNAELLVALENQHTIDLTDSEMNKLFERTKKQLRENAEDMGNGCFKIYHKCDNACIGSIRNGTYDHDVYRDEALNNRFQIKGVELKSGYKDWILWISFAMSCFLLCVVLLGFIMWACQKGNIRCNICI

SEQ ID NO: 8059 - protein, 565 aa, Artificial Sequence; identical to SEQ ID NO: 8000
  derived and/or modified protein sequence (wt) from hemagglutinin__InfluenzaA__AEX35230

SEQ ID NO: 8060 - protein, 566 aa, Artificial Sequence; identical to SEQ ID NO: 1897
  derived and/or modified protein sequence (wt) from hemagglutinin__InfluenzaA__AEX35241

SEQ ID NO: 8061 - protein, 565 aa, Artificial Sequence; identical to SEQ ID NO: 8000
  derived and/or modified protein sequence (wt) from hemagglutinin__InfluenzaA__AEX35263

SEQ ID NO: 8062 - protein, 565 aa, Artificial Sequence; identical to SEQ ID NO: 8000
  derived and/or modified protein sequence (wt) from hemagglutinin__InfluenzaA__AEX35274

SEQ ID NO: 8063 - protein, 566 aa, Artificial Sequence; identical to SEQ ID NO: 1795
  derived and/or modified protein sequence (wt) from hemagglutinin__InfluenzaA__AEX35285

SEQ ID NO: 8064 - protein, 566 aa, Artificial Sequence; identical to SEQ ID NO: 7961
  derived and/or modified protein sequence (wt) from hemagglutinin__InfluenzaA__AEX35296

SEQ ID NO: 8065 - protein, 566 aa, Artificial Sequence
  derived and/or modified protein sequence (wt) from hemagglutinin__InfluenzaA__AEX35307
MKTIIALSYILCLVFAQKIPGNDNSTATLCLGHHAVPNGTIVKTITNDQIEVTNATELVQSSSTGGICDSPHQILDGENCTLIDALLGDPQCDGFQNKKWDLFVERSKAYSNCYPYDVPDYASLRSLVASSGTLEFNNESFNWTGVTQNGTSSACKRRSNKSFFSRLNWLTHLKYKYPALNVTMPNNEKFDKLYIWGVHHPGTDSDQISLYAQASGRITVSTKRSQQTVIPNIGSRPRVRDVSSRISIYWTIVKPGDILLINSTGNLIAPRGYFKIRSGKSSIMRSDAPIGKCNSECITPNGSIPNDKPFQNVNRITYGACPRYVKQNTLKLATGMRNVPEKQTRGIFGAIAGFIENGWEGMVDGWYGFRHQNSEGTGQAADLKSTQAAINQINGKLNRLIGKTNEKFHQIEKEFSEVEGRIQDLEKYVEDTKIDLWSYNAELLVALENQHTIDLTDSEMNKLFERTKKQLRENAEDMGNGCFKIYHKCDNACIGSIRNGTYDHDVYRDEALNNRFQIKGVELKSGYKDWILWISFAISCFLLCVVLLGFIMWACQKGNIRCNICI

SEQ ID NO: 8066 - protein, 566 aa, Artificial Sequence; identical to SEQ ID NO: 7961
  derived and/or modified protein sequence (wt) from hemagglutinin__InfluenzaA__AEX35318

SEQ ID NO: 8067 - protein, 566 aa, Artificial Sequence
  derived and/or modified protein sequence (wt) from hemagglutinin__InfluenzaA__AEX35329
MKTIIALSYFLCLVFAQKLPGNDNSTATLCLGHHAVPNGTIVKTITNDQIEVTNATELVQNSSTGGICDSPHQILDGENCTLIDALLGDPQCDGFQNKKWDLFVERSKAYSNCYPYDVPDYASLRSLVASSGTLEFNNESFNWTGVTQNGTSSACKRRSNKSFFSRLNWLTHLKYKYPALNVTMPNNEKFDKLYIWGVHHPGTDSDQISLYAQASGRITVSTKRSQQTVIPNIGSRPRVRDVSSRISIYWTIVKPGDILLINSTGNLIAPRGYFKIRSGKSSIMRSDAPIGKCNSECITPNGSIPNDKPFQNVNRITYGACPRYVKQNTLKLATGMRNVPEKQTRGIFGAIAGFIENGWEGMVDGWYGFRHQNSEGTGQAADLKSTQAAINQINGKLNRLIGKTNEKFHQIEKEFSEVEGRIQDLEKYVEDTKIDLWSYNAELLVALENQHTIDLTDSEMNKLFERTKKQLRENAEDMGNGCFKIYHKCDNACIGSIRNGTYDHDVYRDEALNNRFQIKGVELKSGYKDWILWISFAISCFLLCVALLGFIMWACQKGNIRCNICI

SEQ ID NO: 8068 - protein, 566 aa, Artificial Sequence
  derived and/or modified protein sequence (wt) from hemagglutinin__InfluenzaA__AEX35340
MKTIIALSYILCLVFAQKLPGNDNSTATLCLGHHAVPNGTIVKTITNDQIEVTNATELVQNSSTGGICDSPHQILDGENCTLIDALLGDPQCDGFQNKKWDLFVERSKAYSNCYPYDVPDYASLRSLVASSGTLEFNNESFNWTGVTQNGTSSACKRRSNKSFFSRLNWLTHLKYKYPALNVTMPNNEKFDKLYIWGVHHPGTDSDQISLYAQASGRITVSTKRSQQTVIPNIGSRPRVRDVSSRISIYWTIVKPGDILLINSTGNLIAPRGYFKIRSGKSSIMRSDAPIGKCNSECITPNGSIPNDKPFQNVNRITYGACPRYVKQNTLKLATGMRNVPEKQTRGIFGAIAGFIENGWEGMVDGWYGFRHQNSEGTGQAADLKSTQAAINQINGKLNRLIGKTNEKFHQIEKEFSEVEGRIQDLEKYVEDTKIDLWSYNAELLVALENQHTIDLTDSEMNKLFERTKKQLRENAEDMGNGCFKIYHKCDNACIGSIRNGTYDHDVYRDEALNNRFQIKGVELKSGYKDWILWISFAISCFLLCVALLGFIMWACQKGNIRCNICI

SEQ ID NO: 8069 - protein, 566 aa, Artificial Sequence; identical to SEQ ID NO: 7961
  derived and/or modified protein sequence (wt) from hemagglutinin__InfluenzaA__AEX35351

SEQ ID NO: 8070 - protein, 566 aa, Artificial Sequence; identical to SEQ ID NO: 7961
  derived and/or modified protein sequence (wt) from hemagglutinin__InfluenzaA__AEX35362

SEQ ID NO: 8071 - protein, 566 aa, Artificial Sequence; identical to SEQ ID NO: 1795
  derived and/or modified protein sequence (wt) from hemagglutinin__InfluenzaA__AEX35373

SEQ ID NO: 8072 - protein, 566 aa, Artificial Sequence
  derived and/or modified protein sequence (wt) from hemagglutinin__InfluenzaA__AEX35384
MKTIIALSYILCLVFAQKLPGNDNSTATLCLGHHAVPNGTIVKTITNDQIEVTNATELVQSSSTGGICDSPHQILDGENCTLIDALLGDPQCDGFQNKKWDLFVERSKAYSNCYPYDVPDYASLRSLVASSGTLEFNNESFNWTGVTQNGTSSACKRRSNKSFFSRLNWLTHLKFKYPALSVTMPNNEKFDKLYIWGVHHPGTDNDQISLYAQASGRITVSTKRSQQTVIPNIGSRTRVRDVPSRISIYWTIVKPGDILLINSTGNLIAPRGYFKIRSGKSSIMRSDAPIGKCNSECITPNGSIPNDKPFQNVNRITYGACPRYVKQNTLKLATGMRNVPEKQTRGIFGAIAGFIENGWEGMVDGWYGFRHQNSEGTGQAADLKSTQAAINQINGKLNRLIGKTNEKFHQIEKEFSEVEGRIQDLEKYVEDTKIDLWSYNAELLVALENQHTIDLTDSEMNKLFERTKKQLRENAEDMGNGCFKIYHKCDNACIGSIRNGTYDHDVYRDEALNNRFQIKGVELKSGYKDWILWISFAISCFLLCVALLGFIMWACQKGNIRCNICI

SEQ ID NO: 8073 - protein, 566 aa, Artificial Sequence
  derived and/or modified protein sequence (wt) from hemagglutinin__InfluenzaA__AEX35395
MKTIIALSYILCLVFAQKLPGNDNSTATLCLGHHAVPNGTIVKTITNDQIEVTNATELVQSSSTGEICDSPHQILDGENCTLIDALLGDPQCDGFQNKKWNLFVERSKAYSNCYPYDVPDYASLRSLVASSGTLEFNNESFNWTGVTQNGTSSACKRRSNKSFFSRLNWLTHLKFKYPALNVTMPNNEKFDKLYIWGVHHPGTDNDQISLYAQASGRITVSTKRSQQTVIPNIGSRPRVRDVPSRISIYWTIVKPGDILLINSTGNLIAPRGYFKIRSGKSSIMRSDAPIGKCNSECITPNGSIPNDKPFQNVNRITYGACPRYVKQNTLKLATGMRNVPEKQTRGIFGAIAGFIENGWEGMVDGWYGFRHQNSEGTGQAADLKSTQAAINQINGKLNRLIGKTNEKFHQIEKEFSEVEGRIQDLEKYVEDTKIDLWSYNAELLVALENQHTIDLTDSEMNKLFERTKKQLRENAEDMGNGCFKIYHKCDNACIGSIRNGTYDHDVYRDEALNNRFQIKGVELKSGYKDWILWISFAISCFLLCVALLGFIMWACQKGNIRCNICI

SEQ ID NO: 8074 - protein, 566 aa, Artificial Sequence; identical to SEQ ID NO: 1795
  derived and/or modified protein sequence (wt) from hemagglutinin__InfluenzaA__AEX35406

SEQ ID NO: 8075 - protein, 566 aa, Artificial Sequence; identical to SEQ ID NO: 1795
  derived and/or modified protein sequence (wt) from hemagglutinin__InfluenzaA__AEX35417

SEQ ID NO: 8076 - protein, 566 aa, Artificial Sequence
  derived and/or modified protein sequence (wt) from hemagglutinin__InfluenzaA__AEX35428
MKTIIALSYILCLVFAQKLPGNDNSTATLCLGHHAVPNGTLVKTITNDQIEVTNATELVQSSSTGGICDSPHQILDGENCTLIDALLGDPHCDGFQNKKWDLFVERSKAYSNCYPYDVPDYASLRSLVASSGTLEFNNESFNWTGVAQNGTSSACKRRSDKSFFSRLNWLHQLKYKYPALNVTMPNNEKFDKLYIWGVHHPGTDSDQISLYAQASGRITVSTKRSQQTVIPNIGSRPRVRDVSSRISIYWTIVKPGDILFINSTGNLIAPRGYFKIRSGKSSIMRSDAPIDKCNSECITPNGSIPNDKPFQNVNRITYGACPRYVKQNTLKLATGMRNVPEKQTRGIFGAIAGFIENGWEGMVDGWYGFRHQNSEGTGQAADLKSTQAAINQINGKLNRLIGKTNEKFHQIEKEFSEVEGRIQDLEKYVEDTKIDLWSYNAELLVALENQHTIDLTDSEMNKLFERTKKQLRENAEDMGNGCFKIYHKCDNACIGSIRNGTYDHDVYRDEALNNRFQIKGVELKSGYKDWILWISFAISCFLLCVALLGFIMWACQKGNIRCNICI

SEQ ID NO: 8077 - protein, 565 aa, Artificial Sequence
  derived and/or modified protein sequence (wt) from hemagglutinin__InfluenzaA__AEX35439
MKVKLLVLLCTFTATYADTICIGYHANNSTDTVDTVLEKNVTVTHSVNLLEDSHNGKLCLLKGIAPLQLGNCSVAGWILGNPECELLISKESWSYIVETPNPENGTCYPGYFADYEELREQLSSVSSFERFEIFPKESSWPNHTVTGVSASCSHNGKSSFYRNLLWLTGKNGLYPNLSKSYANNKEKEVLVLWGVHHPPNIGDQRALYHTENAYVSVVSSHYSRRFTPEIAKRPKVRDQEGRINYYWTLLEPGDTIIFEANGNLIAPRFAFALSRGFGSGIITSNAPMDECDAKCQTPQGAINSSLPFQNVHPVTIGECPKYVRSAKLRMVTGLRNIPSIQSRGLFGAIAGFIEGGWTGMVDGWYGYHHQNEQGSGYAADQKSTQNAINGITNKVNSVIEKMNTQFTAVGKEFNKLERRMENLNKKVDDGFLDIWTYNAELLVLLENERTLDFHDSNVKNLYEKVKSQLKNNAKEIGNGCFEFYHKCNDECMESVKNGTYDYPKYSEESKLNREKIDGVKLESMGVYQILAIYSTVASSLVLLVSLGAISFWMCSNGSLQCRICI

SEQ ID NO: 8078 - protein, 566 aa, Artificial Sequence
  derived and/or modified protein sequence (wt) from hemagglutinin__InfluenzaA__AEX35450
MKTIIALSYILCLVFAQKLPGNDNSTATLCLGHHAVPNGTIVKTITNDQIEVTNATELVQSSSTGGICDSPHQILDGENCTLIDALLGDPQCDGFQNKKWDLFVERSKAYSNCYPYDVPDYASLRSLVASSGTLEFNNENFNWTGVTQNGTSSACKRRSNNSFFSRLNWLTHLKFKYPALNVTMPNNEKFDKLYIWGVHHPGTDNDQIFLYAQASGRITVSTKRSQQTVIPNIGSRPRVRNIPSRISIYWTIVKPGDILLINSTGNLIAPRGYFKIQSGKSSIMRSDAPIGKCNSECITPNGSIPNDKPFQNVNRITYGACPRYVKQNTLKLATGMRNVPEKQTRGIFGAIAGFIENGWEGMVDGWYGFRHQNSEGIGQAADLKSTQAAINQINGKLNRLIGKTNEKFHQIEKEFSEVEGRIQDLEKYVEDTKIDLWSYNAELLVALENQHTIDLTDSEMNKLFERTKKQLRENAEDMGNGCFKIYHKCDNACIGSIRNGTYDHDVYRDEALNNRFQIKGVELKSGYKDWILWISFAISCFLLCVALLGFIMWACQKGNIRCNICI

SEQ ID NO: 8079 - protein, 566 aa, Artificial Sequence; identical to SEQ ID NO: 630
  derived and/or modified protein sequence (wt) from hemagglutinin__InfluenzaA__AEX35461

SEQ ID NO: 8080 - protein, 566 aa, Artificial Sequence
  derived and/or modified protein sequence (wt) from hemagglutinin__InfluenzaA__AEX35472
MKTIIALSYILCLVFAQKLPGNDNSTATLCLGHHAVPNGTIVKTITNDQIEVTNATELVQSSSTGGICDSPHQILDGENCTLIDALLGDPQCDDFQNKKWDLFVERSKAYSNCYPYDVPDYASLRSLVASSGTLEFNNESFNWTGVTQNGTSSACKRRSNNSFFSRLNWLTHLKFKYPALNVTMPNNEKFDKLYIWGVHHPGTDNDQIFLYAQASGRITVSTKRSQQTVIPNIGSRPRVRNIPSRISIYWTIVKPGDILLINSTGNLIAPRGYFKIRSGKSSIMRSDAPIGKCNSECITPNGSIPNDKPFQNVNRITYGACPRYVKQNTLKLATGMRNVPEKQTRGIFGAIAGFIENGWEGMVDGWYGFRHQNSEGIGQAADLKSTQAAINQINGKLNRLIGKTNEKFHQIEKEFSEVEGRIQDLEKYVEDTKIDLWSYNAELLVALENQHTIDLTDSEMNKLFERTKKQLRENAEDMGNGCFKIYHKCDNACIGSIRNGTYDHDVYRDEALNNRFQIKGVELKSGYKDWILWISFAISCFLLCVVLLGFIMWACQKGNIRCNICI

SEQ ID NO: 8081 - protein, 566 aa, Artificial Sequence; identical to SEQ ID NO: 630
  derived and/or modified protein sequence (wt) from hemagglutinin__InfluenzaA__AEX35483

SEQ ID NO: 8082 - protein, 566 aa, Artificial Sequence
  derived and/or modified protein sequence (wt) from hemagglutinin__InfluenzaA__AEX35494
MKTIIALSYILCLVFAQKLPGNDNSTATLCLGHHAVPNGTIVKTITNDQIEVTNATELVQSSSTGGICDSPHQILDGENCTLIDALLGDPQCDGLQNKKWDLFVERSKAYSNCYPYDVPDYASLRSLVASSGTLEFNNESFNWTGVTQNGTSSACKRRSNNSFFSRLNWLTHLKFKYPALNVTMPNNEKFDKLYIWGVHHPGTDNDQIFLYAQASGRITVSTKRSQQTVIPNIGSRPRVRNIPSRISIYWTIVKPGDILLINSTGNLIAPRGYFKIRSGKSSIMRSDAPIGKCNSECITPNGSIPNDKPFQNVNRITYGACPRYVKQNTLKLATGMRNVPEKQTRGIFGAIAGFIENGWEGMMDGWYGFRHQNSEGIGQAADLKSTQAAINQINGKLNRLIGKTNEKFHQIEKEFSEVEGRIQDLEKYVEDTKIDLWSYNAELLVALENQHTIDLTDSEMNKLFERTKKQLRENAEDMGNGCFKIYHKCDNACIGSIRNGTYDHDVYRDEALNNRFQIKGVELKSGYKDWILWISFAISCFLLCVALLGFIMWACQKGNIRCNICI

SEQ ID NO: 8083 - protein, 566 aa, Artificial Sequence
  derived and/or modified protein sequence (wt) from hemagglutinin__InfluenzaA__AEX35505
MKTIIALSYILCLVFAQKLPGNDNSTATLCLGHHAVPNGTIVKTITNDQIEVTNATELVQSSSTGGICDSPHQILDGENCTLIDALLGDPQCDDFQNKKWDLFVERSKAYSNCYPYDVPDYASLRSLVASSGTLEFNNESFNWTGVTQNGTSSACKRRSNNSFFSRLNWLTHLKFKYPALNVTMPNNEKFDKLYIWGVHHPGTDNDQIFLYAQASGRITVSTKRSQQTVIPNIGSRPRVRNIPSRISIYWTIVKPGDILLINSTGNLIAPRGYFKILSGKSSIMRSDAPIGKCNSECITPNGSIPNDKPFQNVNRITYGACPRYVKQNTLKLATGMRNVPEKQTRGIFGAIAGFIENGWEGMVDGWYGFRHQNSEGIGQAADLKSTQAAINQINGKLNRLIGKTNEKFHQIEKEFSEVEGRIQDLEKYVEDTKIDLWSYNAELLVALENQHTIDLTDSEMNKLFERTKKQLRENAEDMGNGCFKIYHKCDNACIGSIRNGTYDHDVYRDEALNNRFQIKGVELKSGYKDWILWISFAISCFLLCVALLGFIMWACQKGNIRCNICI

SEQ ID NO: 8084 - protein, 566 aa, Artificial Sequence
  derived and/or modified protein sequence (wt) from hemagglutinin__InfluenzaA__AEX35516
MKTIIALSYILCLVFAQKLPGNDNSTATLCLGHHAVPNGTIVKTITNDQIEVTNATELVQSSSTGGICDSPHQILDGENCTLIDALLGDPQCDGLQNKKWDLFVERSKAYSNCYPYDVPDYASLRSLVASSGTLEFNNESFNWTGVTQNGTSSACKRRSNNSFFSRLNWLTHLKFKYPALNVTMPNNEKFDKLYIWGVHHPGTDNDQIFLYAQASGRITVSTKRSQQTVIPNIGSRPRVRNIPSRISIYWTIVKPGDILLINSTGNLIAPRGYFKIRSGKSSIMRSDAPIGKCNSECITPNGSIPNDKPFQNVNRITYGACPRYVKQNTLKLATGMRNVPEKQTRGIFGAIAGFIENGWEGMVDGWYGFRHQNSEGIGQAADLKSTQAAINQINGKLNRLIGKTNEKFHQIEKEFSEVEGRIQDLEKYVEDTKIDLWSYNAELLVALENQHTIDLTDSEMNKLFERTKKQLRENAEDMGNGCFKIYHKCDNACIGSIRNGTYDHDVYRDEALNNRFQIKGVELKSGYKDWILWISFAISCFLLCVALLGFIMWACQKGNIRCNICI

SEQ ID NO: 8085 - protein, 566 aa, Artificial Sequence
  derived and/or modified protein sequence (wt) from hemagglutinin__InfluenzaA__AEX35527
MKTIIALSYILCLVFAQKLPGNDNSTATLCLGHHAVPNGTIVKTITNDQIEVTNATELVQSSSTGGICDSPHQILDGENCTLIDALLGDPQCDGFQNKKWDLFVERSKAYSNCYPYDVPDYVSLRSLVASSGTLEFNNESFNWTGVTQNGTSSACKRRSNNSFFSRLNWLTHLKFKYPALNVTMPNNEQFDKLYIWGVHHPGTDNDQISLYAQASGRITVSTKRSQQTVIPNIGSRPRVRDIPSRISIYWTIVKPGDILLINSTGNLIAPRGYFKIRSGKSSIMRSDAPIGKCNSECITPNGSIPNDKPFQNVNRITYGACPRYVKQNTLKLATGMRNVPEKQTRGIFGAIAGFIENGWEGMVDGWYGFRHQNSEGIGQAADLKSTQAAINQINGKLNRLIGKTNEKFHQIEKEFSEVEGRIQDLEKYVEDTKIDLWSYNAELLVALENQHTIDLTDSEMNKLFERTKKQLRENAEDMGNGCFKIYHKCDNACIGSIRNGTYDHDVYRDEALNNRFQIKGVELKSGYKDWILWISFAISCFLLCVALLGFIMWACQKGNIRCNICI

SEQ ID NO: 8086 - protein, 566 aa, Artificial Sequence
  derived and/or modified protein sequence (wt) from hemagglutinin__InfluenzaA__AEX35549
MKTIIALSYILCLVFAQKLPGNDNSTATLCLGHHAVPNGTIVKTITNDQIEVTNATELVQSSSTGGICDSPHQILDGENCTLIDALLGDPQCDGFQNKKWDLFVERSKAYSNCYPYDVPDYASLRSLIASSGTLEFNNESFNWTGVTQNGTSSACKRGSNNSFFSRLNWLTHLKFKYPALNVTMPNNEEFDKLYIWGVHHPGTDNDQISLYAQASGKITVSTKRSQQTVIPNIGSRPRVRDIPSRISIYWTIVKPGDILLINSTGNLIAPRGYFKIRSGKSSIMRSDAPIDKCNSECITPNGSIPNDKPFQNVNKITYGACPRYVKQNTLKLATGMRNVPEKQTRGIFGAIAGFIENGWEGMVDGWYGFRHQNSEGIGQAADLKSTQAAIDQINGKLNRLIGKTNEKFHQIEKEFSEVEGRIQDLEKYVEDTKIDLWSYNAELLVALENQHTIDLTDSEMNKLFERTKKQLRENAEDMGNGCFKIYHKCDNACIGSIRNGTYDHDVYRDEALNNRFQIKGVELKSGYKDWILWISFAISCFLLCVALLGFIMWACQKGNIRCNICI

SEQ ID NO: 8087 - protein, 566 aa, Artificial Sequence
  derived and/or modified protein sequence (wt) from hemagglutinin__InfluenzaA__AEX35560
MKTIIALSYILCLVFAQKLPGNDNSTATLCLGHHAVPNGTIVKTITNDQIEVTNATELVQSSSTGGICDSPHQILDGENCTLIDALLGDPQCDGFQNKKWDLFVERSKAYSNCYPYDVPDYVSLRSLVASSGTLEFNNESFNWTGVTQNGTSSACKRRSNNSFFSRLNWLTHLKFKYPALNVTMPNNEQFDKLYIWGVHHPGTDNDQISLYAQASGRITVSTKRSQQTVIPNIGSRPRVRDIPSRISIYWTIVKPGDILLINSTGNLIAPRGYFKIRSGKSSIMRSDAPIGKCNSECITPNGSIPNDKPFQNVNRITYGACPRYVKQNTLKLATGMRNVPEKQTRGIFGAIAGFIENGWEGMVDGWYGFRHQNSVGIGQAADLKSTQAAINQINGKLNRLIGKTNEKFHQIEKEFSEVEGRIQDLEKYVEDTKIDLWSYNAELLVALENQHTIDLTDSEMNKLFERTKKQLRENAEDMGNGCFKIYHKCDNACIGSIRNGTYDHDVYRDEALNNRFQIKGVELKSGYKDWILWISFAISCFLLCVALLGFIMWACQKGNIRCNICI

SEQ ID NO: 8088 - protein, 566 aa, Artificial Sequence
  derived and/or modified protein sequence (wt) from hemagglutinin__InfluenzaA__AEX35571
MKTIIALSYILCLVFAQKLPGNDNSTATLCLGHHAVPNGTIVKTITNDQIEVTNATELVQSSSTGGICDSPHQILDGENCTLIDALLGDPQCDGFQNKKWDLFVERSRAYSNCYPYDVPDYASLRSLVASSGTLEFNNESFNWTGVTQNGTSSACKRRSNNSFFSRLNWLTHLKFKYPALNVTMPNNEKFDKLYIWGVHHPGTDNDQIFLYAQASGRITVSTKRSQQTVIPNIGSRPRVRNIPSRISIYWTIVKPGDILLINSTGNLIAPRGYFKIRSGKSSIMRSDAPIGKCNSECITPNGSIPNDKPFQNVNRITYGACPRYVKQNTLKLATGMRNVPEKQTRGIFGAIAGFIENGWEGMVDGWYGFRHQNSEGIGQAADLKSTQAAINQINGKLNRLIGKTNEKFHQIEKEFSEVEGRIQDLEKYVEDTKIDLWSYNAELLVALENQHTIDLTDSEMNKLFERTKKQLRENAEDMGNGCFKIYHKCDNACIGSIRNGTYDHDVYRDEALNNRFQIKGVELKSGYKDWILWISFAISCFLLCVALLGFIMWACQKGNIRCNICI

SEQ ID NO: 8089 - protein, 566 aa, Artificial Sequence; identical to SEQ ID NO: 630
  derived and/or modified protein sequence (wt) from hemagglutinin__InfluenzaA__AEX35582

SEQ ID NO: 8090 - protein, 566 aa, Artificial Sequence
  derived and/or modified protein sequence (wt) from hemagglutinin__InfluenzaA__AEX35593
MKTIIALSYILCLVFAQKLPGNDNSTATLCLGHHAVPNGTIVKTITNDQIEVTNATELVQSSSTGGICDSPHQILDGENCTLIDALLGDPQCDGFQNKKWDLFVERSKAYSNCYPYDVPDYASLRSLVASSGTLEFNNESFNWTGVTQNGTSSACKRRSNNSFFSRLNWLTHLKFKYPALNVTMPNNEKFDKLYIWGVHHPGTDNDQIFLYAQASGRITVSTKRSQQTVIPNIGSRPRVRNIPSRISIYWTIVKPGDILLINSTGNLIAPRGYFKIRSGKSSIMRSDAPLGKCNSECITPNGSIPNDKPFQNVNRITYGACPRYVKQNTLKLATGMRNVPEKQTRGIFGAIAGFIENGWEGMVDGWYGFRHQNSEGIGQAADLKSTQAAINQINGKLNRLIGKTNEKFHQIEKEFSEVEGRIQDLEKYVEDTKIDLWSYNAELLVALENQHTIDLTDSEMNKLFERTKKQLRENAEDMGNGCFKIYHKCDNACIGSIRNGTYDHDVYRDEALNNRFQIKGVELKSGYKDWILWISFAISCFLLCVALLGFIMWACQKGNIRCNICI

SEQ ID NO: 8091 - protein, 566 aa, Artificial Sequence; identical to SEQ ID NO: 2372
  derived and/or modified protein sequence (wt) from hemagglutinin__InfluenzaA__AEX35604

SEQ ID NO: 8092 - protein, 566 aa, Artificial Sequence
  derived and/or modified protein sequence (wt) from hemagglutinin__InfluenzaA__AEX35615
MKTIIALSYILCLVFAQKLPGNDNSTATLCLGHHAVPNGTIVKTITNDQIEVTNATELVQSSSTGEICDSPHQILDGENCTLIDALLGDPQCDGFQNKKWDLFVERSKAYSNCYPYDVPDYASLRSLVASSGTLEFNNESFNWTGVTQNGTSSACIRRSNNSFFSRLNWLTHLKFKYPALNVTMPNNEKFDKLYIWGVHHPGTDNDQIFLYAQASGRITVSTKRSQQTVIPNIGSRPRVRNIPSRISIYWTIVKPGDILLINSTGNLIAPRGYFKIRSGKSSIMRSDAPIGKCNSECITPNGSIPNDKPFQNVNRITYGACPRYVKQNTLKLATGMRNVPEKQTRGIFGAIAGFIENGWEGMVDGWYGFRHQNSEGIGQAADLKSTQAAIDQINGKLNRLIGKTNEKFHQIEKEFSEVEGRIQDLEKYIEDTKIDLWSYNAELLVALENQHTIDLTDSEMNKLFEKTKKQLRENAEDMGNGCFKIYHKCDNACIGSIRNGTYDHDVYRDEALNNRFQIKGVELKSGYKDWILWISFAISCFLLCVALLGFIMWACQKGNIRCNICI

SEQ ID NO: 8093 - protein, 566 aa, Artificial Sequence; identical to SEQ ID NO: 2434
  derived and/or modified protein sequence (wt) from hemagglutinin__InfluenzaA__AEX35626

SEQ ID NO: 8094 - protein, 566 aa, Artificial Sequence
  derived and/or modified protein sequence (wt) from hemagglutinin__InfluenzaA__AEX35637
MKTIIALSYILCLVFAQKLPGNDNSTATLCLGHHAVPNGTIVKTITNDQIEVTNATELVQSSSTGGICDSPHQILDGENCTLIDALLGDPQCDGFQNKKWDLFVERSKAYSNCYPYDVPDYASLRSLVASSGTLEFNNESFNWTGVTQNGTSSACKRGSDNSFFSKLNWLTHLKFKYPALNVTMPNNEKFDKLYIWGVHHPGTDNDQIFPYAQASGRITVSTKRSQQTVIPNIGSRPRVRNIPSRISIYWTIVKPGDILLINSTGNLIAPRGYFKIRSGKSSIMRSDAPIGKCNSECITPNGSIPNDKPFQNVNRITYGACPRYVKQNTLKLATGMRNVPEKQTRGIFGAIAGFIENGWEGMVDGWYGFRHQNSEGIGQAADLKSTQAAINQINGKLNRLIGKTNEKFHQIEKEFSEVEGRIQDLEKYVEDTKIDLWSYNAELLVALENQHTIDLTDSEMNKLFERTKKQLRENAEDMGNGCFKIYHKCDNACIGSIRNGTYDHDVYRDEALNNRFQIKGVELKSGYKDWILWISFAISCFLLCVALLGFIMWACQKGNIRCNICI

SEQ ID NO: 8095 - protein, 566 aa, Artificial Sequence; identical to SEQ ID NO: 2434
  derived and/or modified protein sequence (wt) from hemagglutinin__InfluenzaA__AEX35648

SEQ ID NO: 8096 - protein, 566 aa, Artificial Sequence
  derived and/or modified protein sequence (wt) from hemagglutinin__InfluenzaA__AEX36102
MKTIIALSYILCLVFAQKLPGNNNSTATLCLGHHAVPNGTIVKTITNDQIEVTNATELVQSSSTGEICDSPHQILDGENCTLIDALLGDPQCDGFQNKKWDLFVERSKAYSNCYPYDVPDYASLRSLVASSGTLEFNNESFNWTGVTQNGTSSACIRRSNNSFFSRLNWLTHLKFKYPALNVTMPNNEKFDKLYIWGVHHPGTDNDQIFLYAQASGRITVSTKRSQQTVIPNIGSRPRVRNIPSRISIYWTIVKPGDILLINSTGNLIAPRGYFKIRSGKSSIMRSDAPIGKCNSECITPNGSIPNDKPFQNVNRITYGACPRYVKQNTLKLATGMRNVPEKQTRGIFGAIAGFIENGWEGMVDGWYGFRHQNSEGIGQAADLKSTQAAIDQINGKLNRLIGKTNEKFHQIEKEFSEVEGRIQDLEKYVEDTKIDLWSYNAELLVALENQHTIDLTDSEMNKLFEKTKKQLRENAEDMGNGCFKIYHKCDNACIGSIRNGTYDHDVYRDEALNNRFQIKGVELKSGYKDWILWISFAISCFLLCVALLGFIMWACQKGNIRCNICI

SEQ ID NO: 8097 - protein, 566 aa, Artificial Sequence; identical to SEQ ID NO: 1915
  derived and/or modified protein sequence (wt) from hemagglutinin__InfluenzaA__AEX36113

SEQ ID NO: 8098 - protein, 566 aa, Artificial Sequence; identical to SEQ ID NO: 2434
  derived and/or modified protein sequence (wt) from hemagglutinin__InfluenzaA__AEX36124

SEQ ID NO: 8099 - protein, 566 aa, Artificial Sequence
  derived and/or modified protein sequence (wt) from hemagglutinin__InfluenzaA__AEX36146
MKTIIALSYILCLVLAQKLPGDDNSTATLCLGHHAVPNGTIVKTITNDQIEVTNATELVQSSSTGEICDSPHQILDGENCTLIDALLGDPQCDGFQNKKWDLFVERSKAYSNCYPYDVPDYASLRSLVASSGTLEFNNESFNWTGVTQNGTSSACIRRSNNSFFSRLNWLTHLKFKYPALNVTMPNNEQFDKLYIWGVHHPGTDNDQIFLYAQASGRITVSTKRSQQTVIPNIGSRPRVRNIPSRISIYWTIVKPGDILLINSTGNLIAPRGYFKIRSGKSSIMRSDAPIGKCNSECITPNGSIPNDKPFQNVNRITYGACPRYVKQNTLKLATGMRNVPEKQTRGIFGAIAGFIENGWEGMVDGWYGFRHQNSEGRGQAADLKSTQAAIDQINGKLNRLIGKTNEKFHQIEKEFSEVEGRIQDLEKYVEDTKIDLWSYNAELLVALENQHTIDLTDSEMNKLFEKTKKQLRENAEDMGNGCFKIYHKCDNACIGSIRNGTYDHDVYRDEALNNRFQIKGVELKSGYKDWILWISFAISCFLLCVALLGFIMWACQKGNIRCNICI

SEQ ID NO: 8100 - protein, 566 aa, Artificial Sequence
  derived and/or modified protein sequence (wt) from hemagglutinin__InfluenzaA__AEX36168
MKTIIALSYILCLVFAQKLPGIDNSTATLCLGHHAVPNGTIVKTITNDQIEVTNATELVQSSSTGGICDSPHQILDGENCTLIDALLGDPQCDGFQNKKWDLFVERSKAYSNCYPYDVPDYASLRSLVASSGTLEFNNESFNWAGVTQNGTSSACKRGSDNSFFSRLNWLTHLKFKYPALNVTMPNNEEFDKLYIWGVHHPGTDNDQIFLYAQASGRITVSTKRSQQTVIPNIGSRPRVRNIPSRISIYWTIVKPGDILLINSTGNLIAPRGYFKIRSGKSSIMRSDAPIGKCNSECITPNGSIPNDKPFQNVNRITYGACPRYVKQNTLKLATGMRNVPEKQTRGIFGAIAGFIENGWEGMVDGWYGFRHQNSEGIGQAADLKSTQAAIDQINGKLNKLIGKTNEKFHQIEKEFSEVEGRIQDLEKYVEDTKIDLWSYNAELLVALENQHTIDLTDSEMNKLFEKTKKQLRENAEDMGNGCFKIYHKCDNACIGSIRNGTYDHDVYRDEALNNRFKIKGVELKSGYKDWILWISFAISCFLLCVALLGFIMWACQKGNIKCNICI

SEQ ID NO: 8101 - protein, 566 aa, Artificial Sequence; identical to SEQ ID NO: 2434
  derived and/or modified protein sequence (wt) from hemagglutinin__InfluenzaA__AEX36179

SEQ ID NO: 8102 - protein, 566 aa, Artificial Sequence; identical to SEQ ID NO: 7983
  derived and/or modified protein sequence (wt) from hemagglutinin__InfluenzaA__AEX36190

SEQ ID NO: 8103 - protein, 566 aa, Artificial Sequence; identical to SEQ ID NO: 7978
  derived and/or modified protein sequence (wt) from hemagglutinin__InfluenzaA__AEX36201

SEQ ID NO: 8104 - protein, 566 aa, Artificial Sequence
  derived and/or modified protein sequence (wt) from hemagglutinin__InfluenzaA__AEX36212
MKTIIALSYILCLVFAQKLPGIDNSTATLCLGHHAVPNGTIVKTITNDQIEVTNATELVQNSSTGGICDSPHQILDGENCTLIDALLGDPQCDGFQNKKWDLFVERSKAYSNCYPYDVPDYASLRSLVASSGTLEFNNESFNWTGVTQNGTSSACKRGSNNSFFSRLNWLTHSKFKYPALNVTMPNNEEFDKLYIWGVHHPGTDNDQIFLYAQASGRITVSTKISQQTVIPNIGSRPRVRNIPSRISIYWTIVKPGDILLINSTGNLIAPRGYFKIRSGKSSIMRSDAPIGKCNSECITPNGSIPNDKPFQNVNRITYGACPRYVKQNTLKLATGMRNVPEKQTRGIFGAIAGFIENGWEGMVDGWYGFRHQNSEGIGQAADLKSTQAAIDQINGKLNRLIGKTNEKFHQIEKEFSEVEGRIQDLEKYVEDTKIDLWSYNAELLVALENQHTIDLTDSEMNKLFEKTKKQLRENAEDMGNGCFKIYHKCDNACIGSIRNGTYDHDVYRDEALNNRFQIKGVELKSGYKDWILWISFAISCFLLCVALLGFIMWACQKGNIRCNICI

SEQ ID NO: 8105 - protein, 566 aa, Artificial Sequence; identical to SEQ ID NO: 7978
  derived and/or modified protein sequence (wt) from hemagglutinin__InfluenzaA__AEX36223

SEQ ID NO: 8106 - protein, 566 aa, Artificial Sequence
  derived and/or modified protein sequence (wt) from hemagglutinin__InfluenzaA__AEX36234
MKTIIALSYILCLVFAQKLPGNDNSTATLCLGHHAVPNGTIVKTITNDQIEVTNATELVQSSSTGGICDSPHQILDGENCTLIDALLGDPQCDGFQNKKWDLFVERSKAYSNCYPYDVPDYASLRSLVASSGTLEFNNESFNWTGVTQNGTSSACKRGSDNSFFSKLNWLTHLKFKYPALNVTMPNNEKFDKLYIWGVHHPGTDNDQIFLYAQASGRITVSTKRSQQTVIPNIGSRPRVRNIPSRISIYWTIVKPGDILLINSTGNLIAPRGYFKIRSGKSSIMRSDAPIGKCNSECITPNGSIPNDKPFQNVNRITYGACPRYVKQNTLKLATGMRNVPEKQTRGIFGAIAGFIENGWEGMVDGWYGFRHQNSEGIGQAADLKSTQAAINQINGKLNRLIGKTNEKFHQIEKEFSEVEGRIQDLEKYVEDTKIDLWSYNAELLVALENQHTIDLTDSEMNKLFERTKKQLRENAEDMGNGCLKIYHKCDNACIGSIRNGTYDHDVYRDEALNNRFQIKGVELKSGYKDWILWISFAISCFLLCVALLGFIMWACQKGNIRCNICI

SEQ ID NO: 8107 - protein, 566 aa, Artificial Sequence
  derived and/or modified protein sequence (wt) from hemagglutinin__InfluenzaA__AEX36245
MKTIIALSYILCLVFAQKLPGIDNSTATLCLGHHAVPNGTIVKTITNDQIEVTNATELVQNSSTGGICDSPHQILDGENCTLIDALLGDPQCDGFQNKKWDLFVERSKTYSNCYPYDVPDYASLRSLVASSGTLEFNNESFNWTGVTQNGTSSACKRGSNNSFFSRLNWLTHSKFKYPALNVTMPNNEEFDKLYIWGVHHPGTDNDQIFLYAQASGRITVSTKRSQQTVIPNIGSRPRVRNIPSRISIYWTIVKPGDILLINSTGNLIAPRGYFKIRSGKSSIMRSDAPIGKCNSECITPNGSIPNDKPFQNVNRITYGACPRYVKQNTLKLATGMRNVPEKQTRGIFGAIAGFIENGWEGMVDGWYGFRHQNSEGIGQAADLKSTQAAIDQINGKLNRLIGKTNEKFHQIEKEFSEVEGRIQDLEKYVEDTKIDLWSYNAELLVALENQHTIDLTDSEMNKLFEKTKKQLRENAEDMGNGCFKIYHKCDNACIGSIRNGTYDHDVYRDEALNNRFQIKGVELKSGYKDWILWISFAISCFLLCVALLGFIMWACQKGNIRCNICI

SEQ ID NO: 8108 - protein, 566 aa, Artificial Sequence
  derived and/or modified protein sequence (wt) from hemagglutinin__InfluenzaA__AEX36256
MKTIIALSYILCLVFTQKLPGNDNSTATLCLGHHAVPNGTIVKTITNDQIEVTNATELVQSSSTGEICDSPHQILDGENCTLIDALLGDPQCDGFQNKKWDLFVERSKAYSNCYPYDVPDYASLRSLVASSGTLEFNNESFNWTGVTQNGTSSACIRKSNNSFFSRLNWLTHLKFKYPALNVTMPNNEQFDKLYIWGVHHPGTDNDQIFLYAQASGRITVSTKRSQQTVIPNIGSRPRVRNIPSRISIYWTIVKPGDILLINSTGNLIAPRGYFKIRSGKSSIMRSDAPIGKCNSECITPNGSIPNDKPFQNVNRITYGACPRYVKQNTLKLATGMRNVPEKQTRGIFGAIAGFIENGWEGMVDGWYGFRHQNSEGRGQAADLKSTQAAIDQINGKLNRLIGKTNEKFHQIEKEFSEVEGRIQDLEKYVEDTKIDLWSYNAELLVALENQHTIDLTDSEMNKLFEKTKKQLRENAEDMGNGCFKIYHKCDNACIGSIRNGTYDHDVYRDEALNNRFQIKGVELKSGYKDWILWISFAISCFLLCVALLGFIMWACQKGNIRCNICI

SEQ ID NO: 8109 - protein, 566 aa, Artificial Sequence; identical to SEQ ID NO: 7978
  derived and/or modified protein sequence (wt) from hemagglutinin__InfluenzaA__AEX36267

SEQ ID NO: 8110 - protein, 566 aa, Artificial Sequence
  derived and/or modified protein sequence (wt) from hemagglutinin__InfluenzaA__AEX36289
MKTIIALSYILCLVFAQKLPGIDNSTATLCLGHHAVPNGTIVKTITNDQIEVTNATELVQNSSTGGICDSPHQILDGENCTLIDALLGDPQCDGFQNKKWDLFVERSKAYSNCYPYDVPDYASLRSLVASSGTLEFNNESFNWTGVTQNGTSSACKRGSNNSFFSRLNWLTHSKFKYPALNVTMPNNEEFDKLYIWGVHHPGTDNDQIFLYAQASGRITVSTKISQQTVIPNIGSRPRVRNIPSRISIYWTIVKPGDILLINSTGNLIAPRGYFKIRSGKSSIMRSDAPIGKCNSECITPNGSIPNDKPFQNVNRITYGACPRYVKQNTLKLATGMRNVPEKQTRGIFGAIAGFIENGWEGMVDGWYGYRHQNSEGIGQAADLKSTQAAIDQINGKLNRLIGKTNEKFHQIEKEFSEVEGRIQDLEKYVEDTKIDLWSYNAELLVALENQHTIDLTDSEMNKLFEKTKKQLRENAEDMGNGCFKIYHKCDNACIGSIRNGTYDHDVYRDEALNNRFQIKGVELKLGYKDWILWISFAISCFLLCVALLGFIMWACQKGNIRCNICI

SEQ ID NO: 8111 - protein, 566 aa, Artificial Sequence
  derived and/or modified protein sequence (wt) from hemagglutinin__InfluenzaA__AEX36300
MKTIIALSYILCLVFAQKLPGIDNSTATLCLGHHAVPNGTIVKTITNDQIEVTNATELVQNSSTGGICDSPHQILDGENCTLIDALLGDPQCDGFQNKKWDLFVERSKAYSNCYPYDVPDYASLRSLVASSGTLEFSNESFNWTGVTQNGTSSACKRGSNNSFFSKLNWLTHSKFKYPALNVTMPNNEEFDKLYIWGVHHPGTDNDQIFLYAQASGRITVSTKRSQQTVIPNIGSRPRVRNIPSRISIYWTIVKPGDILLINSTGNLIAPRGYFKIRSGKSSIMRSDAPIGKCNSECITPNGSIPNDKPFQNVNRITYGACPRYVKQNTLKLATGMRNVPEKQTRGIFGAIAGFIENGWEGMVDGWYGFRHQNSEGIGQAADLKSTQAAIDQINGKLNRLIGKTNEKFHQIEKEFSEVEGRIQDLEKYVEDTKIDLWSYNAELLVALENQHTIDLTDSEMNKLFEKTKKQLRENAEDMGNGCFKIYHKCDNACIGSIRNGTYDHDVYRDEALNNRFQIKGVELKSGYKDWILWISFAISCFLLCVALLGFIMWACQKGNIRCNICI

SEQ ID NO: 8112 - protein, 566 aa, Artificial Sequence
  derived and/or modified protein sequence (wt) from hemagglutinin__InfluenzaA__AEX36311
MKTIIALSYILCLVFAQKLPGIDNSTATLCLGHHAVPNGTIVKTITNDQIEVTNATELVQSSSTGGICDSPHQILDGENCTLIDALLGDPQCDGFQNKKWDLFVERSKAYSNCYPYDVPDYASLRSLVASSGTLEFNNESFNWAGVTQNGTSSACKRGSNNSFFSRLNWLTHLKFKYPALNVTMPNNEEFDKLYIWGVHHPGTDNDQIFLYAQASGRITVSTKRSQQTVIPNIGSRPRVRNIPSRISIYWTIVKPGDILLINSTGNLIAPRGYFKIRSGKSSIMRSDAPIGKCNSECITPNGSIPNDKPFQNVNRITYGACPRYVKQNTLKLATGMRNVPEKQTRGIFGAIAGFIENGWEGMVDGWYGFRHQNSEGIGQAADLKSTQAAIDQINGKLNRLIGKTNEKFHQIEKEFSEVEGRIQDLEKYVEDTKIDLWSYNAELLVALENQHTIDLTDSEMNKLFEKTKKQLRENAEDMGNGCFKIYHKCDNACIGSIRNGTYDHDVYRDEALNNRFQIKGVELKSGYKDWILWISFAISCFLLCVALLGFIMWACQKGNIRCNICI

SEQ ID NO: 8113 - protein, 566 aa, Artificial Sequence
  derived and/or modified protein sequence (wt) from hemagglutinin__InfluenzaA__AEX36322
MKTIIALSYILCLVFAQKLPGIDNSTATLCLGHHAVPNGTIVKTITNDQIEVTNATELVQNSSTGGICDSPHQILDGENCTLIDALLGDPQCDGFQNKKWDLFVERSKAYSNCYPYDVPDYASLRSLVASSGTLEFNNESFNWTGVTQNGTSSACKRGSNNSFFSRLNWLTHSKFKYPALNVTMPNNEEFDKLYIWGVHHPGTDNDQIFPYAQASGRITVSTKISQQTVIPNIGSRPRVRNIPSRISIYWTIVKPGDILLINSTGNLIAPRGYFKIRSGKSSIMRSDAPIGKCNSECITPNGSIPNDKPFQNVNRITYGACPRYVKQNTLKLATGMRNVPEKQTRGIFGAIAGFIENGWEGMVDGWYGFRHQNSEGIGQAADLKSTQAAIDQINGKLNRLIGKTNEKFHQIEKEFSEVEGRIQDLEKYVEDTKIDLWSYNAELLVALENQHTIDLTDSEMNKLFEKTKKQLRENAEDMGNGCFKIYHKCDNACIGSIRNGTYDHDVYRDEALNNRFQIKGVELKSGYKDWILWISFAISCFLLCIALLGFIMWACQKGNIRCNICI

SEQ ID NO: 8114 - protein, 566 aa, Artificial Sequence
  derived and/or modified protein sequence (wt) from hemagglutinin__InfluenzaA__AEX36333
MKTIIALSYILCLVFAQKLPGIDNSTATLCLGHHAVPNGTIVKTITNDQIEVTNATELVQNSSTGGICDSPHQILDGENCTLIDALLGDPQCDGFQNKKWDLFVERSKAYSNCYPYDVPDYASLRSLVASSGTLEFNNESFNWTGVTQNGTSSACKRGSNNSFFSRLNWLTHSKFKYPALNVTMPNNEEFDKLYIWGVHHPGTDNDQIFLYAQASGRITVSTKRSQQTVIPNIGSRPRVRNIPSRISIYWTIVKPGDILLINSTGNLIAPRGYFKIRSGKSSIMRSDAPIGKCNSECITPNGSIPNDKPFQNVNRITYGACPRYVKQNTLKLATGMRNVPEKQTRGIFGAIAGFIENGWEGMVDGWYGFRHQNSEGIGQAADLKSTQAAIDQINGKLNRLIGKTNEKFHQIEKEFSEVEGRIQDLEKYVEDTKIDLWSYNAELLVALENQHTIDLTDSEMNKLFEKTKKQLRENAEDMGNGCFKIYHKCDNACIGSIRNGTYDHDAYRDEALNNRFQIKGVELKSGYKDWILWISFAISCFLLCVALLGFIMWACQKGNIRCNICI

SEQ ID NO: 8115 - protein, 566 aa, Artificial Sequence
  derived and/or modified protein sequence (wt) from hemagglutinin__InfluenzaA__AEX36344
MKTIIALSYILCLVFAQKLPGIDNSTATLCLGHHAVPNGTIVKTITNDQIEVTNATELVQSSSTGGICDSPHQILDGENCTLIDALLGDPQCDGFQNKKWDLFVERSNAYSNCYPYDVPDYASLRSLVASSGTLEFNNESFNWAGVTQNGTSSACKRGSNNSFFSRLNWLTHLKFKYPALNVTMPNNEEFDKLYIWGVHHPGTDNDQIFLYAQASGRITVSTKRSQQTVIPNIGSRPRVRNIPSRISIYWTIVKPGDILLINSTGNLIAPRGYFKIRSGKSSIMRSDAPIGKCNSECITPNGSIPNDKPFQNVNRITYGACPRYVKQNTLKLATGMRNVPEKQTRGIFGAIAGFIENGWEGMVDGWYGFRHQNSEGIGQAADLKSTQAAIDQINGKLNRLIGKTNEKFHQIEKEFSEVEGRIQDLEKYVEDTKIDLWSYNAELLVALENQHTIDLTDSEMNKLFEKTKKQLRENAEDMGNGCFKIYHKCDNACIESIRNGTYDHDVYRDEALNNRFQIKGVELKSGYKDWILWISFAISCFLLCVALLGFIMWACQKGNIRCNICI

SEQ ID NO: 8116 - protein, 566 aa, Artificial Sequence
  derived and/or modified protein sequence (wt) from hemagglutinin__InfluenzaA__AEX36366
MKTIIALSYILCLVFAQKLSGNDNSTATLCLGHHAVPNGTIVKTITNDQIEVTNATELVQSSSTGEICDSPHQILDGENCTLIDALLGDPQCDGFQNKKWDLFVERSKAYSNCYPYDVPDYASLRSLVASSGTLEFNNESFNWTGVTQNGTSSACIRRSNNSFFSRLNWLTHLKFKYPALNVTMPNNEKFDKLYIWGVHHPGTDNDQIFLYAQASGRITVSTKRSQQTVIPNIGSRPRVRNIPSRISIYWTIVKPGDILLINSTGNLIAPRGYFKIRSGKSSIMRSDAPIGKCNSECITPNGSIPNDKPFQNVNRITYGACPRYVKQNTLKLATGMRNVPEKQTRGIFGAIAGFIENGWEGMVDGWYGFRHQNSEGIGQAADLKSTQAAIDQINGKLNRLIGKTNEKFHQIEKEFSEVEGRIQDLEKYVEDTKIDLWSYNAELLVALENQHTIDLTDSEMNKLFEKTKKQLRENAEDMGNGCFKIYHKCDNACIGSIRNGTYDHDVYRDEALNNRFQIKGVELKSGYKDWILWISFAISCFLLCVALLGFIMWACQKGNIRCNICI

SEQ ID NO: 8117 - protein, 566 aa, Artificial Sequence; identical to SEQ ID NO: 1928
  derived and/or modified protein sequence (wt) from hemagglutinin__InfluenzaA__AEX36377

SEQ ID NO: 8118 - protein, 566 aa, Artificial Sequence
  derived and/or modified protein sequence (wt) from hemagglutinin__InfluenzaA__AEX36388
MKTIIALSYILCLVFAQKLPGNDNSTATLCLGHHAVPNGTIVKTITNDQIEVTNATELVQSSSTGEICDSPHQILDGENCTLIDALLGDPQCDGFQNKKWDLFVERSKAYSNCYPYDVPDYASLRSLVASSGTLEFNNESFNWTGVTQNGTSSACIRRSNNSFFSRLNWLTHLKFKYPALNVTMPNNEKFDKLYIWGVHHPGTDNDQIFLYAQASGRITVSTKRSQQTVIPNIGSRPRVRNIPSRISIYWTIVKPGDILLINSTGNLIAPRGYFKIRSGKSSIMRSDAPIGKCNSECITPNGSIPNDKPFQNVNRITYGACPRYVKQNTLKLATGMRNVPEKQTRGIFGAIAGFIENGWEGMMDGWYGFRHQNSEGIGQAADLKSTQAAIDQINGKLNRLIGKTNEKFHQIEKEFSEVEGRIQDLEKYVEDTKIDLWSYNAELLVALENQHTIDLTDSEMNKLFEKTKKQLRENAEDMGNGCFKIYHKCDNACIGSIRNGTYDHDVYRDEALNNRFQIKGVELKSGYKDWILWISFAISCFLLCVALLGFIMWACQKGNIRCNICI

SEQ ID NO: 8119 - protein, 566 aa, Artificial Sequence
  derived and/or modified protein sequence (wt) from hemagglutinin__InfluenzaA__AEX36399
MKTIIALSYILCLVFAQKLPGNDNSTATLCLGHHAVPNGTIVKTITNDQTEVTNATELVQSSSTGEICDSPHQILDGENCTLIDALLGDPQCDGFQNKKWDLFVERSKAYSNCYPYDVPDYASLRSLVASSGTLEFNNESFNWTGVTQNGTSSACIRRSNNSFFSRLNWLTHLKFKYPALNVTMPNNEKFDKLYIWGVHHPGTDNDQIFLYAQASGRITVSTKRSQQTVIPNIGSRPRVRNIPSRISIYWTIVKPGDILLINSTGNLIAPRGYFKIRSGKSSIMRSDAPIGKCNSECITPNGSIPNDKPFQNVNRITYGACPRYVKQNTLKLATGMRNVPEKQTRGIFGAIAGFIENGWEGMVDGWYGFRHQNSEGIGQAADLKSTQAAIDQINGKLNRLIGKTNEKFHQIEKEFSEVEGRIQDLEKYVEDTKIDLWSYNAELLVALENQHTIDLTDSEMNKLFEKTKKQLRENAEDMGNGCFKIYHKCDNACIGSIRNGTYDHDVYRDEALNNRFQIKGVELKSGYKDWILWISFAISCFLLCVALLGFIMWACQKGNIRCNICI

SEQ ID NO: 8120 - protein, 566 aa, Artificial Sequence
  derived and/or modified protein sequence (wt) from hemagglutinin__InfluenzaA__AEX36410
MKTIIALSYILCLVFAQKLPGNDNSTATLCLGHHAVPNGTIVKTITNDQIEVTNATELVQNSSTGEICDSPHQILDGENCTLIDALLGDPQCDGFQNKKWDLFVERSKAYSNCYPYDVPDYASLRSLVASSGTLEFNNESFNWTGVTQNGTSSACIRRSNNSFFSRLNWLTHLKFKYPALNVTMPNNEKFDKLYIWGVHHPGTDNDQIFLYAQASGRITVSTKRSQQTVIPNIGSRPRVRNIPSRISIYWTIVKPGDILLINSTGNLIAPRGYFKIRSGKSSIMRSDAPIGKCNSECITPNGSIPNDKPFQNVNRITYGACPRYVKQNTLKLATGMRNVPEKQTRGIFGAIAGFIENGWEGMVDGWYGFRHQNSEGIGQAADLKSTQAAIDQINGKLNRLIGKTNEKFHQIEKEFSEVEGRIQDLEKYVEDTKIDLWSYNAELLVALENQHTIDLTDSEMNKLFEKTKKQLRENAEDMGNGCFKIYHKCDNACIGSIRNGTYDHDVYRDEALNNRFQIKGVELKSGYKDWILWISFAISCFLLCVALLGFIMWACQKGNIRCNICI

SEQ ID NO: 8121 - protein, 566 aa, Artificial Sequence; identical to SEQ ID NO: 2434
  derived and/or modified protein sequence (wt) from hemagglutinin__InfluenzaA__AEX36421

SEQ ID NO: 8122 - protein, 566 aa, Artificial Sequence
  derived and/or modified protein sequence (wt) from hemagglutinin__InfluenzaA__AEX36432
MKTIIALSYILCLVFAQKLPGNDNSTATLCLGHHAVPNGTIVKTITNDQIEVTNATELVQSSSTGEICDSPHQVLDGENCTLIDALLGDPQCDGFQNKKWDLFVERSKAYSNCYPYDVPDYASLRSLVASSGTLEFNNESFNWTGVTQNGTSSACIRRSNNSFFSRLNWLTHLKFKYPALNVTMPNNEQFDKLYIWGVHHPGTDNDQIFLYAQASGRITVSTKRSQQTVIPNIGSRPRVRNIPSRISIYWTIVKPGDILLINSTGNLIAPRGYFKIRSGKSSIMRSDAPIGKCNSECITPNGSIPNDKPFQNVNRITYGACPRYVKQNTLKLATGMRNVPEKQTRGIFGAIAGFIENGWEGMVDGWYGFRHQNSEGRGQAADLKSTQAAIDQINGKLNRLIGKTNEKFHQIEKEFSEVEGRIQDLEKYVEDTKIDLWSYNAELLVALENQHTIDLTDSEMNKLFEKTKKQLRENAEDMGNGCFKIYHKCDNACIGSIRNGTYDHDVYRDEALNNRFQIKGVELKSGYKDWILWISFAISCFLLCVALLGFIMWACQKGNIRCNICI

SEQ ID NO: 8123 - protein, 566 aa, Artificial Sequence
  derived and/or modified protein sequence (wt) from hemagglutinin__InfluenzaA__AEX36443
MKTIIALSYILCLVFAQKLPGNDNSTATLCLGHHAVPNGTIVKTITNDQIEVTNATELVQSSSTGEICNSPHQILDGENCTLIDALLGDPQCDGFQNKKWDLFVERSKAYSNCYPYDVPDYASLRSLVASSGTLEFNNESFNWTGVTQNGTSSACIRRSNNSFFSRLNWLTHLKFKYPALNVTMPNNEEFDKLYIWGVHHPGTDNDQIFLYAQASGRITVSTKRSQQTVIPNIGSRPRVRNIPSRISIYWTIVKPGDILLINSTGNLIAPRGYFKIRSGKSSIMRSDAPIGKCNSECITPNGSIPNDKPFQNVNRITYGACPRYVKQNTLKLATGMRNVPEKQTRGIFGAIAGFIENGWEGMVDGWYGFRHQNSEGIGQAADLKSTQAAIDQINGKLNRLIGKTNEKFHQIEKEFSEVEGRIQDLEKYVEDTKIDLWSYNAELLVALENQHTIDLTDSEMNKLFEKTKKQLRENAEDMGNGCFKIYHKCDNACIGSIRNGTYDHDVYRDEALNNRFQIKGVELKSGYKDWILWISFAISCFLLCVALLGFIMWACQKGNIRCNICI

SEQ ID NO: 8124 - protein, 566 aa, Artificial Sequence
  derived and/or modified protein sequence (wt) from hemagglutinin__InfluenzaA__AEX36454
MKTIIALSYILCLVFAQKLPGNDNSTATLCLGHHAVPNGTIVKTITNDQIEVTNATELVQSSSTGEICNSPHQILDGENCTLIDALLGDPQCDGFQNKKWDLFVERSKAYSNCYPYDVPDYASLRSLVASSGTLEFNNESFNWTGVTQNGTSSACIRRSNNSFFSRLNWLTHLKFKYPALNVTMPNNEEFDKLYIWGVHHPGTDNDQIFLYAQASGRITVSTKRSQQTVIPNIGSRPRVRNIPSRISIYWTIVKPGDILLINSTGNLIAPRGYFKIRSGKSSIMRSDAPIGKCNSECITPNGSIPNDKPFQNVNRITYGACPRYVKQNTLKLATGMRNVPEKQTRGIFGAIAGFIENGWEGMVDGWYGFRHQNSEGIGQAADLKSTQAAIDQINGKLNRLIGKTNEKFHQIEKEFSEVEGRIQDLEKYVEDTKIDLWSYNAELLVALENQHTIDLTDSEMNKLFEKTKKQLRENAEDMGNGCFKIYHKCDNACIGSIRNGTYDHDVYRDEALNNRFQIKGVELKSGYKDWILWISFAISCFLLCVVLLGFIMWACQKGNIRCNICI

SEQ ID NO: 8125 - protein, 566 aa, Artificial Sequence; identical to SEQ ID NO: 1729
  derived and/or modified protein sequence (wt) from hemagglutinin__InfluenzaA__AEX36465

SEQ ID NO: 8126 - protein, 566 aa, Artificial Sequence
  derived and/or modified protein sequence (wt) from hemagglutinin__InfluenzaA__AEX36476
MKTIIALSYILCLVFAQKLPGIDNSTATLCLGHHAVPNGTIVKTITNDQIEVTNATELVQSSSTGGICDSPHQILDGENCTLIDALLGDPQCDGFQNKKWDLFVERSKAYSNCYPYDVPDYASLRSLVASSGTLEFNNESFNWTGVTQNGTSSACKRGSNNSFFSRLNWLTHSKFKYPALNVTMPNNEEFDKLYIWGVHHPGTDNDQIFPYAQASGRITVSTKRSQQTVIPNIGSRPRIRNIPSRISIYWTIVKPGDILLINSTGNLIAPRGYFKIRSGKSSIMRSDAPIGKCDSECITPNGSIPNDKPFQNVNRITYGACPRYVKQNTLKLATGMRNVPEKQTRGIFGAIAGFIENGWEGMVDGWYGFRHQNSEGIGQAADLKSTQAAIDQINGKLNRLIGKTNEKFHQIEKEFSEVEGRIQDLEKYVEDTKIDLWSYNAELLVALENQHTIDLTDSEMNKLFEKTKKQLRENAEDMGNGCFKIYHKCDNACIGSIRNGTYDHDVYRDEALNNRFQIKGVELKSGYKDWILWISFAISCFLLCVALLGFIMWACQKGNIRCNICI

SEQ ID NO: 8127 - protein, 566 aa, Artificial Sequence
  derived and/or modified protein sequence (wt) from hemagglutinin__InfluenzaA__AEX36487
MKTIIALSYILCLVFAQKLPGIDNSTATLCLGHHAVPNGTIVKTITNDQIEVTNATELVQSSSTGGICDSPHQILDGENCTLIDALLGDPQCDGFQNKKWDLFVERSKAYSNCYPYDVPDYASLRSLVASSGTLEFNNESFNWTGVTQNGTSSACKRGSNNSFFSRLNWLTHSKFKYPALNVTMPNNEEFDKLYIWGVLHPGTDNDQIFLYAQASGRITVSTKRSQQTVIPNIGSRPRVRNIPSRISIYWTIVKPGDILLINSTGNLIAPRGYFKIRSGKSSIMRSDAPIGKCNSECITPNGSIPNDKPFQNVNRITYGACPRYVKQNTLKLATGMRNVPEKQTRGIFGAIAGFIENGWEGMVDGWYGFRHQNSEGIGQAADLKSTQAAIDQINGKLNRLIGKTNEKFHQIEKEFSEVEGRIQDLEKYVEDTKIDLWSYNAELLVALENQHTIDLTDSEMNKLFEKTKKQLRENAEDMGNGCFKIYHKCDNACIGSIRNGTYDHDVYRDEALNNRFQIKGVELKSGYKDWILWISFAISCFLLCVALLGFIMWACQKGNIRCNICI

SEQ ID NO: 8128 - protein, 566 aa, Artificial Sequence; identical to SEQ ID NO: 7978
  derived and/or modified protein sequence (wt) from hemagglutinin__InfluenzaA__AEX36498

SEQ ID NO: 8129 - protein, 566 aa, Artificial Sequence
  derived and/or modified protein sequence (wt) from hemagglutinin__InfluenzaA__AEX36509
MKTIIALSYILCLVFAQKLPGIDNSTATLCLGHHAVPNGTIVKTITNDQIEVTNATELVQNSSTGGICDSPHQILDGENCTLIDALLGDPQCDGFQNKKWDLFVERSKAYSNCYPYDVPDYASLRSLVASSGTLEFNNESFNWTGVTQNGTSSACKRGSNNSFFSRLNWLTHSKFKYPALNVTMPNNEEFDKLYIWGVHHPGTDNDQIFPYAQASGRITVSTKRSQQTVIPNIGSRPRVRNIPSRISIYWTIVKPGDILLINSTGNLIAPRGYFKIRSGKSSIMRSDAPIGKCNSECITPNGSIPNDKPFQNVNRITYGACPRYVKQNTLKLATGMRNVPEKQTRGIFGAIAGFIENGWEGMVDGWYGFRHQNSEGIGQAADLKSTQAAIDQINGKLNRLIGKTNEKFHQIEKEFSEVEGRIQDLEKYVEDTKIDLWSYNAELLVALENQHTIDLTDSEMNKLFEKTKKQLRENAEDMGNGCFKIYHKCDNACIGSIRNGTYDHDVYRDEALNNRFQIKGVELKSGYKDWILWISFAISCFLLCVALLGFIMWACQKGNIRCNICI

SEQ ID NO: 8130 - protein, 566 aa, Artificial Sequence
  derived and/or modified protein sequence (wt) from hemagglutinin__InfluenzaA__AEX36520
MKTIIALSYILCLVFAQKLPGNDNSTATLCLGHHAVPNGTIVKTITNDQIEVTNATELVQSSSTGEICDSPHQILDGENCTLIDALLGDPQCDGFQNKKWDLFVERSKAYSNCYPYDVPDYASLRSLVASSGTLEFNNESFNWTGVTQNGTSSACIRRSNNSFFSRLNWLTHLKFKYPALNVTMPNNEQFDKLYIWGVHHPGTDNDQIFLYAQASGRITVSTKRSQQTVIPNIGSRPRVRNIPSRISIYWTIVKPGDILLINSTGNLIAPRGYFKIRSGKSSIMRSDAPIGKCNSECITPNGSIPNDKPFQNVNRITYGACPRYVKQNTLKLATGMRNVPEKQTRGIFGAIAGFIENGWEGMVDGWYGFRHQNSEGRGQAADLKSTQAAIDQINGKLNRLIGKTNEKFHQIEKEFSEVEGRIQDLEKYVEDTKIDLWSYNAELLVALENQHTIDLTDSEMNKLFEKTKKQLRENAEDMGNGCFKIYHKCDNACIGSIRNGTYDHNVYRDEALNNRFQIKGVELKSGYKDWILWISFAISCFLLCVALLGFIMWACQKGNIRCNICI

SEQ ID NO: 8131 - protein, 566 aa, Artificial Sequence
  derived and/or modified protein sequence (wt) from hemagglutinin__InfluenzaA__AEX36531
MKTIIALSYILCLVFAQKLPGNDNSTATLCLGHHAVPNGTIVKTITNDQIEVTNATELVQSSSTGEICDSPHQILDGENCTLIDALLGDPQCDGFQNKKWDLFVERSKAYSNCYPYDVPDYASLRSLVASSGTLEFNNESFNWTGVTQNGTSSACIRRSNNSFFSRLNWLTHLKFKYPALNVTMPNNEQFDKLYIWGVHHPGTDNDQIFLYAQASGRITVSTKRSQQTVIPNIGSRPRVRNIPSRISIYWTIVKPGDILLINSTGNLIAPRGYFKIRSGKSSIMRSDAPIGKCNSECITPNGSIPNDKPFQNVNRITYGACPRYVKQNTLKLATGMRNVPEKQTRGIFGAIAGFIENGWEGMVDGWYGFRHQNSEGRGQAADLKSTQAAIDQINGKLNRLIGKTNEKFHQIEKEFSEVEGRIQDLDKYVEDTKIDLWSYNAELLVALENQHTIDLTDSEMNKLFEKTKKQLRENAEDMGNGCFKIYHKCDNACIGSIRNGTYDHDVYRDEALNNRFQIKGVELKSGYKDWILWISFAISCFLLCVALLGFIMWACQKGNIRCNICI

SEQ ID NO: 8132 - protein, 566 aa, Artificial Sequence
  derived and/or modified protein sequence (wt) from hemagglutinin__InfluenzaA__AEX36542
MKTIIALSYILCLVFAQKLPGNDNSTATLCLGHHAVPNGTIVKTITNDQIEVTNATELVQNSSTGEICDSPHQILDGENCTLIDALLGDPQCDGFQNKKWDLFVERSKAYSNCYPYDVPDYASLRSLVASSGTLEFNNESFNWTGVTQNGTSSACIRRSNNSFFSRLNWLTHLKFKYPALNVTMPNNEQFDKLYIWGVHHPGTDNDQIFLYAQASGRITVSTKRSQQTVIPNIGSRPRVRNIPSRISIYWTIVKPGDILLINSTGNLIAPRGYFKIRSGKSSIMRSDAPIGKCNSECITPNGSIPNDKPFQNVNRITYGACPRYVKQNTLKLATGMRNVPEKQTRGIFGAIAGFIENGWEGMVDGWYGFRHQNSEGRGQAADLKSTQAAIDQINGKLNRLIGKTNEKFHQIEKEFSEVEGRIQDLEKYVEDTKIDLWSYNAELLVALENQHTIDLTDSEMNKLFEKTKKQLRENAEDMGNGCFKIYHKCDNACIGSIRNGTYDHDVYRDEALNNRFQIKGVELKSGYKDWILWISFAISCFLLCVALLGFIMWACQKGNIRCNICI

SEQ ID NO: 8133 - protein, 566 aa, Artificial Sequence; identical to SEQ ID NO: 8132
  derived and/or modified protein sequence (wt) from hemagglutinin__InfluenzaA__AEX36553

SEQ ID NO: 8134 - protein, 566 aa, Artificial Sequence; identical to SEQ ID NO: 8132
  derived and/or modified protein sequence (wt) from hemagglutinin__InfluenzaA__AEX36564

SEQ ID NO: 8135 - protein, 566 aa, Artificial Sequence
  derived and/or modified protein sequence (wt) from hemagglutinin__InfluenzaA__AEX36575
MKTIIALSYILCLVFAQKLPGNGNSTATLCLGHHAVPNGTIVKTITNDQIEVTNATELVQSSSTGEICDSPHQILDGENCTLIDALLGDPQCDGFQNKKWDLFVERSKAYSNCYPYDVPDYASLRSLVASSGTLEFNNESFNWTGVTQNGTSSACIRRSNNSFFSRLNWLTHLKFKYPALNVTMPNNEQFDKLYIWGVHHPGTDNDQIFLYAQASGRITVSTKRSQQTVIPNIGSRPRVRNIPSRISIYWTIVKPGDILLINSTGNLIAPRGYFKIRSGKSSIMRSDAPIGKCNSECITPNGSIPNDKPFQNVNRITYGACPRYVKQNTLKLATGMRNVPEKQTRGIFGAIAGFIENGWEGMVDGWYGFRHQNSEGRGQAADLKSTQAAIDQINGKLNRLIGKTNEKFHQIEKEFSEVEGRIQDLEKYVEDTKIDIWSYNAELLVALENQHTIDLTDSEMNKLFEKTKKQLRENAEDMGNGCFKIYHKCDNACIGSIRNGTYDHDVYRDEALNNRFQIKGVELKSGYKDWILWISFAISCFLLCVALLGFIMWACQKGNIRCNICI

SEQ ID NO: 8136 - protein, 566 aa, Artificial Sequence
  derived and/or modified protein sequence (wt) from hemagglutinin__InfluenzaA__AEX36586
MKTIIALSYILCLVFAQKLPGNDNNTATLCLGHHAVPNGTIVKTITNDQIEVTNATELVQSSSTGEICDSPHQILDGENCTLIDALLGDPQCDGFQNKKWDLFVERSKAYSNCYPYDVPDYASLRSLVASSGTLEFNNESFNWTGVTQNGTSSACIRRSNNSFFSRLNWLTHLKFKYPALNVTMPNNEQFDKLYIWGVHHPGTDNDQIFLYAQASGRITVSTKRSQQTVIPNIGSRPRVRNIPSRISIYWTIVKPGDILLINSTGNLIAPRGYFKIRSGKSSIMRSDAPIGKCNSECITPNGSIPNDKPFQNVNRITYGACPRYVKQNTLKLATGMRNVPEKQTRGIFGAIAGFIENGWEGMVDGWYGFRHQNSEGRGQAADLKSTQAAIDQINGKLNRLIGKTNEKFHQIEKEFSEVEGRIQDLEKYVEDTKIDLWSYNAELLVALENQHTIDLTDSEMNKLFEKTKKQLRENAEDMGNGCFKIYHKCDNACIGSIRNGTYDHDVYRDEALNNRFQIKGVELKSGYKDWILWISFAISCFLLCVALLGFIMWACQKGNIRCNICI

SEQ ID NO: 8137 - protein, 566 aa, Artificial Sequence
  derived and/or modified protein sequence (wt) from hemagglutinin__InfluenzaA__AEX36597
MKTIIALSYILCLVFAQKLPGNDNSMATLCLGHHAVPNGTIVKTITNDQIEVTNATELVQSSSTGEICDSPHQILDGENCTLIDALLGDPQCDGFQNKKWDLFVERSKAYSNCYPYDVPDYASLRSLVASSGTLEFNNESFNWTGVTQNGTSSACIRRSNNSFFSRLNWLTHLKFKYPALNVTMPNNEQFDKLYIWGVHHPGTDNDQIFLYAQASGRITVSTKRSQQTVIPNIGSRPRVRNIPSRISIYWTIVKPGDILLINSTGNLIAPRGYFKIRSGKSSIMRSDAPIGKCNSECITPNGSIPNDKPFQNVNRITYGACPRYVKQNTLKLATGMRNVPEKQTRGIFGAIAGFIENGWEGMVDGWYGFRHQNSEGRGQAADLKSTQAAIDQINGKLNRLIGKTNEKFHQIEKEFSEVEGRIQDLEKYVEDTKVDLWSYNAELLVALENQHTIDLTDSEMNKLFEKTKKQLRENAEDMGNGCFKIYHKCDNACIGSIRNGTYDHDVYRDEALNNRFQIKGVELKSGYKDWILWISFAISCFLLCVALLGFIMWACQKGNIRCNICI

SEQ ID NO: 8138 - protein, 566 aa, Artificial Sequence
  derived and/or modified protein sequence (wt) from hemagglutinin__InfluenzaA__AEX36608
MKTIIALSYILCLVFAQKLPGNDNSTATLCLGHHAVPNGTIVKTITNDQIEVTNATELVQSSSTGGICDSPHQILDGENCTLIDALLGDPQCDGFQNKKWDLFVERSKAYSNCYPYDVPDYASLRSLVASSGTLEFNNENFNWTGVTQNGTSSACKRRSNNSFFSRLNWLTHLKFKYPALNVTMPNNEKFDKLYIWGVHHPGTDNDQIFLYAQASGRITVSTKRSQQTVIPNIGSRPRVRNIPSRISIYWTIVKPGDILLINSTGNLIAPRGYFKIRSGKSSIMRSDAPIGKCNSECITPNGSIPNDKPFQNVNRITYGACPRYVKQNTLKLATGMRNVPEKQTRGIFGAIAGFIENGWEGMVDGWYGFRHQNSEGIGQAADLKSTQAAINQINGKLNRLIGKTNEKFHQIEKEFSEVEGRIQDLEKYVEDTKIDLWSYNAELLVALENQHTIDLTDSEMNKLFERTKKQLRENAEDMGNGCFKIYHKCDNACIGSIRNGTYDHDVYRDEALNKRFQIKGVELKSGYKDWILWISFAISCFLLCVALLGFIMWACQKGNIRCNICI

SEQ ID NO: 8139 - protein, 566 aa, Artificial Sequence; identical to SEQ ID NO: 7961
  derived and/or modified protein sequence (wt) from hemagglutinin__InfluenzaA__AEX36619

SEQ ID NO: 8140 - protein, 566 aa, Artificial Sequence
  derived and/or modified protein sequence (wt) from hemagglutinin__InfluenzaA__AEX63617
MEAKLFVLFCAFTALKADTICVGYHANNSTDTVDTILEKNVTVTHSVNLLENSHNGKLCSLNGKIPLQLGNCNVAGWILGNPKCDLLLTANSWSYIIETSNSKNGACYPGEFADYEELKEQLSTVSSFERFEIFPKATSWPNHDTTRGTTVACSHSGANSFYRNLLWIVKKGNSYPKLSKSYTNNKGKEVLVIWGVHHPPTDSVQQTLYQNNHTYVSVGSSKYYKRFTPEIVARPKVREQAGRMNYYWTLLDQGDTITFEATGNLIAPWHAFALKKGSSSGIMRSDAQVHNCTTKCQTPHGALKGNLPFQNVHPVTIGECPKYVKSTQLRMATGLRNIPSIQSRGLFGAIAGFIEGGWTGMVDGWYGYHHRNEQGSGYAADQKSTQIAIDGISNKVNSVIEKMNIQFTSVGKEFNSLEKRMENLNKKVDDGFLDVWTYNAELLILLENERTLDFHDLNVKNLYEKVKSQLRNNAKEIGNGCFEFYHKCDNECMESVKNGTYNYLKYSEESKLNREEIDGVKLESMGIHQILAIYSTVASSLVLLVSLGAISFWMCSNGSLQCRVCI

SEQ ID NO: 8141 - protein, 565 aa, Artificial Sequence; identical to SEQ ID NO: 3278
  derived and/or modified protein sequence (wt) from hemagglutinin__InfluenzaA__AEX92873

SEQ ID NO: 8142 - protein, 566 aa, Artificial Sequence; identical to SEQ ID NO: 3833
  derived and/or modified protein sequence (wt) from hemagglutinin__InfluenzaA__AEY69088

SEQ ID NO: 8143 - protein, 566 aa, Artificial Sequence; identical to SEQ ID NO: 3430
  derived and/or modified protein sequence (wt) from hemagglutinin__InfluenzaA__AEY69098

SEQ ID NO: 8144 - protein, 566 aa, Artificial Sequence; identical to SEQ ID NO: 3411
  derived and/or modified protein sequence (wt) from hemagglutinin__InfluenzaA__AEY69120

SEQ ID NO: 8145 - protein, 566 aa, Artificial Sequence; identical to SEQ ID NO: 3613
  derived and/or modified protein sequence (wt) from hemagglutinin__InfluenzaA__AEY69131

SEQ ID NO: 8146 - protein, 566 aa, Artificial Sequence; identical to SEQ ID NO: 6988
  derived and/or modified protein sequence (wt) from hemagglutinin__InfluenzaA__AEY69153

SEQ ID NO: 8147 - protein, 566 aa, Artificial Sequence; identical to SEQ ID NO: 3613
  derived and/or modified protein sequence (wt) from hemagglutinin__InfluenzaA__AEY69164

SEQ ID NO: 8148 - protein, 566 aa, Artificial Sequence; identical to SEQ ID NO: 3613
  derived and/or modified protein sequence (wt) from hemagglutinin__InfluenzaA__AEY69175

SEQ ID NO: 8149 - protein, 566 aa, Artificial Sequence; identical to SEQ ID NO: 3613
  derived and/or modified protein sequence (wt) from hemagglutinin__InfluenzaA__AEY69186

SEQ ID NO: 8150 - protein, 566 aa, Artificial Sequence; identical to SEQ ID NO: 3613
  derived and/or modified protein sequence (wt) from hemagglutinin__InfluenzaA__AEY69197

SEQ ID NO: 8151 - protein, 566 aa, Artificial Sequence; identical to SEQ ID NO: 3613
  derived and/or modified protein sequence (wt) from hemagglutinin__InfluenzaA__AEY69208

SEQ ID NO: 8152 - protein, 566 aa, Artificial Sequence; identical to SEQ ID NO: 3613
  derived and/or modified protein sequence (wt) from hemagglutinin__InfluenzaA__AEY69219

SEQ ID NO: 8153 - protein, 566 aa, Artificial Sequence; identical to SEQ ID NO: 3411
  derived and/or modified protein sequence (wt) from hemagglutinin__InfluenzaA__AEY69258

SEQ ID NO: 8154 - protein, 566 aa, Artificial Sequence; identical to SEQ ID NO: 3613
  derived and/or modified protein sequence (wt) from hemagglutinin__InfluenzaA__AEY69269

SEQ ID NO: 8155 - protein, 566 aa, Artificial Sequence; identical to SEQ ID NO: 3411
  derived and/or modified protein sequence (wt) from hemagglutinin__InfluenzaA__AEY69291

SEQ ID NO: 8156 - protein, 566 aa, Artificial Sequence; identical to SEQ ID NO: 3411
  derived and/or modified protein sequence (wt) from hemagglutinin__InfluenzaA__AEY69302

SEQ ID NO: 8157 - protein, 566 aa, Artificial Sequence; identical to SEQ ID NO: 3411
  derived and/or modified protein sequence (wt) from hemagglutinin__InfluenzaA__AEY69313

SEQ ID NO: 8158 - protein, 566 aa, Artificial Sequence; identical to SEQ ID NO: 3411
  derived and/or modified protein sequence (wt) from hemagglutinin__InfluenzaA__AEY69785

SEQ ID NO: 8159 - protein, 566 aa, Artificial Sequence
  derived and/or modified protein sequence (wt) from hemagglutinin__InfluenzaA__AEY69807
MKTIIALSYILCLVFAQKLPGNDNSTATLCLGHHAVPNGTIVKTITNDQIEVTNATELVQSSSTGEICDSPHQILDGKNCTLIDALLGDPQCDGLQNKKWDLFVERSKAYSNCYPYDVPDYASLRSLVASSGTLEFNNESFNWTGVTQNGTSSACIRRSKNSFFSRLNWLTHLNFKYPALNVTMPNNEQFDKLYIWGVHHPGTDKDQIFLYAQASGRITVSTKRSQQTAIPNIGSRPRVRNIPSRISIYWTIVKPGDILLINSTGNLIAPRGYFKLRSGKSSIMRSDAPIGKCNSECITPNGSIPNDKPFQNVNRITYGACPRYVKQNTLKLATGMRNVPEKQTRGIFGAIAGFIENGWEGMVDGWYGFRHQNSEGRGQAADLKSTQAAIDQINGKLNRLIGKTNEKFHQIEKEFSEVEGRIQDLEKYVEDTKIDLWSYNAELLVALENQHTIDLTDSEMNKLFEKTKKQLRENAEDMGNGCFKIYHKCDNACIGSIRNGTYDHDVYRDEALNNRFQIKGVELKSGYKDWILWISFAISCFLLCVALLGFIMWACQKGNIRCNICI

SEQ ID NO: 8160 - protein, 566 aa, Artificial Sequence; identical to SEQ ID NO: 3613
  derived and/or modified protein sequence (wt) from hemagglutinin__InfluenzaA__AEY69818

SEQ ID NO: 8161 - protein, 566 aa, Artificial Sequence; identical to SEQ ID NO: 3613
  derived and/or modified protein sequence (wt) from hemagglutinin__InfluenzaA__AEY69829

SEQ ID NO: 8162 - protein, 566 aa, Artificial Sequence; identical to SEQ ID NO: 3613
  derived and/or modified protein sequence (wt) from hemagglutinin__InfluenzaA__AEY69840

SEQ ID NO: 8163 - protein, 566 aa, Artificial Sequence; identical to SEQ ID NO: 3613
  derived and/or modified protein sequence (wt) from hemagglutinin__InfluenzaA__AEY69851

SEQ ID NO: 8164 - protein, 566 aa, Artificial Sequence; identical to SEQ ID NO: 3613
  derived and/or modified protein sequence (wt) from hemagglutinin__InfluenzaA__AEY69873

SEQ ID NO: 8165 - protein, 566 aa, Artificial Sequence; identical to SEQ ID NO: 3613
  derived and/or modified protein sequence (wt) from hemagglutinin__InfluenzaA__AEY69884

SEQ ID NO: 8166 - protein, 566 aa, Artificial Sequence; identical to SEQ ID NO: 3613
  derived and/or modified protein sequence (wt) from hemagglutinin__InfluenzaA__AEY69895

SEQ ID NO: 8167 - protein, 566 aa, Artificial Sequence; identical to SEQ ID NO: 6988
  derived and/or modified protein sequence (wt) from hemagglutinin__InfluenzaA__AEY69906

SEQ ID NO: 8168 - protein, 566 aa, Artificial Sequence; identical to SEQ ID NO: 3613
  derived and/or modified protein sequence (wt) from hemagglutinin__InfluenzaA__AEY69917

SEQ ID NO: 8169 - protein, 566 aa, Artificial Sequence
  derived and/or modified protein sequence (wt) from hemagglutinin__InfluenzaA__AEY69939
MKTIIALSYILCLVFAQKIPGNDNSTATLCLGHHAVPNGTIVKTITNDQIEVTNATELVQSSSTGEICDSPHQILDGKNCTLIDALLGDPQCDGFQNKKWDLFVERSKAYSNCYPYDVPDYASLRSLVASSGTLEFNNESFNWTGVTQNGTSSACIRRSKNSFFSRLNWLTHLNFKYPALNVTMPNNEQFDKLYIWGVHHPGTDKDQIFLYAQASGRITVSTKRSQQTAIPNIGSRPRVRNIPSRISIYWTIVKPGDILLINSTGNLIAPRGYFKIRSGKSSIMRSDAPIGKCNSGCITPNGSIPNDKPFQNVNRITYGVCPRYVKQNTLKLATGMRNVPEKQTRGIFGAIAGFIENGWEGMVDGWYGFRHQNSEGRGQAADLKSTQAAIDQINGKLNRLIGKTNEKFHQIEKEFSEVEGRIQDLEKYVEDTKIDLWSYNAELLVALENQHTIDLTDSEMNKLFEKTKKQLRENAEDMGNGCFKIYHKCDNACIGSIRNGTYDHDVYRDEALNNRFQIKGVELKSGYKDWFLWISFAISCFLLCVALLGFIMWACQKGNIRCNICI

SEQ ID NO: 8170 - protein, 566 aa, Artificial Sequence; identical to SEQ ID NO: 8169
  derived and/or modified protein sequence (wt) from hemagglutinin__InfluenzaA__AEY69950

SEQ ID NO: 8171 - protein, 566 aa, Artificial Sequence; identical to SEQ ID NO: 8169
  derived and/or modified protein sequence (wt) from hemagglutinin__InfluenzaA__AEY69961

SEQ ID NO: 8172 - protein, 566 aa, Artificial Sequence
  derived and/or modified protein sequence (wt) from hemagglutinin__InfluenzaA__AEY69994
MKTIIALSYILCLVFAQKIPGNDNSTATLCLGHHAVPNGTIVKTITNDQIEVTNATELVQSSSTGEICDSPHQILDGKNCTLIDALLGDPQCDGFQNKKWDLFVERSKAYSNCYPYDVPDYASLRSLVASSGTLEFNNESFNWTGVTQNGTSSACIRRSKNSFFSRLNWLTHLNFKYPALNVTMPNNEQFDKLYIWGVHHPGTDKDQIFLYAQASGRITVSTKRSQQTAIPNIGSRPRVRNIPSRISIYWTIVKPGDILLINSTGNLIAPRGYFKIRSGKSSIMRSDAPIGKCNSGCITPNGSIPNDKPFQNVNRITYGACPRYVKQNTLKLATGMRNVPEKQTRGIFGAIAGFIENGWEGMVDGWYGFRHQNSEGRGQAADLKSTQAAIDQINGKLNRLIGKTNEKFHQIEKEFSEVEGRIQDLEKYVEDTKIDLWSYNAELLVALENQHTIDLTDSEMNKLFEKTKKQLRENAEDMGNGCFKIYHKCDNACIGSIRNGTYDHDVYRDEALNNRFQIKGVELKSGYKDWFLWISFAISCFLLCVALLGFIMWACQKGNIRCNICI

SEQ ID NO: 8173 - protein, 566 aa, Artificial Sequence; identical to SEQ ID NO: 8172
  derived and/or modified protein sequence (wt) from hemagglutinin__InfluenzaA__AEY70005

SEQ ID NO: 8174 - protein, 566 aa, Artificial Sequence; identical to SEQ ID NO: 3613
  derived and/or modified protein sequence (wt) from hemagglutinin__InfluenzaA__AEY70016

SEQ ID NO: 8175 - protein, 566 aa, Artificial Sequence
  derived and/or modified protein sequence (wt) from hemagglutinin__InfluenzaA__AEY70256
MKTIIALSYILCLVFAQKLPGNDNSTATLCLGHHAVPNGTIVKTITNDQIEVTNATELVQSSSTGEICDSPHQILDGKNCTLIDALLGDPQCDGFQNKKWDLFVERSKAYGNCYPYDVPDYASLRSLVASSGTLEFNNESFNWTGVTQNGTSSACIRRSKNSFFSRLNWLTHLNFKYPALNVTMPNNEQFDKLYIWGVHHPGTDKDQIFLYAQASGRITVSTKRSQQTAIPNIGSRPRVRNIPSRISIYWTIVKPGDMLLINSTGNLIAPRGYFKIRSGKSSIMRSDAPIGKCNSECITPNGSIPNDKPFQNVNRITYGACPRYVKQNTLKLATGMRNVPEKQTRGIFGAIAGFIENGWEGMVDGWYGFRHQNSEGRGQAADLKSTQAAIDQINGKLNRLIGKTNEKFHQIEKEFSEVEGRIQDLEKYVEDTKIDLWSYNAELLVALENQHTIDLTDSEMNKLFEKTKKQLRENAEDMGNGCFKIYHKCDNACIGSIRNGTYDHDVYRDEALNNRFQIKGVELKSGYKDWILWISFAISCFLLCVALLGFIMWACQKGNIRCNICI

SEQ ID NO: 8176 - protein, 566 aa, Artificial Sequence; identical to SEQ ID NO: 3613
  derived and/or modified protein sequence (wt) from hemagglutinin__InfluenzaA__AEY70267

SEQ ID NO: 8177 - protein, 566 aa, Artificial Sequence; identical to SEQ ID NO: 3613
  derived and/or modified protein sequence (wt) from hemagglutinin__InfluenzaA__AEY70278

SEQ ID NO: 8178 - protein, 566 aa, Artificial Sequence; identical to SEQ ID NO: 3411
  derived and/or modified protein sequence (wt) from hemagglutinin__InfluenzaA__AEY70289

SEQ ID NO: 8179 - protein, 566 aa, Artificial Sequence; identical to SEQ ID NO: 3613
  derived and/or modified protein sequence (wt) from hemagglutinin__InfluenzaA__AEY70300

SEQ ID NO: 8180 - protein, 566 aa, Artificial Sequence; identical to SEQ ID NO: 3613
  derived and/or modified protein sequence (wt) from hemagglutinin__InfluenzaA__AEY70311

SEQ ID NO: 8181 - protein, 566 aa, Artificial Sequence; identical to SEQ ID NO: 3613
  derived and/or modified protein sequence (wt) from hemagglutinin__InfluenzaA__AEY70333

SEQ ID NO: 8182 - protein, 566 aa, Artificial Sequence; identical to SEQ ID NO: 8172
  derived and/or modified protein sequence (wt) from hemagglutinin__InfluenzaA__AEY70344

SEQ ID NO: 8183 - protein, 566 aa, Artificial Sequence; identical to SEQ ID NO: 5224
  derived and/or modified protein sequence (wt) from hemagglutinin__InfluenzaA__AEY70355

SEQ ID NO: 8184 - protein, 566 aa, Artificial Sequence; identical to SEQ ID NO: 3411
  derived and/or modified protein sequence (wt) from hemagglutinin__InfluenzaA__AEY70365

SEQ ID NO: 8185 - protein, 566 aa, Artificial Sequence; identical to SEQ ID NO: 3613
  derived and/or modified protein sequence (wt) from hemagglutinin__InfluenzaA__AEY70376

SEQ ID NO: 8186 - protein, 566 aa, Artificial Sequence
  derived and/or modified protein sequence (wt) from hemagglutinin__InfluenzaA__AFB18656
MKAILVVLLYTFATANADTLCIGYHANNSTDTVDTVLEKNVTVTHSVNLLEDKHNGKLCKLRGVAPLHLGKCNIAGWILGNPECETLSTASSWSYIVETSSSDNGTCYPGDFIDYEELREQLSSVSSFERFEIFPKTSSWPNHDSNKGVTAACPHAGAKGFYKNLIWLVKKGNSYPKLSKSYINDKGKEVLVLWGIHHPSTTADQQSLYQNADTYVFVGTSRYSKKFKPEIAIRPKVRDQEGRMNYYWTLVEPGDKITFEATGNLVVPRYAFAMERDAGSGIIISDTPVHDCNTTCQTPKGAINTSLPFQNIHPITIGKCPKYVKSTKLRLATGLRNVPSIQSRGLFGAIAGFIEGGWTGMVDGWYGYHHQNEQGSGYAADLKSTQNAIDKITNKVNSVIEKMNTQFTAVGKEFNHLEKRIENLNKKVDDGFLDIWTYNAELLVLLENERTLDYHDSNVKNLYEKVRNQLKNNAKEIGNGCFEFYHKCDNTCMESVKNGTYDYPKYSEEAKLNREEIDGVKLESTRIYQILAIYSTAASSLVLVVSLGAISFWMCSNGSLQCRICI

SEQ ID NO: 8187 - protein, 566 aa, Artificial Sequence; identical to SEQ ID NO: 7050
  derived and/or modified protein sequence (wt) from hemagglutinin__InfluenzaA__AFB40597

SEQ ID NO: 8188 - protein, 566 aa, Artificial Sequence; identical to SEQ ID NO: 7050
  derived and/or modified protein sequence (wt) from hemagglutinin__InfluenzaA__AFB40598

SEQ ID NO: 8189 - protein, 566 aa, Artificial Sequence
  derived and/or modified protein sequence (wt) from hemagglutinin__InfluenzaA__AFB40599
MKAILVVLLYTFATANADTLCIGYHANNSTDTVDTVLEKNVTVTHSVNLLEDKHNGKLCKLRGVAPLHLGKCNIAGWILGNPECESLSTASSWSYIVETSSSDNGTCYPGDFIDYEELREQLSSVSSFERFEIFPKTSSWPNHDLNKGVTAACPHAGAKSFYKNLIWLVKKGNSYPKLSKSYINDKGKEVLVLWGIHHPSTSADQQSLYQNADAYVFVGTSRYSKKFKPEIAIRPKVRDQEGRMNYYWTLVEPGDKITFEATGNLVVPRYAFAMERNAGSGIIISDTPVHDCNTTCQTPKGAINTSLPFQNIHPITIGKCPKYVKSTKLRLATGLRNVPSIQSRGLFGAIAGFIEGGWTGMVDGWYGYHHQNEQGSGYAADLKSTQNAIDKITNKVNSVIEKMNTQFTAVGKEFNHLEKRIENLNKKVDDGFLDIWTYNAELLVLLENERTLDYHDSNVKNLYEKVRSQLKNNAKEIGNGCFEFYHKCDNTCMESVKNGTYDYPKYSEEAKLNREEIDGVKLESTRIYQILAIYSTVASSLVLVVSLGAISFWMCSNGSLQCRICI

SEQ ID NO: 8190 - protein, 566 aa, Artificial Sequence; identical to SEQ ID NO: 3833
  derived and/or modified protein sequence (wt) from hemagglutinin__InfluenzaA__AFB40600

SEQ ID NO: 8191 - protein, 566 aa, Artificial Sequence
  derived and/or modified protein sequence (wt) from hemagglutinin__InfluenzaA__AFB40601
MKAILVVLLYTFATANADTLCIGYHANNSTDTVDTVLEKNVTVTHSVNLLEDKHNGKLCKLRGVAPLHLGKCNIAGWILGNPECESLSTASSWSYIVETSSSDNGTCYPGDFIDYEELREQLSSVSSFERFEIFPETSSWPNHDSNKGVTAACPHAGAKSFYKNLIWLVKKGNSYPKLSKSYINDKGKEVLVLWGIHHPSTSADQQSLYQNADAYVFVGTSRYSKKFKPEIAIRPKVRGQEGRMNYYWTLVEPGDKITFEATGNLVVPRYAFAMERNAGSGIIISDTPVHDCNTTCQTPKGAINTSLPFQNIHPITIGKCPKYVKSTKLRLATGLRNVPSIQSRGLFGAIAGFIEGGWTGMVDGWYGYHHQNEQGSGYAADLKSTQNAIDEITNKVNSVIEKMNTQFTAVGKEFNHLEKRIENLNKKVDDGFLDIWTYNAELLVLLENERTLDYHDSNVKNLYEKVRSQLKNNAKEIGNGCFEFYHKCDNTCMESVKNGTYDYPKYSEEAKLNREEIDGVKLESTRIYQILAIYSTVASSLVLVVSLGAISFWMCSNGSLQCRICI

SEQ ID NO: 8192 - protein, 566 aa, Artificial Sequence; identical to SEQ ID NO: 2669
  derived and/or modified protein sequence (wt) from hemagglutinin__InfluenzaA__AFB40602

SEQ ID NO: 8193 - protein, 566 aa, Artificial Sequence; identical to SEQ ID NO: 3833
  derived and/or modified protein sequence (wt) from hemagglutinin__InfluenzaA__AFB40603

SEQ ID NO: 8194 - protein, 566 aa, Artificial Sequence
  derived and/or modified protein sequence (wt) from hemagglutinin__InfluenzaA__AFB40604
MKAILVVLLYTFATANADTLCIGYHANNSTDTVDTVLEKNVTVTHSVNLLEDKHNGKLCKLRGVAPLHLGKCNIAGWILGNPECESLSTASSWSYIVETSSSDNGTCYPGDFIDYEELREQLSSVSSFERFEIFPKTSSWPNHDSNKGVTAACPHAGAKSFYKNLIWLVKEGNSYPKLSKSYINDKGKEVLVLWGIHHPPTTADQQSLYQNADTYVFVGTSRYSKKFKPEIAIRPKVRDQEGRMNYYWTLVEPGDKITFEATGNLVVPRYAFAMERNAGSGIIISDTPVHDCNTTCQTPKGAINTSLPFQNIHPITIGKCPKYVKSTKLRLATGLRNVPSIQSRGLFGAIAGFIEGGWTGMVDGWYGYHHQNEQGSGYAADLKSTQNAIDKITNKVNSVIEKMNTQFTAVDKEFNHLEKRIGNLNKKVDDGFLDIWTYNAELLVLLENERTLDYHDSNVKNLYEKVRNQLKNNAKEIGNGCFEFYHKCDNTCMESVKNGTYDYPKYSEEAKLNREEIDGVKLESTRIYQILAIYSTVASSLVLVVSLGAISFWMCSNGSLQCRICI

SEQ ID NO: 8195 - protein, 566 aa, Artificial Sequence; identical to SEQ ID NO: 2669
  derived and/or modified protein sequence (wt) from hemagglutinin__InfluenzaA__AFB70138

SEQ ID NO: 8196 - protein, 566 aa, Artificial Sequence
  derived and/or modified protein sequence (wt) from hemagglutinin__InfluenzaA__AFB70145
MKAILVVLLYTFATANADTLCIGYHANNSTDTVDTVLEKNVTVTHSVNLLEDKHNGKLCKLRGVAPLHLGKCNIAGWILGNPECESLSTASSWSYIVETSSSDNGTCYPGDFIDYEELREQLSSVSSFERFEIFPKTSSWPNHDSNKGITAACPHAGAKSFYKNLIWLVKKGNSYPKLSKSYINDKGKEVLVLWGIHHPSTSADQQSLYQNADAYVFVGTSRYSKKFKPEIAIRPKVRDQEGRMNYYWTLVEPGDKITFEATGNLVVPRYAFAMERNAGSGIIISDTPVHDCNTTCQTPKGAINTSLPFQNIHPITIGKCPKYVKSTKLRLATGLRNVPSIQSRGLFGAIAGFIEGGWTGMVDGWYGYHHQNEQGSGYAADLKSTQNAIDEITNKVNSVIEKMNTQFTAVGKEFNHLEKRIENLNKKVDDGFLDIWTYNAELLVLLENERTLDYHDSNVKNLYEKVRSQLKNNAKEIGNGCFEFYHKCDNTCMESVKNGTYDYPKYSEEAKLNREEIDGVKLESTRIYQILAIYSTVASSLVLVVSLGAISFWMCSNGSLQCRICI

SEQ ID NO: 8197 - protein, 566 aa, Artificial Sequence
  derived and/or modified protein sequence (wt) from hemagglutinin__InfluenzaA__AFB70154
MKAILVVLLYTFATANADTLCIGYHANNSTDTVDTVLEKNVTVTHSVNLLEDKHNEKLCKLRGVAPLHLGKCNIAGWILGNPECESLSTASSWSYIVETSSSDNGTCYPGDFIDYEELREQLSSVSSFERFEIFPKTSSWPNHDSNKGVTAACPHAGAKSFYKNLIWLVKKGNSYPKLSKSYINDKGKEVLVLWGIHHPSTSADQQSLYQNADAYVFVGTSRYSKKFKPEIAIRPKVRDQEGRMNYYWTLVEPGDKITFEATGNLVVPRYAFAMERNAGSGIIISDTPVHDCNTTCQTPKGAINTSLPFQNIHPITIGKCPKYVKSTKLRLATGLRNVPSIQSRGLFGAIAGFIEGGWTGMVDGWYGYHHQNEQGSGYAADLKSTQNAIDEITNKVNSVIEKMNTQFTAVGKEFNHLEKRIENLNKKVDDGFLDIWTYNAELLVLLENERTLDYHDSNVKNLYEKVRSQLKNNAKEIGNGCFEFYHKCDNTCMESVKNGTYDYPKYSEEAKLNREEIDGVKLESTRIYQILAIYSTVASSLVLVVSLGAISFWMCSNGSLQCRICI

SEQ ID NO: 8198 - protein, 566 aa, Artificial Sequence; identical to SEQ ID NO: 2669
  derived and/or modified protein sequence (wt) from hemagglutinin__InfluenzaA__AFB70156

SEQ ID NO: 8199 - protein, 566 aa, Artificial Sequence; identical to SEQ ID NO: 2669
  derived and/or modified protein sequence (wt) from hemagglutinin__InfluenzaA__AFB70158

SEQ ID NO: 8200 - protein, 566 aa, Artificial Sequence; identical to SEQ ID NO: 8196
  derived and/or modified protein sequence (wt) from hemagglutinin__InfluenzaA__AFB70160

SEQ ID NO: 8201 - protein, 566 aa, Artificial Sequence; identical to SEQ ID NO: 3863
  derived and/or modified protein sequence (wt) from hemagglutinin__InfluenzaA__AFB70162

SEQ ID NO: 8202 - protein, 566 aa, Artificial Sequence
  derived and/or modified protein sequence (wt) from hemagglutinin__InfluenzaA__AFB70167
MKAILVVLLYTFATANADTLCIGYHANNSTDTVDTVLEKNVTVTHSVNLLEDKHNGKLCKLRGVAPLHLGKCNIAGWILGNPECESLSTASSWSYIVETSSSDNGTCYPGDFIDYEELREQLSSVSSFERFEIFPKTSSWPNHDSNKGVTAACPHAGAKSFYKNLIWLVKKGNSYPKLSKSYINDKGKEVLVLWGIHHPSTSADQQSLYQNADAYVFVGTSRYSKKFKPEIAMRPKVRDQEGRMNYYWTLVEPGDKITFEATGNLVVPRYAFAMERNAGSGIIISDTPVHDCNTTCQTPKGAINTSLPFQNIHPITIGKCPKYVKSTKLRLATGLRNVPSIQSRGLFGAIAGFIEGGWTGMVDGWYGYHHQNEQGSGYAADLKSTQNAIDEITNKVNSVIEKMNTQFTAVGKEFNHLEKRIENLNKKVDDGFLDIWTYNAELLVLLENERTLDYHDSNVKNLYEKVRSQLKNNAKEIGNGCFEFYHKCDNTCMESVKNGTYDYPKYSEEAKLNREEIDGVKLESTRIYQILAIYSTVASSLVLVVSLGAISFWMCSNGSLQCRICI

SEQ ID NO: 8203 - protein, 566 aa, Artificial Sequence; identical to SEQ ID NO: 2669
  derived and/or modified protein sequence (wt) from hemagglutinin__InfluenzaA__AFB70177

SEQ ID NO: 8204 - protein, 566 aa, Artificial Sequence; identical to SEQ ID NO: 3238
  derived and/or modified protein sequence (wt) from hemagglutinin__InfluenzaA__AFB70187

SEQ ID NO: 8205 - protein, 566 aa, Artificial Sequence; identical to SEQ ID NO: 3863
  derived and/or modified protein sequence (wt) from hemagglutinin__InfluenzaA__AFB70197

SEQ ID NO: 8206 - protein, 566 aa, Artificial Sequence; identical to SEQ ID NO: 2669
  derived and/or modified protein sequence (wt) from hemagglutinin__InfluenzaA__AFB70207

SEQ ID NO: 8207 - protein, 566 aa, Artificial Sequence; identical to SEQ ID NO: 2669
  derived and/or modified protein sequence (wt) from hemagglutinin__InfluenzaA__AFB70217

SEQ ID NO: 8208 - protein, 566 aa, Artificial Sequence; identical to SEQ ID NO: 2669
  derived and/or modified protein sequence (wt) from hemagglutinin__InfluenzaA__AFB70227

SEQ ID NO: 8209 - protein, 566 aa, Artificial Sequence
  derived and/or modified protein sequence (wt) from hemagglutinin__InfluenzaA__AFB70247
MKAILVVLLYTFATANADTLCIGYHANNSTDTVDTVLEKNVTVTHSVNLLEDKHNGKLCKLRGVAPLHLGKCNIAGWILGNPECESLSTASSWSYIVETSSSDNGTCYPGDFIDYEELREQLSSVSSFERFEIFPKTSSWPNHDSNKGVTAACPHAGAKSFYKNLIWLVKKGNSYPKLSKSYINDKGKEVLVLWGIHHPSTSADQQSLYQNADAYVFVGTSRYSKEFKPEIAIRPKVRDQEGRMNYYWTLVEPGDKITFEATGNLVVPRYAFAMERNAGSGIIISDTPVHDCNTTCQTPKGAINTSLPFQNIHPITIGKCPKYVKSTKLRLATGLRNVPSIQSRGLFGAIAGFIEGGWTGMVDGWYGYHHQNEQGSGYAADLKSTQNAIDEITNKVNSVIEKMNTQFTAVGKEFNHLEKRIENLNKKVDDGFLDIWTYNAELLVLLENERTLDYHDSNVKNLYEKVRSQLKNNAKEIGNGCFEFYHKCDNTCMESVKNGTYDYPKYSEEAKLNREEIDGVKLESTRIYQILAIYSTVASSLVLVVSLGAISFWMCSNGSLQCRICI

SEQ ID NO: 8210 - protein, 566 aa, Artificial Sequence
  derived and/or modified protein sequence (wt) from hemagglutinin__InfluenzaA__AFB70257
MKAILVVLLYTFATANADTLCIGYHANNSTDTVDTVLEKNVTVTHSVNLLEDKHNGKLCKLRGVAPLHLGKCNIAGWILGNPECESLSTASSWSYIVETSSSDNGTCYPGDFVDYEELREQLSSVSSFERFEIFPKTSSWPNHDSNKGVTAACPHAGAKSFYKNLIWLVKKGNSYPKLSKSYINDKGKEVLVLWGIHHPSTSADQQSLYQNADAYVFVGTSRYSKKFKPEIAIRPKVRDQEGRMNYYWTLVEPGDKITFEATGNLVVPRYAFAMERNAGSGIIISDTPVHDCNTTCQTPKGAINTSLPFQNIHPITIGKCPKYVKSTKLRLATGLRNVPSIQSRGLFGAIAGFIEGGWTGMVDGWYGYHHQNEQGSGYAADLKSTQNAIDEITNKVNSVIEKMNTQFTAVGKEFNHLEKRIENLNKKVDDGFLDIWTYNAELLVLLENERTLDYHDSNVKNLYEKVRSQLKNNAKEIGNGCFEFYHKCDNTCMESVKNGTYDYPKYSEEAKLNREEIDGVKLESTRIYQILAIYSTVASSLVLVVSLGAISFWMCSNGSLQCRICI

SEQ ID NO: 8211 - protein, 566 aa, Artificial Sequence; identical to SEQ ID NO: 7076
  derived and/or modified protein sequence (wt) from hemagglutinin__InfluenzaA__AFB70267

SEQ ID NO: 8212 - protein, 566 aa, Artificial Sequence; identical to SEQ ID NO: 3139
  derived and/or modified protein sequence (wt) from hemagglutinin__InfluenzaA__AFB70277

SEQ ID NO: 8213 - protein, 566 aa, Artificial Sequence; identical to SEQ ID NO: 2669
  derived and/or modified protein sequence (wt) from hemagglutinin__InfluenzaA__AFB70287

SEQ ID NO: 8214 - protein, 566 aa, Artificial Sequence; identical to SEQ ID NO: 2669
  derived and/or modified protein sequence (wt) from hemagglutinin__InfluenzaA__AFB70297

SEQ ID NO: 8215 - protein, 566 aa, Artificial Sequence; identical to SEQ ID NO: 2669
  derived and/or modified protein sequence (wt) from hemagglutinin__InfluenzaA__AFB70307

SEQ ID NO: 8216 - protein, 566 aa, Artificial Sequence; identical to SEQ ID NO: 8196
  derived and/or modified protein sequence (wt) from hemagglutinin__InfluenzaA__AFB70317

SEQ ID NO: 8217 - protein, 566 aa, Artificial Sequence
  derived and/or modified protein sequence (wt) from hemagglutinin__InfluenzaA__AFB70327
MKAILVVLLYTFATANADTLCIGYHANNSTDTVDTVLEKNVTVTHSVNLLEDKHNGKLCKLRGVAPLHLGKCNIAGWILGNPECESLSTASSWSYIVETSSSDNGTCYPGDFIDYEELREQLSSVSSFERFEIFPKTSSWPNHDSNKGVTAACPHAGAKSFYKNLIWLVKKGNSYPKLSKSYINDKGKEVLVLWGIHHPSTSADQQSLYQNADAYVFVGTSRYSKKFKPEIAIRPKVRDQEGRMNYYWTLVEPGDKITFEATGNLVVPRYAFAMERNAGSGIIISDTPVHDCNTTCQTPKGAINTSLPFQNIHPITIGKCPKYVKSTKLRLATGLRNVPSIQSRGLFGAIAGFIEGGWTGMVDGWYGYHHQNEQGSGYAADLKSTQNAIDEITNKVNSVIEKMNTQFTAVGKEFNHLGKRIENLNKKVDDGFLDIWTYNAELLVLLENERTLDYHDSNVKNLYEKVRSQLKNNAKEIGNGCFEFYHKCDNTCMESVKNGTYDYPKYSEEAKLNREEIDGVKLESTRIYQILAIYSTVASSLVLVVSLGAISFWMCSNGSLQCRICI

SEQ ID NO: 8218 - protein, 566 aa, Artificial Sequence; identical to SEQ ID NO: 2669
  derived and/or modified protein sequence (wt) from hemagglutinin__InfluenzaA__AFB70337

SEQ ID NO: 8219 - protein, 566 aa, Artificial Sequence; identical to SEQ ID NO: 4639
  derived and/or modified protein sequence (wt) from hemagglutinin__InfluenzaA__AFB70347

SEQ ID NO: 8220 - protein, 566 aa, Artificial Sequence; identical to SEQ ID NO: 2669
  derived and/or modified protein sequence (wt) from hemagglutinin__InfluenzaA__AFB70367

SEQ ID NO: 8221 - protein, 566 aa, Artificial Sequence; identical to SEQ ID NO: 2669
  derived and/or modified protein sequence (wt) from hemagglutinin__InfluenzaA__AFB70377

SEQ ID NO: 8222 - protein, 566 aa, Artificial Sequence; identical to SEQ ID NO: 3238
  derived and/or modified protein sequence (wt) from hemagglutinin__InfluenzaA__AFB70387

SEQ ID NO: 8223 - protein, 566 aa, Artificial Sequence; identical to SEQ ID NO: 2669
  derived and/or modified protein sequence (wt) from hemagglutinin__InfluenzaA__AFB70397

SEQ ID NO: 8224 - protein, 566 aa, Artificial Sequence; identical to SEQ ID NO: 2669
  derived and/or modified protein sequence (wt) from hemagglutinin__InfluenzaA__AFB70407

SEQ ID NO: 8225 - protein, 566 aa, Artificial Sequence
  derived and/or modified protein sequence (wt) from hemagglutinin__InfluenzaA__AFB77618
MKAILVVLLYTFATANADTLCIGYHANNSTDTVDTVLEKNVTVTHSVNLLEDKHNGKLCKLRGIAPLHLGKCNIAGWILGNPECESLSTASSWSYIVETSSSDNGTCYPGDFINYEELREQLSSVSSFERFEIFPKTSSWPNHDSNKGVTAACPHAGAKSFYKNLIWLVKKGNSYPKLSKSYINDKGKEVLVLWGIHHPTTTGDQQSLYQNADGYVFVGTTRYSKKFKPEIGIRPKVKDQEGRMNYYWTLVEPGDKITFEATGNLVVPRYAFAMERNAGSGIIISDTPVHDCNTTCQTPKGAINTSLPFQNIHPITIGKCPKYVKSTKLRLATGLRNVPSIQSRGLFGAIAGFIEGGWTGMVDGWYGYHHQNEQGSGYAADLKSTQNAIDKITNKVNSVIEKMNTQFTAVGKEFNHLEKRIENLNKKVDDGFLDIWTYNAELLVLLENERTLDYHDSNVKNLYEKVRNQLKNNAKEIGNGCFEFYHKCDNTCMESVKNGTYDYPKYSEEAKLNREEIDGVKLESTRIYQILAIYSTVASSLVMVVSLGAISFWMCSNGSLQCRICI

SEQ ID NO: 8226 - protein, 566 aa, Artificial Sequence; identical to SEQ ID NO: 6867
  derived and/or modified protein sequence (wt) from hemagglutinin__InfluenzaA__AFB77619

SEQ ID NO: 8227 - protein, 566 aa, Artificial Sequence; identical to SEQ ID NO: 6867
  derived and/or modified protein sequence (wt) from hemagglutinin__InfluenzaA__AFB77620

SEQ ID NO: 8228 - protein, 566 aa, Artificial Sequence
  derived and/or modified protein sequence (wt) from hemagglutinin__InfluenzaA__AFB77621
MKAILVVLLYTFATANADTLCIGYHANNSTDTVDTVLEKNVTVTHSVNLLEDKHNGKLCKLRGVTPLHLGKCNIAGWILGNPECESLSTASSWSYIVETSSSDNGTCYPGDFINYEELREQLSSVSSFERFEIFPKTSSWPNHDSNKGVTAACPHAGAKSFYKNLIWLVKKGNSYPKLSKSYINDKGKEVLVLWGIHHPSTTADQQSLYQNADAYVFVGTSRYSKKFKPEIAIRPKVRDQEGRMNYYWTLVEPGDKITFEATGNLVVPRYAFAMERNAGSGIIISDTPVHDCNTTCQTPKGAINTSLPFQNIHPITIGKCPKYVKSTKLRLATGLRNIPSIQSRGLFGAIAGFIEGGWTGMVDGWYGYHHQNEQGSGYAADLKSTQNAIDKITNKVNSVIEKMNTQFTAVGKEFNHLEKRIENLNKKVDDGFLDIWTYNAELLVLLENERTLDYHDSNVKNLYEKVRNQLKNNAKEIGNGCFEFYHKCDNTCMESVKNGTYDYPKYSEEAKLNREEIDGVKLESTRIYQILAIYSTVASSLVLVVSLGAISFWMCSNGSLQCRICI

SEQ ID NO: 8229 - protein, 566 aa, Artificial Sequence
  derived and/or modified protein sequence (wt) from hemagglutinin__InfluenzaA__AFB77622
MKAILVVLLYTFATANADTLCIGYHANNSTDTVDTVLEKNVTVTHSVNLLEDKHNGKLCKLRGVAPLHLGKCNIAGWILGNPECESLSTASSWSYIVETSSSDNGTCYPGDFINYEELREQLSSVSSFERFEIFPKTSSWPNHDPNKGVTAACPHAGAKSFYKNLIWLVKKGNSYPKLSKSYINDKGKEVLVLWGIHHPSTTADQQSLYQNADAYVFVGTSRYSKKFKPEIAIRPKVRDQEGRMNYYWTLVEPGDKITFEATGNLVVPRYAFAMERNAGSGIIISDTPVHDCNTTCQTPKGAINTSLPFQNIHPITIGKCPKYVKSTKLRLATGLRNVPSIQSRGLFGAIAGFIEGGWTGMVDGWYGYHHQNEQGSGYAADLKSTQNAIDKITNKVNSVIEKMNTQFTAVGKEFNHLEKRIENLNKKVDDGFLDIWTYNAELLVLLENERTLDYHDSNVKNLYEKVRNQLKNNAKEIGNGCFEFYHKCDNTCMESVKNGTYDYPKYSEEAKLNREEIDGVKLESTRIYQILAIYSTVASSLVLVVSLGAISFWMCSNGSLQCRICI

SEQ ID NO: 8230 - protein, 566 aa, Artificial Sequence; identical to SEQ ID NO: 6867
  derived and/or modified protein sequence (wt) from hemagglutinin__InfluenzaA__AFB77623

SEQ ID NO: 8231 - protein, 566 aa, Artificial Sequence; identical to SEQ ID NO: 6867
  derived and/or modified protein sequence (wt) from hemagglutinin__InfluenzaA__AFB77624

SEQ ID NO: 8232 - protein, 566 aa, Artificial Sequence
  derived and/or modified protein sequence (wt) from hemagglutinin__InfluenzaA__AFB77625
MKAILVVLLYTFTTANADTLCIGYHANNSTDTVDTVLEKNVTVTHSVNLLEDKHNGKLCKLRGVAPLHLGKCNIAGWILGNPECESLSTASSWSYIVETSSSDNGTCYPGDFINYEELREQLSSVSSFERFEIFPKTSSWPNHDSNKGVTAACPHAGAKSFYKNLIWLVKKGNSYPKLSKSYINDKGKEVLVLWGIHHPSTTADQQSLYQNADAYVFVGTSRYSKKFKPEIAIRPKVRDQEGRMNYYWTLVEPGDKITFEATGNLVVPRYAFAMERNAGSGIIISDTPVHDCNTTCQTPKGAINTSLPFQNIHPITIGKCPKYVKSTKLRLATGLRNVPSIQSRGLFGAIAGFIEGGWTGMVDGWYGYHHQNEQGSGYAADLKSTQNAIDKITNKVNSVIEKMNTQFTAVGKEFNHLEKRIENLNKKVDDGFLDIWTYNAELLVLLENERTLDYHDSNVKNLYEKVRNQLKNNAKEIGNGCFEFYHKCDNTCMESVKNGTYDYPKYSEEAKLNREEIDGVKLESTRIYQILAIYSTVASSLVLVVSLGAISFWMCSNGSLQCRICI

SEQ ID NO: 8233 - protein, 566 aa, Artificial Sequence
  derived and/or modified protein sequence (wt) from hemagglutinin__InfluenzaA__AFB77627
MKAILVVLLYTFATANADTLCIGYHANNSTDTVDTVLEKNVTVTHSVNLLEDKHNGKLCKLRGVAPLHLGKCNIAGWILGNPECESLSTASSWSYIVETSSSDNGTCYPGDFINYEELREQLSSVSSFERFEIFSKTSSWPNHDSNKGVTAACPHAGAKSFYKNLIWLVKKGNSYPKLSKSYINDKGKEVLVLWGIHHPSTTADQQSLYQNADAYVFVGTSRYSKKFKPEIAIRPKVRDQEGRMNYYWTLVEPGDKITFEATGNLVVPRYAFAMERNAGSGIIISDTPVHDCNTTCQTPKGAINTSLPFQNIHPITIGKCPKYVKSTKLRLATGLRNVPSIQSRGLFGAIAGFIEGGWTGMVDGWYGYHHQNEQGSGYAADLKSTQNAIDKITNKVNSVIEKMNTQFTAVGKEFNHLEKRIENLNKKVDDGFLDIWTYNAELLVLLENERTLDYHDSNVKNLYEKVRNQLKNNAKEIGNGCFEFYHKCDNTCMESVKNGTYDYPKYSEEAKLNREEIDGVKLESTRIYQILAIYSTVASSLVLVVSLGAISFWMCSNGSLQCRICI

SEQ ID NO: 8234 - protein, 566 aa, Artificial Sequence; identical to SEQ ID NO: 6867
  derived and/or modified protein sequence (wt) from hemagglutinin__InfluenzaA__AFB77628

SEQ ID NO: 8235 - protein, 566 aa, Artificial Sequence
  derived and/or modified protein sequence (wt) from hemagglutinin__InfluenzaA__AFB77629
MKAILVVLLYTFTTANADTLCIGYHANNSTDTVDTVLEKNVTVTHSVNLLEDKHNGKLCKLRGVAPLHLGKCNIAGWILGNPECESLSTASSWSYIVETSSSDNGTCYPGDFINYEELREQLSSVSSFERFEIFPKTSSWPNHDSNKGVTAACPHAGAKSFYKNLIWLVKKGNSYPKLSKSYINDKGKEVLVLWGIHHPSTTADQQSLYQNADAYVFVGTSRYSKKFKPEIAIRPKVRDQEGRMNYYWTLVEPGDKITFEATGNLVVPRYAFAMERNAGSGIIISDTPVHDCNTTCQTPKGAINTSLPFQNIHPITIGKCPKYVKSTKLRLATGLRNVPSIQSRGLFGAIAGFIEGGWTGMVDGWYGYHHQNEQGSGYAADLKSTQNAIDKITNKVNSVIEKMNTQFTAVGKEFNHLEKRIENLNKKVDDGFLDIWTYNEELLVLLENERTLDYHDSNVKNLYEKVRNQLKNNAKEIGNGCFEFYHKCDNTCMESVKNGTYDYPKYSEEAKLNREEIDGVKLESTRIYQILAIYSTVASSLVLVVSLGAISFWMCSNGSLQCRICI

SEQ ID NO: 8236 - protein, 566 aa, Artificial Sequence
  derived and/or modified protein sequence (wt) from hemagglutinin__InfluenzaA__AFB77630
MKAILVVLLYTFATANADTLCIGYHANNSTDTVDTVLEKNVTVTHSVNLLEDKHNGKLCKLRGVAPLHLGKCNIAGWILGNPECESLSTASSWSYIVETSSSDNGTCYPGDFINYEELREQLSSVSSFERFEIFPKTSSWPNHESNKGVTAACPHAGAKSFYKNLIWLVKKGNSYPKLSKSYINDKGKEVLVLWGIHHPSTTADQQSLYQNADAYVFVGTSRYSKKFKPEIAIRPKVRDQEGRMNYYWTLVEPGDKITFEATGNLVVPRYAFAMERNAGSGIIISDTPVHDCNTTCQTPKGAINTSLPFQNIHPITIGKCPKYVKSTKLRLATGLRNVPSIQSRGLFGAIAGFIEGGWTGMVDGWYGYHHQNEQGSGYAADLKSTQNAIDKITNKVNSVIEKMNTQFTAVGKEFNHLEKRIENLNKKVDDGFLDIWTYNAELLVLLENERTLDYHDSNVKNLYEKVRNQLKNNAKEIGNGCFEFYHKCDNTCMESVKNGTYDYPKYSEEAKLNREEIDGVKLESTRIYQILAIYSTVASSLVLVVSLGAISFWMCSNGSLQCRICI

SEQ ID NO: 8237 - protein, 566 aa, Artificial Sequence
  derived and/or modified protein sequence (wt) from hemagglutinin__InfluenzaA__AFB77631
MKAILVVLLYTFTTANADTLCIGYHANNSTDTVDTVLEKNVTVTHSVNLLEDKHNGKLCKLRGVAPLHLGKCNIAGWILGNPECESLSTASSWSYIVETSSSDNGTCYPGDFINYEELREQLSSVSSFERFEIFPKTSSWPNHDSNKGVTAACPHAGAKSFYKNLIWLVKKGNSYPKLSKSYINDKGKEVLVLWGIHHPSTTADQQSLYQNADAYVFVGTSRYSKKFKPEIAIRPKVRDQEGRMNYYWTLVEPGDKITFEATGNLVVPRYAFAMERNAGSGIIISDTPVHDCNTTCQTPKGAINTSLPFQNIHPITIGKCPKYVKSTKLRLATGLRNVPSIQSRGLFGAIAGFIEGGWTGMVDGWYGYHHQNEQGSGYAADLKSTQNAIDKITNKVNSVIEKMNTQFTAVGKEFNHLEKRIENLNKKVDDGFLDIWTYNAELLVLLENERTLDYHDSNVKNLYEKVRNQLKTNAKEIGNGCFEFYHKCDNTCMESVKNGTYDYPKYSEEAKLNREEIDGVKLESTRIYQILAIYSTVASSLVLVVSLGAISFWMCSNGSLQCRICI

SEQ ID NO: 8238 - protein, 566 aa, Artificial Sequence
  derived and/or modified protein sequence (wt) from hemagglutinin__InfluenzaA__AFB77632
MKAILVVLLYTFATANADTLCIGYHANNSTDTVDTVLEKNVTVTHSVNLLEDKHNGKLCKLRGVAPLHLGKCNIAGWILGNPECESLTTASSWSYIVETSSSDNGTCYPGDFINYEELREQLSSVSSFERFEIFPKTSSWPNHDSNKGVTAACPHAGAKSFYKNLIWLVKKGNSYPKLSKSYINDKGKEVLVLWGIHHPSTTADQQSLYQNADAYVFVGTSRYSKKFKPEIAIRPKVRDQEGRMNYYWTLVEPGDKITFEATGNLVVPRYAFAMERNAGSGIIISDTPVHDCNTTCQTPKGAINTSLPFQNIHPITIGKCPKYVKSTKLRLATGLRNVPSIQSRGLFGAIAGFIEGGWTGMVDGWYGYHHQNEQGSGYAADLKSTQNAIDKITNKVNSVIEKMNTQFTAVGKEFNHLEKRIENLNKKVDDGFLDIWTYNAELLVLLENERTLDYHDSNVKNLYEKVRNQLKNNAKEIGNGCFEFYHKCDNTCMESVKNGTYDYPKYSEEAKLNREEIDGVKLESTRIYQILAIYSTVASSLVLVVSLGAISFWMCSNGSLQCKICI

SEQ ID NO: 8239 - protein, 566 aa, Artificial Sequence
  derived and/or modified protein sequence (wt) from hemagglutinin__InfluenzaA__AFB77633
MKAILVVLLYTFATANADTLCIGYHANNSTDTVDTVLEKNVTVTHSVNLLEDKHNGKLCKLRGVAPLHLGKCNIAGWILGNPECESLSTASSWSYIVETSSSDNGTCYPGDFINYEELREQLSSVSSFERFEIFPKTSSWPNHDSNKGVTAACSHAGAKSFYKNLIWLVKKGNSYPKLSKSYINDKGKEVLVLWGIHHPSTTADQQSLYQNADAYVFVGTSRYSKKFKPEIAIRPKVRDQEGRMNYYWTLVEPGDKITFEATGNLVVPRYAFAMERNAGSGIIISDTPVHDCNTTCQTPKGAINTSLPFQNIHPITIGKCPKYVKSTKLRLATGLRNVPSIQSRGLFGAIAGFIEGGWTGMVDGWYGYHHQNEQGSGYAADLKSTQNAIDKITNKVNSVIEKMNTQFTAVGKEFNHLEKRIENLNKKVDDGFLDIWTYNAELLVLLENERTLDYHDSNVKNLYEKVKNQLKNNAKEIGNGCFEFYHKCDNTPIKNVKNGTYDYPKYSEEAKLNREEIDGVKLESTRIYQILAIYSTVASSLVLVVSLGAISFWMCSNGSLQCRICI

SEQ ID NO: 8240 - protein, 566 aa, Artificial Sequence
  derived and/or modified protein sequence (wt) from hemagglutinin__InfluenzaA__AFB77634
MKAILVVLLYTFATANADTLCIGYHANNSTDTVDTVLEKNVTVTHSVNLLEDKHNGKLCKLRGVAPLHLGKCNIAGWILGNPECESLSTASSWSYIVETSSSDNGTCYPGDFINYEELREQLSSVSSFERFEIFPKTSSWPNHDSNKGVTAACPHAGAKSFYKNLIWLVKKGNSYPKLSKSYINDKGKEVLVLWGIHHPSTTADQQSLYQNADAYVFVGTSRYSKKFKPEIAIRPKVRDQEGRMNYYWTLVEPGEKITFEATGNLVVPRYAFAMERNAGSGIIISDTPVHDCNTTCQTPKGAINTSLPFQNIHPITIGKCPKYVKSTKLRLATGLRNVPSIQSRGLFGAIAGFIEGGWTGMVDGWYGYHHQNEQGSGYAADLKSTQNAIDKITNKVNSVIEKMNTQFTAVGKEFNHLEKRIENLNKKVDDGFLDIWTYNAELLVLLENERTLDYHDSNVKNLYEKVRNQLKNNAKEIGNGCFEFYHKCDNTCMESVKNGTYDYPKYSEEAKLNREEIDGVKLESTRIYQILAIYSTVASSLVLVVSLGAISFWMCSNGSLQCRICI

SEQ ID NO: 8241 - protein, 566 aa, Artificial Sequence
  derived and/or modified protein sequence (wt) from hemagglutinin__InfluenzaA__AFB77635
MKAILVVLLYTFATANADTLCIGYHANNSTDTVDTVLEKNVTVTHSVNLLEDKHNGKLCKLRGVAPLHLGKCNIAGWILGNPECESLSTASPWSYIVETSSSDNGTCYPGDFINYEELREQLSSVSSFERFEIFPKTSSWPNHDSNKGVTAACPHAGAKSFYKNLIWLVKKGNSYPKLSKSYINDKGKEVLVLWGIHHPSTTADQQSLYQNADAYVFVGTSRYSKKFKPEIAIRPKVRDQEGRMNYYWTLVEPGDKITFEATGNLVVPRYAFAMERNAGSGIIISDTPVHDCNTTCQTPKGAINTSLPFQNIHPITIGKCPKYVKSTKLRLATGLRNVPSIQSRGLFGAIAGFIEGGWTGMVDGWYGYHHQNEQGSGYAADLKSTQNAIDKITNKVNSVIEKMNTQFTAVGKEFNHLEKRIENLNKKVDDGFLDIWTYNAELLVLLENERTLDYHDSNVKNLYEKVRNQLKNNAKEIGNGCFEFYHKCDNTCMESVKNGTYDYPKYSEEAKLNREEIDGVKLESTRIYQILAIYSTVASSLVLVVSLGAISFWMCSNGSLQCRICI

SEQ ID NO: 8242 - protein, 566 aa, Artificial Sequence
  derived and/or modified protein sequence (wt) from hemagglutinin__InfluenzaA__AFB77636
MKAILVVLLYTFATANADTLCIGYHANNSTDTVDTVLEKNVTVTHSVNLLEDKHNGKLCKLRGVAPLHLGKCNIAGWILGNPECESLSTASSWSYIVETSSSDNGTCYPGDFINYEELREQLSSVSSFERFEIFPKTSSWPNHDSNKGVTAACPHAGAKSFYKNLIWLVKKGNSYPKLSKSYINDKGKEVLVLWGIHHPSTTADQQSLYQNADAYVFVGTSRYSKKFKPEIAIRPKVRDQEGRMNYYWTLVEPGDKITFEATGNLVVPRYAFAMERKAGSGIIISDTPVHDCNTTCQTPKGAINTSLPFQNIHPITIGKCPKYVKSTKLRLATGLRNVPSIQSRGLFGAIAGFIEGGWTGMVDGWYGYHHQNEQGSGYAADLKSTQNAIDKITNKVNSVIEKMNTQFTAVGKEFNHLEKRIENLNKKVDDGFLDIWTYNAELLVLLENERTLDYHDSNVKNLYEKVRNQLKNNAKEIGNGCFEFYHKCDNTCMESVKNGTYDYPKYSEEAKLNREEIDGVKLESTRIYQILAIYSTVASSLVMVVSLGAISFWMCSNGSLQCRICI

SEQ ID NO: 8243 - protein, 566 aa, Artificial Sequence
  derived and/or modified protein sequence (wt) from hemagglutinin__InfluenzaA__AFB77637
MKAILVVLLYTFATANADTLCIGYHANNSTDTVDTVLEKNVTVTHSVNLLEDKHNGKLCKLRGVAPLHLGKCNIAGWILGNPECESLSTASSWSYIVETSSSDNGTCYPGDFINYEELREQLSSVSSFERFEIFPKTSSWPNHDSNKGVTAACPHAGAKSFYKNLIWLVKKGNSYPKLSKSYINDKGKEVLVLWGIHHPSTTADQQSLYQNADAYVFVGTSRYSKKFKPEIAIRPKGRDQEGRMNYYWTLVEPGDKITFEATGNLVVPRYAFAMERNAGSGIIISDTPVHDCNTTCQTPKGAINTSLPFQNIHPITIGKCPKYVKSTKLRLATGLRNVPSIQSRGLFGAIAGFIEGGWTGMVDGWYGYHHQNEQGSGYAADLKSTQNAIDKITNKVNSVIEKMNTQFTAVGKEFNHLEKRIENLNKKVDDGFLDIWTYNAELLVLLENERTLDYHDSNVKNLYEKVRNQLKNNAKEIGNGCFEFYHKCDNTCMESVKNGTYDYPKYSEEAKLNREEIDGVKLESTRIYQILAIYSTVASSLVLVVSLGAISFWMCSNGSLQCRICI

SEQ ID NO: 8244 - protein, 566 aa, Artificial Sequence
  derived and/or modified protein sequence (wt) from hemagglutinin__InfluenzaA__AFB77638
MKAILVVLLYTFATANADTLCIGYHANNSTDTVDTVLEKNVTVTHSVNLLEDKHNGKLCKLRGVAPLHLGKCNIAGWILGNPECESLSTASSWSYIVETSSSDNGTCYPGDFINYEELREQLSSVSSFERFEIFPKTSSWPNHDSNKGVTAACPHAGAKSFYKNLIWLVKKGNSYPKLSKFYINDKGKEVLVLWGIHHPSTTADQQSLYQNADAYVFVGTSRYSKKFKPEIAIRPKVRDQEGRMNYYWTLVEPGDKITFEATGNLVVPRYAFAMERNAGSGIIISDTPVHDCNTTCQTPKGAINTSLPFQNIHPITIGKCPKYVKSTKLRLATGLRNVPSIQSRGLFGAIAGFIEGGWTGMVDGWYGYHHQNEQGSGYAADLKSTQNAIDKITNKVNSVIEKMNTQFTAVGKEFNHLEKRIENLNKKVDDGFLDIWTYNAELLVLLENERTLDYHDSNVKNLYEKVRNQLKNNAKEIGNGCFEFYHKCDNTCMESVKNGTYDYPKYSEEAKLNREEIDGVKLESTRIYQILAIYSTVASSLVLVVSLGAISFWMCSNGSLQCRICI

SEQ ID NO: 8245 - protein, 566 aa, Artificial Sequence; identical to SEQ ID NO: 6867
  derived and/or modified protein sequence (wt) from hemagglutinin__InfluenzaA__AFB77639

SEQ ID NO: 8246 - protein, 566 aa, Artificial Sequence
  derived and/or modified protein sequence (wt) from hemagglutinin__InfluenzaA__AFB77640
MKAILVVLLYTFATANADTLCIGYHANNSTDTVDTVLEKNVTVTHSVNLLEDKHNGKLCKLRGVAPLHLGKCNIAGWILGNPECESLSTASSWSYIVETSSSDNGTCYPGDFINYEELREQLSSVSSFERFEIFPKTSSWPNHDSNKGVTAACPHAGAKSFYKNLIWLVKKGNSYPKLSKSYINDKGKEVLVLWGIHHPSTTADQQGLYQNADAYVFVGTSRYSKKFKPEIAIRPKVRDQEGRMNYYWTLVEPGDKITFEATGNLVVPRYAFAMERNAGSGIIISDTPVHDCNTTCQTPKGAINTSLPFQNIHPITIGKCPKYVKSTKLRLATGLRNVPSIQSRGLFGAIAGFIEGGWTGMVDGWYGYHHQNEQGSGYAADLKSTQNAIDKITNKVNSVIEKMNTQFTAVGKEFNHLEKRIENLNKKVDDGFLDIWTYNAELLVLLENERTLDYHDSNVKNLYEKVRNQLKNNAKEIGNGCFEFYHKCDNTCMESVKNGTYDYPKYSEEAKLNREEIDGVKLESTRIYQILAIYSTVASSLVLVVSLGAISFWMCSNGSLQCRICI

SEQ ID NO: 8247 - protein, 566 aa, Artificial Sequence
  derived and/or modified protein sequence (wt) from hemagglutinin__InfluenzaA__AFB77641
MKAILVVLLYTFATANADTLCIGYHANNSTDTVDTVLEKNVTVTHSVNLLEDKHNGKLCKLRGVAPLHLGKCNIAGWILGNPECESLSTASSWSYIVETSSSDNGTCYPGDFINYEELREQLSSVSSFERFEIFPKTSSWPNHDSNKGVTAACPHAGAKSFYKNLIWLVKKGNSYPKLSKSYINDKGKEVLVLWGIHHPSTTADQQSLYQNADAYVFVGTSRYSKKFKPEIAIRPKVRDQEGRMNYYWTLVEPGDKITFEATGNLVVPRYAFAMERNAGSGIIISDTPVHDCNTTCQTPKGAINTSLPFQNIHPITIGKCPKYVKSTKLRLATGLRNVPSIQSRGLFGAIAGFIEGGWTGMVDGWYGYHHQNEQGSGYAADLKSTQNAIDKITNKVNSVIEKMNTQFTAVGKEFNHLEKRIENLNKKVDDGFLDIWTYNAELLVLLENERTLDYHDSNVKNLYEKVRNQLKNNAKEIGNGCFEFYHKCDNMCMESVKNGTYDYPKYSEEAKLNREEIDGVKLESTRIYQILAIYSTVASSLVLVVSLGAISFWMCSNGSLQCRICI

SEQ ID NO: 8248 - protein, 566 aa, Artificial Sequence; identical to SEQ ID NO: 6867
  derived and/or modified protein sequence (wt) from hemagglutinin__InfluenzaA__AFB77642

SEQ ID NO: 8249 - protein, 566 aa, Artificial Sequence
  derived and/or modified protein sequence (wt) from hemagglutinin__InfluenzaA__AFB77643
MKAILVVLLYTFATANADTLCIGYHANNSTDTVDTVLEKNVTVTHSVNLLEDKHNGKLCKLRGVAPLHLGKCNIAGWILGNPECESLSTASSWSYIVETSSSDNGTCYPGDFINYEELREQLSSVSSFERFEIFPKPSSWPNHDSNKGVTAACPHAGAKSFYKNLIWLVKKGNSYPKLSKSYINDKGKEVLVLWGIHHPSTTADQQSLYQNADAYVFVGTSRYSKKFKPEIAIRPKVRDQEGRMNYYWTLVEPGDKITFEATGNLVVPRYAFAMERNAGSGIIISDTPVHDCNTTCQTPKGAINTSLPFQNIHPITIGKCPKYVKSTKLRLATGLRNVPSIQSRGLFGAIAGFIEGGWTGMVDGWYGYHHQNEQGSGYAADLKSTQNAIDKITNKVNSVIEKMNTQFTAVGKEFNHLEKRIENLNKKVDDGFLDIWTYNAELLVLLENERTLDYHDSNVKNLYEKVRNQLKNNAKEIGNGCFEFYHKCDNTCMESVKNGTYDDTKDSEEAKLNREEIDGVKLESTRIYQILAIYSTVASSLVLVVSLGAISFWMCSNGSLQCRICI

SEQ ID NO: 8250 - protein, 566 aa, Artificial Sequence
  derived and/or modified protein sequence (wt) from hemagglutinin__InfluenzaA__AFB77691
MKTIIALSYILCLVFAQKLPGNDNSTATLCLGHHAVPNGTIVKTITNDQIEVTNATELVQNSSTGEICDSPHQILDGENCTLIDALLGDPQCDGFQNKKWDLFVERSKAYSNCYPYDVPDYASLRSLVASSGTLEFNNESFNWTGVTQNGTSSACIRRSNNSFFSRLNWLTHLNFKYPALNVTMPNNEQFEKLYIWGVHHPGTDKDQIFLYAQASGRITVSTKRSQQAVIPNIGSRLRVRNIPSRISIYWTIVKPGDILLINSTGNLNAPRGYFKIRSGKSSIMRSDAPIGKCNSECITPNGSIPNDKPFQNVNRITYGACPRYVKQNTLKLATGMRNVPEKQTRGIFGAIAGFIENGWEGMVDGWYGFRHQNSEGRGQAADLKSTQAAIDQINGKLNRLIGKTNEKFHQIEKEFSEVEGRIQDLEKYVEDTKIDLWSYNAELLVALENQHTIDLTDSEMNKLFEKTKNQLRENAEDMGNGCFKIYHKCDNTCIGSIRNGTYDHDAYRDEALNNRFQIKGVELKSGYKDWILWISFAISCFLLCVALLGFIMWACQKGNIRCNICI

SEQ ID NO: 8251 - protein, 566 aa, Artificial Sequence
  derived and/or modified protein sequence (wt) from hemagglutinin__InfluenzaA__AFB77692
MKTIIALSYILCLVFAQKLPGNDNSTATLCLGHHAVPNGTIVKTITNDQIEVTNATELVQNSSTGEICDSPHQILDGENCTLIDALLGDPQCDGFQNKKWDLFVERSKAYSNCYPYDVPDYASLRSLVASSGTLEFNNESFNWTGVTQNGTSSACIRRSNNSFFSRLNWLTHLNFKYPALNVTMPNNEQFDKLYIWGVHHPGTDKDQIFLYAQASGRITVSTKRSQQAVIPNTGSRPRVRNIPSRISIYWTIVKPGDILLINSTGNLIAPRGYFKIRSGKSSIMRSDAPIGKCNSECITPNGSIPNDKPFQNVNRITYGACPRYVKQNTLKLATGMRNVPEKQTRGIFGAIAGFIENGWEGMVDGWYGFRHQNSEGRGQAADLKSTQAAIDQINGKLNRLIGKTNEKFHQIEKEFSEVEGRIQDLEKYVEDTKIDLWSYNAELLVALENQHTIDLTDSEMNKLFEKTKKQLRENAEDMGNGCFKIYHKCDNACIGSIRNGTYDHDVYRDEALNNRFQIKGVELKSGYKDWILWISFAISCFLLCVALLGFIMWACQKGNIRCNICI

SEQ ID NO: 8252 - protein, 566 aa, Artificial Sequence; identical to SEQ ID NO: 7782
  derived and/or modified protein sequence (wt) from hemagglutinin__InfluenzaA__AFB77693

SEQ ID NO: 8253 - protein, 566 aa, Artificial Sequence
  derived and/or modified protein sequence (wt) from hemagglutinin__InfluenzaA__AFB77694
MKTIIALSYILCLVFAQKLPGNDNSTATLCLGHHAVPNGTIVKTIANDQIEVTNATELVQNSSTGEICDSPHQILDGENCTLIDALLGDPQCDDFQNKKWDLFVERSKAYSNCYPYDVPDYASLRSLVASSGTLEFNNESFNWTGVTQNGTSSACIRRSNNSFFSRLNWLTHLNFKYPALNVTMPNNEQFDKLYIWGVHHPGTDKDQIFLYAQASGRITVSTKRSQQAVIPNIGSRPRVRNIPSRISIYWTIVKPGDILLINSTGNLIAPRGYFKIRSGKSSIMRSDAPIGKCNSECITPNGSIPNDKPFQNVNRITYGACPRYVKQNTLKLATGMRNVPEKQTRGIFGAIAGFIENGWEGMVDGWYGFRHQNSEGRGQAADLKSTQAAIDQINGKLNRLIGKTNEKFHQIEKEFSEVEGRIQDLEKYVEDTKIDLWSYNAELLVALENQHTIDLTDSEMNKLFEKTKKQLRENAEDMGNGCFKIYHKCDNTCIGSIRNGTYDHDVYRDEALNNRFQIKGVELKSGYKDWILWISFAISCFLLCVALLGFIMWACQKGNIRCNICI

SEQ ID NO: 8254 - protein, 566 aa, Artificial Sequence
  derived and/or modified protein sequence (wt) from hemagglutinin__InfluenzaA__AFB77695
MKTIIALSYILCLVFAQKLPGNDNSTATLCLGHHAVPNGTIVKTITNDQIEVTNATELVQNSSTGEICDSPHQILDGENCTLIDALLGDPQCDDFQNKKWDLFVERSKAYSNCYPYDVPDYASLRSLVASSGTLEFNNESFNWTGVTQNGTSSACIRRSNNSFFSRLNWLTHLNFKYPALNVTMPNNEQFDKLYIWGVHHPGTDKDQIFLYAQASGRITVSTKRSQQAVIPNIGSRPRVRNIPSRISIYWTIVKPGDILLINSTGNLIAPRGYFKIRSGKSSIMRSDAPIGKCNSECITPNGSIPNDKPFQNVNRITYGACPRYVKQNTLKLATGMRNVPEKQTRGIFGAIAGFIENGWEGMVDGWYGFRHQNSEGRGQAADLKSTQAAIDQINGKLNRLIGKTNEKFHQIEKEFSEVEGRIQDLEKYVEDTKIDLWSYNAELLVALENQHTIDLTDSEMNKLFEKTKKQLRENAEDMGNGCFKIYHKCDNACIGSIRNGTYDHDVYRDEALNNRFQIKGVELKSGYKDWILWISFAISCFLLCVALLGFIMWACQKGNIRCNICI

SEQ ID NO: 8255 - protein, 566 aa, Artificial Sequence
  derived and/or modified protein sequence (wt) from hemagglutinin__InfluenzaA__AFB78126
MKTIIALSYILCLVFAQKLPGNDNSTATLCLGHHAVSNGTLVKTITNDQIEVTNATELVQSSSTGRICDSPHQILDGENCTLIDALLGDPHCDGFQNKEWDLFVERSKAYSNCYPYDVPDYASLRSLVASSGTLEFNNESFNWTGVAQDGTSSACKRRSNKSFFSRLNWLHQLKYKYPALNVTMPNNEKFDKLYIWGVHHPSTDSDQISIYAQASGRVTVSTKRSQQTVIPNIGSSPWVRGASSRISIYWTIVKPGDILLINSTGNLIAPRGYFKIRSGKSSIMRSDAPIGKCNSECITPNGSIPNDKPFQNVNRITYGACPRYVKQNTLKLATGMRNVPEKQTRGIFGAIAGFIENGWEGMVDGWYGFRHQNSEGTGQAADLKSTQAATNQINGKLNRLIEKTNEKFHQIEKEFSEVEGRIQDLEKYVEDTKIDLWSYNAELLVALENQHTIDLTDSEMNKLFERTKKQLRENAEDMGNGCFKIYHKCDNACIGSIRNGTYDHDVYRDEALNNRFQIKGVELKSGYKDWILWISFAISCFLLCVVLLGFIMWACQKGNIRCNICI

SEQ ID NO: 8256 - protein, 566 aa, Artificial Sequence
  derived and/or modified protein sequence (wt) from hemagglutinin__InfluenzaA__AFC34056
MKTIIALSYILCLVFAQKLPGNDNSTATLCLGHHAVPNGTIVKTITNDQIEVTNATELVQSSSTGEICDSPHQILDGENCTLIDALLGDPQCDGFQNKKWDLFVERSKAYSNCYPYDVPDYASLRSLVASSGTLEFNNESFNWTGVTQNGTSSACIRRSNSSFFSRLNWLTHLNFKYPALNVTMPNNEQFDKLYIWGVHHPGTDKDQIFLYAQSSGRITVSTKRSQQAVIPNIGSRPRIRNIPSRISIYWTIVKPGDILLINSTGNLIAPRGYFKIRSGKSSIMRSDAPIGKCNSECITPNGSIPNDKPFQNVNRITYGACPRYVKQRTLKLATGMRNVPEKQTRGIFGAIAGFIENGWEGMVDGWYGFRHQNSEGRGQAADLKSTQAAIDQINGKLNRLIGKTNEKFHQIEKEFSEVEGRIQDLEKYVEDTKIDLWSYNAELLVALENQHTIDLTDSEMNKLFEKTKKQLRENAEDMGNGCFKIYHKCDNACIGSIRNGTYNHDVYRDEALNNRFQIKGVELKSGYKDWILWISFAISCFLLCVALLGFIMWACQKGNIRCNICI

SEQ ID NO: 8257 - protein, 566 aa, Artificial Sequence; identical to SEQ ID NO: 8256
  derived and/or modified protein sequence (wt) from hemagglutinin__InfluenzaA__AFC34057

SEQ ID NO: 8258 - protein, 566 aa, Artificial Sequence
  derived and/or modified protein sequence (wt) from hemagglutinin__InfluenzaA__AFD32426
MKANLLVLLSALAAADADTICIGYHANNSTDTVDTVLEKNVTVTHSVNLLEDSHNGKLCKLRGVAPLHLGKCNIAGRILGNPECESLSTASSWSYIVETPSSDNGTCYPGDFIDYEELREQLSSVSSFERFEIFPKTSSWPNHDSNKGVTAACPHAGAKSFYKNLIWLVKKGNSYPKLSKSYINDKGKEVLVLWGIHHPSTSADQQSLYQNADTYVFVGSSRYSKKFKPEIAIRPKVRDQEGRMNYYWTLVEPGDKITFEATGNLVVPRYAFAMERNAGSGIIISDTPVHDCNTKCQTPLGAINSSLPYQNIHPVTIGECPKYVRSAKLRMVTGLRNTPSIQSRGLFGAIAGFIEGGWTGMIDGWYGYHHQNEQGSGYAADQKSTQNAINGITNKVNTVIEKMNIQFTAVGKEFNKLEKRMENLNKKVDDGFLDIWTYNAELLVLLENERTLDFHDSNVKNLYEKVKSQLKNNAKEIGNGCFEFYHKCDNECMESVRNGTYDYPKYSEESKLNREKVDGVKLESMGIYQILAIYSTVASSLVLLVSLGAISFWMCSNGSLQCRICI

SEQ ID NO: 8259 - protein, 565 aa, Artificial Sequence
  derived and/or modified protein sequence (wt) from hemagglutinin__InfluenzaA__AFD32427
MKANLLVLLSALAAADADTICIGYHANNSTDTVDTVLEKNVTVTHSVNLLEDSHNGKLCDLDGVKPLILRDCSVAGWLLGNPMCDEFINVPEWSYIVEKANPVNDLCYPGDFNDYEELKHLLSRINHFEKIQIIPKSSWSSHEASLGVSSACPYQGKSSFFRNVVWLIKKNSTYPTIKRSYNNTNQEDLLVLWGIHHPNDAAEQTKLYQNPTTYISVGTSTLNQRLVPRIATRSKVNGQSGRMEFFWTILKPNDAINFESNGNFIAPEYAYKIVKKGDSTIMKSELEYGNCNTKCQTPLGAINSSLPYQNIHPVTIGECPKYVRSAKLRMVTGLRNTPSIQSRGLFGAIAGFIEGGWTGMIDGWYGYHHQNEQGSGYAADQKSTQNAINGITNKVNTVIEKMNIQFTAVGKEFNKLEKRMENLNKKVDDGFLDIWTYNAELLVLLENERTLDFHDSNVKNLYEKVKSQLKNNAKEIGNGCFEFYHKCDNECMESVRNGTYDYPKYSEESKLNREKVDGVKLESMGIYQILAIYSTVASSLVLLVSLGAISFWMCSNGSLQCRICI

SEQ ID NO: 8260 - protein, 573 aa, Artificial Sequence
  derived and/or modified protein sequence (wt) from hemagglutinin__InfluenzaA__AFD32428
MKTIIALSYILCLVFAQKLPGNDNSTATLCLGHHAVPNGTIVKTITNDQIEVTNATELVQSSSTGEICDLDGVKPLILRDCSVAGWLLGNPMCDEFINVPEWSYIVEKANPVNDLCYPGDFNDYEELKHLLSRINHFEKIQIIPKSSWSSHEASLGVSSACPYQGKSSFFRNVVWLIKKNSTYPTIKRSYNNTNQEDLLVLWGIHHPNDAAEQTKLYQNPTTYISVGTSTLNQRLVPRIATRSKVNGQSGRMEFFWTILKPNDAINFESNGNFIAPEYAYKIVKKGDSTIMKSELEYGNCNSECITPNGSIPNDKPFQNVNRITYGACPRYVKQNTLKLATGMRNVPEKQTRGIFGAIAGFIENGWEGMVDGWYGFRHQNSEGRGQAADLKSTQAAIDQINGKLNRLIGKTNEKFHQIEKEFSEVEGRIQDLEKYVEDTKIDLWSYNAELLVALENQHTIDLTDSEMNKLFEKTKKQLRENAEDMGNGCFKIYHKCDNACIGSIRNGTYDHDVYRDEALNNRFQIKGVELKSGYKDWILWISFAISCFLLCVALLGFIMWACQKGNIRCNICI

SEQ ID NO: 8261 - protein, 567 aa, Artificial Sequence
  derived and/or modified protein sequence (wt) from hemagglutinin__InfluenzaA__AFD32429
MKTIIALSYILCLVFAQKLPGNDNSTATLCLGHHAVPNGTIVKTITNDQIEVTNATELVQSSSTGEICTQGKRPTDLGQCGLLGTLIGPPQCDQFLEFDADLIIERREGTDVCYPGKFTNEESLRQILRGSGGIDKESMGFTYSGIRTNGATSACRRSGSSFYAEMKWLLSNSDNAEFPQMTKSYRNPRNKPALIIWGVHHSGSATEQTKLYGSGNKLITVGSSKYQQSFTPSPGARPQVNGQSGRIDFHWLLLDPNDTVTFTFNGAFIAPDRASFFRGESLGVQSDVPLDSGCNSECITPNGSIPNDKPFQNVNRITYGACPRYVKQNTLKLATGMRNVPEKQTRGIFGAIAGFIENGWEGMVDGWYGFRHQNSEGRGQAADLKSTQAAIDQINGKLNRLIGKTNEKFHQIEKEFSEVEGRIQDLEKYVEDTKIDLWSYNAELLVALENQHTIDLTDSEMNKLFEKTKKQLRENAEDMGNGCFKIYHKCDNACIGSIRNGTYDHDVYRDEALNNRFQIKGVELKSGYKDWILWISFAISCFLLCVALLGFIMWACQKGNIRCNICI

SEQ ID NO: 8262 - protein, 566 aa, Artificial Sequence; identical to SEQ ID NO: 73
  derived and/or modified protein sequence (wt) from hemagglutinin__InfluenzaA__AFD63527

SEQ ID NO: 8263 - protein, 566 aa, Artificial Sequence
  derived and/or modified protein sequence (wt) from hemagglutinin__InfluenzaA__AFD63538
MKTIIALSYILCLVFAQKLPGNDNSTATLCLGHHAVPNGTIVKTITNDQIEVTNATELVQSSSTGGICDSPHQILDGENCTLIDALLGDPQCDGFQNKKWDLFVERSKAYSNCYPYDVPDYASLRSIVASSGTLEFNNESFNWTGVTQNGTSSACKRKSNKSFFSRLNWLTHLKYKYPALNVTMPNNEKFDKLYIWGVHHPGTDNDQISLYAQASGRITVSTKRSQQTVIPNIGSRPRVRDVSSRISIYWTIVKPGDILLINSTGNLIAPRGYFKIRSGKSSIMRSDAPIGKCNSECITPNGSIPNDKPFQNVNRITYGACPRYVKQNTLKLATGMRNVPEKQTRGIFGAIAGFIENGWEGMVDGWYGFRHQNSEGTGQAADLKSTQAAINQINGKLNRLIGKTNEKFHQIEKEFSEVEGRIQDLEKYVEDTKIDLWSYNAELLVALENQHTIDLTDSEMNKLFERTKKQLRENAEDMGNGCFKIYHKCDNACIGSIRNGTYDHDVYRDEALNNRYQIKGVELKSGYKDWILWISFAISCFLLCVALLGFIMWACQKGNIRCNICI

SEQ ID NO: 8264 - protein, 566 aa, Artificial Sequence
  derived and/or modified protein sequence (wt) from hemagglutinin__InfluenzaA__AFD63549
MKTIIALSYILCLVFAQKLPGNDNSTATLCLGHHAVPNGTIVKTITNDQIEVTNATELVQISSTGGICDSPHQILDGENCTLIDALLGDPQCDGFQNKKWDLFVERSKAYSNCYPYDVPDYASLRSLVASSGTLEFNNESFDWTGVTQNGTSSACKRRSNKSFFSRLNWLTHLKYKYPALNVTMPNNEKFDKLYIWGVHHPGTDNDQISLYAQASGRITVSTKRSQQTVIPNIGSRPRVRDVSSRISIYWTIVKPGDILLINSTGNLIAPRGYFKIRSGKSSIMRSDAPIGKCNSECITPNGSIPNDKPFQNVNRITYGACPRYVKQNTLKLATGMRNVPEKQTRGIFGAIAGFIENGWEGMVDGWYGFRHQNSEGTGQAADLKSTQAAINQINGKLNRLIGKTNEKFHQIEKEFSEVEGRIQDLEKYVEDTKIDLWSYNAELLVALENQHTIDLTDSEMNKLFERTKKQLRENAEDMGNGCFKIYHKCDNACIGSIRNGTYDHDVYRDEALNNRFQIKGVELKSGYKDWILWISFAISCFLLCVALLGFIMWACQKGNIRCNICI

SEQ ID NO: 8265 - protein, 566 aa, Artificial Sequence; identical to SEQ ID NO: 73
  derived and/or modified protein sequence (wt) from hemagglutinin__InfluenzaA__AFD63571

SEQ ID NO: 8266 - protein, 566 aa, Artificial Sequence
  derived and/or modified protein sequence (wt) from hemagglutinin__InfluenzaA__AFD63615
MKTIIALSYILCLVFAQKLPGNDNSTATLCLGHHAVPNGTIVKTITNDQIEVTNATELVQSSSTGGICDSPHQILDGENCTLIDALLGDPQCDGFQNKKWDLFVERSKAYSNCYPYDVPDYASLRSLVASSGTLEFNNESFNWTGVTQNGTSSACKRKSNKSFFSRLNWLTHLKYKYPALNVTMPNNEKFDKLYIWGVHHPGTDNDQISLYAQASGRITVSTKRSQQTVIPNIGSRPRVRDVSSRISIYWTIVKPGDILLINSTGNLIAPRGYFKIRSGKSSIMRSDAPIGKCNSECITPNGSIPNDKPFQNVNRITYGACPRYVKQNTLKLATGMRNVPEKQTRGIFGAIAGFIENGWEGMVDGWYGFRHQNSEGTGQAADLKSTQAAINQINGKLNRLIGKTNEKFHQIEKEFSEVEERIQDLEKYVEDTKIDLWSYNAELLVALENQHTIDLTDSEMNKLFERTKKQLRENAEDMGNGCFKIYHKCDNACIGSIRNGTYDHDVYRDEALNNRFQIKGVELKSGYKDWILWISFAISCFLLCVALLGFIMWACQKGNIRCNICI

SEQ ID NO: 8267 - protein, 566 aa, Artificial Sequence
  derived and/or modified protein sequence (wt) from hemagglutinin__InfluenzaA__AFD63626
MKTIIALSYILCLVFAQKLPGNDNSTATLCLGHHAVPNGTIVKTITNDQIEVTNATELVQISSTGGICDSPHQILDGENCTLIDALLGDPQCDGFQNKKWDLFVERSKAYSNCYPYDVPDYASLRSLVASSGTLEFNNESFDWTGVTQNGTSSACKRRSNKSFFSRLNWLTHLKYKYPALNVTMPNNEKFDKLYIWGVHHPGTDSDQISLYAQASGRITVSTKRSQQTVIPNIGSRPRVRDISSRISIYWTIVKPGDILLINSTGNLIAPRGYFKIRSGKSSIMRSDAPIGKCNSECITPNGSIPNDKPFQNVNRITYGACPRYVKQNTLKLATGMRNVPEKQTRGIFGAIAGFIENGWEGMVDGWYGFRHQNSEGTGQAADLKSTQAAINQINGKLNRLIGKTNEKFHQIEKEFSEVEGRIQDLEKYVEDTKIDLWSYNAELLVALENQHTIDLTDSEMNKLFERTKKQLRENAEDMGNGCFKIYHKCDNACIGSIRNGTYDHDVYRDEALNNRFQIKGVELKSGYKDWILWISFAISCFLLCVALLGFIMWACQKGNIRCNICI

SEQ ID NO: 8268 - protein, 566 aa, Artificial Sequence
  derived and/or modified protein sequence (wt) from hemagglutinin__InfluenzaA__AFD63637
MKTIIALSYILCLVFAQKLPGNDNSTATLCLGHHAVPNGTIVKTITNDQIEVTNATELVQISSTGGICDSPHQILDGENCTLIDALLGDPQCDGFQNKKWDLFVERSKAYSNCYPYDVPDYASLRSLVASSGTLEFNNESFDWTGVTQNGTSSTCKRRSNKSFFSRLNWLTHLKYKYPALNVTMPNNEKFDKLYIWGVHHPGTDSDQISLYAQASGRITVSTKRSQQTVIPNIGSRPRVRDVSSRISIYWTIVKPGDILLINSTGNLIAPRGYFKIRSGKSSIMRSDAPIGKCNSECITPNGSIPNDKPFQNVNRITYGACPRYVKQNTLKLATGMRNVPEKQTRGIFGAIAGFIENGWEGMVDGWYGFRHQNSEGTGQAADLKSTQAAINQINGKLNRLIGKTNEKFHQIEKEFSEVEGRIQDLEKYVEDTKIDLWSYNAELLVALENQHTIDLTDSEMNKLFERTKKQLRENAEDMGNGCFKIYHKCDNACIGSIRNGTYDHDVYRDEALNNRFQIKGVELKSGYKDWILWISFAISCFLLCVALLGFIMWACQKGNIRCNICI

SEQ ID NO: 8269 - protein, 566 aa, Artificial Sequence
  derived and/or modified protein sequence (wt) from hemagglutinin__InfluenzaA__AFD63648
MKTIIALSYILCLVFAQKLPGNDNSMATLCLGHHAVPNGTIVKTITNDQIEVTNATELVQISSTGGICDSPHQILDGENCTLIDALLGDPQCDGFQNKKWDLFVERSKAYSNCYPYDVPDYASLRSLVASSGTLEFNNESFDWTGVTQNGTSSACKRRSNKSFFSRLNWLTHLKYKYPALNVTMPNNEKFDKLYIWGVHHPGTDSDQISLYAQASGRITVSTKRSQQTVIPNIGSRPRVRDVSSRISIYWTIVKPGDILLINSTGNLIAPRGYFKIRSGKSSIMRSDAPIGKCNSECITPNGSIPNDKPFQNVNRITYGACPRYVKQNTLKLATGMRNVPEKQTRGIFGAIAGFIENGWEGMVDGWYGFRHQNSEGTGQAADLKSTQAAINQINGKLNRLIGKTNEKFHQIEKEFSEVEGRIQDLEKYVEDTKIDLWSYNAELLVALENQHTIDLTDSEMNKLFERTKKQLRENAEDMGNGCFKIYHKCDNACIGSIRNGTYDHDVYRDEALNNRFQIKGVELKSGYKDWILWISFAISCFLLCVALLGFIMWACQKGNIRCNICI

SEQ ID NO: 8270 - protein, 566 aa, Artificial Sequence; identical to SEQ ID NO: 73
  derived and/or modified protein sequence (wt) from hemagglutinin__InfluenzaA__AFD63659

SEQ ID NO: 8271 - protein, 566 aa, Artificial Sequence
  derived and/or modified protein sequence (wt) from hemagglutinin__InfluenzaA__AFD63681
MKTIIALSYILCLVFAQKLPGNDNSTATLCLGHHAVPNGTIVKTITNDQIEVTNATELVQSSSTGGICDSPHQILDGENCTLIDALLGDPQCDGFQNKKWDLFVERSKAYSNCYPYDVPDYASLRSLVASSGTLEFNNESFNWTGVTQNGTSSACKRKSNKSFFSRLNWLTHLKYKYPALNVTMPNNEKFDKLYIWGVHHPGTDNDQISLYAQASGRITVSTKRSQQTVIPNIGSRPRVRDVSSRISIYWTIVKPGDILLINSTGNLIAPRGYFKVRSGKSSIMRSDAPIGKCNSECITPNGSIPNDKPFQNVNRITYGACPRYVKQNTLKLATGMRNVPEKQTRGIFGAIAGFIENGWEGMVDGWYGFRHQNSEGTGQAADLKSTQAAINQINGKLNRLIGKTNEKFHQIEKEFSEVEGRIQDLEKYVEDTKIDLWSYNAELLVALENQHTIDLTDSEMNKLFERTKKQLRENAEDMGNGCFKIYHKCDNACIGSIRNGTYDHDVYRDEALNNRFQIKGVELKSGYKDWILWISFAISCFLLCVALLGFIMWACQKGNIRCNICI

SEQ ID NO: 8272 - protein, 566 aa, Artificial Sequence
  derived and/or modified protein sequence (wt) from hemagglutinin__InfluenzaA__AFD63692
MKTIIALSYILCLVFAQKLPGNDNSTATLCLGHHAVPNGTIVKTITNDQIEVTNATELVQSSSTGGICDSPHQILDGENCTLIDALLGDPQCDGFQNKKWDLFVERSKAYSNCYPYDVPDYASLRSLVASSGTLEFNNESFDWTGVTQNGTSSACKRRSNKSFFSRLNWLTHLKYKYPALNVTMPNNEKFDKLYIWGVLHPGTDSDQISLYAQASGRITVSTKRSQQTVIPNIGSRPRVRDVSSRISIYWTIVKPGDILLINSTGNLIAPRGYFKIRSGKSSIMRSDAPIGKCNSECITPNGSIPNDKPFQNVNRITYGACPRYVKQNTLKLATGMRNVPEKQTRGIFGAIAGFIENGWEGMVDGWYGFRHQNSEGTGQAADLKSTQAAINQINGKLNRLIGKTNEKFHQIEKEFSEVEGRIQDLEKYVEDTKIDLWSYNAELLVALENQHTIDLTDSEMNKLFERTKKQLRENAEDMGNGCFKIYHKCDNACIGSIRNGTYDHDVYRDEALNNRFQIKGVELKSGYKDWILWISFAISCFLLCVALLGFIMWACQKGNIRCNICI

SEQ ID NO: 8273 - protein, 566 aa, Artificial Sequence
  derived and/or modified protein sequence (wt) from hemagglutinin__InfluenzaA__AFD63703
MKTIIALSYILCLVFAQKLPGNDNSTATLCLGHHAVPNGTIVKTITNDQIEVTNATELVQISSTSGICDSPYQILDGENCTLIDALLGDPQCDGFQNKKWDLFVERSKAYSNCYPYDVPDYASLRSLVASSGTLEFNNESFDWTGVTQNGTSSACKRRSNKSFFSRLNWLTHLKYKYPALNVTMPNNEKFDKLYIWGVHHPGTDSDQISLYAQASGRITVSTKRSQQTVIPNIGSRPRVRDVSSQISIYWTIVKPGDILLINSTGNLIAPRGYFKIRSGKSSIMRSDAPIGKCNSECITPNGSIPNDKPFQNVNRITYGACPRYVKQNTLKLATGMRNVPEKQTRGIFGAIAGFIENGWEGMVDGWYGFRHQNSEGTGQAADLKSTQAAINQINGKLNRLIGKTNEKFHQIEKEFSEVEGRIQDLEKYVEDTKIDLWSYNAELLVALENQHTIDLTDSEMNKLFERTKKQLRENAEDMGNGCFKIYHKCDNACIGSIRNGTYDHDVYRDEALNNRFQIKGVELKSGYKDWILWISFAISCFLLCVALLGFIMWACQKGNIRCNICI

SEQ ID NO: 8274 - protein, 566 aa, Artificial Sequence
  derived and/or modified protein sequence (wt) from hemagglutinin__InfluenzaA__AFD63714
MKTIIALSYILCLVFAQKLPGNDNSTATLCLGHHAVPNGTIVKTITNDQIEVTNATELVQISSTGGICDSPHQILDGENCTLIDALLGDPQCDGFQNKKWDLFVERSKAYSNCYPYDVPDYASLRSLVASSGTLEFNNESFDWTGVTQNGTSSTCKRRSNKSFFSRLNWLTHLKYKYPALNVTMPNNEKFDKLYIWGVHHPGTDNDQISLYAQASGRITVSTKRSQQTVIPNIGSRPRVRDVSSRISIYWTIVKPGDILLINSTGNLIAPRGYFKIRSGKSSIMRSDAPIGKCNSECITPNGSIPNDKPFQNVNRITYGACPRYVKQNTLKLATGMRNVPEKQTRGIFGAIAGFIENGWEGMVDGWYGFRHQNSEGTGQAADLKSTQAAINQINGKLNRLIGKTNEKFHQIEKEFSEVEGRIQDLEKYVEDTKIDLWSYNAELLVALENQQTIDLTDSEMNKLFERTKKQLRENAEDMGNGCFKIYHKCDNACIGSIRNGTYDHDVYRDEALNNRFHIKGVELKSGYKDWILWISFAISCFLLCVALLGFIMWACQKGNIRCNICI

SEQ ID NO: 8275 - protein, 566 aa, Artificial Sequence
  derived and/or modified protein sequence (wt) from hemagglutinin__InfluenzaA__AFD63736
MKTIIALSYILCLVFAQKLPGNDNSTATLCLGHHAVPNGTIVKTITNDQIEVTNATELVQISSTGGICDSPHQILDGENCTLIDALLGDPQCDGFQNKKWDLFVERSKAYSNCYPYDVPDYASLRSLVASSGTLEFNNESFDWTGVTQNGTSSTCKRRSNKSFFSRLNWLTHLKYKYPALNVTMPNNEKFDKLYIWGVHHPGTDNDQISLYAQASGRITVSTKRSQQTVIPNIGSRPRVRDVSSRISIYWTIVKPGDILLINSTGNLIAPRGYFKIRSGKSSIMRSDAPIGKCNSECITPNGSIPNDKPFQNVNRITYGACPRYVKQNTLKLATGMRNVPEKQTRGIFGAIAGFIENGWEGMVDGWYGFRHQNSEGTGQAADLKSTQAAINQINGKLNRLIGKTNEKFHQIEKEFSEVEGRIQDLEKYVEDTKIDLWSYNAELLVALENQHTIDLTDSEMNKLFERTKKQLRENAEDMGNGCFKIYHKCDNACIGSIRNGTYDHDVYRDEALNNRFHIKGVELKSGYKDWILWISFAISCFLLCVALLGFIMWACQKGNIRCNICI

SEQ ID NO: 8276 - protein, 566 aa, Artificial Sequence
  derived and/or modified protein sequence (wt) from hemagglutinin__InfluenzaA__AFD63747
MKTIIALSYILCLVFAQKLPGNDNSTATLCLGHHAVPNGTIVKTITNDQIEVTNATELVQSSSTGGICDSPHQILDGENCTLIDALLGDPQCDGFQNKKWDLFVERSKAYSNCYPYDVPDYASLRSLVASSGTLEFNNESFDWTGVTQNGTSSACKRRSNKSFFSRLNWLTHLKYKYPALNVTMPNNEKFDKLYIWGVHHPGTDSDQISLYAQASGRITVSTKRSQQTVIPNIGSRPRVRDVSSRISIYWTIVKPGDILLINSTGNLIAPRGYFKIRSGKSSIMRSDAPIGKCNSECITPNGSIPNDKPFQNVNRITYGACPRYVKQNTLKLATGMRNVPEKQTRGIFGAIAGFIENGWEGMVDGWYGFRHQNSEGTGQAADLKSTQAAINQINGKLNRLIGKTNEKFHRIEKEFSEVEGRIQDLEKYVEDTKIDLWSYNAELLVALENQHTIDLTDSEMNKLFERTKKQLRENAEDMGNGCFKIYHKCDNACIGSIRNGTYDHDVYRDEALNNRFQIKGVELKSGYKDWILWISFAISCFLLCVALLGFIMWACQKGNIRCNICI

SEQ ID NO: 8277 - protein, 566 aa, Artificial Sequence
  derived and/or modified protein sequence (wt) from hemagglutinin__InfluenzaA__AFD63758
MKTIIALSYILCLVFAQKLPGNDNSTATLCLGHHAVPNGTIVKTITNDQIEVTNATELVQSSSTGGICDSPHQILDGENCTLIDALLGDPQCDGFQNKKWDLFVERSKAYSNCYPYDVPDYASLRSLVASSGTLEFNNESFNWTGVTQNGTSSACKRKSNKSFFSRLNWLTHLKYKYPALNVTMPNNEKFDKLYIWGVHHPGTDNDQISLYAQASGRITVSTKRSQQTVIPNIGSRPRVRDVSSRISIYWTIVKPGDILLINSTGNLIAPRGYFKIRSGKSSIMRSDAPIGKCNSECITPNGSIPNDKPFQNVNRITYGACPRYVKQNTLKLATGMRNVPEKQTRGIFGAIAGFIENGWEGMVDGWYGFRHQNSEGTGQAADLKSTQAAINQINGKLNRLIGKTNEKFHQIEKEFSEVEGRIQDLEKYVEDTKIDLWSYNAELLVALENQHTIDLTDSEMNKLFERTKKQLRENAEDMGNGCFKIYHKCDNACIGSIRNGTYDHDVYRDEALNNRFQIKGVELKSGYKDWILWISFAISCFLLCVALLGFIMWACQKGNIRCNICI

SEQ ID NO: 8278 - protein, 566 aa, Artificial Sequence
  derived and/or modified protein sequence (wt) from hemagglutinin__InfluenzaA__AFD63769
MKTIIALSYILCLVFAQKLPGNDNSTATLCLGHHAVPNGTIVKTITNDQIEVTNATELVQISSTGGICDSPHQILDGENCTLIDALLGDPQCDGFQNKKWDLFVERSKAYSNCYPYDVPDYASLRSLVASSGTLEFNNESFDWTGVTQNGTSSACKRRSNKSFFSRLNWLTHLKYKYPALNVTMPNNEKFDKLYIWGVHHPGTDNDQISLYAQASGRITVSTKRSQQTVIPNIGSRPRVRDVSSRISIYWTIVKPGDILLINSTGNLIAPRGYFKIRSGKSSIMRSDAPIGKCNSECITPNGSIPNDKPFQNVNRITYGACPRYVKQNTLKLATGMRNVPEKQTRGIFGAIAGFIENGWEGMVDGWYGFRHQNSEGTGQAADLKSTQAAINQINGKLNRLIGKTNEKFHQIEKEFSEVEGRIQDLEKYVEDTKIDLWSYNAELLVALENQHTIDLTDSEMNKLFERTKKQLRENAEDMGNGCFKIYHKCDNACIGSIRNGTYDHDVYRDEALNNRFHIKSVELKSGYKDWILWISFAISCFLLCVALLGFIMWACQKGNIRCNICI

SEQ ID NO: 8279 - protein, 566 aa, Artificial Sequence; identical to SEQ ID NO: 73
  derived and/or modified protein sequence (wt) from hemagglutinin__InfluenzaA__AFD63780

SEQ ID NO: 8280 - protein, 566 aa, Artificial Sequence; identical to SEQ ID NO: 8277
  derived and/or modified protein sequence (wt) from hemagglutinin__InfluenzaA__AFD63791

SEQ ID NO: 8281 - protein, 566 aa, Artificial Sequence; identical to SEQ ID NO: 73
  derived and/or modified protein sequence (wt) from hemagglutinin__InfluenzaA__AFD63802

SEQ ID NO: 8282 - protein, 566 aa, Artificial Sequence
  derived and/or modified protein sequence (wt) from hemagglutinin__InfluenzaA__AFD63813
MKTIIALSYILSLVFAQKFPGNDNSTATLCLGHHAVPNGTIVKTITNDQIEVTNATELVQISSTGGICDSPHQILDGENCTLIDALLGDPQCDGFQNKKWDLFVERSKAYSNCYPYDVPDYASLRSLVASSGSLEFNNESFDWTGVTQNGTSSACKRRSNKSFFSRLNWLTHLKYKYPALNVTMPNNEKFDKLYIWGVHHPGTDSDQISLYAQASGRITVSTKRSQQTVIPNIGSRPRVRDISSRISIYWTIVKPGDILLINSTGNLIAPRGYFKIRSGKSSIMRSDAPIGKCNSECITPNGSIPNDKPFQNVNRITYGACPRYVKQNTLKLATGMRNVPEKQTRGIFGAIAGFIENGWEGMVDGWYGFRHQNSEGTGQAADLKSTQAAINQINGKLNRLIGKTNEKFHQIEKEFSEVEGRIQDLEKYVEDTKIDLWSYNAELLVALENQHTIDLTDSEMNKLFERTKKQLRENAEDMGNGCFKIYHKCDNACIGSIRNGTYDHDVYRDEALNNRFQIKGVELKSGYKDWILWISFATSCFLLCVALLGFIMWACQKGNIRCNICI

SEQ ID NO: 8283 - protein, 566 aa, Artificial Sequence; identical to SEQ ID NO: 8267
  derived and/or modified protein sequence (wt) from hemagglutinin__InfluenzaA__AFD63824

SEQ ID NO: 8284 - protein, 566 aa, Artificial Sequence; identical to SEQ ID NO: 73
  derived and/or modified protein sequence (wt) from hemagglutinin__InfluenzaA__AFD63846

SEQ ID NO: 8285 - protein, 566 aa, Artificial Sequence; identical to SEQ ID NO: 1311
  derived and/or modified protein sequence (wt) from hemagglutinin__InfluenzaA__AFD63857

SEQ ID NO: 8286 - protein, 566 aa, Artificial Sequence; identical to SEQ ID NO: 73
  derived and/or modified protein sequence (wt) from hemagglutinin__InfluenzaA__AFD63868

SEQ ID NO: 8287 - protein, 566 aa, Artificial Sequence; identical to SEQ ID NO: 73
  derived and/or modified protein sequence (wt) from hemagglutinin__InfluenzaA__AFD63890

SEQ ID NO: 8288 - protein, 566 aa, Artificial Sequence; identical to SEQ ID NO: 73
  derived and/or modified protein sequence (wt) from hemagglutinin__InfluenzaA__AFD63901

SEQ ID NO: 8289 - protein, 566 aa, Artificial Sequence; identical to SEQ ID NO: 73
  derived and/or modified protein sequence (wt) from hemagglutinin__InfluenzaA__AFD63912

SEQ ID NO: 8290 - protein, 566 aa, Artificial Sequence
  derived and/or modified protein sequence (wt) from hemagglutinin__InfluenzaA__AFD63923
MKTIIALSYILCLVFAQKLPGNDNSTATLCLGHHAVPNGTIVKTITNDQIEVTNATELVQSSSTGGICDSPHQILDGENCTLIDALLGDPQCDGFQNKKWDLFVERSKAYSNCYPYDVPDYASLRSLVASSGTLEFNNESFNWTGVTQNGTSSACKRKSNKSFFSRLNWLTHLKYKYPALNVTMPNNEKFDKLYIWGVHHPGTDNDQISLYAQASGRITVSTKRSQQTVIPNIGSRPRVRDISSRISIYWTIVKPGDILLINSTGNLIAPRGYFKIRSGKSSIMRSDAPIGKCNSECITPNGSIPNDKPFQNVNRITYGACPRYVKQNTLKLATGMRNVPEKQTRGIFGAIAGFIENGWEGMVDGWYGFRHQNSEGTGQAADLKSTQAAINQINGKLNRLIGKTNEKFHQIEKEFSEVEGRIQDLEKYVEDTKIDLWSYNAELLVALENQHTIDLTDSEMNKLFERTKKQLRENAEDMGNGCFKIYHKCDNACIGSIRNGTYDHDVYRDEALNNRFQIKGVELKSGYKDWILWISFAISCFLLCVALLGFIMWACQKGNIRCNICI

SEQ ID NO: 8291 - protein, 566 aa, Artificial Sequence
  derived and/or modified protein sequence (wt) from hemagglutinin__InfluenzaA__AFD63934
MKTIIALSYILCLVFAQKLPGNDNSTATLCLGHHAVPNGTIVKTITNDQIEVTNATELVQSSSTGGICDSPHQILDGENCTLIDALLGDPQCDGFQNKKWDLFVERSKAYSNCYPYDVPDYASLRSLVASSGTLEFNNESFDWTGVTQNGTSSACKRRSNKSFFSRLNWLTHLKYKYPALNVTMPNNEKFDKLYIWGVHHPGTESDQISLYAQASGRITVSTKRSQQTVIPNIGSRPRVRDVSSRISIYWTVVKPGDILLINSTGNLIAPRGYFKIRSGKSSIMRSDAPIGKCNSECITPNGSIPNDKPFQNVNRITYGACPRYVKQNTLKLATGMRNVPEKQTRGIFGAIAGFIENGWEGMVDGWYGFRHQNSEGTGQAADLKSTQAAINQINGKLNRLIGKTNEKFHQIEKEFSEVEGRIQDLEKYVEDTKIDLWSYNAELLVALENQHTIDLTDSEMNKLFERTKKQLRENAEDMGNGCFKIYHKCDNACIGSIRNGTYDHDVYRDEALNNRFQIKGVELKSGYKDWILWISFAISCFLLCVALLGFIMWACQKGNIRCNICI

SEQ ID NO: 8292 - protein, 566 aa, Artificial Sequence; identical to SEQ ID NO: 8267
  derived and/or modified protein sequence (wt) from hemagglutinin__InfluenzaA__AFD63945

SEQ ID NO: 8293 - protein, 566 aa, Artificial Sequence; identical to SEQ ID NO: 8267
  derived and/or modified protein sequence (wt) from hemagglutinin__InfluenzaA__AFD63956

SEQ ID NO: 8294 - protein, 566 aa, Artificial Sequence; identical to SEQ ID NO: 8267
  derived and/or modified protein sequence (wt) from hemagglutinin__InfluenzaA__AFD63967

SEQ ID NO: 8295 - protein, 566 aa, Artificial Sequence; identical to SEQ ID NO: 73
  derived and/or modified protein sequence (wt) from hemagglutinin__InfluenzaA__AFD63989

SEQ ID NO: 8296 - protein, 566 aa, Artificial Sequence; identical to SEQ ID NO: 73
  derived and/or modified protein sequence (wt) from hemagglutinin__InfluenzaA__AFD64000

SEQ ID NO: 8297 - protein, 566 aa, Artificial Sequence
  derived and/or modified protein sequence (wt) from hemagglutinin__InfluenzaA__AFD64011
MKTIIALSYILCLVFAQKLPGNDNSTATLCLGHHAVPNGTIVKTITNDQIEVTNATELVQSSSTGGICDSPHQILDGENCTLIDALLGDPQCDGFQNKKWDLFVERSKAYSNCYPYDVPDYASLRSLVASSGTLEFNNESFDWTGVTQNGTSSACKRRSNKSFFSRLNWLTHLKYKYPALNVTMPNNEKFDKLYIWGVHHPGTDSDQISLYAQAPGKITVSTKRSQQTVIPNIGSRPRVRDVSSRISIYWTIVKPGDILLINSTGNLIAPRGYFKIRSGKSSIMRSDAPIGKCNSECITPNGSIPNDKPFQNVNRITYGACPRYVKQNTLKLATGMRNVPEKQTRGIFGAIAGFIENGWEGMVDGWYGFRHQNSEGTGQAADLKSTQAAINQINGKLNRLIGKTNEKFHQIEKEFSEVEGRIQDLEKYVEDTKIDLWSYNAELLVALENQHTIDLTDSEMNKLFERTKKQLRENAEDMGNGCFKIYHKCDNACIGSIRNGTYDHDVYRDEALNNRFQIKGVELKSGYKDWILWISFAISCFLLCVALLGFIMWACQKGNIRCDICI

SEQ ID NO: 8298 - protein, 566 aa, Artificial Sequence; identical to SEQ ID NO: 73
  derived and/or modified protein sequence (wt) from hemagglutinin__InfluenzaA__AFD64022

SEQ ID NO: 8299 - protein, 566 aa, Artificial Sequence; identical to SEQ ID NO: 73
  derived and/or modified protein sequence (wt) from hemagglutinin__InfluenzaA__AFD64033

SEQ ID NO: 8300 - protein, 566 aa, Artificial Sequence
  derived and/or modified protein sequence (wt) from hemagglutinin__InfluenzaA__AFD64044
MKTIIALSYILCLVFAQKLPGNENSTATLCLGHHAVPNGTIVKTITNDQIEVTNATELVQSSSTGGICDSPHQILDGENCTLIDALLGDPQCDGFQNKKWDLFVERSKAYSNCYPYDVPDYASLRSLVASSGTLEFNNESFDWTGVTQNGTSSACKRRSNKSFFSRLNWLTHLKYKYPALNVTMPNNEKFDKLYIWGVHHPGTDSDQISLYAQASGRITVSTKRSQQTVIPNIGSRPRVRDVSSRISIYWTIVKPGDILLINSTGNLIAPRGYFKIRSGKSSIMRSDAPIGKCNSECITPNGSIPNDKPFQNVNRITYGACPRYVKQNTLKLATGMRNVPEKQTRGIFGAIAGFIENGWEGMVDGWYGFRHQNSEGTGQAADLKSTQAAINQINGKLNRLIGKTNEKFHQIEKEFSEVEGRIQDLEKYVEDTKIDLWSYNAELLVALENQHTIDLTDSEMNKLFERTKKQLRENAEDMGNGCFKIYHKCDNACIGSIRNGTYDHDVYRDEALNNRFQIKGVELKSGYKDWILWISFAISCFLLCVALLGFIMWACQKGNIRCNICI

SEQ ID NO: 8301 - protein, 566 aa, Artificial Sequence; identical to SEQ ID NO: 8277
  derived and/or modified protein sequence (wt) from hemagglutinin__InfluenzaA__AFD64055

SEQ ID NO: 8302 - protein, 566 aa, Artificial Sequence
  derived and/or modified protein sequence (wt) from hemagglutinin__InfluenzaA__AFD64066
MKTIIALSYILCLVFAQKLPGNDNSTATLCLGHHAVPNGTIVKTITNDQIEVTNATELVQSSSTGGICDSPHQILDGENCTLIDALLGDPQCDGFQNKKWDLFVERSKAYSNCYPYDVPDYTSLRSLVASSGTLEFNNESFNWTGVTQNGTSSACKRRSNKSFFSRLNWLTHLKFKYPALNVTMPNNEKFDKLYIWGVHHPGTDNDQISLYAQASGRITVSTKRSQQTVIPNIGSRPRVRDVPSRISIYWTIVKPGDILLINSTGNLIAPRGYFKIRSGKSSIMRSDAPIGKCNSECITPNGSIPNDKPFQNVNRITYGACPRYVKQNTLKLATGMRNVPEKQTRGIFGAIAGFIENGWEGMVDGWYGFRHQNAEGTGQAADLKSTQAAINQINGKLNRLIGKTNEKFHQIEKEFSEVEGRIQDLEKYVEDTKIDLWSYNAELLVALENQHTIDLTDSEMNKLFERTKKQLRENAEDMGNGCFKIYHKCDNACIGSIRNGTYDHDVYRDEALNNRFQIKGVELKSGYKNWILWISFAISCFLLCVALLGFIMWACQKGNIRCNICI

SEQ ID NO: 8303 - protein, 566 aa, Artificial Sequence
  derived and/or modified protein sequence (wt) from hemagglutinin__InfluenzaA__AFD64077
MKTIIALSYILCLVFAQKLPGNDNSTATLCLGHHAVPNGTIVKTITNDQIEVTNATELVQISSTGEICDSPHQILDGENCTLIDALLGDPQCDGFQNKKWDLFVERSKAYSNCYPYDVPDYASLRSLVASSGTLEFNNESFDWTGVTQNGTSSACKRRSNKSFFSRLNWLTHLKYKYPALNVTMPNNEKFDKLYIWGVHHPGTDSDQISLYAQASGRITVSTKRSQQTVIPNIGSRPRIRDVSSRISIYWTIVKPGDILLINSTGNLIAPRGYFKIRSGKSSIMRSDAPIGKCNSECITPNGSIPNDKPFQNVNRITYGACPRYVKQNTLKLATGMRNVPEKQTRGIFGAIAGFIENGWEGMVDGWYGFRHQNSEGTGQAADLKSTQAAINQINGKLNRLIGKTNEKFHQIEKEFSEVEGRIQDLEKYVEDTKIDLWSYNAELLVALENQHTIDLTDSEMNKLFERTKKQLRENAEDMGNGCFKIYHKCDNACIGSIRNGTYDHDVYRDEALNNRFQIKGVELKSGYKDWILWISFAISCFLLCVALLGFIMWACQKGNIRCNICI

SEQ ID NO: 8304 - protein, 566 aa, Artificial Sequence; identical to SEQ ID NO: 73
  derived and/or modified protein sequence (wt) from hemagglutinin__InfluenzaA__AFD64088

SEQ ID NO: 8305 - protein, 566 aa, Artificial Sequence; identical to SEQ ID NO: 73
  derived and/or modified protein sequence (wt) from hemagglutinin__InfluenzaA__AFD64099

SEQ ID NO: 8306 - protein, 566 aa, Artificial Sequence; identical to SEQ ID NO: 8277
  derived and/or modified protein sequence (wt) from hemagglutinin__InfluenzaA__AFD64110

SEQ ID NO: 8307 - protein, 566 aa, Artificial Sequence
  derived and/or modified protein sequence (wt) from hemagglutinin__InfluenzaA__AFD64121
MKTIIALSYILCLVFAQKLPGNDNSTATLCLGHHAVPNGTIVKTITNDQIEVTNATELVQSSSTGGICDSPHQILDGENCTLIDALLGDPQCDGFQNKKWDLFVERSRAYSNCYPYDVPDYASLRSLVASSGTLEFNNESFNWTGVTQNGTSSACKRKSNKSFFSRLNWLTHLKYKYPALNVTMPNNEKFDKLYIWGVHHPGTDNDQISLYAQASGRITVSTKRSQQTVIPNIGSRPRVRDVSSRISIYWTIVKPGDILLINSTGNLIAPRGYFKIRSGKSSIMRSDAPIGKCNSECITPNGSIPNDKPFQNVNRITYGACPRYVKQNTLKLATGMRNVPEKQTRGIFGAIAGFIENGWEGMVDGWYGFRHQNSEGTGQAADLKSTQAAINQINGKLNRLIGKTNEKFHQIEKEFSEVEGRIQDLEKYVEDTKIDLWSYNAELLVALENQHTIDLTDSEMNKLFERTKKQLRENAEDMGNGCFKIYHKCDNACIGSIRNGTYDHDVYRDEALNNRFQIKGVELKSGYKDWILWISFAISCFLLCVALLGFIMWACQKGNIRCNICI

SEQ ID NO: 8308 - protein, 566 aa, Artificial Sequence; identical to SEQ ID NO: 73
  derived and/or modified protein sequence (wt) from hemagglutinin__InfluenzaA__AFD64132

SEQ ID NO: 8309 - protein, 566 aa, Artificial Sequence; identical to SEQ ID NO: 8267
  derived and/or modified protein sequence (wt) from hemagglutinin__InfluenzaA__AFD64143

SEQ ID NO: 8310 - protein, 566 aa, Artificial Sequence; identical to SEQ ID NO: 73
  derived and/or modified protein sequence (wt) from hemagglutinin__InfluenzaA__AFD64154

SEQ ID NO: 8311 - protein, 566 aa, Artificial Sequence
  derived and/or modified protein sequence (wt) from hemagglutinin__InfluenzaA__AFD64179
MKTIIALSYILCLVFAQKLPGNDNSTATLCLGHHAVPNGTIVKTITNDQIEVTNATELVQISSTGGICDSPHQILDGENCTLIDALLGDPQCDGFQNKKWDLFVERSKAYSNCYPYDVPDYASLRSLVASSGTLEFNNESFDWTGVTQNGTSSACKRRSNKSFFSRLNWLTHLKYKYPALNVTMPNNEKFDKLYIWGVHHPGTDSDQISLYAQASGRITVSTKRSQQTVIPNIGSRPRVRDVSSQISIYWTIVKPGDILLINSTGNLIAPRGYFKIRSGKSSIMRSDAPIGKCNSECITPNGSIPNDKPFQNVNRITYGACPRYVKQNTLKLATGMRNVPEKQTRGIFGAIAGFIENGWEGMVDGWYGFRHQNSEGTGQAADLKSTQAAINQINGKLNRLIGKTNEKFHQIEKEFSEVEGRIQDLEKYVEDTKIDLWSYNAELLVALENQHTIDLTDSEMNKLFERTKKQLRENAEDMGNGCFKIYHKCDNACIGSIRNGTYDHDVYRDEALNNRFQIKGVELKSGYKDWILWISFAISCFLLCVALLGFIMWACQKGNIRCNICI

SEQ ID NO: 8312 - protein, 566 aa, Artificial Sequence; identical to SEQ ID NO: 8311
  derived and/or modified protein sequence (wt) from hemagglutinin__InfluenzaA__AFD64190

SEQ ID NO: 8313 - protein, 566 aa, Artificial Sequence; identical to SEQ ID NO: 8267
  derived and/or modified protein sequence (wt) from hemagglutinin__InfluenzaA__AFD64201

SEQ ID NO: 8314 - protein, 566 aa, Artificial Sequence; identical to SEQ ID NO: 8277
  derived and/or modified protein sequence (wt) from hemagglutinin__InfluenzaA__AFD64212

SEQ ID NO: 8315 - protein, 566 aa, Artificial Sequence
  derived and/or modified protein sequence (wt) from hemagglutinin__InfluenzaA__AFD64223
MKTIIALSYILCLVFAQKLPGNDNSTATLCLGHHAVPNGTIVKTITNDQIEVTNATELVQSSSTGGICDSPHQILDGENCTLIDALLGDPQCDGFQNKKWDLFVERSKAYSNCYPYDVPDYASLRSLVASSGTLEFNNESFNWTGVTQNGTSSACKRRSNKSFFSRLNWLTHLKYKYPALNVTMPNNEKFDKLYIWGVLHPGTDSDQIRLYAQASGRITVSTKRSQQTVIPNIGSRPRVRDVSSRISIYWTIVKPGDILLINSTGNLIAPRGYFKIRSGKSSIMRSDAPIGKCNSECITPNGSIPNDKPFQNVNRITYGACPRYIKQNTLKLATGMRNVPEKQTRGIFGAIAGFIENGWEGMVDGWYGFRHQNSEGTGQAADLKSTQAAINQINGKLNRLIGKTNEKFHQIEKEFSEVEGRIQDLEKYVEDTKIDLWSYNAELLVALENQYTIDLTDSEMNKLFERTKKQLRENAEDMGNGCFKIYHKCDNACIGSIRNGTYDHDVYRDEALNNRFQIKGVELKSGYKDWILWISFAISCFLLCVALLGFIMWACQKGNIRCNICI

SEQ ID NO: 8316 - protein, 566 aa, Artificial Sequence
  derived and/or modified protein sequence (wt) from hemagglutinin__InfluenzaA__AFD64315
MKTIIALSYILCLVFAQKLPGNDNSTATLCLGHHAVPNGTIVKTITNDQIEVTNATELVQISSTGGICDSPHQILDGENCTLIDALLGDPQCDGFQNKKWDLFVERSKAYSNCYPYDVPDYASLRSLVASSGTLEFNNESFDWTGVTQNGTSSACKRRSNKSFFSRLNWLTHLKYKYPALNVTMPNNEKFDKLYIWGVHHPGTDSDQISLYAQASGRITVSTKRSQQTVIPNIGSRPRVRDVSSRISIYWTIVKPGDILLINSTGNLIAPRGYFKIRSGKSSIMRSDAPIGKCNSECITPNGSIPNDKPFQNVNRITYGACPRYVKQNTLKLATGMRNVPEKQTRGIFGAIAGFIENGWEGMVDGWYGFRHQNSEGTGQAADLKSTQAAINQINGKLNRLIGKTNEKFHQIEKEFSEVEGRIQDLEKYVEDTKIDLWSYNAELLVALENQHTIDLTDSEMNKLFERTKNQLRENAEDMGNGCFKIYHKCDNACIGSIRNGTYDHDVYRDEALNNRFQIKGVELKSGYKDWILWISFAISCFLLCVALLGFIMWACQKGNIRCNICI

SEQ ID NO: 8317 - protein, 566 aa, Artificial Sequence; identical to SEQ ID NO: 8307
  derived and/or modified protein sequence (wt) from hemagglutinin__InfluenzaA__AFD64326

SEQ ID NO: 8318 - protein, 566 aa, Artificial Sequence; identical to SEQ ID NO: 8277
  derived and/or modified protein sequence (wt) from hemagglutinin__InfluenzaA__AFD64337

SEQ ID NO: 8319 - protein, 566 aa, Artificial Sequence; identical to SEQ ID NO: 73
  derived and/or modified protein sequence (wt) from hemagglutinin__InfluenzaA__AFD64348

SEQ ID NO: 8320 - protein, 566 aa, Artificial Sequence; identical to SEQ ID NO: 8277
  derived and/or modified protein sequence (wt) from hemagglutinin__InfluenzaA__AFD64359

SEQ ID NO: 8321 - protein, 566 aa, Artificial Sequence
  derived and/or modified protein sequence (wt) from hemagglutinin__InfluenzaA__AFD64370
MKTIIALSYILCLVFAQKLPGNDNSTATLCLGHHAVPNGTIVKTITNDQIEVTNATELVQSSSTGGICDSPHQILDGENCTLIDALLGDPHCDGFQNKKWDLFVERSKAYSNCYPYDVPDYASLRSLVASSGTLEFNNESFNWTGVTQNGTSSACKRKSNKSFFSRLNWLTHLKYKYPALNVTMPNNEKFDKLYIWGVHHPGTDNDQISLYAQASGRITVSTKRSQQTVIPNIGSRPRVRDISSRISIYWTIVKPGDILLINSTGNLIAPRGYFKIRSGKSSIMRSDAPIGKCNSECITPNGSIPNDKPFQNVNRITYGACPRYVKQNTLKLATGMRNVPEKQTRGIFGAIAGFIENGWEGMVDGWYGFRHQNSEGTGQAADLKSTQAAINQINGKLNRLIGKTNEKFHQIEKEFSEVEGRIQDLEKYVEDTKIDLWSYNAELLVALENQHTIDLTDSEMNKLFERTKKQLRENAEDMGNGCFKIYHKCDNACIGSIRNGTYDHDVYRDEALNNRFQIKGVELKSGYKDWILWISFAISCFLLCVALLGFIMWACQKGNIRCNICI

SEQ ID NO: 8322 - protein, 566 aa, Artificial Sequence; identical to SEQ ID NO: 73
  derived and/or modified protein sequence (wt) from hemagglutinin__InfluenzaA__AFD64381

SEQ ID NO: 8323 - protein, 566 aa, Artificial Sequence; identical to SEQ ID NO: 8277
  derived and/or modified protein sequence (wt) from hemagglutinin__InfluenzaA__AFD64392

SEQ ID NO: 8324 - protein, 566 aa, Artificial Sequence; identical to SEQ ID NO: 8267
  derived and/or modified protein sequence (wt) from hemagglutinin__InfluenzaA__AFD64403

SEQ ID NO: 8325 - protein, 566 aa, Artificial Sequence; identical to SEQ ID NO: 8267
  derived and/or modified protein sequence (wt) from hemagglutinin__InfluenzaA__AFD64414

SEQ ID NO: 8326 - protein, 566 aa, Artificial Sequence
  derived and/or modified protein sequence (wt) from hemagglutinin__InfluenzaA__AFD64425
MKTIIALSYILCLVFAQKLPGNDNSTATLCLGHHAVPNGTIVKTITNDQIEVTNATELVQISSTGGICDSPHQILDGENCTLIDALLGDPQCDGFQNKKWDLFVERSKAYSNCYPYDVPNYASLRSLVASSGTLEFNNESFDWTGVTQNGTSSACKRRSNKSFFSRLNWLTHLKYKYPALNVTMPNNEKFDKLYIWGVHHPGTDSDQISLYAQASGRITVSTKRSQQTVIPNIGSRPRVRDVSSRISIYWTIVKPGDILLINSTGNLIAPRGYFKIRSGKSSIMRSDAPIGKCNSECITPNGSIPNDKPFQNVNRITYGACPRYVKQNTLKLATGMRNVPEKQTRGIFGAIAGFIENGWEGMVDGWYGFRHQNSEGTGQAADLKSTQAAINQINGKLNRLIGKTNEKFHQIEKEFSEVEGRIQDLEKYVEDTKIDLWSYNAELLVALENQHTIDLTDSEMNKLFERTKKQLRENAEDMGNGCFKIYHKCDNACIGSIRNGTYDHNVYRDEALNNRFQIKGVELKSGYKDWILWISFAISCFLLCVALLGFIMWACQKGNIRCNICI

SEQ ID NO: 8327 - protein, 566 aa, Artificial Sequence; identical to SEQ ID NO: 73
  derived and/or modified protein sequence (wt) from hemagglutinin__InfluenzaA__AFD64436

SEQ ID NO: 8328 - protein, 566 aa, Artificial Sequence; identical to SEQ ID NO: 73
  derived and/or modified protein sequence (wt) from hemagglutinin__InfluenzaA__AFD64447

SEQ ID NO: 8329 - protein, 566 aa, Artificial Sequence
  derived and/or modified protein sequence (wt) from hemagglutinin__InfluenzaA__AFD64458
MKTIIALSYILCLVFAQKLPGNDNSTATLCLGHHAVQNGTIVKTITNDQIEVTNATELVQSSSTGGICDSPHQILDGENCTLIDALLGDPQCDGFQNKKWDLFVERSKAYSNCYPYDVPDYASLRSLVASSGTLEFNNESFDWTGVTQNGTSSACKRRSNKSFFSRLNWLTHLKYKYPALNVTMPNNEKFDKLYIWGVHHPGTDSDQISLYAQASGRITVSTKRSQQTVIPNIGSRPRVRDVSSRISIYWTIVKPGDILLINSTGNLIAPRGYFKIRSGKSSIMRSDAPIGKCNSECITPNGSIPNDKPFQNVNRITYGACPRYVKQNTLKLATGMRNVPEKQTRGIFGAIAGFIENGWEGMVDGWYGFRHQNSEGTGQAADLKSTQAAINQINGKLNRLIGKTNEKFHQIEKEFSEVEGRIQDLEKYVEDTKIDLWSYNAELLVALENQHTIDLTDSEMNKLFERTKKQLRENAEDMGNGCFKIYHKCDNACIGSIRNGTYDHDVYRDEALNNRFQIKGVELKSGYKDWILWISFAISCFLLCVALLGFIMWACQKGNIRCNICI

SEQ ID NO: 8330 - protein, 566 aa, Artificial Sequence; identical to SEQ ID NO: 6855
  derived and/or modified protein sequence (wt) from hemagglutinin__InfluenzaA__AFD64795

SEQ ID NO: 8331 - protein, 566 aa, Artificial Sequence; identical to SEQ ID NO: 6982
  derived and/or modified protein sequence (wt) from hemagglutinin__InfluenzaA__AFD64799

SEQ ID NO: 8332 - protein, 566 aa, Artificial Sequence
  derived and/or modified protein sequence (wt) from hemagglutinin__InfluenzaA__AFD64802
MKTIIALSYILCLVFAQKLPGNDNSTATLCLGHHAVPNGTIVKTITNDQIEVTNATELVQSSSTGEICNSPHQILDGENCTLIDALLGDPQCDGFQNKKWDLFVERSKAHSNCYPYDVPDYASLRSLVASSGTLEFNNESFNWTGVTQNGTSSACIRRSNNSFFSRLNWLTHLNFKYPALNVTMPNNEQFDKLYIWGVHHPGTDKDQTFLYAQASGRITVSTKRSQQAVIPNIGSRPRVRNIPSRVSIYWTIVKPGDILLINSTGNLIAPRGYFKIRSGKSSIMRSDAPIGKCNSACITPNGSIPNDKPFQNVNRITYGACPRYVKQNTLKLATGMRNVPEKQTRGIFGAIAGFIENGWEGMVDGWYGFRHQNSEGRGQAADLKSTQAAIDQINGKLNRLIGKTNEKFHQIEKEFSEVEGRIQDLEKYVEDTKIDLWSYNAELLVALENQHTIDLTDSEMNKLFEKTKKQLRENAEDMGNGCFKIYHKCDNACIGSIRNGTYDHDVYRDEALNNRFQIKGVELKSEYKDWILWISFAISCFLLCVALLGFIMWACQKGNIRCNICI

SEQ ID NO: 8333 - protein, 566 aa, Artificial Sequence
  derived and/or modified protein sequence (wt) from hemagglutinin__InfluenzaA__AFD64804
MKTIIALSYILCLVFAQKLPGNDNSTATLCLGHHAVPNGTIVKTITNDQIEVTNATELVQSSSTGEICNSPHQILDGENCTLIDALLGDPQCDGFQNKKWDLFVERSKAHSNCYPYDVPDYASLRSLVASSGTLEFNNESFNWTGVTQNGTSSACIRRSNNSFFSRLNWLTHLNFKYPALNVTMPNNEQFDKLYIWGVHHPGTDKDQIFLYAQASGRITVSTKRSQQAVIPNIGSRPRVRNIPSRVSIYWTIVKPGDILLINSTGNLIAPRGYFKIRSGKSSIMRSDAPIGKCNSACITPNGSIPNDKPFQNVNRITYGACPRYVKQNTLKLATGMRNVPEKQTRGIFGAIAGFIENGWEGMMDGWYGFRHQNSEGRGQAADLKSTQAAIDQINGKLNRLIGKTNEKFHQIEKEFSEVEGRIQDLEKYVEDTKIDLWSYNAELLVALENQHTIDLTDSEMNKLFEKTKKQLRENAEDMGNGCFKIYHKCDNACIGSIRNGTYDHDVYRDEALNNRFQIKGVELKSGYKDWILWISFAISCFLLCVALLGFIMWACQKGNIRCNICI

SEQ ID NO: 8334 - protein, 566 aa, Artificial Sequence
  derived and/or modified protein sequence (wt) from hemagglutinin__InfluenzaA__AFD64806
MKTIIALSYILCLVFAQKLPGNDNSTATLCLGHHAVPNGTIVKTITNDQIEVTNATELVQSSSTGEICNSPHQILDGENCTLIDALLGDPQCDGFQNKKWDLFVERSKAHSNCYPYDVPDYASLRSLVASSGTLEFNNESFNWTGVTQNGTSSACIRRSNNSFFSRLNWLTHLNFKYPALNVTMPNNEQFDKLYIWGVHHPGTDKDQTFLYAQASGRITVSTKRSQQAVIPNIGSRPRVRNIPSRVSIYWTIVKPGDILLINSTGNLIAPRGYFKIRSGKSSIMRSDAPIGKCNSACITPNGSIPNDKPFQNVNRITYGACPRYVKQNTLKLATGMRNVPEKQTRGIFGAIAGFIENGWEGMVDGWYGFRHQNSEGRGQAADLKSTQAAIDQINGKLNRLIGKTNEKFHQIEKEFSEVEGRIQDLEKYVEDTKIDLWSYNAELLVALENQHTIDLTDSEMNKLFEKTKKQLRENAEDMGNGCFKIYHKCDNACIGSIRNGTYDHDVYRDEALNNRFQIKGVELKSGYKDWILWISFAISCFLLCVALLGFIMWACQKGNIRCNICI

SEQ ID NO: 8335 - protein, 566 aa, Artificial Sequence
  derived and/or modified protein sequence (wt) from hemagglutinin__InfluenzaA__AFD64807
MKTIIALSYILCLVFAQKLPGNDNSTATLCLGHHAVPNGTIVKTITNDQIEVTNATELVQSSSTGEICNSPHQILDGENCTLIDALLGDPQCDGFQNKKWDLFVERSKAHSNCYPYDVPDYASLRSLVASSGTLEFNNESFNWTGVTQNGTSSACIRRSNNSFFSRLNWLTHLNFKYPALNVTMPNNEQFDKLYIWGVHHPGTDKDQTFLYAQASGRITVSTKRSQQAVIPNIGSRPRVRDIPSRVSIYWTIVKPGDILLINSTGNLIAPRGYFKIRSGKSSIMRSDAPLGKCHSACITPNGSIPNDKPFQNVNRITYGACPRYVKQNTLKLATGMRNVPEKQTRGIFGAIAGFIENGWEGMVDGWYGFRHQNSEGRGQAADLKSTQAAIDQINGKLNRLIGKTNEKFHQIEKEFSEVEGRIQDLEKYVEDTKIDLWSYNAELLVALENQHTIDLTDSEMNKLFEKTKKQLRENAEDMGNGCFKIYHKCDNACIGSIRNGTYDHDMYRDEALNNRFQIKGVELKSGYKDWILWISFAISCFLLCVALLGFIMWACQKGNIRCNICI

SEQ ID NO: 8336 - protein, 566 aa, Artificial Sequence
  derived and/or modified protein sequence (wt) from hemagglutinin__InfluenzaA__AFD64810
MKTIIALSYILCLVFAQKLPGNDNSTATLCLGHHAVPNGTIVKTITNDQIEVTNATELVQSSSTGEICNSPHQILDGENCTLIDALLGDPQCDGFQNKKWDLFVERSKAHSNCYPYDVPDYASLRSLVASSGTLEFNNESFNWTGVTQNGTSSACIRRSNNSFFSRLNWLTHLNFKYPALNVTMPNNEQFDKLYIWGVHHPGTDKDQIFLYAQASGRITVSTKRSQQAVIPNIGSRPRVRNIPSRVSIYWTIVKPGDILLINSTGNLIAPRGYFKIRSGKSSIMRSDAPIGKCNSACITPNGSIPNDKPFQNVNRITYGACPRYVKQNTLKLATGMRNVPEKQTRGIFGAIAGFIENGWEGMVDGWYGFRHQNSEGRGQAADLKSTQAAIDQINGKLNRLIGKTNEKFHQIEKEFSEVEGRIQDLEKYVEDTKIDLWSYNAELLVALENQHTIDLTDSEMNKLFEKTKKQLRENAEDMGNGCFKIYHKCDNACIGSIRNGTYDPDVYRDEALNNRFQIKGVELKSGYKDWILWISFAISCFLLCVALLGFIMWACQKGNIRCNICI

SEQ ID NO: 8337 - protein, 566 aa, Artificial Sequence
  derived and/or modified protein sequence (wt) from hemagglutinin__InfluenzaA__AFD64812
MKTIIALSYILCLVFAQKLPGNDNSTATLCLGHHAVPNGTIVKTITNDQIEVTNATELVQSSSTGEICNSPHQILDGENCTLIDALLGDPQCDGFQNKKWDLFVERSKAHSNCYPYDVPDYASLRSLVASSGTLEFNNESFNWTGVTQNGTSSACIRRSNNSFFSRLNWLTHLNFKYPALNVTMPNNEQFDKLYIWGVHHPGTDKDQTFLYAQASGRITVSTKRSQQAVIPNIGSRPRVRNIPSRVSIYWTIVKPGDILLINSTGNLIAPRGYFKIRSGKSSIMRSDAPIGKCNSACITPNGSIPNDKPFQNVNRITYGACPRYVKQNTLKLATGMRNVPEKQTRGIFGAIAGFIENGWEGMVDGWYGFRHQNSEGRGQAADLKSTQAATDQINGKLNRLIGKTNEKFHQIEKEFSEVEGRIQDLEKYVEDTKIDLWSYNAELLVALENQHTIDLTDSEMNKLFEKTKKQLRENAEDMGNGCFKIYHKCDNACIGSIRNGTYDHDVYRDEALNNRFQIKGVELKSGYKDWILWISFAISCFLLCVALLGFIMWACQKGNIRCNICI

SEQ ID NO: 8338 - protein, 566 aa, Artificial Sequence
  derived and/or modified protein sequence (wt) from hemagglutinin__InfluenzaA__AFD64814
MKTIIALSYILCLVFAQKLPGNDNSTATLCLGHHAVPNGTIVKTITNDQIEVTNATELVQSSSTGEICNSPHQILDGENCTLIDALLGDPQCDGFQNKKWDLFVERSKAHSNCYPYDVPDYASLRSLVASSGTLEFNNESFNWTGVTQNGTSSACIRRSNNSFFSRLNWLTHLNFKYPALNVTMPNNEQFDKLYIWGVHHPGTDKDQTFLYAQASGRITVSTKRSQQAVIPNIGSRPRVRNIPSRVSIYWTIVKPGDILLINSTGNLIAPRGYFKIRSGKSSIMRSDAPIGKCNSACITPNGSIPNDKPFQNVNRITYGACPRYVKQNTLKLATGMRNVPEKQTRGIFGAIAGFIENGWEGMVDGWYGFRHQNSEGRGQAADLKSTQAAIDQINGKLNRLIGKTNEKFHQIEKEFSEVEGRIQDLEKYVEDTKIDLWSYNAELLVALENQHTIDLTDSEMNKLFEKTKKQLRENAEDMGNGCFKIYHKCDNACIGSIRNGTYDPDVYRDEALNNRFQIKGVELKSGYKDWILWISFAISCFLLCVALLGFIMWACQKGNIRCNICI

SEQ ID NO: 8339 - protein, 566 aa, Artificial Sequence
  derived and/or modified protein sequence (wt) from hemagglutinin__InfluenzaA__AFD64816
MKTIIALSYILCLVFAQKLPENDNSTATLCLGHHAVPNGTIVKTITNDQIEVTNATELVQSSSTGEICNSPHQILDGENCTLIDALLGDPQCDGFQNKKWDLFVERSKAHSNCYPYDVPDYASLRSLVASSGTLEFNNESFNWTGVTQNGTSSACMRRSNNSFFSRLNWLTHLNFKYPALNVTMPNNEQFDKLYIWGVHHPGTDKDQIFLYAQASGRITVSTKRSQQAVIPNIGSRPRVRNIPSRVSIYWTIVKPGDILLINSTGNLIAPRGYFKIRSGKSSIMRSDAPIGKCNSACITPNGSIPNDKPFQNVNRITYGACPRYVKQNTLKLATGMRNVPEKQTRGIFGAIAGFIENGWEGMVDGWYGFRHQNSEGRGQAADLKSTQAAIDQINGKLNRLIGKTNEKFHQIEKEFSEVEGRIQDLEKYVEDTKIDLWSYNAELLVALENQHTIDLTDSEMNKLFEKTKKQLRENAEDMGNGCFKIYHKCDNACIGSIRNGTYDHDVYRDEALNNRFQIKGVELKSGYKDWILWISFAISCFLLCVALLGFIMWACQKGNIRCNICI

SEQ ID NO: 8340 - protein, 566 aa, Artificial Sequence
  derived and/or modified protein sequence (wt) from hemagglutinin__InfluenzaA__AFD64818
MKTIIALSYILCLVFAQKLPGNDNSTATLCLGHHAVPNGTIVKTITNDQIEVTNATELVQSSSTGEICNSPHQILDGENCTLIDALLGDPQCDGFQNKKWDLFVERSKAHSNCYPYDVPDYASLRSLVASSGTLEFNNESFNWTGVTQNGTSSACIRRSNNSFFSRLNWLTHLNFKYPALNVTMPNNEQFDKLYIWGVHHPGTDKDQTFLYAQASGRITVSTKRSQQAVIPNIGSRPRVRNIPSRVSIYWTIVKPGDILLINSTGNLIAPRGYFKIRSGKSSIMRSDAPLGKCISACITPNGSIPNDKPFQNVNRITYGACPRYVKQNTLKLATGMRNVPEKQTRGIFGAIAGFIENGWEGMVDGWYGFRHQNSEGRGQAADLKSTQAAIDQINGKLNRLIGKTNEKFHQIEKEFSEVEGRIQDLEKYVEDTKIDLWSYNAELLVALENQHTIDLTDSEMNKLFEKTKKQLRENAEDMGNGCFKIYHKCDNACIGSIRNGTYDHDVYRDEALNNRFQIKGVELKSGYKDWILWISFAISCFLLCVALLGFIMWACQKGNIRCNICI

SEQ ID NO: 8341 - protein, 566 aa, Artificial Sequence
  derived and/or modified protein sequence (wt) from hemagglutinin__InfluenzaA__AFD64819
MKTIIALSYILCLVFAQKLPGNDNSTATLCLGHHAVPNGTIVKTITNDQIEVTNATELVQSSSTGEICNSPHQILDGENCTLIDALLGDPQCDGFQNKKWDLFVERSKAHSNCYPYDVPDYASLRSLVASSGTLEFNNESFNWTGVTQNGTSSACIRRSNNSFFSRLNWLTHLNFKYPALNVTMPNNEQFDKLYIWGVHHPGTDKDQTFLYAQASGRITVSTKRSQQAVIPNIGSRPRIRNIPSRVSIYWTIVKPGDILLINSTGNLIAPRGYFKIRSGKSSIMRSDAPIGKCISACITPNGSIPNDKPFQNVNRITYGACPRYVKQNTLKLATGMRNVPEKQTRGIFGAIAGFIENGWEGMVDGWYGFRHQNSEGRGQAADLKSTQAAIDQINGKLNRLIGKTNEKFHQIEKEFSEVEGRIQDLEKYVEDTKIDLWSYNAELLVALENQHTIDLTDSEMNKLFEKTKKQLRENAEDMGNGCFKIYHKCDNACIGSIRNGTYDPDVYRDEALNNRFQIKGVELKSGYKDWILWISFAISCFLLCVALLGFIMWACQKGNIRCNICI

SEQ ID NO: 8342 - protein, 566 aa, Artificial Sequence; identical to SEQ ID NO: 6982
  derived and/or modified protein sequence (wt) from hemagglutinin__InfluenzaA__AFD64820

SEQ ID NO: 8343 - protein, 566 aa, Artificial Sequence
  derived and/or modified protein sequence (wt) from hemagglutinin__InfluenzaA__AFD64822
MKTIIALSYILCLVFAQKLPGNDNSTATLCLGHHAVPNGTIVKTITNDQIEVTNATELVQSSSTGEICNSPHQILDGENCTLIDALLGDPQCDGFQNKKWDLFVERSKAHSNCYPYDVPDYASLRSLVASSGTLEFNNESFNWTGVTQNGTSSACMRRSNNSFFSRLNWLTHLNFKYPALNVTMPNNEQFDKLYIWGVHHPGTDKDQIFLYAQASGRITVSTKRSQQAVIPNIGSRPRVRNIPSRVSIYWTIVKPGDILLINSTGNLIAPRGYFKIRSGKSSIMRSDAPIGKCNSACITPNGSIPNDKPFQNVNRITYGACPRYVKQNTLKLATGMRNVPEKQTRGIFGAIAGFIENGWEGMVDGWYGFRHQNSEGRGQAADLKSTQAAIDQINGKLNRLIGKTNEKFHQIEKEFSEVEGRIQDLEKYVEDTKIDLWSYNAELLVALENQHTIDLTDSEMNKLFEKTKKQLRENAEDMGNGCFKIYHKCDNACIGSIRNGTYDHDVYRDEALNNRFQIKGVELKSGYKDWILWISFAISCFLLCVALLGFIMWACQKGNIRCNICI

SEQ ID NO: 8344 - protein, 566 aa, Artificial Sequence
  derived and/or modified protein sequence (wt) from hemagglutinin__InfluenzaA__AFD64823
MKTIIALSYILCLVFAQKLPGNDNSTATLCLGHHAVPNGTIVKTITNDQIEVTNATELVQSSSTGEICNSPHQILDGENCTLIDALLGDPQCDGFQNKKWDLFVERSKAHSNCYPYDVPDYASLRSLVASSGTLEFNNESFNWTGVTQNGTSSACIRRSNNSFFSRLNWLTHLNFKYPALNVTMPNNEQFDKLYIWGVHHPGTDKDQIFLYAQAAGRITVSTKRSQQAVIPNIGSRPRVRNIPSRVSIYWTIVKPGDILLINSTGNLIAPRGYFKIRSGKSSIMRSDAPIGRCNSACITPNGSIPNDKPFQNVNRITYGACPRYVKQNTLKLATGMRNVPEKQTRGIFGAIAGFIENGWEGMVDGWYGFRHQNSEGRGQAADLKSTQAAIDQINGKLNRLIGKTNEKFHQIEKEFSEVEGRIQDLEKYVEDTKIDLWSYNAELLVALENQHTIDLTDSEMNKLFEKTKKQLRENAEDMGNGCFKIYHKCDNACIGSIRNGTYDHDVYRDEALNNRFQIKGVELKSGYKDWILWISFAISCFLLCVALLGFIMWACQKGNIRCNICI

SEQ ID NO: 8345 - protein, 566 aa, Artificial Sequence
  derived and/or modified protein sequence (wt) from hemagglutinin__InfluenzaA__AFD64824
MKTIIALSYILCLVFAQKLPGNDNSTATLCLGHHAVPNGTIVKTITNDQIEVTNATELVQSSSTGEICNSPHQILDGENCTLIDALLGDPQCDGFQNKKWDLFVERSKAHSNCYPYDVPDYASLRSLVASSGTLEFNNESFNWTGVTQNGTSSACIRRSNNSFFSRLNWLTHLNFKYPALNVTMPNNEQFDKLYIWGVHHPGTDKDQTFLYAQASGRITVSTKRSQQAVIPNIGSRPRVRNIPSRVSIYWTIVKPGDILLINSTGNLIAPRGYFKIRSGKSSIMRSDAPIGKCNSACITPNGSIPNDKPFQNVNRITYGACPRYVKQNTLKLATGMRNVPEKQTRGIFGAIAGFIENGWEGMVDGWYGFRHQNSEGRGQAADLKSTQAAIDQINGKLNRLIGKTNEKFHQIEKEFSEVEGRIQDLEKYVEDTKIDLWSYNAELLVALENQHTIDLTDSEMNKLFEKTKKQLRENAEDMGNGCFKIYHKCDNACIGSIRNGTYDHDVYRDEALNNRFQIKGVELKSGYKDWILWISFATSCFLLCVALLGFIMWACQKGNIRCNICI

SEQ ID NO: 8346 - protein, 566 aa, Artificial Sequence; identical to SEQ ID NO: 8334
  derived and/or modified protein sequence (wt) from hemagglutinin__InfluenzaA__AFD64825

SEQ ID NO: 8347 - protein, 566 aa, Artificial Sequence; identical to SEQ ID NO: 8334
  derived and/or modified protein sequence (wt) from hemagglutinin__InfluenzaA__AFD64827

SEQ ID NO: 8348 - protein, 566 aa, Artificial Sequence
  derived and/or modified protein sequence (wt) from hemagglutinin__InfluenzaA__AFD64828
MKTIIALSYILCLVFAQKLPGNDNSTATLCLGHHAVPNGTIVKTITNDQIEVTNATELVQSSSTGEICNSPHQILDGENCTLIDALLGDPQCDGFQNKKWDLFVERSKAHSNCYPYDVPDYASLRSLVASSGTLEFNNESFNWTGVTQNGTSSACIRRSNNSFFSRLNWLTHLNFKYPALNVTMPNNEQFDKLYIWGVHHPGTDKDQIFLYAQASGRITVSTKRSQQAVIPNIGSRPRVRNIPSRVSIYWTIVKPGDILLINSTGNLIAPRGYFKIRSGKSSIMRSDAPIGKCNSACITPNGSIPNDKPFQNVNRITYGACPRYVKQNTLKLATGMRNVPEKQTRGIFGAIAGFIENGWEGMMDGWYGFRHQNSEGRGQAADLKSTQAAIDQINGKLNRLIGKTNEKFHQIEKEFSEVEGRIQDLEKYVEDTKIDLWSYNAELLVALENQHTIDLTDSEMNKLFEKTKKQLRENAEDMGNGCFKIYHKCDNACIGSIRNGTYDPDVYRDEALNNRFQIKGVELKSGYKDWILWISFAISCFLLCVALLGFIMWACQKGNIRCNICI

SEQ ID NO: 8349 - protein, 566 aa, Artificial Sequence; identical to SEQ ID NO: 8343
  derived and/or modified protein sequence (wt) from hemagglutinin__InfluenzaA__AFD64830

SEQ ID NO: 8350 - protein, 566 aa, Artificial Sequence; identical to SEQ ID NO: 6982
  derived and/or modified protein sequence (wt) from hemagglutinin__InfluenzaA__AFD98095

SEQ ID NO: 8351 - protein, 566 aa, Artificial Sequence
  derived and/or modified protein sequence (wt) from hemagglutinin__InfluenzaA__AFD98106
MKTIIALSYILCLVFAQKLPGNDNSTATLCLGHHAVPNGTIVKTITNDQIEVTNATELVQSSSAGEICDSPHHILDGENCTLIDALLGDPQCDGFQNKKWDLFVERSRAYSNCYPYDVPDYASLRSLVASSGTLEFNNESFNWTGVTQNGTSSACIRRSNNSFFSRLNWLTHLNFKYPALNVTMPNNEQFDKLYIWGVHHPGTDKDQIFLYAQASGRITVSTKRSQQAVIPNIGSRPRVRNIPSRISIYWTIVKPGDILLINSTGNLIAPRGYFKIRSGKSSIMRSDAPIGKCNSECITPNGSIPNDKPFQNVNRITYGACPRYVKQSTLKLATGMRNVPEKQTRGIFGAIAGFIENGWEGMMDGWYGFRHQNSEGRGQAADLKSTQAAIDQINGKLNRLIGKTNEKFHQIEKEFSEVEGRIQDLEKYVEDTKIDLWSYNAELLVALENQHTIDLTDSEMNKLFEKTKKQLRENAEDMGNGCFKIYHKCDNACIGSIRNGTYDHDVYRDEALNNRFQIKGVELKSGYKDWILWISFAISCFLLCVALLGFIMWACQKGNIRCNICI

SEQ ID NO: 8352 - protein, 566 aa, Artificial Sequence
  derived and/or modified protein sequence (wt) from hemagglutinin__InfluenzaA__AFD98128
MKTIIALSYILCLVFAQKLPGNDNSTATLCLGHHAVPNGTIVKTITNDQIEVTNATELVQNSSTGEICNSPHQILDGENCTLIDALLGDPQCDGFQNKKWDLFVERSKAHSNCYPYDVPDYASLRSLVASSGTLEFNNESFNWTGVTQNGTSSACIRKSNNSFFSRLNWLTHLNFKYPALNVTMPNNEQFDKLYIWGVHHPGTDKDQIFLYAQAAGRITVSTKRSQQAVIPNIGSRPRVRNIPSRVSIYWTIVKPGDILLINSTGNLIAPRGYFKIRSGKSSIMRSDAPIGKCNSACITPNGSIPNDKPFQNVNRITYGACPRYVKQNTLKLATGMRNVPEKQTRGIFGAIAGFIENGWEGMVDGWYGFRHQNSEGRGQAADLKSTQAAIDQINGKLNRLIGKTNEKFHQIEKEFSEVEGRIQDLEKYVEDTKIDLWSYNAELLVALENQHTIDLTDSEMNKLFEKTKKQLRENAEDMGNGCFKIYHKCDNACIGSIRNGTYDHDVYRDEALNNRFQIKGVELKSGYKDWILWISFAISCFLLCVALLGFIMWACQKGNIRCNICI

SEQ ID NO: 8353 - protein, 566 aa, Artificial Sequence; identical to SEQ ID NO: 6982
  derived and/or modified protein sequence (wt) from hemagglutinin__InfluenzaA__AFD98139

SEQ ID NO: 8354 - protein, 566 aa, Artificial Sequence
  derived and/or modified protein sequence (wt) from hemagglutinin__InfluenzaA__AFD98161
MKTIIALSYILCLVFAQKLPGNDNSTATLCLGHHAVPNGTIVKTITNDQIEVTNATELVQNSSAGEICDSPHHILDGENCTLIDALLGDPQCDGFQNKKWDLFVERSRAYSNCYPYDVPDYASLRSLVASSGTLEFNNESFNWTGVTQNGTSSACIRRSNNSFFSRLNWLTHLNFKYPALNVTMPNNEQFDKLYIWGVHHPGTDKDQIFLYAQASGRITVSTKRSQQAVIPNIGSRPRVRNIPSRISIYWTIVKPGDILLINSTGNLIAPRGYFKIRSGKSSIMRSDAPIGKCNSECITPNGSIPNDKPFQNVNRITYGACPRYVKQSTLKLATGMRNVPEKQTRGIFGAIAGFIENGWEGMMDGWYGFRHQNSEGRGQAADLKSTQAAIDQINGKLNRLIGKTNEKFHQIEKEFSEVEGRIQDLEKYVEDTKIDLWSYNAELLVALENQHTIDLTDSEMNKLFEKTKKQLRENAEDMGNGCFKIYHKCDNACIGSIRNGTYDHDVYRDEALNNRFQIKGVELKSGYKDWILWISFAISCFLLCVALLGFIMWACQKGNIRCNICI

SEQ ID NO: 8355 - protein, 566 aa, Artificial Sequence
  derived and/or modified protein sequence (wt) from hemagglutinin__InfluenzaA__AFD98172
MKTIIALSYILCLVFAQKLPGNDNSTATLCLGHHAVPNGTIVKTITNDQIEVTNATELVQSSSAGEICDSPHHILDGENCTLIDALLGDPQCDGFQNKKWDLFVERSRAYSNCYPYDVPDYASLRSLVASSGTLEFNNESFNWTGVTQNGTSSACIRRSNNSFFSRLNWLTHLNFKYPALNVTMPNNEQFDKLYIWGVHHPGTDKDQIFLYAQASGRITVSTKRSQQAVIPNIGSRPRVRNIPSRISIYWTIVKPGDILLINSTGNLIAPRGYFKIRSGKSSIMRSDAPIGKCNSECITPNGSIPNDKPFQNVNRITYGACPRYVKQSTLKLATGMRNVPEKQTRGIFGAIAGFIENGWEGMMDGWYGFRHQNSEGRGQAADLKSTQAAIDQINGKLNRLIGKTNEKFHQIEKEFSEVEGRIQDLEKYVEDTKIDLWSYNAELLVALENQHTIDLTDSEMNKLFEKTKKQLRENAEDMGNGCFKIYHKCDNACIGSIRNGTYDHDVYRDEALNNRFQIKGVELKSGYKDWVLWISFAISCFLLCVALLGFIMWACQKGNIRCNICI

SEQ ID NO: 8356 - protein, 566 aa, Artificial Sequence
  derived and/or modified protein sequence (wt) from hemagglutinin__InfluenzaA__AFD98183
MKTIIALSYILCLVFAQKLPGNDNSTATLCLGHHAVPNGTIVKTITNDQIEVTNATELVQSSSTGEICNSPHQILDGENCTLIDALLGDPQCDGFQNKKWDLFVERSKAHSNCYPYDVPDYASLRSLVASSGTLEFNNESFNWTGVTQNGTSSACIRRSNNSFFSRLNWLTHLNFKYPALNVTMPNNEQFDKLYIWGVHHPGTDKDQIFLYAQASGRITVSTKRSQQAVLPNIGSRPRVRNIPSRVSIYWTIVKPGDILLINSTGNLIAPRGYFKIRSGKSSIMRSDAPIGKCNSTCITPNGSIPNDKPFQNVNRITYGACPRYVKQNTLKLATGMRNVPEKQTRGIFGAIAGFIENGWEGMVDGWYGFRHQNSEGRGQAADLKSTQAAIDQINGKLNRLIGKTNEKFHQIEKEFSEVEGRIQDLEKYVEDTKIDLWSYNAELLVALENQHTIDLTDSEMNKLFEKTKKQLRENAEDMGNGCFKIYHKCDNACIGSIRNGTYDHDVYRDEALNNRFQIKGVELKSGYKDWILWISFAISCFLLCVALLGFIMWACQKGNIRCNICI

SEQ ID NO: 8357 - protein, 566 aa, Artificial Sequence; identical to SEQ ID NO: 6855
  derived and/or modified protein sequence (wt) from hemagglutinin__InfluenzaA__AFD98194

SEQ ID NO: 8358 - protein, 566 aa, Artificial Sequence; identical to SEQ ID NO: 6909
  derived and/or modified protein sequence (wt) from hemagglutinin__InfluenzaA__AFD98205

SEQ ID NO: 8359 - protein, 566 aa, Artificial Sequence; identical to SEQ ID NO: 8351
  derived and/or modified protein sequence (wt) from hemagglutinin__InfluenzaA__AFD98215

SEQ ID NO: 8360 - protein, 566 aa, Artificial Sequence; identical to SEQ ID NO: 6982
  derived and/or modified protein sequence (wt) from hemagglutinin__InfluenzaA__AFD98226

SEQ ID NO: 8361 - protein, 566 aa, Artificial Sequence
  derived and/or modified protein sequence (wt) from hemagglutinin__InfluenzaA__AFD98237
MKTIIALSYILCLVSAQKLPGNDNSTATLCLGHHAVPNGTIVKTITNDQIEVTNATELVQSSSTGEICNSPHQILDGENCTLIDALLGDPQCDGFQNKKWDLFVERSKAHSNCYPYDVPDYASLRSLVASSGTLEFNNESFNWTGVTQNGTSSACIRRSNNSFFSRLNWLTHLNFKYPALNVTMPNNEQFDKLYIWGVHHPGTDKDQIFLYAQASGRITVSTKRSQQAVIPNIGSRPRVRNIPSRVSIYWTIVKPGDILLINSTGNLIAPRGYFKIRSGKSSIMRSDAPIGKCNSACITPNGSIPNDKPFQNVNRITYGACPRYVKQNTLKLATGMRNVPEKQTRGIFGAIAGFIENGWEGMVDGWYGFRHQNSEGRGQAADLKSTQAAIDQINGKLNRLIGKTNEKFHQIEKEFSEVEGRIQDLEKYVEDTKIDLWSYNAELLVALENQHTIDLTDSEMNKLFEKTKKQLRENAEDMGNGCFKIYHKCDNACIGSIRNGTYDHDVYRDEALNNRFQIKGVELKSGYKDWILWISFAISCFLLCVALLGFIMWACQKGNIRCNICI

SEQ ID NO: 8362 - protein, 566 aa, Artificial Sequence; identical to SEQ ID NO: 8354
  derived and/or modified protein sequence (wt) from hemagglutinin__InfluenzaA__AFD98248

SEQ ID NO: 8363 - protein, 566 aa, Artificial Sequence
  derived and/or modified protein sequence (wt) from hemagglutinin__InfluenzaA__AFD98259
MKTIIALSYILCLVFAQKLPGNDNSTATLCLGHHAVPNGTIVKTITNDQIEVTNATELVQSSSAGEICDSPHHILDGENCTLIDALLGDPQCDGFQNKKWDLFVERSKAYSNCYPYDVQDYASLRSLVASSGTLEFNNESFNWTGVTQNGTSSACIRRSNNSFFSRLNWLTHLNFKYPALNVTMPNNEQFDKLYIWGVHHPGTDKDQIFLYAQASGRITVSTKRSQQAVIPNIGSRPRVRNIPSRISIYWTIVKPGDILLINSTGNLIAPRGYFKIRSGKSSIMRSDAPIGKCNSECITPNGSIPNDKPFQNVNRITYGACPRYVKQSTLKLATGMRNVPEKQTRGIFGAIAGFIENGWEGMMDGWYGFRHQNSEGRGQAADLKSTQAAIDQINGKLNRLIGKTNEKFHQIEKEFSEVEGRIQDLEKYVEDTKIDLWSYNAELLVALENQHTIDLTDSEMNKLFEKTKKQLRENAEDMGNGCFKIYHKCDNACIGSIRNGTYDHDVYRDEALNNRFQIKGVELKSGYKDWILWISFAISCFLLCVALLGFIMWACQKGNIRCNICI

SEQ ID NO: 8364 - protein, 566 aa, Artificial Sequence
  derived and/or modified protein sequence (wt) from hemagglutinin__InfluenzaA__AFD98270
MKAILVVLLYTFVTANADTLCIGYHANNSTDTVDTVLEKNVTVTHSVNLLEDKHNGKLCKLRGVTPLHLGKCNIAGWILGNPECESLSTASSWSYIVETSSSDNGTCYPGDFINYEELREQLSSVSSFERFEIFPNTSSWPNHDSNKGVTAACPHAGAKSFYKNLIWLVKKGNSYPKLSKSYINDKGKEVLVLWGIHHPSTTADQQSLYQNADAYVFVGTSRYSKKFKPEIAIRPKVRDQEGRMNYYWTLVEPGDKITFEATGNLVVPRYAFAMERNAGSGIIISDTPVHDCNTTCQTPKGAINTSLPFQNIHPITIGKCPKYVKSTKLRLATGLRNVPSIQSRGLFGAIAGFIEGGWTGMVDGWYGYHHQNEQGSGYAADLKSTQNAIDKITNKVNSVIEKMNTQFTAVGKEFNHLEKRIENLNKKVDDGFLDIWTYNAELLVLLENERTLDYHDSNVKNLYEKVRNQLKNNAKEIGNGCFEFYHKCDNTCMESVKNGTYDYPKYSEEAKLNREEIDGVKLESTRIYQILAIYSTVASSLVLVVSLGAISFWMCSNGSLQCRICI

SEQ ID NO: 8365 - protein, 566 aa, Artificial Sequence
  derived and/or modified protein sequence (wt) from hemagglutinin__InfluenzaA__AFD98280
MKAILVVLLYTFATANADTLCIGYHANNSTDTVDTVLEKNVTVTHSVNLLEDKHNGKLCKLRGVAPLHLGKCNIAGWILGNPECDSLSTARSWSYIVETSSSDNGTCYPGDFIDYEELREQLSSVSSFERFEIFPKTSSWPNHDSNKGVTAACPHAGAKGFYKNLIWLVKKGNSYPKLSKSYINDKGKEVLVLWGIHHPSTTADQQSLYQNADTYVFVGTSRYSKKFKPEIAIRPKVRDQEGRMNYYWTLVEPGDKITFEATGNLVVPRYAFAMERNAGSGIIISDTPVHDCNTTCQTPKGAINTSLPFQNIHPITIGKCPKYVKSTKLRLATGLRNVPSIQSRGLFGAIAGFIEGGWTGMVDGWYGYHHQNEQGSGYAADLKSTQNAIDKITNKVNSVIEKMNTQFTAVGKEFNHLEKRIENLNKKVDDGFLDIWTYNAELLVLLENERTLDYHDSNVKNLYEKVRNQLKNNAKEIGNGCFEFYHKCDNTCMESVKNGTYDYPKYSEEAKLNREEIDGVKLESTRIYQILAIYSTVASSLVLVVSLGAISFWMCSNGSLQCRICI

SEQ ID NO: 8366 - protein, 566 aa, Artificial Sequence; identical to SEQ ID NO: 8343
  derived and/or modified protein sequence (wt) from hemagglutinin__InfluenzaA__AFD98290

SEQ ID NO: 8367 - protein, 566 aa, Artificial Sequence; identical to SEQ ID NO: 7086
  derived and/or modified protein sequence (wt) from hemagglutinin__InfluenzaA__AFD98310

SEQ ID NO: 8368 - protein, 566 aa, Artificial Sequence; identical to SEQ ID NO: 6454
  derived and/or modified protein sequence (wt) from hemagglutinin__InfluenzaA__AFD98320

SEQ ID NO: 8369 - protein, 566 aa, Artificial Sequence; identical to SEQ ID NO: 8354
  derived and/or modified protein sequence (wt) from hemagglutinin__InfluenzaA__AFD98340

SEQ ID NO: 8370 - protein, 566 aa, Artificial Sequence
  derived and/or modified protein sequence (wt) from hemagglutinin__InfluenzaA__AFD98351
MKTIIALSYILCLVFAQKLPGNDNSTATLCLGHHAVPNGTIVKTITNDQIEVTNATELVQSSSAGEICDSPHHILDGENCTLIDALLGDPQCDGFQNKKWDLFVERSRAYSNCYPYDVPDYASLRSLVASSGTLEFNNESFNWTGVTQNGTSSACIRRSNNSFFSRLNWLTHLNFKYPALNVTMPNNEQFDKLYIWGVHHPGTDKDQIFLYAQASGRITVSTKRSQQAVIPNIGSRPRVRNIPSRISIYWTIVKPGDILLINSTGNLIAPRGYFKIRSGKSSIMRSDAPIGKCNSECITPNGSIPNDKPFQNVNRITYGACPRYVKQSTLKLATGMRNVPEKQTRGIFGAIAGFIENGWEGMMDGWYGFRHQNSEGRGQAADLKSTQAAIDQINGKLNRLIGKTNEKFHQIEKEFSEVEGRIQDLEKYVEDTKIDLWSYNAELLVALENQHTIDLTDSEMNKLFEKTKKQLRENAEDMGNGCFKIYHKCDNACIGTIRNGTYDHDVYRDEALNNRFQIKGVELKSGYKDWILWISFAISCFLLCVALLGFIMWACQKGNIRCNICI

SEQ ID NO: 8371 - protein, 566 aa, Artificial Sequence
  derived and/or modified protein sequence (wt) from hemagglutinin__InfluenzaA__AFD98362
MKTIIALSYILCLVFAQKLPGNDNSMATLCLGHHAVPNGTIVKTITNDQIEVTNATELVQNSSTGEICDSPHQILDGENCTLIDALLGDPQCDGFQNKKWDLFVERSKAYSNCYPYDVPDYASLRSLVASSGTLEFNNESFNWTGVTQNGTSSACIRRSNNSFFSRLNWLTHLNFKYPALNVTMPNNEQFDKLYIWGVHHPGTDKDQIFLYAQASGRITVSTKRGQQAVIPNIGSRPRVRNIPSRISIYWTIVKPGDILLINSTGNLIAPRGYFKIRSGKSSIMRSDAPIGKCNSECITPNGSIPNDKPFQNVNRITYGACPRYVKQNTLKLATGMRNVPEKQTRGIFGAIAGFIENGWEGMVDGWYGFRHQNSEGRGQAADLKSTQAAIDQINGKLNRLVGKTNEKFHQIEKEFSEVEGRIQDLEKYVEDTKIDLWSYNAELLVALENQHTIDLTDSEMNKLFEKTKKQLRENAEDMGNGCFKIYHKCDNACIGSIRNGTYDHDVYRDEALNNRFQIKGVELKSGYKDWILWISFAISCFLLCVALLGFIMWACQKGNIRCNICI

SEQ ID NO: 8372 - protein, 566 aa, Artificial Sequence; identical to SEQ ID NO: 8351
  derived and/or modified protein sequence (wt) from hemagglutinin__InfluenzaA__AFD98373

SEQ ID NO: 8373 - protein, 566 aa, Artificial Sequence; identical to SEQ ID NO: 6982
  derived and/or modified protein sequence (wt) from hemagglutinin__InfluenzaA__AFD98384

SEQ ID NO: 8374 - protein, 566 aa, Artificial Sequence
  derived and/or modified protein sequence (wt) from hemagglutinin__InfluenzaA__AFD98395
MKTIIALSYILCLVFAQKLPGDDNSTATLCLGHHAVPNGTIVKTITNDQIEVTNATELVQNSSAGEICDSPHHILDGENCTLIDALLGDPQCDGFQNKKWDLFVERSRAYSNCYPYDVPDYASLRSLVASSGTLEFNNESFNWTGVTQNGTSSACIRRSNNSFFSRLNWLTHLNFKYPALNVTMPNNEQFDKLYIWGVHHPGTDKDQIFLYAQASGRITVSTKRSQQAVIPNIGSRPRVRNIPSRISIYWTIVKPGDILLINSTGNLIAPRGYFKIRSGKSSIMRSDAPIGKCNSECITPNGSIPNDKPFQNVNRITYGACPRYVKQSTLKLATGMRNVPEKQTRGIFGAIAGFIENGWEGMMDGWYGFRHQNSEGRGQAADLKSTQAAIDQINGKLNRLIGKTNEKFHQIEKEFSEVEGRIQDLEKYVEDTKIDLWSYNAELLVALENQHTIDLTDSEMNKLFEKTKKQLRENAEDMGNGCFKIYHKCDNACIGSIRNGTYDHDVYRDEALNNRFQIKGVELKSGYKDWILWISFAISCFLLCVALLGFIMWACQKGNIRCNICI

SEQ ID NO: 8375 - protein, 566 aa, Artificial Sequence; identical to SEQ ID NO: 8351
  derived and/or modified protein sequence (wt) from hemagglutinin__InfluenzaA__AFD98406

SEQ ID NO: 8376 - protein, 566 aa, Artificial Sequence; identical to SEQ ID NO: 8354
  derived and/or modified protein sequence (wt) from hemagglutinin__InfluenzaA__AFD98417

SEQ ID NO: 8377 - protein, 566 aa, Artificial Sequence
  derived and/or modified protein sequence (wt) from hemagglutinin__InfluenzaA__AFD98428
MKTIIALSYILCLVFAQKLPGNDNSTATLCLGHHAVPNGTIVKTITNDQIEVTNATELVQSSSTGEICNSPHQILDGENCTLIDALLGDPQCDGFQNKKWDLFVERSKAHSNCYPYDVPDYASLRSLVASSGTLEFNNESFNWTGVTQNGTSSACIRRSNNSFFSRLNWLTHLNFKYPALNVTMPNNEQFDKLYIWGVHHPGTDKDQTFLYAQASGRITVSTKRSQQAVIPNIGSRPRVRNIPSRVSIYWTIVKPGDILLINSTGNLIAPRGYFKIRSGKSSIMRSDAPIGKCNSACITPNGSIPNDKPFQNVNRITYGACPRYVKQNTLKLATGMRNVPEKQTRGIFGAIAGFIENGWEGMVDGWYGFRHQNSEGRGQAADLKSTQAAIDQINGKLNRLIGKTNEKFHQIEKEFSEVEGRIQDLEKYVEDTKIDLWSYNAELLVALENQHTIDLTDSEMNKLFEKTKKQLRENAEDMGNGCFKIYHKCDNACIGSIRNGTYDHDVYRDEALNNRFQIKGVELKSGYKDWILWISFTISCFLLCVALLGFIMWACQKGNIRCNICI

SEQ ID NO: 8378 - protein, 566 aa, Artificial Sequence; identical to SEQ ID NO: 6867
  derived and/or modified protein sequence (wt) from hemagglutinin__InfluenzaA__AFD98439

SEQ ID NO: 8379 - protein, 566 aa, Artificial Sequence
  derived and/or modified protein sequence (wt) from hemagglutinin__InfluenzaA__AFD98449
MKTIIALSYILCLVFAQKLPGNDNSTATLCLGHHAVPNGTIVKTITNDQIEVTNATELVQSSSTGEICDSPHQILDGKNCTLIDALLGDPQCDGFQNKKWDLFVERSKAYSNCYPYDVPDYASLRSLVASSGTLEFNNENFNWTGVTQNGTSSACIRRSKNSFFSRLNWLTHLNFKFPALNVTMPNNEQFDKLYIWGVHHPGTDKDQIFLYAQASGRITVSTKRSQQTAIPNIGSRPRVRNIPSRISIYWTIVKPGDILLINSTGNLIAPRGYFKIRSGKSSIMRSDAPIGKCNSECITPNGSIPNDKPFQNVNRITYGACPRYVKQNTLKLATGMRNVPEKQTRGIFGAIAGFIENGWEGMVDGWYGFRHQNSEGRGQAADLKSTQAAIDQINGKLNRLIGKTNEKFHQIEKEFSEVEGRIQDLEKYVEDTKIDLWSYNAELLVALENQHTIDLTDSEMNKLFEKTKKQLRENAEDMGNGCFKIYHKCDNACIGSIRNGTYNHDVYRDEALNNRFQIKGVELKSGYKDWILWISFAISCFLLCVALLGFIMWACQKGNIRCNICI

SEQ ID NO: 8380 - protein, 566 aa, Artificial Sequence
  derived and/or modified protein sequence (wt) from hemagglutinin__InfluenzaA__AFD98460
MKTIIALSYILCLVFAQKLPGNDNSTATLCLGHHAVPNGTIVKTITNDQIEVTNATELVQSSSAGEICDSPHHILDGENCTLIDALLGDPQCDGFQNKKWDLFVERSRAYSNCYPYDVPDYASLRSLVASSGTLEFNNESFNWTGVTQNGTSSACIRRSNNSFFSKLNWLTHLNFKYPALNVTMPNNEQFDKLYIWGVHHPGTDKDQIFLYAQASGRITVSTKRSQQAVIPNIGSRPRVRNIPSRISIYWTIVKPGDILLINSTGNLIAPRGYFKIRSGKSSIMRSDAPIGKCNSECITPNGSIPNDKPFQNVNRITYGACPRYVKQSTLKLATGMRNVPEKQTRGIFGAIAGFIENGWEGMMDGWYGFRHQNSEGRGQAADLKSTQAAIDQINGKLNRLIGKTNEKFHQIEKEFSEVEGRIQDLEKYVEDTKIDLWSYNAELLVALENQHTIDLTDSEMNKLFEKTKKQLRENAEDMGNGCFKIYHKCDNACIGSIRNGTYDHDVYRDEALSNRFQIKGVELKSGYKDWILWISFAISCFLLCVALLGFIMWACQKGNIRCNICI

SEQ ID NO: 8381 - protein, 566 aa, Artificial Sequence; identical to SEQ ID NO: 6867
  derived and/or modified protein sequence (wt) from hemagglutinin__InfluenzaA__AFD98471

SEQ ID NO: 8382 - protein, 566 aa, Artificial Sequence
  derived and/or modified protein sequence (wt) from hemagglutinin__InfluenzaA__AFD98481
MKTIIALSYILCLVFAQKLPGNDNSTATLCLGHHAVPNGTIVKTITNDQIEVTNATELVQNSSTGEICNSPHQILDGENCTLIDALLGDPQCDGFQNKKWDLFVERSKAHSNCYPYDVPDYASLRSLVASSGTLEFNNESFNWTGVTQNGTSSACIRRSNNSFFSRLNWLTHLNFKYPALNVTMPNNEQFDKLYIWGVHHPGTDKDQIFLYAQAAGRITVSTKRSQQAVIPNIGSRPRVRNIPSRVSIYWTIVKPGDILLINSTGNLIAPRGYFKIRSGKSSVMRSDAPIGKCNSACITPNGSIPNDKPFQNVNRITYGACPRYVKQNTLKLATGMRNVPEKQTRGIFGAIAGFIENGWEGMVDGWYGFRHQNSEGRGQAADLKSTQAAIDQINGKLNRLIGKTNEKFHQIEKEFSEVEGRIQDLEKYVEDTKIDLWSYNAELLVALENQHTIDLTDSEMNKLFEKTKKQLRENAEDMGNGCFKIYHKCDNACIGSIRNGTYDHDVYRDEALNNRFQIKGVELKSGYKDWILWISFAISCFLLCVALLGFIMWACQKGNIRCNICI

SEQ ID NO: 8383 - protein, 566 aa, Artificial Sequence; identical to SEQ ID NO: 6982
  derived and/or modified protein sequence (wt) from hemagglutinin__InfluenzaA__AFD98492

SEQ ID NO: 8384 - protein, 566 aa, Artificial Sequence
  derived and/or modified protein sequence (wt) from hemagglutinin__InfluenzaA__AFD98503
MKTIIALSYILCLVFAQKLPGNDNSTATLCLGHHAVPNGTIVKTITNDQIEVTNATELVQSSSAGEICDSPHHILDGENCTLIDALLGDPQCDGFQNKKWDLFVERSRAYSNCYPYDVPDYASLRSLVASSGTLEFNNESFNWTGVTQNGTSSACIRRSNNSFFSRLNWLTHLNFKYPALNVTMPNNEQFDKLYIWGVHHPGTDKDQIFLYAQASGRITVSTKRSQQAVIPNIGSRPRVRNIPSRISIYWTIVKPGDILLINSTGNLIAPRGYFKIRSGKSSIMRSDAPIGKCNSECITPNGSIPNDKPFQNVNRITYGACPRYVKQSTLKLATGMRNVPEKQTKGIFGAIAGFIENGWEGMMDGWYGFRHQNSEGRGQAADLKSTQAAIDQINGKLNRLIGKTNEKFHQIEKEFSEVEGRIQDLEKYVEDTKIDLWSYNAELLVALENQHTIDLTDSEMNKLFEKTKKQLRENAEDMGNGCFKIYHKCDNACIGSIRNGTYDHDVYRDEALNNRFQIKGVELKSGYKDWILWISFAISCFLLCVALLGFIMWACQKGNIRCNICI

SEQ ID NO: 8385 - protein, 566 aa, Artificial Sequence; identical to SEQ ID NO: 6982
  derived and/or modified protein sequence (wt) from hemagglutinin__InfluenzaA__AFD98514

SEQ ID NO: 8386 - protein, 566 aa, Artificial Sequence; identical to SEQ ID NO: 8334
  derived and/or modified protein sequence (wt) from hemagglutinin__InfluenzaA__AFD98525

SEQ ID NO: 8387 - protein, 566 aa, Artificial Sequence; identical to SEQ ID NO: 6855
  derived and/or modified protein sequence (wt) from hemagglutinin__InfluenzaA__AFD98558

SEQ ID NO: 8388 - protein, 566 aa, Artificial Sequence
  derived and/or modified protein sequence (wt) from hemagglutinin__InfluenzaA__AFD98569
MKTIIALSYILCLVFAQKLPGNDNSTATLCLGHHAVPNGTIVKTITNDQIEVTNATELVQSSSTGEICNSPHQILDGENCTLIDALLGDPQCDGFQNKKWDLFVERSKAHSNCYPYDVPDYASLRSLVASSGTLEFNNESFNWTGVTQNGTSSACIRRSNNSFFSRLNWLTHLNFKYPALNVTMPNNEQFDKLYIWGVHHPGTDKDQTFLYAQASGRITVSTKRSQQAVIPNIGSRPRVRNIPSRVSIYWTIVKPGDILLINSTGNLIAPRGYFKIRSGKSSIMRSDAPIGKCNSACITPNGSIPNDKPFQNVNRITYGACPRYVKQNTLKLATGMRNVPEKQTRGIFGAIAGFIENGWEGMVDGWYGFRHQNSEGRGQAADLKSTQAAIDQINGKLNRLIGKTNEKFHQIEKEFSEVEGRIQDLEKYVEDTKIDLWSYNAELLVALENQHTIDLTDSEMNKLFEKTKKQLRENAEDMGNGCFKIYHECDNACIGSIRNGTYDHDVYRDEALNNRFQIKGVELKSGYKDWILWISFAISCFLLCVALLGFIMWACQKGNIRCNICI

SEQ ID NO: 8389 - protein, 566 aa, Artificial Sequence; identical to SEQ ID NO: 6855
  derived and/or modified protein sequence (wt) from hemagglutinin__InfluenzaA__AFD98580

SEQ ID NO: 8390 - protein, 566 aa, Artificial Sequence
  derived and/or modified protein sequence (wt) from hemagglutinin__InfluenzaA__AFE02942
MKAILVVLLYTFATANADTLCIGYHANNSTDTVDTLLEKNVTVTHSVNLLEDKHNGKLCKLRGVAPLHLGKCNIAGWILGNPECESLSTASSWSYIVETSNSDNGTCYPGDFIDYEELREQLSSVSSFERFEIFPKTSSWPNHDSNKGVTAACPHAGAKSFYKNLIWLVKKGNSYPKLSKSYINDKGKEVLVLWGIHHPSTSADQQSLYQNADAYVFVWTSRYSKKFKPEIAIRPKVRDQEGRMNYYWTLVEPGDKITFEATGNLVVPRYAFAMDRNAGSGIIISDTPVHDCNTTCQTPKGAINTSLPFQNIHPITIGKCPKYVKSTKLRLATGLRNVPSIQSRGLFGAIAGFIEGGWTGMVDGWYGYHHQNEQGSGYAADLKSTQNAIDEITNKVNSVIEKMNTQFTAVGKEFNHLEKRIENLNKKVDDGFLDIWTYNAELLVLLENERTLDYHDSNVKNLYEKVRSQLKNNAKEIGNGCFEFYHKCDNTCMESVKNGTYDYPKYSEEAKLNREEIDGVKLESTRIYQILAIYSTVASSLVLVVSLGAISFWMCSNGSLQCRICI

SEQ ID NO: 8391 - protein, 566 aa, Artificial Sequence; identical to SEQ ID NO: 3833
  derived and/or modified protein sequence (wt) from hemagglutinin__InfluenzaA__AFE18688

SEQ ID NO: 8392 - protein, 566 aa, Artificial Sequence; identical to SEQ ID NO: 650
  derived and/or modified protein sequence (wt) from hemagglutinin__InfluenzaA__AFE47624

SEQ ID NO: 8393 - protein, 566 aa, Artificial Sequence; identical to SEQ ID NO: 1400
  derived and/or modified protein sequence (wt) from hemagglutinin__InfluenzaA__AFE47635

SEQ ID NO: 8394 - protein, 566 aa, Artificial Sequence; identical to SEQ ID NO: 6982
  derived and/or modified protein sequence (wt) from hemagglutinin__InfluenzaA__AFF18506

SEQ ID NO: 8395 - protein, 566 aa, Artificial Sequence
  derived and/or modified protein sequence (wt) from hemagglutinin__InfluenzaA__AFF57124
MKAILVVLLYTFATANADTLCIGYHANNSTDTVDTVLEKNVTVTHSVNLLEDKHNGKLCKLRGVAPLHLGKCNIAGWILGNPECESLSTASSWSYIVETSSSDNGTCYPGDFINYEELREQLSSVSSFERFEIFPKTSSWPNHDSNKGVTAACPHAGAKSFYKNLIWLVKKENSYPKLSKSYINDKGKEVLVLWGIHHPSTTADQQRLYQNADAYVFVGTSRYSKKFKPEIAIRPKVRDQEGRMNYYWTLVEPGDKITFEATGNLVVPRYAFAMERNAGSGIIISDTPVHDCNTTCQTPKGAINTSLPFQNIHPITIGKCPKYVKSTKLRLATGLRNVPSIQSRGLFGAIAGFIEGGWTGMVDGWYGYHHQNEQGSGYAADLKSTQNAIDKITNKVNSVIEKMNTQFTAVGKEFNHLEKRIENLNKKVDDGFLDIWTYNAELLVLLENERTLDYHDSNVKNLYEKVRNQLKNNAKEIGNGCFEFYHKCDNTCMESVKNGTYDYPKYSEEAKLNREEIDGVKLESTRIYQILAIYSTVASSLVLVVSLGAISFWMCSNGSLQCRICI

SEQ ID NO: 8396 - protein, 566 aa, Artificial Sequence
  derived and/or modified protein sequence (wt) from hemagglutinin__InfluenzaA__AFF57128
MKAILVVLLYTFATANADTLCIGYHANNSTDTVDTVLEKNVTVTHSVNLLEDKHNGKLCKLRGVAPLHLGKCNIAGWILGNPECESLSTASSWSYIVETSSSDNGTCYPGDFINYEELREQLSSVSSFERFEIFPKTSSWPNHDSNKGVTAACPHAGAKSFYKNLIWLVKKGNSYPKLSKSYINDKGKEVLVLWGIHHPSTTADQQSIYQNADAYVFVGTSRYSKKFKPEIAIRPKVRDQEGRMNYYWTLVEPGDKITFEATGNLVVPRYAFAMERNAGSGIIISDTPVHDCNTTCQTPKGAINTSLPFQNIHPITIGKCPKYVKSTKLRLATGLRNVPSIQSRGLFGAIAGFIEGGWTGMVDGWYGYHHQNEQGSGYAADLKSTQNAIDKITNKVNSVIEKMNTQFTAVGKEFNHLEKRIENLNKKVDDGFLDIWTYNAELLVLLENERTLDYHDSNVKNLYEKVRNQLKNNAKEIGNGCFEFYHKCDNTCMESVKNGTYDYPKYSEEAKLNREEIDGVKLESTRIYQILAIYSTVASSLVLVVSLGAISFWMCSNGSLQCRICI

SEQ ID NO: 8397 - protein, 566 aa, Artificial Sequence
  derived and/or modified protein sequence (wt) from hemagglutinin__InfluenzaA__AFF57132
MKAILVVLLYTFATANADTLCIGYHANNSTDTVDTVLEKNVTVTHSVNLLEDKHNGKLCKLRGVAPLHLGKCNIAGWILGNPECESLSTASSWSYIVETSSSDNGTCYPGDFIDYEELREQLSSVSSFERFEIFPKTSSWPNHDSNKGVTAACPHAGAKGFYKNLIWLVKKGNSYPKLSKSYINDKGKEVLVLWGIHHPSTTADQQSIYQNADTYVFVGTSRYSKKFKPEIAIRPKVRDQEGRMNYYWTLVEPGDKITFEATGNLVVPRYAFAMERNAGSGIIISDTPVHDCNTTCQTPKGAINTSLPFQNIHPITIGKCPKYVKSTKLRLATGLRNVPSIQSRGLFGAIAGFIEGGWTGMVDGWYGYHHQNEQGSGYAADLKSTQNAIDKITNKVNSVIEKMNTQFTAVGKEFNHLEKRIENLNKKVDDGFLDIWTYNAELLVLLENERTLDYHDSNVKNLYEKVRNQLKNNAKEIGNGCFEFYHKCDNTCMESVKNETYDYPKYSEEAKLNREEIDGVKLESTRIYQILAIYSTVASSLVLVVSLGAISFWMCSNGSLQCRICI

SEQ ID NO: 8398 - protein, 566 aa, Artificial Sequence
  derived and/or modified protein sequence (wt) from hemagglutinin__InfluenzaA__AFF57136
MKAILVVLLYTFATANADTLCIGYHANNSTDTVDTVLEKNVTVTHSVNLLEDKHNGKLCKLRGVAPLHLGKCNIAGWILGNPECESLSTASSWSYIVETSSSDNGTCYPGDFIDYEELREQLSSVSSFERFEIFPKTSSWPNHDSNKGVTAACPHAGAKSFYKNLIWLVKKGNSYPKLSKSYINDKGKEVLVLWGIHHPSTSADQQSLYQNADAYVFVGSSRYSKKFKPEIAIRPKVRDREGRMNYYWTLVEPGDKITFEATGNLVVPRYAFAMERNAGSGIIISDTPVYDCNTTCQTPKGAINTSLPFQNIHPITIGKCPKYVKSTKLRLATGLRNVPSIQSRGLFGAIAGFIEGGWTGMVDGWYGYHHQNEQGSGYAADLKSTQNAIDEITNKVNSVIEKMNTQFTAVGKEFNHLEKRIENLNKKVDDGFLDIWTYNAELLVLLENERTLDYHDSNVKNLYEKVRSQLKNNAKEIGNGCFEFYHKCDNTCMESVKNGTYDYPKYSEEAKLNREEIDGVKLESTRIYQILAIYSTVASSLVLVVSLGAISFWMCSNGSLQCRICI

SEQ ID NO: 8399 - protein, 566 aa, Artificial Sequence
  derived and/or modified protein sequence (wt) from hemagglutinin__InfluenzaA__AFF57144
MKAILVVLLYTFATANADTLCIGYHANNSTDTVDTVLEKNVTVTHSVNLLEDKHNGKLCKLRGVAPLHLGKCNIAGWILGNPECESLSTASSWSYIVETSSSDNGTCYPGDFIDYEELREQLSSVSSFERFEIFPKTSSWPNHDSNKGVTAACPHAGAKSFYKNLIWLVKKGNSYPKLSKSYINDKGKEVLVLWGIHHPSTSDDQQSLYQNEDAYVFVGSSRYSKKFKPEIAIRPKVRDREGRMNYYWTLVEPGDKITFEATGNLVVPRYAFAMERNAGSGIIISDTPVHDCNTTCQTPKGAINTSLPFQNIHPITIGKCPKYVKSTKLRLATGLRNVPSIQSRGLFGAIAGFIEGGWTGMVDGWYGYHHQNEQGSGYAADLKSTQNAIDEITNKVNSVIEKMNTQFTAVGKEFNHLEKRIENLNKKVDDGFLDIWTYNAELLVLLENERTLDYHDSNVKNLYEKVRSQLKNNAKEIGNGCFEFYHKCDNTCMESVKNGTYDYPKYSEEAKLNREEIDGVKLESTRIYQILAIYSTVASSLVLVVSLGAISFWMCSNGSLQCRICI

SEQ ID NO: 8400 - protein, 566 aa, Artificial Sequence
  derived and/or modified protein sequence (wt) from hemagglutinin__InfluenzaA__AFF57148
MKAILVVLLYTFATANADTLCIGYHANNSTDTVDTLLEKNVTVTHSVNLLEDKHNGKLCKLRGVAPLHLGKCNIAGWILGNPECESLSTASSWSYIVETSSSDNGTCYPGDFIDYEELREQLSSVSSFERFEIFPKTSSWPNHDSNKGVTAACPHAGAKSFYKNLIWLVKKGNSYPKLSKSYINDKGKEVLVLWGIHHPSTSDDQQSLYQNEDAYVFVGSSRYSKKFKPEIAIRPKVRDREGRMNYYWTLVEPGDKITFEATGNLVVPRYAFAMERNAGSGIIISDTPVHDCNTTCQTPKGAINTSLPFQNIHPITIGKCPKYVKSTKLRLATGLRNVPSIQSRGLFGAIAGFIEGGWTGMVDGWYGYHHQNEQGSGYAADLKSTQNAIDEITNKVNSVIEKMNTQFTAVGKEFNHLEKRIENLNKKVDDGFLDIWTYNAELLVLLENERTLDYHDSNVKNLYEKVRSQLKNNAKEIGNGCFEFYHKCDNTCMESVKNGTYDYPKYSEEAKLNREEIDGVKLESTRIYQILAIYSTVASSLVLVVSLGAISFWMCSNGSLQCRICI

SEQ ID NO: 8401 - protein, 566 aa, Artificial Sequence
  derived and/or modified protein sequence (wt) from hemagglutinin__InfluenzaA__AFF57160
MKAILVVLLYTFATANADTLCIGYHANNSTDTVDTVLEKNVTVTHSVNLLEDKHNGKLCKLRGVAPLHLGKCNIAGWILGNPECESLSTASSWSYIVETSSSDNGTCYPGDFIDYEELREQLSSVSSFERFEIFPKTSSWPNHDSNKGVTAACPHAGAKSFYKNLIWLVKKGNSYPKLSESYINDKGKEVLVLWGIHHPSTSADQQSLYQNEDAYVFVGSSRYSKKFKPEIAIRPKVRDREGRMNYYWTLVEPGDKITFEATGNLVVPRYAFAMERNAGSGIIISDTPVHDCNTTCQTPKGAINTSLPFQNIHPITIGKCPKYVKSTKLRLATGLRNVPSIQSRGLFGAIAGFIEGGWTGMVDGWYGYHHQNEQGSGYAADLKSTQNAIDEITNKVNSVIEKMNTQFTAVGKEFNHLEKRIENLNKKVDDGFLDIWTYNAELLVLLENERTLDYHDSNVKNLYEKVRSQLKNNAKEIGNGCFEFYHKCDNTCMESVKNGTYDYPKYSEEAKLNREEIDGVKLESTRIYQILAIYSTVASSLVLVVSLGAISFWMCSNGSLQCRICI

SEQ ID NO: 8402 - protein, 566 aa, Artificial Sequence
  derived and/or modified protein sequence (wt) from hemagglutinin__InfluenzaA__AFF57164
MKAILVVLLYTFATANADTLCIGYHANNSTDTVDTVLEKNVTVTHSVNLLEDKHNEKLCKLRGVAPLHLGKCNIAGWILGNPECESLSTASSWSYIVETSSSDNGTCYPGDFIDYEELREQLSSVSSFERFEIFPKTSSWPNHDSNKGVTAACPHAGAKSFYKNLIWLVKKGNSYPKLSKSYINDKGKEVLVLWGIHHPSTSADQQSLYQNADAYVFVGSSRYSKKFKPEIAIRPKVRDREGRMNYYWTLVEPGDKITFEATGNLVVPRYAFAMERNAGSGIIISDTPVHDCNTTCQTPKGAINTSLPFQNIHPITIGKCPKYVKSTKLRLATGLRNVPSIQSRGLFGAIAGFIEGGWTGMVDGWYGYHHQNEQGSGYAADLKSTQNAIDEITNKVNSVIEKMNTQFTAVGKEFNHLEKRIENLNKKVDDGFLDIWTYNAELLVLLENERTLDYHDSNVKNLYEKVRSQLKNNAKEIGNGCFEFYHKCDNTCMESVKNGTYDYPKYSEEAKLNREEIDGVKLESTRIYQILAIYSTVASSLVLVVSLGAISFWMCSNGSLQCRICI

SEQ ID NO: 8403 - protein, 566 aa, Artificial Sequence; identical to SEQ ID NO: 8402
  derived and/or modified protein sequence (wt) from hemagglutinin__InfluenzaA__AFF57168

SEQ ID NO: 8404 - protein, 566 aa, Artificial Sequence
  derived and/or modified protein sequence (wt) from hemagglutinin__InfluenzaA__AFF57172
MKAILVVLLYTFATANADTLCIGYHANNSTDTVDTVLEKNVTVTHSVNLLEDKHNGKLCKLRGVAPLHLGKCNIAGWILGNPECESLSTASSWSYIVETSSSDNGTCYPGDFIDYEELREQLSSVSSFERFEIFPKTSSWPNHDSNKGVTAACPHAGAKSFYKNLIWLVKKGNSYPKLSKSYINDKGKEVLVLWGIHHPSTSADQQSLYQNEDAYVFVGSSRYSKKFKPEIAIRPKVRDREGRMNYYWTLVEPGDKITFEATGNLVVPRYAFAMERNAGSGIIISDTPVHDCNTTCQTPKGAINTSLPFQNIHPITIGKCPKYVKSTKLRLATGLRNVPSIQSRGLFGAIAGFIEGGWTGMVDGWYGYHHQNEQGSGYAADLKSTQNAIDEITNKVNSVIEKMNTQFTAVGKEFNHLEKRIENLNKKVDDGFLDIWTYNAELLVLLENERTLDYHDSNVKNLYEKVRSQLKNNAKEIGNGCFEFYHKCDNTCMESVKNGTYDYPKYSEEAKLNREEIDGVKLESTRIYQILAIYSTVASSLVLVVSLGAISFWMCSNGSLQCRICI

SEQ ID NO: 8405 - protein, 566 aa, Artificial Sequence
  derived and/or modified protein sequence (wt) from hemagglutinin__InfluenzaA__AFF57176
MKAILVVLLYTFATANADTLCIGYHANNSTDTVDTVLEKNVTVTHSVNLLEDKHNGKLCKLRGVAPLHLGKCNIAGWILGNPECESLSTASSWSYIVETSSSDNGTCYPGDFIDYEELREQLSSVSSFERFEIFPKTSSWPNHDSNKGVTAACPHAGAKSFYKNLIWLVKKENSYPKLSKSYINDKGKEVLVLWGIHHPSTSADQQSLYQNADAYVFVGSSRYSKKFKPEIAIRPKVRDREGRMNYYWTLVEPGDKITFEATGNLVVPRYAFAMERNAGSGIIISDTPVHDCNTTCQTPKGAINTSLPFQNIHPITIGKCPKYVKSTKLRLATGLRNVPSIQSRGLFGAIAGFIEGGWTGMVDGWYGYHHQNEQGSGYAADLKSTQNAIDEITNKVNSVIEKMNTQFTAVGKEFNHLEKRIENLNKKVDDGFLDIWTYNAELLVLLENERTLDYHDSNVKNLYEKVRSQLKNNAKEIGNGCFEFYHKCDNTCMESVKNGTYDYPKYSEEAKLNREEIDGVKLESTRIYQILAIYSTVASSLVLVVSLGAISFWMCSNGSLQCRICI

SEQ ID NO: 8406 - protein, 566 aa, Artificial Sequence
  derived and/or modified protein sequence (wt) from hemagglutinin__InfluenzaA__AFF57184
MKAILVVLLYTFATANADTLCIGYHANNSTDTVDTVLEKNVTVTHSVNLLEDKHNGKLCKLRGVAPLHLGKCNIAGWILGNPECESLSTASSWSYIVETSSSDNGTCYPGDFIDYEELREQLSSVSSFERFEIFPKTSSWPNHDSNKGVTAACPHAGAKSFYKNLIWLVKKENSYQKLSKSYINDKGKEVLVLWGIHHPSTSADQQSLYQNADAYVFVGSSRYSKKFKPEIAIRPKVRDREGRMNYYWTLVEPGDKITFEATGNLVVPRYAFAMERNAGSGIIISDTPVHDCNTTCQTPKGAINTSLPFQNIHPITIGKCPKYVKSTKLRLATGLRNVPSIQSRGLFGAIAGFIEGGWTGMVDGWYGYHHQNEQGSGYAADLKSTQNAIDEITNKVNSVIEKMNTQFTAVGKEFNHLEKRIENLNKKVDDGFLDIWTYNAELLVLLENERTLDYHDSNVKNLYEKVRSQLKNNAKEIGNGCFEFYHKCDNTCMESVKNGTYDYPKYSEEAKLNREEIDGVKLESTRIYQILAIYSTVASSLVLVVSLGAISFWMCSNGSLQCRICI

SEQ ID NO: 8407 - protein, 566 aa, Artificial Sequence; identical to SEQ ID NO: 8399
  derived and/or modified protein sequence (wt) from hemagglutinin__InfluenzaA__AFF57188

SEQ ID NO: 8408 - protein, 568 aa, Artificial Sequence
  derived and/or modified protein sequence (wt) from hemagglutinin__InfluenzaA__AFF60787
MEKIVLLFAIVSLVKSDQICIGYHANNSTEQVDTIMEKNVTVTHAQDILEKTHNGKLCDLDGVKPLILRDCSVAGWLLGNPMCDEFINVPEWSYIVEKANPVNDLCYPGDFNDYEELKHLLSRINHFEKIQIIPKSSWSSHEASLGVSSACPYQGKSSFFRNVVWLIKKNSTYPTIKRSYNNTNQEDLLVLWGIHHPNDAAEQTKLYQNPTTYISVGTSTLNQRLVPRIATRSEVNGQSGRMEFFWTILKPNDAINFESNGNFIAPEYAYKIVKKGDSTIMKSELEYGNCNTKCQTPMGAINSSMPFHNIHPLTIGECPKYVKSNRLVLATGLRNSPQRERRRKKRGLFGAIAGFIEGGWQGMVDGWYGYHHSNEQGSGYAADKESTQKAIDGVTNKVNSIIDKMNTQFEAVGREFNNLERRIENLNKKMEDGFLDVWTYNAELLVLMENERTLDFHDSNVKNLYDKVRLQLRDNAKELGNGCFEFYHKCDNECMESVRNGTYDYPQYSEEARLKREEISGVKLESIGIYQILSIYSTVASSLALAIMVAGLSLWMCSNGSLQCRICI

SEQ ID NO: 8409 - protein, 566 aa, Artificial Sequence
  derived and/or modified protein sequence (wt) from hemagglutinin__InfluenzaA__AFG29042
MKAILVVLLYTFATANADTLCIGYHANNSTDTVDTVLEKNVTVTHSVNLLEDKHNGKLCKLRGVAPLHLGKCNIAGWILGNPECESLSTASSWSYIVETFSSDNGTCYPGDFIDYEELREQLSSVSSFERFEIFPKTSSWPNHDSNKGVTAACPHAGAKSFYKNLIWLVKKGNSYPKLSKSYINDKGKEVLVLWGIHHPSTSADQQSLYQNADAYVFVGTSRYSKKFKPEIAIRPKVRDQEGRMNYYWTLIEPGDKITFEATGNLVVPRYAFAMERNAGSGIIISDTPVHDCNTTCQTPKGAINTSLPFQNIHPITIGKCPKYVKSTKLRLATGLRNVPSIQSRGLFGAIAGFIEGGWTGMVDGWYGYHHQNEQGSGYAADLKSTQNAIDEITNKVNSVIEKMNTQFTAVGKEFNHLEKRIENLNKKVDDGFLDIWTYNAELLVLLENERTLDYHDSNVKNLYEKVRSQLKNNAKEIGNGCFEFYHKCDNTCMESVKNGTYDYPKYSEEAKLNREEIDGVKLESTRIYQILAIYSTVASSLVLVVSLGAISFWMCSNGSLQCRICI

SEQ ID NO: 8410 - protein, 566 aa, Artificial Sequence
  derived and/or modified protein sequence (wt) from hemagglutinin__InfluenzaA__AFG29044
MKAILVVLLYTFATANADTLCIGYHANNSTDTVDTVLEKNVTVTHSVNLLEDKHNGKLCKLRGVAPLHLGKCNIAGWILGNPECESLSTASSWSYIVETPNSDNGTCYPGDFIDYEELREQLSSVSSFERFEIFPKTSSWPNHDSNKGVTAACPHAGAKSFYKNLIWLVKKGNSYPKLSKSYINDKGKEVLVLWGIHHPPTSTDQQSLYQNADAYVFVGTSRYSKKFKPEIAIRPKVRGQEGRMNYYWTLVEPGDKITFEATGNLVVPRYAFAMERNAGSGIIISDTPVHDCNTTCQTPKGAINTSLPFQNIHPITIGKCPKYVKSTKLRLATGLRNVPSIQSRGLFGAIAGFIEGGWTGMVDGWYGYHHQNEQGSGYAADLKSTQNAIDKITNKVNSVIEKMNTQFTAVGKEFNHLEKRIENLNKKVDDGFLDIWTYNAELLVLLENERTLDYHDSNVKNLYEKVRSQLKNNAKEIGNGCFEFYHKCDNTCMESVKNGTYDYPKYSEEAKLNREEIDGVKLESTRIYQILAIYSTVASSLVLVVSLGAISFWMCSNGSLQCRICI

SEQ ID NO: 8411 - protein, 566 aa, Artificial Sequence; identical to SEQ ID NO: 2669
  derived and/or modified protein sequence (wt) from hemagglutinin__InfluenzaA__AFG31060

SEQ ID NO: 8412 - protein, 566 aa, Artificial Sequence; identical to SEQ ID NO: 5224
  derived and/or modified protein sequence (wt) from hemagglutinin__InfluenzaA__AFG31070

SEQ ID NO: 8413 - protein, 566 aa, Artificial Sequence; identical to SEQ ID NO: 2656
  derived and/or modified protein sequence (wt) from hemagglutinin__InfluenzaA__AFG31080

SEQ ID NO: 8414 - protein, 566 aa, Artificial Sequence
  derived and/or modified protein sequence (wt) from hemagglutinin__InfluenzaA__AFG31100
MKAILVVLLYTFATANADTLCIGYHANNSTDTVDTVLEKNVTVTHSVNLLEDKHNGKLCKLRGVAPLHLGKCNIAGWILGNPECESLSTASSWSYIVETSSSDNGTCYPGDFIDYEELREQLSSVSSFERFEIFPKTSSWPNHDLNKGVTAACPHAGAKSFYKNLIWLVKKGNSYPKLSKSYINDKGKEVLVLWGIHHPSTSADQQSLYQNADAYVFVGTSRYSKKFKPEIAIRPKVRDQEGRMNYYWTLVEPGDKITFEATGNLVVPRYAFAMERNAGSGIIISDTPVHDCNTTCQTPKGAINTSLPFQNIHPITIGKCPKYVKSTKLRLATGLRNVPSIQSRGLFGAIAGFIEGGWTGMVDGWYGYHHQNEQGSGYAADLKSTQNAIDEITNKVNSVIEKMNTQFTAVGKEFNHLEKRIENLNKKVDDGFLDIWTYNAELLVLLENERTLDYHDSNVKNLYEKVRSQLKNNAKEIGNGCFEFYHKCDNTCMESVKNGTYDYPKYSEEAKLNREEIDGVKLESTRIYQILAIYSTVASSLVLIVSLGAISFWMCSNGSLQCRICI

SEQ ID NO: 8415 - protein, 566 aa, Artificial Sequence; identical to SEQ ID NO: 2669
  derived and/or modified protein sequence (wt) from hemagglutinin__InfluenzaA__AFG31110

SEQ ID NO: 8416 - protein, 566 aa, Artificial Sequence; identical to SEQ ID NO: 2911
  derived and/or modified protein sequence (wt) from hemagglutinin__InfluenzaA__AFG31120

SEQ ID NO: 8417 - protein, 566 aa, Artificial Sequence; identical to SEQ ID NO: 2911
  derived and/or modified protein sequence (wt) from hemagglutinin__InfluenzaA__AFG31130

SEQ ID NO: 8418 - protein, 566 aa, Artificial Sequence; identical to SEQ ID NO: 2911
  derived and/or modified protein sequence (wt) from hemagglutinin__InfluenzaA__AFG31140

SEQ ID NO: 8419 - protein, 566 aa, Artificial Sequence; identical to SEQ ID NO: 3771
  derived and/or modified protein sequence (wt) from hemagglutinin__InfluenzaA__AFG31150

SEQ ID NO: 8420 - protein, 566 aa, Artificial Sequence; identical to SEQ ID NO: 3771
  derived and/or modified protein sequence (wt) from hemagglutinin__InfluenzaA__AFG31160

SEQ ID NO: 8421 - protein, 566 aa, Artificial Sequence; identical to SEQ ID NO: 2669
  derived and/or modified protein sequence (wt) from hemagglutinin__InfluenzaA__AFG31170

SEQ ID NO: 8422 - protein, 566 aa, Artificial Sequence; identical to SEQ ID NO: 2669
  derived and/or modified protein sequence (wt) from hemagglutinin__InfluenzaA__AFG31180

SEQ ID NO: 8423 - protein, 566 aa, Artificial Sequence; identical to SEQ ID NO: 2669
  derived and/or modified protein sequence (wt) from hemagglutinin__InfluenzaA__AFG31190

SEQ ID NO: 8424 - protein, 566 aa, Artificial Sequence; identical to SEQ ID NO: 2669
  derived and/or modified protein sequence (wt) from hemagglutinin__InfluenzaA__AFG31200

SEQ ID NO: 8425 - protein, 566 aa, Artificial Sequence; identical to SEQ ID NO: 2669
  derived and/or modified protein sequence (wt) from hemagglutinin__InfluenzaA__AFG31210

SEQ ID NO: 8426 - protein, 566 aa, Artificial Sequence; identical to SEQ ID NO: 2669
  derived and/or modified protein sequence (wt) from hemagglutinin__InfluenzaA__AFG31220

SEQ ID NO: 8427 - protein, 566 aa, Artificial Sequence; identical to SEQ ID NO: 5224
  derived and/or modified protein sequence (wt) from hemagglutinin__InfluenzaA__AFG31230

SEQ ID NO: 8428 - protein, 566 aa, Artificial Sequence; identical to SEQ ID NO: 2669
  derived and/or modified protein sequence (wt) from hemagglutinin__InfluenzaA__AFG31240

SEQ ID NO: 8429 - protein, 566 aa, Artificial Sequence; identical to SEQ ID NO: 2669
  derived and/or modified protein sequence (wt) from hemagglutinin__InfluenzaA__AFG31250

SEQ ID NO: 8430 - protein, 566 aa, Artificial Sequence; identical to SEQ ID NO: 2669
  derived and/or modified protein sequence (wt) from hemagglutinin__InfluenzaA__AFG31260

SEQ ID NO: 8431 - protein, 566 aa, Artificial Sequence; identical to SEQ ID NO: 2669
  derived and/or modified protein sequence (wt) from hemagglutinin__InfluenzaA__AFG31270

SEQ ID NO: 8432 - protein, 566 aa, Artificial Sequence; identical to SEQ ID NO: 2669
  derived and/or modified protein sequence (wt) from hemagglutinin__InfluenzaA__AFG31280

SEQ ID NO: 8433 - protein, 566 aa, Artificial Sequence; identical to SEQ ID NO: 2669
  derived and/or modified protein sequence (wt) from hemagglutinin__InfluenzaA__AFG31290

SEQ ID NO: 8434 - protein, 566 aa, Artificial Sequence
  derived and/or modified protein sequence (wt) from hemagglutinin__InfluenzaA__AFG31300
MKAILVVLLYTFATANADTLCIGYHANNSTDTVDTVLEKNVTVTHSVNLLEDKHNGKLCKLRGVAPLHLGKCNIAGWILGNPECESLSTASSWSYIVETSSSDNGTCYPGDFIDYEELREQLSSVSSFERFEIFPKTSSWPNHDSNKGVTAACPHAGAKSFYKNLIWLVKKGNSYPKLSKSYINDKGKEVLVLWGIHHPSTSADQQSLYQNADAYVFVGTSRYSKKFKPEIAIRPKVRDQEGRMNYYWTLVEPGDKITFEATGNLVVPRYAFAMERNAGSGIIISDTPVHDCNTTCQTPKGAINTSLPFQNINPITIGKCPKYVKSTKLRLATGLRNVPSIQSRGLFGAIAGFIEGGWTGMVDGWYGYHHQNEQGSGYAADLKSTQNAIDEITNKVNSVIEKMNTQFTAVGKEFNHLEKRIENLNKKVDDGFLDIWTYNAELLVLLENERTLDYHDSNVKNLYEKVRSQLKNNAKEIGNGCFEFYHKCDNTCMESVKNGTYDYPKYSEEAKLNREEIDGVKLESTRIYQILAIYSTVASSLVLVVSLGAISFWMCSNGSLQCRICI

SEQ ID NO: 8435 - protein, 566 aa, Artificial Sequence; identical to SEQ ID NO: 5224
  derived and/or modified protein sequence (wt) from hemagglutinin__InfluenzaA__AFG31310

SEQ ID NO: 8436 - protein, 566 aa, Artificial Sequence; identical to SEQ ID NO: 2669
  derived and/or modified protein sequence (wt) from hemagglutinin__InfluenzaA__AFG31323

SEQ ID NO: 8437 - protein, 566 aa, Artificial Sequence; identical to SEQ ID NO: 2669
  derived and/or modified protein sequence (wt) from hemagglutinin__InfluenzaA__AFG31333

SEQ ID NO: 8438 - protein, 566 aa, Artificial Sequence; identical to SEQ ID NO: 2669
  derived and/or modified protein sequence (wt) from hemagglutinin__InfluenzaA__AFG31343

SEQ ID NO: 8439 - protein, 566 aa, Artificial Sequence; identical to SEQ ID NO: 2669
  derived and/or modified protein sequence (wt) from hemagglutinin__InfluenzaA__AFG31353

SEQ ID NO: 8440 - protein, 566 aa, Artificial Sequence; identical to SEQ ID NO: 2669
  derived and/or modified protein sequence (wt) from hemagglutinin__InfluenzaA__AFG31363

SEQ ID NO: 8441 - protein, 566 aa, Artificial Sequence; identical to SEQ ID NO: 2669
  derived and/or modified protein sequence (wt) from hemagglutinin__InfluenzaA__AFG31376

SEQ ID NO: 8442 - protein, 566 aa, Artificial Sequence; identical to SEQ ID NO: 2669
  derived and/or modified protein sequence (wt) from hemagglutinin__InfluenzaA__AFG31386

SEQ ID NO: 8443 - protein, 566 aa, Artificial Sequence; identical to SEQ ID NO: 2669
  derived and/or modified protein sequence (wt) from hemagglutinin__InfluenzaA__AFG31396

SEQ ID NO: 8444 - protein, 566 aa, Artificial Sequence; identical to SEQ ID NO: 2669
  derived and/or modified protein sequence (wt) from hemagglutinin__InfluenzaA__AFG31406

SEQ ID NO: 8445 - protein, 566 aa, Artificial Sequence; identical to SEQ ID NO: 2669
  derived and/or modified protein sequence (wt) from hemagglutinin__InfluenzaA__AFG31416

SEQ ID NO: 8446 - protein, 566 aa, Artificial Sequence; identical to SEQ ID NO: 2669
  derived and/or modified protein sequence (wt) from hemagglutinin__InfluenzaA__AFG31426

SEQ ID NO: 8447 - protein, 566 aa, Artificial Sequence; identical to SEQ ID NO: 2669
  derived and/or modified protein sequence (wt) from hemagglutinin__InfluenzaA__AFG31436

SEQ ID NO: 8448 - protein, 566 aa, Artificial Sequence; identical to SEQ ID NO: 2669
  derived and/or modified protein sequence (wt) from hemagglutinin__InfluenzaA__AFG31446

SEQ ID NO: 8449 - protein, 566 aa, Artificial Sequence; identical to SEQ ID NO: 2669
  derived and/or modified protein sequence (wt) from hemagglutinin__InfluenzaA__AFG31456

SEQ ID NO: 8450 - protein, 566 aa, Artificial Sequence; identical to SEQ ID NO: 2669
  derived and/or modified protein sequence (wt) from hemagglutinin__InfluenzaA__AFG31466

SEQ ID NO: 8451 - protein, 566 aa, Artificial Sequence; identical to SEQ ID NO: 3771
  derived and/or modified protein sequence (wt) from hemagglutinin__InfluenzaA__AFG31486

SEQ ID NO: 8452 - protein, 566 aa, Artificial Sequence; identical to SEQ ID NO: 2669
  derived and/or modified protein sequence (wt) from hemagglutinin__InfluenzaA__AFG31496

SEQ ID NO: 8453 - protein, 566 aa, Artificial Sequence; identical to SEQ ID NO: 2669
  derived and/or modified protein sequence (wt) from hemagglutinin__InfluenzaA__AFG31506

SEQ ID NO: 8454 - protein, 566 aa, Artificial Sequence; identical to SEQ ID NO: 2669
  derived and/or modified protein sequence (wt) from hemagglutinin__InfluenzaA__AFG31516

SEQ ID NO: 8455 - protein, 566 aa, Artificial Sequence; identical to SEQ ID NO: 2760
  derived and/or modified protein sequence (wt) from hemagglutinin__InfluenzaA__AFG31526

SEQ ID NO: 8456 - protein, 566 aa, Artificial Sequence; identical to SEQ ID NO: 2669
  derived and/or modified protein sequence (wt) from hemagglutinin__InfluenzaA__AFG31536

SEQ ID NO: 8457 - protein, 566 aa, Artificial Sequence; identical to SEQ ID NO: 5224
  derived and/or modified protein sequence (wt) from hemagglutinin__InfluenzaA__AFG31546

SEQ ID NO: 8458 - protein, 566 aa, Artificial Sequence; identical to SEQ ID NO: 5224
  derived and/or modified protein sequence (wt) from hemagglutinin__InfluenzaA__AFG31556

SEQ ID NO: 8459 - protein, 566 aa, Artificial Sequence; identical to SEQ ID NO: 2669
  derived and/or modified protein sequence (wt) from hemagglutinin__InfluenzaA__AFG31566

SEQ ID NO: 8460 - protein, 566 aa, Artificial Sequence; identical to SEQ ID NO: 2911
  derived and/or modified protein sequence (wt) from hemagglutinin__InfluenzaA__AFG31586

SEQ ID NO: 8461 - protein, 566 aa, Artificial Sequence; identical to SEQ ID NO: 2911
  derived and/or modified protein sequence (wt) from hemagglutinin__InfluenzaA__AFG31596

SEQ ID NO: 8462 - protein, 566 aa, Artificial Sequence; identical to SEQ ID NO: 2911
  derived and/or modified protein sequence (wt) from hemagglutinin__InfluenzaA__AFG31606

SEQ ID NO: 8463 - protein, 566 aa, Artificial Sequence; identical to SEQ ID NO: 2911
  derived and/or modified protein sequence (wt) from hemagglutinin__InfluenzaA__AFG31616

SEQ ID NO: 8464 - protein, 566 aa, Artificial Sequence; identical to SEQ ID NO: 2911
  derived and/or modified protein sequence (wt) from hemagglutinin__InfluenzaA__AFG31626

SEQ ID NO: 8465 - protein, 566 aa, Artificial Sequence; identical to SEQ ID NO: 2669
  derived and/or modified protein sequence (wt) from hemagglutinin__InfluenzaA__AFG31636

SEQ ID NO: 8466 - protein, 566 aa, Artificial Sequence; identical to SEQ ID NO: 2669
  derived and/or modified protein sequence (wt) from hemagglutinin__InfluenzaA__AFG31646

SEQ ID NO: 8467 - protein, 566 aa, Artificial Sequence; identical to SEQ ID NO: 3833
  derived and/or modified protein sequence (wt) from hemagglutinin__InfluenzaA__AFG31656

SEQ ID NO: 8468 - protein, 566 aa, Artificial Sequence; identical to SEQ ID NO: 3833
  derived and/or modified protein sequence (wt) from hemagglutinin__InfluenzaA__AFG31666

SEQ ID NO: 8469 - protein, 566 aa, Artificial Sequence
  derived and/or modified protein sequence (wt) from hemagglutinin__InfluenzaA__AFG71865
MKTIIALSYIFCLALGQDLPGNDNSTATLCLGHHAVPNGTLVKTITNDQIEVTNATELVQSSSTGKICNNPHRILDGIDCTLIDALLGDPHCDVFQNETWDLFVERSKAFSNCYPYDVPDYASLRSLVASSGTLEFITEGFTWTGVTQNGGSNACKRGPGIGFFSRLNWLTKSGSTYPVLNVTMPNNDNFDKLYIWGVHHPSTNQEQTSLYVQASGRVTVSTRRSQQTIIPNIGSRPWVRGLSSRISIYWTIVKPGDVLVINSNGNLIAPRGYFKMRTGKSSIMRSDAPIDTCISECITPNGSIPNDKPFQNVNKITYGACPKYVKQNTLKLATGMRNVPEKQTRGLFGAIAGFIENGWEGMIDGWYGFRHQNSEGTGQAADLKSTQAAIDQINGKLNRVIEKTNEKFHQIEKEFSEVEGRIQDLEKYVEDTKIDLWSYNAELLVALENQHTIDLTDSEMNKLFEKTRRQLRENAEDMGNGCFKIYHKCDNACIESIRNGTYDHDVYRDEALNNRFQIKGVELKSGYKDWILWISFAISCFLLCVVLLGFIMWACQRGNIRCNICI

SEQ ID NO: 8470 - protein, 566 aa, Artificial Sequence; identical to SEQ ID NO: 1556
  derived and/or modified protein sequence (wt) from hemagglutinin__InfluenzaA__AFG71876

SEQ ID NO: 8471 - protein, 566 aa, Artificial Sequence
  derived and/or modified protein sequence (wt) from hemagglutinin__InfluenzaA__AFG71898
MKTIIALSYLFCLAFGQDLPGNDNSTATLCLGHHAVPNGTLVKTITDDQIEVTNATELVQSSSTGKICNNPHRILDGIDCTLIDALLGDPHCDVFQNETWDLFVERSKAFSNCYPYDVPDYASLRSLVASSGTLEFTTEGFTWTGVTQNGGSNACKRGPGSGFFSRLNWLTKSGSTYPVLNVTMSNNDNFDKLYIWGVHHPSTNQEQTSLYVQASGRVTVSTRRSQQTIIPNIGSRPWVRGLSSRISIYWTIVKPGDVLVINSNGNLIAPRGYFKMRTGKSSIMRSDAPIDTCVSECITPNGSIPNDKPFQNVNKITYGACPKYVKQNTLKLATGMRNVPEKQTRGLFGAIAGFIENGWEGMIDGWYGFRHQNSEGTGQAADLKSTQAAIDQINGKLNRVIEKTNEKFHQIEKEFSEVEGRIQDLEKYVEDTKIDLWSYNAELLVALENQHTIDLTDSEMNKLFEKTRRQLRENAEDMGNGCFKIYHKCDNACIESIRNGTYDHDVYRDEALNNRFQIKGVELKSGYKDWILWISFAISCFLLCVVLLGFIMWACQRGNIRCNICI

SEQ ID NO: 8472 - protein, 566 aa, Artificial Sequence
  derived and/or modified protein sequence (wt) from hemagglutinin__InfluenzaA__AFG71920
MKTIIALSYIFCLALGQDLPGNDNSTATLCLGHHAVPNGTLVKTITNDQIEVTNATELVQSSSTGKICNNPHRILDGINCTLIDALLGDPHCDVFQDETWDLFVERSKAFSNCYPYDVPDYASLRSLIASSGTLEFITEGFTWTGVTQNGGSNACKRGPGSGFFSRLNWLTKSGSTYPVLNVTMPNNDNFDKLYIWGVHHPSTNQEQTSLYVQASGRVTVSTRRSQQTIIPNIGSRPWVRGLSSRISIYWTIVKPGDVLVINSNGNLIAPRGYFKMRTGKSSIMRSDAPIDTCISECITPNGSIPNDKPFQNVNKITYGACPKYVKQNTLKLATGMRNVPEKQTRGLFGAIAGFIENGWEGMIDGWYGFRHQNSEGTGQAADLKSTQAAIDQINGKLNRVIEKTNEKFHQIEKEFSEVEGRIQDLEKYVEDTKIDLWSYNAELLVALENQHTIDLTDSEMNKLFEKTRRQLRENAEDMGNGCFKIYHKCDNACIESIRNGTYDHDVYRDEALNNRFQIKGVELKSGYKDWILWISFAISCFLLCVVLLGFIMWACQRGNIRCNICI

SEQ ID NO: 8473 - protein, 566 aa, Artificial Sequence
  derived and/or modified protein sequence (wt) from hemagglutinin__InfluenzaA__AFG71931
MKTIIALSYIFCLVIGQDLPGNENSTATLCLGHHAVPNGTLVKTITNDQIEVTNATELVQSSSTGKICNNPHRILDGIDCTLIDALLGDPHCDGFQNETWDLFVERSKAFSNCYPYDVPDYASLRSLVASSGTLEFITEGFTWTGVTQNGGSNACKRGPGIGFFSRLNWLTKSGSTYPVLNVTMPNNDNFDKLYIWGVHHPSTNQEQTSLYVQASGRVTVSTRRSQQTIIPNIGSRPWVRGLSSRISIYWTIVKPGDVLVINSNGNLIAPRGYFKMRTGKSSIMRSDAPIDTCISECITPNGSIPNDKPFQNVNKITYGACPKYVKQNTLKLATGMRNVPEKQTRGLFGAIAGFIENGWEGMIDGWYGFRHQNSEGTGQAADLKSTQAAIDQINGKLNRVIEKTNEKFHQIEKEFSEVEGRIQDLEKYVEDTKIDLWSYNAELLVALENQHTIDLTDSEMNKLFEKTRRQLRENAEDMGNGCFKIYHKCDNACIESIRNGTYDHDVYRDEALNNRFQIKGVELKSGYKDWILWISFAISCFLLCVVLLGFIMWACQRGNIRCNICI

SEQ ID NO: 8474 - protein, 566 aa, Artificial Sequence
  derived and/or modified protein sequence (wt) from hemagglutinin__InfluenzaA__AFG71942
MKTIIALSYIFYLALSQDLPGNDNSKATLCLGHHAVPNGTLVKTITDDQTEVTNATELVQSSSTGKICNNPHRILDGMDCTLIDALLGDPHCDVFQNETWDLFVERSKAFSNCYPYDVPDYASLRSLVASSGTLEFITEGFTWTEVTQNGGSIACKRGPDSGFFSRLNWLTKSGRTYPVLNVTMPNNDNFDKLYIWGVHHPSTDQEQTNLYVQTSGRVTVSTRRSQQTIIPNIGSRPWVRGLSSRISIYWTIVKPGDVLVINSNGNLIAPRGYFKMRTGKSSIMRSDAPIDTCISECITPNGSIPNDKPFQNVNKITYGACPKYVKQNTLKLATGMRNVPEKQTRGLFGAIAGFIENGWEGMIDGWYGFRHQNSEGTGQAADLKSTQAAIDQINGKLNRIIEKTNEKFHQIEKEFSEVEGRIQDLEKYVEDTKIDLWSYNAELLVALENQHTIDLTDSEMNKLFEKTRRQLRENAEDMGNGCFKIYHKCDNACIESIRNGTYDHDVYRDEALNNRFQIKGVELKSGYKDWILWISFAISCFLLCVVLLGFIMWACQRGNIRCNICI

SEQ ID NO: 8475 - protein, 566 aa, Artificial Sequence
  derived and/or modified protein sequence (wt) from hemagglutinin__InfluenzaA__AFG71953
MKTIIALSYIFCLVLGQDLPGNDKSTATLCLGHHAVPNGTLVKTITNDQIEVTNATELVQSSSTGKICNNPHRILDGIDCTLIDALLGDPHCDGFQNETWDLFVERSKAFSNCYPYDVPDYASLRSLVASSGTLEFITEGFTWTGVTQNGGSNACKRGPGSGFFSRLNWLTKSGSTYPVLNVTMPNNDNFDKLYIWGVHHPSTNQEQTSLYVQASGRVTVSTKRSQQTIIPNIGSRPWVRGPSSRISIYWTTVKPGDILIINSNGNLIAPRGYFKMRTGKSSIMRSDAPIGACISECITPNGSIPNDKPFQNVNKITYGACPKYVKQNTLKLATGMRNVPEKQTRGLFGAIAGFIENGWEGMIDGWYGFRHQNSEGTGQAADLKSTQAAIDQINGKLNRVIEKTNEKFHQIEKEFSEVEGRIQDLEKYVEDTKIDLWSYNAELLVALENQHTIDLTDSEMNKLFEKTRRQLRENAEDMGNGCFKIYHKCDNACIGSIRNGTYDHDVYRDEALNNRFQIKGVELKSGYKDWILWISFAISCFLLCVVLLGVIMWACQKGNIRCNICI

SEQ ID NO: 8476 - protein, 566 aa, Artificial Sequence; identical to SEQ ID NO: 305
  derived and/or modified protein sequence (wt) from hemagglutinin__InfluenzaA__AFG71975

SEQ ID NO: 8477 - protein, 566 aa, Artificial Sequence
  derived and/or modified protein sequence (wt) from hemagglutinin__InfluenzaA__AFG71996
MKTIIALSYIFCLVLGQNFPGNDNSTATLCLGHHAVPNGTLVKTITNDQIEVTNATELVQSSSTGKICNNPHRILDGIDCTLIDALLGDPHCDGFQNETWDLFVERSKAFSNCYPYDVPDYASLRSLVASSGTLEFINEGFTWTGVTQNGGSNACKRGPDIGFFSRLNWLYKSGNTYPVLNVSMPNNDNFDKLYIWGVHHPSTDQEQTSLYVQASGRVTVSTKRSQQTIIPNIGSRPWVRGLSSRISIYWTIVKPGDILVINSNGNLIAPRGYFKMRTGKSSIMRSDASIGTCISECITPNGSIPNDKPFQNVNKITYGACPKYVKQNTLKLATGMRNVPEKQTRGIFGAIAGFIENGWEGMIDGWYGFRHQNSEGTGQAADLKSTQAAIDQINGKLNRIIEKTNEKFHQIEKEFSEVEGRIQDLEKYVEDTKIDLWSYNAELLVALENQHTIDLTDSEMNKLFEKTRRQLRENAEDMGNGCFKIYHKCDNACIGSIRNGTYDHDVYRDEALNNRFQIKGVELKSGYKDWILWISFAISCFLLCVVLLGFIMWACQKGNIRCNICI

SEQ ID NO: 8478 - protein, 566 aa, Artificial Sequence
  derived and/or modified protein sequence (wt) from hemagglutinin__InfluenzaA__AFG72007
MKTIIALSYIFCLVLGRDFPRNDNSTATLCLGHHAVPNGTLVKTITNDQIEVTNATELVQSSSTGKICNNPHRILDGMDCTLIDALLGDPHCDGLQNGTWDLFVERSKAFSNCYPYDVPDYASLRSLVASSGTLEFINEGFTWTGVTQNGGSNACKRGPDSGFFSRLNWLYKSGNTYPVLNVTMPNNDNFDKLYIWGVHHPSTDQDQTSLYVQASGRVTVSTKRSQQTVIPNIGPRPWVRGLSSRISIYWTIVKPGDILLINSNGNLIAPRGYFKMRTGKSSIMRSDAPIGTCISECITPNGSIPNDKPFQNVNKITYGACPKYVKQNTLKLATGMRNVPEKQTRGIFGAIAGFIENGWEGMIDGWYGFRHQNSEGTGQAADLKSTQAAIDQINGKLNRVIEKTNEKFHQIEKEFSEVEGRIQDLEKYVEDTKIDLWSYNAELLVALENQHTIDLTDSEMNKLFEKTRRQLRENAEDMGNGCFKIYHRCDNACIGSIRNGTYDHDVYRDEALNNRFQIKGVELKSGYKDWILWISFAISCFLLCVVLLGFIMWACQKGNIRCNICI

SEQ ID NO: 8479 - protein, 566 aa, Artificial Sequence
  derived and/or modified protein sequence (wt) from hemagglutinin__InfluenzaA__AFG72029
MKTIIALSYIFCLVFGQNLPGNDNSTATLCLGHHAVPNGTLVKTITNDQIEVTNATELVQSSSTGRICDSPHRILDGKNCTLIDALLGDPHCDGFQNEKWDLFVERSKAFSNCYPYDVPDYASLRSLIASSGTLEFINEGFNWTGVTQSGGSYACKRGSDNSFFSRLNWLYESESKYPVLNVTMPNNGNFDKLYIWGVHHPSTDKEQTNLYVRASGRVTVSTKRSQQTIIPNIGSRPWVRGLSSRISIYWTIVKPGDILLINSNGNLIAPRGYFKIRTGKSSIMRSDAPIGTCSSECITPNGSIPNDKPFQNVNKITYGACPKYVKQNTLKLATGMRNVPEKQTRGIFGAIAGFIENGWEGMVDGWYGFRHQNSEGTGQAADLKSTQAAIDQINGKLNRVIEKTNEKFHQIEKEFSEVEGRIQDLEKYVEDTKIDLWSYNAELLVALENQHTIDLTDSEMNKLFEKTRRQLRENAEDMGNGCFKIYHKCDNACIGSIRNGTYDHDVYRDEALNNRFQIKGVELKSGYKDWILWISFAISCFLLCVVLLGFIMWACQKGNIRCNICI

SEQ ID NO: 8480 - protein, 566 aa, Artificial Sequence
  derived and/or modified protein sequence (wt) from hemagglutinin__InfluenzaA__AFG72040
MKTIIALSYIFCLVFAQNLPGNDNSTATLCLGHHAVPNGTLVKTITNDQIEVTNATELVQSSSTGRICDSPHRILDGKNCTLVDALLGDPHCDGFQNEKWDLFVERSKAFSNCYPYDVPDYASLRSLVASSGTLEFINESFNWTGVTQSGGSYACKRGSDNSFFSRLNWLYESESKYPVLNVTMPNNGNFDKLYIWGVHHPSTDKEQTNLYVRASGRVTVSTKRSQQTIIPNIGSRPWVRGLSSRISIYWTIVKPGDILLINSNGNLIAPRGYFKIRTGKSSIMRSDAPIGTCSSECITPNGSIPNDKPFQNVNKITYGACPKYVKQNTLKLATGMRNVPEKQTRGIFGAIAGFIENGWEGMVDGWYGFRHQNSEGTGQAADLKSTQAAIDQINGKLNRVIEKTNEKFHQIEKEFSEVEGRIQDLEKYVENTKIDLWSYNAELLVALENQHTIDLTDSEMNKLFEKTRRQLRENAEDMGNGCFKIYHKCDNACIGSIRNGTYDHDVYRDEALNNRFQIKGVELKSGYKDWILWISFAISCFLLCVVLLGFIMWACQKGNIRCNICI

SEQ ID NO: 8481 - protein, 566 aa, Artificial Sequence
  derived and/or modified protein sequence (wt) from hemagglutinin__InfluenzaA__AFG72051
MKTIIALSYIFCLVFAQNLPGNDNSTATLCLGHHAVPNGTLVKTITNDQIEVTNATELVQSSSTGRICDSPHRILDGKNCTLVDALLGDPHCDGFQNEKWDLFVERSKAFSNCYPYDVPDYASLRSLVASSGTLEFINESFNWTGVTQSGGSYACKRGSDNSFFSRLNWLYESESKYPVLNVTMPNNGNFDKLYIWGVHHPSTDKEQTNLYVRASGRVTVSTKRNQQTVIPNIGSRPWVRGLSSRISIYWTIVKPGDILLINSNGNLIAPRGYFKIHNGKSSIMRSDAPIGTCSSECITPNGSIPNDKPFQNVNKITYGACPKYVKQNTLKLATGMRNVPEKQTRGIFGAIAGFIENGWEGMVDGWYGFRHRNSEGTGQAADLKSTQAAIDQINGKLNRVIEKTNEKFHQIEKEFSEVEGRIQDLEKYVEDTKIDLWSYNAELLVALENQHTIDLTDSEMNKLFEKTRRQLRENAEDMGNGCFKIYHKCDNACIGSIRNGTYDHDVYRDEALNNRFQIKGVELKSGYKDWILWISFAISCFLLCVVLLGFIMWACQKGNIRCNICI

SEQ ID NO: 8482 - protein, 566 aa, Artificial Sequence
  derived and/or modified protein sequence (wt) from hemagglutinin__InfluenzaA__AFG72085
MKTIIALSYIFCLVFAQKLPGNDNSTATLCLGHHAVPNGTLVKTITNDQIEVTNATELVQSSSTGRICDSPHRILDGKNCTLIDALLGDPHCDGFQNEKWDLFVERSKAYSNCYPYDVPDYASLRSLVASSGTLEFINEDFNWIGVTQSGGSCACKRGSVNSFFSRLNWLHESEQKYPALNVTMPNNGKFDKLYIWGVHHPSTDREQTNLYVRASGRVTVSTKRSQQTVIPNIGSRPWVRGLSSRISIYWTIVKPGDILLINSIGNLIAPRGYFKIRTGKSSIMRSDAPIGTCSSECITPNGSIPNDKPFQNVNKITYGACPRYVKQNTLKLATGMRNVPEKQTRGIFGAIAGFIENGWEGMVDGWYGFRHQNSEGTGQAADLKSTQAAIDQINGKLNRLIEKTNEKFHQIEKEFSEVEGRIQDLEKYVEDTKIDLWSYNAELLVALENQHTIDLTDSEMNKLFEKTRKQLRENAEDMGNGCFKIYHKCDNACIGSIRNGTYDHDVYRDEALNNRFQIKGVELKSGYKDWILWISFAISCFLLCVVLLGFIMWACQKGNIRCNICI

SEQ ID NO: 8483 - protein, 566 aa, Artificial Sequence
  derived and/or modified protein sequence (wt) from hemagglutinin__InfluenzaA__AFG72107
MKTIIALSYIFCLVFAQKLPGNDNSTATLCLGHHAVPNGTLVKTITNDQIEVTNATELVQSSSTGRICDSPHRILDGKNCTLIDALLGDPHCDGFQNEKWDLFVERSKAFSNCYPYDVPDYASLRSLIASSGTLEFINEEFNWTGVTQNGGSYACKRGSVNSFFSRLNWLHESEYKYPALNVTMPNNGRFDKLYIWGVHHPSTDREQTNLYVRASGRVTVSTKRSQQTVIPNIGPRPWVRGLSSRISIYWTIVKPGDILLINSTGNLIAPRGYFKIHTGKSSIMRSDAPIGTCSSECITPNGSIPNDKPFQNVNKITYGACPRYVKQNTLKLATGMRNVPEKQTRGIFGAIAGFIENGWEGMVDGWYGFRHQNSEGTGQAADLKSTQAAIDQINGKLNRLIEKTNEKFHQIEKEFSEVEGRIQDLEKYVEDTKIDLWSYNAELLVALENQHTIDLTDSEMNKLFEKTRKQLRENAEDMGNGCFKIYHKCDNACIGSIRNGTYDHDVYRDEAVNNRFQIKGVELKSGYKDWILWISFAISCFLLCVILLGFIMWACQKGNIRCNICI

SEQ ID NO: 8484 - protein, 566 aa, Artificial Sequence
  derived and/or modified protein sequence (wt) from hemagglutinin__InfluenzaA__AFG72118
MKTIIALSYIFCLVFAQKLPGNDNSTATLCLGHHAVPNGTLVKTITNDQIEVTNATELVQNSSTGRICNSPHRILDGKNCTLIDALLGDPHCDGFQNKEWDLFVERSKAYSNCYPYDVPDYASLRSLVASSGTLEFINEDFNWTGVAQSGGSYACKRGSVNSFFSRLNWLHESEYKYPALNVTMPNNGKFDKLYIWGVHHPSTDREQTNLYVRASGRVTVSTKRSQQTVIPNIGSRPWVRGLSSRISIYWTIVKPGDILLINSTGNLIAPRGYFKIRTGKSSIMRSDAPIGTCSSECITPNGSIPNDKPFQNVNRITYGACPRYVKQNTLKLATGMRNVPERQTRGIFGAIAGFIENGWEGMVDGWYGFRHQNSEGTGQAADLKSTQAAIDQINGKLNRLIEKTNEKFHQIEKEFSEVEGRIQDLEKYVEDTKIDLWSYNAELLVALENQHTIDLTDSEMNKLFEKTRKQLRENAEDMGNGCFKIYHKCDNACIGSIRNGTYNHDVYRDEALNNRFQIKGVELKSGYKDWILWISFAISCFLLCVVLLGFIMWACQKGNIRCNICI

SEQ ID NO: 8485 - protein, 566 aa, Artificial Sequence
  derived and/or modified protein sequence (wt) from hemagglutinin__InfluenzaA__AFG72129
MKTIIALSYIFCLVFAQKLPGNDNSTATLCLGHHAVPNGTLVKTITNDQIEVTNATELVQSSSTGRICDSPHRILDGKNCTLIDALLGDPHCDGFQNKEWDLFVERSKAYSNCYPYDVPDYASLRSLVASSGTLEFINEDFNWTGVAQSGGSYACKRGSVNSFFSRLNWLHESEYKYPALNVTMPNNGKFDKLYIWGVHHPSTDREQTNLYVRASGRVTVSTKRSQQTVIPNIGSRPWVRGLSSGISIYWTIVKPGDILLINSTGNLIAPRGYFKIRTGKSSIMRSDAPIGTCSSECITPNGSIPNDKPFQNVNRITYGACPRYVKQNTLKLATGMRNVPEKQTRGIFGAIAGFIENGWEGMVDGWYGFRHQNSEGTGQAADLKSTQAAINQINGKLNRLIEKTNEKFHQIEKEFSEVEGRIQDLEKYVEDTKIDLWSYNAELLVALENQHTIDLTDSEMNKLFEKTRKQLRENAEDMGNGCFKIYHKCDNACIGSIRNGTYDHDVYRDEALNNRFQIKGVELKSGYKDWILWISFAISCFLLCVVLLGFIMWACQKGNIRCNICI

SEQ ID NO: 8486 - protein, 566 aa, Artificial Sequence
  derived and/or modified protein sequence (wt) from hemagglutinin__InfluenzaA__AFG72140
MKTIIALSYIFCLVFAQKLPGNDNSTATLCLGHHAVPNGTLVKTITNDQIEVTNATELVQSSSTGRICDSPHRILDGKNCTLIDALLGDPHCDGFQNKEWDLFVERSKAYSNCYPYDVPDYASLRSLVASSGTLEFINEDFNWTGVAQSGGSYACKRGSVNSFFSRLNWLHESEYKYPALNVTMPNNGKFDKLYIWGVHHPSTDREQTNLYVRALGRVTVSTKRSQQTVIPNIGSRPWVRGLSSRISIYWTIVKPGDILLINSTGNLIAPRGYFKIRTGKSSIMRSDAPIGTCSSECITPNGSIPNNKPFQNVNRITYGACPRYVKQNTLKLATGMRNVPEKQTRGIFGAIAGFIENGWEGMVDGWYGFRHQNSEGTGQAADLKSTQAAIDQINGKLNRLIEKTNEKFHQIEKEFSEVEGRIQDLEKYVEDTKIDLWSYNAELLVALENQHTIDLTDSEMNKLFEKTRKQLRENAEDMGNGCFKIYHKCDNACIGSIRNGTYDHDVYRDEALNNRFQIKGVELKSGYKDWILWISFAISCFLLCVVLLGFIMWACQKGNIRCNICI

SEQ ID NO: 8487 - protein, 566 aa, Artificial Sequence
  derived and/or modified protein sequence (wt) from hemagglutinin__InfluenzaA__AFG72151
MKTIIALSYILCLVFAQKLPGNDNSTATLCLGHHAVPNGTLVKTITNDQIEVTNATELVQSSSTGRICDSPHRILDGKNCTLIDALLGDPHCDGFQNKEWDLFVERSKAYSNCYPYDVPDYASLRSLVASSGTLEFTNEDFNWTGVAQSGESYACKRGSVKSFFSRLNWLHESDYKYPALNVTMPNNGKFDKLYIWGVHHPSTDREQTSLYVRASGRVTVSTKRSQQTVIPNIGSRPWVRGLSSRISIYWTIVKPGDILLINSTGNLIAPRGYFKIRTGKSSIMRSDAPIGTCSSECITPNGSIPNDKPFQNVNRITYGACPRYVKQNTLKLATGMRNVPEKQTRGIFGAIAGFIENGWEGMVDGWYGFRHQNSEGTGQAADLKSTQAAIDQINGKLNRLIEKTNEKFHQIEKEFSEVEGRIQDLEKYVEDTKIDLWSYNAELLVALENQHTIDLTDSEMNKLFEKTRKQLRENAEDMGNGCFKIYHKCDNACIGSIRNGTYDHDVYRDEALNNRFQIKGVELKSGYKDWILWISFAISCFLLCVVLLGFIMWACQKGNIRCNICI

SEQ ID NO: 8488 - protein, 566 aa, Artificial Sequence
  derived and/or modified protein sequence (wt) from hemagglutinin__InfluenzaA__AFG72184
MKTIIALSYILCLVFAQKLPGNDNSTATLCLGHHAVPNGTLVKTITNDQIEVTNATELVQSSSTGRICDSPHRILDGKNCTLIDALLGDPHCDDFQNKEWDLFVERSKAYSNCYPYDVPDYASLRSLVASSGTLEFINEDFNWTGVAQSGESYACKRGSVKSFFSRLNWLHESEYKYPALNVTMPNNDKFDKLYIWGVHHPSTEREQTSLYIRASGRVTVSTKRSQQTVIPNIGSRPWVRGLSSRISIYWTIVKPGDILLINSTGNLIAPRGYFKIRTGKSSIMRSDAPIGTCSSECITPNGSIPNDKPFQNVNRITYGACPRYVKQNTLKLATGMRNVPEKQTRGIFGAIAGFIENGWEGMVDGWYGFRHQNSEGTGQAADLKSTQAAIDQINGKLNRLIEKTNEKFHQIEKEFSEVEGRIQDLEKYVEDTKIDLWSYNAELLVALENQHTIDLTDSEMNKLFEKTRKQLRENAEDMGNGCFKIYHKCDNACIGSIRNGTYDHDVYRDEALNNRFQIKGVELKSGYKDWILWISFAISCFLLCVVLLGFIMWACQKGNIRCNICI

SEQ ID NO: 8489 - protein, 566 aa, Artificial Sequence; identical to SEQ ID NO: 8487
  derived and/or modified protein sequence (wt) from hemagglutinin__InfluenzaA__AFG72195

SEQ ID NO: 8490 - protein, 566 aa, Artificial Sequence
  derived and/or modified protein sequence (wt) from hemagglutinin__InfluenzaA__AFG72206
MKTIIALSYILCLVFAQKLPGNDNSTATLCLGHHAVPNGTLVKTITNDQIEVTNATELVQSSSTGKICDSPHRILDGKNCTLIDALLGDPHCDGFQNKEWDLFVERSKAYSNCYPYDVPDYASLRSLVASSGTLEFINEDFNWTGVAQSGESYACKRGSVKSFFSRLNWLHESDYKYPALNVTMPNNGKFDKLYIWGVHHPSTDREQTSLYIRASGRVTVSTKRSQQTVIPNIGSRPWVRGLSSRISIYWTIVKPGDILLINSTGNLIAPRGYFKIRTGKSSIMRSDAPIGTCSSECITPNGSIPNDKPFQNVNRITYGACPRYVKQNTLKLATGMRNVPEKQTRGIFGAIAGFIENGWEGMVDGWYGFRHQNSEGTGQAADLKSTQAAIDQINGKLNRLIEKTNEKFHQIEKEFSEVEGRIQDLEKYVEDTKIDLWSYNAELLVALENQHTIDLTDSEMNKLFEKTRKQLRENAEDMGNGCFKIYHKCDNACIGSIRNGTYDHDVYRDEALNNRFQIKGVELKSGYKDWILWISFAISCFLLCVVLLGFIMWACQKGNIRCNICI

SEQ ID NO: 8491 - protein, 566 aa, Artificial Sequence
  derived and/or modified protein sequence (wt) from hemagglutinin__InfluenzaA__AFG72217
MKTIIALSYILCLVFAQKLPGNDNSTATLCLGHHAVPNGTLVKTITNDQIEVTNATELVQSSSTGRICDSPHRILDGKNCTLIDALLGDPHCDGFQNKEWDLFVERSKAYSNCYPYDVPDYASLRSLVASSGTLEFINEDFNWTGVAQDGGSYACKRGSVNSFFSRLNWLHKLEYKYPALNVTMPNNGKFDKLYIWGVHHPSTDSDQTSLYVRASGRVTVSTKRSQQTVTPNIGSRPWVRGLSSRISIYWTIVKPGDILLISSTGNLIAPRGYFKIRNGKSSIMRSDAPIGNCSSECITPNGSIPNDKPFQNVNRITYGACPRYVKQNTLKLATGMRNVPEKQTRGIFGAIAGFIENGWEGMVDGWYGFRHQNSEGTGQAADIKSTQAAIDQINGKLNRLIEKTNEKFHQIEKEFSEVEGRIQDLEKYVEDTKIDLWSYNAELLVALENQHTIDLTDSEMNKLFEKTRKQLRENAEDMGNGCFKIYHKCDNACIGSIRNGTYDHDVYRDEALNNRFQIKGVELKSGYKDLILWISFAISCFLLCVVLLGFIMWACQKGNIRCNICI

SEQ ID NO: 8492 - protein, 566 aa, Artificial Sequence
  derived and/or modified protein sequence (wt) from hemagglutinin__InfluenzaA__AFG72228
MKTIIALSYILCLVFAQKLPGNDNSTATLCLGHHAVPNGTLVKTITNDQIEVTNATELVQSSSTGRICDSPHRILDGKNCTLIDALLGDPHCDGFQNKEWDLFVERSKAYSNCYPYDVPDYASLRSLVASSGTLEFTNEDFNWTGVAQSGESYACKRGSVKSFFSRLNWLHESDYKYPELNVTMPNNGKFDKLYIWGVHHPSTDREQTSLYVRASGRVTVSTKRSQQTVIPNIGSRPWVRGLSSRISIYWTIVKPGDILLINSTGNLIAPRGYFKIRTGKSSIMRSDAPIGTCSSECITPNGSIPNDKPFQNVNRITYGACPRYVKQNTLKLATGMRNVPEKQTRGIFGAIAGFIENGWEGMVDGWYGFRHQNSEGTGQAADLKSTQAAIDQINGKLNRLIEKTNEKFHQIEKEFSEVEGRIQDLEKYVEDTKIDLWSYNAELLVALENQHTIDLTDSEMNKLFEKTRKQLRENAEDMGNGCFKIYHKCDNACIGSIRNGTYDHDVYRDEALNNRFQIKGVELKSGYKDWILWISFAISCFLLCVVLLGFIMWACQKGNIRCNICI

SEQ ID NO: 8493 - protein, 566 aa, Artificial Sequence
  derived and/or modified protein sequence (wt) from hemagglutinin__InfluenzaA__AFG72239
MKTIIALSYILCLVLAQKLPGSDNSTATLCLGHHAVPNGTLVKTITNDQIEVTNATELVQSSTTGRICDSPHRILDGKNCTLIDALLGDPHCDGFQNKEWDLFVERSKAYSNCYPYDVPDYASLRSLVASSGTLEFTNEDFNWTGVAQSGESYACKRGSVKSFFSRLNWLHESDYKYPALNVTMPNNGKFDKLYIWGVHHPSTDREQTSLYVRASGRVTVSTKRSQQTVIPNIGSRPWVRGLSSRISIYWTIVKPGDILLINSTGNLIAPRGYFKIRTGKSSIMRSDAPIGTCSSECITPNGSIPNDKPFQNVNRITYGACPRYVKQNTLKLATGMRNVPEKQTRGIFGAIAGFIENGWEGMVDGWYGFRHQNSEGTGQAADLKSTQAAIDQINGKLNRLIEKTNEKFHQIEKEFSEVEGRIQDLEKYVEDTKIDLWSYNAELLVALENQHTIDLTDSEMNKLFEKTRKQLRENAEDMGNGCFKIYHKCDNACIGSIRNGTYDHDVYRDEALNNRFQIKGVELKSGYKDWILWISFAISCFLLCVVLLGFIMWACQKGNIRCNICI

SEQ ID NO: 8494 - protein, 566 aa, Artificial Sequence; identical to SEQ ID NO: 8487
  derived and/or modified protein sequence (wt) from hemagglutinin__InfluenzaA__AFG72272

SEQ ID NO: 8495 - protein, 566 aa, Artificial Sequence
  derived and/or modified protein sequence (wt) from hemagglutinin__InfluenzaA__AFG72316
MKTIIALSHILCLVFAQKLPGNDNSTATLCLGHHAVPNGTLVKTITNDQIEVTNATELVQSSSTGRICDSPHRILDGKNCTLIDALLGDPHCDGFQNKEWDLFVERSKAYSNCYPYDVPDYASLRSLVASSGTLEFINEDFNWTGVAQDGGSYACKRGSVNSFFSRLNWLHKLEYKYPALNVTMPNNGKFDKLYIWGVHHPSTDSDQTSLYVRASGRVTVSTKRSQQTVTPNIGSRPWVRGLSSRISIYWTIVKPGDILLINSTGNLIAPRGYFKIRNGKSSIMRSDVPIGNCSSECITPNGSIPNDKPFQNVNRITYGACPRYVKQNTLKLATGMRNVPEKQTRGIFGAIAGFIENGWEGMVDGWYGFRHQNSEGTGQAADLKSTQAAIDQINGKLNRLIEKTNEKFHQIEKEFSEVEGRIQDLEKYVEDTKIDLWSYNAELLVALENQHTIDLTDSEMNKLFEKTRKQLRENAEDMGNGCFKIYHKCDNACIGSIRNGTYDHDVYRDEALNNRFQIKGVELKSGYKDWILWISFAISCFLLCVVLLGFIMWACQKGNIRCNICI

SEQ ID NO: 8496 - protein, 566 aa, Artificial Sequence
  derived and/or modified protein sequence (wt) from hemagglutinin__InfluenzaA__AFG72339
MKTIIALSYILCLVFAQKLPGNDNSTATLCLGHHAVPNGTLVKTITNDQIEVTNATELVQSSSTGRICDSPHRILDGKNCTLIDALLGDPHCDGFQNKEWDLFVERSKAYSNCYPYDVPDYVSLRSLVASSGTLEFINEDFNWTGVAQDGGSYTCKRGSVNSFFSRLNWLHKSEYKYPALNVTMPNNGKFDKLYIWGVHHPSTDSDQTSLYVRASGRVTVSTKRSQQTVTPNIGSRPWVRGLSSRISIYWTIVKPGDILLINSTGNLIAPRGYFKIRNGKSSIMRSDAPIGTCSSECITPNGSIPNDKPFQNVNRITYGACPRYVKQNTLKLATGMRNVPEKQTRGIFGAIAGFIENGWEGMVDGWYGFRHQNSEGTGQAADLKSTQAAIDQINGKLNRLIEKTNEKFHQIEKEFSEVEGRIQDLEKYVEDTKIDLWSYNAELLVALENQHTIDLTDSEMNKLFEKTRKQLRENAEDMGNGCFKIYHKCDNACIGSIRNGTYDHDVYRDEALNNRFQIKGVELKSGYKDWILWISFAISCFLLCVVLLGFIMWACQKGNIRCNICI

SEQ ID NO: 8497 - protein, 566 aa, Artificial Sequence
  derived and/or modified protein sequence (wt) from hemagglutinin__InfluenzaA__AFG72350
MKTIIALSYILCLVFAQKLPGNDNSTATLCLGHHAVPNGTLVKTITNDQIEVTNATELVQSSSTGRICDSPHRILDGKNCTLIDALLGDPHCDGFQNKEWDLFVERSKAYSNCYPYDVPDYVSLRSLVASSGTLEFINEDFNWTGVAQDGRSYACKRGSVNSFFSRLNWLHKSEYKYPALNVTMPNNGKFDKLYIWGVHHPSTDSDQTSLYVRASGRVTVSTKRSQQTVTPNIGSRPWVRGLSSRISIYWTIVKPGDILLINSTGNLIAPRGYFKIRNGKSSIMRSDAPIGICSSECITPNGSIPNDKPFQNVNRITYGACPRYVKQNTLKLATGMRNVPEKQTRGIFGAIAGFIENGWEGMVDGWYGFRHQNSEGTGQAADLKSTQAAIDQINGKLNRLIEKTNEKFHQIEKEFSEVEGRIQDLEKYVEDTKIDLWSYNAELLVALENQHTIDLTDSEMNKLFEKTRKQLRENAEDMGNGCFKIYHKCDNACIGSIRNGTYDHDVYRDEALNNRFQIKGVELKSGYKDWILWISFAISCFLLCVVLLGFIMWACQKGNIRCNICI

SEQ ID NO: 8498 - protein, 566 aa, Artificial Sequence
  derived and/or modified protein sequence (wt) from hemagglutinin__InfluenzaA__AFG72372
MKTIIALSYILCLVFAQKLPGNDNSTATLCLGHHAVPNGTLVKTITNDQIEVTNATELVQSSSTGRICDSPHRILDGKNCTLIDALLGDPHCDGFQNKEWDLFVERSKAYSNCYPYDVPDYASLRSLVASSGTLEFINEDFNWTGVAQDGKSYTCKRGSVNSFFSRLNWLHKLEYKYPALNVTMPNNGKFDKLYIWGVHHPSTDSDQTSLYVRASGRVTVSTKRSQQTVIPNIGSRPWVRGLSSRISIYWTIVKPGDILLINSTGNLIAPRGYFKIRNGKSSIMRSDAPIGNCSSECITPNGSIPNDKPFQNVNRITYGACPRYVKQNTLKLATGMRNVPEKQTRGIFGAIAGFIENGWEGMVDGWYGFRHQNSEGTGQAADLKSTQAAIDQINGKLNRLIEKTNEKFHQIEKEFSEVEGRIQDLEKYVEDTKIDLWSYNAELLVALENQHTIDLTDSEMNKLFERTRKQLRENAEDMGNGCFKIYHKCDNACIGSIRNGTYDHDVYRDEALNNRFQIKGVELKSGYKDWILWISFAISCFLLCVVLLGFIMWACQKGNIRCNICI

SEQ ID NO: 8499 - protein, 566 aa, Artificial Sequence; identical to SEQ ID NO: 1024
  derived and/or modified protein sequence (wt) from hemagglutinin__InfluenzaA__AFG72383

SEQ ID NO: 8500 - protein, 566 aa, Artificial Sequence
  derived and/or modified protein sequence (wt) from hemagglutinin__InfluenzaA__AFG72394
MKTIIALSYILCLVFAQKLPGNDNSTATLCLGHHAVPNGTLVKTITNDQIEVTNATELVQSSSTGRICDSPHRILDGKNCTLIDALLGDPHCDGFQNKEWDLFVERSKAYSNCYPYDVPDYASLRSLVASSGTLEFINEDFNWTGVAQDGKSYACKRGSVNSFFSRLNWLHKLEYKYPALNVTMPNNGKFDKLYIWGVHHPSTDSDQTSLYVRASGRVTVATKRSQQTVIPNIGFRPWVRGQSSGISIYWTIVKPGDILLINSTGNLIAPRGYFKIRNGKSSIMRSDAPIGNCSSECITPNGSIPNDKPFQNVNRITYGACPRYVKQNTLKLATGMRNVPEKQTRGIFGAIAGFIENGWEGMVDGWYGFRHQNSEGTGQAADLKSTQAAIDQINGKLNRLIEKTNEKFHQIEKEFSEVEGRIQDLEKYVEDTKIDLWSYNAGLLVALENQHTIDLTDSEMNKLFERTRKQLRENAEDMGNGCFKIYHKCDNACIGSIRNGTYDHDVYRDEALNNRFQIKGVELKSGYKDWILWISFAISCFLLCVVLLGFIMWACQKGNIRCNICI

SEQ ID NO: 8501 - protein, 566 aa, Artificial Sequence
  derived and/or modified protein sequence (wt) from hemagglutinin__InfluenzaA__AFG72405
MKTIIALSYILCLVFAQKLPGNDNSTATLCLGHHAVPNGTLVKTITNDQIEVTNATELVQSSSTGRICDSPHRILDGKNCTLIDALLGDPNCDGFQNKEWDLFVERSKAYSNCYPYDVPDYASLRSLVASSGTLEFTNEDFNWTGVAQDGGSYACKRGSVKSFFSRLNWLHKLEYKYPALNVTMPNNGKFDKLYIWGVHHPSTDSDQTSLYVRASGRVTVSTKRSQQTVTPNIGSRPWVRGLSSRISIYWTIVKPGDILLINSTGNLIAPRGYFKIRNGKSSIMRSDAPIGTCSSECITPNGSIPNDKPFQNVNRITYGACPRYVKQNTLKLATGMRNVPEKQTRGIFGAIAGFIENGWEGMVDGWYGFRHQNSEGTGQAADLKSTQAAINQINGKLNRLIEKTNEKFHQIEKEFSEVEGRIQDLEKYVEDTKIDLWSYNAELLVALENQHTIDLTDSEMNKLFEKTRKQLRENAEDMGNGCFKIYHKCDNACIGSIRNGTYDHDVYRDEALNNRFQIKGVELKSGYKDWILWISFAISCFLLCVVLLGFIMWACQKGNIRCNICI

SEQ ID NO: 8502 - protein, 566 aa, Artificial Sequence
  derived and/or modified protein sequence (wt) from hemagglutinin__InfluenzaA__AFG72449
MKTIIALSYILCLVFAQKLPGNDNSTATLCLGHHAVPNGTLVKTITNDQIEVTNATELVQSSSTGRICYSPHRILDGNNCTLIDALLGDPHCDGFQNKEWDLFVERSKAYSNCYPYDVPDYASLRSLVASSGTLEFINEDFNWTGVAQDGKSYACKRGSVKGFFSRLNWLHKLEYKYPALNVTMPNNGKFDKLYIWGVHHPSTDSDQTSLYVRASGGVTVSTKRSQQTVIPSIGSRPWVRGLSSRISIYWTIVKPGDILLINSTGNLIAPRGYFKIRNGKSSIMRSDAPIGNCSSECITPNGSIPNDKPFQNVNRITYGACPRYVKQNTLKLATGMRNVPEKQTRGIFGAIAGFIENGWEGMVDGWYGFRHQNSEGTGQAADLKSTQAAIDQINGKLNRLIEKTNEKFHQIEKEFSEVEGRIQDLEKYVEDTKIDLWSYNAELLVALENQHTIDLTDSEMNKLFERTRKQLRENAEDMGNGCFKIYHKCDNACIGSIRNGTYDHDVYRDEALNNRFQIKGVELKSGYKDWILWISFAISCFLLCVVLLGFIMWACQKGNIRCNICI

SEQ ID NO: 8503 - protein, 566 aa, Artificial Sequence; identical to SEQ ID NO: 1053
  derived and/or modified protein sequence (wt) from hemagglutinin__InfluenzaA__AFG72460

SEQ ID NO: 8504 - protein, 566 aa, Artificial Sequence
  derived and/or modified protein sequence (wt) from hemagglutinin__InfluenzaA__AFG72504
MKTIIALSYILCLVFAQKLPGNDNSTATLCLGHHAVPNGTLVKTITNDQIEVTNATELVQSSSTGRICDSPHRILDGKNCTLIDALLGDPHCDGFQNKEWDLFVERSKAYSNCYPYDVPDYASLRSLVASSGTLEFINEDFNWTGVAQDGKSYACKRGSVKSFFSRLNWLHKLEYKYPALNVTMPNNGKFDKLYIWGVHHPSTDSDQTSLYVRASGRVTVSTKRSQQTVIPNIGFRPWVRGLSSRISIYWTIVKPGDILLINSTGNLIAPRGYFKIRNGKSSIIRSDAPIGNCSSECITPNGSIPNDKPFQNVNRITYGACPRYVKQNTLKLATGMRNVPEKQTRGIFGAIAGFIENGWEGMVDGWYGFRHQNSEGTGQAADLKSTQAAIDQINGKLNRLIEKTNEKFHQIEKEFSEVEGRIQDLEKYVEDTKIDLWSYNAGLLVALENQHTIDLTDSEMNKLFERTRKQLRENAEDMGNGCFKIYHKCDNACIGSIRNGTYDHDVYRDEALNNRFQIKGVELKSGYKDWILWISFAISCFLLCVVLLGFIMWACQKGNIRCNICI

SEQ ID NO: 8505 - protein, 566 aa, Artificial Sequence
  derived and/or modified protein sequence (wt) from hemagglutinin__InfluenzaA__AFG72515
MKTIIALSYILCLVFAQKLPGNDNSTATLCLGHHAVPNGTLVKTITNDQIEVTNATELVQSSPTGRICDSPHRILDGKNCTLIDALLGDPHCDGFQNKEWDLFVERSKAYSNCYPYDVPDYASLRSLVASSGTLEFINENFNWTGVAQDGKSYACKRGSVNSFFSRLNWLHKLEYKYPALNVTMPNNGKFDKLYIWGVHHPSTDSDQTSLYVRASGRVTVSTKRSQQTVIPDIGYRPWVRGLSSRISIYWTIVKPGDILLINSTGNLIAPRGYFKIRNGKSSIMRSDAPIGNCSSECITPNGSIPNDKPFQNVNRITYGACPRYVKQNTLKLATGMRNVPEKQTRGIFGAIAGFIENGWEGMVDGWYGFRHQNSEGTGQAADLKSTQAAIDQINGKLNRLVEKTNEKFHQIEKEFSEVEGRIQDLEKYVEDTKIDLWSYNAELLVALENQHTIDLTDSEMNKLFERTRKQLRENAEDMGNGCFKIYHKCDNACIGSIRNGTYDHDVYRDEALNNRFQIKGVELKSGYKDWILWISFAISCFLLCVVLLGFIMWACQKGNIRCNICI

SEQ ID NO: 8506 - protein, 566 aa, Artificial Sequence
  derived and/or modified protein sequence (wt) from hemagglutinin__InfluenzaA__AFG72526
MKTIIALSYILCLVFAQKLPGNDNSTATLCLGHHAVPNGTLVKTITNDQIEVTNATELVQSSSTGRICDSPHRILDGKNCTLIDALLGDPHCDGFQNKEWDLFVERSKAYSSCYPYDVPDYASLRSLVASSGTLEFINEDFNWTGVAQDGKSYACKRGSVNSFFSRLNWLHKLEYKYPALNVTMPNNGKFDKLYIWGVHHPSTDSDQTSLYVRASGRVIVSTKRSQQTVIPNIGSRPWVRGLSSRISIYWTIVKPGDILLINSTGNLIAPRGYFKIRTGKSSIMRSDAPIGNCSSECITPNGSIPNDKPFQNVNRITYGACPRYVKQNTLKLATGMRNVPEKQTRGIFGAIAGFIENGWEGMVDGWYGFRHQNSEGTGQAADLKSTQTAINQINGKLNRLIEKTNEKFHQIEKEFSEVEGRIQDLEKYVEDTKIDLWSYNAELLVALENQHTIDLTDSEMNKLFERTRKQLRENAEDMGNGCFKIYHKCDNACIGSIRNGTYDHDVYRDEALNNRFQIKGVELKSGYKDWILWISFAISCFLLCVVLLGFIMWACQKGNIRCNICI

SEQ ID NO: 8507 - protein, 566 aa, Artificial Sequence
  derived and/or modified protein sequence (wt) from hemagglutinin__InfluenzaA__AFG72581
MKTIIALSYILCLVFAQKLPGNDNSTATLCLGHHAVPNGTLVKTITNDQIEVTNATELVQSSSTGRICDSPHRILDGKNCTLIDALLGDPHCDGFQNKEWDLFVERSKAYSNCYPYDVPDYASLRSLVASSGTLEFINEDFNWTGVAQDGKSYACKRGSVNSFFSRLNWLHKLEYKYPALNVTMPNNGKFDKLYIWGVHHPSTDSDQTSLYVRASGGVTVSTKRSQQTVIPNIGYRPWVRGLSSRISIYWTIVKPGDILLINSTGNLIAPRGYFKIRNGKSSIMRSDAPIGNCSSECITPNGSISNDKPFQNVNRITYGACPRYVKQNTLKLATGMRNVPEKQTRGIFGAIAGFIENGWEGMVDGWYGFRHQNSEGTGQAADLKSTQAAIDQINGKLNRLIEKTNEKFHQIEKEFSEVEGRIQDLEKYVEDTKIDLWSYNAELLVALENQHTIDLTDSEMNKLFERTRKQLRENAEDMGNGCFKIYHKCDNACIGSIRNGTYDHDVYRDEALNNRFQIKGVELKSGYKDWILWISFAISCFLLCVVLLGFIMWACQKGNIRCNICI

SEQ ID NO: 8508 - protein, 566 aa, Artificial Sequence
  derived and/or modified protein sequence (wt) from hemagglutinin__InfluenzaA__AFG72603
MKTIIALSYILCLVFAQKLPGNDNSTATLCLGHHAVPNGTLVKTITNDQIEVTNATELVQSSSTGRICDSPHRILDGKNCTLIDALLGDPHCDGFQNKEWDLFVERSKAYSNCYPYDVPDYASLRSLVASSGTLEFTKEGFNWTGVAQDGKSYACKRGSVNSFFSRLNWLHKLEYKYPALNVTMPNNDKFDKLYIWGVHHPSTDSDQTSLYVQASGRVTVSTKRSQQTVIPNIGSRPWVRGISSRISIYWTIVKPGDILLINSTGNLIAPRGYFKIRNGKSSIMRSDAPIGNCKSECITPNGSIPNDKPFQNVNRITYGACPRYVKQNTLKLATGMRNVPEKQTRGIFGAIAGFIENGWEGMVDGWYGFRHQNSEGTGQAADLKSTQAATDQINGKLNRLIEKTNEKFHQIEKEFSEVEGRIQDLEKYVEDTKIDLWSYNAELLVALENQHTIDLTDSEMNKLFERTRKQLRENAEDMGNGCFKIYHKCDNACIGSIRNGTYDHDVYRDEALNNRFQIKGVELKSGYKDWILWISFAISCFLLCVVLLGFIMWACQKGNIRCNICI

SEQ ID NO: 8509 - protein, 566 aa, Artificial Sequence
  derived and/or modified protein sequence (wt) from hemagglutinin__InfluenzaA__AFG72614
MKTIIALSYILCLVFAQKLPGNDNSTATLCLGHHAVPNGTLVKTITNDQIEVTNATELVQSSSTGRICDSPHRILDGKNCTLIDALLGDPHCDGFQNKEWDLFVERSKAYSNCYPYDVPDYASLRSLVASSGTLEFTNEGFNWTGVAQDGTSYSCKRGSVKSFFSRLNWLHKLEYKYPALNVAMPNNDKFDKLYIWGVHHPSTDSDQTSLYVQASGRVTVSTKRSQQTVIPNIGSRPWVRGVSSRISIYWTIVKPGDILLINSTGNLIAPRGYFKIRSGKSSIMRSDAPIGNCNSECITPNGSIPNDKPFQNVNRITYGACPRYVKQNTLKLATGMRNVPEKQTRGIFGAIAGFIENGWEGMVDGWYGFRHQNSEGTGQAADLKSTQAAINQINGKLNRLIEKTNEKFHQIEKEFSEVEGRIQDLEKYVEDTKIDLWSYNAELLVALENQHTIDLTDSEMNKLFERTRKQLRENAEDMGNGCFKIYHKCDNACIGSIRNGTYDHDVYRDEALNNRFQIKGVELKSGYKDWILWISFAISCFLLCVVLLGFIMWACQKGNIRCNICI

SEQ ID NO: 8510 - protein, 566 aa, Artificial Sequence
  derived and/or modified protein sequence (wt) from hemagglutinin__InfluenzaA__AFG72625
MKTIIALSYILCLVFAQKLPGNDNSTATLCLGHHAVPNGTLVKTITNDQIEVTNATELVQSSSTGRICDSPHRILDGKNCTLIDALLGDPHCDGFQNKEWDLFVERSKAYSNCYPYDVPDYASLRSLVASSGTLEFTNEGFNWTGVAQDGTSYACKRGSVKSFFSRLNWLHKLEYKYPALNVTMPNNDKFDKLYIWGVHHPSTDSDQTSLYVQASGRVTVSTKRSQQTVIPNIGSRPWVRGISSRISIYWTIVKPGDILLIKSTGNLIAPRGYFKIRSGKSSIMRSDAPIGNCNSECITPNGSIPNDKPFQNVNRITYGACPRYVKQNTLKLATGMRNVPEKQTRGIFGAIAGFIENGWEGMVDGWYGFRHQNSEGTGQAADLKSTQAAINQINGKLNRLIEKTNEKFHQIEKEFSEVEGRIQDLEKYVEDTKIDLWSYNAELLVALENQHTIDLTDSEMNKLFERTRKQLRENAEDMGNGCFKIYHKCDNACIGSIRNGTYDHDVYRDEALNNRFQIKGVELKSGYKDWILWISFAISCFLLCVVLLGFIMWACQKGNIRCNICI

SEQ ID NO: 8511 - protein, 566 aa, Artificial Sequence
  derived and/or modified protein sequence (wt) from hemagglutinin__InfluenzaA__AFG72636
MKTIIALSYILCLVFAQKLPGNDNSTATLCLGHHAVPNGTLVKTITNDQIEVTNATELVQSSSTGRICDSPHRILDGKNCTLIDALLGDPHCDGFQNKEWDLFVERSKAYSNCYPYDVPDYASLRSLVASSGTLEFTNEGFNWTGVAQDGKSYACKRGSVKSFFSRLNWLHKLEFKYPALNVTMPNNDKFDKLYIWGVHHPSTDSDQTSLYVQASGRVTVSTKRSQQTVIPNIGSRPWVRGISSRISIYWTIVKPGDILLINSTGNLIAPRGYFKIRNGKSSIMRSDAPIDNCNSECITPNGSIPNDKPFQNVNRITYGACPRYVKQNTLKLATGMRNVPEKQTRGIFGAIAGFIENGWEGMVDGWYGFRHQNSEGTGQAADLKSTQAAIDQINGKLNRLIEKTNEKFHQIEKEFSEVEGRIQDLEKYVEDTKIDLWSYNAELLVALENQHTIDLTDSEMNKLFERTRKQLRENAEDMGNGCFKIYHKCDNACIGSIRNGTYDHDVYRDEALNNRFQIKGVELKSGYKDWILWISFAISCFLLCVVLLGFIMWACQKGNIRCNICI

SEQ ID NO: 8512 - protein, 566 aa, Artificial Sequence
  derived and/or modified protein sequence (wt) from hemagglutinin__InfluenzaA__AFG72658
MKTIIALSYILCLAFAQKLPGNDNSTATLCLGHHAVPNGTLVKTITNDQIEVTNATELVQSSSTGRICDSPHRILDGKNCTLIDALLGDPHCDGFQNKEWDLFVERSKAYSNCYPYDVPDYASLRSLVASSGTLEFTNEGFNWTGVAQDGKSYACKRGSVNSFFSRLNWLHKLEYKYPALNVTMPNNDKFDKLYIWGVHHPSTDSDQTSLYVQASGRVTVSTKRSQQTVIPNIGSRPWVRGISSRISIYWTIVKPGDILLINSTGNLIAPRGYFKIRNGKSSIMRSDAPIDNCNSECITPNGSIPNDKPFQNVNRITYGACPRYVKQNTLKLATGMRNVPEKQTRGIFGAIAGFIENGWEGMVDGWYGFRHQNSEGTGQAADLKSTQAAIDQINGKLNRLIEKTNEKFHQIEKEFSEVEGRIQDLEKYVEDTKIDLWSYNAELLVALENQHTIDLTDSEMNKLFERTRKQLRENAEDMGNGCFKIYHKCDNACIGSIRNGTYDHDVYRDEALNNRFQIKGVELKSGYKDWILWISFAISCFLLCVVLLGFIMWACQKGNIRCNICI

SEQ ID NO: 8513 - protein, 566 aa, Artificial Sequence
  derived and/or modified protein sequence (wt) from hemagglutinin__InfluenzaA__AFG72680
MKTIIALSYILCLVFAQKLPGNDNSTATLCLGHHAVPNGTLVKTITNDQIEVTNATELVQSSSTGIICDSPHRILDGKNCTLIDALLGDPHCDGFQNKEWDLFVERSKAYSNCYPYDVPDYASLRSLVASSGTLEFTNEGFNWTGVAQDGTSYACKRGSVKSFFSRLNWLHKLEYKYPALNVTMPNNDKFDKLYIWGVHHPSTDSDQTSLYVQASGRVTVSTRRSQQTVIPNIGSRPWVRGVSSRISIYWTIVKPGDILLINSTGNLIAPRGYFKIRSGKSSIMRSDAPIGNCNSECITPNGSIPNDKPFQNVNRITYGACPRYVKQNTLKLATGMRNVPEKQTRGIFGAIAGFIENGWEGMVDGWYGFRHQNSEGTGQAADLKSTQAAINQINRKLNRLIEKTNEKFHQIEKEFSEVEGRIQDLEKYVEDTKIDLWSYNAELLVALENQHTIDLTDSEMNKLFERTRKQLRENAEDMGNGCFKIYHKCDNACIGSIRNGTYDHDVYRDEALNNRFQIKGVELKSGYKDWILWISFAISCFLLCVVLLGFIMWACQKGNIRCNICI

SEQ ID NO: 8514 - protein, 566 aa, Artificial Sequence
  derived and/or modified protein sequence (wt) from hemagglutinin__InfluenzaA__AFG72691
MKTIIALSYILCLVFAQKLPGNDNSTATLCLGHHAVPNGTLVKTITNDQIEVTNATELVQSSSTGRICDSPHRILDGKNCTLIDALLGDPHCDGFKNKEWDLFVERSTAYSNCYPYDVPDYASLRSLVASSGTLEFTNEGFNWTGVAQDGTSYACKRGSVKSFFSRLNWLHKLEYKYPALNVTMPNNDKFDKLYIWGVHHPSTDSDQTSLYVQASGRVTVSTKRSQQTVIPNIGSRPWVRGVSSRISIYWTIVKPGDILLINSTGNLIAPRGYFKIRSGKSSIMRSDAPIDNCNSECITPNGSIPNGKPFQNVNRITYGACPRYVKQNTLKLATGMRNVPEKQTRGIFGAIAGFIENGWEGMVDGWYGFRHQNSEGTGQAADLKSTQAAINQINGKLNRLIEKTNEKFHQIEKEFSEVEGRIQDLEKYVEDTKIDLWSYNAELLVALENQHTIDLTDSEMNKLFERTRKQLRENAEDMGNGCFKIYHKCDNACIGSIRNGTYDHDVYRDEALNNRFQIKGVELKSGYKDWILWISFAISCFLLCVVLLGFIMWACQKGNIRCNICI

SEQ ID NO: 8515 - protein, 566 aa, Artificial Sequence
  derived and/or modified protein sequence (wt) from hemagglutinin__InfluenzaA__AFG72713
MKIIIALSYILCLVFAQKLPGNDNSTATLCLGHHAVPNGTLVKTITNDQIEVTNATELVQSSSTGRICDSPHQILDGKNCTLIDALLGDPHCDGFKNKEWDLFVERSTAYSNCYPYDVPDYASLRSLVASSGTLEFTNEGFNWTGVAQDGTSYACKRGSVKSFFSRLNWLHKLEYKYPALNVTMPNNDKFDKLYIWGVHHPSTDSDQTSLYVQASGRVTVSTKRSQQTVIPNIGSRPWVRGISSRISIYWTIVKPGDILLISSTGNLIAPRGYFKIRSGKSSIIRSDAPIDNCNSECITPNGSIPNDKPFQNVNRITYGACPRYVKQNTLKLATGMRNVPEKQTRGIFGAIAGFIENGWEGMVDGWYGFRHQNSEGTGQAADLKSTQAAINQINGKLNRLIEKTNEKFHQIEKEFSEVEGRIQDLEKYVEDTKIDLWSYNAELLVALENQHTIDLTDSEMNKLFERTRKQLRENAEDMGNGCFKIYHKCDNACIGSIRNGTYDHDVYRDEALNNRFQIKGVELKSGYKDWILWISFAISCFLLCVVLLGFIMWACQKGNIRCNICI

SEQ ID NO: 8516 - protein, 566 aa, Artificial Sequence
  derived and/or modified protein sequence (wt) from hemagglutinin__InfluenzaA__AFG72724
MKTIIALSYILCLVFAQKLPGNDNSTATLCLGHHAVPNGTLVKTITNDQIEVTNATELVQSSSTGRICDSPHRILDGKNCTLIDALLGDPHCDGFQNKEWDLFVERSKAYSNCYPYDVPDYASLRSLVASSGTLEFTNEGFNWTGVAQDGTSYACKRGSVKSFFSRLNWLHKLEYKYPALNVTMPNNDKFDKLYIWGVHHPSTDSDQTSLYVQASGRVTVSTKRSQQTVIPNIGSRPWVRGVSSRISIYWTIVKPGDILLINSTGNLIAPRGYFKIRSGKSSIMRSDAPIDNCNSECITPNGSIPNDKPFQNVNRITYGACPRYVKQNTLKLATGMRNVPEKQTRGIFGAIAGFIENGWEGMVDGWYGFRHQNSEGTGQAADLKSTQAAINQINGKLNRLIEKTNEKFHQIEKEFSEVEGRIQDLEKYVEDTKIDLWSYNAELLVALENQHTIDLTDSEMNKLFERTRKQLRENAEDMGNGCFKIYHKCDNVCIGSIRNGTYDHDVYRDEALNNRFQIKGVELKSGYKDWILWISFAISCFLLCVVLLGFIMWACQKGNIRCNICI

SEQ ID NO: 8517 - protein, 566 aa, Artificial Sequence
  derived and/or modified protein sequence (wt) from hemagglutinin__InfluenzaA__AFG72735
MKTIIALSYILCLVFAQKLPGNDNSTATLCLGHHAVPNGTLVKTITNDQIEVTNATELVQSSSTGRICDSPHRILDGKNCTLIDALLGDPHCDGFKNKEWDLFVERSTAYSNCYPYDVPDYASLRSLVASSGTLEFTNEGFNWTGVAQDGTSYACKRGSVKSFFSRLNWLHKLEYKYPALTVTMPNNDKFDKLYIWGVHHPSTDSDQTSIYVQASGRVTVSTKRSQQTVIPNIGSRPWVRGVSSRISIYWTIVKPGDILLINSTGNLIAPRGYFKIRSGKSSIMRSDAPIDNCNSECITPNGSIPNDKPFQNVNRITYGACPRYVKQNTLKLATGMRNVPEKQTRGIFGAIAGFIENGWEGMVDGWYGFRHQNSEGTGQAADLKSTQAAINQINGKLNRLIEKTNEKFHQIEKEFSEVEGRIQDLEKYVEDTKIDIWSYNAELLVALENQHTIDLTDSEMNKLFERTRKQLRENAEDMGNGCFKIYHKCDNACIGSIRNGTYDHDVYRDEALNNRFQIKGVELKSGYKDWILWISFAISCFLLCVVLLGFIMWACQKGNIRCNICI

SEQ ID NO: 8518 - protein, 566 aa, Artificial Sequence
  derived and/or modified protein sequence (wt) from hemagglutinin__InfluenzaA__AFG72757
MKTIIALSYILCLVFAQKIPGNDNSTATLCLGHHAVPNGTLVKTITNDQIEVTNATELVQSSSTGRICDSPHRILDGENCTLIDALLGDPHCDGFQNKEWDLFVERSKAYSNCYPYDVPDYASLRSLVASSGTLEFNNESFNWTGVAQNGTSYACKRSSIKSFFSRLNWLHQLKYKYPALNVTMPNNDKFDKLYIWGVHHPSTDSDQTSIYAQASGRVTVSTKRSQQTVIPNIGSRPWVRGISSRISIHWTIVKPGDILLINSTGNLIAPRGYFKIRSGKSSIMRSDAPIGKCNSECITPNGSIPNDKPFQNVNRITYGACPRYVKQNTLKLATGMRNVPEKQTRGIFGAIAGFIENGWEGMVDGWYGFRHQNSEGTGQAADLKSTQAAINQINGKLNRLIEKTNEKFHQIEKEFSEVEGRIQDLEKYVEDTKIDLWSYNAELLVALENQHTIDLTDSEMNKLFERTRKQLRENAEDMGNGCFKIYHKCDNACIGSIRNGTYDHDVYRDEALNNRFQIKGVELKSGYKDWILWISFAISCFLLCVVLLGFIMWACQKGNIRCNICI

SEQ ID NO: 8519 - protein, 566 aa, Artificial Sequence
  derived and/or modified protein sequence (wt) from hemagglutinin__InfluenzaA__AFG72779
MKTIIALSYILCLVFAQKLPGNDNSTATLCLGHHAVPNGTLVKTITNDQIEVTNATELVQSSSTGRICDSPHRILDGENCTLIDALLGDPHCDGFQNKEWDLFVERSKAYSNCYPYDVPDYASLRSLVASSGTLEFNNESFNWTGVAQNGTSSACKRRSIKSFFSRLNWLHQLKYKYPALNVTMPNNDKFDKLYIWGVHHPSTDSDQTSLYAQASGRVTVSTRRSQQTVIPNIGSRPWVRGVSSGISIYWTIVKPGDILLINSTGNLIAPRGYFKIRSGKSSIMRSDAPIGKCNSECITPNGSIPNDKPFQNVNRITYGACPRYVKQNTLKLATGMRNVPEKQTRGIFGAIAGFIENGWEGMVDGWYGFRHQNSEGTGQAADLKSTQAAINQINGKLNRLIEKTNEKFHQIEKEFSEVEGRIQDLEKYVEDTKIDLWSYNAELLVALENQHTIDLTDSEMNKLFERTRKQLRENAEDMGNGCFKIYHKCDNACIGSIRNGTYDHDVYRDEALNNRFQIKGVELKSGYKDWILWISFAISCFLLCVVLLGFIMWACQKGNIRCNICI

SEQ ID NO: 8520 - protein, 566 aa, Artificial Sequence
  derived and/or modified protein sequence (wt) from hemagglutinin__InfluenzaA__AFG72801
MKTIIALSYILCLVFAQKLPGNDNSTATLCLGHHAVSNGTLVKTITNDQIEVTNATELVQSSSTGRICDSPHQILDGENCTLIDALLGDPHCDGFQNKEWDLFVERSKAYSNCYPYDVPDYASLRSLVASSGTLEFNNESFNWTGVAQNGTSSACKRRSNKSFFSRLNWLHQLKYKYPALNVTMPNNEKFDKLYIWGVHHPSTDSDQISIYAQSSGRVTVSTKRSQQTVIPNIGSSPWVRGVSSRISIYWTIVKPGDILLINSTGNLIAPRGYFKIRSGKSSIMRSDAPIGKCNSECITPNGSIPNDKPFQNVNRITYGACPRYVKQNTLKLATGMRNVPEKQTRGIFGAIAGFIENGWEGMVDGWYGFRHQNSEGTGQAADLKSTQAAINQINGKLNRLIEKTNEKFHQIEKEFSEVEGRIQDLEKYVEDTKIDLWSYNAELLVALENQHTIDLTDSEMNKLFERTKKQLRENAEDMGNGCFKIYHKCDNACIGSIRNGTYDHDVYRDEALNNRFQIKGVELKSGYKDWILWISFAISCFLLCVVLLGFIMWACQKGNIRCNICI

SEQ ID NO: 8521 - protein, 566 aa, Artificial Sequence
  derived and/or modified protein sequence (wt) from hemagglutinin__InfluenzaA__AFG72812
MKTIIALSYILCLVFAQKLPGNDNSTATLCLGHHAVPNGTLVKTITNDQIEVTNATELVQSSSTGRICDSPHQILDGENCTLIDALLGDPHCDGFQNKEWDLFVERSKAYSNCYPYDVPDYVSLRSLVASSGTLEFNNESFNWTGVAQNGTSSACKRRSNKSFFSRLNWLHQLKYKYPALNVTMPNNEKFDKLYIWGVHHPGTDSDQISLYAQASGRVTVSTKRSQQTVIPNIGSRPWVRGVSSRISIYWTIVKPGDILLINSTGNLIAPRGYFKIRSGKSSIMRSDAPIGKCNSECITPNGSIPNDKPFQNVNRITYGACPRYVKQNTLKLATGMRNVPEKQTRGIFGAIAGFIENGWEGMMDGWYGFRHLNSEGTGQAADLKSTQAAINQINGKLNRLIEKTNEKFHQIEKEFSEVEGRIQDLEKYVEDTKIDLWSYNAELLVALENQHTIDLTDSEMNKLFERTKKQLRENAEDMGNGCFKIYHKCDNACIGSIRNGTYDHDVYRDEALNNRFQIKGVELKSGYKDWILWISFAISCFLLCIVLLGFIMWACQKGNIRCNICI

SEQ ID NO: 8522 - protein, 566 aa, Artificial Sequence
  derived and/or modified protein sequence (wt) from hemagglutinin__InfluenzaA__AFG72823
MKTIIALSYILCLVFAQKLPGNDNSTATLCLGHHAVPNGTIVKTITNDQIEVTNATELVQSSSTGGICDSPHQILDGENCTLIDALLGDPQCDGFQNKKWDLFVERSKAYSNCYPYDVPDYASLRSLVASSGTLEFNNESFNWTGVTQNGTSSACKRRSNKSFFSRLNWLTHLKYKYPALNVTMPNNEKFDKLYIWGVLHPGTDSDQISLYAQASGRITVSTKRSQQTVIPNIGSRPRVRGVSSRISIYWTIVKPGDILLINSTGNLIAPRGYFKIRSGKSSIMRSDAPIGKCNSECITPNGSIPNDKPFQNVNRITYGACPRYIKQNTLKLATGMRNVPEKQTRGIFGAIAGFIENGWEGMVDGWYGFRHQNSEGTGQAADLKSTQAAINQINGKLNRLIGKTNEKFHQIEKEFSEVEGRIQDLEKYVEDTKIDLWSYNAELLVALENQHTIDLTDSEMNKLFERTKKQLRENAEDMGNGCFKIYHKCDNACIGSIRNGTYDHDVYRDEALNNRFQIKGVELKSGYKDWILWISFAISCFLLCVALLGFIMWACQKGNIRCNICI

SEQ ID NO: 8523 - protein, 566 aa, Artificial Sequence
  derived and/or modified protein sequence (wt) from hemagglutinin__InfluenzaA__AFG72834
MKTIIALSYILCLVFAQKLPGNDNSTATLCLGHHAVPNGTLVKTITNDQIEVTNATELVQSSSTGRICDSPHQILDGENCTLIDALLGDPHCDGFQNKEWDLFVERSKAYSNCYPYDVPDYVSLRSLVASSGTLEFNNESFNWTGVAQNGTSSACKRRSNKSFFSRLNWLHQLKYKYPALNVTMPNNEKFDKLYIWGVHHPGTDSDQISLYAQASGRVTVSTKRSQQTVIPNIGSRPWVRGVSSRISIYWTIVKPGDILLINSTGNLIAPRGYFKIQSGKSSIMRSDAPIGKCNSECITPNGSIPNDKPFQNVNRITYGACPRYVKQNTLKLATGMRNVPEKQTRGIFGAIAGFIENGWEGMMDGWYGFRHQNSEGTGQAADLKSTQAAINQINGKLNRLIEKTNEKFHQIEKEFSEVEGRIQDLEKYVEDTKIDLWSYNAELLVALENQHTIDLTDSEMNKLFERTKKQLRENAEDMGNGCFKIYHKCDNACIGSIRNGTYDHDVYRDEALNNRFQIKGVELKSGYKDWILWISFAISCFLLCIVLLGFIMWACQKGNIRCNICI

SEQ ID NO: 8524 - protein, 566 aa, Artificial Sequence
  derived and/or modified protein sequence (wt) from hemagglutinin__InfluenzaA__AFG72845
MKTIIALSYILCLVFAQKLPGNDNSTATLCLGHHAVPNGTLVKTITNDQIEVTNATELVQSSSTSRICDSPHQILDGENCTLIDALLGDPHCDGFQNKEWDLFVERSKAYSNCYPYDVPDYVSLRSLVASSGTLEFNNESFNWTGVAQNGTSSACKRRSDKSFFSRLNWLHQLRYKYPALNVTMPNNEKFDKLYIWGVHHPGTDSDQISLYAQASGRVTISTKRSQQTVIPNIGSRPWVRGVSSRISIHWTIVKPGDILLINSTGNLIAPRGYFKIRSGKSSIMRSDAPIGKCNSECITPNGSIPNDKPFQNVNRITYGACPRYVKQKTLKLATGMRNVPEKQTRGIFGAIAGFIENGWEGMMDGWYGFRHQNSEGTGQAADLKSTQAAINQINGKLNRLIEKTNEKFHQIEKEFSEVEGRIQDLEKYVEDTKIDLWSYNAELLVALENQHTIDLTDSEMNKLFERTKKQLRENAEDMGNGCFKIYHKCDNACIGSIRNGTYDHDVYRDEALNNRFQIKGVELKSGYKDWILWISFAISCFLLCIVLLGFIMWACQKGNIRCNICI

SEQ ID NO: 8525 - protein, 566 aa, Artificial Sequence
  derived and/or modified protein sequence (wt) from hemagglutinin__InfluenzaA__AFG72856
MKTIIALSYILCLVFAQKLPGNDNSTATLCLGHHAVPNGTIVKTITNDQIEVTNATELVQSSSTGGICDSPHQILDGENCTLIDALLGDPQCDGFQNKKWDLFVERSKAYSNCYPYDVPDYASLRSLIASSGTLEFTNESFNWTGVTQNGTSSACKRRSNKSFFSRLNWLTHLKYKYPALNVTMPNNEKFDKLYIWGVHHPGTDSDQISLYAQASGRITVSTKRSQQTVIPNIGSRPRVRDISSRISIYWTIVKPGDILLINSTGNLIAPRGYFKIRSGKSSIMRSDAPIGKCNSECITPNGSIPNDKPFQNVNRITYGACPRYVKQNTLKLATGMRNVPEKQTRGIFGAIAGFIENGWEGMVDGWYGFRHQNSEGTGQAADLKSTQAAINQINGKLNKLIGKTNEKFHQIEKEFSEVEGRIQDLEKYVEDTKIDLWSYNAELLVALENQHTIDLTDSEMNKLFERTKKQLRENAEDMGNGCFKIYHKCDNACIGSIRNGTYDHDVYRDEALNNRFQIKGVELKSGYKDWILWISFAISCFLLCVVLLGFIMWACQKGNIRCNICI

SEQ ID NO: 8526 - protein, 566 aa, Artificial Sequence
  derived and/or modified protein sequence (wt) from hemagglutinin__InfluenzaA__AFG72867
MKTIIALSYILCLVFAQKLPGNDNSTATLCLGHHAVPNGTLVKTITNDQIEVTNATELVQSSSTGRICDSPHQILDGENCTLIDALLGDPHCDGFQNKEWDLFVERSKAYSNCYPYDVPDYVSLRSLVASSGTLEFNNESFNWTGVAQNGTSSACKRRSNKSFFSRLNWLHQLKNKYPALNVTMPNNEKFDKLYIWGVHHPGTDSDQISLYAQASGRVTVSTKRSQQTVIPNIGSRPRVRDISSRISIYWTIVKPGDILLINSTGNLIAPRGYFKIRSGKSSIMRSDAPIGKCNSECITPNGSIPNDKPFQNVNRITYGACPRYVKQNTLKLATGMRNVPEKQTRGIFGAIAGFIENGWEGMMDGWYGFRHQNSEGTGQAADLKSTQAAINQINGKLNRLIEKTNEKFHQIEKEFSEVEGRIQDLEKYVEDTKIDLWSYNAELLVALENQHTIDLTDSEMNKLFERTKKQLRENAEDMGNGCFKIYHKCDNACIGSIRNGTYDHDVYRDEALNNRFQIKGVELKSGYKDWILWISFAISCFLLCIVLLGFIMWACQKGNIRCNICI

SEQ ID NO: 8527 - protein, 566 aa, Artificial Sequence
  derived and/or modified protein sequence (wt) from hemagglutinin__InfluenzaA__AFG72922
MKTIIALSYILCLVFAQKLPGDDNSTATLCLGHHAVPNGTIVKTITNDQIEVTNATELVQSSSTGEICDSPHQILDGENCTLIDALLGDPQCDGFQNKKWDLFVERSKAYSNCYPYDVPDYASLRSLVASSGTLEFNNESFNWTGVTQNGTSSSCIRKSNNSFFSRLNWLTHLKFKYPALNVTMPNNEQFDKLYIWGVHHPGTDNDQIFLYAQASGRITVSTKRSQQTVIPNIGSRPRVRNIPSRISIYWTIVKPGDILLINSTGNLIAPRGYFKIRSGKSSIMRSDAPIGKCNSECITPNGSIPNDKPFQNVNRITYGACPRYVKQNTLKLATGMRNVPEKQTRGIFGAIAGFIENGWEGMVDGWYGFRHQNSEGRGQAADLKSTQAAIDQINGKLNRLIGKTNEKFHQIEKEFSEVEGRIQDLEKYVEDTKIDLWSYNAELLVALENQHTIDLTDSEMNKLFEKTKKQLRENAEDMGNGCFKIYHKCDNACIGSIRNGTYDHDVYRDEALNNRFQIKGVELKSGYKDWILWISFAISCFLLCVALLGFIMWACQKGNIRCNICI

SEQ ID NO: 8528 - protein, 566 aa, Artificial Sequence
  derived and/or modified protein sequence (wt) from hemagglutinin__InfluenzaA__AFG72933
MKTIIALSYILCLVFAQKLPGNDNSTATLCLGHHAVPNGTIVKTITNDQIEVTNATELVQSSSTGEICDSPHQILDGENCTLIDALLGDPQCDGFQNKKWDLFVERSKAYSNCYPYDVPDYASLRSLVASSGTLEFNNESFNWTGVTQNGTSSACVRRSNNSFFSRLNWLTHLKFKYPALNVTMPNNEQFDKLYIWGVHHPGTDNDQIFLYAQASGRITVSTKRSQQTVIPNIGSRPRVRNIPSRISIYWTIVKPGDILLINSTGNLIAPRGYFKIRSGKSSIMRSDAPIGKCNSECITPNGSIPNDKPFQNVNRITYGACPRYVKQNTLKLATGMRNVPEKQTRGIFGAIAGFIENGWEGMVDGWYGFRHQNSEGRGQAADLKSTQAAIDQINGKLNRLIGKTNEKFHQIEKEFSEVEGRIQDLEKYVEDTKIDLWSYNAELLVALENQHTIDLTDSEMNKLFEKTKKQLRENAEDMGNGCFKIYHKCDNACIGSIRNGTYDHDVYRDEALNNRFQIKGVELKSGYKDWILWISFAISCFLLCVALLGFIMWACQKGNIRCNICI

SEQ ID NO: 8529 - protein, 566 aa, Artificial Sequence
  derived and/or modified protein sequence (wt) from hemagglutinin__InfluenzaA__AFG72955
MKTIIALSYILCLVFAQKLPGNDNSTATLCLGHHAVPNGTIVKTITNDQIEVTNATELVQSSSTGEICDSPHQILDGENCTLIDALLGDPQCDGFQNKKWDLFVERSKAYSNCYPYDVPDYASLRSLIASSGTLEFNNESFNWTGVTQNGTSSACIRRSNNSFFSRLNWLTHLRFKYPALNVTMPNNEQFDKLYIWGVHHPGTDNDQIFLYAQASGRITVSTKRSQQTVIPNIGSRPRVRNIPSRISIYWTIVKPGDILLINSTGNLIAPRGYFKIRSGKSSIMRSDAPIGKCNSECITPNGSIPNDKPFQNVNRITYGACPRYVKQNTLKLATGMRNVPEKQTRGIFGAIAGFIENGWEGMVDGWYGFRHQNSEGRGQAADLKSTQAAIDQINGKLNRLIGKTNEKFHQIEKEFSEVEGRIQDLEKYVEDTKIDLWSYNAELLVALENQHTIDLTDSEMNKLFEKTKKQLRENAEDMGNGCFKIYHKCDNACIGSIRNGTYDHDVYRDEALNNRFQIKGVELKSGYKDWILWISFAISCFLLCVALLGFIMWACQKGNIRCNICI

SEQ ID NO: 8530 - protein, 566 aa, Artificial Sequence; identical to SEQ ID NO: 1640
  derived and/or modified protein sequence (wt) from hemagglutinin__InfluenzaA__AFG98808

SEQ ID NO: 8531 - protein, 566 aa, Artificial Sequence; identical to SEQ ID NO: 1640
  derived and/or modified protein sequence (wt) from hemagglutinin__InfluenzaA__AFG98819

SEQ ID NO: 8532 - protein, 566 aa, Artificial Sequence
  derived and/or modified protein sequence (wt) from hemagglutinin__InfluenzaA__AFG98830
MKTIIALSYIFCLVLGQDLPGNDKSTATLCLGHHAVPNGTLVKTITNDQIEVTNATELVQSSSTGKICNNPHRILDGIDCTLIDALLGDPHCDGFQNETWDLFVERSKAFSNCYPYDVPDYASLRSLVASSGTLEFITEGFTWTGVTQNGGSSACKRGPGSGFFSRLNWLTKSGSTYPVLNVTMPNNDNFDKLYIWGVHHPSTNQEQTSLYVQASGRVTVSTRRSQQTIIPNIGSRPWVRGLSSRISIYWTIVKPGDILIINSNGNLIAPRGYFKMRTGKSSIMRSDAPIDTCISECITPNGSIPNDKPFQNVNKITYGACPKYVKQNTLKLATGMRNVPEKQTRGLFGAIAGFIENGWEGMIDGWYGFRHQNSEGTGQAADLKSTQAAIDQINGKLNRVIEKTNEKFHQIEKEFSEVEGRIQDLEKYVEDTKIDLWSYNAELLVALENQHTIDLTDSEMNKLFEKTRRQLRENAEDMGNGCFKIYHKCDNACIGSIRNGTYDHDVYRDEALNNRFQIKGVELKSGYKDWILWISFAISCFLLCVVLLGFIMWACQKGNIRCNICI

SEQ ID NO: 8533 - protein, 566 aa, Artificial Sequence
  derived and/or modified protein sequence (wt) from hemagglutinin__InfluenzaA__AFG98841
MKTIIALSYIFCLVLGQDLPGNDKSTATLCLGHHAVPNGTLVKTITNDQIEVTNATELVQSSSTGKICNNPHRILDGIDCTLIDALLGDPHCDGFQNETWDLFVERSKAFSNCYPYDVPDYASLRSLVASSGTLEFITEGFTWTGVTQNGGSNACKRGPGSGFFSRLNWLTKSGSTYPVLNVTMPNNDNFDKLYIWGVHHPSTNQEQTSLYVQASGRVTVSTRRSQQTIIPNIGSRPWVRGLSSRISIYWTIVKPGDILIINSNGNLIAPRGYFKMRTGKSSIMRSDAPIGTCISECITPNGSIPNDKPFQNVNKITYGACPKYVKQNTLKLATGMRNVPEKQTRGLFGAIAGFIENGWEGMIDGWYGFRHQNSEGTGQAADLKSTQAAIDQINGKLNRVIEKTNEKFHQIEKEFSEVEGRIQDLEKYVEDTKIDLWSYNAELLVALENQHTIDLTDSEMNKLFEKTRRQLRENAEDMGNGCFKIYHKCDNACIGSIRNGTYDHDVYRDEALNNRFQIKGVELKSGYKDWILWISFAISCFLLCVVLLGFIMWACQKGNIRCNICI

SEQ ID NO: 8534 - protein, 566 aa, Artificial Sequence; identical to SEQ ID NO: 305
  derived and/or modified protein sequence (wt) from hemagglutinin__InfluenzaA__AFG98852

SEQ ID NO: 8535 - protein, 566 aa, Artificial Sequence
  derived and/or modified protein sequence (wt) from hemagglutinin__InfluenzaA__AFG98863
MKTIIALSYIFCLVLGQDLPGNDNSTATLCLGHHAVPNGTLVKTITNDQIEVTNATELVQSSSTGKICNNPHRILDGIDCTLIDALLGDPHCDGFQNETWDLFVERSKAFSNCYPYDVPDYASLRSLVASSGTLEFINEGFTWTGVTQNGGSSACKRGPDSGFFSRLNWLYKSGSTYPVLNVTMPNNDNFDKLYIWGVHHPSTNQEQTSLYVQASGRVTVSTKRSQQTIIPNIGSRPWVRGLSSRISIYWTIVKPGDILVINSNGNLIAPRGYFKMRTGKSSIMRSDAPIGTCISECITPNGSIPNDKPFQNVNKITYGACPKYVKQNTLKLATGMRNVPEKQTRGLFGAIAGFIENGWEGMIDGWYGFRHQNSEGTGQAADLKSTQAAIDQINGKLNRVIEKTNEKFHQIEKEFSEVEGRIQDLEKYVEDTKIDLWSYNAELLVALENQHTIDLTDSEMNKLFEKTRRQLRENAEDMGNGCFRIYHKCDNACIGSIRNGTYDHDVYRDEALNNRFQIKGVELKSGYKDWILWISFAISCFLLCVVLLGFIMWACQKGNIRCNICI

SEQ ID NO: 8536 - protein, 566 aa, Artificial Sequence
  derived and/or modified protein sequence (wt) from hemagglutinin__InfluenzaA__AFG98874
MKTIIALSYIFCLVLGQDFPGNDNSTATLCLGHHAVPNGTLVKTITNDQIEVTNATELVQSSSTGKICNNPHRILDGIDCTLIDALLGDPHCDGFQNETWDLFVERSKAFSNCYPYDVPDYASLRSLVASSGTLEFINEGFTWTGVTQNGGSNACKRGPDNGFFSRLNWLYKSGSTYPVLNVTMPNNDNFDKLYIWGVHHPSTDQEQTSLYVQASGRVTVSTKRSQQTIIPNIGSRPWVRGLSSRISIYWTIVKPGDILVINSNGNLIAPRGYFKMRTGKSSIMRSDAPIGTCISECITPNGSIPNDKPFQNVNKITYGACPKYVKQNTLKLATGMRNVPEKQTRGLFGAIAGFIENGWEGMIDGWYGFRHQNSEGTGQAADLKSTQAAIDQINGKLNRVIEKTNEKFHQIEKEFSEVEGRIQDLEKYVEDTKIDLWSYNAELLVALENQHTIDLTDSEMNKLFEKTRRQLRENAEDMGNGCFKIYHKCDNACIGSIRNGTYDHDVYRDEALNNRFQIKGVELKSGYKDWILWISFAISCFLLCVVLLGFIMWACQKGNIRCNICI

SEQ ID NO: 8537 - protein, 566 aa, Artificial Sequence
  derived and/or modified protein sequence (wt) from hemagglutinin__InfluenzaA__AFG98885
MKTIIALSYIFCLVLGQDFPGNDNSTATLCLGHHAVPNGTLVKTITNDQIEVTNATELVQSSSTGKICNNPHRILDGIDCTLIDALLGDPHCDGFQNETWDLFVERSKAFSNCYPYDVPDYASLRSLVASSGTLEFINEGFTWTGVTQNGGSNACKRGTDSGFFSRLNWLYKSGSTYPVLNVTMPNNDNFDKLYIWGVHHPSTDQEQTSLYVQASGRVTVSTKRSQQTIIPNIGSRPWVRGLSSRISIYWTIVKPGDILVINSNGNLIAPRGYFKMRTGKSSIMRSDAPIGTCISECITPNGSIPNDKPFQNVNKITYGACPKYVKQNTLKLATGMRNVPEKQTRGLFGAIAGFIENGWEGMIDGWYGFRHQNSEGTGQAADLKSTQAAIDQINGKLNRVIEKTNEKFHQIEKEFSEVEGRIQDLEKYVEDTKIDLWSYNAELLVALENQHTIDLTDSEMNKLFEKTRRQLRENAEDMGNGCFKIYHKCDNACIGSIRNGTYDHDVYRDEALNNRFQIKGVELKSGYKDWILWISFAISCFLLCVVLLGFIMWACQKGNIRCNICI

SEQ ID NO: 8538 - protein, 566 aa, Artificial Sequence
  derived and/or modified protein sequence (wt) from hemagglutinin__InfluenzaA__AFG98896
MKTIIALSYIFCLVLGQDFPGNDNSTATLCLGHHAVPNGTLVKTITNDQIEVTNATELVQSSSTGKICNNPHRILDGINCTLIDALLGDPHCDGFQNETWDLFVERSKAFSNCYPYDVPDYASLRSLVASSGTLEFINEGFTWTGVTQNGGSNACKRGPDSGFFSRLNWLYKSGSAYPVLNVTMPNNDNFDKLYIWGVHHPSTDQEQTNLYVQTSGRVTVSTKRSQQTIIPNIGSRPWVRGLSSRISIYWTIVKPGDILVINSNGNLIAPRGYFKMRTGKSSIMRSDAPIGTCISECITPNGSIPNDKPFQNVNKITYGACPKYVKQNTLKLATGMRNVPEKQTRGIFGAIAGFIENGWEGMIDGWYGFRHQNSEGTGQAADLKSTQAAIDQINGKLNRVIEKTNEKFHQIEKEFSEVEGRIQDLEKYVEDTKIDLWSYNAELLVALENQHTIDLTDSEMNKLFEKTRRQLRENAEDMGNGCFKIYHKCDNACIGSIRNGTYDHDVYRDEALNNRFQIKGVELKSGYKDWILWISFAISCFLLCVVLLGFIMWACQKGNIRCNICI

SEQ ID NO: 8539 - protein, 566 aa, Artificial Sequence
  derived and/or modified protein sequence (wt) from hemagglutinin__InfluenzaA__AFG98907
MKTIIALSYIFCLVLGQDLPGNDNSTATLCLGHHAVPNGTLVKTITNDQIEVTNATELVQSSSTGKICNNPHRILDGINCTLIDALLGDPHCDGFQNEKWDLFVERSKAFSNCYPYDVPDYASLRSLVASSGTLEFINEGFNWTGVTQNGGSNACKRGPDCGFFSRLNWLYKSGSTYPVLNVTMPNNDNFDKLYIWGVHHPSTDQEQTNLYVQASGRVTVSTKRSQQTIIPNIGSRPWVRGLSSRISIYWTIVKPGDILVINSNGNLIAPRGYFKMRTGKSSIMRSDAPIGTCISECITPNGSIPNDKPFQNVNKITYGACPKYVKQNTLKLATGMRNVPEKQTRGIFGAIAGFIENGWEGMIDGWYGFRHQNSEGTGQAADLKSTQAAIDQINGKLNRVIEKTNEKFHQIEKEFSEVEGRIQDLEKYVEDTKIDLWSYNAELLVALENQHTIDLTDSEMNKLFEKTRRQLRENAEDMGNGCFKIYHKCDNACIGSIRNGTYNHDVYRDEALNNRFQIKGVELKSGYKDWILWISFAISCFLLCVVLLGFIMWACQKGNIRCNICI

SEQ ID NO: 8540 - protein, 566 aa, Artificial Sequence
  derived and/or modified protein sequence (wt) from hemagglutinin__InfluenzaA__AFG98918
MKTIIALSYIFCLVLGQDLPGNDNSTATLCLGHHAVPNGTLVKTITNDQIEVTNATELVQSSSTGKICNNPHRILDGINCTLIDALLGDPHCDGFQNEKWDLFVERSKAFSNCYPYDVPDYASLRSLVASSGTLEFINEGFNWTGVTQNGGSNACKRGPDRGFFSRLNWLYKSGSTYPVLNVTMPNNDNFDKLYIWGVHHPSTDQEQTNLYVQASGRVTVSTKRSQQTIIPNIGSRPWVRGLSSRISIYWTIVKPGDILVINSNGNLIAPRGYFKMRTGKSSIMRSDAPIGTCISECITPNGSIPNDKPFQNVNKITYGACPKYVKQNTLKLATGMRNVPEKQTRGIFGAIAGFIENGWEGMIDGWYGFRHQNSEGTGQAADLKSTQAAIDQINGKLNRVIEKTNEKFHQIEKEFSEVEGRIQDLEKYVEDTKIDLWSYNAELLVALENQHTIDLTDSEMNKLFEKTRRQLRENAEDMGNGCFKIYHKCDNACIGSIRNGTYNHDVYRDEALNNRFQIKGVELKSGYKDWILWISFAISCFLLCVVLLGFIMWACQKGNIRCNICI

SEQ ID NO: 8541 - protein, 566 aa, Artificial Sequence
  derived and/or modified protein sequence (wt) from hemagglutinin__InfluenzaA__AFG98929
MKTVIALSYIFCLVLGQDLPGNDNSTATLCLGHHAVPNGTLVKTITNDQIEVTNATELVQSSSTGKICNNPHRILDGINCTLIDALLGDPHCDGFQNEKWDLFVERSKAFSNCYPYDVPDYASLRSLVASSGTLEFINEGFNWTGVTQNGGSNACKRGPDIGFFSRLNWLYKSGSTYPVLNVTMPNNDNFDKLYIWGVHHPSTDQEQTNLYVQASGRVTVSTKRSQQTIIPNIGSRPWVRGLSSRISIYWTIVKPGDILVINSNGNLIAPRGYFKMRTGKSSIMRSDAPIGTCISECITPNGSIPNDKPFQNVNKITYGACPKYVKQNTLKLATGMRNVPEKQTRGIFGAIAGFIENGWEGMIDGWYGFRHQNSEGTGQAADLKSTQAAIDQINGKLNRVIEKTNEKFHQIEKEFSEVEGRIQDLEKYVEDTKIDLWSYNAELLVALENQHTIDLTDSEMNKLFEKTRRQLRENAEDMGNGCFKIYHKCDNACIGSIRNGTYNHDVYRDEALNNRFQIKGVELKSGYKDWILWISFAISCFLLCVVLLGFIMWACQKGNIRCNICI

SEQ ID NO: 8542 - protein, 566 aa, Artificial Sequence
  derived and/or modified protein sequence (wt) from hemagglutinin__InfluenzaA__AFG98940
MKTIIALSYIFCLVLGQDLPGNDNSTATLCLGHHAVPNGTLVKTITNDQIEVTNATELVQSSSTGKICNNPHRILDGINCTLIDALLGDPHCDGFQNEKWDLFVERSKAFSNCYPYDVPDYASLRSLVASSGTLEFINEGFNWTGVTQNGGSNACKRGPDSGFFSRLNWLYKSGSTYPVLNVTMPNKDNFDKLYIWGVHHPSTDQEQTNLYVQASGRVTVSTKRSQQTIIPNIGSRPWVRGMSSRISIYWTIVKPGDILVINSNGNLIAPRGYFKMRTGRSSIMRSDAPIGTCISECITPNGSIPNDRPFQNVNKITYGACPKYVKQNTLKLATGMRNVPEKQTRGIFGAIAGFIENGWEGMIDGWYGFRHQNSEGTGQAADLKSTQAAIDQINGKLNRVIEKTNEKFHQIEKEFSEVEGRIQDLEKYVEDTKIDLWSYNAELLVALENQHTIDLTDSEMNKLFEKTRRQLRENAEDMGNGCFKIYHKCDNACIESIRNGTYNHDVYRDEALNNRFQIKGVELKSGYKDWILWISFAISCFLLCVVLLGFIMWACQKGNIRCNICI

SEQ ID NO: 8543 - protein, 566 aa, Artificial Sequence
  derived and/or modified protein sequence (wt) from hemagglutinin__InfluenzaA__AFG98962
MKTIIALSYIFCLVLAQDLPGNDNSTATLCLGHHAVPNGTLVKTITNDQIEVTNATELVQSSSTGKICNNPHRILDGINCTLIDALLGDPHCDGFQNEKWDLFVERSKAFSNCYPYDVPDYASLRSLVASSGTLEFINEGFNWTGVTQNGGSNACKRGPDSGFFSRLNWLYKSGSTYPVLNVTMPNNDNFDKLYIWGVHHPSTDQEQTNLYVQASGRVTVSTKRSQQTIIPNVGSRPWVRGLSSRISIYWTIVKPGDILVINSNGNLIAPRGYFKMRTGKSSIMRSDAPIGTCSSECITPNGSIPNDKPFQNVNKITYGACPKYVKQNTLKLATGMRNVPEKQTRGIFGAIAGFIENGWEGMIDGWYGFRHQNSEGTGQAADLKSTQAAIDQINGKLNRVIEKTNEKFHQIEKEFSEVEGRIQDLEKYVEDTKIDLWSYNAELLVALENQHTIDLTDSEMNKLFEKTRRQLRENAEDMGNGCFKIYHKCDNACIGSIRNGTYDHDVYRDEALNNRFQIKGVELKSGYKDWILWISFAISCFLLCVVLLGFIMWACQKGNIRCNICI

SEQ ID NO: 8544 - protein, 566 aa, Artificial Sequence
  derived and/or modified protein sequence (wt) from hemagglutinin__InfluenzaA__AFG98973
MKTIIALSYIFCLVLGQDFPRNDNSTATLCLGHHAVPNGTLVKTITNDQIEVTNANELVQSSSTGKICNNPHRILDGMDCTLIDALLGDPHCDGLQNETWDLFVERSKAFSNCYPYDVPDYASLRSLVASSGTLEFINEGFTWTGVTQNGGSNACKRGPDRGFFSRLNWLYKSGNTYPVLNVTMPNNDNFDKLYIWGVHHPSTDQDQTSLYVQASGRVTVSTKRSQQTVIPNIGPRPWVRGLSSGISIYWTIVKPGDILLINSNGNLIAPRGYFKMRTGKSSIMRSDAPIGTCISECITPNGSIPNDKPFQNVNKITYGACPKYVKQNTLKLATGMRNVPEKQTRGIFGAIAGFIENGWEGMIDGWYGFRHQNSEGTGQAADLKSTQAAIDQINGKLNRVIEKTNEKFHQIEKEFSEVEGRIQDLEKYVEDTKIDLWSYNAELLVALENQHTIDLTDSEMNKLFEKTRRQLRENAEDMGNGCFKIYHRCDNACIGSIRNGTYDHDVYRDEALNNRFQIKGVELKSGYKDWILWISFAISCFLLCVVLLGFIMWACQKGNIRCNICI

SEQ ID NO: 8545 - protein, 566 aa, Artificial Sequence
  derived and/or modified protein sequence (wt) from hemagglutinin__InfluenzaA__AFG98984
MKTIIALSYIFCLVLGQDFPRNDNSTATLCLGHHAVPNGTLVKTITNDQIEVTNATELVQSSSTGKICNNPHRILDGMDCTLIDALLGDPHCDGLQNETWDLFVERSKAFSNCYPYDVPDYASLRSLVASSGTLEFINEGFTWTGVTQNGGSNACKRGPDRGFFSRLNWLYKSGNTYPVLNVTMPNNDNFDKLYIWGVHHPSTDQDQTSLYVQASGRVTVSTKRSQQTVIPNIGPRPWVRGLSSGISIYWTIVKPGDILLINSNGNLIAPRGYFKMRTGKSSIMRSDAPIGTCISECITPNGSIPNDKPFQNVNKITYGACPKYVKQNTLKLATGMRNVPEKQTRGIFGAIAGFIENGWEGMIDGWYGFRHQNSEGTGQAADLKSTQAAIDQINGKLNRVIEKTNEKFHQIEKEFSEVEGRIQDLEKYVEDTKIDLWSYNAELLVALENQHTIDLTDSEMNKLFEKTRRQLRENAEDMGNGCFKIYHRCDNACIGSIRNGTYDHDVYRDEALNNRFQIKGVELKSGYKDWILWISFAISCFLLCVVLLGFIMWACQKGNIRCNICI

SEQ ID NO: 8546 - protein, 567 aa, Artificial Sequence
  derived and/or modified protein sequence (wt) from hemagglutinin__InfluenzaA__AFG98995
MKTIIALSYIFCLVFAQDLPGNDNNSTATLCLGHHAVPNGTLVKTITNDQIEVTNATELVQSSSTGKICNNPHRILDGINCTLIDALLGDPHCDGFQNEKWDLFVERSKAFSNCYPYDVPDYASLRSLVASSGTLEFINEGFNWTGVTQNGGSNACKRGPDIGFFSRLNWLYKSGSTYPVQNVTMPNNDNSDKLYIWGVHHPSTDKEQTDLYVQASGKVTVSTKRSQQTIIPNVGSRPWVRGLSSRISIYWTIVKPGDILVINSNGNLIAPRGYFKMRTGKSSIMRSDAPIGTCSSECITPNGSIPNDKPFQNVNKITYGACPKYVKQNTLKLATGMRNVPEKQTRGIFGAIAGFIENGWEGMIDGWYGFRHQNSEGTGQAADLKSTQAAIDQINGKLNRVIEKTNEKFHQIEKEFSEVEGRIQDLEKYVEDTKIDLWSYNAELLVALENQHTIDLTDSEMNKLFEKTRRQLRENAEDMGNGCFKIYHKCDNACIGSIRNGTYDHDVYRDEALNNRFQIKGVELKSGYKDWILWISFAISCFLLCVVLLGFIMWACQKGNIRCNICI

SEQ ID NO: 8547 - protein, 566 aa, Artificial Sequence
  derived and/or modified protein sequence (wt) from hemagglutinin__InfluenzaA__AFG99006
MKTIIALSYIFCLVLGQDFPRNDNSTATLCLGHHAVPNGTLVKTITNDQIEVTNATELVQSSSTGKICNNPHRILDGMDCTLIDALLGDPHCDGLQNETWDLFVERSKAFSNCYPYDVPDYASLRSLVASSGTLEFINEGFTWTGVTQNGGSNACKRGPDRGFFSRLNWLYKSGNTYPVLNVTMPNNDNFDKLYIWGVHHPSTDQDQTSLYVQASGRVTVSTKRSQQTVIPNIGPRPWVRGLSSRISIYWTIVKPGDILLINSNGNLIAPRGYFKMRTGKSSIMRSDAPIGTCISECITPNGSIPNDKPFQNVNKITYGACPKYVKQNTLKLATGMRNVPEKQTRGIFGAIAGFIENGWEGMIDGWYGFRHQNSEGTGQAADLKSTQAAIDQINGKLNRVIEKTNEKFHQIEKEFSEVEGRIQDLEKYVEDTKIDLWSYNAELLVALENQHTIDLTDSEMNKLFEKTRRQLRENAEDMGNGCFKIYHRCDNACIGSIRNGTYDHDVYRDEALNNRFQIKGVELKSGYKDWILWISFAISCFLLCVVLLGFIMWACQKGNIRCNICI

SEQ ID NO: 8548 - protein, 566 aa, Artificial Sequence; identical to SEQ ID NO: 764
  derived and/or modified protein sequence (wt) from hemagglutinin__InfluenzaA__AFG99017

SEQ ID NO: 8549 - protein, 566 aa, Artificial Sequence
  derived and/or modified protein sequence (wt) from hemagglutinin__InfluenzaA__AFG99028
MKTIIALSYIFCLVFAQDLPGNDNSTATLCLGHHAVPNGTLVKTITNDQIEVTNATELVQSSSTGKICGNPHRILDGINCTLIDALLGDPHCDGFQNEKWDLFVERSKAFSNCYPYDVPDYASLRSLVASSGTLEFINEGFNWTGVTQNGGSSACKRGPDNGFFSRLNWLYKSGSTYPVQNVTMPNNDNSDKLYIWGVHHPSTDKEQTDLYVQASGKVTVSTKRSQQTVIPNVGSRPWVRGLSSRVSIYWTIVKPGDILVINSNGNLIAPRGYFKMRTGKSSIMRSDAPIGTCSSECITPNGSIPNDKPFQNVNKITYGACPKYVKQNTLKLATGMRNVPEKQTRGIFGAIAGFIENGWEGMIDGWYGFRHQNSEGTGQAADLKSTQAAIDQINGKLNRVIEKTNEKFHQIEKEFSEVEGRIQDLEKYVEDTKIDLWSYNAELLVALENQHTIDLTDSEMNKLFEKTRRQLRENAEDMGNGCFKIYHKCDNACIGSIRNGTYDHDVYRDEALNNRFQIKGVELKSGYKDWILWISFAISCFLLCVVLLGFIMWACQKGNIRCNICI

SEQ ID NO: 8550 - protein, 566 aa, Artificial Sequence
  derived and/or modified protein sequence (wt) from hemagglutinin__InfluenzaA__AFG99039
MKTIIALSYIFCLVFAQDLPGNDNSTATLCLGHHAVPNGTLVKTITNDQIEVTNATELVQSSSTGKICDNPHRILDGINCTLIDALLGDPHCDGFQNEKWDLFVERSKAFSNCYPYDVPDYASLRSLVASSGTLEFINEGFNWTGVTQNGGSSACKRGPDNGFFSRLNWLYKSGSTYPVQNVAMPNNDNSDKLYIWGVHHPSTDKEQTDLYVQASGKVTVSTKRSQQTVIPNVGSRPWVRGLSSRVSIYWTIVKPGDILVINSNGNLIAPRGYFKMRTGKSSIMRSDAPIGTCSSECITPNGSIPNDKPFQNVNKITYGACPKYVKQNTLKLATGMRNVPEKQTRGIFGAIAGFIENGWEGMIDGWYGFRHQNSEGTGQAADLKSTQAAIDQINGKLNRVIEKTNEKFHQIEKEFSEVEGRIQDLEKYVEDTKIDLWSYNAELLVALENQHTIDLTDSEMNKLFEKTRRQLRENAEDMGNGCFKIYHKCDNACIGSIRNGTYDHDVYRDEALNNRFQIKGVELKSGYKDWILWISFAISCFLLCVVLLGFIMWACQKGNIRCNICI

SEQ ID NO: 8551 - protein, 566 aa, Artificial Sequence; identical to SEQ ID NO: 764
  derived and/or modified protein sequence (wt) from hemagglutinin__InfluenzaA__AFG99050

SEQ ID NO: 8552 - protein, 566 aa, Artificial Sequence
  derived and/or modified protein sequence (wt) from hemagglutinin__InfluenzaA__AFG99061
MKTIIALSYIFCLVFAQDLPGNDNSTATLCLGHHAVPNGTLVKTITNDQIEVTNATELVQSSSTGKICDNPHRILDGINCTLIDALLGDPHCDGFQNEKWDLFVERSKAFSNCYPYDVPDYASLRSLVASSGTLEFINEGFNWTGVTQNGGSSACKRGPDNGFFSRLNWLYKSGSTYPVQNVTMPNNDNSDKLYIWGVHHPSTDKEQTDLYVQASGKVTVSTKRSQQTVIPNVGSRPWVRGLSSRVSIYWTIVKPGDILVINSNGNLIAPRGYFKMRTGKSSIMRSDAPIGTCSSECITPNGSIPNDKPFQNVNKITYGACPKYIKQNTLKLATGMRNVPEKQTRGIFGAIAGFIENGWEGMIDGWYGFRHQNSEGTGQAADLKSTQAAIDQINGKLNKVIEKTNEKFHQIEKEFSEVEGRIQDLEKYVEDTKIDLWSYNAELLVALENQHTIDLTDSEMNKLFEKTRRQLRENAEDMGNGCFKIYHKCDNACIGSIRNGTYDHDVYRDEALNNRFQIKGVELKSGYKDWILWISFAISCFLLCVVLLGFIMWACQKGNIRCNICI

SEQ ID NO: 8553 - protein, 566 aa, Artificial Sequence
  derived and/or modified protein sequence (wt) from hemagglutinin__InfluenzaA__AFG99072
MKTIIALSYIFCLVFAQDLPGNDNSTATLCLGHHAVPNGTLVKTITNDQIEVTNATELVQSSSTGKICDNPHRILDGKNCTLIDALLGDPHCDGFQNEKWDLFVERSKAFSNCYPYDVPDYASLRSLVASSGTLEFINEGFNWTGVTQNGGSSACKRGPDNGFFSRLNWLYKSGSTYPVQNVTMPNNDNSDRLYIWGVHHPSTDKEQTDLYVQASGKVTVSTKRSQQTVIPNVGSRPWVRGLSSRVSIYWTIVKPGDILVINSNGNLIAPRGYFKMRTGKSSIMRSDAPIGTCSSECITPNGSIPNDKPFQNVNKITYGACPKYVKQNTLKLATGMRNVPEKQTRGIFGAIAGFIENGWEGMIDGWYGFRHQNSEGTGQAADLKSTQAAIDQINGKLNRVIEKTNEKFHQIEKEFSEVEGRIQDLEKYVEDTKIDLWSYNAELLVALENQHTIDLTDSEMNKLFEKTRRQLRENAEDMGNGCFKIYHKCDNACIGSIRNGTYNHDVYRDEALNNRFQIKGVELKSGYKDWILWISFAISCFLLCVVLLGFIMWACQKGNIRCNICI

SEQ ID NO: 8554 - protein, 566 aa, Artificial Sequence
  derived and/or modified protein sequence (wt) from hemagglutinin__InfluenzaA__AFG99083
MKTIIALSYIFCLVFAQDLPGNDNSTATLCLGHHAVPNGTLVKTITNDQIEVTNATELVQSSSTGKICDNPHRILDGINCTLIDALLGDPHCDGFQNEKWDLFVERSKAFSNCYPYDVPDYASLRSLVASSGTLEFINEGFNWTGVTQNGGSSACKRGPDKGFFSRLNWLYKSGSTYPVQNVTMPNNDNSDKLYIWGVHHPSTDKEQTDLYVQASGKVTVSTKRSQQTVIPNVGSRPWVRGLSSRVSIYWTIVKPGDILVINSNGNLIAPRGYFKMLTGKSSIMRSDAPIGTCSSECITPNGSIPNDKPFQNVNKITYGACPKYVKQNTLKLATGMRNVPEKQTRGIFGAIAGFIENGWEGMIDGWYGFRHQNSEGTGQAADLKSTQAAIDQINGKLNRVIEKTNEKFHQIEKEFSEVEGRIHDLEKYVEDTKIDLWSYNAELLVALENQHTIDLTDSEMNKLFEKTRRQLRENAEDMGNGCFKIYHKCDNACIGSIRNGTYDHDVYRDEALNNRFQIKGVELKSGYKDWILWISFAISCFLLCVVLLGFIMWACQKGNIRCNICI

SEQ ID NO: 8555 - protein, 566 aa, Artificial Sequence
  derived and/or modified protein sequence (wt) from hemagglutinin__InfluenzaA__AFG99094
MKTIIALSYIFCLVFAQDLPGNDNSTATLCLGHHAVPNGTLVKTITNDQIEVTNATELVQSSSTGKICDNPHRILDGINCTLIDALLGDPHCDGFQNEKWDLFVERSKAFSNCYPYDVPDYASLRSLVASSGTLEFINEGFNWTGVTQNGGSGACKRGPDNGFFSRLNWLYKSGSTYPVQNVTMPNNDNSDKLYIWGVHHPSTDKEQTDLYVQASGKVTVSTKRSQQTVIPNVGSRPWVRGLSSRVSIYWTIVKPGDILVINSNGNLIAPRGYFKMRTGKSSIMRSDAPIGTCSSECITPNGSIPNDKPFQNVNKITYGACPKYVKQNTLKLATGMRNVPEKQTRGIFGAIAGFIENGWEGMIDGWYGFRHQNSEGTGQAADLKSTQAAIDQINGKLNRVIEKTNEKFHQIEKEFSEVEGRIQDLEKYVEDTKIDLWSYNAELLVALENQHTIDLTDSEMNKLFEKTRRQLRENAEDMGNGCFKIYHKCDNACIGSIRNGTYDHDVYRDEALNNRFQIKGVELKSGYKDWILWISFAISCFLLCVVLLGFIMWACQKGNIRCNICI

SEQ ID NO: 8556 - protein, 566 aa, Artificial Sequence
  derived and/or modified protein sequence (wt) from hemagglutinin__InfluenzaA__AFG99116
MKTIIALSYIFCLVFAQNLPGNDNSTATLCLGHHAVPNGTLVKTITNDQIEVTNATELVQSSSTGRICDSPHRILDGKNCTLVDALLGDPHCDGFQNEKWDLFVERSKAFSNCYPYDVPDYASLRSLVASSGTLEFINESFNWTGVTQSGGSYACKRGSDNSFFSRLNWLYESESKYPVLNVTMPNNGNFDKLYIWGVHHPSTDKEQTNLYVRASGRVTVSTKRSQQTIIPNIGSRPWVRGLSSRISIYWTIVKPGDILLINSNGNLIAPRGYFKIRTGKSSIMRSDAPIGTCSSECITPNGSIPNDKPFQNVNKITYGACPKYVKQNTLKLATGMRNVPEKQTRGIFGAIAGFIENGWEGMVDGWYGFRHQNSEGTGQAADLKSTQAAIDQINGKLNRVIEKTNEKFHQIEKEFSEVEGRIQDLEKYVEDTKIDLWSYNAELLVALENQHTIDLTDSEMNKLFEKTRRQLRENAEDMGNGCFKIYHKCDNACIGSIRNGTYDHDVYRDEALNNRFQIKGVELKSGYKDWILWISFAISCFLLCVVLLGFIMWACQKGNIRCNICI

SEQ ID NO: 8557 - protein, 566 aa, Artificial Sequence
  derived and/or modified protein sequence (wt) from hemagglutinin__InfluenzaA__AFG99127
MKTIIALSYILCLVFAQNLPGNDNSTATLCLGHHAVPNGTLVKTITNDQIEVTNATELVQSSSTGRICDSPHRILDGKNCTLVDALLGDPHCDGFQNEKWDLFVERSKAFSNCYPYDVPDYASLRSLVASSGTLEFINESFNWTGVTQSGGSYACKRGSDNSFFSRLNWLYESESKYPVLNVTMPNNGNFDKLYIWGVHHPSTDKEQTNLYVRASGRVTVSTKRSQQTIIPNIGSRPWVRGLSSRISIYWTIVKPGDILLINSNGNLIAPRGYFKIRTGKSSIMRSDAPIGTCSSECITPNGSIPNDKPFQNVNKITYGACPKYVKQNTLKLATGMRNVPEKQTRGIFGAIAGFIENGWEGMVDGWYGFRHQNSEGTGQAADLKSTQAAIDQINGKLNRVIEKTNEKFHQIEKEFSEVEGRIQDLEKYVEDTKIDLWSYNAELLVALENQHTIDLTDSEMNKLFEKTRRQLRENAEDMGNGCFKIYHKCDNACIGSIRNGTYDHDVYRDEALNNRFQIKGVELKSGYKDWILWISFAISCFLLCVVLLGFIMWACQKGNIRCNICI

SEQ ID NO: 8558 - protein, 566 aa, Artificial Sequence
  derived and/or modified protein sequence (wt) from hemagglutinin__InfluenzaA__AFG99138
MKTIIALSYIFCLVFAQNLPGNDNSTATLCLGHHAVPNGTLVKTITNDQIEVTNATELVQSSSTGRICDSPHRILDGKNCTLVDALLGDPHCDGFQNEKWDLFVERSKAFSNCYPYDVPDYASLRSLVASSGTLEFINESFNWTGVTQSGGSSACKRGSDNSFFSRLNWLYESESKYPVLNVTMPNNGNFDKLYIWGVHHPSTDKEQTNLYVRASGRVTVSTKRNQQTVIPNIGSRPWVRGLSSRISIYWTIVKPGDILLINSNGNLIAPRGYFKIRNGKSSIMRSDAPIGTCSSECITPNGSIPNDKPFQNVNKITYGACPKYVKQNTLKLATGMRNVPEKQTRGIFGAIAGFIENGWEGMVDGWYGFRHRNSEGTGQAADLKSTQAAIDQINGKLNRVIEKTNEKFHQIEKEFSEVEGRIQDLEKYVEDTKIDLWSYNAELLVALENQHTIDLTDSEMNKLFEKTRRQLRENAEDMGNGCFKIYHKCDNACIGSIRNGTYDHDVYRDEALNNRFQIKGVELKSGYKDWILWISFAISCFLLCVVLLGFIMWACQKGNIRCNICI

SEQ ID NO: 8559 - protein, 566 aa, Artificial Sequence
  derived and/or modified protein sequence (wt) from hemagglutinin__InfluenzaA__AFG99149
MKTIIALSYILCLVFAQNLPGNDNSTATLCLGHHAVPNGTLVKTITNDQIEVTNATELVQSSSTGRICDSPHRILDGKNCTLIDALLGDPHCDGFQNEKWDLFVERSRAFSNCYPYDVPDYASLRSLVASSGTLEFINEGFNWTGVTQSGGSYACKRGSDNSFFSRLNWLYESESKYPVLNVTMPNNGKFDKLYIWGVHHPSTDKEQTNLYVRASGRVTVSTKRSQQTVIPNIGSRPWVRGLSSRISIYWTIVKPGDILLINSTGNLIAPRGYFKIRTGKSSIMRSDAPIGTCSSECITPNGSIPNDKPFQNVNKITYGACPRYVKQNTLKLATGMRNVPEKQTRGIFGAIAGFIENGWEGMVDGWYGFRHQNSEGTGQAADLKSTQAAIDQINGKLNRVIEKTNEKFHQIEKEFSEVEGRIQDLEKYVEDTKIDLWSYNAELLVALENQHTIDLTDAEMNKLFEKTRKQLRENAEDMGNGCFKIYHKCDNACIGSIRNGTYDHDVYRDEALNNRFQIKGVELKSGYKDWILWISFAISCFLLCVVLLGFIMWACQKGNIRCNICI

SEQ ID NO: 8560 - protein, 566 aa, Artificial Sequence
  derived and/or modified protein sequence (wt) from hemagglutinin__InfluenzaA__AFG99171
MKTIIALSYIFCLVFAQNLPGNDNSTATLCLGHHAVPNGTLVKTITNDQIEVTNATELVQSSSTGRICDSPHRILDGKNCTLVDALLGDPHCDGFQNEKWDLFVERSKAFSNCYPYDVPDYASLRSLVASSGTLEFTNESFNWTGVTQSGGSYACKRGSDNSFFSRLNWLYESESKYPVLNVTMPNNGNFDKLYIWGVHHPSTDKEQTNLYVRASGRVTVSTKRNQQTVIPNIGSRPWVRGLSSRISIYWTIVKPGDILLINSNGNLIAPRGYFKIRNGKSSIMRSDAPIGTCSSECITPNGSIPNDKPFQNVNKITYGACPKYVKQNTLKLATGMRNVPEKQTRGIFGAIAGFIENGWEGMVDGWYGFRHRNSEGTGQAADLKSTQAAIDQINGKLNRVIEKTNEKFHQIEKEFSEVEGRIQDLEKYVEDTKIDLWSYNAELLVALENQHTIDLTDSEMNKLFEKTRRQLRENAEDMGNGCFKIYHKCDNACIGSIRNGTYDHDVYRDEALNNRFQIKGVELKSGYKDWILWISFAISCFLLCVVLLGFIMWACQKGNIRCNICI

SEQ ID NO: 8561 - protein, 566 aa, Artificial Sequence
  derived and/or modified protein sequence (wt) from hemagglutinin__InfluenzaA__AFG99182
MKTIIALSYIFCLVFAQKLPGNDNSTATLCLGHHAVPNGTLVKTITNDQIEVTNATELVQSSSTGRICDSPHRILDGKNCTLIDALLGDPHCDGFQNEKWDLFVERSKAFSNCYPYDVPDYASLRSLVASSGTLEFINEGFNWTGVTQSGGSYACKRGSVNSFFSRLNWLYESEYKYPALNVTMPNNGKFDKLYIWGVHHPSTDKEQTNLYVRASGRVTVSTKRSQQTVIPNIGSRPWVRGLSSRISIYWTIVKPGDILLINSTGNLIAPRGYFKIRTGKSSIMRSDAPIGTCSSECITPNGSIPNDKPFQNVNKITYGACPRYVKQNTLKLATGMRNVPEKQTRGIFGAIAGFIENGWEGMVDGWYGFRHQNSEGTGQAADLKSTQAAIDQINGKLNRLIEKTNEKFHQIEKEFSEVEGRIQDLEKYVEDTKIDLWSYNAELLVALENQHTIDLTDSEMNKLFEKTRKQLRENAEDMGNGCFKIYHKCDNACIGSIRNGTYDHDVYRDEALNNRFQIKGVELKSGYKDWILWISFAISCFLLCVVLLGFIMWACQKGNIRCNICI

SEQ ID NO: 8562 - protein, 566 aa, Artificial Sequence
  derived and/or modified protein sequence (wt) from hemagglutinin__InfluenzaA__AFG99193
MKTIIALSYISCLVFAQKLPGNDNSTATLCLGHHAVPNGTLVKTITNDQIEVTNATELVQSSSTGRICDSPHRILDGKNCTLIDALLGDPHCDGFQNEKWDLFVERSKAFSNCYPYDVPDYASLRSLVASSGTLEFINEGFNWTGVTQSGGSYACKRGSVNSFFSRLNWLYESESKYPALNVTMPNNGKFEKLYIWGVHHPSTDKEQTNLYVRASGRVTVSTKRSQQTVIPNIGPRPWVRGLSSRISIYWTIVKPGDILLINSTGNLIAPRGYFKIRTGKSSIMRSDAPIGTCSSECITPNGSIPNDKPFQNVNKITYGACPRYVKQNTLKLATGMRNVPEKQTRGIFGAIAGFIENGWEGMVDGWYGFRHQNSEGTGQAADLKSTQAAIDQINGKLNRLIEKTNEKFHQIEKEFSEVEGRIQDLEKYVEDTKIDLWSYNAELLVALENQHTIDMTDSEMNKLFEKTRKQLRENAEDMGNGCFKIYHKCDNACIGSIRNGTYDHDVYRDEALNNRFQIKGVELKSGYKDWILWISFAISCFLLCVVLLGFIMWACQKGNIRCNICI

SEQ ID NO: 8563 - protein, 566 aa, Artificial Sequence
  derived and/or modified protein sequence (wt) from hemagglutinin__InfluenzaA__AFG99204
MKTIIALSYIFCLGFAQKLPGNDNSTATLCLGHHAVPNGTLVKTITNDQIEVTNATELVQSSSTGRICDSPHRILDGKNCTLIDALLGDPHCDGFQNEKWDLFVERSKAFSNCYPYDVPDYASLRSLVASSGTLEFINEGFNWTGVTQSGGSYACKRGSVNSFFSRLNWLYKSESKYPALNVTMPNNGKFDKLYIWGVHHPSTDKEQTNLYVRASGRVTVSTKRSQQTVIPNIGSRPWVRGLSSRISIYWTIVKPGDILLINSTGNLIAPRGYFKIRTGKSSIIRSDAPIGTCSSECITPNGSIPNDKPFQNVNKITYGACPRYVKQNTLKLATGMRNVPEKQTRGIFGAIAGFIENGWEGMVDGWYGFRHQNSEGTGQAADLKSTQAAIDQINGKLNRLIEKTNEKFHQIEKEFSEVEGRIQDLEKYVEDTKIDLWSYNAELLVALENQHTIDLTDSEMNKLFEKTRKQLRENAEDMGNGCFKIYHKCDNACIGSIRNGTYDHDVYRDEALNNRFQIKGVELKSGYKDWILWISFAISCFLLCVVLLGFIMWACQKGNIRCNICI

SEQ ID NO: 8564 - protein, 566 aa, Artificial Sequence
  derived and/or modified protein sequence (wt) from hemagglutinin__InfluenzaA__AFG99215
MKTIIALSYIFCLVFAQKLPGNDNSTATLCLGHHAVPNGTLVKTITNDQIEVTNATELVQSSSTGRICDSPHRILDGKNCTLIDALLGDPHCDGFQNEKWDLFIERSKAFSNCYPYDVPDYASLRSLVASSGTLEFINEGFNWTGVTQSGGSYACKRGSVNSFFSRLNWLYESEYKYPALNVTMPNNGKFDKLYIWGVHHPSTEKEQTNLYVRASGRVTVSTKRSQQTVTPNIGSRPWVRGLSSRISIYWTIVKPGDILLINSTGNLIAPRGYFKIRTGKSSIMRSDAPIGTCSSECITPNGSIPNDKPFQNVNKITYGACPRYVKQNTLKLATGMRNVPEKQTRGIFGAIAGFIENGWEGMVDGWYGFRHQNSEGTGQAADLKSTQAAIDQINGKLNRLIEKTNEKFHQIEKEFSEVEGRIQDLEKYVEDTKIDLWSYNAELLVALENQHTIDLTDSEMNKLFEKTRKQLRENAEDMGNGCFKIYHKCDNACIGSIRNGTYDHDVYRDEALNNRFQIKGVELKSGYKDWILWISFAISCFLLCVVLLGFIMWACQKGNIRCNICI

SEQ ID NO: 8565 - protein, 566 aa, Artificial Sequence
  derived and/or modified protein sequence (wt) from hemagglutinin__InfluenzaA__AFG99226
MKTIIALSYIFCLVFAQKLPGNDNSTATLCLGHHAVPNGTLVKTITNDQIEVTNATELVQSSSTGRICDSPHRILDGKNCTLIDALLGDPHCDGFQNEKWDLFVERSKAFSNCYPYDVPDYASLRSLVASSGTLEFINEGFNWTGVTQSGGSYACKRGSVNSFFSRLNWLYESEYKYPALNVTMPNNGKFDKLYIWGVHHPSTDKEQTNLYVRASGRVTVSTKRSQQTVIPNIGSRPWVRGLSSRISIYWTIVKPGDILSINSTGNLIAPRGYFKIRTGKSSIMRSDAPIGTCSSECITPNGSIPNDKPFQNVNKITYGACPRYVKQNTLKLATGMRNVPEKQTRGIFGAIAGFIENGWEGMVDGWYGFRHQNSEGTGQAADLKSTQAAIDQINGKLNRLIEKTNEKFHQIEKEFSEVEGRIQDLEKYVEDTKIDLWSYNAELLVALENQHTIDLTDSEMNKLFEKTRKQLRENAEDMGNGCFKIYHKCDNACIGSIRNGTYDHDVYRDEALNNRFQIKGVELKSGYKDWILWISFAISCFLLCVVLLGFIMWACQKGNIRCNICI

SEQ ID NO: 8566 - protein, 566 aa, Artificial Sequence
  derived and/or modified protein sequence (wt) from hemagglutinin__InfluenzaA__AFG99237
MKTIIALSYIFCLVFAQKLPGNDNSTATLCLGHHAVPNGTLVKTITNDQIEVTNATELVQSSSTGRICDSPHRILDGKNCTLIDALLGDPHCDGFQNEKWDLFVERSKAFSNCYPYDVPDYASLRSLVASSGTLEFINEDFNWTGVTQSGGSYACKRESVNSFFSRLNWLYESEYKYPALNVTMPNNGKFEKLYIWGVHHPSTDKEQTNLYVRASGRVTVSTKRSQQTVIPNIGSRPWVRGLSSRISIYWTIVKPGDILLINSTGNLIAPRGYFKIRTGKSSIMRSDAPIGTCSSECITPNGSIPNDKPFQNVNKITYGACPRYVRQNTLKLATGMRNVPEKQTRGIFGAIAGFIENGWEGMVDGWYGFRHQNSEGTGQAADLKSTQAAIDQINGKLNRLIEKTNEKFHQIEKEFSEVEGRIQDLEKYVEDTKIDLWSYNAELLVALENQHTIDLTDSEMNKLFEKTRKQLRENAEDMGNGCFKIYHKCDNACIGSIRNGTYDHDVYRDEALNNRFQIKGVELKSGYKDWILWISFAISCFLLCVVLLGFIMWACQKGNIRCNICI

SEQ ID NO: 8567 - protein, 566 aa, Artificial Sequence
  derived and/or modified protein sequence (wt) from hemagglutinin__InfluenzaA__AFG99248
MKTIIALSYIFCLVFAQKLPGNDNSTATLCLGHHAVPNGTLVKTITNDQIEVTNATELVQSSSTGRICDSPHRILDGKNCTLIDALLGDPHCDGFQNEKWDLFVERSKAYSNCYPYDVPDYASLRSLVASSGTLEFINEDFNWTGVTQSGGSHACKRGSVNSFFSRLNWLHESEYKYPALNVTMPNNGKFDKLYIWGVHHPITDREQTNLYVRASGRVTVSTKRSQQTVIPNIGFRPWVRGLSSRISIYWTIVKPGDILLINSTGNLIAPRGYFKIRNGKSSIMRSDAPIGTCSSECITPNGSIPNDKPFQNVNKITYGACPRYVKQNTLKLATGMRNVPEKQTRGIFGAIAGFIENGWEGMVDGWYGFRHQNSEGTGQAADLKSTQAAIDQINGKLNRLIEKTNEKFHQIEKEFSEVEGRIQDLEKYVEDTKIDLWSYNAELLVALENQHTIDLTDSEMNKLFEKTRKQLRENAEDMGNGCFKIYHKCDNACIGSIRNGTYDHDVYRDEALNNRFQIKGVELKSGYKDWILWISFAISCFLLCVVLLGFIMWACQKGNIRCNICI

SEQ ID NO: 8568 - protein, 566 aa, Artificial Sequence
  derived and/or modified protein sequence (wt) from hemagglutinin__InfluenzaA__AFG99259
MKTIIALSYIFCLVFAQKLPGNDNSTATLCLGHHAVPNGTLVKTITNDQVEVTNATELVQSSSTGRICDSPHRILDGKNCTLIDALLGDPHCDGFQNEKWDLFVERSKAYSNCYPYDVPDYASLRSLVASSGTLEFINEDFNWTGVTQSGGSYACKRGSVNSFFSRLNWLHKSEYKYPALNVTMPNNGKFDKLYIWGVHHPSTDREQTNLYVRASGRVTVSTKRSQQTVIPNIGSRPWVRGLSSRISIYWTIVKPGDILLINSTGNLIAPRGYFKIRTGKSSIMRSDAPIGTCSSECITPNGSIPNDKPFQNVNKITYGACPRYVKQNTLKLATGMRNVPEKQTRGIFGAIAGFIENGWEGMVDGWYGFRHQNSEGTGQAADLKSTQAAIDQINGKLNRLIEKTNEKFHQIEKEFSEVEGRIQDLEKYVEDTKIDLWSYNAELLVALENQHTIDLTDSEMNKLFEKTRKQLRENAEDMGNGCFKIYHKCDNACIGSIRNGTYDHDVYRDEALNNRFQIKGVELKSGYKDWILWISFAISCFLLCVVLLGFIMWACQKGNIRCNICI

SEQ ID NO: 8569 - protein, 566 aa, Artificial Sequence
  derived and/or modified protein sequence (wt) from hemagglutinin__InfluenzaA__AFG99270
MKTIIALSYIFCLVFAQKLPGNDNSTATLCLGHHAVPNGTLVKTITNDQIEVTNATELVQSSSTGRICDSPHRILDGKNCTLIDALLGDPHCDGFQNKEWDLFVERSKAYSNCYPYDVPDYASLRSLVASSGTLEFINEDFNWTGVAQSGGSYACKRGSVNSFFSRLNWLHKSEYKYPALNVTMPNNGKFDKLYIWGVHHPSTDREQTNLYVRASGRVTVSTKRSQQTVIPNIGSRPWVRGLSSRISIYWTIVKPGDILLINSTGNLIAPRGYFKIRTGKSSIMRSDAPIGTCSSECITPNGSIPNDKPFQNVNRITYGACPRYVKQNTLKLATGMRNVPEKQTRGIFGAIAGFIENGWEGMVDGWYGFRHHNSEGTGQAADLKSTQAAIDQINGKLNRLIEKTNEKFHQIEKEFSEVEGRIQDLEKYVEDTKIDLWSYNAELLVALENQHTIDLTDSEMNKLFEKTRKQLRENAEDMGNGCFKIYHKCDNACIGSIRNGTYDHDVYRDEALNNRFQIKGVELKSGYKDWILWISFAISCFLLCVVLLGFIMWACQKGNIRCNICI

SEQ ID NO: 8570 - protein, 566 aa, Artificial Sequence
  derived and/or modified protein sequence (wt) from hemagglutinin__InfluenzaA__AFG99281
MKTIIALSYIFCLVFAQKLPGNDNSTATLCLGHHAVPNGTLVKTITNDQIEVTNATELVQSSSTGRICDSPHRILDGKNCTLIDALLGDPHCDGFQNEKWDLFVERSKAFSNCYPYDVPDYASLRSLVASSGTLEFINEEFNWTGVTQSGGSYACKRGSVNSFFSRLNWLHKSEYKYPALNVTMPNNGRFDKLYIWGVHHPSTDREQTNLYVRASGRVTVSTKRSQQTVIPNIGPRPWVRGLSSRISIYWTIVKPGDILLINSTGNLIAPRGYFKIHTGKSSIMRSDAPIGTCSSECITPNGSIPNDKPFQNVNKITYGACPRYVKQNTLKLATGMRNVPDKQTRGIFGAIAGFIENGWEGMVDGWYGFRHQNSEGTGQAADLKSTQAAIDQINGKLNRLIEKTNEKFHQIEKEFSEVEGRIQDLEKYVEDTKIDLWSYNAELLVALENQHTIDLTDSEMNKLFEKTRKQLRENAEDMGNGCFKIYHKCDNACIGSIRNGTYDHDVYRDEALNNRFQIKGVELKSGYKDWILWISFAISCFLLCVVLLGFIMWACQKGNIRCNICI

SEQ ID NO: 8571 - protein, 566 aa, Artificial Sequence
  derived and/or modified protein sequence (wt) from hemagglutinin__InfluenzaA__AFG99292
MKTIIALSYIFCLVFAQKLPGNDNSTATLCLGHHAVPNGTLVKTITNDQVEVTNATELVQSSSTGRICDSPHRILDGKNCTLIDALLGDPHCDGFQNEKWDLFVERSKAYSNCYPYDVPDYASLRSLVASSGTLEFINEDFNWTGVTQSGGSYACKRGSVNSFFSRLNWLHESEYKYPALNVTMPNNGKFDKLYIWGVHHPSTDREQTNLYVRASGRVTVSTKRSQQTVIPNIGSRPWVRGLSSRISIYWTIVKPGDILLINSTGNLIAPRGYFKIRTGKSSIMRSDAPIGTCSSECITPNGSIPNDKPFQNVNKITYGACPRYVKQNTLKLATGMRNVPEKQTRGIFGAIAGFIENGWEGMVDGWYGFRHQNSEGTGQAADLKSTQAAIDQINGKLNRLIEKTNEKFHQIEKEFSEVEGRIQDLEKYVEDTKIDLWSYNAELLVALENQHTIDLTDSEMNKLFEKTRKQLRENAEDMGNGCFKIYHKCDNACIGSIRNGTYDHDVYRDEALNNRFQIKGVELKSGYKDWILWISFAISCFLLCVVLLGFIMWACQKGNIRCNICI

SEQ ID NO: 8572 - protein, 566 aa, Artificial Sequence
  derived and/or modified protein sequence (wt) from hemagglutinin__InfluenzaA__AFG99303
MKTIIALSYIFCLVVAQKLPGNDNSTATLCLGHHAVPNGTLVKTITNDQIEVTNATELVQSSSTGRICDSPHRILDGKNCTLIDALLGDPHCDGFQNKEWDLFVERSKAYSNCYPYDVPDYASLRSLVASSGTLEFINEDFNWTGVAQSGGSYACKRGSVNSFFSRLNWLHESEYKYPALNVTMPNNGKFDKLYIWGVHHPSTDREQTNLYVRASGRVTVSTKRSQQTVIPNIGSRPWVRGLSSRISIYWTIVKPGDILLINSTGNLIAPRGYFKIRTGKSSIMRSDAPIGTCSSECITPNGSISNDKPFQNVNRITYGACPRYVKQNTLKLATGMRNVPEKQTRGIFGAIAGFIENGWEGMVDGWYGFRHQNSEGTGQAADLKSTQAAIDQINGKLNRLIEKTNEKFHQIEKEFSEVEGRIQDLEKYVEDTKIDLWSYNAELLVALENQHTIDLTDSEMNKLFEKTRKQLRENAEDMGNGCFKIYHKCDNACIGSIRNGTYDHDVYRDEALNNRFQIKGVELKSGYKDWILWISFAISCFLLCVVLLGFIMWACQKGNIRCNICI

SEQ ID NO: 8573 - protein, 566 aa, Artificial Sequence
  derived and/or modified protein sequence (wt) from hemagglutinin__InfluenzaA__AFG99314
MKTIIALSYIFCLVFAQKLPGNDNSTATLCLGHHAVPNGTLVKTITNDQIEVTNATELVQSSSTGRICDSPHRILDGKNCTLIDALLGDPHCDSFQNEKWDLFVERSKAYSNCYPYDVPDYASLRSLVASSGTLEFINEDFNWTGVTQSGGSYACKRGSVNSFFSRLNWLHESEYKYPALNVTMPNNGKFDKLYIWGIHHPSTDREQTNLYVRASGRVTVSTKRSQQTVIPNIGSRPWVRGLSSRISIYWTIVKPGDILLINSTGNLIAPRGYFKLRTGKSSIMRSDAPIGTCSSECITPNGSIPNDKPFQNVNKITYGACPRYVKQNTLKLATGMRNVPEKQTRGIFGAIAGFIENGWEGMVDGWYGFRHQNSEGTGQAADLKSTQAAIDQINGKLNRLIEKTNEKFHQIEKEFSEVEGRIQDLEKYVEDTKIDLWSYNAELLVALENQHTIDLTDSEMNKLFEKTRKQLRENAEDMGNGCFKIYHKCDNACIGSIRNGTYDHDVYRDEALNNRFQIKGVELKSGYKDWILWISFAISCFLLCVVLLGFIMWACQKGNIRCNICI

SEQ ID NO: 8574 - protein, 566 aa, Artificial Sequence
  derived and/or modified protein sequence (wt) from hemagglutinin__InfluenzaA__AFG99336
MKTIIALSYIFCLVFAQKLPGNDNSTATLCLGHHAVPNGTLVKTITNDQIEVTNATELVQSSSTGRICDSPHRILDGKNCTLIDALLGDPHCDGFQNKEWDLFVERSKAYSNCYPYDVPDYASLRSLVASSGTLEFINEDFNWTGVAQSGGSYACKRGSVNSFFSRLNWLHKSEYKYPALNVTMPNNGKFDKLYIWGVHHPSTDREQTNLYVRASGRVTVSTKRSQQTVIPNIGSRPWVRGLSSRISIYWTIVKPGDILLINSTGNLIAPRGYFKIRTGKSSIMRSDAPIGTCSSECITPNGSIPNDKPFQNVNRITYGACPRYVKQNTLKLATGMRNVPEKQTRGIFGAIAGFIENGWEGMVDGWYGFRHQNSEGTGQAADLKSTQAAIDQINGKLNRLIEKTNEKFHQIEKEFSEVEGRIQDLEKYVEDTKIDLWSYNAELLVALENQHTIDLTDSEMNKLFEKTRKQLRENAEDMGNGCFKIYHKCDNACIGSIRNGTYDHDVYRDEALNNRFQIKGVELKSGYKDWILWISFAISCFLLCVVLLGFIMWACQKGNIRCNICI

SEQ ID NO: 8575 - protein, 566 aa, Artificial Sequence
  derived and/or modified protein sequence (wt) from hemagglutinin__InfluenzaA__AFG99347
MKTIIALSYIFCLVFAQKLPGNDNSTATLCLGHHAVPNGTLVKTITNDQIEVTNATELVQSSSTGRICDSPHRILDGKNCTLIDALLGDPHCDGFQNKEWDLFVERSKAYSNCYPYDVPDYASLRSLVASSGTLEFINEDFNWTGVAQSGGSYACKRGSVNSFFSRLNWLHKPEYKYPALNVTMPNNGKFDKLYIWGVHHPSTDREQTNLYVRASGRVTVSTKRSQQTVIPNIGSRPWVRGLSSRISIYWTIVKPGDILLINSTGNLIAPRGYFKIRTGKSSIMRSDAPIGTCSSECITPNGSIPNDKPFQNVNRITYGACPRYVKQNTLKLATGMRNVPEKQTRGIFGAIAGFIENGWEGMVDGWYGFRHQNSEGTGQAADLKSTQAAIDQINGKLNRLIDKTNEKFHQIEKEFSEVEGRIQDLEKYVEDTKIDLWSYNAELLVALENQHTIDLTDSEMNKLFEKTRKQLRENAEDMGNGCFKIYHKCDNACIGSIRNGTYDHDVYRDEALNNRFQIKGVELKSGYKDWILWISFAISCFLLCVVLLGFIMWACQKGNIRCNICI

SEQ ID NO: 8576 - protein, 566 aa, Artificial Sequence
  derived and/or modified protein sequence (wt) from hemagglutinin__InfluenzaA__AFG99358
MKTIIALSHILCLVFAQKLPGNDNSTATLCLGHHAVPNGTLVKTITNDQIEVTNATELVQSSSTGRICDSPHRILDGKNCTLIDALLGDPHCDGFQNKEWDLFVERSKAYSNCYPYDVPDYASLRSLVASSGTLEFINEDFNWTGVAQDGGSYACKRGSVNSFFSRLNWLHKLEYKYPALNVTMPNNGKFDKLYIWGVHHPSTDSDQTSLYVRASGRVTVSTKRSQQTVTPNIGSRPWVRGLSSRISIYWTIVKPGDILLINSIGNLIAPRGYFKIRNGKSSIMRSDVPIGNCSSECITPNGSIPNDKPFQNVNRITYGACPRYVKQNTLKLATGMRNVPEKQTRGIFGAIAGFIENGWEGMVDGWYGFRHQNSEGTGQAADLKSTQAAIDQINGKLNRLIEKTNEKFHQIEKEFSEVEGRIQDLEKYVEDTKIDLWSYNAELLVALENQHTIDLTDSEMNKLFEKTRKQLRENAEDMGNGCFKIYHKCDNACIGSIRNGTYDHDVYRDEALNNRFQIKGVELKSGYKDWILWISFAISCFLLCVVLLGFIMWACQKGNIRCNICI

SEQ ID NO: 8577 - protein, 566 aa, Artificial Sequence
  derived and/or modified protein sequence (wt) from hemagglutinin__InfluenzaA__AFG99369
MKTIIALSYIFCLVFAQKLPGNDNSTATLCLGHHAVPNGTLVKTITNDQIEVTNATELVQSSSTGRICDSPHRILDGKNCTLIDALLGDPHCDGFQNKEWDLFVERSKAYSNCYPYDVPDYASLRSLVASSGTLEFINEDFNWAGVAQSGGSYACKRGSVNSFFSRLNWLHESEYKYPALNVTMPNNGKFDKLYIWGVHHPSTDREQTNLYVRASGRVTVSTKRSQQTVIPNIGSRPWVRGLSSRISIYWTIVKPGDILLINSTGNLIAPRGYFKIRTGKSSIMRSDAPIGTCSSECITPNGSIPNDKPFQNVNRITYGACPRYVKQNTLKLATGMRNVPEKQTRGIFGAIAGFIENGWEGMVDGWYGFRHQNSEGTGQAADLKSTQAAIDQINGKLNRLIEKTNEKFHQIEKEFSEVEGRIQDLEKYVEDTKIDLWSYNAELLVALENQHTIDLTDSEMNKLFEKTRKQLRENAEDMGNGCFKIYHKCDNACIGSIRNGTYDHDVYRDEALNNRFQIKGVELKSGYKDWILWISFATSCFLLCVVLLGFIMWACQKGNIRCNICI

SEQ ID NO: 8578 - protein, 566 aa, Artificial Sequence
  derived and/or modified protein sequence (wt) from hemagglutinin__InfluenzaA__AFG99380
MKTIIALSYIFCLVFAQKLPGNDNSTATLCLGHHAVPNGTLVKTITNDQIEVTNATELVQSSSTGRICDSPHRILDGKNCTLIDALLGDPHCDGFQNKEWDLFVERSKAYSNCYPYDVPDYASLRSLVASSGTLEFINEDFNWTGVAQSGGSYACKRGSVNSFFSRLNWLHESEYKYPALNVTMPNNGKFDKLYIWGVHHPSTDREQTNLYVRASGRVTVSTKRSQQTVIPNIGSRPWVRGLSSRISIYWTIVKPGDILLINSTGNLIAPRGYFKIRTGKSSIMRSDAPIGTCSSECITPNGSIPNDKPFQNVNRITYGACPRYVKQNTLKLATGMRNVPEKQTRGIFGAIAGFIENGWEGMVDGWYGFRHQNSEGTGQAADLKSTQAAIDQINGKLNRLIEKTNEKFHQIEKEFSEVEGRIQDLEKYVEDTKIDLWSYNAELLVALENQHTIDLTDSEMNKLFEKTRKQLRENAEDMGNGCFKIYHKCDNACIGSIRNGTYDHDVYRDEALNNRFQIKGVELKSGYKDWILWISFAISCFLLCVVLLGFIMWACQKGNIRCNICI

SEQ ID NO: 8579 - protein, 566 aa, Artificial Sequence; identical to SEQ ID NO: 8578
  derived and/or modified protein sequence (wt) from hemagglutinin__InfluenzaA__AFG99391

SEQ ID NO: 8580 - protein, 566 aa, Artificial Sequence
  derived and/or modified protein sequence (wt) from hemagglutinin__InfluenzaA__AFG99402
MKTIIALSYIFCLVFAQKLPGNDNSTATLCLGHHAVPNGTLVKTITNDQIEVTNATELVQSSSTGRICDSPHRILDGKNCTLIDALLGDPHCDGFQNEKWDLFVERSKAYSNCYPYDVPDYASLRSLVASSGTLEFINEDFNWTGVTQSGGSYACKRGSVNSFFSRLNWLHKSEYKYPALNVTMPNNGKFDKLYIWGVHHPVTDREQTNLYVRASGRVTVSTKRSQQTVIPNIGSRPWVRGLSSRISIYWTIVKPGDILLINSTGNLIAPRGYFKIRTGKSSIMRSDAPIGTCSSECITPNGSIPNDKPFQNVNKITYGACPRYVKQNTLKLATGMRNVPEKQTRGIFGAIAGFIENGWEGMVDGWYGFRHQNSEGTGQAADLKSTQAAIDQINGKLNRLIEKTNEKFHQIEKEFSEVEGRIQDLEKYVEDTKIDLWSYNAELLVALENQHTIDLTDSEMNKLFEKTRKQLRENAEDMGNGCFKIYHKCDNACIGSIRNGTYDHDVYRDEALNNRFQIKGVELKSGYKDWILWISFAISCFLLCVVLLGFIMWACQKGNIRCNICI

SEQ ID NO: 8581 - protein, 566 aa, Artificial Sequence
  derived and/or modified protein sequence (wt) from hemagglutinin__InfluenzaA__AFG99413
MKTIIALSYIFCLVFAQKLPGNDNSTATLCLGHHAVPNGTLVKTITNDQIEVTNATELVQSSSTGRICDSPHRILDGKNCTLIDALLGDPHCDGFQNKEWDLFVERSKAYSNCYPYDVPDYASLRSLVASSGTLEFINEDFNWTGVAQSGGSYACKRGSVNSFFSRLNWLHESEYKYPALNVTMPNNGKFDKLYIWGVHHPSTDREQTNLYVRASGRVTVSTKRSQQTVIPNIGSRPWVRGLSSRISIYWTIVKPGDILLINSTGNLIAPRGYFKIRTGKSSIMRSDAPIGTCSSECITPNGSIPNDKPFQNVNRITYGACPRYVKQNTLKLATGMRNVPEKQTRGIFGAIAGFIENGWEGMVDGWYGFRHQNSEGTGQAADLKSTQAAIDQINGKLNRLIEKTNEKFHQIEKEFSEVEGRIQDLEKYVEDTKIDLWSYNAELLVALENQHTIDLTDSEMNKLFEKTRRQLRENAEDMGNGCFKIYHKCDNACIGSIRNGTYDHDVYRDEALNNRFQIKGVELKSGYKDWILWISFAISCFLLCVVLLGFIMWACQKGNIRCNICI

SEQ ID NO: 8582 - protein, 566 aa, Artificial Sequence
  derived and/or modified protein sequence (wt) from hemagglutinin__InfluenzaA__AFG99424
MKTIIALSYIFCLVFAQKLPGNDNSTATLCLGHHAVPNGTLVKTITNDQIEVTNATELVQSSSTGRICDSPHRILDGKNCTLIDALLGDPHCDGFQNKEWDLFVERSKAYSNCYPYDVPDYASLRSLVASSGTLEFINEDFNWTGVAQSGGSYACKRGSVNSFFSRLNWLHKSEYKYPALNVTMPNNGKFDKLYIWGVHHPSTDREQTNLYVRASGRVTVSTKRSQQTVIPNIGSRPWVRGLSSRISIYWTIVKPGDILLINSTGNLIAPRGYFKIRTGKSSIMRSDAPIGTCSSECITPNGSIPNDKPFQNVNRITYGACPRYVKQNTLKLATGMRNVPEKQTRGIFGAIAGFIENGWEGMVDGWYGFRHQNSEGTGQAADLKSTQAAIDQINGKLNRLIEKTNEKFHQIEKEFSEVEGRIQDLEKYVEDTKIDLWSYNAELLVALENQHTIDLTDSEMNKLFEKTRRQLRENAEDMGNGCFKIYHKCDNACIGSIRNGTYDHDVYRDEALNNRFQIKGVELKSGYKDWILWISFAISCFLLCVVLLGFIMWACQKGNIRCNICI

SEQ ID NO: 8583 - protein, 566 aa, Artificial Sequence
  derived and/or modified protein sequence (wt) from hemagglutinin__InfluenzaA__AFG99435
MKTIIALSYIFCLVFAQKLPGNDNSTATLCLGHHAVPNGTLVKTITNDQIEVTNATELVQNSSTGRICDSPHRILDGKNCTLIDALLGDPHCDGLQNKEWDLFVERSKAYSNCYPYDVPDYASLRSLVASSGTLEFTKEDFNWTGVAQSGGSYACKRGSVNSFFSRLNWLHESEYKYPALNVTMPNNGKFDKLYIWGVHHPSTDREQTNLYVRASGRVTVSTKRSQQTVIPNIGSRPWVRGLSSRISIYWTIVKPGDILLINSTGNLIAPRGYFKIRTGKSSIMRSDAPIGTCSSECITPNGSIPNDKPFQNVNRITYGACPRYVKQNTLKLATGMRNVPEKQTRGIFGAIAGFIENGWEGMVDGWYGFRHQNSEGTGQAADLKSTQAAIDQINGKLNRLIEKTNEKFHQIEKEFSEVEGRIQDLEKYVEDTKIDLWSYNAELLVALENQHTIDLTDSEMNKLFEKTRKQLRENAEDMGNGCFKIYHKCDNACIGSIRNGTYDHDVYRDEALNNRFQIKGVELKSGYKDWILWISFAISCFLLCVVLLGFIMWACQKGNIRCNICI

SEQ ID NO: 8584 - protein, 566 aa, Artificial Sequence; identical to SEQ ID NO: 8583
  derived and/or modified protein sequence (wt) from hemagglutinin__InfluenzaA__AFG99446

SEQ ID NO: 8585 - protein, 566 aa, Artificial Sequence
  derived and/or modified protein sequence (wt) from hemagglutinin__InfluenzaA__AFG99457
MKTIIALSYILCLVFAQKLPGNDNSTATLCLGHHAVPNGTLVKTITNDQIEVTNATELVQSSSTGRICDSPHRILDGENCTLIDALLGDPHCDGFQNKEWDLFVERSKAYSNCYPYDVPDYASLRSLVASSGTLEFINEDFNWTGVAQSGGSYACKRGSVNSFFSRLNWLHKSEYKYPALNVTMPNNGKFDKLYIWGVHHPSTDRDQTSLYVRASGRVTVSTKRSQQTVIPNIGSRPWVRGQSSRISIYWTIVKPGDILLINSTGNLIAPRGYFKIRNGKSSIMRSDAPIGTCSSECITPNGSIPNDKPFQNVNRITYGACPRYVKQNTLKLATGMRNVPEKQTRGIFGAIAGFIENGWEGMVDGWYGFRHQNSEGTGQAADLKSTQAAIDQINGKLNRLIEKTNEKFHQIEKEFSEVEGRIQDLEKYVEDTKIDLWSYNAELLVALENQHTIDLTDSEMNKLFEKTRKQLRENAEDMGNGCFKIYHKCDNACIGSIRNGTYDHDVYRDEALNNRFQIKGVELKSGYKDWILWISFAISCFLLCVVLLGFIMWACQKGNIRCNICI

SEQ ID NO: 8586 - protein, 566 aa, Artificial Sequence
  derived and/or modified protein sequence (wt) from hemagglutinin__InfluenzaA__AFG99468
MKTIIALSYIFCLVFAQKLPGNDNSTATLCLGHHAVPNGTLVKTITNDQIEVTNATELVQSSSTGRICDSPHRILDGKNCTLIDALLGDPHCDGFQNKEWDLFVERSKAYSNCYPYDVPDYASLRSLVASSGTLEFINEDFNWTGVAQSGGSYACKRGSVNSFFSRLNWLHESEYKYPALNVTMPNNGKFDKLYIWGVHHPSTDREQTNLYVRASGRVTVSTKRSQQTVIPNIGSRPWVRGLSSRISIYWTIVKPGDILLINSTGNLIAPRGYFKIRTGKSSIMRSDAPIGTCSSECITPNGSIPNDKPFQNVNRITYGACPRYVKQNTLKLATGMRNVPEKQTRGIFGAIAGFIENGWEGMVDGWYGFRHQNSEGTGQAADLKSTQAAIDQINGKLNRLIEKTNEKFHQIEKEFSEVEGRIQDLEKYVEDTKIDLWSYNAELLVALENQHTIDLTDSEMDKLFEKTRKQLRENAEDMGNGCFKIYHKCDNACIGSIRNGTYDHDVYRDEALNNRFQIKGVELKSGYKDWILWISFAISCFLLCVVLLGFIMWACQKGNIRCNICI

SEQ ID NO: 8587 - protein, 566 aa, Artificial Sequence
  derived and/or modified protein sequence (wt) from hemagglutinin__InfluenzaA__AFG99490
MKTIIALSYILCLVFAQKLPGNDNSTATLCLGHHAVPNGTLVKTITNDQIEVTNATELVQSSSTGRICDSPHRILDGKNCTLIDALLGDPHCDGFQNKEWDLFIERSKAYSNCYPYDVPDYASLRSLVASSGTLEFINEDFNWTGVAQSGESYACKRGSVKSFFSRLNWLHESEYKYPALNVTMPNNGKFDKLYIWGVHHPSTDREQTSLYVRASGRVTVSTKRSQQTVIPNIGSRPWVRGLSSRISIYWTIVKPGDILLINSTGNLIAPRGYFKIRTGKSSIMRSDAPIGTCSSECITPNGSIPNDKPFQNVNRITYGACPRYVKQNTLKLATGMRNVPEKQTRGIFGAIAGFIENGWEGMVDGWYGFRHQNSEGTGQAADLKSTQAAIDQINGKLNRLIEKTNEKFHQIEKEFSEVEGRIQDLEKYVEDTKIDLWSYNAELLVALENQHTIDLTDSEMNKLFEKTRKQLRENAEDMGNGCFKIYHKCDNACIGSIRNGTYDHDVYRDEALNNRFQIKGVELKSGYKDWILWISFAISCFLLCVVLLGFIMWACQKGNIRCNICI

SEQ ID NO: 8588 - protein, 566 aa, Artificial Sequence
  derived and/or modified protein sequence (wt) from hemagglutinin__InfluenzaA__AFG99501
MKTIIALSYIFCLVVAQKLPGNDNSTATLCLGHHAVPNGTLVKTITNDQIEVTNATELVQSSSTGRICDSPHRILDGKNCTLIDALLGDPHCDGFQNKEWDLFVERSKAYSNCYPYDVPDYASLRSLVASSGTLEFINEDFNWTGVAQSGGSYTCKRGSVNSFFSRLNWLHESEYKYPALNVTMPNNGKFDKLYIWGVHHPSTDREQTNLYVRASGRVTVSTKRSQQTVIPNIGSRPWVRGLSSRISIYWTIVKPGDILLINSTGNLIAPRGYFKIRTGKSSIMRSDAPIGTCSSECITPNGSISNDKPFQNVNRITYGACPRYVKQNTLKLATGMRNVPEKQTRGIFGAIAGFIENGWEGMVDGWYGFRHQNSEGTGQAADLKSTQAAIDQINGKLNRLIEKTNEKFHQIEKEFSEVEGRIQDLEKYVEDTKIDLWSYNAELLVALENQHTIDLTDSEMNKLFEKTRKQLRENAEDMGNGCFKIYHKCDNACIGSIRNGTYDHDVYRDEALNNRFQIKGVELKSGYKDWILWISFAISCFLLCVVLLGFIMWACQKGNIRCNICI

SEQ ID NO: 8589 - protein, 566 aa, Artificial Sequence
  derived and/or modified protein sequence (wt) from hemagglutinin__InfluenzaA__AFG99512
MKTIIALSYILCLVFAQKLPGNDNSTATLCLGHHAVPNGTLVKTITNDQIEVTNATELVQSSSTGRICDSPHRILDGKNCTLIDALLGDPHCDGFQNKEWDLFVERSKAYSNCYPYDVPDYASLRSLVASSGTLEFINEDFNWTGVAQSGDSYACKRGSVKSFFSRLNWLHESEYKYPALNVTMPNNDKFDKLYIWGVHHPSTDREQTSLYIRASGRVTVSTKRSQQTVIPNIGSRPWVRGLSSRISIYWTIVKPGDILLINSTGNLIAPRGYFKIRTGKSSIMRSDAPIGTCSSECITPNGSIPNDKPFQNVNRITYGACPRYVKQNTLKLATGMRNVPEKQTRGIFGAIAGFIENGWEGMVDGWYGFRHQNSEGTGQAADLKSTQAAIDQINGKLNRLIEKTNEKFHQIEKEFSEVEGRIQDLEKYVEDTKIDLWSYNAELLVALENQHTIDLTDSEMNKLFEKTRKQLRENAEDMGNGCFKIYHKCDNACIGSIRNGTYDHDVYRDEALNNRFQIKGVELKSGYKDWILWISFAISCFLLCVVLLGFIMWACQKGNIRCNICI

SEQ ID NO: 8590 - protein, 566 aa, Artificial Sequence
  derived and/or modified protein sequence (wt) from hemagglutinin__InfluenzaA__AFG99523
MKTIIALSYIFCLVFAQKLPGNDNSTATLCLGHHAVPNGTLVKTITNDQIEVTNATELVQSSSTGRICDSPHRILDGKNCTLIDALLGDPHCDGFQNKEWDLFVERSKAYSNCYPYDVPDYASLRSLVASSGTLEFINEDFNWTGVAQSGGSYACKRGSVNSFFSRLNWLHESQYKYPALNVTMPNNGKFDKLYIWGVHHPSTDREQTNLYVRASGRVTVSTKRSQQTVIPNIGSRPWVRGLSSRISIYWTIVKPGDILLINSTGNLIAPRGYFKIRTGKSSIMRSDAPIGTCSSECITPNGSIPNDKPFQNVNRITYGACPRYVKQNTLKLATGMRNVPEKQTRGIFGAIAGFIENGWEGMVDGWYGFRHQNSEGTGQAADLKSTQAAIDQINGKLNRLIEKTNEKFHQIEKEFSEVEGRIQDLEKYVEDTKIDLWSYNAELLVALENQHTIDLTDSEMNKLFEKTRKQLRENAEDMGNGCFKIYHKCDNACIGSIRNGTYDHDVYRDEALNNRFQIKGVELKSGYKDWILWISFAISCFLLCVVLLGFIMWACQKGNIRCNICI

SEQ ID NO: 8591 - protein, 566 aa, Artificial Sequence; identical to SEQ ID NO: 8487
  derived and/or modified protein sequence (wt) from hemagglutinin__InfluenzaA__AFG99534

SEQ ID NO: 8592 - protein, 566 aa, Artificial Sequence; identical to SEQ ID NO: 8487
  derived and/or modified protein sequence (wt) from hemagglutinin__InfluenzaA__AFG99545

SEQ ID NO: 8593 - protein, 566 aa, Artificial Sequence
  derived and/or modified protein sequence (wt) from hemagglutinin__InfluenzaA__AFG99556
MKTIIALSYILCLVFAQKLPGNDNSTATLCLGHHAVPNGTLVKTITNDQIEVTNATELVQSSSTGRICDSPHRILDGKNCTLIDALLGDPHCDGFQNKEWDLFVERSKAYSNCYPYDVPDYASLRSLVASSGTLEFTNEDFNWTGVAQSGESYACKRGSVKSFFSRLNWLHESDYKYPALNVTMPNNGKFDKLYIWGVHHPSTDREQTSLYVRASGRVTVSTKRSQQTVIPNIGSRPWVRGLSSRISIYWTIVKPGDILLINSTGNLIAPRGYFKIRTGKSSIMRSDAPIGTCSSECITPNGSIPNDKPFQNVNRITYGACPRYVKQNTLKLATGMRNVPEKQTRGIFGAIAGFIENGWEGMVDGWYGFRHQNSEGTGQAADRKSTQAAIDQINGKLNRLIEKTNEKFHQIEKEFSEVEGRIQDLEKYVEDTKIDLWSYNAELLVALENQHTIDLTDSEMNKLFEKTRKQLRENAEDMGNGCFKIYHKCDNACIGSIRNGTYDHDVYRDEALNNRFQIKGVELKSGYKDWILWISFAISCFLLCVVLLGFIMWACQKGNIRCNICI

SEQ ID NO: 8594 - protein, 566 aa, Artificial Sequence; identical to SEQ ID NO: 8487
  derived and/or modified protein sequence (wt) from hemagglutinin__InfluenzaA__AFG99567

SEQ ID NO: 8595 - protein, 566 aa, Artificial Sequence; identical to SEQ ID NO: 8487
  derived and/or modified protein sequence (wt) from hemagglutinin__InfluenzaA__AFG99578

SEQ ID NO: 8596 - protein, 566 aa, Artificial Sequence; identical to SEQ ID NO: 8487
  derived and/or modified protein sequence (wt) from hemagglutinin__InfluenzaA__AFG99589

SEQ ID NO: 8597 - protein, 566 aa, Artificial Sequence
  derived and/or modified protein sequence (wt) from hemagglutinin__InfluenzaA__AFG99600
MKTIIALSYILCLVFAQKLPGNDNSTATLCLGHHAVPNGTLVKTITNDQIEVTNATELVQSSSTGRICDSPHRVLDGKNCTLIDALLGDPHCDGFQNKEWDLFVERSKAYSNCYPYDVPDYASLRSLVASSGTLEFTNEDFNWTGVAQSGESYACKRGSVKSFFSRLNWLHESDYKYPALNVTMPNNGKFDKLYIWGVHHPSTDREQTSLYVRASGRVTVSTKRSQQTVIPNIGSRPWVRGLSSRISIYWTIVKPGDILLINSTGNLIAPRGYFKIRIGKSSIMRSDAPIGTCSSECITPNGSIPNDKPFQNVNRITYGACPRYVKQNTLKLATGMRNVPEKQTRGIFGAIAGFIENGWEGMVDGWYGFRHQNSEGTGQAADLKSTQAAIDQINGKLNRLIEKTNEKFHQIEKEFSEVEGRIQDLEKYVEDTKIDLWSYNAELLVALENQHTIDLTDSEMNKLFEKTRKQLRENAEDMGNGCFKIYHKCDNACIGSIRNGTYDHDVYRDEALNNRFQIKGVELKSGYKDWILWISFAISCFLLCVVLLGFIMWACQKGNIRCNICI

SEQ ID NO: 8598 - protein, 566 aa, Artificial Sequence; identical to SEQ ID NO: 8487
  derived and/or modified protein sequence (wt) from hemagglutinin__InfluenzaA__AFG99611

SEQ ID NO: 8599 - protein, 566 aa, Artificial Sequence; identical to SEQ ID NO: 8487
  derived and/or modified protein sequence (wt) from hemagglutinin__InfluenzaA__AFG99622

SEQ ID NO: 8600 - protein, 566 aa, Artificial Sequence; identical to SEQ ID NO: 8487
  derived and/or modified protein sequence (wt) from hemagglutinin__InfluenzaA__AFG99633

SEQ ID NO: 8601 - protein, 566 aa, Artificial Sequence
  derived and/or modified protein sequence (wt) from hemagglutinin__InfluenzaA__AFG99644
MKTIIALSYILCLVFAQKLPGNDNSTATLCLGHHAVPNGTLVKTITNDQIEVTNATELVQNSSTGRICDSPHRILDGKNCTLIDALLGDPHCDDFQNKEWDLFVERSKAYSNCYPYDVPDYASLRSLVAASGTLEFINEDFNWTGVAQSGESYACKRGSVKSFFSRLNWLHESEYKYPALNVTMPNNGKFDKLYIWGVHHPSTDREQTSLYVRASGRVTVSTKRSQQTVIPNIGSRPWVRGLSSRISIYWTIVKPGDILLINSTGNLIAPRGYFKIRTGKSSIMRSDAPIGTCSSECITPNGSIPNDKPFQNVNRITYGACPRYVKQNTLKLATGMRNVPEKQTRGIFGAIAGFIENGWEGMVDGWYGFRHQNSEGTGQAADLKSTQAAIDQINGKLNRLIEKTNEKFHQIEKEFSEIEGRIQNLEKYVEDTKIDLWSYNAELLVALENQHTIDLTDSEMNKLFEKTRKQLRENAEDMGNGCFKIYHKCDNACIGSIRNGTYDHDVYRDEALNNRFQIKGVELKSGYKDWILWISFAISCFLLCVVLLGFIMWACQKGNIRCNICI

SEQ ID NO: 8602 - protein, 566 aa, Artificial Sequence
  derived and/or modified protein sequence (wt) from hemagglutinin__InfluenzaA__AFG99655
MKTIIALSYILCLVFAQKLPGNDNSTATLCLGHHAVPNGTLVKTITNDQIEVTNATELVQNSSTGRICDSPHRILDGKNCTLIDALLGDPHCDDFQNKEWDLFVERSKAYSNCYPYDVPDYASLRSLVASSGTLEFINEDFNWTGVAQSGESYACKRGSVKSFFSRLNWLHESEYKYPALNVTMPNNGKFDKLYIWGVHHPSTDREQTSLYVRASGRVTVSTKRSQQTVIPNIGSRPWVRGLSSRISIYWTIVKPGDILLINSTGNLIAPRGYFKIRTGKSSIMRSDAPIGTCSSECITPNGSIPNDKPFQNVNRITYGACPRYVKQNTLKLATGMRNVPEKQTRGIFGAIAGFIENGWEGMVDGWYGFRHQNSEGTGQAADLKSTQAAIDQINGKLNRLIEKTNEKFHQIEKEFSEIEGRIQDLEKYVEDTKIDLWSYNAELLVALENQHTIDLTDSEMNKLFEKTRKQLRENAEDMGNGCFKIYHKCDNACIGSIRNGTYDHDVYRDEALNNRFQIKGVELKSGYKDWILWISFAISCFLLCVVLLGFIMWACQKGNIRCNICI

SEQ ID NO: 8603 - protein, 566 aa, Artificial Sequence; identical to SEQ ID NO: 8602
  derived and/or modified protein sequence (wt) from hemagglutinin__InfluenzaA__AFG99666

SEQ ID NO: 8604 - protein, 566 aa, Artificial Sequence; identical to SEQ ID NO: 2338
  derived and/or modified protein sequence (wt) from hemagglutinin__InfluenzaA__AFG99677

SEQ ID NO: 8605 - protein, 566 aa, Artificial Sequence; identical to SEQ ID NO: 8487
  derived and/or modified protein sequence (wt) from hemagglutinin__InfluenzaA__AFG99688

SEQ ID NO: 8606 - protein, 566 aa, Artificial Sequence
  derived and/or modified protein sequence (wt) from hemagglutinin__InfluenzaA__AFG99701
MKTIIALSYILCLVFAQKLPGNDNSTATLCLGHHAVPNGTLVKTITNDQIEVTNATELVQSSSTGRICDSPHRILDGKNCTLIDALLGDPHCDGFQNKEWDLFVERSNAYSNCYPYDVPDYASLRSLVASSGTLEFTNEDFNWTGVAQSGESYACKRGSVKSFFSRLNWLHESDYKYPALNVTMPNNGKFDKLYIWGVHHPSTDREQTSLYVRASGRVTVSTKRSQQTVIPNIGSRPWVRGLSSRISIYWTIVKPGDILLINSTGNLIAPRGYFKIRTGKSSIMRSDAPIGTCSSECITPNGSIPNDKPFQNVNRITYGACPRYVKQNTLKLATGMRNVPEKQTRGIFGAIAGFIENGWEGMVDGWYGFRHQNSEGTGQAADLKSTQAAIDQINGKLNRLIEKTNEKFHQIEKEFSEVEGRIQDLEKYVEDTKIDLWSYNAELLVALENQHTIDLTDSEMNKLFEKTRKQLRENAEDMGNGCFKIYHKCDNACIGSIRNGTYDHDVYRDEALNNRFQIKGAELKSGYKDWILWISFAISCFLLCVVLLGFIMWACQKGNIRCNICI

SEQ ID NO: 8607 - protein, 566 aa, Artificial Sequence
  derived and/or modified protein sequence (wt) from hemagglutinin__InfluenzaA__AFG99712
MKTIIALSYILCLVFAQKLPGNDNSTATLCLGHHAVPNGTLVKTITNDQIEVTNATELVQSSSTGRICDSPHRILDGKNCTLIDALLGDPHCDGFQNKEWDLFVERSKAYSNCYPYEVPDYASLRSLVASSGTLEFTNEDFNWTGVAQSGESYACKRGSVKSFFSRLNWLHESDYKYPALNVTMPNNGKFDKLYIWGVHHPSTDREQTSLYVRASGRVTVSTKRSQQTVIPNIGSRPWVRGLSSRISIYWTIVKPGDILLINSTGNLIAPRGYFKIRTGKSSIMRSDAPIGTCSSECITPNGSIPNDKPFQNVNRITYGACPRYVKQNTLKLATGMRNVPEKQTRGIFGAIAGFIENGWEGMVDGWYGFRHQNSEGTGQAADLKSTQAAIDQINGKLNRLIEKTNEKFHQIEKEFSEVEGRIQDLEKYVEDTKIDLWSYNAELLVALENQHTIDLTDSEMNKLFEKTRKQLRENAEDMGNGCFKIYHKCDNACIGSIRNGTYDHDVYRDEALNNRFQIKGVELKSGYKDWILWISFAISCFLLCVVLLGFIMWACQKGNIRCNICI

SEQ ID NO: 8608 - protein, 566 aa, Artificial Sequence; identical to SEQ ID NO: 8487
  derived and/or modified protein sequence (wt) from hemagglutinin__InfluenzaA__AFG99723

SEQ ID NO: 8609 - protein, 566 aa, Artificial Sequence; identical to SEQ ID NO: 8602
  derived and/or modified protein sequence (wt) from hemagglutinin__InfluenzaA__AFG99734

SEQ ID NO: 8610 - protein, 566 aa, Artificial Sequence
  derived and/or modified protein sequence (wt) from hemagglutinin__InfluenzaA__AFG99745
MKTIIALSYILCLVFAQKLPGNDNSTATLCLGHHAVPNGTLVKTITNDQIEVTNATELVQSSSTGRICDSPHRILDGKNCTLIDALLGDPHCDGFQNKEWDLFVERSKAYSNCYPYDVPDYASLRSLVASSGTLEFINEDFNWTGVAQSGDSYACKRGSVKSFFSRLNWLHESEYKYPALNVTMPNNDKFDKLYIWGVHHPSTEREQTSLYIRASGRVTVSTKRSQQTVIPNIGSKPWVRGLSSRISIYWTIVKPGDILLINSTGNLIAPRGYFKIRTGKSSIMRSDAPIGTCSSECITPNGSIPNDKPFQNVNRITYGACPRYVKQNTLKLATGMRNVPEKQTRGIFGAIAGFIENGWEGMVDGWYGFRHQNSEGTGQAADLKSTQAAIDQINGKLNRLIEKTNEKFHQIEKEFSEVEGRIQDLEKYVEDTKIDLWSYNAELLVALENQHTIDLTDSEMNKLFEKTRKQLRENAEDMGNGCFKIYHKCDNACMGSIRNGTYDHDVYRDEALNNRFQIKGVELKSGYKDWILWISFAISCFLLCVVLLGFIMWACQKGNIRCNICI

SEQ ID NO: 8611 - protein, 566 aa, Artificial Sequence; identical to SEQ ID NO: 8487
  derived and/or modified protein sequence (wt) from hemagglutinin__InfluenzaA__AFG99756

SEQ ID NO: 8612 - protein, 566 aa, Artificial Sequence
  derived and/or modified protein sequence (wt) from hemagglutinin__InfluenzaA__AFG99767
MKTIIALSYILCLVFAQKLPGNDNSTATLCLGHHAVPNGTLVKTITNDQIEVTNATELVQSSSTGRICDSPHRILDGKNCTLIDALLGDPHCDDFQNKEWDLFVERSKAYSNCYPYDVPDYASLRSLVASSGTLEFINEDFNWTGVAQSGESYACKRGSVKSFFSRLNWLHESEYKYPALNVTMPNNDKFDKLYIWGVHHPSTDREQTSLYIRASGRVTVSTKRSQQTVIPNIGSRPWVRGLSSRISIYWTIVKPGDILLINSTGNLIAPRGYFKIRTGKSSIMRSDAPIGTCSSECITPNGSIPNDKPFQNVNRITYGACPRYVKQNTLKLATGMRNVPEKQTRGIFGAIAGFIENGWEGMVDGWYGFRHQNSEGTGQAADLKSTQAAIDQINGKLNRLIEKTNEKFHQIEKEFSEVEGRIQDLEKYVEDTKIDLWSYNAELLVALENQHTIDLTDSEMNKLFEKTRKQLRENAEDMGNGCFKIYHKCDNACIGSIRNGTYDHDVYRDEALNNRFQIKGVELKSGYKDWILWISFAISCFLLCVVLLGFIMWACQKGNIRCNICI

SEQ ID NO: 8613 - protein, 566 aa, Artificial Sequence
  derived and/or modified protein sequence (wt) from hemagglutinin__InfluenzaA__AFG99778
MKTIIALSYILCLVFAQKLPGNDNSTATLCLGHHAVPNGTLVKTLTNDQIEVTNATELVQSSSTGKICDSPHRILDGKNCTLIDALLGDPHCDGLQNKEWDLFVERSKAYSNCYPYDVPDYASLRSLVASSGTLEFINEDFNWTGVAQDGGSYACKRGSVNSFFSRLNWLHKSEYKYPALNVTMPNNGKVDKLYIWGVHHPSTDRDQTSLYVRASGRVTVSTKRSQQTVIPNIGSRPWVRGQSSRISIYWTIVKPGDILLINSTGNLIAPRGYFKIRNGKSSIMRSDAPIGTCSSECITPNGSIPNDKPFQNVNRITYGACPRYVKQNTLKLATGMRNVPEKQTRGIFGAIAGFIENGWEGMVDGWYGFRHQNSEGTGQAADLKSTQAAIDQINGKLNRLIEKTNEKFHQIEKEFSEVEGRIQDLEKYVEDTKIDLWSYNAELLVALENQHTIDLTDSEMNKLFEKTRKQLRENAEDMGNGCFKIYHKCDNACIGSIRNGTYDHDVYRDEALNNRFQIKGVELKSGYKDWILWISFAISCFLLCVVLLGFIMWACQKGNIRCNICI

SEQ ID NO: 8614 - protein, 566 aa, Artificial Sequence; identical to SEQ ID NO: 8487
  derived and/or modified protein sequence (wt) from hemagglutinin__InfluenzaA__AFG99789

SEQ ID NO: 8615 - protein, 566 aa, Artificial Sequence; identical to SEQ ID NO: 8602
  derived and/or modified protein sequence (wt) from hemagglutinin__InfluenzaA__AFG99800

SEQ ID NO: 8616 - protein, 566 aa, Artificial Sequence
  derived and/or modified protein sequence (wt) from hemagglutinin__InfluenzaA__AFG99811
MKTIIALSYILCLVFSQKLPGNDNSTATLCLGHHAVPNGTLVKTITNDQIEVTNATELVQNSSTGRICDSPHRILDGKNCTLIDALLGDPHCDDFQNKEWDLFVERSKAYSNCYPYDVPDYASLRSLVASSGTLEFINEDFNWTGVAQSGESYACKRGSVKSFFSRLNWLHESEYKYPALNVTMPNNGKFDKLYIWGVHHPSTDREQTSLYVRASGRVTVSTKRSQQTVIPNIGSRPWVRGLSSRISIYWTIVKPGDILLINSTGNLIAPRGYFKIRTGKSSIMRSDAPIGTCSSECITPNGSIPNDKPFQNVNRITYGACPRYVKQNTLKLATGMRNVPEKQTRGIFGAIAGFIENGWEGMVDGWYGFRHQNSEGTGQAADLKSTQAAIDQINGKLNRLIEKTNEKFHQIEKEFSEIEGRIQDLEKYVEDTKIDLWSYNAELLVALENQHTIDLTDSEMNKLFEKTRKQLRENAEDMGNGCFKIYHKCDNACIGSIRNGTYDHDVYRDEALNNRFQIKGVELKSGYKDWILWISFAISCFLLCVVLLGFIMWACQKGNIRCNICI

SEQ ID NO: 8617 - protein, 566 aa, Artificial Sequence; identical to SEQ ID NO: 8487
  derived and/or modified protein sequence (wt) from hemagglutinin__InfluenzaA__AFG99822

SEQ ID NO: 8618 - protein, 566 aa, Artificial Sequence; identical to SEQ ID NO: 8487
  derived and/or modified protein sequence (wt) from hemagglutinin__InfluenzaA__AFG99833

SEQ ID NO: 8619 - protein, 566 aa, Artificial Sequence; identical to SEQ ID NO: 8487
  derived and/or modified protein sequence (wt) from hemagglutinin__InfluenzaA__AFG99844

SEQ ID NO: 8620 - protein, 566 aa, Artificial Sequence
  derived and/or modified protein sequence (wt) from hemagglutinin__InfluenzaA__AFG99855
MKTIIALSYILCLVFAQKLPGNDNSTATLCLGHHAVPNGTLVKTITNDQIEVTNATELVQSSSTGRICDSPHRILDGKNCTLIDALLGDPHCDGFQNKEWDLFVERSKAYSNCYPYDVPDYASLRSLVASSGTLEFTNEDFNWTGVAQSGESYACKRGSVKSFFSRLNWLHESDYKYPALNVTMPNNGKFDKLYIWGVHHPSTDREQTSLYVRASGRVTVSTKRSQQTVIPNIGSRPWVRGLSSRISIYWTIVKPGDILLINSTGNLIAPRGYFKIRTGKSSIMRSDAPIGTCSSECITPNGSIPNDKPFQNVNRITYGACPRYVKQNTLKLATGMRNVPGKQTRGIFGAIAGFIENGWEGMVDGWYGFRHQNSEGTGQAADLKSTQAAIDQINGKLNRLIEKTNEKFHQIEKEFSEVEGRIQDLEKYVEDTKIDLWSYNAELLVALENQHTIDLTDSEMNKLFEKTRKQLRENAEDMGNGCFKIYHKCDNACIGSIRNGTYDHDVYRDEALNNRFQIKGVELKSGYKDWILWISFAISCFLLCVVLLGFIMWACQKGNIRCNICI

SEQ ID NO: 8621 - protein, 566 aa, Artificial Sequence; identical to SEQ ID NO: 8487
  derived and/or modified protein sequence (wt) from hemagglutinin__InfluenzaA__AFG99866

SEQ ID NO: 8622 - protein, 566 aa, Artificial Sequence; identical to SEQ ID NO: 8487
  derived and/or modified protein sequence (wt) from hemagglutinin__InfluenzaA__AFG99877

SEQ ID NO: 8623 - protein, 566 aa, Artificial Sequence
  derived and/or modified protein sequence (wt) from hemagglutinin__InfluenzaA__AFG99888
MKTIIALSYILCLVFAQKLPGNDNSTATLCLGHHAVPNGTLVKTITNDQIEVTNATELVQSSSTGRICDSPHRILDGKNCTLIDALLGDPHCDGFQNKEWDLFVERSKAYSNCYPYDVPDYASLRSLVASSGTLEFINEDFNWTGVAQSGESYACKRGSVKSFFSRLNWLHESEYKYPALNVTMPNNDKFDKLYIWGVHHPSTDREQTSLYIRASGRVTVSTKRSQQTVIPNIGSRPWVRGLSSRISIYWTIVKPGDILLINSTGNLIAPRGYFKIRTGKSSIMRSDAPIGTCNSECITPNGSIPNDKPFQNVNRITYGACPRYVKQNTLKLATGMRNVPEKQTRGIFGAIAGFIENGWEGMVDGWYGFRHQNSEGTGQAADLKSTQAAIDQINGKLNRLIEKTNEKFHQIEKEFSEVEGRIQDLEKYVEDTKIDLWSYNAELLVALENQHTIDLTDSEMNKLFEKTRKQLRENAEDMGNGCFKIYHKCDNACIGSIRNGTYNHDVYRDEALNNRFQIKGVELKSGYKDWILWISFAISCFLLCVVLLGFIMWACQKGNIRCNICI

SEQ ID NO: 8624 - protein, 566 aa, Artificial Sequence; identical to SEQ ID NO: 8487
  derived and/or modified protein sequence (wt) from hemagglutinin__InfluenzaA__AFG99899

SEQ ID NO: 8625 - protein, 566 aa, Artificial Sequence; identical to SEQ ID NO: 8487
  derived and/or modified protein sequence (wt) from hemagglutinin__InfluenzaA__AFG99910

SEQ ID NO: 8626 - protein, 566 aa, Artificial Sequence; identical to SEQ ID NO: 8487
  derived and/or modified protein sequence (wt) from hemagglutinin__InfluenzaA__AFG99921

SEQ ID NO: 8627 - protein, 566 aa, Artificial Sequence
  derived and/or modified protein sequence (wt) from hemagglutinin__InfluenzaA__AFG99932
MKTIIALSYILCLVFAQKLPGNDNSTATLCLGHHAVPNGTLVKTITNDQIEVTNATELVQSSSTGRICDSPHRILDGKNCTLIDALLGDPHCDGFQNKEWDLFVERSKAYSNCYPYDVPDYASLRSLVASSGTLEFINEDFNWTGVAQSGESYACKRGSVKSFFSRLNWLHESEYKYPALNVTMPNNDKFDKLYIWGVHHPSTDREQTSLYIRASGRVTVSTKRSQQTVIPNIGSRPWVRGLSSRISIYWTIVKPGDILLINSTGNLIAPRGYFKIRTGKSSIMRSDAPIGTCSSECITPNGSIPNDKPFQNVNRITYGACPRYVKQNTLKLATGMRNVPEKQTRGIFGAIAGFIENGWEGMVDGWYGFRHQNSEGTGQAADLKSTQAAIDQINGKLNRLIEKTNEKFHQIEKEFSEVEGRIQDLEKYVEDTKIDLWSYNAELLVALENQHTIDLTDSEMNKLFEKTRKQLRENAEDMGNGCFKIYHKCDNACIGSIRNGTYDHDVYRDEALNNRFQIKGVELKSGYKDWILWISFAISCFLLCVVLLGFIMWACQKGNIRCNICI

SEQ ID NO: 8628 - protein, 566 aa, Artificial Sequence; identical to SEQ ID NO: 8487
  derived and/or modified protein sequence (wt) from hemagglutinin__InfluenzaA__AFG99943

SEQ ID NO: 8629 - protein, 566 aa, Artificial Sequence
  derived and/or modified protein sequence (wt) from hemagglutinin__InfluenzaA__AFG99954
MKTIIALSYILCLVFAQKLPGNDNSTATLCLGHHAVPNGTLVKTITNDQIEVTNATELVQSSSTGRICDSPHRILDGKNCTLIDALLGDPHCDGFQNKEWDLFVERSKAYSNCYPYDVPDYASLRSLVASSGTLEFINEDFNWTGVAQSGDSYACKRGSVKSFFSRLNWLHESEYKYPALNVTMPNNDKFDKLYIWGVHHPSTEREQTSLYIRASGRVTVSTKRSQQTVIPNIGFKPWVRGLSSRISIYWTIVKPGDILLINSTGNLIAPRGYFKIRTGKSSIMRSDAPIGTCSSECITPNGSIPNDKPFQNVNRITYGACPRYVKQNTLKLATGMRNVPEKQTRGIFGAIAGFIENGWEGMVDGWYGFRHQNSEGTGQAADLKSTQAAIDQINGKLNRLIEKTNEKFHQIEKEFSEVEGRIQDLEKYVEDTKIDLWSYNAELLVALENQHTIDLTDSEMNKLFEKTRKQLRENAEDMGNGCFKIYHKCDNACIGSIRNGTYDHDVYRDEALNNRFQIKGVELKSGYKDWILWISFAISCFLLCVVLLGFIMWACQKGNIRCNICI

SEQ ID NO: 8630 - protein, 566 aa, Artificial Sequence
  derived and/or modified protein sequence (wt) from hemagglutinin__InfluenzaA__AFG99965
MKTIIALSYILCLAFAQKLPGNDNSTATLCLGHHAVPNGTLVKTITNDQIEVTNATELVQSSSTGRICDSPHRILDGKNCTLIDALLGDPHCDGFQNKEWDLFVERSKAYSNCYPYDVPDYASLRSLVASSGTLEFTNEDFNWTGVAQSGESYACKRGSVKSFFSRLNWLHESDYKYPALNVTMPNNGKFDKLYIWGVHHPSTDREQTSLYVRASGRVTVSTKRSQQTVIPNIGSRPWVRGLSSRISIYWTIVKPGDILLINSTGNLIAPRGYFKIRTGKSSIMRSDAPIGTCSSECITPNGSIPNDKPFQNVNRITYGACPRYVKQNTLKLATGMRNVPEKQTRGIFGAIAGFIENGWEGMVDGWYGFRHQNSEGTGQAADLKSTQAAIDQINGKLNRLIEKTNEKFHQIEKEFSEVEGRIQDLEKYVEDTKIDLWSYNAELLVALENQHTIDLTDSEMNKLFEKTRKQLRENAEDMGNGCFKIYHKCDNACIGSIRNGTYDHDVYRDEALNNRFQIKGVELKSGYKDWILWISFAISCFLLCVVLLGFIMWACQKGNIRCNICI

SEQ ID NO: 8631 - protein, 566 aa, Artificial Sequence; identical to SEQ ID NO: 8487
  derived and/or modified protein sequence (wt) from hemagglutinin__InfluenzaA__AFG99976

SEQ ID NO: 8632 - protein, 566 aa, Artificial Sequence
  derived and/or modified protein sequence (wt) from hemagglutinin__InfluenzaA__AFG99987
MKTIIALSYILCLVFAQKLPGNDNSTATLCLGHHAVPNGTLVKTITNDQIEVTNATELVQSSSTGRICDSPHRILDGKNCTLIDALLGDPHCDGFQNKEWDLFVERSKAYSNCYPYDVPDYASLRSLVASSGTLEFINEDFNWTGVAQNGDSYACKRGSVKSFFSRLNWLHESEYKYPALNVTMPNNDKFDKLYIWGVHHPSTDREQTSLYIRASGRVTVSTKRSQQTVIPNIGSRPWVRGLSSRISIYWTIVKPGDILLINSTGNLIAPRGYFKIRTGKSSIMRSDAPIGTCSSECITPNGSIPNDKPFQNVNRITYGACPRYVKQNTLKLATGMRNVPEKQTRGIFGAIAGFIENGWEGMVDGWYGFRHQNSEGTGQAADLKSTQAAIDQINGKLNRLIEKTNEKFHQIEKEFSEVEGRIQDLEKYVEDTKIDLWSYNAELLVALENQHTIDLTDSEMNKLFEKTRKQLRENAEDMGNGCFKIYHKCDNACIGSIRNGTYDHDVYRDEALNNRFQIKGVELKSGYKDWILWISFAISCFLLCVVLLGFIMWACQKGNIRCNICI

SEQ ID NO: 8633 - protein, 566 aa, Artificial Sequence
  derived and/or modified protein sequence (wt) from hemagglutinin__InfluenzaA__AFG99998
MKTIIALSYILCLVFAQKLPGNDNSTATLCLGHHAVPNGTLVKTITNDQIEVTNATELVQSSSTGRICDSPHRILDGKNCTLIDALLGDPHCDGFQNKEWDLFVERSKAYSNCYPYDVPDYASLRSLVASSGTLEFINEDFNWTGVAQDGGSYACKRGSVNSFFSRLNWLHKLEYKYPALNVTMPNNGKFDKLYIWGVHHPSTDSDQTSLYVRASGRVTVSTKRSQQTVTPNIGSRPWVRGLSSRISIYWTIVKPGDILLINSTGNLIAPRGYFKIRNGKSSIMRSDAPIGNCSSECITPNGSIPNDKPFQNVNRITYGACPRYVKQNTLKLATGMRNVPEKQTRGIFGAIAGFIENGWEGMVDGWYGFRHQNSEGTGQAADLKSTQAAIDQINGKLNRLIEKTNEKFHQIEKEFSEVEGRIQDLEKYVEDTKIDLWSYNAELLVALENQHTIDLTDSEMNKLFEKTRKQLRENAEDMGNGCFKIYHKCDNACIGSIRNGTYDHDVYRDEALNNRFQIKGVELKSGYKDWILWISFAISCFLLCVVLLGFIMWACQKGNIRCNICI

SEQ ID NO: 8634 - protein, 566 aa, Artificial Sequence; identical to SEQ ID NO: 8602
  derived and/or modified protein sequence (wt) from hemagglutinin__InfluenzaA__AFH00021

SEQ ID NO: 8635 - protein, 566 aa, Artificial Sequence
  derived and/or modified protein sequence (wt) from hemagglutinin__InfluenzaA__AFH00032
MKTIIALSYILCLVFAQKLPGNDNSTATLCLGHHAVPNGTLVKTITNDQIEVTNATELVQSSSTGKICDSPHRILDGKNCTLIDALLGDPHCDDFQNKEWDLFVERSKAYSNCYPYDVPDYASLRSLVASSGTLEFINEDFNWTGVAQSGDSYACKRGSVKSFFSRLNWLHESEYKYPALNVTMPNNDKFDKLYIWGVHHPSTDREQTSLYIRASGRVTVSTKRSQQTVIPNIGSRPWVRGLSSRISIYWTIVKPGDILLINSTGNLIAPRGYFKIRTGKSSIMRSDAPIGTCSSECITPNGSIPNDKPFQNVNRITYGACPRYVKQNTLKLATGMRNVPEKQTRGIFGAIAGFIENGWEGMVDGWYGFRHQNSEGTGQAADLKSTQAAIDQINGKLNKLIEKTNEKFHQIEKEFSEVEGRIQDLEKYVEDTKIDLWSYNAELLVALENQHTIDLTDSEMNKLFEKTRKQLRENAEDMGNGCFKIYHKCDNACIGSIRNGTYDHDVYRDEALNNRFQIKGVELKSGYKDWILWISFAISCFLLCVVLLGFIMWACQKGNIRCNICI

SEQ ID NO: 8636 - protein, 566 aa, Artificial Sequence
  derived and/or modified protein sequence (wt) from hemagglutinin__InfluenzaA__AFH00043
MKTIIALSYILCLVFAQKLPGNDNSTATLCLGHHAVPNGTLVKTITNDQIEVTNATELVQSSSTGKICDSPHRILDGKNCTLIDALLGDPHCDDFQNKEWDLFVERSKAYSNCYPYDVPDYASLRSLVASSGTLEFINEDFNWTGVAQSGDSYACKRGSVKSFFSRLNWLHESEYKYPALNVTMPNNDKFDKLYIWGVHHPSTDREQTSLYIRASGRVTVSTKRSQQTVIPNIGSRPWVRGLSSRISIYWTIVKPGDILLINSTGNLIAPRGYFKIRTGKSSIMRSDATIGTCSSECITPNGSIPNDKPFQNVNRITYGACPRYVKQNTLKLATGMRNVPEKQTRGIFGAIAGFIENGWEGMVDGWYGFRHQNSEGTGQAADLKSTQAAIDQINGKLNKLIEKTNEKFHQIEKEFSEVEGRIQDLEKYVEDTKIDLWSYNAELLVALENQHTIDLTDSEMNKLFEKTRKQLRENAEDMGNGCFKIYHKCDNACIGSIRNGTYDHDVYRDEALNNRFQIKGVELKSGYKDWILWISFAISCFLLCVVLLGFIMWACQKGNIRCNICI

SEQ ID NO: 8637 - protein, 566 aa, Artificial Sequence
  derived and/or modified protein sequence (wt) from hemagglutinin__InfluenzaA__AFH00054
MKTIIALSYILCLVFAQKLPGNDNSTATLCLGHHAVPNGTLVKTITNDQIEVTNATELVQSSSTGRICDSPHRILDGKNCTLIDALLGDPHCDGFQNKEWDLFVERSKAYSNCYPYDVPDYASLRSLVASSGTLEFINEDFNWTGVAQNGDSYACKRGSVKSFFSRLNWLHESEYKYPALNVTMPNNDKFDKLYIWGVHHPSTDREQTSLYIRASGRVTVSTKRSQQTVIPNIGSRPWVRGLSSRISIYWTIVKPGDILLINSTGNLIAPRGYFKIRTGKSSIMRSDAPIGTCSSECITPNGSIPNDKPFQNVNRITYGACPRYVKQNTLKLATGMRNVPEKQTRGIFGAIAGFIENGWEGMVDGWYGFRHQNSEGTGQAADLKSTQAAIDQINGKLNRLIEKTNEKFHQIEKEFSEVEGRIQDLEKYVEDTKIDLWSYNAELLVALENQHTIDLTDSEMNKLFEKTRKQLRENAEDMGNGCFKIYHKCDNACIGSIRNGTYDHDVYRDEALNNRFHIKGVELKSGYKDWILWISFAISCFLLCVVLLGFIMWACQKGNIRCNICI

SEQ ID NO: 8638 - protein, 566 aa, Artificial Sequence
  derived and/or modified protein sequence (wt) from hemagglutinin__InfluenzaA__AFH00065
MKTIIALSYILCLVFAQKLPGNDNSTATLCLGHHAVPNGTLVKTITNDQIEVTNATELVQSSSTGRICDSPHRILDGKNCTLIDALLGDPHCDGFQNKEWDLFVERSKAYSNCYPYDVPDYASLRSLVASSGTLEFINEDFNWTGVAQDGGSYACKRGSVNSFFSRLNWLHKLEYKYPALNVTMPNNGKFDKLYIWGVHHPSTDSDQTSLYVRASGRVTVSTKRSQQTVIPNIGSRPWVRGQPSRISIYWTIVKPGDILLINSTGNLIAPRGYFKIRNGKSSIMRSDAPIGNCSSECITPNGSIPNDKPFQNVNRITYGACPRYVKQNTLKLATGMRNVPEKQTRGIFGAIAGFIENGWEGMVDGWYGFRHQNSEGTGQAADLKSTQAAIDQINGKLNRLIEKTNEKFHQIEKEFSEVEGRIQDLEKYVEDTKIDLWSYNAELLVALENQHTIDLTDSEMNKLFERTRKQLRENAEDMGNGCFKIYHKCDNACIGSIRNGTYDHDVYRDEALNNRFQIKGVELKSGYKDWILWISFAISCFLLCVVLLGFIMWACQKGNIRCNICI

SEQ ID NO: 8639 - protein, 566 aa, Artificial Sequence
  derived and/or modified protein sequence (wt) from hemagglutinin__InfluenzaA__AFH00076
MKTIIALSYILCLVFAQKLPGNDNSTATLCLGHHAVPNGTLVKTITNDQIEVTNATELVQSSSTGKICDSPHRILDGKNCTLIDALLGDPHCDDFQNKEWDLFVERSKAYSNCYPYDVPDYASLRSLVASSGTLEFINEDFNWTGVAQSGDSYACKRGSVKSFFSRLNWLHESEYKYPALNVTMPNNDKFDKLYIWGVHHPSTDREQTSLYIRASGRVTVSTKRSQQTVIPNIGSRPWVRGLSSRISIYWTIVKPGDILLINSTGNLIAPRGYFKIRTGKSSIMRSDAPIGTCNSECITPNGSIPNDKPFQNVNRITYGACPRYVKQNTLKLATGMRNVPEKQTRGIFGAIAGFIENGWEGMVDGWYGFRHQNSEGTGQAADLKSTQAAIDQINGKLNRLIEKTNEKFHQIEKEFSEVEGRIQDLEKYVEDTKIDLWSYNAELLVALENQHTIDLTDSEMNKLFEKTRKQLRENAEDMGNGCFKIYHKCDNACIGSIRNGTYDHDVYRDEALNNRFQIKGVELKSGYKDWILWISFAISCFLLCVVLLGFIMWACQKGNIRCNICI

SEQ ID NO: 8640 - protein, 566 aa, Artificial Sequence
  derived and/or modified protein sequence (wt) from hemagglutinin__InfluenzaA__AFH00087
MKTIIALSYILCLVFAQKLPGNDNSTATLCLGHHAVPNGTLVKTITNDQIEVTNATELVQSSSTGRICDSPHRILDGKNCTLIDALLGDPHCDGFQNKEWDLFVERSEAYSSCYPYDVPDYASLRSLVASSGTLEFINEDFNWTGVAQDGKSYACKRGSVNSFFSRLNWLHKLEYKYPALNVTMPNNGKFDKLYIWGVHHPSTDSDQTSLYVRASGRVTVSTKRSQQTVIPNIGSRPWVRGQSSRIGIYWTIVKPGDILLINSTGNLIAPRGYFKIRNGKSSIMRSDAPIGNCSSECITPNGSIPNDKPFQNVNKITYGACPRYVKQNTLKLATGMRNVPEKQTRGIFGAIAGFIENGWEGMVDGWYGFRHQNSEGTGQAADLKSTQAAIDQINGKLNRLIEKTNEKFHQIEKEFSEVEGRIQDLEKYVEDTKIDLWSYNAELLVALENQHTIDLTDSEMNKLFERTRKQLRENAEDMGNGCFKIYHKCDNACIGSIRNGTYDHDVYRDEALNNRFQIKGVELKSGYKDWILWISFAISCFLLCVVLLGFIMWACQKGNIRCNICI

SEQ ID NO: 8641 - protein, 566 aa, Artificial Sequence
  derived and/or modified protein sequence (wt) from hemagglutinin__InfluenzaA__AFH00098
MKTIIALSYILCLVFAQKLPGNDNSTATLCLGHHAVPNGTLVKTITNDQIEVTNATELVQSSSTGRICDSPHRILDGKNCTLIDALLGDPHCDGFQNKEWDLFVERSKAYSNCYPYDVPDYASLRSLVASSGTLEFINEDFNWTGVAQDGGSYACKRGSVNSFFSRLNWLHKLEYKYPALNVTMPNNGKFDKLYIWGVHHPSTDSDQTSLYVRASGRVTVSTKRSQQTVIPNIGSRPWVRGLPSRISIYWTIVKPGDILLINSTGNLIAPRGYFKIRNGKSSIMRSDAPIGNCSSECITPNGSIPNDKPFQNVNRITYGACPRYVKQNTLKLATGMRNVPEKQTRGIFGAIAGFIENGWEGMVDGWYGFRHQNSEGTGQAADLKSTQAAIDQINGKLNRLIEKTNEKFHQIEKEFSEVEGRIQDLEKYVEDTKIDLWSYNAELLVALENQHTIDLTDSEMNKLFERTRKQLRENAEDMGNGCFKIYHKCDNACIGSIRNGTYDHDVYRDEALNNRFQIKGVELKSGYKDWILWISFAISCFLLCVVLLGFIMWACQKGNIRCNICI

SEQ ID NO: 8642 - protein, 566 aa, Artificial Sequence
  derived and/or modified protein sequence (wt) from hemagglutinin__InfluenzaA__AFH00109
MKTIIALSYILCLVFAQKLPGNDNSTATLCLGHHAVPNGTLVKTITNDQIEVTNATELVQSSSTGRICDSPHRILDGKNCTLIDALLGDPHCDGFQNKEWDLFVERSKAYSNCYPYDVPDYASLRSLVASSGTLEFINEDFNWTGVAQDGKSYTCKRGSVNSFFSRLNWLHKLEYKYPALNVTMPNNGKFDKLYIWGVHHPSTDSDQTSLYVRASGRVTVSTKRSQQTVIPNIGFRPWVRGLSSRISIYWTIVKPGDILLINSTGNLIAPRGYFKIRNGKSSIMRSDAPIGNCSSECITPNGSIPNDKPFQNVNRITYGACPRYVKQNTLKLATGMRNVPEKQTRGIFGAIAGFIENGWEGMVDGWYGFRHQNSEGTGQAADLKSTQAAIDQINGKLNRLIEKTNEKFHQIEKEFSEVEGRIQDLEKYVEDTKIDLWSYNAGLLVALENQHTIDLTDSEMNKLFERTRKQLRENAEDMGNGCFKIYHKCDNACIGSIRNGTYDHDVYRDEALNNRFQIKGVELKSGYKDWILWISFAISCFLLCVVLLGFIMWACQKGNIRCNICI

SEQ ID NO: 8643 - protein, 566 aa, Artificial Sequence
  derived and/or modified protein sequence (wt) from hemagglutinin__InfluenzaA__AFH00120
MKTIIALSYILCLVFAQKLPGNDNSTATLCLGHHAVPNGTLVKTITNDQIEVTNATELVQSSSTGRICDSPHRILDGKNCTLIDALLGDPHCDGFQNKEWDLFVERSKAYSNCYPYDVPDYASLRSLVASSGTLEFINEDFNWTGVAQDGKSYACKRGSVNSFFSRLNWLHKLEYKYPALNVTMPNNGKFDKLYIWGVHHPSTDSDQTSLYVRASGRVTVSTKRSQQTVIPNIGFRPWVRGLSSRISIYWTIVKPGDILLINSTGNLIAPRGYFKIRNGKSSIMRSDAPIGNCSSECITPNGSIPNDKPFQNVNRITYGACPRYVKQNTLKLATGMRNVPEKQTRGIFGAIAGFIENGWEGMVDGWYGFRHQNSEGTGQAADLKSTQAAIDQINGKLNRLIEKTNEKFHQIEKEFSEVEGRIQDLEKYVEDTKIDLWSYNAGLLVALENQHTIDLTDSEMNKLFERTRKQLRENAEDMGNGCFKIYHKCDNACIGSIRNGTYDHDVYRDEALNNRFQIKGVELKSGYKDWILWISFAISCFLLCVVLLGFTMWACQKGNIRCNICI

SEQ ID NO: 8644 - protein, 566 aa, Artificial Sequence; identical to SEQ ID NO: 8498
  derived and/or modified protein sequence (wt) from hemagglutinin__InfluenzaA__AFH00131

SEQ ID NO: 8645 - protein, 566 aa, Artificial Sequence
  derived and/or modified protein sequence (wt) from hemagglutinin__InfluenzaA__AFH00153
MKTIIALSYILCLVFAQKLPGNDNSTATLCLGHHAVPNGTLVKTITNDQIEVTNATELVQSSSTGRICDSPHRILDGKNCTLIDALLGDPHCDGFQNKEWDLFVERSKAYSNCYPYDVPDYASLRSLVASSGTLEFINEDFNWTGVAQDGKSYACKRGSVNSFFSRLNWLHKLEYKYPALNVTMPNNGKFDKLYIWGVHHPSTDSDQTSLYIRASGRVTVSTKRSQQTVIPNIGSRPWVRGLSSRISIYWTIVKPGDILLINSTGNLIAPRGYFKIRNGKSSIMRSDAPIGNCSSECITPNGSIPNDKPFQNVNRITYGACPRYVKQNTLKLATGMRNVPEKQTRGIFGAIAGFIENGWEGMVDGWYGFRHQNSEGTGQAADLKSTQAAIDQINGKLNRLIEKTNEKFHQIEKEFSEVEGRIQDLEKYVEDTKIDLWSYNAELLVALENQHTIDLTDSEMNKLFERTRKQLRENAEDMGNGCFKIYHKCDNACIGSIRNGTYDHDVYRDEALNNRFQIKGVELKSGYKDWILWISFAISCFLLCVVLLGFIMWACQKGNIRCNICI

SEQ ID NO: 8646 - protein, 566 aa, Artificial Sequence
  derived and/or modified protein sequence (wt) from hemagglutinin__InfluenzaA__AFH00164
MKTIIALSYILCLVFAQKLPGNDNSTATLCLGHHAVPNGTLVKTITNDQIEVTNATELVQSSSTGRICDSPHRILDGKNCTLMDALLGDPHCDGFQNKEWDLFVERSKAYSNCYPYDVPDYASLRSLVASSGTLEFINEDFNWTGVAQNGDSYACKRGSVKSFFSRLNWLHESEYKYPALNVTMPNNDKFDKLYIWGVHHPSTDREQTSLYIRASGRVTVSTKRSQQTVIPNIGSRPWVRGLSSRISIYWTIVKPGDILLINSTGNLIAPRGYFKIRTGKSSIMRSDAPIGTCSSECITPNGSIPNDKPFQNVNRITYGACPRYVKQNTLKLATGMRNVPEKQTRGIFGAIAGFIENGWEGMVDGWYGFRHQNSEGTGQAADLKSTQAAIDQINGKLNRLIEKTNEKFHQIEKEFSEVEGRIQDLEKYVEDTKIDLWSYNAELLVALENQHTIDLTDSEMNKLFEKTRKQLRENAEDMGNGCFKIYHKCDNACIGSIRNGTYDHDVYRDEALNNRFQIKGVELKSGYKDWILWISFAISCFLLCVVLLGFIMWACQKGNIRCNICI

SEQ ID NO: 8647 - protein, 566 aa, Artificial Sequence
  derived and/or modified protein sequence (wt) from hemagglutinin__InfluenzaA__AFH00175
MKTIIALSYILCLVFAQKLPGNDNSTATLCLGHHAVPNGTLVKTITNDQIEVTNATELVQSSSTGRICDSPHRILDGKNCTLIDALLGDPHCDGFQNKEWDLFVERSKAYSNCYPYDVPDYASLRSLVASSGTLEFINEDFNWTGVAQDGKSYACKRGSVKSFFSRLNWLHKLEYKYPALNVTMPNNGKFDKLYIWGVHHPSTDSDQTSLYVRASGRVTVSTKKSQQTVIPNIGSRPWVRGQSSRISIYWTIVKPGDILLINSTGNLIAPRGYFKIRNGKSSIMRSDAPIGNCSSECITPNGSIPNDKPFQNVNRITYGACPRYVKQNTLKLATGMRNVPEKQTRGIFGAIAGFIENGWEGMVDGWYGFRHQNSEGTGQAADLKSTQAAIDQINGKLNRLIEKTNEKFHQIEKEFSEVEGRIQDLEKYVEDTKIDLWSYNAELLVALENQHTIDLTDSEMNKLFERTRKQLRENAEDMGNGCFKIYHKCDNACIGSIRNGTYDHDVYRDEALNNRFQIKGVELKSGYKDWILWISFAISCFLLCVVLLGFIMWACQKGNIRCNICI

SEQ ID NO: 8648 - protein, 566 aa, Artificial Sequence
  derived and/or modified protein sequence (wt) from hemagglutinin__InfluenzaA__AFH00186
MKTIIALSHILCLVFAQKLPGNDNSTATLCLGHHAVPNGTLVKTITNDQIEVTNATELVQSSSTGRICDSPHRILDGKNCTLIDALLGDPHCDGFQNKEWDLFVERSKAYSNCYPYDVPDYASLRSLVASSGTLEFINEDFNWTGVAQDGGSYACKRGSVNSFFSRLNWLHKLEYKYPALNVTMPNNGKFDKLYIWGVHHPSTDSDQTSLYVRASGRVTVSTKRSQQTVTPNIGSRPWVRGQSSRISIYWTIVKPGDILLISSTGNLIAPRGYFKIRNGKSSIMRSDVPIGNCSSECITPNGSIPNDKPFQNVNRITYGACPRYVKQNTLKLATGMRNVPEKQTRGIFGAIAGFIENGWEGMVDGWYGFRHQNSEGTGQAADLKSTQAAIDQINGKLNRLIEKTNEKFHQIEKEFSEVEGRIQDLEKYVEDTKIDLWSYNAELIVALENQHTIDLTDSEMNKLFEKTRKQLRENAEDMGNGCFKIYHKCDNACIGSIRNGTYDHDVYRDEALNNRFQIKGVELKSGYKDWILWISFAISCFLLCVVLLGFIMWACQKGNIRCNICI

SEQ ID NO: 8649 - protein, 566 aa, Artificial Sequence
  derived and/or modified protein sequence (wt) from hemagglutinin__InfluenzaA__AFH00197
MKTIIALSYILCLVFAQKLPGNDNSTATLCLGHHAVPNGTLVKTITNDQIEVTNATELVQSSSTGRICDSPHRILDGKNCTLIDALLGDPHCDGFQNKEWDLFVERSKAYSNCYPYDVPDYASLRSLVASSGTLEFINEDFNWTGVAQDGGSYTCKRGSVNSFFSRLNWLHKLEYKYPALNVTMPNNGKFDKLYIWGVHHPSTDSDQTSLYVRASGRVTVSTKISQQTVIPNIGSRPWVRGLSSRISIYWTIVKPGDILLINSTGNLIAPRGYFKIRNGKSSIMRSDAPIGNCSSECITPNGSIPNDKPFQNVNRITYGACPRYVKQNTLKLATGMRNVPEKQTRGIFGAIAGFIENGWEGMVDGWYGFRHQNSEGTGQAADLKSTQAAIDQINGKLNRLIEKTNEKFHQIEKEFSEVEGRIQDLEKYVEDTKIDLWSYNAELLVALENQHTIDLTDSEMNKLFERTRKQLRENAEDMGNGCFKIYHKCDNACIGSIRNGTYDHDVYRDEALNNRFQIKGVELKSGYKDWILWISFAISCFLLCVVLLGFIMWACQKGNIRCNICI

SEQ ID NO: 8650 - protein, 566 aa, Artificial Sequence
  derived and/or modified protein sequence (wt) from hemagglutinin__InfluenzaA__AFH00208
MKTIIALSYILCLVFAQKLPGNDNSTATLCLGHHAVPNGTLVKTITNDQIEVTNATELVQSSSTGRICDSPHRILDGKNCTLIDALLGDPHCDGFQNKEWDLFVERSKAYSNCYPYDVPDYASLRSLVASSGTLEFINEDFNWTGVAQNGDSYACKRGSVKSFFSRLNWLHESEYKYPALNVTMPNNDKFDKLYIWGVHHPSTDREQTSLYIRASGRVTVSTKRSQQTVIPNIGSRPWVRGLSSRISIYWTIVKPGDILLINSTGNLIAPRGYFKIRTGKSSVMRSDAPIGTCSSECITPNGSIPNDKPFQNVNRITYGACPRYVKQNTLKLATGMRNVPEKQTRGIFGAIAGFIENGWEGMVDGWYGFRHQNSEGTGQAADLKSTQAAIDQINGKLSRLIEKTNEKFHQIEKEFSEVEGRIQDLEKYVEDTKIDLWSYNAELLVALENQHTIDLTDSEMNKLFEKTRKQLRENAEDMGNGCFKIYHKCDNACIGSIRNGTYDHDVYRDEALNNRFQIKGVELKSGYKDWILWISFAISCFLLCVVLLGFIMWACQKGNIRCNICI

SEQ ID NO: 8651 - protein, 566 aa, Artificial Sequence
  derived and/or modified protein sequence (wt) from hemagglutinin__InfluenzaA__AFH00219
MKTIIALSYILCLVFAQKLPGNDNSTATLCLGHHAVPNGTLVKTITNDQIEVTNATELVQSSSTGRICDSPHRILDGKNCTLIDALLGDPNCDGFQNKEWDLFVERSKAYSNCYPYDVPDYASLRSLVASSGTLEFTNEDFNWTGVAQDGGSYACKRGSVNSFFSRLNWLHKLEYKYPALNVTMPNNGKFDKLYIWGVHHPSTDSDQTSLYVRASGRVTVSTKRSQQTVTPNIGSRPWVRGLSSRISIYWTIVKPGDILLINSTGNLIAPRGYFKIRNGKSSIMRSDAPIGTCSSECITPNGSIPNDKPFQNVNRITYGACPRYVKQNTLKLATGMRNVPEKQTRGIFGAIAGFIENGWEGMVDGWYGFRHQNSEGTGQAADLKSTQAAIDQINGKLNRLIDKTNEKFHQIEKEFSEVEGRIQDLEKYVEDTKIDLWSYNAELLVALENQHTIDLTDSEMNKLFEKTRKQLRENAEDMGNGCFKIYHKCDNACIGSIRNGTYDHDVYRDEALNNRFQIKGVELKSGYKDWILWISFAISCFLLCVVLLGFIMWACQKGNIRCNICI

SEQ ID NO: 8652 - protein, 566 aa, Artificial Sequence
  derived and/or modified protein sequence (wt) from hemagglutinin__InfluenzaA__AFH00230
MKTIIALSYILCLVFAQKLPGNDNSTATLCLGHHAVPNGTLVKTITNDQIEVTNATELVQSSSTGRICDSPHRILDGKNCTLIDALLGDPHCDGFQNKEWDLFVERSKAYSNCYPYDVPDYASLRSLVASSGTLEFINEDFNWTGVAQDGKSYACKRGSVKSFFSRLNWLHKLEYKYPALNVTMPNNGKFDKLYIWGVHHPSTNSDQTSLYVRASGRVTVSTKRSQQTVIPNIGFRPWVRGLSSRISIYWTIVKPGDILLINSTGNLIAPRGYFKIRNGKSSIMRSDAPIGNCSSECITPNGSIPNDKPFQNVNRITYGACPRYVKQNTLKLATGMRNVPEKQTRGIFGAIAGFIENGWEGMVDGWYGFRHQNSEGTGQAADLKSTQAAIDQINGKLNRLIEKTNEKFHQIEKEFSEVEGRIQDLEKYVEDTKIDLWSYNAGLLVALENQHTIDLTDSEMNKLFERTRKQLRENAEDMGNGCFKIYHKCDNACIGSIRNGTYDHDVYRDEALNNRFQIKGVELKSGYKDWILWISFAISCFLLCVVLLGFIMWACQKGNIRCNICI

SEQ ID NO: 8653 - protein, 566 aa, Artificial Sequence; identical to SEQ ID NO: 1024
  derived and/or modified protein sequence (wt) from hemagglutinin__InfluenzaA__AFH00241

SEQ ID NO: 8654 - protein, 566 aa, Artificial Sequence
  derived and/or modified protein sequence (wt) from hemagglutinin__InfluenzaA__AFH00252
MKTIIALSYILCLVFAQKLPGNDNSTATLCLGHHAVPNGTLVKTITNDQIEVTNATELVQSSSTGRICDSPHRILDGKNCTLIDALLGDPHCDDFQNKEWDLFVERSKAYSNCYPYDVPDYASLRSLVASSGTLEFINEDFNWTGVAQSGDSYACKRGSVKSFFSRLNWLHESEYKYPALNVTMPNNDKFDKLYIWGVHHPSTDREQTSLYIRASGRVTVSTKRSQQTVIPNIGSRPWVRGLSSRISIYWTIVKPGDILLINSTGNLIAPRGYFKIRTGKSSIMRSDAPIGTCSSECITPNGSIPNDKPFQNVNRITYGACPRYVKQNTLKLATGMRNVPEKQTRGIFGAIAGFIENGWEGMVDGWYGFRHQNSEGTGQAADLKSTQAAIDQINGKLNRLIEKTNEKFHQIEKEFSEVEGRIQDLEKYVEDTKIDLWSYNAELLVALENQHTIDLTDSEMNKLFEKTRKQLRENAEDMGNGCFKIYHKCDNACIGSIRNGTYDHDVYRDEALNNRFQIKGVELKSGYKDWILWISFAISCFLLCVVLLGFIMWACQKGNIRCNICI

SEQ ID NO: 8655 - protein, 566 aa, Artificial Sequence
  derived and/or modified protein sequence (wt) from hemagglutinin__InfluenzaA__AFH00263
MKTIIALSYILHLVFAQKLPGNDNSTATLCLGHHAVPNGTLVKTITNDQIEVTNATELVQSSSTGRICDSPHRILDGKNCTLIDALLGDPNCDGFQNKEWDLFVERSKAYSNCYPYDVPDYASLRSLVASSGTLEFTNEDFNWTGVAQDGGSYACKRGSVNSFFSRLNWLHKLEYKYPALNVTMPNNGKFDKLYIWGVHHPSTDSVQTSLYVRASGKVTVSTKRSQQTVTPNIGSKPWVRGLSSRISIYWTIVKPGDILLINSTGNLIAPRGYFKIRNGKSSIMRSDAPIGTCSSECITPNGSIPNDKPFQNVNRITYGACPRYVKQNTLKLATGMRNVPEKQTRGIFGAIAGFIENGWEGMVDGWYGFRHQNSEGTGQAADLKSTQAAIDQINGKLNRLIEKTNEKFHQIEKEFSEVEGRIQDLEKYVEDTKIDLWSYNAELLVALENQHTIDLTDSEMNKLFEKTRKQLRENAEDMGNGCFKIYHKCDNACIGSIRNGTYDHDVYRDEALNNRFQIKGVELKSGYKDWILWISFAISCFLLCVVLLGFIMWACQKGNIRCNICI

SEQ ID NO: 8656 - protein, 566 aa, Artificial Sequence
  derived and/or modified protein sequence (wt) from hemagglutinin__InfluenzaA__AFH00274
MKTIIALSYILCLVFAQKLPGNDNSTATLCLGHHAVPNGTLVKTITNDQIEVTNATELVQSSSTGRICDSPHRILDGKNCTLIDALLGDPHCDGFQNKEWDLFVERSKAYSNCYPYDVPDYASLRSLVASSGTLEFINEDFNWTGVAQDGKSYACKRGSVNSFFSRLNWLHKLEYKYPALNVTMPNNGKFDKLYIWGVHHPSTDSDQTSLYVRASGRVTVSTKRSQQTVIPNIGFRPWVRGLSSGISIYWTIVKPGDILLINSTGNLIAPRGYFKIRNGKSSIMRSDAPIGNCSSECITPNGSIPNDKPFQNVNRITYGACPRYVKQNTLKLATGMRNVPEKQTRGIFGAIAGFIENGWEGMVDGWYGFRHQNSEGTGQAADLKSTQAAIDQINGKLNRLIEKTNEKFHQIEKEFSEVEGRIQDLEKYVEDTKIDLWSYNAGLLVALENQHTIDLTDSEMNKLFERTRKQLRENAEDMGNGCFKIYHKCDNACIGSIRNGTYDHDVYRDEALNNRFQIKGVELKSGYKDWILWISFAISCFLLCVVLLGFIMWACQKGNIRCNICI

SEQ ID NO: 8657 - protein, 566 aa, Artificial Sequence
  derived and/or modified protein sequence (wt) from hemagglutinin__InfluenzaA__AFH00285
MKTIIALSYILCLVFAQKLPGNDNSTATLCLGHHAVPNGTLVKTITNDQIEVTNATELVQSSSTGRICGSPHRILDGKNCTLIDALLGDPHCDGFQNKEWDLFVERSKAYSNCYPYDVPDYASLRSLVASSGTLEFINEDFNWTGVAQDGGSYACKRGSVNSFFSRLNWLHKLEYKYPALNVTMPNNGKFDKLYIWGVHHPSTDSDQTSLYVRASGRVTVSTKRSQQTVTPNIGSRPWVRGQSSRISIYWTIVKPGDILLINSTGNLIAPRGYFKIRNGKSSIMRSDAPIGNCSSECITPNGSIPNDKPFQNVNRITYGACPRYVKQNTLKLATGMRNVPEKQTRGIFGAIAGFIENGWEGMVDGWYGFRHQNSEGTGQAADLKSTQAAIDQINGKLNRLIEKTNEKFHQIEKEFSEVEGRIQDLEKYVEDTKIDLWSYNAELLVALENQHTIDLTDSEMNKLFEKTRKQLRENAEDMGNGCFKIYHKCDNACIGSIRNGTYDHDVYRDEALNNRFQIKGVELKSGYKDWILWISFAISCFLLCVVLLGFIMWACQKGNIRCNICI

SEQ ID NO: 8658 - protein, 566 aa, Artificial Sequence
  derived and/or modified protein sequence (wt) from hemagglutinin__InfluenzaA__AFH00296
MKTIIALSYIFCLVFAQKLPGNDNSTATLCLGHHAVPNGTLVKTITNDQIEVTNATELVQSSSTGRICDSPHRILDGKNCTLIDALLGDPHCDGFQNKEWDLFVERSKAYSNCYPYDVPDYASLRSLVASSGTLEFINEDFNWTGVAQSGGSYACKRGSVNSFFSRLNWLHESEYKYPALNVTMPNNGKFDKLYIWGVHHPSTDREQTNLYVRASGRVTVSTKRSQQTVIPNIGSRPWVRGLSSRISIYWTIVKPGDILLINSTGNLIAPRGYFKIRTGKSSIMRSDAPIGTCSSECITPNGSIPNDKPFQNVNRITYGACPRYVKQNTLKLATGMRNVPEKQTRGIFGAIAGFIENGWEGMVDGWYGFRHQNSEGTGQAADLKSTQAAIDQINGKLNRLIEKTNEKFHQIEKEFSEVEGRIQDLEKYVEDTKIDLWSYNAELLVALENQHTIDLTDSEMNKLFEKTRKQLRENAEDMGNGCFKIYHKCDNACIGSIRNGTYDHDVYRDEALNNRFQIKGVELKSGYKDWILWISFATSCFLLCVVLLGFIMWACQKGNIRCNICI

SEQ ID NO: 8659 - protein, 566 aa, Artificial Sequence
  derived and/or modified protein sequence (wt) from hemagglutinin__InfluenzaA__AFH00307
MKTIIALSYILCLVFAQKLPGNDNSTATLCLGHHAVPNGTLVKTITNDQIEVTNATELVQSSSTGRICDSPHRILDGKNCTLIDALLGDPHCDGFQNKEWDLFVERSKAYSNCYPYDVPDYASLRSLVASSGTLEFINEDFNWTGVAQDGGSYACKRGSVNSFFSRLNWLHKLEYKYPALNVTMPNNGKFDKLYIWGVHHPSTDSDQTSLYVRASGRVTVSTKRSQQTVTPNIGSRPWVRGQSSRISIYWTIVKPGDILLINSTGNLIAPRGYFKIRNGKSSIMRSDAPIGNCSSECITPNGSIPNDKPFQNVNRITYGACPRYVKQNTLKLATGMRNVPEKQTRGIFGAIAGFIENGWEGMVDGWYGFRHQNSEGTGQAADLKSTQAAIDQINGKLNRLIEKTNEKFHQIEKEFSEVEGRIQDLEKYVEDTKIDLWSYNAELLVALENQHTIDLTDSEMNKLFEKTRKQLRENAEDMGNGCFKIYHKCDNACIGSIRNGTYDHDVYRDEALNNRFQIKGVELKSGYKDWILWISFAISCFLLCVVLLGFIMWACQKGNIRCNICI

SEQ ID NO: 8660 - protein, 566 aa, Artificial Sequence; identical to SEQ ID NO: 8659
  derived and/or modified protein sequence (wt) from hemagglutinin__InfluenzaA__AFH00318

SEQ ID NO: 8661 - protein, 566 aa, Artificial Sequence
  derived and/or modified protein sequence (wt) from hemagglutinin__InfluenzaA__AFH00329
MKTIIALSYILCLVFAQKLPGNDNSTATLCLGHHAVPNGTLVKTITNDQIEVTNATELVQSSSTGRICDSHHRILDGKNCTLIDALLGDPHCDGFQNKEWDLFVERSKAYSNCYPYDVPDYASLRSLVASSGTLEFINEDFNWTGVAQDGKSYACKRGSVNSFFSRLNWLHKLEYKYPALNVTMPNNGKFDKLYIWGVHHPSTDSDQTSIYVRASGRVTVSTKRSQQTVIPNIGSRPWVRGISSRISIYWTIVKPGDILLINSTGNLIAPRGYFKIRNGKSSIMRSDAPIGNCNSECITPNGSIPNDKPFQNVNRITYGACPRYVKQNTLKLATGMRNVPEKQTRGIFGAIAGFIENGWEGMVDGWYGFRHQNSEGTGQAADLKSTQAAIDQINGKLNRLIEKTNEKFHQIEKEFSEVEGRIQDLEKYVEDTKIDLWSYNAELLVALENQHTIDLTDSEMNKLFERTRKQLRENAEDMGNGCFKIYHKCDNACIGSIRNGTYDHDVYRDEALNNRFQIKGVELKSGYKDWILWISFATSCFLLCVVLLGFIMWACQKGNIRCNICI

SEQ ID NO: 8662 - protein, 566 aa, Artificial Sequence
  derived and/or modified protein sequence (wt) from hemagglutinin__InfluenzaA__AFH00340
MKTIIALSYILCLVFAQKLPGNDNSTATLCLGHHAVPNGTLVKTITNDQIEVTNATELVQSSSTGRICDSPHRILDGKNCTLIDALLGDPHCDGFQNKEWDLFVERSKAYSNCYPYDVPDYASLRSLVASSGTLEFINEDFNWTGVAQDGKSYACKRGSVNSFFSRLNWLHKLEYKYPALNVTMPNNGKFDKLYIWGVHHPSTDSDQTSLYVRASGRVTVSTKRSQQTVIPNIGFRPWVRGLSSRISIYWTIVKPGDILLISSTGNLIAPRGYFKIRNGKSSIMRSDAPIGNCSSECITPNGSIPNDKPFQNVNRITYGACPRYVKQNTLKLATGMRNIPEKQTRGIFGAIAGFIENGWEGMVDGWYGFRHQNSEGTGQAADLKSTQAAIDQINGKLNRLIEKTNEKFHQIEKEFSEVEGRIQDLEKYVEDTKIDLWSYNAGLLVALENQHTIDLTDSEMNKLFERTRKQLRENAEDMGNGCFKIYHKCDNACIGSIRNGTYDHDVYRDEALNNRFQIKGVELKSGYKDWILWISFAISCFLLCVVLLGFIMWACQKGNIRCNICI

SEQ ID NO: 8663 - protein, 566 aa, Artificial Sequence
  derived and/or modified protein sequence (wt) from hemagglutinin__InfluenzaA__AFH00351
MKTIIALSYILCLVFAQKLPGNDNSTATLCLGHHAVPNGTLVKTITNDQIEVTNATELVQSSSTGRICDSPHRILDGKNCTLIDALLGDPHCDGFQNKEWDLFVERSKAYSNCYPYDVPDYASLRSLVASSGTLEFTKEGFNWTGVAQDGKSYACKRGSVKSFFSRLNWLHKLEYKYPALNVTMPNNDKFDKLYIWGVHHPSTDSDQTSLYVQASGRVTVSTKRSQQTVIPNIGSRPWVRGISSRISIYWTIVKPGDILLINSTGNLIAPRGYFKIRNGKSSIMRSDAPIGNCNSECITPDGSIPNDKPFQNVNRITYGACPRYVKQNTLKLATGMRNVPEKQTRGIFGAIAGFIENGWEGMVDGWYGFRHQNSEGTGQAADLKSTQAAIDQINGKLNRLIEKTNKKFHQIEKEFSEVEGRIQDLEKYVEDTKIDLWSYNAELLVALENQHTIDLTDSEMNKLFERTRKQLRENAEDMGNGCFKIYHKCDNACIGSIRNGTYDHDVYRDEALNNRFQIKGVELKSGYKDWILWISFAISCFLLCVVLLGFIMWACQKGNIRCNICI

SEQ ID NO: 8664 - protein, 566 aa, Artificial Sequence
  derived and/or modified protein sequence (wt) from hemagglutinin__InfluenzaA__AFH00362
MKTIIALSYILCLVFAQKLPGNDNSTATLCLGHHAVPNGTLVKTITNDQIEVTNATELVQSSSTGRICDSPHRILDGKNCTLIDALLGDPHCDGFQNKEWDLFVERSKAYSNCYPYDVPDYASLRSLVASSGTLEFTNEGFNWTGVAQDGKSYACKRGSVKSFFSRLNWLHKLEYKYPALNVTMPNNDKFDKLYIWGVHHPSTDSDQTSLYVQASGRVTVSTKRSQQTVIPNIGSRPWVRGISSRISIYWTIVKPGDILLINSTGNLIAPRGYFKIRNGKSSIMRSDAPIDNCNSECITPNGSIPNDKPFQNVNRITYGACPRYVKQNTLKLATGMRNVPEKQTRGIFGAIAGFIENGWEGMVDGWYGFRHQNSEGTGQAADLKSTQAAIDQINGKLNRLIEKTNEKFHQIEKEFSEVEGRIQDLEKYVEDTKIDLWSYNAELLVALENQHTIDLTDSEMNKLFERTRKQLRENAEDMGNGCFKIYHKCDNACIGSIRNGTYDHDVYRDEALNNRFQIKGVELKSGYKDWILWISFATSCFLLCVVLLGFIMWACQKGNIRCNICI

SEQ ID NO: 8665 - protein, 566 aa, Artificial Sequence
  derived and/or modified protein sequence (wt) from hemagglutinin__InfluenzaA__AFH00384
MKTIIALSYILCLVFAQKLPGNDNSTATLCLGHHAVPNGTLVKTITNDQIEVTNATELVQSSSTGRICDSPHRILDGKNCTLIDALLGDPHCDGFQNKEWDLFVERSKAYSNCYPYDVPDYASLRSLVASSGTLEFTKEGFNWTGVAQDGKSYACKRGSVNSFFSRLNWLHKLEYKYPALNVTMPNNDKFDKLYIWGVHHPSTDSDQTSLYVQASGRVTVSTKRSQQTVIPNIGSRPWVRGISSRISIYWTIVKPGDILLINSIGNLIAPRGYFKIRNGKSSIMRSDAPIGNCNSECITPNGSIPNDKPFQNVNRITYGACPRYVKQNTLKLATGMRNVPEKQTRGIFGAIAGFIENGWEGMVDGWYGFRHQNSEGTGQAADLKSTQAAIDQINGKLNRLIEKTNEKFHQIEKEFSEVEGRIQDLEKYVEDTKIDLWSYNAGLLVALENQHTIDLTDSEMNKLFERTRKQLRENAEDMGNGCFKIYHKCDNACIGSIRNGTYDHDVYRDEALNNRFQIKGVELKSGYKDWILWISFAISCFLLCVVLLGFIMWACQKGNIRCNICI

SEQ ID NO: 8666 - protein, 566 aa, Artificial Sequence
  derived and/or modified protein sequence (wt) from hemagglutinin__InfluenzaA__AFH00395
MKAIIALSYILCLVFAQKLPGNDNSTATLCLGHHAVPNGTLVKTITNDQIEVTNATELVQSSSTGRICDSPHRILDGKNCTLIDALLGDPHCDGFQNKEWDLFVERSKAYSNCYPYDVPDYASLRSLVASSGTLEFTKEGFNWTGVAQDGKSYACKRGSVNGFFSRLNWLHKLEYKYPALNVTMPNNDKFDKLYIWGVHHPSTDSDQTSLYVQASGRVTVSTKRSQQTVIPNIGSRPWVRGISSRISIYWTIVKPGDILLIKSTGNLIAPRGYFKIRNGKSSIMRSDAPIGNCNSECITPNGSIPNDKPFQNVNRITYGACPRYVKQNTLKLATGMRNVPEKQTRGIFGAIAGFIENGWEGMVDGWYGFRHQNSEGTGQAADLKSTQAAIDQINGKLNRLIEKTNEKFHQIEKEFSEVEGRIQDLEKYVEDTKIDLWSYNAELLVALENQHTIDLTDSEMNKLFERTRKQLRENAEDMGNGCFKIYHKCDNACIGSIRNGTYDHDVYRDEALNNRFQIKGVELKSGYKDWILWISFAISCFLLCVVLLGFIMWACQKGNIRCNICI

SEQ ID NO: 8667 - protein, 566 aa, Artificial Sequence
  derived and/or modified protein sequence (wt) from hemagglutinin__InfluenzaA__AFH00417
MKTIIALSYILCLVFAQKLPGNDNSTATLCLGHHAVPNGTLVKTITNDQIEVTNATELVQSSSTGRICDSPHRILDGKNCTLIDALLGDPHCDGFQNKEWDLFVERSKAYSNCYPYDVPDYASLRSLVASSGTLEFTNEGFNWTGVAQDGKSYACKRGSVKSFFSRLNWLHKLEYKYPALNVTMPNNDKFDKLYIWGVHHPSTDSDQTSLYVQASGRVTVSTKRSQQTVIPNIGSRPWVRGISSRISIYWTIVKPGDILLINSTGNLIAPRGYFKIRNGKSSIMRSDAPIDNCNSECITPNGSIPNDKPFQNVNRITYGACPRYVKQNTLKLATGMRNVPEKQTRGIFGAIAGFIENGWEGMVDGWYGFRHQNSEGTGQAADLKSTQAAIDQINGKLNRLIEKTNEKFHQIEKEFSEVEGRIQDLEKYVEDTKIDLWSYNAELLVALENQHTIDLTDSEMNKLFERTRKQLRENAEDMGNGCFKIYHKCDNACIGSIRNGTYDHDVYRDEALNNRFQIKGVELKSGYKDWILWISFAISCFLLCVVLLGFIMWACQKGNIRCNICI

SEQ ID NO: 8668 - protein, 566 aa, Artificial Sequence; identical to SEQ ID NO: 988
  derived and/or modified protein sequence (wt) from hemagglutinin__InfluenzaA__AFH00428

SEQ ID NO: 8669 - protein, 566 aa, Artificial Sequence
  derived and/or modified protein sequence (wt) from hemagglutinin__InfluenzaA__AFH00439
MKTIIALSYILCLVFAQKLPGNDNSTATLCLGHHAVPNGTLVKTITNDQIEVTNATELVQSSSTGRICDSPHRILDGKNCTLIDALLGDPHCDGFQNKEWDLFVERSKAYSNCYPYDVPDYASLRSLVASSGTLEFTNEGFNWTGVAQDGTSYACKRGSVKSFFSRLNWLHKLEYKYPALNVTMPNNDKFDKLYIWGVHHPSTDSDQTSLYVQASGRVTVSTKRSQQTVIPNIGSRPWVRGVSSRISIYWTIVKPGDILLINSTGNLIAPRGYFKIRSGKSSIMRSDAPIGNCNSECITPNGSIPNDKPFQNVNRITYGACPRYVKQNTLKLATGMRNVPEKQTRGIFGAIAGFIENGWEGMVDGWYGFRHQNSEGTGQAADLKSTQAAINQINGKLNRLIEKTNEKFHQIEKEFSEVEGRIQDLEKYVEDTKIDLWSYNAELLVALENQHTIDLTDSEMSKLFERTRKQLRENAEDMGNGCFKIYHKCDNACIGSIRNGTYDHDVYRDEALNNRFQIKGVELKSGYKDWILWISFAISCFLLCVVLLGFIMWACQKGNIRCNICI

SEQ ID NO: 8670 - protein, 566 aa, Artificial Sequence
  derived and/or modified protein sequence (wt) from hemagglutinin__InfluenzaA__AFH00450
MKTIIALSYILCLVFAQKLPGNDNSTATLCLGHHAVPNGTLVKTITNDQIEVTNATELVQSSSTGRICDGPHRIIDGKNCTLIDALLGDPHCDGFQNKEWDLFVERSKAYSNCYPYDVPDYASLRSLVASSGTLEFTNESFNWTGVAQNGTSYACKRGSVKSFFSRLNWLHKLEYKYPALNVTMPNNDKFDKLYIWGVHHPSTDSDQTSLYVQSSGRVTVSTKRSQQTVIPNIGSRPWVRGVSSRISIYWTIVKPGDILLINSTGNLIAPRGYFKIRSGKSSIMRSDAPIDNCNSECITPNGSIPNDKPFQNVNRITYGACPRYVKQNTLKLATGMRNVPEKQTRGIFGAIAGFIENGWEGMIDGWYGFRHQNSEGTGQAADLKSTQAAINQINGKLNRLIEKTNEKFHQIEKEFSEVEGRIQDLEKYVEDTKIDLWSYNAELLVALENQHTIDLTDSEMNKLFERTRKQLRENAEDMGNGCFKIYHKCDNACIGSIRNGTYDHDVYRDEALNNRFQIKGVELKSGYKDWILWISFAISCFLLCVVLLGFIMWACQKGNIRCNICI

SEQ ID NO: 8671 - protein, 566 aa, Artificial Sequence
  derived and/or modified protein sequence (wt) from hemagglutinin__InfluenzaA__AFH00461
MKTIIALSYILCLVFAQKLPGNDNSTATLCLGHHAVPNGTLVKTITNDQIEVTNATELVQSSPTGRICDSPHRILDGKNCTLIDALLGDPHCDGFQNKEWDLFVERSKAYSNCYPYDVPDYASLRSLVASSGTLEFINENFNWTGVAQDGKSYACKRGSVNSFFSRLNWLHKLDYKYPALNVTMPNNGKFDKLYIWGVHHPSTDSDQISLYVRSSGRVTVSTKRSQQTVIPDIGYRPWVRGLSSRISIYWTIVKPGDILLINSTGNLIAPRGYFKLRNGKSSIMRSDAPIGNCSSGCITPNGSIPNDKPFQNVNRITYGACPRYVKQNTLKLATGMRNVPEKQTRGIFGAIAGFIENGWEGMVDGWYGFRHQNSEGTGQAADLKSTQAAIDQINGKLNRLVEKTNEKFHQIEKEFSEVEGRIQDLEKYVEDTKIDLWSYNAELLVALENQHTIDLTDSEMNKLFERTRKQLRENAEDMGNGCFKIYHKCDNACIGSIRNGTYDHDVYRDEALNNRFQIKGVELKSGYKDWILWISFAISCFLLCVVLLGFIMWACQKGNIRCNICI

SEQ ID NO: 8672 - protein, 566 aa, Artificial Sequence
  derived and/or modified protein sequence (wt) from hemagglutinin__InfluenzaA__AFH00472
MKTIIALSYILCLVFAQKLPGNDNSTATLCLGHHAVPNGTLVKTITNDQIEVTNATELVQSSSTGRICDSPHRILDGKNCTLIDALLGDPHCDGFQNKEWDLFVERSKAYSNCYPYDVSDYASLRSLVASSGTLEFNNESFNWTGVAQNGTSYACKRRSVKSFFSRLNWLHKLEYKYPALNVTMPNNDKFDKLYIWGVHHPSTDSDQTSLYVQASGRVTVSTKRSQQTVIPNIGSRPWVRGVSSRISIYWTIVKPGDILLINSTGNLIAPRGYFKIRSGKSSIMRSDAPIGNCNSECITPNGSIPNDKPFQNVNRITYGACPRYVKQNTLKLATGMRNVPEKQTRGIFGAIAGFIENGWEGMVDGWYGFRHQNSEGTGQAADLKSTQAAINQINGKLNRLIEKTNEKFHQIEKEFSEVEGRIQDLEKYVEDTKIDLWSYNAELLVALENQHTIDLTDSEMNKLFERTRKQLRENAEDMGNGCFKIYHKCDNACIGSIRNGTYDHDVYRDEALNNRFQIKGVELKSGYKDWILWISFAISCFLLCVVLLGFIMWACQKGNIRCNICI

SEQ ID NO: 8673 - protein, 566 aa, Artificial Sequence
  derived and/or modified protein sequence (wt) from hemagglutinin__InfluenzaA__AFH00483
MKTIIALSYILCMVFAQKLPGNDNSTATLCLGHHAVPNGTLVKTITNDQIEVTNATELVQSSSTGKICDSPHRILDGKNCTLIDALLGDPHCDGFQNKEWDLFVERSKAYSNCYPYDVPDYASLRSLVASSGTLEFNNESFNWTGVAQNGTSYACKRGSVKSFFSRLNWLHKLEYKYPALNVTMPNNDKFDKLYIWGVHHPSTDSDQTSLYVQASGRVTVSTKRSQQTVIPNIGSRPWVRGVSSRISIYWTIVKPGDILLINSTGNLIAPRGYFKIRSGKSSIMRSDAPIGNCNSECITPNGSIPNDKPFQNVNRITYGACPRYVKQNTLKLATGMRNVPEKQTRGIFGAIAGFIENGWEGMVDGWYGFRHQNSEGTGQAADLKSTQAAINQINGKLNRLIEKTNEKFHQIEKEFSEVEGRIQDLEKYVEDTKIDLWSYNAELLVALENQHTIDLTDSEMNKLFERTRKQLRENAEDMGNGCFKIYHKCDNACIGSIRNGTYDHDVYRDEALNNRFQIKGVELKSGYKDWILWISFAISCFLLCVVLLGFIMWACQKGNIRCNICI

SEQ ID NO: 8674 - protein, 566 aa, Artificial Sequence
  derived and/or modified protein sequence (wt) from hemagglutinin__InfluenzaA__AFH00494
MKTIIALSYILCLVFAQKLPGNDNSTATLCLGHHAVPNGTLVKTITNDQIEVTNATELVQSSPTGRICDSPHRILDGKNCTLIDALLGDPHCDGFQNKEWDLFVERSKAYSNCYPYDVPDYASLRSLVASSGTLEFINENFNWTGVAQDGKSYACKRGSVNSFFSRLNWLHKLEYKYPALNVTMPNNGKFDKLYIWGVHHPSTDSDQTSLYVRASGRVTVSTKRSQQTVIPDIGYRPWVRGQSSRIGIYWTIVKPGDILLINSTGNLIAPRGYFKIRNGKSSIMRSDAPIGNCSSECITPNGSIPNDKPFQNVNRITYGACPRYVKQNTLKLATGMRNVPEKQTRGIFGAIAGFIENGWEGMVDGWYGFRHQNSEGTGQAADLKSTQAAIDQINGKLNRLVEKTNEKFHQIEKEFSEVEGRIQDLEKYVEDTKIDLWSYNAELLVALENQHTIDLTDSEMNKLFERTRKQLRENAEDMGNGCFKIYHKCDNACIGSIRNGTYNHDVYRDEALNNRFQIKGVELKSGYKDWILWISFAISCFLLCVVLLGFIMWACQKGNIRCNICI

SEQ ID NO: 8675 - protein, 566 aa, Artificial Sequence
  derived and/or modified protein sequence (wt) from hemagglutinin__InfluenzaA__AFH00505
MKTIIALSYILCLVFAQKLPGNDNSTATLCLGHHAVPNGTLVKTITNDQIEVTNATELVQSSSTGRICDSPHRILDGKNCTLIDALLGDPHCDGFQNKEWDLFVERSKAYSNCYPYDVPDYASLRSLVASSGTLEFTNEGFNWTGVAQDGTSYACKRGSVKSFFSRLNWLHKLEYKYPALNVTMPNNDKFDKLYIWGVHHPSTDSDQISLYVQASGRVTVSTKRSQQTVIPNIGSRPWVRGVSSIISIYWTIVKPGDILLINSTGNLIAPRGYFKIRSGKSSIMRSDAPIDNCNSECITPNGSIPNDKPFQNVNRITYGACPRYVKQNTLKLATGMRNVPEKQTRGIFGAIAGFIENGWEGMVDGWYGFRHQNSEGTGQAADLKSTQAAINQINGKLNRLIEKTNEKFHQIEKEFSEVEGRIQDLEKYVEDTKIDLWSYNAELLVALENQHTIDLTDSEMNKLFERTRKQLRENAEDMGNGCFKIYHKCDNACIGSIRNGTYDHDVYRDEALNNRFQIKGVELKSGYKDWILWISFAISCFLLCVVLLGFIMWACQKGNIRCNICI

SEQ ID NO: 8676 - protein, 566 aa, Artificial Sequence
  derived and/or modified protein sequence (wt) from hemagglutinin__InfluenzaA__AFH00516
MKTIIALSYILCQVFAQKLPGNDNSTATLCLGHHAVPNGTLVKTITNDQIEVTNATELVQSSSTGRICDSPHRILDGKNCTLIDALLGDPHCDGFQNKEWDLFVERSKAYSNCYPYDVPDYASLRSLVASSGTLEFTNEGFNWTGVAQDGKSYACKRGSVNSFFSRLNWLHKLEYKYPALNVTMPNNDKFDKLYIWGVHHPSTDSDQTSLYVQASGRVTVSTKRSQQTVIPNIGSRPWVRGISSRISIYWTIVKPGDILLIKSTGNLIAPRGYFKIRNGKSSIMRSDAPIDNCNSECITPNGSIPNDKPFQNVNRITYGACPRYVKQNTLKLATGMRNVPEKQTRGIFGAIAGFIENGWEGMVDGWYGFRHQNSEGTGQAADLKSTQAAIDQINGKLNRLIEKTNEKFHQIEKEFSEVEGRIQDLEKYVEDTKIDLWSYNAELLVALENQHTIDLTDSEMNKLFERTRKQLRENAEDMGNGCFKIYHKCDNACIGSIRNGTYDHDVYRDEALNNRFQIKGVELKSGYKDWILWISFAISCFLLCVVLLGFIMWACQKGNIRCNICI

SEQ ID NO: 8677 - protein, 566 aa, Artificial Sequence
  derived and/or modified protein sequence (wt) from hemagglutinin__InfluenzaA__AFH00527
MKTIIALSYILCLVFAQKIPGNDNSTATLCLGHHAVPNGTLVKTITNDQIEVTNATELVQSSSTGRICDSPHRILDGENCTLIDALLGDPHCDGFQNKEWDLFVERSKAYSNCYPYDVPDYASLRSLVASSGTLEFNNESFNWTGVAQNGTSYACKRRSIKSFFSRLNWLHQLKYKYPALNVTMPNNDKFDKLYIWGVHHPSTDSDQTSLYAQASGRVTVSTKRSQQTVIPNIGSRPWVRGVSSRISIHWTIVKPGDILLINSTGNLIAPRGYFKIRSGKSSIMRSDAPIGKCNSECITPNGSIPNDKPFQNVNRITYGACPRYVKQNTLKLATGMRNVPEKQTRGIFGAIAGFIENGWEGMVDGWYGFRHQNSEGTGQAADLKSTQAAINQINGKLNRLIEKTNEKFHQIEKEFSEVEGRIQDLEKYVEDTKIDLWSYNAELLVALENQHTIDLTDSEMNKLFERTRKQLRENAEDMGNGCFKIYHKCDNACIGSIRNGTYDHDVYRDEALNNRFQIKGVELKSGYKDWILWISFAISCFLLCVVLLGFIMWACQKGNIRCNICI

SEQ ID NO: 8678 - protein, 566 aa, Artificial Sequence
  derived and/or modified protein sequence (wt) from hemagglutinin__InfluenzaA__AFH00538
MKTIIALSYILCLVFAQKIPGNDNSTATLCLGHHAVPNGTLVKTITNDQIEVTNATELVQRSSTGRICDSPHRILDGENCTLIDALLGDPHCDGFQNKEWDLFVERSKAYSNCYPYDVPDYASLRSLVASSGTLEFNNESFNWTGVAQNGTSYACKRRSIKSFFSRLNWLHQLKYKYPALNVTMPNNDKFDKLYIWGVHHPSTDSDQTSLYAQASGRVTVSTKRSQQTVIPNIGSRPWVRGVSSRISIYWTIVKPGDILLINSTGNLIAPRGYFKIRSGKSSIMRSDAPIGKCNSECITPNGSIPNDKPFQNVNRITYGACPRYVKQNTLKLATGMRNVPEKQTRGIFGAIAGFIENGWEGMVDGWYGFRHQNSEGTGQAADLKSTQAAINQINGKLNRLIEKTNEKFHQIEKEFSEVEGRIQDLEKYVEDTKIDLWSYNAELLVALENQHTIDLTDSEMNKLFERTRKQLRENAEDMGNGCFKIYHKCDNACIGSIRNGTYDHDVYRDEALNNRFQIKGVELKSGYKDWILWISFAISCFLLCVVLLGFIMWACQKGNIRCNICI

SEQ ID NO: 8679 - protein, 566 aa, Artificial Sequence
  derived and/or modified protein sequence (wt) from hemagglutinin__InfluenzaA__AFH00549
MKTIIALSYILCLVFAQKLPGNDNSTATLCLGHHAVPNGTLVKTITNDQIEVTNATELVQSSSTGRICDSPHRILDGENCTLIDALLGDPHCDGFQNKEWDLFVERSKAYSNCYPYDVPDYASLRSLVASSGTLEFNNESFNWTGVAQNGTSSACKRRSIKSFFSRLNWLHQLKYKYPALNVTMPNNDKFDKLYIWGVHHPSTDSDQTSLYAQAPGRVTVSTRRSQQTVIPNIGSRPWVRGVSSIISIYWTIVKPGDILLINSTGNLIAPRGYFKIRSGKSSIMRSDAPISKCNSECITPNGSIPNDKPFQNVNRITYGACPRYVKQNTLKLATGMRNVPEKQTRGIFGAIAGFIENGWEGMVDGWYGFRHQNSEGTGQAADLKSTQAAINQINGKLNRLIEKTNEKFHQIEKEFSEVEGRIQDLEKYVEDTKIDLWSYNAELLVALENQHTIDLTDSEMNKLFERTRKQLRENAEDMGNGCFKIYHKCDNACIGSIRNGTYDHDVYRDEALNNRFQIKGVELKSGYKDWILWISFAISCFLLCVVLLGFIMWACQKGNIRCNICI

SEQ ID NO: 8680 - protein, 566 aa, Artificial Sequence
  derived and/or modified protein sequence (wt) from hemagglutinin__InfluenzaA__AFH00560
MKTIIALSYILCLVFAQKLPVNDNSTATLCLGHHAVPNGTLVKTITNDHIEVTNATELVQSSSTGRICDIPHQILDGENCTLIDALLGDPHCDGFQNKEWDLFVERSTAYSNCYPYDVPDYASLRSLVASSGTLEFNNESFNWTGVAQNGTSSACKRRSIKSFFSRLNWLHQLKYKYPALNVTMPNNEKFDKLYIWGVHHPSTDSDQISLYAQAPGRVTVSTKRSQQTVIPNIGSRPWVRGVSSRISIYWTIVKPGDILLINSTGNLIAPRGYFKIRSGKSSIMRSDAPIGKCNSECITPNGSIPNDKPFQNVNRITYGACPRYVKQNTLKLATGMRNVPEKQTRGIFGAIAGFIENGWEGMVDGWYGFRHQNSEGTGQAADLKSTQAAINQINGKLNRLIEKTNEKFHQIEKEFSEAEGRIQDLEKYVEDTKIDLWSYNAELLVALENQHTIDLTDSEMNKLFERTRKQLRENAEDMGNGCFKIYHKCDNACIGSIRNGTYDHDVYRDEALNNRFQIKGVELKSGYKDWILWISFAISCFLLCIVLLGFIMWACQKGNIRCNICI

SEQ ID NO: 8681 - protein, 566 aa, Artificial Sequence
  derived and/or modified protein sequence (wt) from hemagglutinin__InfluenzaA__AFH00571
MKTIIALSYILCLVFAQKLPVNDNSTATLCLGHHAVPNGTLVKTITNDNIEVTNATELVQSSSTGRICDSPHQILDGENCTLIDALLGDPHCDGFQNKEWDLFVERSTAYSNCYPYDVPDYASLRSLVASSGTLEFNNESFNWTGVDQNGTSSACKRRSNKSFFSRLNWLHQLKYKYPALNVTMPNNEKFDKLYIWGVHHPSTDSDQISLYAQASGRVTVSTKRSQQTVIPNIGSRPWVRGVSSRISIYWTIVKPGDILLINSTGNLIAPRGYFKIRSGKSSIMRSNAPIGKCNSECITPNGSIPNDKPFQNVNRITYGACPRYVKQNTLKLATGMRNVPEKQTRGIFGAIAGFIENGWEGMVDGWYGFRHQNSEGTGQAADLKSTQAAINQINGKLNRLIEKTNEKFHQIEKEFSEVEGRIQDLEKYVEDTKIDLWSYNAELLVALENQHTIDLTDSEMNKLFERTRKQLRENAEDMGNGCFKIYHKCDNACIGSIRNGTYDHDVYRDEALNNRFQIKGVELKSGYKDWILWISFAISCFLLCVVLLGFIMWACQKGNIRCNICI

SEQ ID NO: 8682 - protein, 566 aa, Artificial Sequence
  derived and/or modified protein sequence (wt) from hemagglutinin__InfluenzaA__AFH00582
MKTIIALSYILCLVFAQKLPGNDNSTATLCLGHHAVPNGTLVKTITNDQIEVTNATELVQSSSTGGICDSPHQILDGENCTLIDALLGDPHCDGFQNKEWDLFVERSKAYSNCYPYDVPDYASLRSLVASSGTLEFNNESFNWTGVAQNGTSSACKRRSNKSFFSRLNWLHQLKYKYPALNVTMPNNEKFDKLYIWGVHHPSTDSDQISLYAQAPGRVTVSTKRSQQTVIPNIGSRPWVRGVSSRISIYWTIVKPGDILLINCTGNLIAPRGYFKIRSGKSSIMRSDASIGKCNSECITPNGSIPNDKPFQNVNRITYGACPRYVKQNTLKLATGMRNVPEKQTRGIFGAIAGFIENGWEGMVDGWYGFRHQNSEGTGQAADLKSTQAAINQINGKLNRLIEKTNEKFHQIEKEFSEVEGRIQDLEKYVEDTKIDLWSYNAELLVALENQHTIDLTDSEMNKLFERTKKQLRENAEDMGNGCFKIYHKCDNACIGSIRNGTYDHDVYRDEALNNRFQIKGVELKSGYKDWILWISFATSCFLLCVVLLGFIMWACQKGNIRCNICI

SEQ ID NO: 8683 - protein, 566 aa, Artificial Sequence; identical to SEQ ID NO: 1305
  derived and/or modified protein sequence (wt) from hemagglutinin__InfluenzaA__AFH00593

SEQ ID NO: 8684 - protein, 566 aa, Artificial Sequence; identical to SEQ ID NO: 1305
  derived and/or modified protein sequence (wt) from hemagglutinin__InfluenzaA__AFH00604

SEQ ID NO: 8685 - protein, 566 aa, Artificial Sequence
  derived and/or modified protein sequence (wt) from hemagglutinin__InfluenzaA__AFH00615
MKTIIALSYILCLVFAQKLPGNDNSTATLCLGHHAVPNGTIVKTITNDQIEVTNATELVQSSSTGGICNSPHQILDGENCTLIDALLGDPQCDGFQNKKWDLFVERSKAYSNCYPYDVPDYASLRSLVASSGTLEFNNESFNWTGVTQNGTSSACKRRSNKSFFSRLNWLTHLKYKYPALNVTMPNNEKFDKLYIWGVHHPGTDSDQISLYAQASGRITVSTKRSQQTVIPNIGSRPRVRDISSRISIYWTIVKPGDILLINSTGNLIAPRGYFKIRSGKSSIMRSDAPIGKCNSECITPNGSIPNDKPFQNVNRITYGACPRYVKQNTLKLATGMRNVPEKQTRGIFGAIAGFIENGWEGMVDGWYGFRHQNSEGTGQAADLKSTQAAINQINGKLNRLIGKTNEKFHQIEKEFSEVEGRIQDIEKYVEDTKIDLWSYNAELLVALENQHTIDLTDSEMNKLFERTKKQLRENAEDMGNGCFKIYHKCDNACIESIRNGTYDHDVYRDEALNNRFQIKGVELKSGYKDWILWISFAISCFLLCVALLGFIMWACQKGNIRCNICI

SEQ ID NO: 8686 - protein, 566 aa, Artificial Sequence; identical to SEQ ID NO: 8277
  derived and/or modified protein sequence (wt) from hemagglutinin__InfluenzaA__AFH00626

SEQ ID NO: 8687 - protein, 566 aa, Artificial Sequence
  derived and/or modified protein sequence (wt) from hemagglutinin__InfluenzaA__AFH00637
MKTIIALSYILCLVFAQKLPGNDNSTATLCLGHHAVPNGTIVKTITNDQIEVTNATELVQSSSTGGICDSPHQILDGENCTLIDALLGDPQCDGFQNKKWDLFVERSKAYSNCYPYDVPDYASLRSLVASSGTLEFNNESFNWTGVTQNGTSSSCKRRSNNSFFSRLNWLTHLKFKYPALNVTMPNNEKFDKLYIWGVHHPGTNNDQISLYTQASGRITVSTKRSQQTVIPNIGSRPRVRDIPSRISIYWTIVKPGDILLINSTGNLIAPRGYFKIRSGKSSIMRSDAPIGKCNSECITPNGSIPNDKPFQNVNRITYGACPRYVKQNTLKLATGMRNVPEKQTRGIFGAIAGFIENGWEGMVDGWYGFRHQNSEGIGQAADLKSTQAAINQINGKLNRLIGKTNEKFHQIEKEFSEVEGRIQDLEKYVEDTKIDLWSYNAELLVALENQHTIDLTDSEMNKLFERTKKQLRENAEDMGNGCFKIYHKCDNACIGSIRNGTYDHDVYRDEALNNRFQIKGVELKSGYKDWILWISFAISCFLLCVALLGFIMWACQKGNIRCNICI

SEQ ID NO: 8688 - protein, 566 aa, Artificial Sequence
  derived and/or modified protein sequence (wt) from hemagglutinin__InfluenzaA__AFH00648
MKTIIALSYILCLVFAQKLPGNDDSTATLCLGHHAVPNGTIVKTITNDQIEVTNATELVQSSSTGGICDSPHQILDGENCTLIDALLGDPQCDGFQNKKWDLFVERSKAYSNCYPYDVPDYASLRSLVASSGTLEFNDESFNWTGVTQNGTSSSCKRRSNNSFFSRLNWLTHLKFKYPALNVTMPNNEKFDKLYIWGVHHPVTDNDQIFLYAQASGRITVSTKRSQQTVIPNIGSRPRIRNIPSRISIYWTIVKPGDILLINSTGNLIAPRGYFKIRSGKSSIMRSDAPIGKCNSECITPNGSIPNDKPFQNVNRITYGACPRYVKQNTLKLATGMRNVPEKQTRGIFGAIAGFIENGWEGMVDGWYGFRHQNSEGIGQAADLKSTQAAINQINGKLNRLIGKTNEKFHQIEKEFSEVEGRIQDLEKYVEDTKIDLWSYNAELLVALENQHTIDLTDSEMNKLFERTKKQLRENAEDMGNGCFKIYHKCDNACIGSIRNGTYDHDVYRDEALNNRFQIKGVELKSGYKDWILWISFAISCFLLCVALLGFIMWACQKGNIRCNICI

SEQ ID NO: 8689 - protein, 566 aa, Artificial Sequence
  derived and/or modified protein sequence (wt) from hemagglutinin__InfluenzaA__AFH00659
MKTIIALSYILCLVFTQKLPGNDNSTATLCLGHHAVPNGTMVKTITNDQIEVTNATELVQSSSTGEICDSPHQILDGENCTLIDALLGDPQCDGFQNKKWDLFVERSKAHSNCYPYDVPDYASLRSLIASSGTLEFNNESFNWTGVTQNGTSSACKRRSDNSFFSRLNWLTHLKFKYPALNVTMPNNEEFDKLYIWGVHHPGTDNDQISLYAQASGRITVSTKRSQQTVIPNIGSRPRVRDIPSRISIYWTIVKPGDILLINSTGNLIAPRGYFKIRSGKSSIMRSDAPIGKCNSGCITPNGSIPNDKPFQNVNRITYGACPRYVKQNTLKLATGMRNVPEKQTRGIFGAIAGFIENGWEGMVDGWYGFRHQNSEGIGQAADLKSTQAAIDQINGKLNRLIGKTNEKFHQIEKEFSEVEGRIQDLEKYVEDTKIDLWSYNAELLVALENQHTIDLTDSEMNKLFERTKKQLRENAEDMGNGCFKIYHKCDNACIGSIRNGTYDHDVYRDEALNNRFQIKGVELKSGYKDWILWISFAISCFLLCVALLGFIMWACQKGNIRCNICI

SEQ ID NO: 8690 - protein, 566 aa, Artificial Sequence
  derived and/or modified protein sequence (wt) from hemagglutinin__InfluenzaA__AFH00670
MKTIIALSYILCLVFAQKLPGIDNSTATLCLGHHAVPNGTIVKTITNDQIEVTNATELVQNSSTGGICDSPHQILDGENCTLIDALLGDPQCDGFQNKKWDLFVERSKAYSNCYPYDVPDYASLRSLVASSGTLEFNNESFNWTGVTQNGTSSACKRGSNNSFFSRLNWLTHSKFKYPALNVTMPNNEEFDKLYIWGVLHPGTDNDQIFLYAQASGRITVSTKRSQQTVIPNIGSRPRVRNIPSRISIYWTIVKPGDILLINSTGNLIAPRGYFKIRSGKSSIMRSDAPIGKCNSECITPNGSIPNDKPFQNVNRITYGACPRYVKQNTLKLATGMRNVPEKQTRGIFGAIAGFIENGWEGMVDGWYGFRHQNSEGIGQAADLKSTQAAIDQINGKLNRLIGKTNEKFHQIEKEFSEVEGRIQDLEKYVEDTKIDLWSYNAELLVALENQHTIDLTDSEMNKLFEKTKKQLRENAEDMGNGCFKIYHKCDNACIGSIRNGTYDHDVYRDEALNNRFQIKGVELKSGYKDWILWISFAISCFLLCVALLGFIMWACQKGNIRCNICI

SEQ ID NO: 8691 - protein, 566 aa, Artificial Sequence
  derived and/or modified protein sequence (wt) from hemagglutinin__InfluenzaA__AFH00681
MKTIIALSYILCLVFAQKLPGNDNSTATLCLGHHAVPNGTIVKTITNDQIEVTNATELVQSSSTGEICDSPHQILDGENCTLIDALLGDPQCDGFQNKKWDLFIERSKAYSNCYPYDVPDYASLRSLVASSGTLEFNNESFNWTGVTQNGTSSACIRRSNNSFFSRLNWLTHLKFKYPALNVTMPNKEKFDKLYIWGVHHPGTDNDQIFLYAQASGRITVSTKRSQQTVIPNIGSRPRVRNIPSRISIYWTIVKPGDILLINSTGNLIAPRGYFKIRSGKSSIMRSDAPIGKCNSECITPNGSIPNDKPFQNVNRITYGACPRYVKQNTLKLATGMRNVPEKQTRGIFGAIAGFIENGWEGMVDGWYGFRHQNSEGIGQAADLKSTQAAIDQINGKLNRLIGKTNEKFHQIEKEFSEVEGRIQDLEKYVEDTKIDLWSYNAELLVALENQHTIDLTDSEMNKLFEKTKKQLRENAEDMGNGCFKIYHKCDNACIGSIRNGTYDHDVYRDEALNNRFQIKGVELKSGYKDWILWISFAISCFLLCVALLGFIMWACQKGNIRCNICI

SEQ ID NO: 8692 - protein, 566 aa, Artificial Sequence; identical to SEQ ID NO: 1928
  derived and/or modified protein sequence (wt) from hemagglutinin__InfluenzaA__AFH00692

SEQ ID NO: 8693 - protein, 566 aa, Artificial Sequence
  derived and/or modified protein sequence (wt) from hemagglutinin__InfluenzaA__AFH00703
MKTIIALSYILCLVFAQKLPGNDNSTATLCLGHHAVPNGTIVKTITNDQIEVTNATELVQSSSTGKICDSPHQILDGKNCTLIDALLGDPQCDGFQNKKWDLFVERSKAYSNCYPYDVPDYASLRSLVASSGTLEFNNESFNWTGVTQNGTSSACIRRSKNSFFSRLNWLTHLNFKYSALNVTMPNNEQFDKLYIWGVHHPGTDKDQIFLYAQASGRITVSTKRSQQTVIPNIGSRPRVRNIPSRISIYWTIVKPGDILLINSTGNLIAPRGYFKMQSGKSSIMRSDAPIGKCNSECITPNGSIPNDKPFQNVNRITYGACPRYVKQNTLKLATGMRNVPEKQTRGIFGAIAGFIENGWEGMVDGWYGFRHQNSEGRGQAADLKSTQAAIDQINGKLNRLIGKTNEKFHQIEKEFSEVEGRIQDLEKYVEDTKIDLWSYNAELLVALENQHTIDLTDSEMNKLFEKTKKQLRENAEDMGNGCFKIYHKCDNACIGSIRNGTYDHDVYRDEALNNRFQIKGVELKSGYKDWILWISFAISCFLLCVALLGFIMWACQKGNIRCNICI

SEQ ID NO: 8694 - protein, 566 aa, Artificial Sequence
  derived and/or modified protein sequence (wt) from hemagglutinin__InfluenzaA__AFH00714
MKTIIALSYIFCLVFAQNLPGNDNSTATLCLGHHAVPNGTLVKTITNDQIEVTNATELVQSSSTGRICDSPHRILDGKNCTLIDALLGDPHCDGFQNEKWDLFVERSKAFSNCYPYDVPDYASLRSLVASSGTLEFINEGFNWTGVTQSGGSYACKRGSDKSFFSRLNWLYESESKYPVLNVTMPNNGNFDKLYIWGVHHPSTDKEQTNLYVRASGRVTVSTKRSQQTIIPNIGSRPWVRGLSSGISIYWTIVKPGDILLINSNGNLIAPRGYFKIRTGKSSIMRSDAPIGTCSSECITPNGSIPNDKPFQNVNKITYGACPKYVKQNTLKLATGMRNVPEKQTRGIFGAIAGFIENGWEGMVDGWYGFRHQNSEGTGQAADLKSTQAAIDQINGKLNRVIEKTNEKFHQIEKEFSEVEGRIQDLEKYVEDTKIDLWSYNAELLVALENQHTIDLTDSEMNKLFEKTRRQLRENAEDMGNGCFKIYHKCDNACIGSIRNGTYDHDVYRDEALNNRFQIKGVELKSGYKDWILWISFAISCFLLCVVLLGFIMWACQKGNIRCNICI

SEQ ID NO: 8695 - protein, 566 aa, Artificial Sequence
  derived and/or modified protein sequence (wt) from hemagglutinin__InfluenzaA__AFH00725
MKTIIALSYIFCLIFAQNLPGNDNSTATLCLGHHAVPNGTLVKTITNDQIEVTNATELVQSSSTGRICDSPHRILDGKNCTLIDALLGDPHCDGFQNEKWDLFVERSKAFSNCYPYDVPDYASLRSLVASSGTLEFINEGFNWTGVTQSGGSYACKRGSDNSFFSRLNWLYESESKYPVLNVTMPNNGKFDKLYIWGVHHPSTDKEQTKLYVRASGRVTVSTKRSQQTVIPNIGSRPWVRGLSSRISIYWTIVKPGDILLINSTGNLIAPRGYFKIRTGKSSIMRSDAPIGTCSSECITPNGSIPNDKPFQNVNKITYGACPRYVKQNTLKLATGMRNVPEKQTRGIFGAIAGFIENGWEGMVDGWYGFRHQNSEGTGQAADLKSTQAAIDQINGKLNRVIEKTNEKFHQIEKEFSEVEGRIQDLEKYVEDTKIDLWSYNAELLVALENQHTIDLTDSEMNKLFEKTRKQLRENAEDMGNGCFKIYHKCDNACIGSIRNGTYDHDVYRDEALNNRFQIKGVELKSGYKDWILWISFAISCFLLCVVLLGFIMWACQKGNIRCNICI

SEQ ID NO: 8696 - protein, 566 aa, Artificial Sequence; identical to SEQ ID NO: 7066
  derived and/or modified protein sequence (wt) from hemagglutinin__InfluenzaA__AFH00736

SEQ ID NO: 8697 - protein, 566 aa, Artificial Sequence
  derived and/or modified protein sequence (wt) from hemagglutinin__InfluenzaA__AFH00747
MKTIIALSYIFCLVFAQKLPGNDNSTATLCLGHYAVPNGTLVKTITNDQIEVTNATELVQSSSTGRICDSPHRILDGKNCTLIDALLGDPHCDGFQNEKWDLFVERSKAYSNCYPYDVPDYASLRSLVASSGTLEFINEDFNWTGVTQSGGSYACKRGSVKSFFSRLNWLHESEYKYPALNVTMPNNGKFDKLYIWGVHHPSTDREQTNLYVRASGRVTVSTKRSQQTVIPNIGSRPWVRGLSSRISIYWTIVKPGDILLINSTGNLIAPRGYFKIRTGKSSIMRSDAPIGTCSSECITPNGSIPNDKPFQNVNKITYGACPRYVKQNTLKLATGMRNVPEKQTRGIFGAIAGFIENGWEGMVDGWYGFRHQNSEGTGQAADLKSTQAAIDQINGKLNRLIEKTNEKFHQIEKEFSEVEGRIQDLEKYVEDTKIDLWSYNAELLVALENQHTIDLTDSEMNKLFEKTRKQLRENAEDMGNGCFKIYHKCDNACIGSIRNGTYDHDVYRDEALNNRFQIKGVELKSGYKDWILWISFAISCFLLCVVLLGFIMWACQKGNIRCNICI

SEQ ID NO: 8698 - protein, 566 aa, Artificial Sequence
  derived and/or modified protein sequence (wt) from hemagglutinin__InfluenzaA__AFH00758
MKTIIALSYILCLVFAQKLPGNDNSTATLCLGHHAVPNGTLVKTITNDQIEVTNATELVQSSSTGRICDSPHRILDGKNCTLIDALLGDPHCDGFQNKEWDLFVERSKAYSNCYPYDVPDYASLRSLVASSGTLEFINEDFNWTGVAQSGESYACKRGSVKSFFSRLNWLHESEYKYPALNVTMPNNGKFDKLYIWGVHHPSTDREQTKLYVRASGRVTVSTKRSQQTVIPNIGSRPWVRGLSSRISIYWTIVKPGDILLINSTGNLIAPRGYFKIRTGKSSIMRSDAPIGTCSSECITPNGSIPNDKPFQNVNRITYGACPRYVKQNTLKLATGMRNVPEKQTRGIFGAIAGFIENGWEGMVDGWYGFRHQNSEGTGQAADLKSTQAAIDQINGKLNRLIEKTNEKFHQIEKEFSEVEGRIQDLEKYVEDTKIDLWSYNAELLVALENQHTIDLTDSEMNKLFEKTRKQLRENAEDMGNGCFKIYHKCDNACIGSIRNGTYDHDVYRDEALNNRFQIKGVELKSGYKDWILWISFAISCFLLCVVLLGFIMWACQKGNIRCNICI

SEQ ID NO: 8699 - protein, 566 aa, Artificial Sequence
  derived and/or modified protein sequence (wt) from hemagglutinin__InfluenzaA__AFH00769
MKTIIALSYILCLVFAQKLPGNDNSTATLCLGHHAVPNGTLVKTITNDQIEVTNATELVQSSSTGRICDSPHRILDGKNCTLIDALLGDPHCDGFQNKEWDLFVERSKAYSNCYPYDVPDYASLRSLVASSGTLEFINEDFNWTGVAQSGESYTCKRGSVKSFFSRLNWLHESEYKYPALNVTMPNNDKFDKLYIWGVHHPSTDREQTSLYIRASGRVTVSTKRSQQTVIPNIGSRPWVRGLSSRISIYWTIVKPGDILLINSTGNLIAPRGYFKIRTGKSSIMRSDAPIGTCSSECITPNGSIPNDKPFQNVNRITYGACPRYVKQNTLKLATGMRNVPEKQTRGIFGAIAGFIENGWEGMVDGWYGFRHQNSEGTGQAADLKSTQAAIDQINGKLNRLIEKTNEKFHQIEKEFSEVEGRIQDLEKYVEDTKIDLWSYNAELLVALENQHTIDLTDSEMNKLFEKTRKQLRENAEDMGNGCFKIYHKCDNACIGSIRNGTYDHDVYRDEALNNRFQIKGVELKSGYKDWILWISFAISCFLLCVVLLGFIMWACQKGNIRCNICI

SEQ ID NO: 8700 - protein, 566 aa, Artificial Sequence
  derived and/or modified protein sequence (wt) from hemagglutinin__InfluenzaA__AFH00780
MRAIIALSYILCLVFAQKLPGNDNSTATLCLGHHAVPNGTLVKTITNDQIEVTNATELVQSSSTGRICDSPHRILDGKNCTLIDALLGDPHCDGFQNKEWDLFVERSKAYSDCYPYDVPDYASLRSLVASSGTLEFTNEGFNWTGVAQDGTSYACKRGSVKSFFSRLNWLHKLEYKYPALNVTMPNNDKFDKLYIWGVHHPSTDSDQTSLYVQASGRVTVSTKRSQQTVIPNIGSRPWVRGVSSRISIYWTIVKPGDILLINSTGNLIAPRGYFKIRSGKSSIMRSDAPIGNCNSECITPNGSIPNDKPFQNVNRITYGACPRYVKQNTLKLATGMRNVPEKQTRGIFGAIAGFIENGWEGMVDGWYGFRHQNSEGTGQAADLKSTQAAINQINGKLNRLIEKTNEKFHQIEKEFSEVEGRIQDLEKYVEDTKIDLWSYNAELLVALENQHTIDLTDSEMNKLFERTRKQLRENAEDMGNGCFKIYHKCDNACIGSIRNGTYDHDVYRDEALNNRFQIKGVELKSGYKDWILWISFAISCFLLCVVLLGFIMWACQKGNIRCNICI

SEQ ID NO: 8701 - protein, 566 aa, Artificial Sequence
  derived and/or modified protein sequence (wt) from hemagglutinin__InfluenzaA__AFH00791
MKTIIALSYILCLVFAQKLPGNDNSTATLCLGHHAVPNGTLVKTITNDQIEVTNATELVQGSSTGRICDSPHQILDGKNCTLIDALLGDPHCDGFQNKEWDLFVERSTAYSNCYPYDVPDYASLRSLVASSGTLEFTKEGFNWTGVAQDGTSYTCKRGSVKSFFSRLNWLHKLEYKYPALNVTMPNNDKFDKLYIWGVHHPSTDSDQTSLYVQASGRVTVSTKRSQQTVIPNIGSRPWVRGVSSRISIYWTIVKPGDILLINSTGNLIAPRGYFKIRSGKSSIMRSDAPIDNCNSECITPNGSIPNDKPFQNVNRITYGACPRYVKQNTLKLATGMRNVPEKQTRGIFGAIAGFIENGWEGMVDGWYGFRHQNSEGTGQAADLKSTQAAINQINGKLNRLIEKTNEKFHQIEKEFSEVEGRIQDLEKYVEDTKIDLWSYNAELLVALENQHTIDLTDSEMNKLFERTRKQLRENAEDMGNGCFKIYHKCDNACIGSIRNGTYDHDVYRDEALNNRFQIKGVELKSGYKDWILWISFAISCFLLCVVLLGFIMWACQKGNIRCNICI

SEQ ID NO: 8702 - protein, 566 aa, Artificial Sequence; identical to SEQ ID NO: 1342
  derived and/or modified protein sequence (wt) from hemagglutinin__InfluenzaA__AFH00802

SEQ ID NO: 8703 - protein, 566 aa, Artificial Sequence
  derived and/or modified protein sequence (wt) from hemagglutinin__InfluenzaA__AFH00813
MKTIIALSYILCLVFAQKLPGNDNSTATLCLGHHAVPNGTIVKTITNDQIEVTNATELVQSSSTGEICNSPHQILDGENCTLIDALLGDPQCDGFQNKKWDLFVERSKAHSNCYPYDVPDYASLRSLVASSGTLEFNNESFNWTGVTQNGTSSACIRRSNNSFFSRLNWLTHLNFKYPALNVTMPNNEQFDKLYIWGVHHPGTDKDQIFLYAQASGRITVSTKRSQQAVIPNIGSRPRVRDIPSRVSIYWTIVKPGDILLINSTGNLIAPRGYFKIRSGKSSIMRSDAPIGKCNSACITPNGSIPNDKPFQNVNRITYGACPRYVKQNTLKLATGMRNVPEKQTRGIFGAIAGFIENGWEGMVDGWYGFRHQNSEGRGQAADLKSTQAAIDQINGKLNRLIGKTNEKFHQIEKEFSEVEGRIQDLEKYVEDTKIDLWSYNAELLVALENQHTIDLTDSEMNKLFEKTKKQLRENAEDMGNGCFKIYHKCDNACIGSIRNGTYDHDVYRDEALNNRFQIKGVELKSGYKDWILWISFAISCFLLCVALLGFIMWACQKGNIRCNICI

SEQ ID NO: 8704 - protein, 566 aa, Artificial Sequence
  derived and/or modified protein sequence (wt) from hemagglutinin__InfluenzaA__AFH00824
MKTIIALSYILRLVFAQKLPGNDNSTATLCLGHHAVPNGTIVKTITNDQIEVTNATELVQNSSIGEICNSPHQILDGENCTLIDALLGDPQCDGFQNKKWDLFVERSKAYSNCYPYDVPDYASLRSLVASSGTLEFNNESFNWTGVTQNGTSSACIRRSNNSFFSRLNWLTHLNFKYPALNVTMPNNEQFDKLYIWGVHHPGTDKDQIFLYAQSSGRITVSTKRSQQAVIPNIGSRPRIRDIPSRISIYWTIVKPGDILLINSTGNLIAPRGYFKIRSGKSSIMRSDAPIGKCNSECITPNGSIPNDKPFQNVNRITYGACPRYVKQSTLKLATGMRNVPEKQTRGIFGAIAGFIENGWEGMVDGWYGFRHQNSEGRGQAADLKSTQAAIDQINGKLNRLIGKTNEKFHQIEKEFSEVEGRIQDLEKYVEDTKIDLWSYNAELLVALENQHTIDLTDSEMNKLFEKTKKQLRENAEDMGNGCFKIYHKCDNACIGSIRNGTYDHDVYRDEALNNRFQIKGVELKSGYKDWILWISFAISCFLLCVALLGFIMWACQKGNIRCNICI

SEQ ID NO: 8705 - protein, 566 aa, Artificial Sequence
  derived and/or modified protein sequence (wt) from hemagglutinin__InfluenzaA__AFH01407
MKTIIALSYILCLVFAQKLPGNDNSTATLCLGHHAVPNGTIVKTITNDQIEVTNATELVQSSSTGGICNSPHQILDGENCTLIDALLGDPQCDGFQNKKWDLFVERSKAYSNCYPYDVPDYASLRSLVASSGTLEFNNESFNWTGVTQNGTSSACKRRSNKSFFSRLNWLTHLKYKYPALNVTMPNNEKFDKLYIWGVHHPGTDSDQISLYAQASGRITVSTKRSQQTVIPNIGSRPRVRDISSRISIYWTIVKPGDILLINSTGNLIAPRGYFKIRSGKSSIMRSDAPIGKCNSECITPNGSIPNDKPFQNVNRITYGACPRYVKQNTLKLATGMRNVPEKQTRGIFGAIAGFIENGWEGMVDGWYGFRHQNSEGTGQAADLKSTQAAINQINGKLNRLIGKTNEKFHQIEKEFSEVEGRIQDLEKYVEDTKIDLWSYNAELLVALENQHTIDLTDSEMNKLFERTKKQLRENAEDMGNGCFKIYHKCDNACIESIRNGTYDHDVYRDEALNNRFQIKGVELKSGYKDWILWISFAISCFLLCVALLGFIMWACQKGNIRCNICI

SEQ ID NO: 8706 - protein, 566 aa, Artificial Sequence
  derived and/or modified protein sequence (wt) from hemagglutinin__InfluenzaA__AFH34940
MKTIIALSYILCLVFAQKLPGNDNSTATLCLGHHAVPNGTIVKTITNDQIEVTNATELVQSSSTGEICDSPHQILDGENCTLIDALLGDPQCDGFQNKKWDLFVERSKAYSNCYPYDVPDYASLRSLVASSGTLEFNNESFNWTGVTQNGTSSACIRRSNSSFFSRLNWLTHLNFKYPALNVTMPNNEQFDKLYIWGVHHPGTDKDQIFLYAQSSGRITVSTKRSQQAVIPNIGSRPRIRNIPSRISIYWTIVKPGDILLINSTGNLIAPRGYFKIRSGKSSIMRSDAPIGKCNSECITPNGSIPNDKPFQNVNRITYGACPRYVKQSTLKLATGMRNVPEKQTRGIFGAIAGFIENGWEGMVDGWYGFRHQNSEGRGQAADLKSTQAAIDQINGKLNRLIGKTNEKFHQIEKEFSEVEGRIQDLEKYVEDTKIDLWSYNAELLVALENQHTIDLTGSEMNKLFEKTKKQLRENAEDMGNGCFKIYHKCDNACIGSIRNGTYNHDVYRDEALNNRFQIKGVELKSGYKDWILWISFAISCFLLCVALLGFIMWACQKGNIRCNICI

SEQ ID NO: 8707 - protein, 566 aa, Artificial Sequence
  derived and/or modified protein sequence (wt) from hemagglutinin__InfluenzaA__AFH34961
MKTIIALSYILCLVFAQKLPGNDNSTATLCLGHHAVPNGTIVKTITNDQIEVTNATELVQSSSTGEICDSPHQILDGENCTLIDALLGDPQCDGFQNKKWDLFVERSKAYSNCYPYDVPDYASLRSLVAASGTLEFNNESFNWTGVTQNGTSSACIRRSNSSFFSRLNWLTHLNFKYPALNVTMPNNEQFDKLYIWGVHHPGTDKDQIFLYAQSSGRITVSTKRSQQAVIPNIGSRPRIRNIPSRISIYWTIVKPGDILLINSTGNLIAPRGYFKIRSGKSSIMRSDAPIGKCNSECITPNGSIPNDKPFQNVNRITYGACPRYVKQSTLKLATGMRNVPEKQTRGIFGAIAGFIENGWEGMVDGWYGFRHQNSEGRGQAADLKSTQAAIDQINGKLNRLIGKTNEKFHQIEKEFSEVEGRIQDLEKYVEDTKIDLWSYNAELLVALENQHTIDLTDSEMNKLFEKTKKQLRENAEDMGNGCFKIYHKCDNACIGSIRNGTYNHDVYRDEALNNRFQIKGVELKSGYKDWILWISFAISCFLLCVALLGFIMWACQKGNIRCNICI

SEQ ID NO: 8708 - protein, 566 aa, Artificial Sequence
  derived and/or modified protein sequence (wt) from hemagglutinin__InfluenzaA__AFH34968
MKTIIALSYILCLVFAQKLPGNDNSTATLCLGHHAVPNGTIVKTITNDQIEVTNATELVQSSSTGEICDSPHQILDGENCTLIDALLGDPQCDGFQNKKWDLFVERSKAYSNCYPYDVPDYASLRSLVAASGTLEFNNESFNWTGVTQNGTSSACIRRSNSSFFSRLNWLTHLNFKYPALNVTMPNNEQFDKLYIWGVHHPGTDKDQIFLYAQSSGRITVSTKRSQQAVIPNIGSRPRIRDIPSRISIYWTIVKPGDILLINSTGNLIAPRGYFKIRSGKSSIMRSDAPIGKCNSACITPNGSIPNDKPFQNVNRITYGACPRYVKQSTLKLATGMRNVPEKQTRGIFGAIAGFIENGWEGMVDGWYGFRHQNSEGRGQAADLKSTQAAIDQINGKLNRLIGKTNEKFHQIEKEFSEVEGRIQDLEKYVEDTKIDLWSYNAELLVALENQHTIDLTDSEMNKLFEKTKKQLRENAEDMGNGCFKIYHKCDNACIGSIRNGTYNHDVYRDEALNNRFQIKGVELKSGYKDWILWISFAISCFLLCVALLGFIMWACQKGNIRCNICI

SEQ ID NO: 8709 - protein, 566 aa, Artificial Sequence
  derived and/or modified protein sequence (wt) from hemagglutinin__InfluenzaA__AFH34975
MKTIIALSYILCLVFAQKLPGNDNSTATLCLGHHAVPNGTIVKTITNDRIEVTNATELVQNSSIGEICDSPHQILDGENCTLIDALLGDPQCDGFQNKKWDLFVERSKAYSNCYPYDVPDYASLRSLVASSGTLEFNNESFNWNGVTQNGTSSACIRRSNNSFFSRLNWLTHLNFKYPALNVTMPNNEQFDKLYIWGVHHPGTDKDQIFLYAQPSGRITVSTKRSQQAVIPNIGSRPRIRNIPSRISIYWTIVKPGDILLINSTGNLIAPRGYFKIRSGKSSIMRSDAPIGKCKSECITPNGSIPNDKPFQNVNRITYGACPRYVKQSTLKLATGMRNVPEKQTRGIFGAIAGFIENGWEGMVDGWYGFRHQNSEGRGQAADLKSTQAAIDQINGKLNRLIGKTNEKFHQIEKEFSEVEGRIQDLEKYVEDTKIDLWSYNAELLVALENQHTIDLTDSEMNKLFEKTKKQLRENAEDMGNGCFKIYHKCDNACIGSIRNGTYDHDVYRDEALNNRFQIKGVELKSGYKDWILWISFAISCFLLCVALLGFIMWACQKGNIRCNICI

SEQ ID NO: 8710 - protein, 566 aa, Artificial Sequence; identical to SEQ ID NO: 3411
  derived and/or modified protein sequence (wt) from hemagglutinin__InfluenzaA__AFH74464

SEQ ID NO: 8711 - protein, 566 aa, Artificial Sequence; identical to SEQ ID NO: 2669
  derived and/or modified protein sequence (wt) from hemagglutinin__InfluenzaA__AFH74465

SEQ ID NO: 8712 - protein, 566 aa, Artificial Sequence; identical to SEQ ID NO: 3430
  derived and/or modified protein sequence (wt) from hemagglutinin__InfluenzaA__AFH74477

SEQ ID NO: 8713 - protein, 566 aa, Artificial Sequence
  derived and/or modified protein sequence (wt) from hemagglutinin__InfluenzaA__AFH74488
MKTIIALSYILCLVFAQKLPGNDNSTATLCLGHHAVPNGTIVKTITNDQIEVTNATELVQSSSTGEICDNPHQILDGKNCTLIDALLGDPQCDGFQNKKWDLFVERSKAYSNCYPYDVPDYASLRSLVASSGTLEFNNESFNWTGVTQNGTSSACIRRSKNSFFSRLNWLTHLNFKYPALNVTMPNNEQFDKLYIWGVHHPGTDKDQIFLYAQASGRITVSTKRSQQTVIPNIGSRPRVRNIPSRISIYWTIVKPGDILLINSTGNLIAPRGYFKIRSGKSSIMRSDAPIGKCNSECITPNGSIPNDKPFQNVNRITYGACPRYVKQNTLKLATGMRNVPEKQTRGIFGAIAGFIENGWEGMVDGWYGFRHQNSEGRGQAADLKSTQAAIDQINGKLNRLIGKTNEKFHQIEKEFSEVEGRIQDLEKYVEDTKIDLWSYNAELLVALENQHTIDLTDSEMNKLFERTKKQLRENAEDMGNGCFKIYHKCDNACIGSIRNGTYDHDVYRDEALNNRFQIKGVELKSGYKDWILWISFAISCFLLCVALLGFIMWACQKGNIRCNICI

SEQ ID NO: 8714 - protein, 566 aa, Artificial Sequence; identical to SEQ ID NO: 3411
  derived and/or modified protein sequence (wt) from hemagglutinin__InfluenzaA__AFH74499

SEQ ID NO: 8715 - protein, 566 aa, Artificial Sequence; identical to SEQ ID NO: 3613
  derived and/or modified protein sequence (wt) from hemagglutinin__InfluenzaA__AFH74510

SEQ ID NO: 8716 - protein, 566 aa, Artificial Sequence
  derived and/or modified protein sequence (wt) from hemagglutinin__InfluenzaA__AFH74521
MKTIIALSYILCLVFAQKIPGNDNSTATLCLGHHAVPNGTIVKTITNDQIEVTNATELVQSSSTGEICNSPHQILDGENCTLIDALLGDPQCDGFQNKKWDLFVERSKAYSNCYPYDVPDYASLRSLVASSGTLEFNNESFNWTGVTQNGTSSACIRRSNNSFFSRLNWLTHSKSKYPALNVTMPNNEQFDKLYIWGVHHPGTDNDQIFLYAQASGRITVSTKRSQQTVIPNIGSRPRIRDIPSRISIYWTIVKPGDILLINSTGNLIAPRGYFKIRSGKSSIMKSDAPIGKCNSECITPNGSIPNDKPFQNVNRITYGACPRYVKQNTLKLATGMRNVPEKQTRGIFGAIAGFIENGWEGMVDGWYGFRHQNSEGRGQAADLKSTQAAIDQINGKLNRLIGKTNEKFHQIEKEFSEVEGRIQDLEKYVEDTKVDLWSYNAELLVALENQHTIDLTDSEMNKLFEKTKKQLRENAEDMGNGCFKIYHKCDNACIGSIRNGTYDHDVYRDEALNNRFQIKGVELKSGYKDWILWISFAISCFLLCVALLGFIMWACQKGNIRCNICI

SEQ ID NO: 8717 - protein, 566 aa, Artificial Sequence; identical to SEQ ID NO: 6988
  derived and/or modified protein sequence (wt) from hemagglutinin__InfluenzaA__AFH74532

SEQ ID NO: 8718 - protein, 566 aa, Artificial Sequence; identical to SEQ ID NO: 3613
  derived and/or modified protein sequence (wt) from hemagglutinin__InfluenzaA__AFH74543

SEQ ID NO: 8719 - protein, 566 aa, Artificial Sequence; identical to SEQ ID NO: 3613
  derived and/or modified protein sequence (wt) from hemagglutinin__InfluenzaA__AFH74554

SEQ ID NO: 8720 - protein, 566 aa, Artificial Sequence; identical to SEQ ID NO: 3613
  derived and/or modified protein sequence (wt) from hemagglutinin__InfluenzaA__AFH74565

SEQ ID NO: 8721 - protein, 566 aa, Artificial Sequence; identical to SEQ ID NO: 3613
  derived and/or modified protein sequence (wt) from hemagglutinin__InfluenzaA__AFH74576

SEQ ID NO: 8722 - protein, 566 aa, Artificial Sequence; identical to SEQ ID NO: 3613
  derived and/or modified protein sequence (wt) from hemagglutinin__InfluenzaA__AFH74587

SEQ ID NO: 8723 - protein, 566 aa, Artificial Sequence
  derived and/or modified protein sequence (wt) from hemagglutinin__InfluenzaA__AFH74598
MKTIIALSYILCLVFAQKLPENDNSTATLCLGHHAVPNGTIVKTITNDQIEVTNATELVQSSSTGEICDSPHQILDGKNCTLIDALLGDPQCDGFQNKKWDLFVERSKAYSNCYPYDVPDYASLRSLVASSGTLEFNNESFNWTGVTQNGTSSACIRRSKNSFFSRLNWLTHLNFKYPALNVTMPNNEQFDKLYIWGVHHPGTDKDQIFLYAQASGRITVSTKRSQQTAIPNIGSRPRVRNIPSRISIYWTIVKPGDILLINSTGNLIAPRGYFKIRSGKSSIMRSDAPIGKCNSECITPNGSIPNDKPFQNVNRITYGACPRYVKQNTLKLATGMRNVPEKQTRGIFGAIAGFIENGWEGMVDGWYGFRHQNSEGRGQAADLKSTQAAIDQINGKLNRLIGKTNEKFHQIEKEFSEVEGRIQDLEKYVEDTKIDLWSYNAELLVALENQHTIDLTDSEMNKLFEKTKKQLRENAEDMGNGCFKIYHKCDNACIGSIRNGTYDHDVYRDEALNNRFQIKGVELKSGYKDWILWISFAISCFLLCVALLGFIMWACQKGNIRCNICI

SEQ ID NO: 8724 - protein, 566 aa, Artificial Sequence; identical to SEQ ID NO: 3411
  derived and/or modified protein sequence (wt) from hemagglutinin__InfluenzaA__AFH74609

SEQ ID NO: 8725 - protein, 566 aa, Artificial Sequence; identical to SEQ ID NO: 3613
  derived and/or modified protein sequence (wt) from hemagglutinin__InfluenzaA__AFH74620

SEQ ID NO: 8726 - protein, 566 aa, Artificial Sequence
  derived and/or modified protein sequence (wt) from hemagglutinin__InfluenzaA__AFH74631
MKTIIALSYILCLVFAQKLPGNDNSTATLCLGHHAVPNGTIVKTITNDQIEVTNATELVQSSSTGEICDSPHQILDGTNCTLIDALLGDPQCDGFQNKKWDLFVERSKAYSNCYPYDVPDYASLRSLVASSGTLEFNNESFNWTGVTQNGTSSACIRRSKNSFFSRLNWLTHLNFKYPALNVTMPNNEQFDKLYIWGVHHPGTDKDQIFLYAQASGRITVSTKRSQQTAIPNIGSRPRVRNIPSRISIYWTIVKPGDILLINSTGNLIAPRGYFKIRSGKSSIMRSDAPIGKCNSECITPNGSIPNDKPFQNVNRITYGACPRYVKQNTLKLATGMRNVPEKQTRGIFGAIAGFIENGWEGMVDGWYGFRHQNSEGRGQAADLKSTQAAIDQINGKLNRLIGKTNEKFHQIEKEFSEVEGRIQDLEKYVEDTKIDLWSYNAELLVALENQHTIDLTDSEMNKLFEKTKKQLRENAEDMGNGCFKIYHKCDNACIGSIRNGTYDHDVYRDEALNNRFQIKGVELKSGYKDWILWISFAISCFLLCVALLGFIMWACQKGNIRCNICI

SEQ ID NO: 8727 - protein, 566 aa, Artificial Sequence; identical to SEQ ID NO: 3411
  derived and/or modified protein sequence (wt) from hemagglutinin__InfluenzaA__AFH74642

SEQ ID NO: 8728 - protein, 566 aa, Artificial Sequence; identical to SEQ ID NO: 3411
  derived and/or modified protein sequence (wt) from hemagglutinin__InfluenzaA__AFH74653

SEQ ID NO: 8729 - protein, 566 aa, Artificial Sequence; identical to SEQ ID NO: 3411
  derived and/or modified protein sequence (wt) from hemagglutinin__InfluenzaA__AFH74664

SEQ ID NO: 8730 - protein, 566 aa, Artificial Sequence; identical to SEQ ID NO: 3411
  derived and/or modified protein sequence (wt) from hemagglutinin__InfluenzaA__AFH74675

SEQ ID NO: 8731 - protein, 566 aa, Artificial Sequence; identical to SEQ ID NO: 8159
  derived and/or modified protein sequence (wt) from hemagglutinin__InfluenzaA__AFH74686

SEQ ID NO: 8732 - protein, 566 aa, Artificial Sequence; identical to SEQ ID NO: 8159
  derived and/or modified protein sequence (wt) from hemagglutinin__InfluenzaA__AFH74697

SEQ ID NO: 8733 - protein, 566 aa, Artificial Sequence; identical to SEQ ID NO: 3613
  derived and/or modified protein sequence (wt) from hemagglutinin__InfluenzaA__AFH74708

SEQ ID NO: 8734 - protein, 566 aa, Artificial Sequence; identical to SEQ ID NO: 3613
  derived and/or modified protein sequence (wt) from hemagglutinin__InfluenzaA__AFH74719

SEQ ID NO: 8735 - protein, 566 aa, Artificial Sequence; identical to SEQ ID NO: 3613
  derived and/or modified protein sequence (wt) from hemagglutinin__InfluenzaA__AFH74730

SEQ ID NO: 8736 - protein, 566 aa, Artificial Sequence
  derived and/or modified protein sequence (wt) from hemagglutinin__InfluenzaA__AFH74741
MKTIIALSYILCLVFAQKLPGNDNSTATLCLGHHAVPNGTIVKTITNDQIEVTNATELVQNSSTGEICDSPHQILDGKNCTLIDALLGDPQCDGFQNKKWDLFVERSKAYSNCYPYDVPDYASLRSLVASSGTLEFNNESFNWTGVTQNGTSSACIRRSKNSFFSRLNWLTHLNFKYPALNVTMPNNEQFDKLYIWGVHHPGTDKDQIFLYAQASGRITVSTKRSQQTAIPNIGSRPRVRNIPSRISIYWTIVKPGDILLINSTGNLIAPRGYFKIRSGKSSIMRSDAPIGKCNSECITPNGSIPNDKPFQNVNRITYGACPRYVKQNTLKLATGMRNVPEKQTRGIFGAIAGFIENGWEGMVDGWYGFRHQNSEGRGQAADLKSTQAAIDQINGKLNRLIGKTNEKFHQIEKEFSEVEGRIQDLEKYVEDTKIDLWSYNAELLVALENQHTIDLTDSEMNKLFEKTKKQLRENAEDMGNGCFKIYHKCDNACIGSIRNGTYDHDVYRDEALNNRFQIKGVELKSGYKDWILWISFAISCFLLCVALLGFIMWACQKGNIRCNICI

SEQ ID NO: 8737 - protein, 566 aa, Artificial Sequence; identical to SEQ ID NO: 3613
  derived and/or modified protein sequence (wt) from hemagglutinin__InfluenzaA__AFH74752

SEQ ID NO: 8738 - protein, 566 aa, Artificial Sequence; identical to SEQ ID NO: 3613
  derived and/or modified protein sequence (wt) from hemagglutinin__InfluenzaA__AFH74763

SEQ ID NO: 8739 - protein, 566 aa, Artificial Sequence; identical to SEQ ID NO: 3613
  derived and/or modified protein sequence (wt) from hemagglutinin__InfluenzaA__AFH74774

SEQ ID NO: 8740 - protein, 566 aa, Artificial Sequence; identical to SEQ ID NO: 6988
  derived and/or modified protein sequence (wt) from hemagglutinin__InfluenzaA__AFH74785

SEQ ID NO: 8741 - protein, 566 aa, Artificial Sequence; identical to SEQ ID NO: 3613
  derived and/or modified protein sequence (wt) from hemagglutinin__InfluenzaA__AFH74796

SEQ ID NO: 8742 - protein, 566 aa, Artificial Sequence; identical to SEQ ID NO: 8169
  derived and/or modified protein sequence (wt) from hemagglutinin__InfluenzaA__AFH74807

SEQ ID NO: 8743 - protein, 566 aa, Artificial Sequence; identical to SEQ ID NO: 8169
  derived and/or modified protein sequence (wt) from hemagglutinin__InfluenzaA__AFH74818

SEQ ID NO: 8744 - protein, 566 aa, Artificial Sequence; identical to SEQ ID NO: 8169
  derived and/or modified protein sequence (wt) from hemagglutinin__InfluenzaA__AFH74829

SEQ ID NO: 8745 - protein, 566 aa, Artificial Sequence; identical to SEQ ID NO: 8169
  derived and/or modified protein sequence (wt) from hemagglutinin__InfluenzaA__AFH74840

SEQ ID NO: 8746 - protein, 566 aa, Artificial Sequence
  derived and/or modified protein sequence (wt) from hemagglutinin__InfluenzaA__AFH74851
MKTIIALSYILCLVFAQKLPGNDNSTATLCLGHHAVPNGTIVKTITNDQIEVTNATELVQSSSTGEICDSPHQILDGKNCTLIDALLGDPQCDGFQNKKWDLFVERSKAYGNCYPYDVPDYASLRSLVASSGTLEFNNESFNWTGVTQNGTSSACIRRSKNSFFSRLNWLTHLNFKYPALNVTMPNNEQFDKLYIWGVHHPGTDKDQIFLYAQASGRITVSTKRSQQTAIPNIGSRPRVRNIPSRISIYWTIVKPGDILLINSTGNLIAPRGYFKIRSGKSSIMRSDAPIGKCNSECITPNGSIPNDKPFQNVNRITYGACPRYVKQNTLRLATGMRNVPEKQTRGIFGAIAGFIENGWEGMVDGWYGFRHQNSEGRGQAADLKSTQAAIDQINGKLNRLIGKTNEKFHQIEKEFSEVEGRIQDLEKYVEDTKIDLWSYNAELLVALENQHTIDLTDSEMNKLFEKTKKQLRENAEDMGNGCFKIYHKCDNACIGSIRNGTYDHDVYRDEALNNRFQIKGVELKSGYKDWILWISFAISCFLLCVALLGFIMWACQKGNIRCNICI

SEQ ID NO: 8747 - protein, 566 aa, Artificial Sequence; identical to SEQ ID NO: 8172
  derived and/or modified protein sequence (wt) from hemagglutinin__InfluenzaA__AFH74862

SEQ ID NO: 8748 - protein, 566 aa, Artificial Sequence; identical to SEQ ID NO: 8172
  derived and/or modified protein sequence (wt) from hemagglutinin__InfluenzaA__AFH74873

SEQ ID NO: 8749 - protein, 566 aa, Artificial Sequence; identical to SEQ ID NO: 3613
  derived and/or modified protein sequence (wt) from hemagglutinin__InfluenzaA__AFH74884

SEQ ID NO: 8750 - protein, 566 aa, Artificial Sequence; identical to SEQ ID NO: 3613
  derived and/or modified protein sequence (wt) from hemagglutinin__InfluenzaA__AFH74895

SEQ ID NO: 8751 - protein, 566 aa, Artificial Sequence; identical to SEQ ID NO: 3613
  derived and/or modified protein sequence (wt) from hemagglutinin__InfluenzaA__AFH74906

SEQ ID NO: 8752 - protein, 566 aa, Artificial Sequence; identical to SEQ ID NO: 3411
  derived and/or modified protein sequence (wt) from hemagglutinin__InfluenzaA__AFH74917

SEQ ID NO: 8753 - protein, 566 aa, Artificial Sequence; identical to SEQ ID NO: 3613
  derived and/or modified protein sequence (wt) from hemagglutinin__InfluenzaA__AFH74928

SEQ ID NO: 8754 - protein, 566 aa, Artificial Sequence; identical to SEQ ID NO: 3613
  derived and/or modified protein sequence (wt) from hemagglutinin__InfluenzaA__AFH74939

SEQ ID NO: 8755 - protein, 566 aa, Artificial Sequence
  derived and/or modified protein sequence (wt) from hemagglutinin__InfluenzaA__AFH74950
MKTIIALSYILCLVFAQKLPGNDNSTATLCLGHHAVPNGTIVKTITNDQIEVTNATELVQSSSTGEICDSPHQILDGKNCTLIDALLGDPQCDGFQNKKWDLFVERSKAYGNCYPYDVPDYASLRSLVASSGTLEFNNESFNWTGVTQNGTSSACIRRSKNSFFSRLNWLTHLNFKYPALNVTMPNNEQFDKLYIWGVHHPGTDKDQIFLYAQASGRITVSTKRSQQTAIPNIGSRPRVRNIPSRISIYWTIVKPGDILLINSTGNLIAPRGYFKIRSGKSSIMRSDAPIGKCNSECITPNGSIPNDKPFQNVNRITYGACPRYVKQNTLKLATGMRNVPEKQTRGIFGAIAGFIENGWEGMVDGWYGFRHQNSEGRGQAADLKSTQAAIDQINGKLNRLIGKTNEKFHQIEKEFSEVEGRIQDLEKYVEDTKIDLWSYNAELLVALENQHTIDLTDSEMNKLFEKTKKQLRENAEDMGNGCFKIYHKCDNACIGSIRNGTYDHDVYRDEALNNRFQIKGVELKSGYKDWILWISFAISCFLLCVALLGFIMWACQKGNIRCNICI

SEQ ID NO: 8756 - protein, 566 aa, Artificial Sequence; identical to SEQ ID NO: 8172
  derived and/or modified protein sequence (wt) from hemagglutinin__InfluenzaA__AFH74961

SEQ ID NO: 8757 - protein, 566 aa, Artificial Sequence; identical to SEQ ID NO: 3613
  derived and/or modified protein sequence (wt) from hemagglutinin__InfluenzaA__AFH75388

SEQ ID NO: 8758 - protein, 566 aa, Artificial Sequence
  derived and/or modified protein sequence (wt) from hemagglutinin__InfluenzaA__AFH97140
MKAILVVLLYIFATANADTLCIGYHANNSTDTVDTVLEKNVTVTHSVNLLEDKHNGKLCKLRGVAPLHLGKCNIAGWILGNPECESLSTASSWSYIVETSSSDNGTCYPGDFIDYEELREQLSSVSSFERFEIFPKTSSWPNHDSNKGVTAACPHAGAKSFYKNLIWLVKKGNSYPKLSKSYINDKGKEVLVLWGIHHPSTSADQQSLYQNADAYVFVGTSRYSKKFKPEIAIRPKVRDQEGRMNYYWTLVEPGDKITFEATGNLVVPRYAFAMERNAGSGIIISDTPVHDCNTTCQTPKGAINTSLPFQNIHPITIGKCPKYVKSTKLRLATGLRNVPSIQSRGLFGAIAGFIEGGWTGMVDGWYGYHHQNEQGSGYAADLKSTQNAIDEITNKVNSVIEKMNTQFTAVGKEFNHLEKRIENLNKKVDDGFLDIWTYNAELLVLLENERTLDYHDSNVKNLYEKVRSQLKNNAKEIGNGCFEFYHKCDNTCMESVKNGTYDYPKYSEEAKLNREEIDGVKLESTRIYQILAIYSTVASSLVLVVSLGAISFWMCSNGSLQCRICI

SEQ ID NO: 8759 - protein, 566 aa, Artificial Sequence
  derived and/or modified protein sequence (wt) from hemagglutinin__InfluenzaA__AFJ05142
MKTIIALSYILCLVFAQKIPGNDNSTATLCLGHHAVPNGTIVKTITNDQIEVTNATELVQSSSTGEICDSPHQILDGENCTLIDALLGDPQCDGFQNKKWDLFVERSKAYSNCYPYDVPDYASLRSLVASSGTLEFNNECFNWTGVTQNGTSSACIRRSNSSFFSRLNWLTHLNFKYPALNVTMPNNEQFDKLYIWGVHHPGTDKDQIFLYAQSSGRITVSTKRSQQAVIPNIGSRPRIRNIPSRISIYWTIVKPGDILLINSTGNLIAPRGYFKIRSGKSSIMRSDAPIGKCNSGCITPNGSIPNDKPFQNVNRITYGACPRYVKQSTLKLATGMRNVPEKQTRGIFGAIAGFIENGWEGMVDGWYGFRHQNSEGRGQAADLKSTQAAIDQINGKLNRLIGKTNEKFHQIEKEFSEVEGRIQDLEKYVEDTKIDLWSYNAELLVALENQHTIDLTDSEMNKLFEKTKKQLRENAEDMGNGCFKIYHKCDNACIGSIRNGTYNHDVYRDEALNNRFQIKGVELKSGYKDWILWISFAISCFLLCVALLGFIMWACQKGNIRCNICI

SEQ ID NO: 8760 - protein, 566 aa, Artificial Sequence
  derived and/or modified protein sequence (wt) from hemagglutinin__InfluenzaA__AFJ05144
MKTIIALSYILCLVFAQKLPGNDNSTATLCLGHHAVPNGTIVKTITNDQIEVTNATELVQSSSTGEICDSPHQILDGENCTLIDALLGDPQCDGFQNKKWDLFVERSKAYSNCYPYDVPDYASLRSLVASSGTLEFNNESFNWTGVTQNGTSSACIRRSNSSFFSRLNWLTHLNFKYPALNVTMPNNEQFDKLYIWGVHHPGTDKDQIFLYAQSSGRITVSTKRSQQAVIPNIGSRPRVRNIPSRISIYWTIVKPGDILLINSTGNLIAPRGYFKIRSGKSSIMRSDAPIGKCNSECITPNGSIPNDKPFQNVNRITYGACPRYVKQSTLKLATGMRNVPEKQTRGIFGAIAGFIENGWEGMVDGWYGFRHQNSEGRGQAADLKSTQAAIDQINGKLNRLIGKTNEKFHQIEKEFSEVEGRIQDLEKYVEDTKIDLWSYNAELLVALENQHTIDLTDSEMNKLFEKTKKQLRENAEDMGNGCFKIYHKCDNACIGSIRNGTYNHDVYRDEALNNRFQIKGVELKSGYKDWILWISFAISCFLLCVALLGFIMWACQKGNIRCNICI

SEQ ID NO: 8761 - protein, 566 aa, Artificial Sequence
  derived and/or modified protein sequence (wt) from hemagglutinin__InfluenzaA__AFJ11706
MKTIIALSYILCLVFAQKLPGNDNSTATLCLGHHAVPNGTIVKTITNDQIEVTNATELVQSSSTGEICDSPHQILDGENCTLIDALLGDPQCDGFQNKKWDLFVERSKAYSNCYPYDVPDYASLRSLVASSGTLEFNNESFNWTGVTQNGTSSACIRSSNNSFFSRLNWLTHLNFKYPALNVTMPNNEQFDKLYIWGVHHPGTDKDQIFLYAQASGRITVSTKRSQQAVIPNIGSRPRVRNIPSRISIYWTIVKPGDILLINSTGNLIAPRGYFKIRSGKSSIMRSDAPIGKCNSECITPNGSIPNDKPFQNVNRITYGACPRYVKQSTLKLATGMRNVPEKQTRGIFGAIAGFIENGWEGMVDGWYGFRHQNSEGRGQAADLKSTQAAIDQINGKLNRLIGKTNEKFHQIEKEFSEVEGRIQDLEKYVEDTKIDLWSYNAELLVALENQHTIDLTDSEMNKLFEKTKKQLRENAEDMGNGCFTIYHKCDNACIGSIRNGTYDHNVYRDEALNNRFQIKGVELKSGYKDWILWISFAISCFLLCVALLGFIMWACQKGNIRCNICI

SEQ ID NO: 8762 - protein, 566 aa, Artificial Sequence; identical to SEQ ID NO: 6982
  derived and/or modified protein sequence (wt) from hemagglutinin__InfluenzaA__AFJ11728

SEQ ID NO: 8763 - protein, 566 aa, Artificial Sequence
  derived and/or modified protein sequence (wt) from hemagglutinin__InfluenzaA__AFJ19842
MKTIIALSYILCLVFAQKLPGNDNSTATLCLGHHAVPNGTIVKTITNDQIEVTNATELVQSSSAGEICDSPHHILDGENCTLIDALLGDPQCDGFQNKKWDLFVERSRAYSNCYPYDVPDYASLRSLVASSGTLEFNNESFNWTGVTQNGTSSACIRRSNNSFFSRLNWLTHLNFKYPALNVTMPNNEQFDKLYIWGVHHPGTDKDQIFLYAQASGRITVSTKRSQQAVIPNIGSRPRVRNIPSRISIYWTIVKPGDILLINSTGNLIAPRGYFKIRSGKSSIMRSDAPIGKCNSECITPNGSIPNDKPFQNVNRITYGACPRYVKQSTLKLATGMRNVPEKQTRGIFGAIAGFIENGWEGMMDGWYGFRHQNSEGRGQAADLKSTQAAIDQINGKLNRLIGKTNEKFHQIEKEFSEVEGRIQDLEKYVEDTKIDLWSYNAELLVALENQHTIDLTDSEMNKLFEKTKKQLRENAEDMGNGCFKIYHKCDNACIGSIRNGTYDHDVYRDEALNNRFQIKGIELKSGYKDWILWISFAISCFLLCVALLGFIMWACQKGNIRCNICI

SEQ ID NO: 8764 - protein, 566 aa, Artificial Sequence; identical to SEQ ID NO: 8361
  derived and/or modified protein sequence (wt) from hemagglutinin__InfluenzaA__AFJ20171

SEQ ID NO: 8765 - protein, 566 aa, Artificial Sequence; identical to SEQ ID NO: 6982
  derived and/or modified protein sequence (wt) from hemagglutinin__InfluenzaA__AFJ20182

SEQ ID NO: 8766 - protein, 566 aa, Artificial Sequence
  derived and/or modified protein sequence (wt) from hemagglutinin__InfluenzaA__AFJ74386
MKAKLLVLLCAFTATYADTICIGYHANNSTDTVDTVLEKNVTVTHSVNLLEDSHNGKLCRLKGTAPLQLGNCSVAGWILGNPECESLFSKESWSYIAETPNPENGTCYPGYFADYEELREQLSSVSSFERFEIFPKESSWPNHTVTKGVTASCSHNGKSSFYKNLLWLTEKNGLYPNLSKSYVNNKEKEVLVLWGVHHPSNIGDQRAIYHTENAYVSVMSSHYSRRFTPEIAKRPKVRDQEGRINYYWTLLEPGDTIIFEANGNLIAPWYAFALSRGFGSGIITSNASMGECDAKCQTPQGAINSSLPFQNVHPVTIGECPKYVRSTKLRMVTGLRNIPSIQSRGLFGAIAGFIEGGWTGMIDGWYGYHHQNEQGSGYAADQKSTQNAIDGITNKVNSVIEKMNTQFTAVGKEFNKLERRMENLNKKVDDGFLDIWTYNAELLVLLENERTLDFHDSNVKNLYEKVKNQLKNNAKEIGNGCFEFYHKCNNECMESVKNGTYDYPKYSGESKLNREKIDGVKLESMGVYQILAIYSTVASSLVLLVSLGAISFWMCSNGSLQCRICI

SEQ ID NO: 8767 - protein, 566 aa, Artificial Sequence
  derived and/or modified protein sequence (wt) from hemagglutinin__InfluenzaA__AFJ74407
MKTIIALSYILCLVFAQKLPGNDNSTATLCLGHHAVPNGTLVKTITNDQIEVTNATELVQSSSTGRICDSPHRILDGKNCTLIDALLGDPHCDGFQNKEWDLFVERSKAYSNCYPYDVPDYASLRSLVASSGTLEFTNEGFNWTGVAQDGTSYACKRGSVKSFFSRLNWLHKLEYKYPALNVTMPNNDKFDKLYIWGVHHPSTDSDQTSLYVQASGRVTVSTKRSQQTVIPNIGSRPWVRGVSSRISIYWTIVKPGDILLINSTGNLIAPRGYFKIRSGKSSIMRSDAPIGNCSSECITPNGSIPNDKPFQNVNRITYGACPRYVKQNTLKLATGMRNVPEKQTRGIFGAIAGFIENGWEGMVDGWYGFRHQNSEGTGQAADLKSTQAAINQINGKLNRLIEKTNEKFHQIEKEFSEVEGRIQDLEKYVEDTKIDLWSYNAELLVALENQHTIDLTDSEMNKLFERTRKQLRENAEDMGNGCFKIYHKCDNACIGSIRNGTYDHDVYRDEALNNRFQIKGVELKSGYKDWILWISFAISCFLLCVVLLGFIMWACQKGNIRCNICI

SEQ ID NO: 8768 - protein, 566 aa, Artificial Sequence
  derived and/or modified protein sequence (wt) from hemagglutinin__InfluenzaA__AFJ74418
MKTIIALSYILCLVFAQKLPGNDNSTATLCLGHHAVPNGTLVKTITNDQIEVTNATELVQSSSTGRICDSPHQILDGENCTLIDALLGDPHCDGFQNKEWDLFVERSKAYSNCYPYDVPDYASLRSLVASSGTLEFNNESFNWTGVAQNGTSSACKRRSIKSFFSRLNWLHQLKYKYPALNVTMPNNEKFDKLYIWGVHHPSTDSDQISLYAQASGRVTVSTKRSQQTVIPNIGSRPWVRGVSSRISIYWTIVKPGDILLINSTGNLIAPRGYFKIRSGKSSIMRSDAPIGKCNSECITPNGSIPNDKPFQNVNRITYGACPRYVKQNTLKLATGMRNVPEKQTRGIFGAIAGFIENGWEGMVDGWYGFRHQNSEGTGQAADLKSTQAAINQINGKLNRLIEKTNEKFHQIEKEFSEVEGRIQDLEKYVEDTKIDLWSYNAELLVALENQHTIDLTDSEMNKLFERTKKQLRENAEDMGNGCFKIYHKCDNACIGSIRNGTYDHDVYRDEALNNRFQIKGVELKSGYKDWILWISFAISCFLLCVVLLGFIMWACQKGNIRCNICI

SEQ ID NO: 8769 - protein, 566 aa, Artificial Sequence
  derived and/or modified protein sequence (wt) from hemagglutinin__InfluenzaA__AFJ74437
MKTIIALSYILCKVFAQKLPGNDNSTATLCLGHHAVPNGTLVKTITNDQIEVTNATELVQSSSTGRICDSPHQILDGENCTLIDALLGDPHCDGFQNKEWDLFVERSKAYSNCYPYDVPDYASLRSLVASSGTLEFNNESFNWTGVAQNGTSSACKRRSIKSFFSRLNWLHQLKYKYPALNVTMPNNEKFDKLYIWGVHHPSTDSDQISLYAQASGRVTVSTKRSQQTVIPNIGSRPWVRGVSSRISIYWTIVKPGDILLINSTGNLIAPRGYFKIRSGKSSIMRSDAPIGKCNSECITPNGSIPNDKPFQNVNRITYGACPRYVKQNTLKLATGMRNVPEKQTRGIFGAIAGFIENGWEGMVDGWYGFRHQNSEGTGQAADLKSTQAAINQINGKLNRLIEKTNEKFHQIEKEFSEVEGRIQDLEKYVEDTKIDLWSYNAELLVALENQHTIDLTDSEMNKLFERTKKQLRENAEDMGNGCFKIYHKCDNACIGSIRNGTYDHDVYRDEALNNRFQIKGVELKSGYKDWILWISFAISCFLLCVVLLGFIMWACQKGNIRCNICI

SEQ ID NO: 8770 - protein, 566 aa, Artificial Sequence
  derived and/or modified protein sequence (wt) from hemagglutinin__InfluenzaA__AFJ74448
MKTIIALSYILCLVFAQKLPGNDNSTATLCLGHHAVPNGTLVKTITNDQIEVTNATELVQSSSTGRICDSPHQILDGENCTLIDALLGGPHCDGFQNKEWDLFVERSKAYSNCYPYDVPDYASLRSLVASSGTLEFNNESFNWTGVAQNGTSSACKRRSNKSFFSRLNWLHQLKYKYPALNVTMPNNEKFDKLYIWGVHHPSTDSDQISLYAQASGRVTVSTKRSQQTVIPNIGSRPWVRGVSSRISIYWTIVKPGDILLINSTGNLIAPRGYFKIRSGKSSIMRSDAPIGKCNSECITPNGSIPNDKPFQNVNRITYGACPRYVKQNTLKLATGMRNVPEKQTRGIFGAIAGFIENGWEGMVDGWYGFRHQNSEGTGQAADLKSTQAAINQINGKLNRLIEKTNEKFHQIEKEFSEVEGRIQDLEKYVEDTKIDLWSYNAELLVALENQHTIDLTDSEMNKLFERTKKQLRENAEDMGNGCFKIYHKCDNACIGSIRNGTYDHDVYRDEALNNRFQIKGVELKSGYKDWILWISFAISCFLLCVVLLGFIMWACQKGNIRCNICI

SEQ ID NO: 8771 - protein, 566 aa, Artificial Sequence
  derived and/or modified protein sequence (wt) from hemagglutinin__InfluenzaA__AFJ74459
MEAKLLVLLCAFTATYADTICIGYHANNSTDTVDTVLEKNVTVTHSVNLLEDSHNGKLCRLKGTAPLQLGNCSIAGWILGNPECESLFSKESWSYIAETPNPENGTCYPGYFADYEELREQLSSVSSFERFEIFPKESSWPNHTVTKGVTASCSHNGKSSFYKNLLWLTEKNGLYPNLSKSYVNNKEKEVLVLWGVHHPSNIGDQRAIYHTENAYVSVVSSHYSRRFTPEIAKRPKVRNQEGRINYYWTLLEPGDTIIFEANGNLIAPWYAFALSRGFGSGIITSNASMGECDAKCQTPQGAINSSLPFQNVHPVTIGECPKYVRSTKLRMVTGLRNIPSIQSRGLFGAIAGFIEGGWTGMIDGWYGYHHQNEQGSGYAADQKSTQNAINGITNKVNSIIEKMNTQFTAVGKEFNKLERRMENLNKKVDDGFLDIWTYNAELLVLLENERTLDFHDSNVKNLYEKVKNQLKNNAKEIGNGCFEFYHKCNNECMESVKNGTYDYPKYSKESKLNREKIDGVKLESMGVYQILAIYSTVASSLVLLVSLGAISFWMCSNGSLQCRICI

SEQ ID NO: 8772 - protein, 566 aa, Artificial Sequence
  derived and/or modified protein sequence (wt) from hemagglutinin__InfluenzaA__AFJ74470
MKTIIALSYILCLVFAQKLPGNDNSTATLCLGHHAVPNGTLVKTITNDQIEVTNATELVQSSSTGRICDSPHRILDGKNCTLIDALLGDPHCDGFQNKEWDLFVERSKAYSNCYPYDVPDYASLRSLVASSGTLEFNNESFNWTGVAQNGTSYACKRRSVKSFFSRLNWLHKLEYKYPALNVTMPNNDKFDKLYIWGVHHPSTDSDQISLYAQTSGRVTVSTKRSQQTVIPNIGSRPWVRGVSSRISIYWTIVKPGDILLINSTGNLIAPRGYFKIRSGKSSIMRSDAPIGNCSSECITPNGSIPNDKPFQNVNRITYGACPRYVKQNTLKLATGMRNVPEKQTRGIFGAIAGFIENGWEGMVDGWYGFRHQNSEGTGQAADLKSTQAAINQINGKLNRLIEKTNEKFHQIEKEFSEVEGRIQDLEKYVEDTKIDLWSYNAELLVALENQHTIDLTDSEMNKLFERTRKQLRENAEDMGNGCFKIYHKCDNACIGSIRNGTYNHDVYRDEALNNRFQIKGVELKSGYKDWILWISFAISCFLLCVVLLGFIMWACQKGNIRCNICI

SEQ ID NO: 8773 - protein, 566 aa, Artificial Sequence
  derived and/or modified protein sequence (wt) from hemagglutinin__InfluenzaA__AFJ74492
MKTIIALSYILCLVFAQKLPGNDNSTATLCLGHHAVPNGTLVKTITNDQIEVTNATELVQSSSTGRICDSPHQILDGENCTLIDALLGDPHCDGFQNKEWDLFVERSKAYSNCYPYDVPDYASLRSLVASSGTLEFNNESFNWTGVAQNGTSSACKRRSNKSFFSRLNWLHQLKYKYPALNVTMPNNKKFDKLYIWGVHHPSTDSDQISLYAQASGRVTVSTKRSQQTVIPNIGSRPWVRGVSSIISIYWTIVKPGDILLINSTGNLIAPRGYFKIRNGKSSIMRSDAPIGKCNSECITPNGSIPNDKPFQNVNRITYGACPRYVKQNTLKLATGMRNVPEKQTRGIFGAIAGFIENGWEGMVDGWYGFRHQNSEGTGQAADLKSTQAAINQINGKLNRLIGKTNEKFHQIEKEFSEVEGRIQDLEKYVEDTKIDLWSYNAELLVALENQHTIDLTDSEMNKLFERTKKQLRENAEDMGNGCFKIYHKCDNACIGSIRNGTYDHDVYRDEALNNRFKIKGVELKSGYKDWILWISFAISCFLLCVVLLGFIMWACQKGNIRCNICI

SEQ ID NO: 8774 - protein, 566 aa, Artificial Sequence
  derived and/or modified protein sequence (wt) from hemagglutinin__InfluenzaA__AFJ74525
MKTIIALSYILCLVFAQKLPGNDNSTATLCLGHHAVPNGTLVKTITNDQIEVTNATELVQSSSTGRICDSPHRILDGENCTLIDALLGDPHCDGFQNKEWDLFVERSKAYSNCYPYDVPDYASLRSLVASSGTLEFNNESFNWTGVAQDGTSSACKRRSIKSFFSRLNWLHQLKYKYPALNVTMPNNDKFDKLYIWGVHHPSTDSDQTSLYAQASGRVTVSTKRSQQTVIPNIGSRPWVRGVSSIISIYWTIVKPGDILLINSTGNLIAPRGYFKIRSGKSSIMRSDAPIGKCNSECITPNGSIPNDKPFQNVNRITYGTCPRYVKQNTLKLATGMRNVPEKQTRGIFGAIAGFIENGWEGMVDGWYGFRHQNSEGTGQAADLKSTQAAINQINGKLNRLIEKTNEKFHQIEKEFSEVEGRIQDLEKYVEDTKIDLWSYNAELLVALENQHTIDLTDSEMNKLFERTRKQLRENAEDMGNGCFKIYHKCDNACIGSIRNGTYDHDVYRDEALNNRFQIKGVELKSGYKDWILWISFAISCFLLCVVLLGFIMWACQKGNIRCNICI

SEQ ID NO: 8775 - protein, 566 aa, Artificial Sequence; identical to SEQ ID NO: 8773
  derived and/or modified protein sequence (wt) from hemagglutinin__InfluenzaA__AFJ74535

SEQ ID NO: 8776 - protein, 566 aa, Artificial Sequence
  derived and/or modified protein sequence (wt) from hemagglutinin__InfluenzaA__AFJ74560
MKTIIALSYILCLVFAQKLPGNDNSTATLCLGHHAVPNGTLVKTITNDQIEVTNATELVQSSSTGRICDSPHQILDGENCTLIDALLGDPHCDGFQNKEWDLFVERSKAYSNCYPYDVPDYVSLRSLVASSGTLEFNNESFNWTGVAQNGTSSACKRRSDKSFFSRLNWLHQLKYKYPALNVTMPNNEKFDKLYIWGVHHPGTDSDQISLYAQTSGRVTVSTKRSQQTVIPNIGSGPWVRGVSSRISIYWTIVKPGDILLINSTGNLIAPRGYFKIRSGKSSIMRSDAPIGKCNSECITPNGSIPNDKPFQNVNRITYGPCPRYVKQNTLKLATGMRNVPEKQTRGIFGAIAGFIENGWEGMMDGWYGFRHQNSEGTGQAADLKSTQAAINQINGKLNRLVEKTNEKFHQIEKEFSEVEGRIQDLEKYVEDTKIDLWSYNAELLVALENQHTIDLTDSEMNKLFERTKKQLRENAEDMGNGCFKIYHKCDNACIGSIRNGTYDHDVYRDEALNNRFQIKGVELKSGYKDWILWISFAISCFLLCIVLLGFIMWACQKGNIRCNICI

SEQ ID NO: 8777 - protein, 566 aa, Artificial Sequence
  derived and/or modified protein sequence (wt) from hemagglutinin__InfluenzaA__AFJ74634
MKTIIALSYILCLVFAQKLPGNDNSTATLCLGHHAVPNGTIVKTITNDQIEVTNATELVQSSSTGGICDSPHQILDGENCTLIDALLGDPQCDGFQNKKWDLFVERSKAYSNCYPYDVPDYASLRSLVASSGTLEFNNESFNWTGVTQNGTSSACKRRSNKSFFSRLNWLTQLKYKYPALNVTMPNNEKFDKLYIWGVHHPGTDSDQISLYAQASGRITVSTKRSQQTVIPNIGSRPRVRDVSSRISIYWTIVKPGDILLINSTGNLIAPRGYFKIRSGKSSIMRSDAPIGKCNSECITPNGSIPNDKPFQNVNRITYGACPRYVKQNTLKLATGMRNVPEKQTRGIFGAIAGFIENGWEGMVDGWYGFRHQNSEGTGQAADLKSTQAAINQINGKLNRLIGKTNEKFHQIEKEFSEVEGRIQDLEKYVEDTKIDLWSYNAELLVALENQHTIDLTDSEMNKLFERTKKQLRENAEDMGNGCFKIYHKCDNACIGSIRNGTYDHDVYRDEALNNRFQIKGVELKSGYKDWILWISFAISCFLLCVALLGFIMWACQKGNIRCNICI

SEQ ID NO: 8778 - protein, 565 aa, Artificial Sequence
  derived and/or modified protein sequence (wt) from hemagglutinin__InfluenzaA__AFJ74653
MKVKLLVLLCTFTATYADTICIGYHANNSTDTVDTVLEKNVTVTHSVNLLEDSHNGKLCLLKGIAPLQLGNCSVAGWILGNPECELLISKESWSYIVEKPNPENGTCYPGYFADYEELREQLSSVSSFERFEIFPKESSWPNHTVTGVSASCSHNGKSSFYKNLLWLTGKNGLYPNLSKSYANNKEKEVLVLWGVHHPPNIGDQRALYHTDNAYVSVVSSHYSRKFTPEIAKRPKVRDQEGRINYYWTLLEPGDTIIFEANGNLIAPRYAFALSRGFGSGIINSNAPMDECDAKCQTPQGAINSSLPFQNVHPVTIGECPKYVRSAKLRMVTGLRNIPSIQSRGLFGAIAGFIEGGWTGMVDGWYGYHHQNEQGSGYAADQKSTQNAINGITNKVNSVIEKMNTQFTAVGKEFNKLERRMENLNKKVDDGFIDIWTYNAELLVLLENERTLDFHDSNVKNLYEKVKSQLKNNAKEIGNGCFEFYHKCNDECMESVKNGTYDYPKYSEESKLNREKIDGVKLESMGVYQILAIYSTVASSLVLLVSLGAISFWMCSNGSLQCRICI

SEQ ID NO: 8779 - protein, 565 aa, Artificial Sequence
  derived and/or modified protein sequence (wt) from hemagglutinin__InfluenzaA__AFJ74673
MKVKLLVLLCTFTATYADTICIGYHANNSTDTVDTVLEKNVTVTHSVNLLEDSHNGKLCLLKGIAPLQLGNCSVAGWILGNPECELLISKESWSYIVEKPNPENGTCYPGYFADYEELREQLSSVSSFERFEIFPKESSWPNHTVTGVSASCSHNGKSSFYKNLLWLTGKNGLYPNLRKSYANNKEKEVLVLWGVHHPPNIGDQRALYHTDNAYVSVVSSHYSRKFTPEIAKRPKVRDQEGRINYYWTLLEPGDTIIFEANGNLIAPRYAFALSRGFGSGIINSNAPMDECDAKCQTPQGAINSSLPFQNVHPVTIGECPKYVRSAKLRMVTGLRNIPSIQSRGLFGAIAGFIEGGWTGMVDGWYGYHHQNEQGSGYAADQKSTQNAINGITNKVNSVIEKMNTQFTAVGKEFNKLERRMENLNKKVDDGFIDIWTYNAELLVLLENERTLDFHDSNVKNLYEKVKSQLKNNAKEIGNGCFEFYHKCNDECMESVKNGTYDYPKYSEESKLNREKIDGVKLESMGVYQILAIYSTVASSLVLLVSLGAISFWMCSNGSLQCRICI

SEQ ID NO: 8780 - protein, 566 aa, Artificial Sequence
  derived and/or modified protein sequence (wt) from hemagglutinin__InfluenzaA__AFJ74674
MKTIIALSYILCLVFAQKLPGNDNSTATLCLGHHAVPNGTLVKTITNDQIEVTNATELVQSSSTGGICDSPHQILDGENCTLIDALLGDPHCDGFQNKKWDLFVERSKAYSNCYPYDVPDYASLRSLVASSGTLEFNNESFNWTGVAQNGTSSACKRRSNKSFFSRLNWLHQLKYKYPALNVTMPNNEKFDKLYIWGVHHPGTDSDQISLYAQASGRITVSTKRSQQTVIPNIGSRPRVRDVSSRISIYWTIVKPGDILLINSTGNLIAPRGYFKIRSGRSSIMRSDAPIGKCNSECITPNGSIPNDKPFQNVNRITYGACPRYVKQNTLKLATGMRNVPEKQPRGIFGAIAGFIENGWEGMVDGWYGFRHQNSEGTGQAADLKSTQAAINQINGKLNRLIGKTNEKFHQIEKEFSEVEGRIQDLEKYVEDTKIDLWSYNAELLVALENQHTIDLTDSEMNKLFERTKKQLRENAEDMGNGCFKIYHKCDNACIGSIRNGTYDHDVYRDEALNNRFQIKGVELKSGYKDWILWISFAISCFLLCVALLGFIMWACQKGNIRCNICI

SEQ ID NO: 8781 - protein, 565 aa, Artificial Sequence; identical to SEQ ID NO: 8778
  derived and/or modified protein sequence (wt) from hemagglutinin__InfluenzaA__AFJ74694

SEQ ID NO: 8782 - protein, 566 aa, Artificial Sequence
  derived and/or modified protein sequence (wt) from hemagglutinin__InfluenzaA__AFJ74695
MKTIIALSYILCLVFAQKLPGNDNSTATLCLGHHAVPNGTLVKTITNDQIEVTNATELVQNSSTGRICDSPHQILDGENCTLIDALLGDPHCDGFQNKEWDLFVERSKAYSNCYPYDVPDYVSLRSLVASSGTLEFNNESFNWTGVAQDGTSSACKRRSDKSFFSRLNWLHQLKYKYPALNVTMPNNEKFDKLYIWGVHHPGTDSDQISLYARASGRVTVSTKRSQQTVIPNIGSRPWVRGVSSKISIYWTIVKPGDILLINSTGNLIAPRGYFKIRSGKSSIMRSDAPIGKCNSECITPNGSIPNDKPFQNVNRITYGPCPRYVKQNTLKLATGMRNVPEKQTRGIFGAIAGFIENGWEGMVDGWYGFRHQNSEGTGQAADLKSTQAAINQINGKLNRLIEKTNEKFHQIEKEFSEVEGRIQDLEKYVEDTKIDLWSYNAELLVALENQHTIDLTDSEMNKLFERTKKQLRENAEDMGNGCFKIYHKCDNACIGSIRNGTYDHDVYRDEALNNRFQIKGVELKSGYKDWILWISFAISCFLLCIVLLGFIMWACQKGNIRCNICI

SEQ ID NO: 8783 - protein, 566 aa, Artificial Sequence
  derived and/or modified protein sequence (wt) from hemagglutinin__InfluenzaA__AFJ74727
MKTIIALSYILCLVFAQKLPGNDNSTATLCLGHHAVPNGTIVKTITNDQIEVTNATELVQSSSTGGICDSPHQILDGENCTLIDALLGDPQCDGFQNKKWDLFVERSKAYSNCYPYDVPDYASLRSLVASSGTLEFNNESFNWTGVTQNGTSSACKRRSNKSFFSRLNWLTQLKYKYPALNVTMPNNEKFDKLYIWGVHHPGTDSDQISLYAQASGRITVSTKRSQQTVIPNIGSRPRVRDISSRISIYWTIVKPGDILLINSTGNLIAPRGYFKIRSGKSSIMRSDAPIGKCNSECITPNGSIPNDKPFQNVNRITYGACPRYVKQNTLKLATGMRNVPEKQTRGIFGAIAGFIENGWEGMVDGWYGFRHQNSEGTGQAADLKSTQAAINQINGKLNRLIGKTNEKFHQIEKEFSEVEGRIQDLEKYVEDTKIDLWSYNAELLVALENQHTIDLTDSEMNKLFERTKKQLRENAEDMGNGCFKIYHKCDNACIGSIRSGTYDHDVYRDEALNNRFQIKGVELKSGYKDWILWISFAISCFLLCVALLGFIMWACQKGNIRCNICI

SEQ ID NO: 8784 - protein, 565 aa, Artificial Sequence; identical to SEQ ID NO: 8778
  derived and/or modified protein sequence (wt) from hemagglutinin__InfluenzaA__AFJ74743

SEQ ID NO: 8785 - protein, 566 aa, Artificial Sequence; identical to SEQ ID NO: 8777
  derived and/or modified protein sequence (wt) from hemagglutinin__InfluenzaA__AFJ74744

SEQ ID NO: 8786 - protein, 565 aa, Artificial Sequence; identical to SEQ ID NO: 8778
  derived and/or modified protein sequence (wt) from hemagglutinin__InfluenzaA__AFJ74760

SEQ ID NO: 8787 - protein, 566 aa, Artificial Sequence
  derived and/or modified protein sequence (wt) from hemagglutinin__InfluenzaA__AFJ74761
MKTIIALSYILCLVFAQKLPGNDNSTATLCLGHHAVPNGTIVKTITNDQIEVTNATELVQSSSTGGICDSPHQILDGENCTLIDALLGDPQCDGFQNKKWDLFVERSKAYSNCYPYDVPDYASLRSLVASSGTLEFNNESFNWTGVTQNGTSSACKRRSNKSFFSRLNWLTQLKYKYPALNVTMPNNEKFDKLYIWGVHHPGTDSDQISLYAQASGRITVSTKRSQQTVIPNIGSRPRVRDISSRISIYWTIVKPGDILLINSTGNLIAPRGYFKIRSGKSSIMRSDAPIGKCNSECITPNGSIPNDKPFQNVNRITYGACPRYVKQNTLKLATGMRNVPEKQTRGIFGAIAGFIENGWEGMVDGWYGFRHQNSEGTGQAADLKSTQAAINQINGKLNRLIGKTNEKFHQIEKEFSEVEGRIQDLEKYVEDTKIDLWSYNAELLVALENQHTIDLTDSEMNKLFERTKKQLRENAEDMGNGCFKIYHKCDNACIGSIRNGTYDHDVYRDEALNNRFQIKGVELKSGYKDWILWISFAISCFLLCVALLGFIMWACQKGNIRCNICI

SEQ ID NO: 8788 - protein, 565 aa, Artificial Sequence; identical to SEQ ID NO: 8778
  derived and/or modified protein sequence (wt) from hemagglutinin__InfluenzaA__AFJ74779

SEQ ID NO: 8789 - protein, 566 aa, Artificial Sequence; identical to SEQ ID NO: 8777
  derived and/or modified protein sequence (wt) from hemagglutinin__InfluenzaA__AFJ74780

SEQ ID NO: 8790 - protein, 566 aa, Artificial Sequence
  derived and/or modified protein sequence (wt) from hemagglutinin__InfluenzaA__AFJ74804
MKTIIALSYILCLVFAQKLPGNDNSTATLCLGHHAVPNGTIVKTITNDQIEVTNATELVQSSSTGGICDSPHQILDGENCTLIDALLGDPQCDGFQNRKWDLFVERSKAYSNCYPYDVPDYASLRSLVASSGTLEFNNESFDWTGVTQNGTSSACKRRSNKSFFSRLNWLTHLKYKYPALNVTMPNNEKFDKLYIWGVHHPGTDSDQISLYAQASGRITVSTKRSQQTVIPNIGSRPRVRDVSSRISIYWTIVKPGDILLINSTGNLIAPRGYFKIRSGKSSIMRSDAPIGKCNSECITPNGSIPNDKPFQNVNRITYGACPRYVKQNTLKLATGMRNVPEKQTRGIFGAIAGFIENGWEGMVDGWYGFRHQNSEGTGQAADLKSTQAAINQINGKLNRLIGKTNEKFHQIEKEFSEVEGRIQDLEKYVEDTKIDLWSYNAELLVALENQHTIDLTDSEMNKLFERTKKQLRENAEDMGNGCFKIYHKCDNACIGSIRNGTYDHDVYRDEALNNRFQIKGVELKSGYKDWILWISFAISCFLLCVALLGFIMWACQKGNIRCNICI

SEQ ID NO: 8791 - protein, 566 aa, Artificial Sequence
  derived and/or modified protein sequence (wt) from hemagglutinin__InfluenzaA__AFJ74819
MKTIIALSYILCLVFAQKLPGNDNSTATLCLGHHAVPNGTIVKTITNDQIEVTNATELVQSSSTGGICDSPHQILDGENCTLIDALLGDPQCDGFQNKKWDLFVERSKAYSNCYPYDVPDYASLRSLVASSGTLEFNNESFDWTGVTQNGTSSACKRRSNKSFFSRLNWLTHLKYKYPALNVTMPNNEKFDKLYIWGVHHPGTDSDQINLYAQASGRITVSTKRSQQTVIPNIGSRPRVRDVSSRISIYWTIVKPGDILLINSTGNLIAPRGYFKIRSGKSSIMRSDAPIGKCNSECITPNGSIPNDKPFQNVNRITYGACPRYVKQNTLKLATGMRNVPEKQTRGIFGAIAGFIENGWEGMVDGWYGFRHQNSEGTGQAADLKSTQAAINQINGKLNRLIGKTNEKFHQIEKEFSEVEGRIQDLEKYVEDTKIDLWSYNAELLVALENQHTIDLTDSEMNKLFERTKKQLRENAEDMGNGCFKIYHKCDNACIGSIRNGTYDHDVYRDEALNNRFQIKGVELKSGYKDWILWISFAISCFLLCVALLGFIMWACQKGNIRCNICI

SEQ ID NO: 8792 - protein, 566 aa, Artificial Sequence; identical to SEQ ID NO: 2645
  derived and/or modified protein sequence (wt) from hemagglutinin__InfluenzaA__AFJ74842

SEQ ID NO: 8793 - protein, 565 aa, Artificial Sequence
  derived and/or modified protein sequence (wt) from hemagglutinin__InfluenzaA__AFJ75036
MKVKLLVLLCTFTATYADTICIGYHANNSTDTVDTVLEKNVTVTHSVNLLEDSHNGKLCLLKGIAPLQLGNCSVAGWILGNPECELLISRESWSYIVEKPNPENGTCYPGHFADYEELREQLSSVSSFERFEIFPKENSWPNHTVTGVSASCSHNGKSSFYKNLLWLTGKNGLYPNLSKSYANNKEKEVLVLWGVHHPPNIGDQRALYHTENAYVSVVSSHYSRKFTPEIAKRPKVRDQEGRINYYWTLLEPGDTIIFEANGNLIAPRYAFALSRGFGSGIINSNAPMDECDAKCQTPQGAINSSLPFQNVHPVTIGECPKYVRSAKLRMVTGLRNIPSIQSRGLFGAIAGFIEGGWTGMVDGWYGYHHQNEQGSGYAADQKSTQNAINGITNKVNSVIEKMNTQFTAVGKEFNKLERRMENLNKKVDDGFIDIWTYNAELLVLLENERTLDFHDSNVKNLYEKVKSQLKNNAKEIGNGCFEFYHKCNDECMESVKNGTYDYPKYSEESKLNREKIDGVKLESMGVYQILAIYSTVASSLVLLVSLGAISFWMCSNGSLQCRICI

SEQ ID NO: 8794 - protein, 566 aa, Artificial Sequence; identical to SEQ ID NO: 630
  derived and/or modified protein sequence (wt) from hemagglutinin__InfluenzaA__AFJ75047

SEQ ID NO: 8795 - protein, 565 aa, Artificial Sequence
  derived and/or modified protein sequence (wt) from hemagglutinin__InfluenzaA__AFJ75058
MKVKLLVLLCTFTATYADTICIGYHANNSTDTVDTVLEKNVTVTHSVNLLEDSHNGKLCLLKGIAPLQLGNCSVAGWILGNPECELLISRESWSYIVEKPNPENGTCYPGHFADYEELREQLSSVSSFERFEIFPKESSWPNHTVTGVSASCSHNGKSSFYKNLLWLTGKNGLYPNLSKSYANNKEKEVLVLWGVHHPPNIGDQRALYHTENAYVSVVSSHYSRKFTPEIAKRPKVRDQEGRINYYWTLLEPGDTIIFEANGNLIAPRYAFALSRGFGSGIINSNAPMDECDAKCQTPQGAINSSLPFQNVHPVTIGECPKYVRSAKLRMVTGLRNIPSIQSRGLFGAIAGFIEGGWTGMVDGWYGYHHQNEQGSGYAADQKSTQNAINGITNKVNSVIEKMNTQFTAVGKEFNKLERRMENLNKKVDDGFIDIWTYNAELLVLLENERTLDFHDSNVKNLYEKVKSQLKNNAKEIGNGCFEFYHKCNDECMESVKNGTYDYPKYSEESKLNREKIDGVKLESMGVYQILAIYSTVASSLVLLVSLGAISFWMCSNGSLQCRICI

SEQ ID NO: 8796 - protein, 565 aa, Artificial Sequence
  derived and/or modified protein sequence (wt) from hemagglutinin__InfluenzaA__AFJ75069
MKVKLLVLLCTFTATYADTICIGYHANNSTDTVDTVLEKNVTVTHSVNLLEDSHNGKLCLLKGIAPLQLGNCSVAGWILGNPECELLISRESWSYIVEKSNPENGTCYPGHFADYEELREQLSSVSSFERFEIFPKESSWPNHTTTGVSASCSHNGESSFYKNLLWLTGKNGLYPNLSKSYANNKEKEVLVLWGVHHPPNIGDQRALYHTENAYVSVVSSHYSRKFTPEIAKRPKVRDQEGRINYYWTLLEPGDTIIFEANGNLIAPRYAFALSRGFGSGIINSNAPMDECDAKCQTPQGAINSSLPFQNVHPVTIGECPKYVRSAKLRMVTGLRNIPSIQSRGLFGAIAGFIEGGWTGMVDGWYGYHHQNEQGSGYAADQKSTQNAINGITNKVNSVIEKMNTQFTAVGKEFNKLERRMENLNKKVDDGFIDIWTYNAELLVLLENERTLDFHDSNVKNLYEKVKSQLKNNAKEIGNGCFEFYHKCNDECMESVKNGTYDYPKYSEESKLNREKIDGVKLESMGVYQILAIYSTVASSLVLLVSLGAISFWMCSNGSLQCRICI

SEQ ID NO: 8797 - protein, 566 aa, Artificial Sequence
  derived and/or modified protein sequence (wt) from hemagglutinin__InfluenzaA__AFJ75091
MKTIIALSYILCLVFAQKLPGNDNSTATLCLGHHAVPNGTIVKTITNDQIEVTNATELVQSSSTGGICDSPHQILDGENCTLIDALLGDPQCDGFQNKKWDLFVERSKAYSNCYPYDVPDYASLRSLVASSGTLEFNNESFNWTGVTQNGTSSACKRRSNNSFFSRLNWLTHLKFKYPALNVTMPNNEKFDKLYIWGVHHPGTDNDQIFLYAQASGRITVSTKISQQTVIPNIGSRPRVRNIPSRISIYWTIVKPGDILLINSTGNLIAPRGYFKIRSGKSSIMRSDAPIGKCNSECITPNGSIPNDKPFQNVNRITYGACPRYVKQNTLKLATGMRNVPEKQTRGIFGAIAGFIENGWEGMVDGWYGFRHQNSEGIGQAADLKSTQAAIDQINGKLNRLIGKTNEKFHQIEKEFSEVEGRIQDLEKYVEDTKIDLWSYNADLLVALENQHTIDLTDSEMNKLFEKTKKQLRENAEDMGNGCFKIYHKCDNACIGSIRNGTYDHDVYRDEALNNRFQIKGVELKSGYKDWILWISFAISCFLLCVALLGFIMWACQKGNIRCNICI

SEQ ID NO: 8798 - protein, 566 aa, Artificial Sequence
  derived and/or modified protein sequence (wt) from hemagglutinin__InfluenzaA__AFJ75449
MKTIIALSYILCLVFAQKLPGNDNSTATLCLGHHAVPNGTIVKTITNDQIEVTNATELVQSSSTGEICDSPHQILDGENCTLIDALLGDPQCDGFQNKKWDLFVERSKAYSNCYPYDVPDYASLRSLVASSGTLEFNNESFNWTGVTQNGTSSACIRRSNNSFFSRLNWLTHLKFKYPALNVTMPNNEKFDKLYIWGVHHPGTDNDQIFLYAQASGKITVSTKRSQQTVIPNIGSRPRVRNIPSRISIYWTIVKPGDILLINSTGNLIAPRGYFKIRSGKSSIMRSDAPIGKCNSECITPNGSIPNDKPFQNVNRITYGACPRYVKQNTLKLATGMRNVPEKQTRGIFGAIAGFIENGWEGMVDGWYGFRHQNSEGTGQAADLKSTQAAIDQINGKLNRLIGKTNEKFHQIEKEFSEVEGRIQDLEKYVEDTKIDLWSYNAELLVALENQHTIDLTDSEMNKLFEKTKKQLRENAEDMGNGCFKIYHKCDNACIGSIRNGTYDHDVYRDEALNNRFQIKGVELKSGYKDWILWISFAISCFLLCVALLGFIMWACQKGNIRCNICI

SEQ ID NO: 8799 - protein, 566 aa, Artificial Sequence
  derived and/or modified protein sequence (wt) from hemagglutinin__InfluenzaA__AFJ75460
MKTIIALSYILCLVFTQKLPGNDNSTATLCLGHHAVPNGTIVKTITNDQIEVTNATELVQSSSTGEICDSPHQILDGENCTLIDALLGDPQCDGFQNKKWDLFVERSKAYSNCYPYDVPDYASLRSLVASSGTLEFNNESFNWTGVTQNGTSSACIRRSNNSFFSRLNWLTHLKFKYPALNVTMPNNENFDKLYIWGVHHPGTDNDQIFLYAQASGRITVSTKRSQQTVIPNIGSRPRVRNIPSRISIYWTIVKPGDILLINSTGNLIAPRGYFKIRSGKSSIMRSDAPIGKCNSECITPNGSIPNDKPFQNVNRITYGACPRYVKQNTLKLATGMRNVPEKQTRGIFGAIAGFIENGWEGMVDGWYGFRHQNSEGIGQAADLKSTQAAVDQINGKLNRLIGKTNEKFHQIEKEFSEVEGRIQDLEKYVEDTKIDLWSYNAELLVALENQHTIDLTDSEMNKLFEKTKKQLRENAEDMGNGCFKIYHKCDNACIGSIRNGTYDHDVYRDEALNNRFQIKGVELKSGYKDWILWISFAISCFLLCVALLGFIMWACQKGNIRCNICI

SEQ ID NO: 8800 - protein, 565 aa, Artificial Sequence
  derived and/or modified protein sequence (wt) from hemagglutinin__InfluenzaA__AFJ75517
MKVKLLVLLCTFTATYADTICIGYHANNSTDTVDTVLEKNVTVTYSVNLLEDNHNGKLCLLKGIAPLQLGNCSVAGWILGNPECELLISKESWSYIVERPNPENGTCYPGHFADYEELREQLSSVSSFERFEIFPKESSWPNHTVTGVSASCSHNGESSFYKNLLWLTGKNGLYPNLSKSYANNKEKEVLVLWGVHHPPNIGDQMTLYHKKNAYVSVVSSHYSRKFTPEIAKRPKVRDQEGRINYYWTLLEPGDTIIFEANGNLIAPRYAFALNRGFGSGIINSNAPMDECDAKCQTPQGAINSSLPFQNVHPVTIGECPKYVRSAKLRMVTGLRNIPSIQSRGLFGAIAGFIEGGWTGMVDGWYGYHHQNEQGSGYAADQKSTQNAINGITNKVNSVIEKMNTQFTAVGKEFNKLERRMENLNKKVDDGFIDVWTYNAELLVLLENERTLDFHDSNVKNLYEKVKTQLKNNAKEIGNGCFEFYHKCNDECMESVKNGTYDYPKYSEESKLSREKIDGVKLESMGVYQILAIYSTVASSLVLLVSLGAISFWMCSNGSLQCRICI

SEQ ID NO: 8801 - protein, 565 aa, Artificial Sequence
  derived and/or modified protein sequence (wt) from hemagglutinin__InfluenzaA__AFJ75560
MKVKLLVLLCTFTATYADTICIGYHANNSTDTVDTVLEKNVTVTHSVNLLEDNHNGKLCLLKGIAPLQLGNCSVAGWILGNPECELLISKESWSYIVERPNPENGTCYPGHFADYEELREQLSSVSSFERFEIFPKESSWPNHTVTGVSASCSHNGESSFYKNLLWLTGKNGLYPNLSKSYANNKEKEVLVLWGVHHPPNIGDQMTLYHKENAYVSVVSSHYSRKFTPEIAKRPKVRDQEGRINYYWTLLEPGDTIIFEANGNLIAPRYAFALSRGFGSGIINSNAPMDECDAKCQTPQGAINSSLPFQNVHPVTIGECPKFVRSAKLRMVTGLRNIPSIQSRGLFGAIAGFIEGGWTGMVDGWYGYHHQNEQGSGYAADQKSTQNAINGITNKVNSVIEKMNTQFTAVGKEFNKLERRMENLNKKVDDGFIDVWTYNAELLVLLENERTLDFHDSNVKNLYEKVKNQLRNNAKEIGNGCFEFYHKCNDECMESVKNGTYDYPKYSEESKLSREKIDGVKLESMGVYQILAIYSTVASSLVLLVSLGAISFWMCSNGSLQCRICI

SEQ ID NO: 8802 - protein, 565 aa, Artificial Sequence
  derived and/or modified protein sequence (wt) from hemagglutinin__InfluenzaA__AFJ75571
MKVKLLVLLCTFTATYADTICIGYHANNSTDTVDTVLEKNVTVTHSVNLLEDNHNGKLCLLKGIAPLQLGNCSVAGWILGNPECELLISKESWSYIVERPNPENGTCYPGHFADYEELREQLSSVSSFERFEIFPKESSWPNHTVTGVSASCSHNGENSFYKNLLWLTGKNGLYPNLSKSYANNKEKEVLVLWGVHHPPNIGDQMTLYHKENAYVSVVSSHYSRKFTPEIAKRPKVRDQEGRINYYWTLLEPGDTIIFEANGNLIAPRYAFALSRGFGSGIINSNAPMDECDAKCQTPQGAINSSLPFQNVHPVTIGECPKYVRSAKLRMVTGLRNIPSIQSRGLFGAIAGFIEGGWTGMVDGWYGYHHQNEQGSGYAADQKSTQNAINGITNKVNSVIEKMNTQFTAVGKEFNKLERRMENLNKKVDDGFIDVWTYNAELLVLLENERTLDFHDSNVKNLYEKVKNQLKNNAKEIGNGCFEFYHKCNDECMESVKNGTYDYPKYSEESKLSRERIDGVKLESMGVYQILAIYSTVASSLVLLVSLGAISFWMCSNGSLQCRICI

SEQ ID NO: 8803 - protein, 566 aa, Artificial Sequence
  derived and/or modified protein sequence (wt) from hemagglutinin__InfluenzaA__AFJ75593
MKTIIALSYILCLVFAQKLPGNDSSTATLCLGHHAVPNGTIVKTITNDQIEVTNATELVQSSSTGEICNSPHQILDGENCTLIDALLGDPQCDGFQNKKWDLFVERSKAYSNCYPYDVPDYASLRSLVASSGTLEFNNESFNWTGVTQNGTSSACIRRSNNSFFSRLNWLTHLKFKYPALNVTMPNNEKFDKLYIWGVHHPGTDNDQIFLYAQASGRITVSTKRSQQTVIPNIGSRPRVRNIPSRISIYWTIVKPGDILLINSTGNLIAPRGYFKIRSGKSSIMRSDAPIGKCNSECITPNGSIPNDKPFQNVNRITYGACPRYVKQNTLKLATGMRNVPEKQTRGIFGAIAGFIENGWEGMVDGWYGFRHQNSEGIGQAADLKSTQAAIDQINGKLNRLIGKTNEKFHQIEKEFSEVEGRIQDLEKYVEDTKVDLWSYNAELLVALENQHTIDLTDSEMNKLFEKTKKQLRENAEDMGNGCFKIYHKCDNACIGSIRNGTYDHDVYRDEALNNRFQIKGVELKSGYKDWILWISFAISCFLLCVALLGFIMWACQKGNIRCNICI

SEQ ID NO: 8804 - protein, 565 aa, Artificial Sequence
  derived and/or modified protein sequence (wt) from hemagglutinin__InfluenzaA__AFJ75615
MKVKLLVLLCTFTATYADTICVGYHANNSTDTVDTVLEKNVTVTHSVNLLENSHNGKLCLLKGIAPLQLGNCSVAGWILGNPECELLISKESWSYIVEKPNPENGTCYPGHFADYEELREQLSSVSSFERFEIFPKESSWPNHTVTGVSASCSHNGESSFYRNLLWLTGKNGLYPNLSKSYANNKEKEVLVLWGVHHPPNIGDQKALYHTENAYVSVVSSHYSRKFTPEIAKRPKVRDQEGRINYYWTLLEPGDTIIFEANGNLIAPRYAFALSRGFGSGIINSNAPMDKCDAKCQTPQGAINSSLPFQNVHPVTIGECPKYVRSAKLRMVTGLRNIPSIQSRGLFGAIAGFIEGGWTGMVDGWYGYHHQNEQGSGYAADQKSTQNAINGITNKVNSVIEKMNTQFTEVGKEFNKLERRMENLNKKVDDGFIDIWTYNAELLVLLENERTLDFHDSNVKNLYEKVKSQLKNNAKEIGNGCFEFYHKCNDECMESVKNGTYDYPKYSEESKLNREKIDGVKLESMGVYQILAIYSTVASSLVLLVSLGAISFWMCSNGSLQCRICI

SEQ ID NO: 8805 - protein, 566 aa, Artificial Sequence; identical to SEQ ID NO: 5352
  derived and/or modified protein sequence (wt) from hemagglutinin__InfluenzaA__AFJ75630

SEQ ID NO: 8806 - protein, 566 aa, Artificial Sequence; identical to SEQ ID NO: 5352
  derived and/or modified protein sequence (wt) from hemagglutinin__InfluenzaA__AFJ75641

SEQ ID NO: 8807 - protein, 565 aa, Artificial Sequence
  derived and/or modified protein sequence (wt) from hemagglutinin__InfluenzaA__AFJ75651
MKVKLLVLLCTFTATYADTICIGYHANNSTDTVDTVLEKNVTVTHSVNLLENSHNGKLCLLKGIAPLQLGNCSVAGWILGNPECELLISKESWSYIVEKPNPENGTCYPGHFADYEELREQLSSVSSFERFEIFPKESSWPNHTVTGVSASCSHNGESSFYRNLLWLTGKNGLYPNLSKSYANNKEKEVLVLWGVHHPPNIGDQKALYRTENAYVSVVSSHYSRKFTPEIAKRPKVRDQEGRINYYWTLLEPGDTIIFEANGNLIAPRYAFALSRGFGSGIINSDAPMDKCDAKCQTPQGAINSSLPFQNVHPVTIGECPKYVRSAKLRMVTGLRNIPSIQSRGLFGAIAGFIEGGWTGMVDGWYGYHHQNEQGSGYAADQKSTQNAINGITNKVNSVIEKMNTQFTAVGKEFNKLERRMENLNKKVDDGFIDIWTYNAELLVLLENERTLDFHDSNVKNLYEKVKSQLKNNAKEIGNGCFEFYHKCNDECMESVKNGTYDYPKYSEESKLNREKIDGVKLESMGVYQILAIYSTVASSLVLLVSLGAISFWMCSNGSLQCRICI

SEQ ID NO: 8808 - protein, 566 aa, Artificial Sequence
  derived and/or modified protein sequence (wt) from hemagglutinin__InfluenzaA__AFJ75662
MKTIIALSYILCLVFAQKLPGNDNSTATLCLGHHAVPNGTIVKTITNDQIEVTNATELVQSSSTGEICDSPHQILDGENCTLIDALLGDPQCDGFQNKKWDLFVERSKAYSNCYPYDVPDYASLRSLVASSGTLEFNNESFNWTGVTQNGTSSACIRRSNNSFFSRLNWLTHLKFKYPALNVTMPNNEEFDKLYIWGVHHPGTDNDQIFLYAQASGRITVSTKRSQQTVIPNIGSRPRVRNIPSRISIYWTIVKPGDILLINSTGNLIAPRGYFKIRSGKSSIMRSDAPIGKCNSECITPNGSIPNDKPFQNVNRITYGACPRYVKQNTLKLATGMRNVPEKQTRGIFGAIAGFIENGWEGMVDGWYGFRHQNSEGTGQAADLKSTQAAIDQINGKLNRLIGKTNEKFHQIEKEFSEVEGRIQDLEKYVEDTKIDLWSYNAELLVALENQHTIDLTDSEMNKLFEKTKKQLRENAEDMGNGCFKIYHKCDNACIGSIRNGTYDHDVYRDEALNNRFQIKGVELKSGYKDWILWISFAISCFLLCVALLGFIMWACQKGNIRCNICI

SEQ ID NO: 8809 - protein, 565 aa, Artificial Sequence
  derived and/or modified protein sequence (wt) from hemagglutinin__InfluenzaA__AFJ75673
MKVKLLVLLCTFTATYADTICIGYHANNSTDTVDTVLEKNVTVTYSVNLLEDNHNGKLCLLKGIAPLQLGNCSVAGWILGNPECELLISKESWSYIVERPNPENGTCYPGHFADYEELREQLSSVSSFERFEIFPKESSWPNHTVTGVSASCSHNGESSFYKNLLWLTGKNGLYPNLSKSYANNKEKEVLVLWGVHHPPNIGNQMTLYHKENAYVSVVSSHYSRKFTPEIAKRPKVRDQEGRINYYWTLLEPGDTIIFEANGNLIAPRYAFALNRGFGSGIINSNAPMDECDAKCQTPQGAINSSLPFQNVHPVTIGECPKYVRSAKLRMVTGLRNIPSIQSRGLFGAIAGFIEGGWTGMVDGWYGYHHQNEQGSGYAADQKSTQNAINGITNKVNSVIEKMNTQFTAVGKEFNKLERRMENLNKKVDDGFIDVWTYNAELLVLLENERTLDFHDSNVKNLYEKVKTQLKNNAKEIGNGCFEFYHKCNDECMESVKNGTYDYPKYSEESKLSREKIDGVKLESMGVYQILAIYSTVASSLVLLVSLGAISFWMCSNGSLQCRICI

SEQ ID NO: 8810 - protein, 566 aa, Artificial Sequence; identical to SEQ ID NO: 2669
  derived and/or modified protein sequence (wt) from hemagglutinin__InfluenzaA__AFJ76119

SEQ ID NO: 8811 - protein, 566 aa, Artificial Sequence; identical to SEQ ID NO: 3022
  derived and/or modified protein sequence (wt) from hemagglutinin__InfluenzaA__AFJ76131

SEQ ID NO: 8812 - protein, 566 aa, Artificial Sequence
  derived and/or modified protein sequence (wt) from hemagglutinin__InfluenzaA__AFJ76155
MKAILVVLLYTFATANADTLCIGYHANNSTDTVDTVLEKNVTVTHSVNLLEDKHNGKLCKLRGIAPLHLGKCNIAGWILGNPECESLSTASSWSYIVETSSSDNGTCYPGDFIDYEELREQLSSVSSFERFEIFPKTSSWPNHDSNKGVTAACPHAGAKSFYKNLIWLVKKGNSYPKLSKSYINDKGKEVLVLWGIHHPSTSADQQSLYQNADAYVFVGTSRYSKKFKPEIAIRPKVREQEGRMNYYWTLVEPGDKITFEATGNLVVPRYAFAMERKAGSGIIISDTPVHDCNTTCQTPKGAINTSLPFQNIHSITIGKCPKYVKSTKLRLATGLRNVPSIQSRGLFGAIAGFIEGGWTGMVDGWYGYHHQNEQGSGYAADLKSTQNAIDEITNKVNSVIEKMNTQFTAVGKEFNHLEKRIENLNKKVDDGFLDIWTYNAELLVLLENERTLDYHDSNVKNLYEKVRSQLKNNAKEIGNGCFEFYHKCDNTCMESVKNGTYDYPKYSEEAKLNREEIDGVKLESTRIYQILAIYSTVASSLVLVVSLGAISFWMCSNGSLQCRICI

SEQ ID NO: 8813 - protein, 565 aa, Artificial Sequence
  derived and/or modified protein sequence (wt) from hemagglutinin__InfluenzaA__AFJ76186
MKVKLLVLLCTFTATYADTICIGYHANNSTDTVDTVLEKNVTVTHSVNLLENSHNGKLCLLKGIAPLQLGNCSVAGWILGNPECELLISKESWSYIVEKPNPENGTCYPGHFADYEELREQLSSVSSFERFEIFPKESSWPNHTVTGVSASCSHNGESSFYRNLLWLTGKNGLYPNLSKSYANNKEKEVLVLWGVHHPPNIGDQKALYHTENAYVSVVSSHYSRKFTPEITKRPKVRDQEGRINYYWTLLEPGDTIIFEANGNLIAPRYAFALSRGFGSGIINSDAPMDKCDAKCQTPQGAINSSLPFQNVHPVTIGECPKYVRSAKLRMVTGLRNIPSIQSRGLFGAIAGFIEGGWTGMVDGWYGYHHQNEQGSGYAADQKSTQNAINGITNKVNSVIEKMNTQFTAVGKEFNKLERRMENLNKKVDDGFIDIWTYNAELLVLLENERTLDFHDSNVKNLYEKVKSQLKNNAKEIGNGCFEFYHKCNDECMESVKNGTYDYPKYSEESKLNREKIDGVKLESMGVYQILAIYSTVASSLVLLVSLGAISFWMCSNGSLQCRICI

SEQ ID NO: 8814 - protein, 566 aa, Artificial Sequence; identical to SEQ ID NO: 2669
  derived and/or modified protein sequence (wt) from hemagglutinin__InfluenzaA__AFJ76203

SEQ ID NO: 8815 - protein, 566 aa, Artificial Sequence
  derived and/or modified protein sequence (wt) from hemagglutinin__InfluenzaA__AFJ76213
MKTIIALSYILCLVFAQKLPGNDNSTATLCLGHHAVPNGTIVKTITNDQIEVTNATELVQSSSTGGICDSPHQILDGENCTLIDALLGDPQCDGFQNKKWDLFVERSKAYSNCYPYDVPDYASLRSLVASSGTLEFNNESFDWTGVTQNGTSSACKRRSNKSFFSRLNWLTHSKYKYPALNVTMPNNEKFDKLYIWGVHHPGTDSDQISLYAQASGRITVSTKRSQQTVIPNIGSRPRVRDVSSRISIYWTIVKPGDILLINSTGNLIAPRGYFKIRSGKSSIMRSDAPIGKCNSECITPNGSIPNDKPFQNVNRITYGACPRYVKQNTLKLATGMRNVPEKQTRGIFGAIAGFIENGWEGMVDGWYGFRHQNSEGTGQAADLKSTQAAINQINGKLNRLIGKTNEKFHQIEKEFSEVEGRIQDLEKYVEDTKIDLWSYNAELLVALENQHTIDLTDSEMNKLFERTKKQLRENAEDMGNGCFKIYHKCDNACIGSIRNGTYDHDVYRDEALNNRFQIKGVELKSGYKDWILWISFAISCFLLCVALLGFIMWACQKGNIRCNICI

SEQ ID NO: 8816 - protein, 566 aa, Artificial Sequence
  derived and/or modified protein sequence (wt) from hemagglutinin__InfluenzaA__AFJ77408
MKTIIALSYILCLIFAQKLPGNDNSTATLCLGHHAVPNGTLVKTITNDQIEVTNATELVQSSSTGRICNSPHRILDGENCTLIDALLGDPHCDGFQNKEWDLFVERSKAYSNCYPYDVPDYASLRSLVASSGTLEFTKEGFNWTGVAQDGKSYSCKRGSVNSFFSRLNWLHKLEYKYPALNVTMPNNDKFDKLYIWGVHHPSTDSDQTSLYVQASGRVTVSTKRSQQTVIPNIGSRPWVRGISSRISIYWTIVKPGDILLINSTGNLIAPRGYFKIRNGKSSIMRSDAPIGNCNSECITPNGSIPNDKPFQNVNRITYGACPRYVKQNTLKLATGMRNVPEKQTRGIFGAIAGFIENGWEGMVDGWYGFRHQNSEGTGQAADLKSTQAAINQINGKLNRLIEKTNEKFHQIEKEFSEVEGRIQDLEKYVEDTKIDLWSYNAELLVALENQHTIDLTDSEMNKLFERTRKQLRENAEDMGNGCFKIYHKCDNACIGSIRNGTYDHDVYRDEALNNRFQIKGVELKSGYKDWILWISFAISCFLLCVVLLGFIMWACQKGNIRCNICI

SEQ ID NO: 8817 - protein, 566 aa, Artificial Sequence
  derived and/or modified protein sequence (wt) from hemagglutinin__InfluenzaA__AFJ77430
MKTIIALSYILCLIFAQKLPGNDNSTATLCLGHHAVPNGTLVKTITNDQIEVTNATELVQSSSTGRICDSPHRILDGENCTLIDALLGDPNCDGFQNKEWDLFVERSKAYSNCYPYDVPDYASLRSLVASSGTLEFTKEGFNWTGVAQDGKSYSCKRGSVNSFFSRLNWLHKLEYKYPALNVTMPNNDKFDKLYIWGVHHPSTDSDQISLYAQASGRVTVSTKRSQQTVIPNIGSRPWVRGISSRISIYWTIVKPGDILLINSTGNLIAPRGYFKIRNGKSSIMRSDAPIGNCNSECITPNGSIPNDKPFQNVNRITYGACPRYVKQNTLKLATGMRNVPEKQTRGIFGAIAGFIENGWEGMVDGWYGFRHQNSEGTGQAADLKSTQAAINQINGKLNRLIEKTNEKFHQIEKEFSEVEGRIQDLEKYVEDTKIDLWSYNAELLVALENQHTIDLTDSEMNKLFERTRRQLRENAEDMGNGCFKIYHKCDNACIGSIRNGTYDHDVYRDEALNNRFQIKGVELKSGYKDWILWISFAISCFLLCVVLLGFIMWACQKGNIRCNICI

SEQ ID NO: 8818 - protein, 566 aa, Artificial Sequence
  derived and/or modified protein sequence (wt) from hemagglutinin__InfluenzaA__AFJ77440
MKTIIALSYILCLVFAQKLPGNDNSTATLCLGHHAVPNGTLVKTITNDQIEVTNATELVQSSSTGRICDSPHRILDGKNCTLIDALLGDPHCDGFQNKEWDLFVERSKAYSNCYPYDVPDYASLRSLVASSGTLEFTSEGFNWTGVAQDGTSYACKRGSVKSFFSRLNWLHKLEYKYPALNVTMPNNDKFDKLYIWGVHHPSTDSDQTSLYVQASGRVTVSTKRSQQTVIPNIGSRPWVRGVSSRISIYWTIVKPGDILLINSTGNLIAPRGYFKIRSGKSSIMRSDAPIGNCNSECITPNGSIPNDKPFQNVNRITYGACPRYVKQNTLKLATGMRNVPEKQTRGIFGAIAGFIENGWEGMVDGWYGFRHQNSEGTGQAADLKSTQAAINQINGKLNRLIEKTNEKFHQIEKEFSEVEGRIQDLEKYVEDTKIDLWSYNAELLVALENQHTIDLTDSEMNKLFERTRKQLRENAEDMGNGCFKIYHKCDNACIGSIRNGTYDHDVYRDEALNNRFQIKGVELKSGYKDWILWISFAISCFLLCVVLLGFIMWACQKGNIRCNICI

SEQ ID NO: 8819 - protein, 566 aa, Artificial Sequence
  derived and/or modified protein sequence (wt) from hemagglutinin__InfluenzaA__AFJ77451
MKTIIALSYILCLVFAQKLPGNDNSTATLCLGHHAVPNGTLVKTITNDQIEVTNATELVQSSSTGRICDSPHRILDGKNCTLIDALLGDPHCDGFQNKEWDLFVERSKAYSNCYPYDVPDYASLRSLVASSGTLEFNNESFNWTGVAQNGTSYACKRRSVKSFFSRLNWLHKLEYKYPALNVTMPNNDKFDKLYIWGVHHPSTDSDQTSLYVQASGRVTVSTKRSQQTVIPNIGSRPWVRGVSSRISIYWTIVKPGDILLINSTGNLIAPRGYFKIRSGKSSIMRSDAPIGNCNSECITPNGSIPNDKPFQNVNRITYGACPRYVKQNTLKLATGMRNVPEKQTRGIFGAIAGFIENGWEGMVDGWYGFRHQNSEGTGQAADLKSTQAAINQINGKLNRLIEKTNGKFHQIEKEFSEVEGRIQDLEKYVEDTKIDLWSYNAELLVALENQHTIDLTDSEMNKLFERTRKQLRENAEDMGNGCFKIYHKCDNACIGSIRNGTYDHDVYRDEALNNRFQIKGVELKSGYKDWILWISFAISCFLLCVVLLGFIMWACQKGNIRCNICI

SEQ ID NO: 8820 - protein, 566 aa, Artificial Sequence
  derived and/or modified protein sequence (wt) from hemagglutinin__InfluenzaA__AFJ77462
MKTIIALSYILCLVFAQKLPGNDNSTATLCLGHHAVPNGTLVKTITNDQIEVTNATELVQSSSTGRICDSPHRILDGKNCTLIDALLGDPHCDGFQNKEWDLFVERSKAYSNCYPYDVPDYASLRSLVASSGTLEFTNEGFNWTGVAQDGTSYACKRGSVKSFFSRLNWLHKLEYKYPALNVTMPNNDKFDKLYIWGVHHPSTDSDQTSLYVQASGRVTVSTKRSQQTVIPNIGSRPWVRGVSSRISIYWTIVKPGDILLINSTGNLIAPRGYFKIRSGKSSIMRSDAPIGNCNSECITPNGSIPNDKPFQNVNRITYGACPRYVKQNTLKLATGMRNVPEKQTRGIFGAIAGFIENGWEGMVDGWYGFRHQNSEGTGQAADLKSTQAAINQINGKLNRLIEKTNEKFHQIEKEFSEVEGRIQDLEKYVEDTKIDLWSYNAELLVALENQHTIDLTDSEMNKLFERTRKQLRENAEDMGNGCFKIYHKCDNACIGSIRNGTYDHDVYRDEALNNRFQIKGVELKSGYKDWILWISFAISCFLLCVVLLGFIMWACQKGNIRCNICI

SEQ ID NO: 8821 - protein, 566 aa, Artificial Sequence
  derived and/or modified protein sequence (wt) from hemagglutinin__InfluenzaA__AFJ77473
MKTIIALSYILCQVFAQKLPGNDNSTATLCLGHHAVPNGTLVKTITNDQIEVTNATELVQSSSTGRICDSPHQILDGENCTLIDALLGDPHCDGFQNKEWDLFVERSKAYSNCYPYDVPDYASLRSLVASSGTLEFNNESFNWTGVAQNGTSSACKRRSIKSFFSRLNWLHQLKYKYPALNVTMPNNEKFDKLYIWGVHHPSTDSDQISLYAQASGRVTVSTKRSQQTVIPNIGSRPWVRGVSSRISIYWTIVKPGDILLINSTGNLIAPRGYFKIRSGKSSIMRSDAPIGKCNSECITPNGSIPNDKPFQNVNRITYGACPRYVKQNTLKLATGMRNVPEKQTRGIFGAIAGFIENGWEGMVDGWYGFRHQNSEGTGQAADLKSTQAAINQINGKLNRLIEKTNEKFHQIEKEFSEVEGRIQDLEKYVEDTKIDLWSYNAELLVALENQHTIDLTDSEMNKLFERTKKQLRENAEDMGNGCFKIYHKCDNACIGSIRNGTYDHDVYRDEALNNRFQIKGVELKSGYKDWILWISFAISCFLLCVVLLGFIMWACQKGNIRCNICI

SEQ ID NO: 8822 - protein, 566 aa, Artificial Sequence; identical to SEQ ID NO: 186
  derived and/or modified protein sequence (wt) from hemagglutinin__InfluenzaA__AFJ77484

SEQ ID NO: 8823 - protein, 566 aa, Artificial Sequence; identical to SEQ ID NO: 188
  derived and/or modified protein sequence (wt) from hemagglutinin__InfluenzaA__AFJ77495

SEQ ID NO: 8824 - protein, 566 aa, Artificial Sequence; identical to SEQ ID NO: 186
  derived and/or modified protein sequence (wt) from hemagglutinin__InfluenzaA__AFJ77506

SEQ ID NO: 8825 - protein, 566 aa, Artificial Sequence
  derived and/or modified protein sequence (wt) from hemagglutinin__InfluenzaA__AFJ77517
MKTIIALSYILCLVFAQKIPGNDNSTATLCLGHHAVPNGTLVKTITNDQIEVTNATELVQSSSTGRICDSPHRILDGENCTLIDALLGDPHCDGFQNKEWDLFVERSKAYSNCYPYDVPDYASLRSLVASSGTLEFNNESFNWTGVAQNGTSNACKRRSMKSFFSRLNWLHQLKYKYPALNVTMPNNDKFDKLYIWGVHHPSTDSDQTSLYAQASGRVTVSTQRSQQTVIPNIGSRPWVRGVSSRISIYWTIVKPGDILLINSTGNLIAPRGYFKIRSGKSSIIRSDAPIGKCNSECITPNGSIPNDKPFQNVNRITYGACPRYVKQNTLKLATGMRNVPEKQTRGIFGAIAGFIENGWEGMVDGWYGFRHQNSEGTGQAADLKSTQAAINQINGKLNRLIEKTNEKFHQIEKEFSEVEGRIQDLEKYVEDTKIDLWSYNAELLVALENQHTIDLTDSEMNKLFERTRKQLRENAEDMGNGCFKIYHKCDNACIGSIRNGTYDHDVYRDEALNNRFQIKGVELKSGYKDWILWISFAMSCFLLCVVLLGFIMWACQKGNIRCNICI

SEQ ID NO: 8826 - protein, 566 aa, Artificial Sequence; identical to SEQ ID NO: 23
  derived and/or modified protein sequence (wt) from hemagglutinin__InfluenzaA__AFJ77528

SEQ ID NO: 8827 - protein, 565 aa, Artificial Sequence
  derived and/or modified protein sequence (wt) from hemagglutinin__InfluenzaA__AFJ77550
MKTIIALSYILCQVFAQKLPGNDNSTATLCLGHHAVPNGTLVKTITNDQIEVTNATELVQSSSTGRICDSPHQILDGENCTLIDALLGDPHCDGFQNKEWDLFVERSKAYSNCYPYDVPDYASLRSLVASSGTLEFNNESFNWTGVAQNGTSSACKRRSIKSFFSRLNWLHQLKYKYPALNVTMPNNEKFDKLYIWGVHHPSTDSDQISLYAQASGRVTVSTKRSQQTVIPNIGSRPWVRGVSSRISIYWTIVKPGDILLINSTGNLIAPRGYFKIRSGKSSIMRSDAPIGKCNSECITPNGSIPNDKPFQNVNRITYGACPRYVKQNTLKLATGMRNVPEKTRGIFGAIAGFIENGWEGMVDGWYGFRHQNSEGTGQAADLKSTQAAINQINGKLNRLIEKTNEKFHQIEKEFSEVEGRIQDLEKYVEDTKIDLWSYNAELLVALENQHTIDLTDSEMNKLFERTKKQLRENAEDMGNGCFKIYHKCDNACIGSIRNGTYDHDVYRDEALNNRFQIKGVELKSGYKDWILWISFAISCFLLCVVLLGFIMWACQKGNIRCSICI

SEQ ID NO: 8828 - protein, 566 aa, Artificial Sequence
  derived and/or modified protein sequence (wt) from hemagglutinin__InfluenzaA__AFJ77561
MKTIIALSYILCLVFAQKLPGNDNSTATLCLGHHAVPNGTLVKTITNDQIEVTNATELVQSSSTGRICDSPHRILDGKNCTLIDALLGDPHCDGFQNKEWDLFVERSKAYSNCYPYDVPDYASLRSLVASSGTLEFNNESFNWTGVAQNGTSYACKRRSVKSFFSRLNWLHKLEYKYPALNVTMPNNDKFDKLYIWGVHHPSTDSDQTSLYAQASGRVTVSTKRSQQTVIPNIGSRPWVRGVSSRISIYWTIVKPGDILLIYSTGNLIAPRGYFKIRSGKSSIMRSDAPIGNCSSECITPNGSIPNDKPFQNVNRITYGACPRYVKQNTLKLATGMRNVPEKQTRGIFGAIAGFIENGWEGMVDGWYGFRHQNSEGTGQAADLKSTQAAINQINGKLNRLIEKTNEKFHQIEKEFSEVEGRIQDLEKYVEDTKIDLWSYNAELLVALENQHTIDLTDSEMNKLFERTRKQLRENAEDMGNGCFKIYHKCDNACIGSIRNGTYDHDVYRDEALNNRFQIKGVELKSGYKDWILWISFAISCFLLCVVLLGFIMWACQKGNIRCNICI

SEQ ID NO: 8829 - protein, 565 aa, Artificial Sequence
  derived and/or modified protein sequence (wt) from hemagglutinin__InfluenzaA__AFJ77572
MKTIIALSYILCQVFAQKLPGNDNSTATLCLGHHAVPNGTLVKTITNDQIEVTNATELVQSSSTGRICDSPHQILDGENCTLIDALLGDPHCDGFQNKEWDLFVERSKAYSNCYPYDVPDYASLRSLVASSGTLEFNNESFNWTGVAQNGTSSACKRRSIKSFFSRLNWLHQLKYKYPALNVTMPNNEKFDKLYIWGVHHPSTDSDQISLYAQASGRVTVSTKRSQQTVIPNIGSGPWVRGVSSRISIYWTIVKPGDILLINSTGNLIAPRGYFKIRSGKSSIMRSDAPIGKCNSECITPNGSIPNDKPFQNVNRITYGACPRYVKQNTLKLATGMRNVPEKTRGIFGAIAGFIENGWEGMVDGWYGFRHQNSEGTGQAADLKSTQAAINQINGKLNRLIEKTNEKFHQIEKEFSEVEGRIQDLEKYVEDTKIDLWSYNAELLVALENQHTIDLTDSEMNKLFERTKKQLRENAEDMGNGCFKIYHKCDNACIGSIRNGTYDHDVYRDEALNNRFQIKGVELKSGYKDWILWISFAISCFLLCVVLLGFIMWACQKGNIRCSICI

SEQ ID NO: 8830 - protein, 566 aa, Artificial Sequence
  derived and/or modified protein sequence (wt) from hemagglutinin__InfluenzaA__AFJ77583
MKTIITLSYILCLVFAQKLPVKDNSTATLCLGHHAVPNGTLVKTITNDHIEVTNATELVQSSSTGRICDSPHQILDGENCTLIDALLGDPHCDGFQNKEWDLFVERSTAYSNCYPYDVPDYASLRSLVASSGTLEFNNESFNWTGVAQNGTSSACKRRSIKSFFSRLNWLHQLKYKYPALNVTMPNNEKFDKLYIWGVHHPSTDSDQISLYAQASGRVTVSTKRSQQTVIPNIGSRPWVRGVSSRISIYWTIVKPGDILLINSTGNLIAPRGYFKIRSGKSSIMRSNAPIGKCNSECITPNGSIPNDKPFQNVNRITYGACPRYVKQNTLKLATGMRNVPEKQTRGIFGAIAGFIENGWEGMVDGWYGFRHQNSEGTGQAADLKSTQAAINQINGKLNRLIEKTNEKFHQIEKEFSEVEGRIQDLEKYVEDTKIDLWSYNAELLVALENQHTIDLTDSEMNKLFERTRKQLRENAEDMGNGCFKIYHKCDNACIGSIRNGTYDHDVYRDEALNNRFQIKGVELKSGYKDWILWISFAISCFLLCVVLLGFIMWACQKGNIRCNICI

SEQ ID NO: 8831 - protein, 566 aa, Artificial Sequence
  derived and/or modified protein sequence (wt) from hemagglutinin__InfluenzaA__AFJ77594
MKTIIALSYILCLVFAQKLPVKDNSTATLCLGHHAVPNGTLVKTITNDHIEVTNATELVQSSSTGRICDSPHQILDGENCTLIDALLGDPHCDGFQNKEWDLFVERSTAYSNCYPYDVPDYASLRSLVASSGTLEFNNESFNWTGVAQNGTSSACKRRSIKSFFSRLNWLHQLKYKYPALNVTMPNNEKFDKLYIWGVHHPSTDSDQISLYAQASGRVTVSTKRSQQTVIPNIGSRPWVRGVSSRISIYWTIVKPGDILLINSTGNLIAPRGYFKIRSGKSSIMRSNAPIGKCNSECITPNGSIPNDKPFQNVNRITYGACPRYVKQNTLKLATGMRNVPEKQTRGIFGAIAGFIENGWEGMVDGWYGFRHQNSEGTGQAADLKSTQAAINQINGKLNRLIEKTNEKFHQIEKEFSEVEGRIQDLEKYVEDTKIDLWSYNAELLVALENQHTIDLTDSEMNKLFERTRKQLRENAEDMGNGCFKIYHKCDNACIGSIRNGTYDHDVYRDEALNNRFQIKGVELKSGYKDWILWISFAISCFLLCVVLLGFIMWACQKGNIRCNICI

SEQ ID NO: 8832 - protein, 566 aa, Artificial Sequence
  derived and/or modified protein sequence (wt) from hemagglutinin__InfluenzaA__AFJ77605
MKTIIALSYILCLIFAQKLPGNDNSTATLCLGHHAVPNGTLVKTITNDQIEVTNATELVQSSSTGKICDSPHQILDGENCTLIDALLGDPHCDGFQNKEWDLFVERSKAYSNCYPYDVPDYASLRSLVASSGTLEFNNESFNWTGVAQNGTSSACKRRSNKSFFSRLNWLHQLKYKYPALNVTMPNNEKFDKLYIWGVHHPSTDSDQISLYAQASGRVTVSTKRSQQTVIPNIGSRPWVRGVSSRISIYWTIVKPGDILLINSTGNLIAPRGYFKIRSGKSSIMRSDAPIGKCNSECITPNGSIPNDKPFQNVNRITYGACPRYVKQNTLKLATGMRNVPEKQTRGIFGAIAGFIENGWEGMVDGWYGFRHQNSEGTGQAADLKSTQAAINQINGKLNRLIEKTNEKFHQIEKEFSEVEGRIQDLEKYVEDTKIDLWSYNAELLVALENQHTIDLTDSEMNKLFERTKKQLRENAEDMGNGCFKIYHKCDNACIGSIRNGTYDHDVYRDEAVNNRFQIKGVELKSGYKDWILWISFAISCFLLCVVLLGFIMWACQKGNIRCNICI

SEQ ID NO: 8833 - protein, 566 aa, Artificial Sequence
  derived and/or modified protein sequence (wt) from hemagglutinin__InfluenzaA__AFJ77616
MKTIIALSYILCMVLAQKLPVKDNSTATLCLGHHAVPNGTLVKTITNDHIEVTNATELVQSSSTGRICDSPHQILDGENCTLIDALLGDPHCDGFQNKEWDLFVERSTAYSNCYPYDVPDYASLRSLVASSGTLEFNNESFNWTGVAQNGTSSACKRRSIKSFFSRLNWLHQLKYKYPALNVTMPNNEKFDKLYIWGVHHPSTDSDQISLYAQASGRVTVSTKRSQQTVIPNIGSRPWVRGVSSRISIYWTIVKPGDILLINSTGNLIAPRGYFKIRSGKSSIMRSNASIGKCNSECITPNGSIPNDKPFQNVNRITYGACPRYVKQNTLKLATGMRNVPEKQTRGIFGAIAGFIENGWEGMVDGWYGFRHQNSEGTGQAADLKSTQAAINQINGKLNRLIEKTNEKFHQIEKEFSEVEGRIQDLEKYVEDTKIDLWSYNAELLVALENQHTIDLTDSEMNKLFERTRKQLRENAEDMGNGCFKIYHKCDNACIGSIRNGTYDHDVYRDEALNNRFQIKGVELKSGYKDWILWISFAISCFLLCVVLLGFIMWACQKGNIRCNICI

SEQ ID NO: 8834 - protein, 566 aa, Artificial Sequence
  derived and/or modified protein sequence (wt) from hemagglutinin__InfluenzaA__AFJ77627
MKTIIALSYILCLVLAQKLPVKDNSTATLCLGHHAVPNGTLVKTITNDHIEVTNATELVQSSSTGRICDSPHQILDGENCTLIDALLGDPHCDGFQNKEWDLFVERSTAYSNCYPYDVPDYASLRSLVASSGTLEFNNESFNWTGVAQNGTSSACKRRSIKSFFSRLNWLHQLKYKYPALNVTMPNNEKFDKLYIWGVHHPSTDSDQISLYAQASGRVTVSTKRSQQTVIPNIGSRPWVRGVSSRISIYWTIVKPGDILLINSTGNLIAPRGYFKIRSGKSSIMRSNASIGKCNSECITPNGSIPNDKPFQNVNRITYGACPRYVKQNTLKLATGMRNVPEKQTRGIFGAIAGFIENGWEGMVDGWYGFRHQNSEGTGQAADLKSTQAAINQINGKLNRLIEKTNEKFHQIEKEFSEVEGRIQDLEKYVEDTKIDLWSYNAELLVALENQHTIDLTDSEMNKLFERTRKQLRENAEDMGNGCFKIYHKCDNACIGSIRNGTYDHDVYRDEALNNRFQIKGVELKSGYKDWILWISFAISCFLLCVVLLGFIMWACQKGNIRCNICI

SEQ ID NO: 8835 - protein, 566 aa, Artificial Sequence
  derived and/or modified protein sequence (wt) from hemagglutinin__InfluenzaA__AFJ77638
MKTIIALSYILCLVFAQKLPGNDNSTATLCLGHHAVPNGTLVKTITNDQIEVTNATELVQSSSTGRICDSPHQILDGENCTLIDALLGDPHCDGFQNKEWDLFVERSKAYSNCYPYDVPDYASLRSLVASSGTLEFNNESFNWTGVAQNGTSSACKRRSNKSFFSRLNWLHQLKYKYPALNVTMPNNEKFDKLYIWGVHHPSTDSDQISLYAQASGRVTVSTKRSQQTVIPNIGSRPWVRGVSSRISIYWTIVKPGDILLINSTGNLIAPRGYFKIRSGKSSIMRSDAPIGKCNSECTTPNGSIPNDKPFQNVNRITYGACPRYVKQNTLKLATGMRNVPEKQTRGIFGAIAGFIENGWEGMVDGWYGFRHQNSEGTGQAADLKSTQAAINQINGKLNRLIGKTNEKFHQIEKEFSEVEGRIQDLEKYVEDTKIDLWSYNAELLVALENQHTIDLTDSEMNKLFERTKKQLRENAEDMGNGCFKIYHKCDNACIGSIRNGTYDHDVYRDEALNNRFQIKGVELKSGYKDWILWISFAISCFLLCVVLLGFIMWACQKGNIRCNICI

SEQ ID NO: 8836 - protein, 566 aa, Artificial Sequence
  derived and/or modified protein sequence (wt) from hemagglutinin__InfluenzaA__AFJ77649
MKTIIALSYILCLVFAQKLPGNDNSTATLCLGHHAVPNGTLVKTITNDQIEVTNATELVQSSSTGRICDSPHQILDGENCTLIDALLGDPHCDGFQNKEWDLFVERSKAYSNCYPYDVPDYASLRSLVASSGTLEFNNESFNWTGVAQNGTSSACKRRSNKSFFSRLNWLHQLKYKYPALNVTMPNNEKFDKLYIWGVHHPSTDSDQISLYAQASGRVTVSTKRSQQTVIPNIGSRPWVRGVSSRISIYWTIVKPGDILLINNTGNLIAPRGYFKIRNGKSSIMRSDAPIGKCNSECITPNGSIPNDKPFQNVNRITYGACPRYVKQNTLKLATGMRNVPEKQTRGIFGAIAGFIENGWEGMVDGWYGFRHQNSEGTGQAADLKSTQAAINQINGKLNRLIGKTNEKFHQIEKEFSEVEGRIQDLEKYVEDTKIDLWSYNAELLVALENQHTIDLTDSEMNKLFERTKKQLRENAEDMGNGCFKIYHKCDNACIGSIRNGTYDHDVYRDEALNNRFKIKGVELKSGYKDWILWISFAISCFLLCVVLLGFIMWACQKGNIRCNICI

SEQ ID NO: 8837 - protein, 566 aa, Artificial Sequence; identical to SEQ ID NO: 203
  derived and/or modified protein sequence (wt) from hemagglutinin__InfluenzaA__AFJ77660

SEQ ID NO: 8838 - protein, 566 aa, Artificial Sequence; identical to SEQ ID NO: 203
  derived and/or modified protein sequence (wt) from hemagglutinin__InfluenzaA__AFJ77671

SEQ ID NO: 8839 - protein, 566 aa, Artificial Sequence; identical to SEQ ID NO: 203
  derived and/or modified protein sequence (wt) from hemagglutinin__InfluenzaA__AFJ77682

SEQ ID NO: 8840 - protein, 566 aa, Artificial Sequence
  derived and/or modified protein sequence (wt) from hemagglutinin__InfluenzaA__AFJ77693
MKTIIALSYILCLVFAQKLPVNDNSTATLCLGHHTVPNGTLVKTITNDNIEVTNATELVQSSSTGRICDSPHQILDGENCTLIDALLGDPHCDGFQNKEWDLFVERSTAYSNCYPYDVPDYASLRSLVASSGTLEFNNESFNWTGVDQNGTSSACKRRSNKSFFSRLNWLHQLKYKYPALNVTMPNNEKFDKLYIWGVHHPSTDSDQISLYAQASGRVTVSTKRSQQTVIPNIGSRPWVRGVSSRISIYWTIVKPGDILLINSTGNLIAPRGYFKIRSGKSSIMRSNAPIGKCNSECITPNGSIPNDKPFQNVNRITYGACPRYVKQNTLKLATGMRNVPEKQTRGIFGAIAGFIENGWEGMVDGWYGFRHQNFEGTGQAADLKSTQAAINQINGKLNRLIEKTNEKFHQIEKEFSEVEGRIQDLEKYVEDTKIDLWSYNAELLVALENQHTIDLTDSEMNKLFERTRKQLRENAEDMGNGCFKIYHKCDNACIGSIRNGTYDHDVYRDEALNNRFQIKGVELKSGYKDWILWISFAISCFLLCVVLLGFIMWACQKGNIRCNICI

SEQ ID NO: 8841 - protein, 566 aa, Artificial Sequence; identical to SEQ ID NO: 203
  derived and/or modified protein sequence (wt) from hemagglutinin__InfluenzaA__AFJ77704

SEQ ID NO: 8842 - protein, 566 aa, Artificial Sequence; identical to SEQ ID NO: 8681
  derived and/or modified protein sequence (wt) from hemagglutinin__InfluenzaA__AFJ77715

SEQ ID NO: 8843 - protein, 566 aa, Artificial Sequence; identical to SEQ ID NO: 8681
  derived and/or modified protein sequence (wt) from hemagglutinin__InfluenzaA__AFJ77726

SEQ ID NO: 8844 - protein, 566 aa, Artificial Sequence; identical to SEQ ID NO: 8777
  derived and/or modified protein sequence (wt) from hemagglutinin__InfluenzaA__AFJ77737

SEQ ID NO: 8845 - protein, 566 aa, Artificial Sequence; identical to SEQ ID NO: 32
  derived and/or modified protein sequence (wt) from hemagglutinin__InfluenzaA__AFJ77748

SEQ ID NO: 8846 - protein, 566 aa, Artificial Sequence; identical to SEQ ID NO: 32
  derived and/or modified protein sequence (wt) from hemagglutinin__InfluenzaA__AFJ77759

SEQ ID NO: 8847 - protein, 566 aa, Artificial Sequence
  derived and/or modified protein sequence (wt) from hemagglutinin__InfluenzaA__AFJ77781
MKTIIALSYILCLVFAQKLPGNDNSTATLCLGHHAVPNGTIVKTITNDQIEVTNATELVQSSSTGGICDSPHQILDGENCTLIDALLGDPQCDGFQNKKWDLFVERSKAYSNCYPYDVPDYASLRSLVASSGTLEFNSESFDWTGVTQNGTSSACKRRSNKSFFSRLNWLTHLKYKYPALNVTMPNNEKFDKLYIWGVHHPGTDSDQISLYAQASGRITVSTKRSQQTVIPNIGSRPRVRDVSSRISIYWTIVKPGDILLINSTGNLIAPRGYFKIRSGKSSIMRSDAPIGKCNSECITPNGSIPNDKPFQNVNRITYGACPRYVKQNTLKLATGMRNVPEKQTRGIFGAIAGFIENGWEGMVDGWYGFRHQNSEGTGQAADLKSTQAAINQINGKLNRLIGKTNEKFHQIEKEFSEVEGRIQDLEKYVEDTKIDLWSYNAELLVALENQHTIDLTDSEMNKLFERTKKQLRENAEDMGNGCFKIYHKCDNACIGSIRNGTYDHDVYRDEALNNRFQIKGVELKSGYKDWILWISFAISCFLLCVALLGFIMWACQKGNIRCNICI

SEQ ID NO: 8848 - protein, 566 aa, Artificial Sequence; identical to SEQ ID NO: 1795
  derived and/or modified protein sequence (wt) from hemagglutinin__InfluenzaA__AFJ77792

SEQ ID NO: 8849 - protein, 566 aa, Artificial Sequence; identical to SEQ ID NO: 1795
  derived and/or modified protein sequence (wt) from hemagglutinin__InfluenzaA__AFJ77803

SEQ ID NO: 8850 - protein, 566 aa, Artificial Sequence; identical to SEQ ID NO: 1795
  derived and/or modified protein sequence (wt) from hemagglutinin__InfluenzaA__AFJ77814

SEQ ID NO: 8851 - protein, 566 aa, Artificial Sequence; identical to SEQ ID NO: 1795
  derived and/or modified protein sequence (wt) from hemagglutinin__InfluenzaA__AFJ77825

SEQ ID NO: 8852 - protein, 566 aa, Artificial Sequence; identical to SEQ ID NO: 1795
  derived and/or modified protein sequence (wt) from hemagglutinin__InfluenzaA__AFJ77836

SEQ ID NO: 8853 - protein, 566 aa, Artificial Sequence; identical to SEQ ID NO: 1795
  derived and/or modified protein sequence (wt) from hemagglutinin__InfluenzaA__AFJ77847

SEQ ID NO: 8854 - protein, 566 aa, Artificial Sequence
  derived and/or modified protein sequence (wt) from hemagglutinin__InfluenzaA__AFJ77858
MKTIIALSYILCLVFAQKLPGNDNSTATLCLGHHAVPNGTIVKTITNDQIEVTNATELVQSSSTGGICDSPHQILDGENCTLIDALLGDPQCDGFQNKKWDLFVERSKAYSNCYPYDVPDYASLRSLVASSGTLEFNNESFNWTGVTQNGTSSACKRRSNNSFFSRLNWLTHLKFKYPALNVTMPNNEKFDKLYIWGVHHPGTDNDQISLYAQASGRITVSTQRSQQTVIPNIGSRPRVRDIPSRISIYWTIVKPGDMLLINSTGNLIAPRGYFKIRSGKSSIMRSDAPIGKCNSECITPNGSIPNDKPFQNVNRITYGACPRYVKQNTLKLATGMRNVPEKQTRGIFGAIAGFIENGWEGMVDGWYGFRHQNSEGTGQAADLKSTQAAINQINGKLNKLIGKTNEKFHQIEKEFSEVEGRIQDLEKYVEDTKIDLWSYNAELLVALENQHTIDLTDSEMNKLFERTKKQLRENAEDMGNGCFKIYHKCDNACIGSIRNGTYDHDVYRDEALNNRFQIKGVELKSGYKDWILWISFAISCFLFCVALLGFIMWACQKGNIRCNICI

SEQ ID NO: 8855 - protein, 566 aa, Artificial Sequence
  derived and/or modified protein sequence (wt) from hemagglutinin__InfluenzaA__AFJ77869
MKTIIAFSYILCLVFAQKLPGNDNSTATLCLGHHAVPNGTIVKTITNDQIEVTNATELVQSSSTGGICDSPHQILDGENCTLIDALLGDPQCDGFQNKKWDLFVERSKAYSNCYPYDVPDYASLRSLVASSGTLEFNNESFNWTGVTQNGTSSACKRRSNNSFFSRLNWLTHLKFKYPALNVTMPNNEKFDKLYIWGVHHPGTDNDQISLYAQASGRITVSTKRSQQTVIPNIGSRPRVRDIPSRISIYWTIVKPGDILLINSTGNLIAPRGYFKIRSGKSSIMRSDAPIGKCNSECITPNGSIPNDKPFQNVNRITYGACPRYVKQNTLKLATGMRNVPEKQTRGIFGAIAGFIENGWEGMVDGWYGFRHQNSEGTGQAADLKSTQAAINQINGKLNRLIGKTNEKFHQIEKEFSEVEGRIQDLEKYVEDTKIDLWSYNAELLVALENQHTIDLTDSEMNKLFERTKKQLRENAEDMGNGCFKIYHKCDNACIGSIRNGTYDHDVYRDEALNNRFQIKGVELKSGYKDWILWISFAISCFLLCVALLGFIMWACQKGNIRCNICI

SEQ ID NO: 8856 - protein, 566 aa, Artificial Sequence
  derived and/or modified protein sequence (wt) from hemagglutinin__InfluenzaA__AFJ77880
MKTIIALSYILCLVFAQKLPGNDNSTATLCLGHHAVPNGTIVKTITNDQIEVTNATELVQSSSTGGICNSPHQILDGENCTLIDALLGDPQCDGFQNKKWDLFVERSKAYSNCYPYDVPDYASLRSLVASSGTLEFNNESFNWTGVTQNGTSSACKRRSNKSFFSRLNWLTHLKFKYPALNVTMPNNEKFDKLYIWGVHHPGTDNDQISLYAQASGRITVSTKRSQQTVIPNIGSRPRVRDVPSRISIYWTIVKPGDILLINSTGNLIAPRGYFKIRSGKSSIMRSDAPIGKCNSECITPNGSIPNDKPFQNVNRITYGACPRYVKQNTLKLATGMRNVPEKQTRGIFGAIAGFIENGWEGMVDGWYGFRHQNSEGTGQAADLKSTQAAINQINGKLNRLIGKTNEKFHQIEKEFSEVEGRIQDLEKYVEDTKIDLWSYNAELLVALENQHTIDLTDSEMNKLFERTKKQLRENAEDMGNGCFKIYHKCDNACIGSIRNGTYDHDVYRDEALNNRFQIKGVELKSGYKDWILWISFAISCFLLCVALLGFIMWACQKGNIRCNICI

SEQ ID NO: 8857 - protein, 566 aa, Artificial Sequence
  derived and/or modified protein sequence (wt) from hemagglutinin__InfluenzaA__AFJ77902
MKTIIALSYILCLVFAQKLPGNDNSTATLCLGHHAVPNGTIVKTITNDQIEVTNATELVQSSSTGGICDSPHQILDGENCTLIDALLGDPQCDGFQNKKWDLFVERSKAYSNCYPYDVPDYASLRSLVASSGTLEFNNESFNWTGVTQNGTSSACKRRSNNSFFSRLNWLTHLKFKYPALNVTMPNNEKFDKLYIWGVHHPGTDNDQIGLYAQASGRITVSTKRSQQTVIPNIGSRPRVRDIPSRISIYWTIVKPGDMLLINSTGNLIAPRGYFKIRSGKSSIMRSDAPIGKCNSECITPNGSIPNDKPFQNVNRITYGACPRYVKQNTLKLATGMRNVPEKQTRGIFGAIAGFIENGWEGMVDGWYGFRHQNSEGTGQAADLKSTQAAINQINGKLNRLIGKTNEKFHQIEKEFSEVEGRIQDLEKYVEDTKIDLWSYNAELLVALENQHTIDLTDSEMNKLFERTKKQLRENAEDMGNGCFKIYHKCDNACIGSIRNGTYDHDVYRDEALNNRFQIKGVELKSGYKDWILWISFAISCFLLCVALLGFIMWACQKGNIRCNICI

SEQ ID NO: 8858 - protein, 566 aa, Artificial Sequence
  derived and/or modified protein sequence (wt) from hemagglutinin__InfluenzaA__AFJ77913
MKTIIALSYILCLVFAQKLPGNDNSTATLCLGHHAVPNGTIVKTITNDQIEVTNATELVQSSSTGGICDSPHQILDGENCTLIDALLGDPQCDGFQNKKWDLFVERSKAYSNCYPYDVQDYASLRSLVASSGTLEFNNESFNWTGVTQNGTSSACKRRSNNSFFSRLNWLTHLKFKYPALNVTMPNNEKFDKLYIWGVHHPGTDNDQISLYAQASGRITVSTKRSQQTVIPNIGSRPRVRDIPSRISIYWTIVKPGDMLLINSTGNLIAPRGYFKIRSGKSSIMRSDAPIGKCNSECITPNGSIPNDKPFQNVNRITYGACPRYVKQNTLKLATGMRNVPEKQTRGIFGAIAGFIENGWEGMVDGWYGFRHQNSEGTGQAADLKSTQAAINQINGKLNRLIGKTNEKFHQIEKEFSEVEGRIQDLEKYVEDTKIDLWSYNAELLVALENQHTIDLTDSEMNKLFERTKKQLRENAEDMGNGCFKIYHKCDNACIGSIRNGTYDHDVYRDEALNNRFQIKGVELKSGYKDWILWISFAISCFLLCVALLGFIMWACQKGNIRCNICI

SEQ ID NO: 8859 - protein, 566 aa, Artificial Sequence; identical to SEQ ID NO: 1113
  derived and/or modified protein sequence (wt) from hemagglutinin__InfluenzaA__AFJ77924

SEQ ID NO: 8860 - protein, 566 aa, Artificial Sequence
  derived and/or modified protein sequence (wt) from hemagglutinin__InfluenzaA__AFJ77935
MKTIIALSYILCLVFAQKLPGNDNSTATLCLGHHAVPNGTVVKTITNDQIEVTNATELVQSSSTGGICDSPHQILDGENCTLMDALLGDPQCDGFQNKKWDLFVERSKAYSNCYPYDVPDHASLRSLVASSGTLEFNNESFNWTGVTQNGTSSACKRRSNNSFFSRLNWLTHLKFKYPALNVTMPNNETFDKLYIWGVHHPGTDNDQISLYAQASGRITVSTKRSQQTVIPNIGSRPRVRDIPSRISIYWTIVKPGDILLINSTGNLIAPRGYFKIRSGKSSIMRSDAPIGKCNSECITPNGSIPNDKPFQNVNRITYGACPRYVKQNTLKLATGMRNVPEKQTRGIFGAIAGFIENGWEGMVDGWYGFRHQNSEGTGQAADLKSTQAAINQINGKLNRLIGKTNEKFHQIEKEFSEVEGRIQDLEKYVEDTKIDLWSYNAELLVALENQHTIDLTDSEMNKLFERTKKQLRENAEDMGNGCFKIYHKCDNACIGSIRNGTYDHDVYRDEALNNRFQIKGVELKSGYKDWILWISFAISCFLLCVALLGFIMWACQKGNIRCNICI

SEQ ID NO: 8861 - protein, 566 aa, Artificial Sequence
  derived and/or modified protein sequence (wt) from hemagglutinin__InfluenzaA__AFJ77946
MKTIIALSYILCLVFAQKLPGNDNSTATLCLGHHAVPNGTIVKTITNDQIEVTNATELVQSSSTGGICDSPHQILDGENCTLIDALLGDPQCDGFQNKKWDLFVERSKAYSNCYPYDVPDYASLRSLVASSGTLEFNNESFNWTGVTQNGTSSACKRRSNNSFFSRLNWLTHLKFKYPALNVTMPNNEKFDKLYIWGVHHPGTDNDQISLYAQASGRITVSTKRSQQTVIPNIGSRPRVRDIPSRISIYWTIVKPGDMLLINSTGNLIAPRGYFKIRSGKSSIMRSDAPIGKCNSECITPNGSIPNDKPFQNVNRITYGACPRYIKQNTLKLATGMRNVPEKQTRGIFGAIAGFIENGWEGMVDGWYGFRHQNSEGTGQAADLKSTQAAINQINGKLNRLIGKTNEKFHQIEKEFSEVEGRIQDLEKYVEDTKIDLWSYNAELLVALENQHTIDLTDSEMNKLFERTKKQLRENAEDMGNGCFKIYHKCDNACIGSIRNGTYDHDVYRDEALNNRFQIKGVELKSGYKDWIIWISFAISCFLLCVALLGFIMWACQKGNIRCNICI

SEQ ID NO: 8862 - protein, 566 aa, Artificial Sequence; identical to SEQ ID NO: 1753
  derived and/or modified protein sequence (wt) from hemagglutinin__InfluenzaA__AFJ77957

SEQ ID NO: 8863 - protein, 566 aa, Artificial Sequence; identical to SEQ ID NO: 630
  derived and/or modified protein sequence (wt) from hemagglutinin__InfluenzaA__AFJ77968

SEQ ID NO: 8864 - protein, 566 aa, Artificial Sequence
  derived and/or modified protein sequence (wt) from hemagglutinin__InfluenzaA__AFJ77979
MKTIIALSYILCLVFAQKLPGNDNSTATLCLGHHAVPNGTIVKTITNDQIEVTNATELVQSSSTGGICDSPHQILDGENCTLIDALLGDPQCDGFQNKKWDLFVERSKAYSNCYPYDVPDYASLRSLVASSGTLEFNNESFNWTGVTQNGTSSACKRRSNNSFFSRLNWLTHLKFKYPALNVTMPNNEKFDKLYIWGVHHPGTDNDQIFLYAQASGRITVSTKRSQQTVIPNIGSRPRVRNIPSRISIYWTIVKPGDILLINSTGNLIAPRGYFKIRSGKSSIMRSDAPIGKCNSECITPNGSIPNDKPFQNVNRITYGACPRYVKQNTLKLATGMRNVPEKQTRGIFGAIAGFIENGWEGMVDGWYGFRHQNSEGIGQAADLKSTQAAINQINGKLNRLIGKTNEKFHQIEKEFSEVEGRIQDLEKYVEDTKIDLWSYNAELLVALENQHTIDLTDSEMNKLFERTKKQLRENAEDMGNGCFKIYHKCDNACIGSIRNGTYDHDVYRDEALNNRFQIKGVELRSGYKDWILWISFAISCFLLCVALLGFIMWACQKGNIRCNICI

SEQ ID NO: 8865 - protein, 566 aa, Artificial Sequence
  derived and/or modified protein sequence (wt) from hemagglutinin__InfluenzaA__AFJ77990
MKTIIALSYILCLVFAQKLPGNDNSTATLCLGHHAVPNGTIVKTITNDQIEVTNATELVQSSSTGGICDSPHQILDGENCTLIDALLGDPQCDGFQNKKWDLFVERSKAYSNCYPYDVPDYASLRSLVASSGTLEFNNESFNWTGVTQNGTSSACKRRSNNSFFSRLNWLTHLKFKYPALNVTMPNNEKFDKLYIWGVHHPGTDNDQIFLYAQASGRITVSTKRSQQTVIPNIGSRPRVRNIPSRISIYWTIVKPGDILLINSTGNLIAPRGYFKIRSGKSSIMRSDAPIGKCNSECITPNGSIPNDKPFQNVNRITYGACPRYVKQNTLKLATGMRNVPEKQTRGIFGAIAGFIENGWEGMVDGWYGFRHQNSEGIGQAADLKSTQAAINQINGKLNRLIGKTNEKFHQIEKEFSEVEGRIQDLEKYVEDTKIDLWSYNAELLVALENQHTIDLTDSEMNKLFERTKKQLRENAEDMGNGCFKIYHKCDNACIGSIRNGTYDHDEYRDEALNNRFQIKGVELKSGYKDWILWISFAISCFLLCVTLLGFIMWACQKGNIRCNICI

SEQ ID NO: 8866 - protein, 566 aa, Artificial Sequence
  derived and/or modified protein sequence (wt) from hemagglutinin__InfluenzaA__AFJ78001
MKTIIALSYILCLVFAQKLPGNDNSTATLCLGHHAVPNGTIVKTITNDQIEVTNATELVQSSSTGGICDSPHQILDGKNCTLIDALLGDPQCDDFQNKKWDLFVERSKAYSNCYPYDVPDYASLRSLVASSGTLEFNNESFNWTGVTQNGTSSACKRRSNNSFFSRLNWLTHLKFKYPALNVTMPNNEKFDKLYIWGVHHPGTDNDQIFLYAQASGRITVSTKRSQQTVIPNIGSRPRVRNIPSRISIYWTIVKPGDILLINSTGNLIAPRGYFKIRSGKSSIMRSDAPIGKCNSECITPNGSIPNDKPFQNVNRITYGACPRYVKQNTLKLATGMRNVPEKQTRGIFGAIAGFIENGWEGMVDGWYGFRHQNSEGIGQAADLKSTQAAINQINGKLNRLIGKTNEKFHQIEKEFSEVEGRIQDLEKYVEDTKIDLWSYNAELLVALENQHTIDLTDSEMNKLFERTKKQLRENAEDMGNGCFKIYHKCDNACIGSIRNGTYDHDVYRDEALNNRFQIKGVELKSGYKDWILWISFAISCFLLCVTLLGFIMWACQKGNIRCNICI

SEQ ID NO: 8867 - protein, 566 aa, Artificial Sequence
  derived and/or modified protein sequence (wt) from hemagglutinin__InfluenzaA__AFJ78012
MKTIIALSYILCLVFAQKLPGNDNSTATLCLGHHAVPNGTIVKTITNDQIEVTNATELVQSSSTGGICDSPHQILDGENCTLIDALLGDPQCDGFQNKKWDLFVERSKAHSNCYPYDVPDYASLRSLVASSGTLEFNNESFNWTGVTQNGTSSACKRRSNNSFFSRLNWLTHLKFKYPALNVTMPNNEKFDKLYIWGVHHPGTDNDQIFLYAQASGRITVSTKRSQQTVIPNIGSRPRVRNIPSRISIYWTIVKPGDILLINSTGNLIAPRGYFKIRSGKSSIMRSDAPIGKCNSECITPNGSIPNDKPFQNVNRITYGACPRYVKQNTLKLATGMRNVPEKQTRGIFGAIAGFIENGWEGMVDGWYGFRHQNSEGIGQAADLKSTQAAIDQINGKLNRLIGKTNEKFHQIEKEFSEVEGRIQDLEKYVEDTKIDLWSYNAELLVALENQHTIDLTDSEMNKLFERTKKQLRENAEDMGNGCFKIYHKCDNACIGSIRNGTYDHDVYRDEALNNRFQIKGVELKSGYKDWILWISFAISCFLLCVALLGFIMWACQKGNIRCNICI

SEQ ID NO: 8868 - protein, 566 aa, Artificial Sequence
  derived and/or modified protein sequence (wt) from hemagglutinin__InfluenzaA__AFJ78023
MKTIIALSYILCLVFAQKLPGNDNSTATLCLGHHAVPNGTIVKTITNDQIEVTNATELVQSSSTGGICDSPHQILDGENCTLIDALLGDPQCDGFQNKKWDLFVERSKAYSNCYPYDVPDYASLRSLVASSGTLEFNNESFNWTGVTQNGTSSACKRKSNNSFFSRLNWLTHLKFKYPALNVTMPNNEKFDKLYIWGVHHPGTDNDQIFLYAQASGRITVSTKRSQQTVIPNIGSRPRVRNIPSRISIYWTIVKPGDILLINSTGNLIAPRGYFKIRSGKSSIMRSDAPIGKCNSECITPNGSIPNDKPFQNVNRITYGACPRYVKQNTLKLATGMRNVPEKQTRGIFGAIAGFIENGWEGMVDGWYGFRHQNSEGIGQAADLKSTQAAINQINGKLNRLIGKTNEKFHQIEKEFSEVEGRIQDLEKYVEDTKIDLWSYNAELLVALENQHTIDLTDSEMNKLFERTKKQLRENAEDMGNGCFKIYHKCDNACIGSIRNGTYDHDVYRDEALNNRFQIKGVELKSGYKDWILWISFAISCFLLCVALLGFIMWACQKGNIRCNICI

SEQ ID NO: 8869 - protein, 566 aa, Artificial Sequence; identical to SEQ ID NO: 630
  derived and/or modified protein sequence (wt) from hemagglutinin__InfluenzaA__AFJ78034

SEQ ID NO: 8870 - protein, 566 aa, Artificial Sequence
  derived and/or modified protein sequence (wt) from hemagglutinin__InfluenzaA__AFJ78045
MKTIIALSYILCLVFAQKLPGNDNSTATLCLGHHAVPNGTIVKTITNDQIEVTNATELVQSSSTGGICDSPHQILDGENCTLIDALLGDPQCDGFQNKKWDLFVERSRAYSNCYPYDVPDYASLRSLVASSGTLEFNNESFNWTGVTQNGTSSACKRRSNNSFFSRLNWLTHLKFKYPALNVTMPNNEKFDKLYIWGVHHPGTDNDQIFLYAQASGRITVSTKRSQQTVIPNIGSRPRVRNIPSRISIYWTIVKPGDILLINSTGNLIAPRGYFKIRSGKSSIMRSDAPIGKCNSECITPNGSIPNDKPFQNVNRITYGACPRYVKQNTLKLATGMRNVPEKQTRGIFGAIAGFIENGWEGMVDGWYGFRHQNSEGMGQAADLKSTQAAINQINGKLNRLIGKTNEKFHQIEKEFSEVEGRIQDLEKYVEDTKIDLWSYNAELLVALENQHTIDLTDSEMNKLFERTKKQLRENAEDMGNGCFKIYHKCDNACIGSIRNGTYDHDVYRDEALNNRFQIKGVELKSGYKDWILWISFAISCFLLCVALLGFIMWACQKGNIKCNICI

SEQ ID NO: 8871 - protein, 566 aa, Artificial Sequence; identical to SEQ ID NO: 630
  derived and/or modified protein sequence (wt) from hemagglutinin__InfluenzaA__AFJ78056

SEQ ID NO: 8872 - protein, 566 aa, Artificial Sequence
  derived and/or modified protein sequence (wt) from hemagglutinin__InfluenzaA__AFJ78067
MKTIIALSYILCLVFAQKLPGNDNSTATLCLGHHAVPNGTIVKTITNDQIEVTNATELVQSSSTGGICDSPHQILDGENCTLIDALLGDPQCDGFQNKKWDLFVERSKAYSNCYPYDVPDYASLRSLVASSGTLEFNNESFNWTGVTQNGTSSACKRRSNNSFFSRLNWLTHLKFKYPALNVTMPNNEKFDKLYIWGVHHPGTDNDQIFLYAQASGRITVSTKRSQQTVIPNIGSRPRVRNIPSRISIYWTIVKPGDILLINSTGNLIAPRGYFKIRSGRSSIMRSDAPIGKCNSECITPNGSIPNDKPFQNVNRITYGACPRYVKQNTLKLATGMRNVPEKQTRGIFGAIAGFIENGWEGMVDGWYGFRHQNSEGIGQAADLKSTQAAINQINGKLNRLIGKTNEKFHQIEKEFSEVEGRIQDLEKYVEDTKIDLWSYNAELLVALENQHTIDLTDSEMNKLFERTKKQLRENAEDMGNGCFKIYHKCDNACIGSIRNGTYDHDVYRDEALNNRFQIKGVELKSGYKDWILWISFAISCFLLCVALLGFIMWACQKGNIRCNICI

SEQ ID NO: 8873 - protein, 566 aa, Artificial Sequence
  derived and/or modified protein sequence (wt) from hemagglutinin__InfluenzaA__AFJ78078
MKTIIALSYILCLVFAQKLPGNDNSTATLCLGHHAVPNGTIVKTITNDQIEVTNATELVQSSSTGGICDSPHQILDGENCTLIDALLGDPQCDGFQNKKWDLFVERSKAYSNCYPYDVPDYASLRSLVASSGTLEFNNESFNWTGVTQNGTSSACKRRSNNSFFSRLNWLTHLKFKYPALNVTMPNNEKFDKLYIWGVHHPGTDNDQIFLYAQASGRITVSTKRSQQTVIPNIGSRPRVRNIPSRISIYWTIVKPGDILLINSTGNLIAPRGYFKIRSGKSSIMRSDAPIDKCNSECITPNGSIPNDKPFQNVNRITYGACPRYVKQNTLKLATGMRNVPEKQTRGIFGAIAGFIENGWEGMVDGWYGFRHQNSEGIGQAADLKSTQAAIDQINGKLNRLIGKTNEKFHQIEKEFSEVEGRIQDLEKYVEDTKIDLWSYNAELLVALENQHTIDLTDSEMNKLFEKTKKQLRENAEDMGNGCFKIYHKCDNACIGSIRNGTYDHDVYRDEALNNRFQIKGVELKSGYKDWILWISFAISCFLLCVALLGFIMWACQKGNIRCNICI

SEQ ID NO: 8874 - protein, 566 aa, Artificial Sequence; identical to SEQ ID NO: 8797
  derived and/or modified protein sequence (wt) from hemagglutinin__InfluenzaA__AFJ78089

SEQ ID NO: 8875 - protein, 566 aa, Artificial Sequence; identical to SEQ ID NO: 1828
  derived and/or modified protein sequence (wt) from hemagglutinin__InfluenzaA__AFJ78100

SEQ ID NO: 8876 - protein, 566 aa, Artificial Sequence
  derived and/or modified protein sequence (wt) from hemagglutinin__InfluenzaA__AFJ78111
MKTIIALSYILCLVFAQKLPGNDNSTATLCLGHHAVPNGTIVKTITNDQIEVTNATELVQSSSTGGICDSPHQILDGENCTLIDALLGDPQCDGFQNKKWDLFVERSKAYSNCYPYDVPDYASLRSLVASSGTLEFNNESFNWTGVTQNGTSSACKRRSNNSFFSRLNWLTHLKFKYPALNVTMPNNENFDKLYIWGVHHPGTDNDQIFLYAQASGRITVSTKRSQQTVIPNIGSRPRVRNIPSRISIYWTIVKPGDILLINSTGNLIAPRGYFKIRSGKSSIMRSDAPIGKCNSECITPNGSIPNDKPFQNVNRITYGACPRYVKQNTLKLATGMRNVPEKQTRGIFGAIAGFIENGWEGMVDGWYGFRHQNSEGIGQAADLKSTQAAIDQINGKLNRLIGKTNEKFHQIEKEFSEVEGRIQDLEKYVEDTKIDLWSYNAELLVALENQHTIDLTDSEMNKLFEKTKKQLRENAEDMGNGCFKIYHKCDNACIGSIRNGTYDHDVYRDEALNNRFQIKGVELKSGYKDWILWISFAISCFLLCVALLGFIMWACQKGNIRCNICI

SEQ ID NO: 8877 - protein, 566 aa, Artificial Sequence
  derived and/or modified protein sequence (wt) from hemagglutinin__InfluenzaA__AFJ78122
MKTIIALSYILCLIFAQKLPGNDNSTATLCLGHHAVPNGTIVKTITNDQIEVTNATELVQSSSTGGICDSPHQILDGENCTLIDALLGDPQCDGFQNKKWDLFVERSKAYSNCYPYDVPDYASLRSLVASSGTLEFNNESFNWTGVTQNGTSSACKRRSNNSFFSRLNWLTHLKFKYPALNVTMPNNEKFDKLYIWGVHHPGTDNDQIFLYAQASGRITVSTKRSQQTVIPNIGSRPRVRNIPSRISIYWTIVKPGDILLINSTGNLIAPRGYFKIRSGRSSIMRSDAPIDKCNSECITPNGSIPNDKPFQNVNRITYGACPRYVKQNTLKLATGMRNVPEKQTRGIFGAIAGFIENGWEGMVDGWYGFRHQNSEGIGQAADLKSTQAAIDQINGKLNRLIRKTNEKFHQIEKEFSEVEGRIQDLEKYVEDTKIDLWSYNAELLVALENQHTIDLTDSEMNKLFEKTKKQLRENAEDMGNGCFKIYHKCDNACIGSIRNGTYDHDVYRDEALNNRFQIKGVELKSGYKDWILWISFAISCFLLCVALLGFIMWACQKGNIRCNICI

SEQ ID NO: 8878 - protein, 566 aa, Artificial Sequence
  derived and/or modified protein sequence (wt) from hemagglutinin__InfluenzaA__AFJ78144
MKTIIALSYILCLVFAQKLPGNDNSTATLCLGHHAVPNGTIVKTITNDQIEVTNATELVQSSSTGEICDSPHQILDGENCTLIDALLGDPQCDGFQNKKWDLFVERSKAYSNCYPYDVPDYASLRSLVASSGTLEFNNESFNWTGVTQNGTSSSCIRRSNNSFFSRLNWLTHLKFKYPALNVTMPNNEKFDKLYIWGVHHPGTDNDQIFLYAQASGRITVSTKRSQQTVIPNIGSRPRVRNIPSRISIYWTIVKPGDILLINSTGNLIAPRGYFKIRSGKSSIMRSDAPIGKCNSECITPNGSIPNDKPFQNVNRITYGACPRYVKQNTLKLATGMRNVPEKQTRGIFGAIAGFIENGWEGMVDGWYGFRHQNSEGIGQAADLKSTQAAIDQINGKLNRLIGKTNEKFHQIEKEFSEVEGRIQDLEKYVEDTKVDLWSYNAELLVALENQHTIDLTDSEMNKLFEKTKKQLRENAEDMGNGCFKIYHKCDNACIGSIRNGTYDHDVYRDEALNNRFQIKGVELKSGYKDWILWISFAISCFLLCVALLGFIMWACQKGNIRCNICI

SEQ ID NO: 8879 - protein, 566 aa, Artificial Sequence; identical to SEQ ID NO: 8878
  derived and/or modified protein sequence (wt) from hemagglutinin__InfluenzaA__AFJ78155

SEQ ID NO: 8880 - protein, 566 aa, Artificial Sequence
  derived and/or modified protein sequence (wt) from hemagglutinin__InfluenzaA__AFJ78166
MKTIIALSYILCLVFAQKLPGNDNSTATLCLGHHAVPNGTIVKTITNDQIEVTNATELVQSSSTGEICDSPHQILDGENCTLIDALLGDPQCDGFQNKKWDLFVERSKAYSNCYPYDVPDYASLRSLVASSGTLEFNNESFNWTGVTQNGTSSACIRRSNNSFFSRLNWLTHLKFKYPALNVTMPNNEEFDKLYIWGVHHPGTDNDQIFLYAQASGRITVSTKRSQQTVIPNIGSRPRVRNIPSRISIYWTIVKPGDILLINSTGNLIAPRGYFKIRSGKSSIMRSDAPIGKCNSECITPNGSIPNDKPFQNVNRITYGACPRYVKQNTLKLATGMRNVPEKQTRGIFGAIAGFIENGWEGMVDGWYGFRHQNSEGIGQAADLKSTQAAIDQINGKLNRLIGKTNEKFHQIEKEFSEVEGRIQDLEKYVEDTKIDLWSYNAELLVALENQHTIDLTDSEMNKLFEKTKRQLRENAEDMGNGCFKIYHKCDNACIGSIRNGTYDHDVYRDEALNNRFQIKGVELKSGYKDWILWISFAISCFLLCVALLGFIMWACQKGNIRCNICI

SEQ ID NO: 8881 - protein, 566 aa, Artificial Sequence; identical to SEQ ID NO: 1729
  derived and/or modified protein sequence (wt) from hemagglutinin__InfluenzaA__AFJ78177

SEQ ID NO: 8882 - protein, 566 aa, Artificial Sequence
  derived and/or modified protein sequence (wt) from hemagglutinin__InfluenzaA__AFJ78188
MKTIIALSYILCLVFAQKLPGNDNSTATLCLGHHAVPNGTIVKTITNDQIEVTNATELVQSSSTGEICDSPHQILDGENCTLIDALLGDPQCDGFQNKKWDLFVERSKAYSNCYPYDVPDYASLRSLVASSGTLEFNNESFNWTGVTQNGTSSACIRRSNNSFFSRLNWLTHLKFKYPALNVTMPNNEKFDKLYIWGVHHPGTDNDQIFLYAQASGRITVSTKRSQQTVIPNIGSRPRIRNIPSRISIYWTIVKPGDILLINSTGNLIAPRGYFKIRSGKSSIMRSDAPIGKCNSECITPNGSIPNDKPFQNVNRITYGACPRYVKQNTLKLATGMRNVPEKQTRGIFGAIAGFIENGWEGMVDGWYGFRHQNSEGTGQAADLKSTQAAIDQINGKLNRLIGKTNEKFHQIEKEFSEVEGRIQDLEKYVEDTKIDLWSYNAELLVALENQHTIDLTDSEMNKLFEKTKKQLRENAEDMGNGCFKIYHKCDNACIGSIRNGTYDHDVYRDEALNNRFQIKGVELKSGYKDWILWISFAISCFLLCVALLGFIMWACQKGNIRCNICI

SEQ ID NO: 8883 - protein, 566 aa, Artificial Sequence
  derived and/or modified protein sequence (wt) from hemagglutinin__InfluenzaA__AFJ78210
MKTIIALSYILCLVFAQKLPGNDNSTATLCLGHHAVPNGTIVKTITNDQIEVTNATELVQSSSTGEICDSPHQILDGENCTLIDALLGDPQCDGFQNKKWDLFVERSKAYSNCYPYDVPDYASLRSLVASSGTLEFNNESFNWTGVTQNGTSSACIRRSNNSFFSRLNWLTHLKFKYPALNVTMPNNEKFDKLYIWGVHHPGTDNDQIFLYAQASGRITVSTKRSQQTVIPNIGSRPRVRNIPSRISIYWTIVKPGDILLINSTGNLIAPRGYFKIRSGKSSIMRSDAPIGKCNSECITPNGSIPNDKPFQNVNRITYGACPRYVKQNTLKLATGMRNVPEKQTRGIFGAIAGFIENGWEGMVDGWYGFRHQNSEGTGQAADLKSTQAAIDQINGKLNRLIGKTNEKFHQIEKEFSEVEGRIQDLEKYVEDTKIDLWSYNAELLVALENQHTIDLTDSEMNKLFEKTKKQLRENAEDMGNGCFKIYHKCDNACIGSIRNGTYDHDVYRDEALNNRFQIKGIELKSGYKDWILWISFAISCFLLCVALLGFIMWACQKGNIRCNICI

SEQ ID NO: 8884 - protein, 566 aa, Artificial Sequence; identical to SEQ ID NO: 8808
  derived and/or modified protein sequence (wt) from hemagglutinin__InfluenzaA__AFJ78221

SEQ ID NO: 8885 - protein, 566 aa, Artificial Sequence
  derived and/or modified protein sequence (wt) from hemagglutinin__InfluenzaA__AFJ78232
MKTIIALSYILCLVFAQKLPGNDNSTATLCLGHHAVPNGTIVKTITNDQIEVTNATELVQSSSTGKICDSPHQILDGENCTLIDALLGDPQCDGFQNKKWDLFVERSKAYSNCYPYDVPDYASLRSLVASSGTLEFNNESFNWTGVTQNGTSSACIRRSNNSFFSRLNWLTHLKFKYPALNVTMPNNEEFDKLYIWGVHHPGTDNDQIFLYAQASGRITVSTKRSQQTVIPNIGSRPRVRNIPSRISIYWTIVKPGDILLINSTGNLIAPRGYFKIRSGKSSIMRSDAPIGKCNSECITPNGSIPNDKPFQNVNRITYGACPRYVKQNTLKLATGMRNVPEKQTRGIFGAIAGFIENGWEGMVDGWYGFRHQNSEGTGQAADLKSTQAAIDQINGKLNRLIGKTNEKFHQIENEFSEVEGRIQDLEKYVEDTKIDLWSYNAELLVALENQHTIDLTDSEMNKLFEKTKKQLRENAEDMGNGCFKIYHKCDNACIGSIRNGTYDHDVYRDEALNNRFQIKGVELKSGYKDWILWISFAISCFLLCVALLGFIMWACQKGNIRCNICI

SEQ ID NO: 8886 - protein, 566 aa, Artificial Sequence
  derived and/or modified protein sequence (wt) from hemagglutinin__InfluenzaA__AFJ78243
MKTIIALSYILCLVFAQKLPGNDNSTATLCLGHHAVPNGTIVKTITNDQIEVTNATELVQSSSTGEICDSPHQILDGENCTLIDALLGDPQCDGFQNKKWDLFVERSKAYSNCYPYDVPDYASLRSLVASSGTLEFNNESFNWTGVTQNGTSSACIRRSNNSFFSRLNWLTHLKFKYPALNVTMPNNEEFDKLYIWGVHHPGTDNDQIFLYAKASGRITVSTKRSQQTVIPNIGSRPRVRNIPSRISIYWTIVKPGDILLINSTGNLIAPRGYFKIRSGKSSIMRSDAPVGKCNSECITPNGSIPNDKPFQNVNRITYGACPRYVKQNTLKLATGMRNVPEKQTRGIFGAIAGFIENGWEGMVDGWYGFRHKNSEGTGQAADLKSTQAAIDQINGKLNRLIGKTNEKFHQIEKEFSEVEGRIQDLEKYVEDTKIDLWSYNAELLVALENQHTIDLTDSEMNKLFEKTKKQLRENAEDMGNGCFKIYHKCDNACIGSIRNGTYDHDVYRDEALNNRFQIKGVELKSGYKDWILWISFAISCFLLCVALLGFIMWACQKGNIRCNICI

SEQ ID NO: 8887 - protein, 566 aa, Artificial Sequence
  derived and/or modified protein sequence (wt) from hemagglutinin__InfluenzaA__AFJ78254
MKTIIALSYILCLVFAQKLPGNDNSTATLCLGHHAVPNGTIVKTITNDQIEVTNATELVQSSSTGEICDSPHQILDGENCTLIDALLGDPQCDGFQNKKWDLFVERSKAYSNCYPYDVPDYASLRSLVASSGTLEFNNESFNWTGVTQNGTSSACIRRSNNSFFSRLNWLTHLKFKYPALNVTMPNNEEFDKLYIWGVHHPGTDNDQIFLYAQASGRITVSTKRSQQTVIPNIGSRPRVRNIPSRISIYWTIVKPGDILLINSTGNLIAPRGYFKIRSGKSSIMRSDAPIGKCNSECITPNGSIPNDKPFQNVNRITYGACPRYVKQNTLKLATGMRNVPEKQTRGIFGAIAGFIENGWEGMVDGWYGFRHQNSEGIGQAADLKSTQAAIDQINGKLNRLIGKTNEKFHQIEKEFSEVEGRIQDLEKYVEDTKVDLWSYNAELLVALENQHTIDLTDSEMNKLFEKTKKQLRENAEDMGNGCFKIYHKCDNACIGSIRNGTYDHDVYRDEALNNRFQIKGVELKSGYKDWILWISFAISCFLLCVALLGFIMWACQKGNIRCNICI

SEQ ID NO: 8888 - protein, 566 aa, Artificial Sequence; identical to SEQ ID NO: 8887
  derived and/or modified protein sequence (wt) from hemagglutinin__InfluenzaA__AFJ78265

SEQ ID NO: 8889 - protein, 566 aa, Artificial Sequence
  derived and/or modified protein sequence (wt) from hemagglutinin__InfluenzaA__AFJ78276
MKTIIALSYILCLVFAQKLPGNDNSTATLCLGHHAVPNGTIVKTITNDQIEVTNATELVQSSSTGEICDSPHQILDGENCTLIDALLGDPQCDGFQNKKWDLFVERSKAYSNCYPYDVPDYASLRSLVASSGTLEFNNESFNWTGVTQNGTSSACIRRSNNSFFSRLNWLTHLKFKYPALNVTMPNNEKFDKLYIWGVHHPGTDNDQIFLYAQASGRITVSTKRSQQTVIPNIGSRPRVRNIPSRISIYWTIVKPGDILLINSTGNLIAPRGYFKIRSGKSSIMRSDAPIGKCNSECITPNGSIPNDKPFQNVNRITYGACPRYVKQNTLKLATGMRNVPEKQTRGIFGAIAGFIENGWEGMVDGWYGFRHQNSEGIGQAADLKSTQAAIDQINGKLNRLIGKTNEKFHQIEKEFSEVEGRIQDLEKYVEDTKVDLWSYNAELLVALENQHTIDLTDSEMNKLFEKTKKQLRENAEDMGNGCFKIYHKCDNACIGSIRNGTYDHDVYRDEALNNRFQIKGVELKSGYKDWILWISFAISCFLLCVALLGFIMWACQKGNIRCNICI

SEQ ID NO: 8890 - protein, 566 aa, Artificial Sequence
  derived and/or modified protein sequence (wt) from hemagglutinin__InfluenzaA__AFJ78287
MKTIIALSYILCLVFAQKLPGNDNSTATLCLGHHAVPNGTIVKTITNDQIEVTNATELVQSSSTGEICDSPHQILDGKNCTLMDALLGDPQCDGFQNKKWDLFVERSKAYSNCYPYDVPDYASLRSLVASSGTLEFNNESFNWTGVTQNGTSSACIRRSKNSFFSRLNWLTHLNFKYPALNVTMPNNEQFDKLYIWGVHHPGTDKDQIFPYAQASGRITVSTKRSQQTVIPNIGSRPRVRNIPSRISIYWTIVKPGDILLINSTGNLIAPRGYFKIRSGKSSIMRSDAPIGKCNSECITPNGSIPNDKPFQNVNRITYGACPRYVKQNTLKLATGMRNVPEKQTRGIFGAIAGFIENGWEGMVDGWYGFRHQNSEGRGQAADLKSTQAAIDQINGKLNRLIGKTNEKFHQIEKEFSEVEGRIQDLEKYVEDTKIDLWSYNAELLVALENQHTIDLTDSEMNKLFEKTKKQLRENAEDMGNGCFKIYHKCDNACIGSIRNGTYDHDVYRDEALNNRFQIKGVELKSGYKDWILWISFAISCFLLCVALLGFIMWACQKGNIRCNICI

SEQ ID NO: 8891 - protein, 565 aa, Artificial Sequence
  derived and/or modified protein sequence (wt) from hemagglutinin__InfluenzaA__AFJ78309
MKAKLLVLLCTFTATYADTICIGYHANNSTDTVDTVLEKNVTVTHSVNLLEDSHNGKLCLLKGIAPLQLGNCSVAGWILGNPECESLISKESWSYIVETPNPENGTCYPGYFADYEELREQLSSVSSFERFEIFPKESSWPNHTVTGVSASCSHNGKSSFYRNLLWLTEKNGLYPNLSKSYVNNKEKEVLVLWGVHHPSNIGDQRAIYHTENAYVSVVSSHYSRRFTPEIAKRPKVRDQEGRINYYWTLLEPGDTIIFEANGNLIAPWYAFALSRGFGSGIITSNAPMDECDAKCQTPQGAINSSLPFQNVHPITIGECPKYVRSAKLRMVTGLRNIPSIQSRGLFGAIAGFIEGGWTGMIDGWYGYHHQNEQGSGYAADQKSTQNAINGITNKVNSVIEKMNTQFTAVGKEFNKLERRMENLNKKVDDGFLDIWTYNAELLVLLENERTLDFHDSNVKNLYEKVKSQLKNNAKEIGNGCFEFYHKCNNECMESVKNGTYDYPKYSEESKLNREKIDGVKLESMGVYQILAIYSTVASSLVLLVSLGAISFWMCSNGSLQCRICI

SEQ ID NO: 8892 - protein, 566 aa, Artificial Sequence
  derived and/or modified protein sequence (wt) from hemagglutinin__InfluenzaA__AFJ78320
MKTIIALSYILCLVFAQKLPGNDNSTATLCLGHHAVPNGTLVKTITNDQIEVTNATELVQSSSTGRICDSPHQILDGENCTLIDALLGDPHCDGFQNKEWDLFVERSKAYSNCYPYDVPDYASLRSLVASSGTLEFNNESFNWTGVAQNGTSSACKRRSNKSFFSRLNWLHQLKYKYPALNVTMPNNEKFDKLYIWGVHHPSTDSDQISLYAQASGRVTVSTKRSQQTVIPNIGSRPWVRGVSSRISIYWTIVKPGDILLINSTGNLIAPRGYFKIRSGKSSIMRSDAPIGKCNSECITPNGSIPNDKPFQNVNRITYGACPRYVKQNTLKLATGMRNVPEKQTRGIFGAIAGFIENGWEGMVDGWYGFRHQNSEGTGQAADLKSTQAAINQINGKLNRLIGKTNEKFHQIEKEFSEVEGRIQDLEKYVEDTKIDLWSYNAELLVALENQHTIDLTDSEMNKLFERTKKQLRENAEDMGNGCFKIYHKCDNACIGSIRNGTYDHDVYRDEALNNRFQIKGVELKSGYKDWILWISFAISCFLLCVVLLGFIMWACQKGNIRCNICI

SEQ ID NO: 8893 - protein, 565 aa, Artificial Sequence
  derived and/or modified protein sequence (wt) from hemagglutinin__InfluenzaA__AFJ78331
MKAKLLVLLCTFTATYADTICIGYHANNSTDTVDTVLEKNVTVTHSVNLLEDSHNGKLCLLKGIAPLQLGNCSVAGWILGNPECELLISKESWSYIVETPNPENGTCYPGYFADYEELREQLSSVSSFERFEIFPKESSWPNHTVTGVSASCSHNGKSSFYRNLLWLTGKNGLYPNLSKSYVNNKEKEVLVLWGVHHPPNIGDQRALYHTENAYVSVVSSHYSRRFTPEIAKRPKVRDQEGRINYYWTLLEPGDTIIFEANGNLIAPWYAFALSRGFGSGIITSNAPMDECDAKCQTPQGAINSSLPFQNVHPVTIGECPKYVRSAKLRMVTGLRNIPSIQSRGLFGAIAGFIEGGWTGMVDGWYGYHHQNEQGSGYAADQKSTQNAINGITNKVNSVIEKMNTQFTAVGKEFNKLERRMENLNKKVDDGFLDIWTYNAELLVLLENERTLDFHDSNVKNLYEKVKSQLKNNAKEIGNGCFEFYHKCNNECMESVKNGTYDYPKYSEESKLNREKIDGVKLESMGVYQILAIYSTVASSLVLLVSLGAISFWMCSNGSLQCRICI

SEQ ID NO: 8894 - protein, 565 aa, Artificial Sequence; identical to SEQ ID NO: 8893
  derived and/or modified protein sequence (wt) from hemagglutinin__InfluenzaA__AFJ78342

SEQ ID NO: 8895 - protein, 565 aa, Artificial Sequence; identical to SEQ ID NO: 8893
  derived and/or modified protein sequence (wt) from hemagglutinin__InfluenzaA__AFJ78353

SEQ ID NO: 8896 - protein, 565 aa, Artificial Sequence
  derived and/or modified protein sequence (wt) from hemagglutinin__InfluenzaA__AFJ78364
MKAKLLVLLCTFTATYADTICIGYHANNSTDTVDTVLEKNVTVTHSVNLLEDSHNGKLCLLKGIAPLQLGNCSVAGWILGNPECESLISKESWSYIVETPNPENGTCYPGYFADYEELREQLSSVSSFERFEIFPKESSWPNHTVTGVSASCSHNGKSSFYRNLLWLTEKNGLYPNLSKSYVNNKEKEVLVLWGVHHPSNIGDQRAIYHTENAYVSVVSSHYNRRFTPEIAKRPKVRNQEGRINYYWTLLEPGDTIIFEANGNLIAPWYAFALSRGFGSGIITSNAPMDECDAKCQTPQGAINSSLPFQNVHPITIGECPKYVRSAKLRMVTGLRNIPSIQSRGLFGAIAGFIEGGWTGMIDGWYGYHHQNEQGSGYAADQKSTQNAINGITNKVNSVIEKMNTQFTAVGKEFNKLERRMENLNKKVDDGFLDIWTYNAELLVLLENERTLDFHDSNVKNLYEKVKSQLKNNAKEIGNGCFEFYHKCNNECMESVKNGTYDYPKYSEESKLNREKIDGVKLESMGVYQILAIYSTVASSLVLLVSLGAISFWMCSNGSLQCRICI

SEQ ID NO: 8897 - protein, 565 aa, Artificial Sequence
  derived and/or modified protein sequence (wt) from hemagglutinin__InfluenzaA__AFJ78375
MKAKLLVLLCTFTATYADTICIGYHANNSTDTVDTVLEKNVTVTHSINLLENSHNGKLCLLKGIAPLQLGNCSVAGWILGNPECELLISKESWSYIVETPNPENGTCYPGHFADYEELREQLSSVSSFERFEIFPKESSWPNHTVTGVSASCSHNGKSSFYRNLLWLTEKNGLYPNLSKSYVNNKEKEVLVLWGVHHPSNIGDQRAIYHTENAYVSVVSSHYSRRFTPEIVKRPKVRDQEGRINYYWTLLEPGDTIIFEANGNLIAPWYAFALSRGFGSGIITSNAPMDECDAKCQTPQGAINSSLPFQNVHPVTIGECPKYVRSAKLRMVTGLRNIPSIQSRGLFGAIAGFIEGGWTGMIDGWYGYHHQNEQGSGYAADQKSTQNAINGITNKVNSIIEKMNTQFTAVGKEFNKLERRMENLNKKVDDGFLDIWTYNAELLVLLENERTLDFHDSNVKNLYEKVKSQLKNNAKEIGNGCFEFYHKCNNECMESVKNGTYDYPKYSEESKLNREKIDGVKLESMGVYQILAIYSTVASSLVLLVSLGAISFWMCSNGSLQCRICI

SEQ ID NO: 8898 - protein, 565 aa, Artificial Sequence; identical to SEQ ID NO: 1385
  derived and/or modified protein sequence (wt) from hemagglutinin__InfluenzaA__AFJ78386

SEQ ID NO: 8899 - protein, 565 aa, Artificial Sequence; identical to SEQ ID NO: 1385
  derived and/or modified protein sequence (wt) from hemagglutinin__InfluenzaA__AFJ78397

SEQ ID NO: 8900 - protein, 565 aa, Artificial Sequence; identical to SEQ ID NO: 8077
  derived and/or modified protein sequence (wt) from hemagglutinin__InfluenzaA__AFJ78408

SEQ ID NO: 8901 - protein, 565 aa, Artificial Sequence
  derived and/or modified protein sequence (wt) from hemagglutinin__InfluenzaA__AFJ78419
MKVKLLVLLCTFTATYADTICIGYHANNSTDTVDTVLEKNVTVTHSVNLLEDSHNGKLCLLKGIAPLQLGNCSVAGWILGNPECELLISKESWSYIVEKPNPENGTCYPGYFADYEELREQLSSVSSFERFEIFPKESSWPNHTVTGVSASCSHNGKSSFYKNLLWLTGKNGLYPNLSKSYANNKEKEVLVLWGVHHPPNIGDQRALYHTENAYVSVVSSHYSRKFTPEIAKRPKVRDQEGRINYYWTLLEPGDTVIFEANGNLIAPRYAFALSRGFGSGIINSNAPMDECDAKCQTPQGAINSSLPFQNVHPVTIGECPKYVRSAKLRMVTGLRNIPSIQSRGLFGAIAGFIEGGWTGMVDGWYGYHHQNEQGSGYAADQKSTQNAINGITNKVNSVIEKMNTQFTAVGKEFNKLERRMENLNKKVDDGFIDIWTYNAELLVLLENERTLDFHDSNVKNLYEKVKSQLKNNAKEIGNGCFEFYHKCNDECMESVKNGTYDYPKYSEESKLNREKIDGVKLESMGVYQILAIYSTVASSLVLLVSLGAISFWMCSNGSLQCRICI

SEQ ID NO: 8902 - protein, 565 aa, Artificial Sequence
  derived and/or modified protein sequence (wt) from hemagglutinin__InfluenzaA__AFJ78430
MKVKLLVLLCTFTATYADTICIGYHANNSTDTVDTVLEKNVTVTHSVNLLEDSHNGKLCLLKGIAPLQLGNCSVAGWILGNPECELLISRESWSYIVENPNPENGTCYPGHFADYEELREQLSSVSSFERFEIFPKESSWPNHTVTGVSASCSHNGKSSFYKNLLWLTGKNGLYPNLSKSYANNKEKEVLVLWGVHHPPNIGDQRALYHTENAYVSVVSSHYSRKFTPEIAKRPKVRDQEGRINYYWTLLGPGDTIIFEANGNLIAPRYAFALSRGFGSGIINSNAPMDECDAKCQTPQGAINSSLPFQNVHPVTIGECPKYVRSAKLRMVTGLRNIPSIQSRGLFGAIAGFIEGGWTGMVDGWYGYHHQNEQGSGYAADQKSTQNAINGITNKVNSVIEKMNTQFTAVGKEFNKLERRMENLNKKVDDGFIDIWTYNAELLVLLENERTLDFHDSNVKNLYEKVKSQLKNNAKEIGNGCFEFYHKCNDECMESVKNGTYDYPKYSEESKLNREKIDGVKLESMGVYQILAIYSTVASSLVLLVSLGAISFWMCSNGSLQCRICI

SEQ ID NO: 8903 - protein, 565 aa, Artificial Sequence
  derived and/or modified protein sequence (wt) from hemagglutinin__InfluenzaA__AFJ78441
MKVKLMVLLCTFTATYADTICIGYHANNSTDTVDTVLEKNVTVTHSVNLLEDSHNGKLCLLKGIAPLQLGNCSVAGWILGNPECELLISRESWSYIVEKPNPENGTCYPGHFADYEELREQLSSVSSFERFEIFPKESSWPNHTVTGVSASCSHNGKSSFYKNLLWLTGKNGLYPNLSKSYANNKEKEVLVLWGVHHPPNIGDQKALYHTENAYVSVVSSHYSRKFTPEIAKRPKVRDQEGRINYYWTLLEPGDTIIFEANGNLIAPRYAFALSRGFGSGIINSNAPMDECDAKCQTPQGAINSSLPFQNVHPVTIGECPKYVRSAKLRMVTGLRNIPSIQSRGLFGAIAGFIEGGWTGMVDGWYGYHHQNEQGSGYAADQKSTQNAINGITNKVNSVIEKMNTQFTAVDKEFNKLERRMENLNKKVDDGFIDIWTYNAELLVLLENERTLDFHDSNVKNLYEKVKSQLKNNAKEIGNGCFEFYHKCNDECMESVKNGTYDYPKYSEESKLNREKIDGVKLESMGVYQILAIYSTVASSLVLLVSLGAISFWMCSNGSLQCRICI

SEQ ID NO: 8904 - protein, 565 aa, Artificial Sequence
  derived and/or modified protein sequence (wt) from hemagglutinin__InfluenzaA__AFJ78452
MKVKLLVLLCTFTATYADTICIGYHANNSTDTVDTVLEKNVTVTHSVNLLEDSHNGKLCLLKGIAPLQLGNCSVAGWILGNPECELLISKESWSYIVEKPNPENGTCYPGHFADYEELREQLSSVSSFERFEIFPKESSWPNHTVTGVSASCSHNGKSSFYKNLLWLTGKNGLYPNLSKSYANNKEKEVLVLWGVHHPPNIGDQKALYHTENAYVSVVSSHYSRKFIPEIAKRPKVRDQEGRINYYWTLLEPGDTIIFEANGNLIAPRYAFALSRGFGSGIINSNAPMDECDAKCQTPQGAINSSLPFQNVHPVTIGECPKYVRSAKLRMVTGLRNIPSIQSRGLFGAIAGFIEGGWTGMVDGWYGYHHQNEQGSGYAADQKSTQNAINGITNKVNSVIEKMNTQFTAVGKEFNKLERRMENLNKKVDDGFIDIWTYNAELLVLLENERTLDFHDSNVKNLYEKVKSQLKNNAKEIGNGCFEFYHKCNDECMESVKNGTYDYPKYSEESKLNREKIDGVKLESMGVYQILAIYSTVASSLVLLVSLGAISFWMCSNGSLQCRICI

SEQ ID NO: 8905 - protein, 565 aa, Artificial Sequence
  derived and/or modified protein sequence (wt) from hemagglutinin__InfluenzaA__AFJ78463
MKVKLLVLLCTFTATYADTICIGYHANNSTDTVDTVLEKNVTVTHSVNLLEDSHNGKLCLLKGIAPLQLGNCSVAGWILGNPECELLISKESWSYIVEKPNPENGTCYPGHFADYEELREQLSSVSSFERFEIFPKESSWPNHTVTGVSASCSHNGKSSFYKNLLWLTGKNGLYPNLGKSYANNKEKEVLVLWGVHHPPNIGDQKALYHTENAYVSVVSSHYSRKFIPEIAKRPKVRDQEGRINYYWTLLEPGDTIIFEANGNLIAPRYAFALSRGFGSGIINSNAPMDECDAKCQTPQGAINSSLPFQNVHPVTIGECPKYVRSAKLRMVTGLRNIPSIQSRGLFGAIAGFIEGGWTGMVDGWYGYHHQNEQGSGYAADQKSTQNAINGITNKVNSVIEKMNTQFTAVGKEFNKLERRMENLNKKVDDGFIDIWTYNAELLVLLENERTLDFHDSNVKNLYEKVKSQLKNNAKEIGNGCFEFYHKCNDECMESVKNGTYDYPKYSEESKLNREKIDGVKLESMGVYQILAIYSTVASSLVLLVSLGAISFWMCSNGSLQCRICI

SEQ ID NO: 8906 - protein, 565 aa, Artificial Sequence
  derived and/or modified protein sequence (wt) from hemagglutinin__InfluenzaA__AFJ78474
MKVKLLVLLCTFTATYADTICIGYHANNSTDTVDTVLEKNVTVTHSVNLLEDSHNGKLCLLKGIAPLQLGNCSVAGWILGNPECELLISRESWSYIVEKPNPENGTCYPGHFADYEELREQLSSVSSFERFEIFPKESSWPNHTVTGVSASCSYNGKSSFYKNLLWLTGKNGLYPNLSKSYANNKEKEVLVLWGVHHPPNIGDQRALYHTENAYVSVVSSHYSRKFTPEIAKRPKVRDQEGRINYYWTLLEPGDTIIFEANGNLIAPRYAFALSRGFGSGIINSNAPMDECDAKCQTPQGAINSSLPFQNVHPVTIGECPKYVRSAKLRMVTGLRNIPSIQSRGLFGAIAGFIEGGWTGMVDGWYGYHHQNEQGSGYAADQKSTQNAINGITNKVNSVIEKMNTQFTAVGKEFNKLERRMENLNKKVDDGFIDIWTYNAELLVLLENERTLDFHDSNVKNLYEKVKSQLKNNAKEIGNGCFEFYHKCNDECMESVKNGTYDYPKYSEESKLNREKIDGVKLESMGVYQILAIYSTVASSLVLLVSLGAISFWMCSNGSLQCRICI

SEQ ID NO: 8907 - protein, 565 aa, Artificial Sequence
  derived and/or modified protein sequence (wt) from hemagglutinin__InfluenzaA__AFJ78485
MKVKLLVLLCTFTATYADTICIGYHANNSTDTVDTVLEKNVTVTHSVNLLEDSHNGKLCLLKGIAPLQLGNCSVAGWILGNPECELLISRESWSYIVEKPNPENGTCYPGHFADYEELREQLSSVSSFERFEIFPKESSWPNHTTTGVSASCSHNGESSFYKNLLWLTGKNGLYPNLSKSYANNKEKEVLVLWGVHHPPNIGDQRALYHTENAYVSVVSSHYSRKFTPEIAKRPKVRDQEGRINYYWTLLEPGDTIIFEANGNLIAPRYAFALSRGFGSGIINSNAPMDECDAKCQTPQGAINSSLPFQNVHPVTIGECPKYVRSAKLRMVTGLRNIPSIQSRGLFGAIAGFIEGGWTGMVDGWYGYHHQNEQGSGYAADQKSTQNAINGITNKVNSVIEKMNTQFTAVGKEFNKLERRMENLNKKVEDGFIDIWTYNAELLVLLENERTLDFHDSNVKNLYEKVKSQLKNNAKEIGNGCFEFYHKCNDECMESVKNGTYDYPKYSEESKLNREKIDGVKLESMGVYQILAIYSTVASSLVLLVSLGAISFWMCSNGSLQCRICI

SEQ ID NO: 8908 - protein, 565 aa, Artificial Sequence
  derived and/or modified protein sequence (wt) from hemagglutinin__InfluenzaA__AFJ78496
MKVKLLVLLCTFTATYADTICIGYHANNSTDTVDTVLEKNVTVTHSVNLLEDSHNGKLCLLKGIAPLQLGNCSVAGWILGNPECELLISRESWSYIVEKPNPENGTCYPGHFADYEELREQLSSVSSFERFEIFPKESSWPNHTTTGVSASCSHNGESSFYKNLLWLTGKNGLYPNLSKSYANNKEKEVLVLWGVHHPPNIGGQRALYHTENAYVSVVSSHYSRKFTPEIAKRPKVRDQEGRINYYWTLLEPGDTIIFEANGNLIAPRYAFALSRGFGSGIINSNAPMDECDAKCQTPQGAINSSLPFQNVHPVTIGECPKYVRSAKLRMVTGLRNIPSIQSRGLFGAIAGFIEGGWTGMVDGWYGYHHQNEQGSGYAADQKSTQNAINGITNKVNSVIEKMNTQFTAVGKEFNKLERRMENLNKKVDDGFIDIWTYNAELLVLLENERTLDFHDSNVKNLYEKVKSQLKNNAKEIGNGCFEFYHKCNDECMESVKNGTYDYPKYSEESKLNREKIDGVKLESMGVYQILAIYSTVASSLVLLVSLGAISFWMCSNGSLQCRICI

SEQ ID NO: 8909 - protein, 565 aa, Artificial Sequence
  derived and/or modified protein sequence (wt) from hemagglutinin__InfluenzaA__AFJ78518
MKVKLLVLLCTFTATYADTICIGYHANNSTDTVDTVLEKNVTVTHSVNLLEDSHNGKLCLLKGIAPLQLGNCSVAGWILGNPECELLISRESWSYIVEKPNPENGTCYPGHFADYEELREQLSSVSSFERFEIFPKESSWPNHTTTGVSASCSHNGESSFYKNLLWLTGKNGLYPNLSKSYANNKEKEVLVLWGVHHPPNIGDQRALYHTENAYVSVVSSHYSRKFTPEIAKRPKVRDQEGRINYYWTLLEPGDTIIFEANGNLIAPRYAFALSRGFGSGIINSNAPMDECDAKCQTPQGAINSSLPFQNVHPVTIGECPKYVRSAKLRMVTGLRNIPSIQSRGLFGAIAGFIEGGWTGMVDGWYGYHHQNEQGSGYAADQKSTQNAINGITNKVNSVIEKMNTQFTAVGKEFNKLERRMENLNKKVDDGFIDIWTYNAELLVLLENERTLDFHDSNVKNLYEKVKSQLKNNAKEIGNGCFEFYHKCNDECMESVKNGTYDYPKYSEESKLNREKIDGVKLESMGVYQILAIYSTVASSLVLLVSLGAISFWMCSNGSLQCRICI

SEQ ID NO: 8910 - protein, 565 aa, Artificial Sequence
  derived and/or modified protein sequence (wt) from hemagglutinin__InfluenzaA__AFJ78529
MKVKLLVLLCTFTATYADTICIGYHANNSTDTVDTVLEKNVTVTHSVNLLEDNHNGKLCLLKGIAPLQLGNCSVAGWILGNPECELLISKESWSYIVERPNPENGTCYPGHFADYEELREQLSSVSSFERFEIFPKESSWPNHTVTGVSASCSHNGESSFYKNLLWLTGKNGLYPNLSKSYANNKEKEVLVLWGVHHPPNIGDQMTLYHKENAYVSVVSSHYSRKFTPEIAKRPKVRDQEGRINYYWTLLEPGDTIIFEANGNLIAPRYAFALSRGFGSGIINSNAPMDECDAKCQTPQGAINSSLPFQNVHPVTIGECPKYVRSAKLRMVTGLRNIPSIQSRGLFGAIAGFIEGGWTGMVDGWYGYHHQNEQGSGYAADQKSTQNAINGITNKVNSVIEKMNTQFTAVGKEFNKLERRMENLNKKVDDGFIDVWTYNAELLVLLENERTLDFHDSNVKNLYEKVKNQLKNNAKEIGNGCFEFYHKCNDECMESVKNGTYDYPKYSEESKLSREKIDGVKLESMGVYQILAIYSTVASSLVLLVSLGAISFWMCSNGSLQCRICI

SEQ ID NO: 8911 - protein, 565 aa, Artificial Sequence; identical to SEQ ID NO: 8910
  derived and/or modified protein sequence (wt) from hemagglutinin__InfluenzaA__AFJ78540

SEQ ID NO: 8912 - protein, 565 aa, Artificial Sequence; identical to SEQ ID NO: 8910
  derived and/or modified protein sequence (wt) from hemagglutinin__InfluenzaA__AFJ78551

SEQ ID NO: 8913 - protein, 565 aa, Artificial Sequence
  derived and/or modified protein sequence (wt) from hemagglutinin__InfluenzaA__AFJ78562
MKVKLLVLLCTFTATYADTICIGYHANNSTDTVDTVLEKNVTVTHSVNLLEDNHNGKLCLLKGIAPLQLGNCSVAGWILGNPECELLISKESWSYIVERPNPENGTCYPGHFADYEELREQLSSVSSFERFEIFPKESSWPNHTVTGVSASCSHNGESSFYKNLLWLTGKNGLYPTLSKSYANNKEKEVLVLWGVHHPPNIGDQMTLYHKENAYVSVVSSHYSRKFTPEIAKRLKVRDQEGRINYYWTLLEPGDTIIFEANGNLIAPRYAFALSRGLGSGIINSNAPMDECDAKCQTPQGAINSSLPFQNVHPVTIGECPKYVRSAKLRMVTGLRNIPSIQSRGLFGAIAGFIEGGWTGMVDGWYGYHHQNEQGSGYAADQKSTQNAINGITNKVNSVIEKMNTQFTAVGKEFNKLERRMENLNKKVDDGFIDVWTYNAELLVLLENERTLDFHDSNVKNLYEKVKNQLKNNAKEIGNGCFEFYHKCNDECMESVKNGTYDYPKYSEESKLSREKIDGVKLESMGVYQILAIYSTVASSLVLLVSLGAISFWMCSNGSLQCRICI

SEQ ID NO: 8914 - protein, 565 aa, Artificial Sequence
  derived and/or modified protein sequence (wt) from hemagglutinin__InfluenzaA__AFJ78573
MKVKLLVLLCTFTATYADTICIGYHANNSTDTVDTVLEKNVTVTHSVNLLEDNHNGKLCLLKGIAPLQLGNCSVAGWILGNPECELLISKESWSYIVERPNPENGTCYPGHFADYEELREQLSSVSSFERFEIFPKESSWPNHTVTGVSASCSHNGESSFYKNLLWLTGKNGLYPNLSKSYANNKEKEVLVLWGVHHPPNIGDQMTLYHKENAYVSVVSSHYSRKFTPEIAKRPKVRDQEGRINYYWTLLEPGDTIIFEANGNLIAPRYAFALSRGFGSGIINSNASMDECDAKCQTPQGAINSSLPFQNVHPVTIGECPKYVRSAKLRMVTGLRNIPSIQSRGLFGAIAGFIEGGWTGMVDGWYGYHHQNEQGSGYAADQKSTQNAINGITNKVNSVIEKMNTQFTAVGKEFNKLERRMENLNKKVDDGFIDVWTYNAELLVLLENERTLDFHDSNVKNLYEKVKNQLKNNAKEIGNGCFEFYHKCNDECMESVKNGTYDYPKYSEEAKLSREKIDGVKLESMGVYQILAIYSTVASSLVLLVSLGAISFWMCSNGSLQCRICI

SEQ ID NO: 8915 - protein, 565 aa, Artificial Sequence
  derived and/or modified protein sequence (wt) from hemagglutinin__InfluenzaA__AFJ78584
MKVKLLVLLCTFTATYADTICIGYHANNSTDTVDTVLEKNVTVTHSVNLLENSHNGKLCLLKGIAPLQLGNCSVAGWILGNPECELLISKESWSYIVEKPNPENGTCYPGHFADYEELREQLSSVSSFERFEIFPKESSWPNHTVTGVSASCSHNGENSFYRNLLWLTRKNGLYPNLSKSYANNKEKEVLVLWGVHHPPNIGDQKALYHTENAYVSVVSSHYSRKFTPEIAKRPKVRDQEGRINYYWTLLEPGDTIIFEANGNLIAPRYAFALSRGFGSGIINSNAPMDKCDAKCQTPQGAINSSLPFQNVHPVAIGECPKYVRSAKLRMVTGLRNIPSIQSRGLFGAIAGFIEGGWTGMVDGWYGYHHQNEQGSGYAADQKSTQNAINGITNKVNSVIEKMNTQFTAVGKEFNKLERRMENLNKKVDDGFIDIWTYNAELLVLLENERTLDFHDSNVKNLYEKVKSQLKNNAKEIGNGCFEFYHKCNDECMESVKNGTYDYPKYSEESKLNREKIDGVKLESMGVYQILAIYSTVASSLVLLVSLGAISFWMCSNGSLQCRICI

SEQ ID NO: 8916 - protein, 565 aa, Artificial Sequence
  derived and/or modified protein sequence (wt) from hemagglutinin__InfluenzaA__AFJ78595
MKVKLLVLLCTFTATYADTICIGYHANNSTDTVDTVLEKNVTVTHSVNLLENSHNGKLCLLKGIAPLQLGNCSVAGWILGNPECELLISKESWSYIVEKPNPENGTCYPGHFADYEELREQLSSVSSFERFEIFPKESSWPNHTVTGVSASCSHNGESSFYRNLLWLTGKNGLYPNLSKSYANNREKEVLVLWGVHHPPNIGDQKALYHTENAYVSVVSSHYSRKFTPEIAKRPKVRDQEGRINYYWTLLEPGDTIIFEANGNLIAPRYAFALSRGFGSGIINSNAPMDKCDAKCQTPQGAINSSLPFQNVHPVTIGECPKYVRSAKLRMVTGLRNIPSIQSRGLFGAIAGFIEGGWTGMVDGWYGYHHQNEQGSGYAADQKSTQNAINGITNKVNSVIEKMNTQFTAVGKEFNKLERRMENLNKKVDDGFIDIWTYNAELLVLLENERTLDFHDSNVKNLYEKVKSQLKNNAKEIGNGCFEFYHKCNDECMESVKNGTYDYPKYSEESKLNREKIDGVKLESMGVYQILAIYSTVASSLVLLVSLGAISFWMCSNGSLQCRICI

SEQ ID NO: 8917 - protein, 565 aa, Artificial Sequence
  derived and/or modified protein sequence (wt) from hemagglutinin__InfluenzaA__AFJ78617
MKVKLLVLLCTFTATYADTICIGYHANNSTDTVDTVLEKNVTVTHSVNLLENSHNGKLCLLKGIAPLQLGNCSVAGWILGNPECELLISKESWSYIVEKPNPENGTCYPGHFADYEELREQLSSVSSFERFEIFPKESSWPNHTVTGVSASCSHDGESSFYRNLLWLTGKNGLYPNLSKSYANNKEKEVLVLWGVHHPPSISDQKTLYHTENAHVSVVSSHYSRKFTPEIAKRPKVRDQEGRINYYWTLLEPGDTIIFEANGNLIAPRYAFALSRGFGSGIINSNAPMDKCDAKCQTPQGAINSSLPFQNVHPVTIGECPKYVRSAKLRMVTGLRNIPSIQSRGLFGAIAGFIEGGWTGMVDGWYGYHHQNEQGSGYAADQKSTQNAINGITNKVNSVIEKMNTQFTAVSKEFNKLERRMENLNKKVDDGFIDIWTYNAELLVLLENERTLDFHDSNVKNLYEKVKSQLKNNAKEIGNGCFEFYHKCNDECMESVKNGTYDYPKYSEESKLNREKIDGVKLESMGVYQILAIYSTVASSLVLLVSLGAISFWMCSNGSLQCRICI

SEQ ID NO: 8918 - protein, 565 aa, Artificial Sequence
  derived and/or modified protein sequence (wt) from hemagglutinin__InfluenzaA__AFJ78628
MKVKLLVLLCTFTATYADTICIGYHANNSTDTVDTVLEKNVTVTHSVNLLEDNHNGKLCLLKGIAPLQLGNCSVAGWILGNPECELLISKESWSYIVERPNPENGTCYPGHFADYEELREQLSSVSSFERFEIFPKESSWPNHTVTGVSASCSHNGESSFYKNLLWLTGKNGLYPNLSKSYANNKEKEVLVLWGVHHPPNIGNQMTLYHKENAYVSVVSSHYSRKFTPEIAKRPKVRDQEGRINYYWTLLEPGDTIIFEANGNLIAPRYAFALSRGFGSGIINSNAPMDECDAKCQTPQGAINSSLPFQNVHPVTIGECPKYVRSAKLRMVTGLRNIPSIQSRGLFGAIAGFIEGGWTGMVDGWYGYHHQNEQGSGYAADQKSTQNAINGITNKVNSVIEKMNTQFTAVGKEFNKLERRMENLNKKVDDGFIDVWTYNAELLVLLENERTLDFHDSNVKNLYEKVKNQLKNNAKEIGNGCFEFYHKCNDECMESVKNGTYDYPKYSEESKLSREKIDGVKLESMGVYQILAIYSTVASSLVLLVSLGAISFWMCSNGSLQCRICI

SEQ ID NO: 8919 - protein, 565 aa, Artificial Sequence
  derived and/or modified protein sequence (wt) from hemagglutinin__InfluenzaA__AFJ78639
MKVKLLVLLCTFTATYADTICIGYHANNSTDTVDTVLEKNVTVTHSVNLLENSHNGKLCLLKGIAPLQLGNCSVAGWILGNPECELLISKESWSYIVEKPNPENGTCYPGHFADYEELREQLSSVSSFERFEIFPKESSWPNHTVTGVSASCSHNGESSFYRNLLWLTGKNGLYPNLSKSYANNKEKEVLVLWGVHHPPSISNQKTLYHTENAYVSVVSSHYSRKFTPEIAKRPKVRDQEGRINYYWTLLEPGDTIIFEANGNLIAPRYAFALSRGFGSGIINSNAPMDKCDAKCQTPQGAINSSLPFQNVHPVTIGECPKYVRSAKLRMVTGLRNIPSIQSRGLFGAIAGFIEGGWTGMVDGWYGYHHQNEQGSGYAADQKSTQNAINGITNKVNSVIEKMNTQFTAVGKEFNKLERRMENLNKKVDDGFIDIWTYNAELLVLLENERTLDFHDSNVKNLYEKVKSQLKNNAKEIGNGCFEFYHKCNDECMESVKNGTYDYPKYSEESKLNREKIDGVKLESMGVYQILAIYSTVASSLVLLVSLGAISFWMCSNGSLQCRICI

SEQ ID NO: 8920 - protein, 565 aa, Artificial Sequence; identical to SEQ ID NO: 8919
  derived and/or modified protein sequence (wt) from hemagglutinin__InfluenzaA__AFJ78650

SEQ ID NO: 8921 - protein, 566 aa, Artificial Sequence; identical to SEQ ID NO: 2669
  derived and/or modified protein sequence (wt) from hemagglutinin__InfluenzaA__AFJ78661

SEQ ID NO: 8922 - protein, 566 aa, Artificial Sequence
  derived and/or modified protein sequence (wt) from hemagglutinin__InfluenzaA__AFJ78681
MKAILVVLLYTFATVNADTLCIGYHANNSTDTVDTVLEKNVTVTHSVNLLEDKHNGKLCKLRGVAPLHLGKCNIAGWILGNPECESLSTASSWSYIVETSSSDNGTCYPGDFIDYEELREQLSSVSSFERFEIFPKTSSWPNHDSNKGVTAACPHAGAKSFYKNLIWLVKKGNSYPKLSKSYINDKGKEVLVLWGIHHPSTSADQQSLYQNADAYVFVGTSRYSKKFKPEIAIRPKVRDQEGRMNYYWTLVEPGDKITFEATGNLVVPRYAFAMERNAGSGIIISDTPVHDCNTTCQTPKGAINTSLPFQNIHPITIGKCPKYVKSTKLRLATGLRNVPSIQSRGLFGAIAGFIEGGWTGMVDGWYGYHHQNEQGSGYAADLKSTQNAIDEITNKVNSVIEKMNTQFTAVGKEFNHLEKRIENLNKKVDDGFLDIWTYNAELLVLLENERTLDYHDSNVKNLYEKVRSQLKNNAKEIGNGCFEFYHKCDNTCMESVKNGTYDYPKYSEEAKLNREEIDGVKLESTRIYQILAIYSTVASSLVLVVSLGAISFWMCSNGSLQCRICI

SEQ ID NO: 8923 - protein, 566 aa, Artificial Sequence; identical to SEQ ID NO: 2669
  derived and/or modified protein sequence (wt) from hemagglutinin__InfluenzaA__AFJ78691

SEQ ID NO: 8924 - protein, 566 aa, Artificial Sequence; identical to SEQ ID NO: 2669
  derived and/or modified protein sequence (wt) from hemagglutinin__InfluenzaA__AFJ78701

SEQ ID NO: 8925 - protein, 566 aa, Artificial Sequence; identical to SEQ ID NO: 7197
  derived and/or modified protein sequence (wt) from hemagglutinin__InfluenzaA__AFJ78711

SEQ ID NO: 8926 - protein, 566 aa, Artificial Sequence; identical to SEQ ID NO: 2669
  derived and/or modified protein sequence (wt) from hemagglutinin__InfluenzaA__AFJ78721

SEQ ID NO: 8927 - protein, 566 aa, Artificial Sequence
  derived and/or modified protein sequence (wt) from hemagglutinin__InfluenzaA__AFJ78731
MKAILVVLLYTFATANADTLCIGYHANNSTDTVDTVLEKNVTVTHSVNLLEDKHNGKLCKLRGVAPLHLGKCNIAGWILGNPECESLSTASSWSYIVETSSSDNGTCYPGDFIDYEELREQLSSVSSFERFEIFPKTSSWPNHDSNKGVTAACPHAGAKSFYKNLIWLVKKGNSYPKLSKSYINDKGKEVLVLWGIHHPSTSADQQSLYQNADAYVFVGTSRYSKKFKPEIAIRPKVRDQEGRMNYYWTLVEPGDKITFEATGNLVVPRYAFAMERNAGSGIIISDTPVHDCNTTCQTPKGSINTSLPFQNIHPITIGKCPKYVKSTKLRLATGLRNVPSIQSRGLFGAIAGFIEGGWTGMVDGWYGYHHQNEQGSGYAADLKSTQNAIDEITNKVNSVIEKMNTQFTAVGKEFNHLEKRIENLNKKVDDGFLDIWTYNAELLVLLENERTLDYHDSNVKNLYEKVRSQLKNNAKEIGNGCFEFYHKCDNTCMESVKNGTYDYPKYSEEAKLNREEIDGVKLESTRIYQILAIYSTVASSLVLVVSLGAISFWMCSNGSLQCRICI

SEQ ID NO: 8928 - protein, 566 aa, Artificial Sequence; identical to SEQ ID NO: 3833
  derived and/or modified protein sequence (wt) from hemagglutinin__InfluenzaA__AFJ78741

SEQ ID NO: 8929 - protein, 566 aa, Artificial Sequence; identical to SEQ ID NO: 2669
  derived and/or modified protein sequence (wt) from hemagglutinin__InfluenzaA__AFJ78751

SEQ ID NO: 8930 - protein, 566 aa, Artificial Sequence; identical to SEQ ID NO: 2669
  derived and/or modified protein sequence (wt) from hemagglutinin__InfluenzaA__AFJ78761

SEQ ID NO: 8931 - protein, 566 aa, Artificial Sequence; identical to SEQ ID NO: 2669
  derived and/or modified protein sequence (wt) from hemagglutinin__InfluenzaA__AFJ78771

SEQ ID NO: 8932 - protein, 566 aa, Artificial Sequence; identical to SEQ ID NO: 2669
  derived and/or modified protein sequence (wt) from hemagglutinin__InfluenzaA__AFJ78781

SEQ ID NO: 8933 - protein, 566 aa, Artificial Sequence; identical to SEQ ID NO: 2669
  derived and/or modified protein sequence (wt) from hemagglutinin__InfluenzaA__AFJ78791

SEQ ID NO: 8934 - protein, 566 aa, Artificial Sequence; identical to SEQ ID NO: 2669
  derived and/or modified protein sequence (wt) from hemagglutinin__InfluenzaA__AFJ78801

SEQ ID NO: 8935 - protein, 566 aa, Artificial Sequence; identical to SEQ ID NO: 3530
  derived and/or modified protein sequence (wt) from hemagglutinin__InfluenzaA__AFJ78811

SEQ ID NO: 8936 - protein, 566 aa, Artificial Sequence; identical to SEQ ID NO: 2669
  derived and/or modified protein sequence (wt) from hemagglutinin__InfluenzaA__AFJ78821

SEQ ID NO: 8937 - protein, 566 aa, Artificial Sequence; identical to SEQ ID NO: 2669
  derived and/or modified protein sequence (wt) from hemagglutinin__InfluenzaA__AFJ78831

SEQ ID NO: 8938 - protein, 566 aa, Artificial Sequence; identical to SEQ ID NO: 3867
  derived and/or modified protein sequence (wt) from hemagglutinin__InfluenzaA__AFJ78841

SEQ ID NO: 8939 - protein, 566 aa, Artificial Sequence; identical to SEQ ID NO: 2669
  derived and/or modified protein sequence (wt) from hemagglutinin__InfluenzaA__AFJ78851

SEQ ID NO: 8940 - protein, 566 aa, Artificial Sequence
  derived and/or modified protein sequence (wt) from hemagglutinin__InfluenzaA__AFJ78861
MKAILVVLLYTFATANADTLCIGYHANNSTDTVDTVLEKNVTVTHSVNLLEDKHNGKLCRLRGVAPLHLGKCNIAGWILGNPECESLSTASSWSYIVETSSSDNGTCYPGDFIDYEELREQLSSVSSFERFEIFPKTSSWPNHDSNKGVTAACPHAGAKSFYKNLIWLVKKGNSYPKLSKSYINDKGKEVLVLWGIHHPSTSADQQSLYQNADAYVFVGTSRYSKKFKPEIAIRPKVRDQEGRMNYYWTLVEPGDKITFEATGNLVVPRYAFAMERNAGSGIIISDTPVHDCNTTCQTPKGAINTSLPFQNIHPITIGKCPKYVKSTKLRLATGLRNVPSIQSRGLFGAIAGFIEGGWTGMVDGWYGYHHQNEQGSGYAADLKSTQNAIDEITNKVNSVIEKMNTQFTAVGKEFNHLEKRIENLNKKVDDGFLDIWTYNAELLVLLENERTLDYHDSNVKNLYEKVRSQLKNNAKEIGNGCFEFYHKCDNTCMESVKNGTYDYPKYSEEAKLNREEIDGVKLESTRIYQILAIYSTVASSLVLVVSLGAISFWMCSNGSLQCRICI

SEQ ID NO: 8941 - protein, 566 aa, Artificial Sequence
  derived and/or modified protein sequence (wt) from hemagglutinin__InfluenzaA__AFJ78881
MKAILVVLLYTFATANADTLCIGYHANNSTDTVDTVLEKNVTVTHSVNLLEDKHNGKLCKLRGVAPLHLGKCNIAGWILGNPECESLSTSSSWSYIVETSSSDNGTCYPGDFIDYEELREQLSSVSSFERFEIFPKTSSWPNHDSNKGVTAACPHAGAKSFYKNLIWLVKKGNSYPKLSKSYINDKGKEVLVLWGIHHPSTSADQQSLYQNADAYVFVGTSRYSKKFKPEIAIRPKVRDQEGRMNYYWTLVEPGDKITFEATGNLVVPRYAFAMERNAGSGIIISDTPVHDCNTTCQTPKGAINTSLPFQNIHPITIGKCPKYVKSTKLRLATGLRNVPSIQSRGLFGAIAGFIEGGWTGMVDGWYGYHHQNEQGSGYAADLKSTQNAIDEITNKVNSVIEKMNTQFTAVGKEFNHLEKRIENLNKKVDDGFLDIWTYNAELLVLLENERTLDYHDSNVKNLYEKVRSQLKNNAKEIGNGCFEFYHKCDNTCMESVKNGTYDYPKYSEEAKLNREEINGVKLESTRIYQILAIYSTAASSLVLVVSLGAISFWMCSNGSLQCRICI

SEQ ID NO: 8942 - protein, 566 aa, Artificial Sequence; identical to SEQ ID NO: 2669
  derived and/or modified protein sequence (wt) from hemagglutinin__InfluenzaA__AFJ78891

SEQ ID NO: 8943 - protein, 566 aa, Artificial Sequence; identical to SEQ ID NO: 2669
  derived and/or modified protein sequence (wt) from hemagglutinin__InfluenzaA__AFJ78901

SEQ ID NO: 8944 - protein, 566 aa, Artificial Sequence; identical to SEQ ID NO: 2669
  derived and/or modified protein sequence (wt) from hemagglutinin__InfluenzaA__AFJ78911

SEQ ID NO: 8945 - protein, 566 aa, Artificial Sequence; identical to SEQ ID NO: 2669
  derived and/or modified protein sequence (wt) from hemagglutinin__InfluenzaA__AFJ78921

SEQ ID NO: 8946 - protein, 566 aa, Artificial Sequence
  derived and/or modified protein sequence (wt) from hemagglutinin__InfluenzaA__AFJ97567
MKAILVVLLYTFATANADTLCIGYHANNSTDTVDTVLEKNVTVTHSVDLLEDKHNGKLCKLRGVAPLHLGKCNIAGWILGNPECESLSTASSWSYIVETSSSDNGTCYPGDFIDYEELREQLSSVSSFERFEIFPKTSSWPNHDSNKGVTAACPHAGAKSFYKNLIWLVKKGNSYPKLNKSYINDKGKEVLVLWGIHHPSTSTDQQSLYQNADAYVFVGTSRYSKKFKPEIAIRPKVRDQEGRMNYYWTLVEPGDKITFEATGNLVVPRYAFTMERNAGSGIIISDTPVHDCNTTCQTPKGAINTSFPFQNIHPITIGKCPKYVKSTKLRLATGLRNVPSIQSRGLFGAIAGFIEGGWTGMVDGWYGYHHQNEQGSGYAADLKSTQNAIDEITNKVNSVIEKMNTQFTAVGKEFNHLEKRIENLNKKVDDGFLDIWTYNAELLVLLENERTLDYHDSNVKNLYEKVRSQLKNNAKEIGNGCFEFYHKCDNTCMESVKNGTYDYPKYSEEAKLNREEIDGVKLESTRIYQILAIYSTVASSLVLVVSLGAISFWMCSNGSLQCRICI

SEQ ID NO: 8947 - protein, 566 aa, Artificial Sequence; identical to SEQ ID NO: 2669
  derived and/or modified protein sequence (wt) from hemagglutinin__InfluenzaA__AFK14115

SEQ ID NO: 8948 - protein, 566 aa, Artificial Sequence; identical to SEQ ID NO: 2669
  derived and/or modified protein sequence (wt) from hemagglutinin__InfluenzaA__AFK14131

SEQ ID NO: 8949 - protein, 566 aa, Artificial Sequence; identical to SEQ ID NO: 4351
  derived and/or modified protein sequence (wt) from hemagglutinin__InfluenzaA__AFK14139

SEQ ID NO: 8950 - protein, 566 aa, Artificial Sequence
  derived and/or modified protein sequence (wt) from hemagglutinin__InfluenzaA__AFK14148
MKAILVVLLYTFATANADTLCIGYHANNSTDTVDTVLEKNVTVTHSVNLLEDKHNGKLCKLRGVAPLHLGKCNIAGWILGNPECESLSTASSWSYIVETSSSDNGTCYPGDFIDYEELREQLSSVSSFERFEIFPKTSSWPNHDSNKGVTAACPHAGAKSFYKNLIWLVKKGNSYPKLSKSYINDKGKEVLVLWGIHHPSTSADQQSLYQNADAYVFVGTSRYSKKFKPEIAIRPKVRDQEGRMNYYWTLVEPGDKITFEATGNLVVPRYAFAMERNAGSGIIISDTPVHDCNTTCQTPKGAINTSLPFQNIHPITIGKCPKYVKSTKLRLATGLRNVPSIQSRGLFGAIAGFIEGGWTGMVDGWYGYHHQNEQGSGYAADLKSTQNAIDKITNKVNSVIEKMNTQFTAVGKEFNHLEKRIENLNKKVDDGFLDIWTYNAELLVLLENERTLDYHDSNVKNLYEKVRNQLKNNAKEIGNGCFEFYHKCDNTCMESVKNGTYDYPKYSEEAKLNREEIDGVKLESTRIYQILAIYSTVASSLVLVVSLGAISFWMCSNGSLQCRICI

SEQ ID NO: 8951 - protein, 566 aa, Artificial Sequence; identical to SEQ ID NO: 4296
  derived and/or modified protein sequence (wt) from hemagglutinin__InfluenzaA__AFK14157

SEQ ID NO: 8952 - protein, 566 aa, Artificial Sequence; identical to SEQ ID NO: 2669
  derived and/or modified protein sequence (wt) from hemagglutinin__InfluenzaA__AFK14166

SEQ ID NO: 8953 - protein, 566 aa, Artificial Sequence; identical to SEQ ID NO: 3997
  derived and/or modified protein sequence (wt) from hemagglutinin__InfluenzaA__AFK14175

SEQ ID NO: 8954 - protein, 566 aa, Artificial Sequence; identical to SEQ ID NO: 5574
  derived and/or modified protein sequence (wt) from hemagglutinin__InfluenzaA__AFK14184

SEQ ID NO: 8955 - protein, 566 aa, Artificial Sequence; identical to SEQ ID NO: 3022
  derived and/or modified protein sequence (wt) from hemagglutinin__InfluenzaA__AFK14193

SEQ ID NO: 8956 - protein, 566 aa, Artificial Sequence; identical to SEQ ID NO: 4266
  derived and/or modified protein sequence (wt) from hemagglutinin__InfluenzaA__AFK14202

SEQ ID NO: 8957 - protein, 566 aa, Artificial Sequence; identical to SEQ ID NO: 3022
  derived and/or modified protein sequence (wt) from hemagglutinin__InfluenzaA__AFK14211

SEQ ID NO: 8958 - protein, 566 aa, Artificial Sequence
  derived and/or modified protein sequence (wt) from hemagglutinin__InfluenzaA__AFK14220
MKAILVVLLYTFATANADTLCIGYHANNSTDTVDTVLEKNVTVTHSVNLLEDKHNGKLCKLRGVAPLHLGKCNIAGWILGNPECESLSTASSWSYIVETSSSDNGTCYPGDFIDYEELREQLSSASSFERYEIFPKTSSWPNHDSNKGVTAACPHAGAKSFYKNLIWLVKKGNSYPKLSKSYINDKGKEVLVLWGIHHPSTSADQQSLYQNADAYVFVGTSRYSKKFKPEIAIRPKVRDQEGRMNYYWTLVEPGDKITFEATGNLVVPRYAFAMERNAGSGIIISDTPVHDCNTTCQTPKGAINTSLPFQNIHPITIGKCPKYVKSTKLRLATGLRNVPSIQSRGLFGAIAGFIEGGWTGMVDGWYGYHHQNEQGSGYAADLKSTQNAIDKITNKVNSVIEKMNTQFTAVGKEFNHLEKRIENLNKKVDDGFLDIWTYNAELLVLLENERTLDYHDSNVKNLYEKVRNQLKNNAKEIGNGCFEFYHKCDNTCMESVKNGTYDYPKYSEEAKLNREEIDGVKLESTRIYQILAIYSTVASSLVLVVSLGAISFWMCSNGSLQCRICI

SEQ ID NO: 8959 - protein, 566 aa, Artificial Sequence; identical to SEQ ID NO: 4296
  derived and/or modified protein sequence (wt) from hemagglutinin__InfluenzaA__AFK14229

SEQ ID NO: 8960 - protein, 566 aa, Artificial Sequence; identical to SEQ ID NO: 7434
  derived and/or modified protein sequence (wt) from hemagglutinin__InfluenzaA__AFK14238

SEQ ID NO: 8961 - protein, 566 aa, Artificial Sequence
  derived and/or modified protein sequence (wt) from hemagglutinin__InfluenzaA__AFK14247
MKAILVVLLYTFATANADTLCIGYHANNSTDTVDTVLEKNVTVTHSVNLLEDKHNGKLCKLRGVAPLHLGKCNIAGWILGNPECESLSTASSWSYIVETSSSDNGTCYPGDFIDYEELREQLSSVSSFERFEIFPKTSSWPNHDSNKGVTAACPHAGAKSFYKNLIWLVKKGNSYPKLSKSYINDKGKEVLVLWGIHHPSTSADQQSLYQNADAYVFVGTSRYSKKFKPEIAIRPKVRDQEGRMNYYWTLVEPGDKITFEATGNLVVPRYAFAMERNAGSGIIISDTPVHDCNTTCQTPKGAMNTSLPFQNIHPITIGKCPKYVKSTKLRMATGLRNVPSIQSRGLFGAIAGFIEGGWTGMVDGWYGYHHQNEQGSGYAADLKSTQNAIDEITNKVNSVIEKMNTQFTAVGKEFNHLEKRIENLNKKVDDGFLDIWTYNAELLVLLENERTLDYHDSNVKNLYEKVRSQLKNNAKEIGNGCFEFYHKCDNTCMESVKNGTYDYPKYSEEAKLNREEIDGVKLESTRIYQILAIYSTVASSLVLVVSLGAISFWMCSNGSLQCRICI

SEQ ID NO: 8962 - protein, 566 aa, Artificial Sequence
  derived and/or modified protein sequence (wt) from hemagglutinin__InfluenzaA__AFK14272
MKAILIVLLYTFATANADTLCIGYHANNSTDTVDTVLEKNVTVTHSVNLLEDKHNGKLCKLTGVAPLHLGKCDIAGWILGNPECESLSTASSWSYIVETSSSDNGTCYPGDFIDYEELREQLSSVSSFERFEIFPKTSSWPNHDSNKGVTAACPHAGAKSFYKNLIWLVKKGNSYPKLSKSYINDKGKEVLVLWGIHHPSTSADQQSLYQNADAYVFVGTSRYSKKFKPEIAIRPKVRDQEGRMNYYWTLVEPGDKITFEATGNLVVPRYAFAMERNAGSGIIISDTPVHDCNTTCQTPKGAINTSLPFQNIHPITIGKCPKYVKSTKLRLATGLRNVPSIQSRGLFGAIAGFIEGGWTGMVDGWYGYHHQNEQGSGYAADLKSTQHAIDEITNKVNSVIEKMNTQFTAVGKEFNHLEKRIENLNKKVDDGFLDIWTYNAELLVLLENERTLDYHDSNVKNLYEKVRSQLKNNAKEIGNGCFEFYHKCDNTCMESVKNGTYDYPKYSEEAKLNREEIDGVKLESTRIYQILAIYSTVASSLVLVVSLGAISFWMCSNGSLQCRICI

SEQ ID NO: 8963 - protein, 566 aa, Artificial Sequence; identical to SEQ ID NO: 3022
  derived and/or modified protein sequence (wt) from hemagglutinin__InfluenzaA__AFK14314

SEQ ID NO: 8964 - protein, 566 aa, Artificial Sequence
  derived and/or modified protein sequence (wt) from hemagglutinin__InfluenzaA__AFK14323
MKAILVVLLYTFATANADTLCIGYHANNSTDTVDTVLEKNVTVTHSVNLLEDKHNGKLCKLRGVAPLHLGKCNIAGWILGNPECESLSTASSWSYIVETSNSDNGTCYPGDFINYEELREQLSSVSSFERFEIFPKTSSWPNHDSNKGVTAACPHAGAKSFYKNLIWLVKKGNSYPKLSKSYINDKGKEVLVLWGIHHPSTSADQQSLYQNADAYVFVGTSRYSKKFKPEIAIRPKVRDQEGRMNYYWTLVEPGDKITFEATGNLVVPRYAFAMERNAGSGIIISDTPVHDCNTTCQTPKGAINTSLPFQNIHPITIGKCPKYVKSTKLRLATGLRNVPSIQSRGLFGAIAGFIEGGWTGMVDGWYGYHHQNEQGSGYAADLKSTQNAIDKITNKVNSVIEKMNTQFTAVGKEFNHLEKRIENLNKKVDDGFLDIWTYNAELLVLLENERTLDYHDSNVKNLYEKVRSQLKNNAKEIGNGCFEFYHKCDNTCMESVKNGTYDYPKYSEEAKLNREEIDGVKLESTRIYQILAIYSTVASSLVLVVSLGAISFWMCSNGSLQCRICI

SEQ ID NO: 8965 - protein, 566 aa, Artificial Sequence; identical to SEQ ID NO: 7434
  derived and/or modified protein sequence (wt) from hemagglutinin__InfluenzaA__AFK14332

SEQ ID NO: 8966 - protein, 566 aa, Artificial Sequence
  derived and/or modified protein sequence (wt) from hemagglutinin__InfluenzaA__AFK14341
MKAILVVLLYTFATANADTLCIGYHANNSTDTVDTVLEKNVTVTHSVNLLEDKHNGKLCKLRGVAPLHLGKCNIAGWILGNPECESLSTASSWSYIVETSSSDNGTCYPGDFIDYEELREQLSSVSSFERFEIFPKTSSWPNHDSNKGVTAACPHAGAKSFYKNLIWLVKKGNSYPKLSKSYINDKGKEVLVLWGIHHPSTSADQQSLYQNADAYVFVGTSRYSKKFKPEIAIRPKVREQEGRMNYYWTLVEPGDKITFEATGNLVVPRYAFAMERNAGSGIIISDTPVHDCNTTCQTPKGAINTSLPFQNIHPITIGKCPKYVKSTKLRLATGLRNVPSIQSRGLFGAIAGFIEGGWTGMVDGWYGYHHQNEQGSGYAADLKSTQNAIDEITNKVNSVIEKMNTQFTAVGKEFNHLEKRIENLNKKVDDGFLDIWTYNAELLVLLENEKTLDYHDSNVKNLYEKVRSQLKNNAKEIGNGCFEFYHKCDNTCMESVKNGTYDYPKYSEEAKLNREEIDGVKLESTRIYQILAIYSTVASSLVLVVSLGAISFWMCSNGSLQCRICI

SEQ ID NO: 8967 - protein, 566 aa, Artificial Sequence; identical to SEQ ID NO: 4089
  derived and/or modified protein sequence (wt) from hemagglutinin__InfluenzaA__AFK14350

SEQ ID NO: 8968 - protein, 566 aa, Artificial Sequence
  derived and/or modified protein sequence (wt) from hemagglutinin__InfluenzaA__AFK14358
MKAILVVLLYTFATANADTLCIGYHANNSTDTVDTVLEKNVTVTHSVNLLEDKHNGKLCKLRGVAPLHLGKCNIAGWILGNPECESLSTASSWSYIVETSSSDNGACYPGDFIDYEELREQLSSVSSFERFEIFPKTSSWPNHDSNKGVTAACPHAGAKSFYKNLIWLVKKGNSYPKLSKSYINDKGKEVLVLWGIHHPSTSADQQSLYQNADAYVFVGTSRYSKKFKPEIAIRPKVREQEGRMNYYWTLVEPGDKITFEATGNLVVPRYAFAMERNAGSGIIISDTPVHDCNTTCQTPKGAINTSLPFQNIHPITIGKCPKYVKSTKLRLATGLRNVPSIQSRGLFGAIAGFIEGGWTGMVDGWYGYHHQNEQGSGYAADLKSTQNAIDEITNKVNSVIEKMNTQFTAVGKEFNHLEKRIENLNKKVDDGFLDIWTYNAELLVLLENEKTLDYHDSNVKNLYEKVRSQLKNNAKEIGNGCFEFYHKCDNTCMESVKNGTYDYPKYSEEAKLNREEIDGVKLESTRIYQILAIYSTVASSLVLVVSLGAISFWMCSNGSLQCRICI

SEQ ID NO: 8969 - protein, 566 aa, Artificial Sequence
  derived and/or modified protein sequence (wt) from hemagglutinin__InfluenzaA__AFK14395
MKAILVVLLYTFATANADTLCIGYHANNSTDTVDTVLEKNVTVTHSVNILEDKHNGKLCKLRGVAPLHLGKCNIAGWILGNPECESLSTASSWSYIVETSSSENGMCCPRDFIDYEELREQLSSVSSFERFEIFPKTSSWPNHDSNKGVTAACPHAGAKSFYKNLIWLVKKGNSYPKLSKSYINDKGKEVLVLWGIHHPSTSADQQSLYQNADAYVFVGSSRYSKKFKPEIAIRPKVRDQEGRMNYYWTLVEPGDKITFEATGNLVVPRYAFAMERNAGSGIIISDTPVHDCNTTCQTPKGAINTSLPFQNIHPITIGKCPKYVKSTKLRLATGLRNVPSIQSRGLFGAIAGFIEGGWTGMVDGWYGYHHQNEQGSGYAADLKSTQNAIDEITNKVNSVIEKMNTQFTAVGKEFNHLEKRIENLNKKVDDGFLDIWTYNAELLVLLENERTLDYHDSNVKNLYEKVRSQLKNNAKEVGNGCFEFYHKCDNTCMESVKNGTYDYPKYSEEAKLNREEIDGVKLESTRIYQILAIYSTAASSLVLVVSLGAISFWMCSNGSLQCRICI

SEQ ID NO: 8970 - protein, 566 aa, Artificial Sequence
  derived and/or modified protein sequence (wt) from hemagglutinin__InfluenzaA__AFK14431
MKAILVVLLYTFATANADTLCIGYHANNSTDTVDTVLEKNVTVTHSVNLLEDKHNGKLCKLRGVAPLHLGKCNIAGWILGNPECESLSTASSWSYIVETSNSDNGTCYPGDFLDYEELRKQLSSVSSFERVEIFPKTSSWPNHDSNKGVTAACPHAGAKSFYKNLIWLVKKGNSYPKLSKSYINDKGKEVLVLWGIHHPSTSADQQSLYQNADAYVFVGTSRYSKKFKPEIAIRPKVRDQEGRMNYYWTLVEPGDKITFEATGNLVVPRYAFAMERNAGSGIIISDTPVHDCNTTCQTPKGAINTSLPFQNIHPITIGKCPKYVKSTKLRLATGLRNVPSIQSRGLFGAIAGFIEGGWTGMVDGWYGYHHQNEQGSGYAADLKSTQNAIDKITNKVNSVIEKMNTQFTAVGKEFNHLEKRIENLNKKVDDGFLDIWTYNAELLVLLENERTLDYHDSNVKNLYEKVRSQLKNNAKEIGNGCFEFYHKCDNTCMESVKNGTYDYPKYSEEAKLNREEIDGVKLESTRIYQILAIYSTVASSLVLVVSLGAISFWMCSNGSLQCRICI

SEQ ID NO: 8971 - protein, 566 aa, Artificial Sequence; identical to SEQ ID NO: 2669
  derived and/or modified protein sequence (wt) from hemagglutinin__InfluenzaA__AFK14456

SEQ ID NO: 8972 - protein, 566 aa, Artificial Sequence; identical to SEQ ID NO: 2669
  derived and/or modified protein sequence (wt) from hemagglutinin__InfluenzaA__AFK14465

SEQ ID NO: 8973 - protein, 566 aa, Artificial Sequence
  derived and/or modified protein sequence (wt) from hemagglutinin__InfluenzaA__AFK14536
MKAILVVLLYTFATANADTLCIGYHANNSTDTVDTVLEKNVTVTHSVNLLEDKHNGKLCKLRGVAPLHLGKCNIAGWILGNPECESLSTASSWSYIVETYSSDNGTCYPGDFIDYEELREQLSSVSSFERFEIFPKTSSWPNHDSNKGVTAACPHAGAKSFYKNLIWLVKKGNSYPKLSKSYINDKGKEVLVLWGIHHPSTSADQQSLYQNADAYVFVGTSRYSKKFKPEIAIRPKVRDQEGRMNYYWTLVEPGDKITFEATGNLVVPRYAFAMERNAGSGIIISDTPVHDCNTTCQTPKGAINTSLPFQNIHPITIGKCPKYVKSTKLRLATGLRNVPSIQSRGLFGAIAGFIEGGWTGMVDGWYGYHHQNEQGSGYAADLKSTQHAIDEITNKVNSVIEKMNTQFTAVGKEFNHLEKRIENLNKKVDDGFLDIWTYNAELLVLLENERTLDYHDSNVKNLYEKVRSQLKNNAKEIGNGCFEFYHKCDNTCMESVKNGTYDYPKYSEEAKLNREEIDGVKLESTRIYQILAIYSTVASSLVLVVSLGAISFWMCSNGSLQCRICI

SEQ ID NO: 8974 - protein, 566 aa, Artificial Sequence; identical to SEQ ID NO: 2669
  derived and/or modified protein sequence (wt) from hemagglutinin__InfluenzaA__AFK14571

SEQ ID NO: 8975 - protein, 566 aa, Artificial Sequence; identical to SEQ ID NO: 7178
  derived and/or modified protein sequence (wt) from hemagglutinin__InfluenzaA__AFK14586

SEQ ID NO: 8976 - protein, 566 aa, Artificial Sequence
  derived and/or modified protein sequence (wt) from hemagglutinin__InfluenzaA__AFK14595
MKAILVVLLYTFATANADTLCIGYHANNSTDTVDTVLEKNVTVTHSVNLLEDKHNGKLCKLKGVAPLHLGKCNIAGWILGNPKCESLSTASSWSYIGETSSSNNGTCYPGNFIDFEELKKQLSSVSSFERFEIFPKTSSWPNHDSNKGVTAACPHAGAKSFYKNLIWLVKKGNSYPKLSKSYINDKGKEVLVLWGIHHPSTSADQQSLYQNADAYVFVGTSRYSKKFKPEIAIRPKVRDQEGRMNYYWTLVEPGDKITFEATGNLVVPRYAFAMERNAGSGIIISDTPVHDCNTTCQTPKGAINTSLPFQNIHPITIGKCPKYVKSTKLRLATGLRNVPSIQSRGLFGAIAGFIEGGWTGMVDGWYGYHHQNEQGSGYAADLKSTQNAIDEITNKVNSVIEKMNTQFTAVGKEFNHLEKRIENLNKKVDDGFLDIWTYNAELLVLLENERTLDYHDSNVKNLYEKVRSQLKNNAKEIGNGCFEFYHKCDNTCMESVKNGTYDYPKYSEEAKLNREEIDGVKLESTRIYQILAIYSTVASSLVLVVSLGAISFWMCSNGSLQCRICI

SEQ ID NO: 8977 - protein, 566 aa, Artificial Sequence; identical to SEQ ID NO: 7178
  derived and/or modified protein sequence (wt) from hemagglutinin__InfluenzaA__AFK14612

SEQ ID NO: 8978 - protein, 566 aa, Artificial Sequence; identical to SEQ ID NO: 2669
  derived and/or modified protein sequence (wt) from hemagglutinin__InfluenzaA__AFK14621

SEQ ID NO: 8979 - protein, 566 aa, Artificial Sequence
  derived and/or modified protein sequence (wt) from hemagglutinin__InfluenzaA__AFK14630
MKAILVVLLYTFATANADTLCIGYHANNSTDTVDTVLEKNVTVTHSVNLLEDKHNGKLCKLRGVAPLHLGKCNIAGWILGNPECESLSTASSWSYIVETSSSDNGTCYPGDFIDYEELREQLSSVSSFERFEIFPKTSSWPNHDSNKGVTAACPHAGAKSFYKNLIWLVKKGNSYPKLSKSYINDKGKEVLVLWGIHHPSTRADLQSINQNADAYVFVGTSRYSKKFKPEIAIRPKVRDQEGRMNYYWTLVEPGDKITFEATGNLVVPRYAFAMERNAGSGIIISDTPVHDCNTTCQTPKGAINTSLPFQNIHPITIGKCPKYVKSTKLRLATGLRNVPSIQSRGLFGAIAGFIEGGWTGMVDGWYGYHHQNEQGSGYAADLKSTQNAIDEITNKVNSVIEKMNTQFTAVGKEFNHLEKRIENLNKKVDDGFLDIWTYNAELLVLLENERTLDYHDSNVKNLYEKVRSQLKNNAKEIGNGCFEFYHKCDNTCMESVKNGTYDYPKYSEEAKLNREEIDGVKLESTRIYQILAIYSTVASSLVLVVSLGAISFWMCSNGSLQCRICI

SEQ ID NO: 8980 - protein, 566 aa, Artificial Sequence
  derived and/or modified protein sequence (wt) from hemagglutinin__InfluenzaA__AFK14639
MKAILVVLLYTFATANADTLCIGYHANNSTDTVDTVLEKNVTVTHSVNILEDKHNGKLCKLRGVAPLHLGKCNIAGWILGNPECESLSTASSWSYIVETSSSDNGTCYPGDFIDYEELREQLSSVSSFERFEIFPKTSSWPNHDSNKGVTAACPHAGAKSFYKNLIWLVKKGNSYPKLSKSYINDKGKEVLVLWGIHHPSTSADQQSLYQNADAYVFVGSSRYSKKFKPEIAIRPKVRDQEGRMNYYWTLVEPGDKITFEATGNLVVPRYAFAMERNAGSGIIISDTPVHDCNTTCQTPKGAINTSLPFQNIHPITIGKCPKYVKSTKLRLATGLRNVPSIQSRGLFGAIAGFIEGGWTGMVDGWYGYHHQNEQGSGYAADLKSTQNAIDEITNKVNSVIEKMNTQFTAVGKEFNHLEKRIENLNKKVDDGFLDIWTYNAELLVLLENERTLDYHDSNVKNLYEKVRGQLKNNAKEIGNGCFEFYHKCDNTCMESVKNGTYDYPKYSEEAKLNREEIDGVKLESTRIYQILAIYSTVASSLVLVVSLGAISFWMCSNGSLQCRICI

SEQ ID NO: 8981 - protein, 566 aa, Artificial Sequence; identical to SEQ ID NO: 2669
  derived and/or modified protein sequence (wt) from hemagglutinin__InfluenzaA__AFK14661

SEQ ID NO: 8982 - protein, 566 aa, Artificial Sequence; identical to SEQ ID NO: 7178
  derived and/or modified protein sequence (wt) from hemagglutinin__InfluenzaA__AFK14670

SEQ ID NO: 8983 - protein, 566 aa, Artificial Sequence; identical to SEQ ID NO: 7178
  derived and/or modified protein sequence (wt) from hemagglutinin__InfluenzaA__AFK14678

SEQ ID NO: 8984 - protein, 566 aa, Artificial Sequence
  derived and/or modified protein sequence (wt) from hemagglutinin__InfluenzaA__AFK14688
MKAILVVLLYTFATANADTLCIGYHANNSTDTVDTVLEKNVTVTHSVNLLEDKHNGKLCKLRGVAPLHLGKCNIAGWILGNPECESLSTASSWSYIVETSSSDNGTCYPGDFIHDEELRKQLSSVSSFERFEIFPKTSSWPNHDSNKGVTAACPHAGAKSFYKNLIWLVKKGNSYPKLSKSYINDKGKEVLVLWGIHHPSTSADQQSLYQNADAYVFVGTSRYSKKFKPEIAIRPKVRDQEGRMNYYWTLVEPGDKITFEATGNLVVPRYAFAMERKAGSGIIILDTPVHDWNTTCETPKGAVNTSLPFQNIHPITIGKCPKYVKSTKLRLATGLRNVPSIQSRGLFGAIAGFIEGGWTGMVDGWYGYHHQNEQGSGYAADLKSTQNAIDEITNKVNSVIEKMNTQFTAVGKEFNHLEKRIENLNKKVDDGFLDIWTYNAELLVLLENERTLDYHDSNVKNLYEKVRSQLKNNAKEIGNGCFEFYHKCDNTCMESVKNGTYDYPKYSEEAKLNREEIDGVKLESTRIYQILAIYSTVASSLVLVVSLGAISFWMCSNGSLQCRICI

SEQ ID NO: 8985 - protein, 566 aa, Artificial Sequence; identical to SEQ ID NO: 7178
  derived and/or modified protein sequence (wt) from hemagglutinin__InfluenzaA__AFK14697

SEQ ID NO: 8986 - protein, 566 aa, Artificial Sequence; identical to SEQ ID NO: 7178
  derived and/or modified protein sequence (wt) from hemagglutinin__InfluenzaA__AFK14713

SEQ ID NO: 8987 - protein, 566 aa, Artificial Sequence; identical to SEQ ID NO: 7178
  derived and/or modified protein sequence (wt) from hemagglutinin__InfluenzaA__AFK14722

SEQ ID NO: 8988 - protein, 566 aa, Artificial Sequence
  derived and/or modified protein sequence (wt) from hemagglutinin__InfluenzaA__AFK14731
MKAILVVLLYTFATANADTLCIGYHANNSTDTVDTVLEKNVTVTHSVNLLEDKHNGKLCKLRGVAPLHLGKCNIAGWILGNPECESLSTASSWSYIVETSSSDNGTCYPGDFIDYEELRKQLSSVSSFERVEIFPKTSSWPNHDSNKGVTAACPHAGAKSFYKNLIWLVKKGNSYPKLSKSYINDKGKEVLVLWGIHHPSTSADQQSLYQNADAYVFVGTSRYSKKFKPEIAIRPKVRDQEGRMNYYWTLVEPGDKITFEATGNLVVPRYAFAMERNAGSGIIISDTPVHDCNTTCQTPKGAVNTSLPFQNIHPITIGKCPKYVKSTKLRLATGLRNVPSIQSRGLFGAIAGFIEGGWTGMVDGWYGYHHQNEQGSGYAADLKSTQNAIDEITNKVNSVIEKMNTQFTAVGKEFNHLEKRIENLNKKVDDGFLDIWTYNAELLVLLENERTLDYHDSNVKNLYEKVRSQLKNNAKEIGNGCFEFYHKCDNTCMESVKNGTYDYPKYSEEAKLNREEIDGVKLESTRIYQILAIYSTVASSLVLVVSLGAISFWMCSNGSLQCRICI

SEQ ID NO: 8989 - protein, 566 aa, Artificial Sequence; identical to SEQ ID NO: 7178
  derived and/or modified protein sequence (wt) from hemagglutinin__InfluenzaA__AFK14740

SEQ ID NO: 8990 - protein, 566 aa, Artificial Sequence; identical to SEQ ID NO: 7178
  derived and/or modified protein sequence (wt) from hemagglutinin__InfluenzaA__AFK14749

SEQ ID NO: 8991 - protein, 566 aa, Artificial Sequence; identical to SEQ ID NO: 7178
  derived and/or modified protein sequence (wt) from hemagglutinin__InfluenzaA__AFK14756

SEQ ID NO: 8992 - protein, 566 aa, Artificial Sequence; identical to SEQ ID NO: 7178
  derived and/or modified protein sequence (wt) from hemagglutinin__InfluenzaA__AFK14764

SEQ ID NO: 8993 - protein, 566 aa, Artificial Sequence
  derived and/or modified protein sequence (wt) from hemagglutinin__InfluenzaA__AFK14779
MKAILVVLLYTFATANADTLCIGYHANNSTDTVDTVLEKNVTVTHSVNLLEDKHNGKLCKLGGVAPLHLGKCNIAGWILGNPECESLSTASSWSYIVETSSSDNGTCYPGNFIDYEELREQLSSVSSFERFEIFPKTSSWPNHDSNKGVTAACPHAGAKSFYKNLIWLVKKGNSYPKLSKSYINDKGKEVLVLWGIHHPSTSADQQSLYQNADAYVFVGTSRYSKKFKPEIAIRPKVRDQEGRMNYYWTLVEPGDKITFEATGNLVVPRYAFAMERNAGSGIIISDTPVHDCNTTCQTPKGAINTSLPFQNIHPITIGKCPKYVKSTKLRLATGLRNVPSIQSRGLFGAIAGFIEGGWTGMVDGWYGYHHQNEQGSGYAADLKSTQNAIDEITNKVNSVIEKMNTQFTAVGKEFNHLEKRIENLNKKVDDGFLDIWTYNAELLVLLENERTLDYHDSNVKNLYEKVRSQLKNNAKEIGNGCFEFYHKCDNTCMESVKNGTYDYPKYSEEAKLNREEIDGVKLESTRIYQILAIYSTVASSLVLVVSLGAISFWMCSNGSLQCRICI

SEQ ID NO: 8994 - protein, 566 aa, Artificial Sequence
  derived and/or modified protein sequence (wt) from hemagglutinin__InfluenzaA__AFK14788
MKAILVVLLYTFATANADTLCIGYHANNSTDTVDTVLEKNVTVTHSVNILEDKHNGKLCKLRGVAPLHLGKCNIAGWILGNPECESLSTASSWSYIVETSSSDNGTCYPGDFIDYEELREQLSSVSSFERFEIFPKTSSWPNHDSNKGVTAACPHAGAKSFYKNLIWLVKKGNSYPKLRKSYINDKGKEVLVLWGIHHPSTSADQQSLYQNADAYVFVGSSRYSKKFKPEIAIRPKVRDQEGRMNYYWTLVEPGDKITFEATGNLVVPRYAFAMERNAGSGIIISDTPVHDCNTTCQTPKGAINTSLPFQNIHPITIGKCPKYVKSTKLRLATGLRNVPSIQSRGLFGAIAGFIEGGWTGMVDGWYGYHHQNEQGSGYAADLKSTQNAIDEITNKVNSVIEKMNTQFTAVGKEFNHLEKRIENLNKKVDDGFLDIWTYNAELLVLLENERTLDYHDSNVKNLYEKVRSQLKNNAKEVGNGCFEFYHKCDNTCMESVKNGTYDYPKYSEEAKLNREEIDGVKLESTRIYQILAIYSTAASSLVLVVSLGAISFWMCSNGSLQCRICI

SEQ ID NO: 8995 - protein, 566 aa, Artificial Sequence
  derived and/or modified protein sequence (wt) from hemagglutinin__InfluenzaA__AFK14798
MKAILVVLLYTFATANADTLCIGYHANNSTDTVDTVLEKNVTVTHSVNLLEDKHNGKLCKLRGVAPLHLGKCNIAGWILGNPECESLSTASSWSYIVETSSSDNGTCYPGDFINYEELRKQLSSVSSFERVEIFPKTSSWPNHDSNKGVTAACPHAGAKSFYKNLIWLVKKGNSYPKLSKSYINDKGKEVLVLWGIHHPSTSADQQSLYQNADAYVFVGTSRYSKKFKPEIAIRPKVRDQEGRMNYYWTLVEPGDKITFEATGNLVVPRYAFAMERNAGSGIIISDTPVHDCNTTCQTPNGAINTSLPFQNIHPITIGKCPKYVKSTKLRLATGLRNVPSIQSRGLFGAIAGFIEGGWTGMVDGWYGYHHQNEQGSGYAADLKSTQNAIDKITNKVNSVIEKMNTQFTAVGKEFNHLEKRIENLNKKVDDGFLDIWTYNAELLVLLENERTLDYHDSNVKNLYEKVRSQLKNNAKEIGNGCFEFYHKCDNTCMESVKNGTYDYPKYSEEAKLNREEIDGVKLESTRIYQILAIYSTVASSLVLVVSLGAISFWMCSNGSLQCRICI

SEQ ID NO: 8996 - protein, 566 aa, Artificial Sequence
  derived and/or modified protein sequence (wt) from hemagglutinin__InfluenzaA__AFK14814
MKAILVVLLYTFATANADTLCIGYHANNSTDTVDTVLEKNVTVTHSVNLLEDKHNGKLCKLRGVAPLHLGKCNIAGWILGNPECESLSTASSWSYIVETSSSDNGTCYPGDFIDYEELREQLSSVSSYERYEIFPKTSSWPNHDSNKGVTAACPHAGAKSFYKNLIWLVKKGNSYPKLSKSYINDKGKEVLVLWGIHHPSTSADQQSLYQNADAYVFVGTSRYSKKFKPEIAIRPKVREQEGRMNYYWTLVEPGDKITFEATGNLVVPRYAFAMERNAGSGIIISDTPVHDCNTTCQTPKGAINTSLPFQNIHPITIGKCPKYVKSTKLRLATGLRNVPSIQSRGLFGAIAGFIEGGWTGMVDGWYGYHHQNEQGSGYAADLKSTQNAIDEITNKVNSVIEKMNTQFTAVGKEFNHLEKRIENLNKKVDDGFLDIWTYNAELLVLLENERTLDYHDSNVKNLYEKVRSQLKNNAKEIGNGCFEFYHKCDNTCMESVKNGTYDYPKYSEEAKLNREEIDGVKLESTRIYQILAIYSTVASSLVLVVSLGAISFWMCSNGSLQCRICI

SEQ ID NO: 8997 - protein, 566 aa, Artificial Sequence
  derived and/or modified protein sequence (wt) from hemagglutinin__InfluenzaA__AFK14831
MKAILVVLLYTFATANADTLCIGYHANNSTDTVDTVLEKNVTVTHSVNLLEDKHNGKLCKLRGVAPLHLGKCNIAGWILGNPECESLSTASSWSYIVETSSSDNGTCYPGDFSDYEELREQLSSVSSFERFEIFPKTSSWPNHDSNKGVTAACPHAGAKSFYKNLIWLVKKGNSYPKLSKSYINDKGKEVLVLWGIHHPSTSADQQSLYQNADAYVFVGTSRYSKKFKPEIAIRPKVRDQEGRMNYYWTLVEPGDKITFEATGNLVVPRYAFAMERNAGSGIIISDTPVHDCNTTCQTPKGAINTSLPFQNIHPITIGKCPKYVKSTKLRLATGLRNVPSIQSRGLFGAIAGFIEGGWTGMVDGWYGYHHQNEQGSGYAADLKSTQNAIDEITNKVNSVIEKMNTQFTAVGKEFNHLEKRIENLNKKVDDGFLDIWTYNAELLVLLENERTLDYHDSNVKNLYEKVRSQLKNNAKEIGNGCFEFYHKCDNTCMESVKNGTYDYPKYSEEAKLNREEIDGVKLESTRIYQILAIYSTVASSLVLVVSLGAISFWMCSNGSLQCRICI

SEQ ID NO: 8998 - protein, 566 aa, Artificial Sequence; identical to SEQ ID NO: 2669
  derived and/or modified protein sequence (wt) from hemagglutinin__InfluenzaA__AFK14839

SEQ ID NO: 8999 - protein, 566 aa, Artificial Sequence
  derived and/or modified protein sequence (wt) from hemagglutinin__InfluenzaA__AFK14847
MKAILVVLLYTFATANADTLCIGYHANNSTDTVDTVLEKNVTVTHSVNLLEDKHNGKLCKLRGVAPLHLGKCNIAGWILGNPECESLSTASSWSYIVETSSSDNGTCYPGDFIDYEELREQLSSASSFERYEIFPKTSSWPNHDSNKGVTAACPHAGAKSFYKNLIWLVKKGNSYPKLSKSYINDKGKEVLVLWGIHHPSTSADQQSLYQNADAYVFVGTSRYSKKFKPEIAIRPKVRDQEGRMNYYWTLVEPGDKITFEATGNLVVPRYAFAMERNAGSGIIISDTPVHDCNTTCQTPKGAINTSLPFQNIHPITIGKCPKYVKSTKLRLATGLRNVPSIQSRGLFGAIAGFIEGGWTGMVDGWYGYHHQNEQGSGYAADLKSTQNAIDEITNKVNSVIEKMNTQFTAVGKEFNHLEKRIENLNKKVDDGFLDIWTYNAELLVLLENERTLDYHDSNVKNLYEKVRSQLKNNAKEIGNGCFEFYHKCDNTCMESVKNGTYDYPKYSEEAKLNREEIDGVKLESTRIYQILAIYSTVASSLVLVVSLGAISFWMCSNGSLQCRICI

SEQ ID NO: 9000 - protein, 566 aa, Artificial Sequence; identical to SEQ ID NO: 7178
  derived and/or modified protein sequence (wt) from hemagglutinin__InfluenzaA__AFK14868

SEQ ID NO: 9001 - protein, 566 aa, Artificial Sequence; identical to SEQ ID NO: 3833
  derived and/or modified protein sequence (wt) from hemagglutinin__InfluenzaA__AFK14884

SEQ ID NO: 9002 - protein, 566 aa, Artificial Sequence; identical to SEQ ID NO: 3833
  derived and/or modified protein sequence (wt) from hemagglutinin__InfluenzaA__AFK14892

SEQ ID NO: 9003 - protein, 566 aa, Artificial Sequence; identical to SEQ ID NO: 3833
  derived and/or modified protein sequence (wt) from hemagglutinin__InfluenzaA__AFK14901

SEQ ID NO: 9004 - protein, 566 aa, Artificial Sequence; identical to SEQ ID NO: 3833
  derived and/or modified protein sequence (wt) from hemagglutinin__InfluenzaA__AFK14910

SEQ ID NO: 9005 - protein, 566 aa, Artificial Sequence; identical to SEQ ID NO: 2669
  derived and/or modified protein sequence (wt) from hemagglutinin__InfluenzaA__AFK14919

SEQ ID NO: 9006 - protein, 566 aa, Artificial Sequence; identical to SEQ ID NO: 2669
  derived and/or modified protein sequence (wt) from hemagglutinin__InfluenzaA__AFK14929

SEQ ID NO: 9007 - protein, 566 aa, Artificial Sequence; identical to SEQ ID NO: 8186
  derived and/or modified protein sequence (wt) from hemagglutinin__InfluenzaA__AFK25599

SEQ ID NO: 9008 - protein, 566 aa, Artificial Sequence
  derived and/or modified protein sequence (wt) from hemagglutinin__InfluenzaA__AFK25601
MKAILVVLLYTFATANADTLCIGYHANNSTDTVDTVLEKNVTVTHSVNLLEDKHNGKLCKLRGVAPLHLGKCNIAGWILGNPECVTLSTASSWSYIVETSSSDNGTCYPGDFIDYEELREQLSSVSSFERFEIFPKTSSWPNHDSNKGVTAACPHAGAKGFYKNLIWLVKKGNSYPKLSKSYINDKGKEVLVLWGIHHPSTTADQQSLYQNADTYVFVGTSRYSKKFKPEIAIRPKVRDQEGRMNYYWTLVEPGDKITFEATGNLVVPRYAFAMERDAGSGIIISDTPVHDCNTTCQTPKGAINTSLPFQNIHPITIGKCPKYVKSTKLRLATGLRNVPSIQSRGLFGAIAGFIEGGWTGMVDGWYGYHHQNEQGSGYAADLKSTQNAIDKITNKVNSVIEKMNTQFTAVGKEFNHLEKRIENLNKKVDDGFLDIWTYNAELLVLLENERTLDYHDSNVKNLYEKVRNQLKNNAKEIGNGCFEFYHKCDNTCMESVKNGTYDYPKYSEEAKLNREEIDGVKLESTRIYQILAIYSTAASSLVLVVSLGAISFWMCSNGSLQCRICI

SEQ ID NO: 9009 - protein, 566 aa, Artificial Sequence; identical to SEQ ID NO: 8186
  derived and/or modified protein sequence (wt) from hemagglutinin__InfluenzaA__AFK25603

SEQ ID NO: 9010 - protein, 566 aa, Artificial Sequence
  derived and/or modified protein sequence (wt) from hemagglutinin__InfluenzaA__AFK25605
MKAILVVLLYTFATANADTLCIGYHANNSTDTVDTVLEKNVTVTHSVNLLEDKHNGKLCKLRGVAPLHLGKCNIAGWILGNPECETLSTASSWSYIVETSSSDNGTCYPGDFIDYEELREQLSSVSSFERFEIFPKTSSWPNHDSNKGVTAACPHAGAKGFYKNLIWLVKKGNSYPKLSKSYINDKGKEVLVLWGIHHPSTTADQQSLYQNADTYVFVGTSRYSKKFKPEIAIRPKVRDQEGRMNYYWTLVEPGDKITFEATGNLVVPRYAFAMERDAGSGIIISDTPVHDCNTTCQTPKGAINTSLPFQNIHPITIGKCPKYVRSTKLRLATGLRNVPSIQSRGLFGAIAGFIEGGWTGMVDGWYGYHHQNEQGSGYAADLKSTQNAIDKITNKVNSVIEKMNTQFTAVGKEFNHLEKRIENLNKKVDDGFLDIWTYNAELLVLLENERTLDYHDSNVKNLYEKVRNQLKNNAKEIGNGCFEFYHKCDNTCMESVKNGTYDYPKYSEEAKLNREEIDGVKLESTRIYQILAIYSTAASSLVLVVSLGAISFWMCSNGSLQCRICI

SEQ ID NO: 9011 - protein, 566 aa, Artificial Sequence; identical to SEQ ID NO: 8414
  derived and/or modified protein sequence (wt) from hemagglutinin__InfluenzaA__AFK74526

SEQ ID NO: 9012 - protein, 566 aa, Artificial Sequence; identical to SEQ ID NO: 2669
  derived and/or modified protein sequence (wt) from hemagglutinin__InfluenzaA__AFK74534

SEQ ID NO: 9013 - protein, 566 aa, Artificial Sequence; identical to SEQ ID NO: 2669
  derived and/or modified protein sequence (wt) from hemagglutinin__InfluenzaA__AFK74544

SEQ ID NO: 9014 - protein, 566 aa, Artificial Sequence; identical to SEQ ID NO: 2669
  derived and/or modified protein sequence (wt) from hemagglutinin__InfluenzaA__AFK74554

SEQ ID NO: 9015 - protein, 566 aa, Artificial Sequence; identical to SEQ ID NO: 2911
  derived and/or modified protein sequence (wt) from hemagglutinin__InfluenzaA__AFK74564

SEQ ID NO: 9016 - protein, 566 aa, Artificial Sequence; identical to SEQ ID NO: 5224
  derived and/or modified protein sequence (wt) from hemagglutinin__InfluenzaA__AFK74575

SEQ ID NO: 9017 - protein, 566 aa, Artificial Sequence; identical to SEQ ID NO: 2656
  derived and/or modified protein sequence (wt) from hemagglutinin__InfluenzaA__AFK74585

SEQ ID NO: 9018 - protein, 566 aa, Artificial Sequence
  derived and/or modified protein sequence (wt) from hemagglutinin__InfluenzaA__AFK74595
MKAILVVLLYTFATANADTLCIGYHANNSTDTVDTVLEKNVTVTHSVNLLEDKHNGKLCKLRGVAPLHLGKCNIAGWILGNPECESLSTASSWSYIVETSSSDNGTCYPGDFIDYEELREQLSSVSSFERFEIFPKTSSWPNHDLNKGVTAACPHAGAKSFYKNLIWLVKKGNSYPKLSKSYINDKGKEVLVLWGIHHPSTSADQQSLYQNADAYVFVGTSRYSKKFKPEIAIRPKVRDQEGRMNYYWTLVEPGDKITFEATGNLVVPRYAFAMERNAGSGIIISDTPVHDCNTTCQTPKGAINTSLPFQNIHPITIGKCPKYVKSTKLRLATGLRNVPSIQSRGLFGAIAGFIEGGWTGMVDGWYGYHHQNEQGSGYAADLKSTQNAIDEITNKVNSVIEKMNTQFTAVGKEFNHLEKRIENLNKKVDDGFLDIWTYNAELLVLLENERTLDYHDSNVKNLYEKVRSQLKNNAKEIGNGCFEFYHKCDNTCMESVKNGTYDYPKYSEEAKLNREEIDGVKLESTRIYQILAIYSTVASSLVLVVSLGAISFWMCSNGSLQCRICI

SEQ ID NO: 9019 - protein, 566 aa, Artificial Sequence; identical to SEQ ID NO: 2669
  derived and/or modified protein sequence (wt) from hemagglutinin__InfluenzaA__AFK74605

SEQ ID NO: 9020 - protein, 566 aa, Artificial Sequence; identical to SEQ ID NO: 2911
  derived and/or modified protein sequence (wt) from hemagglutinin__InfluenzaA__AFK74615

SEQ ID NO: 9021 - protein, 566 aa, Artificial Sequence; identical to SEQ ID NO: 2911
  derived and/or modified protein sequence (wt) from hemagglutinin__InfluenzaA__AFK74625

SEQ ID NO: 9022 - protein, 566 aa, Artificial Sequence; identical to SEQ ID NO: 3771
  derived and/or modified protein sequence (wt) from hemagglutinin__InfluenzaA__AFK74635

SEQ ID NO: 9023 - protein, 566 aa, Artificial Sequence; identical to SEQ ID NO: 3771
  derived and/or modified protein sequence (wt) from hemagglutinin__InfluenzaA__AFK74645

SEQ ID NO: 9024 - protein, 566 aa, Artificial Sequence; identical to SEQ ID NO: 2669
  derived and/or modified protein sequence (wt) from hemagglutinin__InfluenzaA__AFK74655

SEQ ID NO: 9025 - protein, 566 aa, Artificial Sequence; identical to SEQ ID NO: 2669
  derived and/or modified protein sequence (wt) from hemagglutinin__InfluenzaA__AFK74665

SEQ ID NO: 9026 - protein, 566 aa, Artificial Sequence; identical to SEQ ID NO: 2669
  derived and/or modified protein sequence (wt) from hemagglutinin__InfluenzaA__AFK74675

SEQ ID NO: 9027 - protein, 566 aa, Artificial Sequence; identical to SEQ ID NO: 2669
  derived and/or modified protein sequence (wt) from hemagglutinin__InfluenzaA__AFK74685

SEQ ID NO: 9028 - protein, 566 aa, Artificial Sequence; identical to SEQ ID NO: 5224
  derived and/or modified protein sequence (wt) from hemagglutinin__InfluenzaA__AFK74695

SEQ ID NO: 9029 - protein, 566 aa, Artificial Sequence; identical to SEQ ID NO: 2669
  derived and/or modified protein sequence (wt) from hemagglutinin__InfluenzaA__AFK74705

SEQ ID NO: 9030 - protein, 566 aa, Artificial Sequence; identical to SEQ ID NO: 2669
  derived and/or modified protein sequence (wt) from hemagglutinin__InfluenzaA__AFK74715

SEQ ID NO: 9031 - protein, 566 aa, Artificial Sequence; identical to SEQ ID NO: 2669
  derived and/or modified protein sequence (wt) from hemagglutinin__InfluenzaA__AFK74725

SEQ ID NO: 9032 - protein, 566 aa, Artificial Sequence; identical to SEQ ID NO: 2669
  derived and/or modified protein sequence (wt) from hemagglutinin__InfluenzaA__AFK74735

SEQ ID NO: 9033 - protein, 566 aa, Artificial Sequence; identical to SEQ ID NO: 2669
  derived and/or modified protein sequence (wt) from hemagglutinin__InfluenzaA__AFK74745

SEQ ID NO: 9034 - protein, 566 aa, Artificial Sequence; identical to SEQ ID NO: 2669
  derived and/or modified protein sequence (wt) from hemagglutinin__InfluenzaA__AFK74755

SEQ ID NO: 9035 - protein, 566 aa, Artificial Sequence; identical to SEQ ID NO: 5224
  derived and/or modified protein sequence (wt) from hemagglutinin__InfluenzaA__AFK74765

SEQ ID NO: 9036 - protein, 566 aa, Artificial Sequence; identical to SEQ ID NO: 2669
  derived and/or modified protein sequence (wt) from hemagglutinin__InfluenzaA__AFK74775

SEQ ID NO: 9037 - protein, 566 aa, Artificial Sequence; identical to SEQ ID NO: 2669
  derived and/or modified protein sequence (wt) from hemagglutinin__InfluenzaA__AFK74785

SEQ ID NO: 9038 - protein, 566 aa, Artificial Sequence; identical to SEQ ID NO: 2669
  derived and/or modified protein sequence (wt) from hemagglutinin__InfluenzaA__AFK74795

SEQ ID NO: 9039 - protein, 566 aa, Artificial Sequence; identical to SEQ ID NO: 2669
  derived and/or modified protein sequence (wt) from hemagglutinin__InfluenzaA__AFK74805

SEQ ID NO: 9040 - protein, 566 aa, Artificial Sequence; identical to SEQ ID NO: 2669
  derived and/or modified protein sequence (wt) from hemagglutinin__InfluenzaA__AFK74815

SEQ ID NO: 9041 - protein, 566 aa, Artificial Sequence; identical to SEQ ID NO: 2669
  derived and/or modified protein sequence (wt) from hemagglutinin__InfluenzaA__AFK74825

SEQ ID NO: 9042 - protein, 566 aa, Artificial Sequence; identical to SEQ ID NO: 2669
  derived and/or modified protein sequence (wt) from hemagglutinin__InfluenzaA__AFK74835

SEQ ID NO: 9043 - protein, 566 aa, Artificial Sequence; identical to SEQ ID NO: 2669
  derived and/or modified protein sequence (wt) from hemagglutinin__InfluenzaA__AFK74845

SEQ ID NO: 9044 - protein, 566 aa, Artificial Sequence; identical to SEQ ID NO: 2669
  derived and/or modified protein sequence (wt) from hemagglutinin__InfluenzaA__AFK74895

SEQ ID NO: 9045 - protein, 566 aa, Artificial Sequence; identical to SEQ ID NO: 2669
  derived and/or modified protein sequence (wt) from hemagglutinin__InfluenzaA__AFK74905

SEQ ID NO: 9046 - protein, 566 aa, Artificial Sequence; identical to SEQ ID NO: 2669
  derived and/or modified protein sequence (wt) from hemagglutinin__InfluenzaA__AFK74915

SEQ ID NO: 9047 - protein, 566 aa, Artificial Sequence
  derived and/or modified protein sequence (wt) from hemagglutinin__InfluenzaA__AFK74925
MKAILVVLLYTFATANADTLCIGYHANNSTDTVDTVLEKNVTVTHSVNLLEDKHNGKLCKLRGVVPLHLGKCNIAGWILGNPECESLSTASSWSYIVETSSSDNGTCYPGDFIDYEELREQLSSVSSFERFEIFPKTSSWPNHDSNKGVTAACPHAGAKSFYKNLIWLVKKGNSYPKLSKSYINDKGKEVLVLWGIHHPSTSADQQSLYQNADAYVFVGTSRYSKKFKPEIAIRPKVRDQEGRMNYYWTLVEPGDKITFEATGNLVVPRYAFTMERNAGSGIIISDTPVHDCNTTCQTPKGAINTSLPFQNIHPITIGKCPKYVKSTKLRLATGLRNVPSIQSRGLFGAIAGFIEGGWTGMVDGWYGYHHQNEQGSGYAADLKSTQNAIDGITNKVNSVIEKMNTQFTAVGKEFNHLEKRIENLNKKIDDGFLDIWTYNAELLVLLENERTLDYHDSNVKNLYEKVRSQLKNNAKEIGNGCFEFYHKCDNTCMESVKNGTYDYPKYSEEAKLNREEIDGVKLESTRIYQILAIYSTVASSLVLVVSLGAISFWMCSNGSLQCRICI

SEQ ID NO: 9048 - protein, 566 aa, Artificial Sequence; identical to SEQ ID NO: 3771
  derived and/or modified protein sequence (wt) from hemagglutinin__InfluenzaA__AFK74935

SEQ ID NO: 9049 - protein, 566 aa, Artificial Sequence; identical to SEQ ID NO: 2669
  derived and/or modified protein sequence (wt) from hemagglutinin__InfluenzaA__AFK74945

SEQ ID NO: 9050 - protein, 566 aa, Artificial Sequence; identical to SEQ ID NO: 2669
  derived and/or modified protein sequence (wt) from hemagglutinin__InfluenzaA__AFK74955

SEQ ID NO: 9051 - protein, 566 aa, Artificial Sequence; identical to SEQ ID NO: 2669
  derived and/or modified protein sequence (wt) from hemagglutinin__InfluenzaA__AFK74965

SEQ ID NO: 9052 - protein, 566 aa, Artificial Sequence; identical to SEQ ID NO: 2760
  derived and/or modified protein sequence (wt) from hemagglutinin__InfluenzaA__AFK74975

SEQ ID NO: 9053 - protein, 566 aa, Artificial Sequence; identical to SEQ ID NO: 2669
  derived and/or modified protein sequence (wt) from hemagglutinin__InfluenzaA__AFK74985

SEQ ID NO: 9054 - protein, 566 aa, Artificial Sequence; identical to SEQ ID NO: 5224
  derived and/or modified protein sequence (wt) from hemagglutinin__InfluenzaA__AFK74995

SEQ ID NO: 9055 - protein, 566 aa, Artificial Sequence; identical to SEQ ID NO: 2669
  derived and/or modified protein sequence (wt) from hemagglutinin__InfluenzaA__AFK75005

SEQ ID NO: 9056 - protein, 566 aa, Artificial Sequence
  derived and/or modified protein sequence (wt) from hemagglutinin__InfluenzaA__AFK75015
MKAILVVLLYTFATANADTLCIGYHANNSTDTVDTVLEKNVTVTHSVNLLEDKHNGKLCKLRGVAPLHLGKCNIAGWILGNPECESLSTASSWSYIVETSSSDNGTCYPGDFIDYEELREQLSSVSSFERFEIFPKTSSWPNHDSNKGVTAACPHAGAKSFYKNLIWLVKKGNSYPKLSKSYINDKGKEVLVLWGIHHPSTSADQQSLYQNADAYVFVGTSRYSKKFKPEIAIRPKVRDQEGRMNYYWTLVEPGDKITFEATGNLVVPRYAFAMERNAGSGIIISDTPVHDCNTTCQTPKGAINTSLPFQNIHPITIGKCPKYVKSTKLRLATGLRNVPSIQSRGLFGAIAGFIEGGWTGMVDGWYGYHHQNEQGSGYAADLKSTQNAIDEITNKVNSVIEKMNTQFTAVGKEFNHLEKRIENLNKKVDDGFLDIWTYNAELLVLLENERTLDYHDSNVKNLYEKVRSQLKNNAKEIGNGCFEFYHKCDNTCMESVKNGTYDYPKYSEEAKLNREEIDGVKLESTRIYQILAIYSTVASSLVLVVSLGAISFWMCSNGSLQCRICV

SEQ ID NO: 9057 - protein, 566 aa, Artificial Sequence; identical to SEQ ID NO: 2911
  derived and/or modified protein sequence (wt) from hemagglutinin__InfluenzaA__AFK75025

SEQ ID NO: 9058 - protein, 566 aa, Artificial Sequence; identical to SEQ ID NO: 2911
  derived and/or modified protein sequence (wt) from hemagglutinin__InfluenzaA__AFK75035

SEQ ID NO: 9059 - protein, 566 aa, Artificial Sequence; identical to SEQ ID NO: 2911
  derived and/or modified protein sequence (wt) from hemagglutinin__InfluenzaA__AFK75045

SEQ ID NO: 9060 - protein, 566 aa, Artificial Sequence; identical to SEQ ID NO: 2911
  derived and/or modified protein sequence (wt) from hemagglutinin__InfluenzaA__AFK75055

SEQ ID NO: 9061 - protein, 566 aa, Artificial Sequence; identical to SEQ ID NO: 2669
  derived and/or modified protein sequence (wt) from hemagglutinin__InfluenzaA__AFK75065

SEQ ID NO: 9062 - protein, 566 aa, Artificial Sequence; identical to SEQ ID NO: 2669
  derived and/or modified protein sequence (wt) from hemagglutinin__InfluenzaA__AFK75075

SEQ ID NO: 9063 - protein, 566 aa, Artificial Sequence; identical to SEQ ID NO: 3833
  derived and/or modified protein sequence (wt) from hemagglutinin__InfluenzaA__AFK75085

SEQ ID NO: 9064 - protein, 566 aa, Artificial Sequence; identical to SEQ ID NO: 3833
  derived and/or modified protein sequence (wt) from hemagglutinin__InfluenzaA__AFK75095

SEQ ID NO: 9065 - protein, 566 aa, Artificial Sequence; identical to SEQ ID NO: 2669
  derived and/or modified protein sequence (wt) from hemagglutinin__InfluenzaA__AFK75105

SEQ ID NO: 9066 - protein, 566 aa, Artificial Sequence; identical to SEQ ID NO: 2911
  derived and/or modified protein sequence (wt) from hemagglutinin__InfluenzaA__AFK77857

SEQ ID NO: 9067 - protein, 566 aa, Artificial Sequence; identical to SEQ ID NO: 2911
  derived and/or modified protein sequence (wt) from hemagglutinin__InfluenzaA__AFK77867

SEQ ID NO: 9068 - protein, 566 aa, Artificial Sequence; identical to SEQ ID NO: 8197
  derived and/or modified protein sequence (wt) from hemagglutinin__InfluenzaA__AFK77877

SEQ ID NO: 9069 - protein, 566 aa, Artificial Sequence; identical to SEQ ID NO: 2669
  derived and/or modified protein sequence (wt) from hemagglutinin__InfluenzaA__AFK77887

SEQ ID NO: 9070 - protein, 566 aa, Artificial Sequence
  derived and/or modified protein sequence (wt) from hemagglutinin__InfluenzaA__AFK77897
MKAILVVLLYTFATANADTLCIGYHANNSTDTVDTVLEKNVTVTHSINLLEDKHNGKLCKLRGVAPLHLGKCNIAGWILGNPECESLSTASSWSYIVETSSSDNGTCYPGDFINYEELREQLSSVSSFERFEIFPKTSSWPNHDSNKGVTAACPHAGAKSFYKNLIWLVKKGNSYPKLSKSYINDKGKEVLVLWGIHHPSTSADQQSLYQNADAYVFVGTSKYSKKFKPEIAVRPKVRDQEGRMNYYWTLVEPGDKITFEATGNLLVPRYAFAMERNAGSGIIISDTPVHDCNTTCQTPKGAINTSLPFQNIHPITIGKCPKYVKSTKLRLATGLRNVPSIQSRGLFGAIAGFIEGGWTGMVDGWYGYHHQNEQGSGYAADLKSTQNAIDKITNKVNSVIEKMNTQFTAVGKEFNHLEKRIENLNKKVDDGFLDIWTYNAELLVLLENERTLDYHDSNVKNLYEKVRSQLKNNAKEIGNGCFEFYHKCDNTCMESVKNGTYDYPKYSEEAKLNREEIDGVKLESTRIYQILAIYSTVASSLVLVVSLGAISFWMCSNGSLQCRICI

SEQ ID NO: 9071 - protein, 566 aa, Artificial Sequence; identical to SEQ ID NO: 7050
  derived and/or modified protein sequence (wt) from hemagglutinin__InfluenzaA__AFK78028

SEQ ID NO: 9072 - protein, 566 aa, Artificial Sequence; identical to SEQ ID NO: 2911
  derived and/or modified protein sequence (wt) from hemagglutinin__InfluenzaA__AFK78187

SEQ ID NO: 9073 - protein, 566 aa, Artificial Sequence; identical to SEQ ID NO: 6855
  derived and/or modified protein sequence (wt) from hemagglutinin__InfluenzaA__AFM45476

SEQ ID NO: 9074 - protein, 566 aa, Artificial Sequence
  derived and/or modified protein sequence (wt) from hemagglutinin__InfluenzaA__AFM45487
MKTIIALSYILCLVFAQKLPGNDNSTATLCLGHHAVPNGTIVKTITNDQIEVTNATELVQSSSTGEICDSPHQILDGENCTLIDALLGDPQCDGFQNKKWDLFVERSKAYSNCYPYDVPDYASLRSLVASSGTLEFNNESFNWTGVTQNGTSSACIRRSNSSFFSRLNWLTHLNFKYPALNVTMPNNEQFDKLYIWGVHHPGTDKDQIFLYAQSSGRITVSTKRSQQAVIPNIGSRPRIRNIPSRISIYWTIVKPGDILLINSTGNLIAPRGYFKIRSGKSSIMRSDAPIGKCNSECITPNGSIPNDKPFQNVNRITYGACPRYVKQSTLKLATGMRNVPEKQTRGIFGAIAGFIENGWEGMVDGWYGFRHQNSEGRGQAADLKSTQAAIDQINGKLNRLIGKTNEKFHQIEKEFSEVEGRIQDLEKYVEDTKIDLWSYNAELLVALENQHTIDLTDSEMNKLFEKTKKQLRENAEDMGNGCFKIYHKCDNACIGSIRNGTYNHDVYRDEALNNRFQIKGVELKSGYKDWILWISFAISCFLLCVALLGFIMWACQKGNIRCNICI

SEQ ID NO: 9075 - protein, 566 aa, Artificial Sequence; identical to SEQ ID NO: 6855
  derived and/or modified protein sequence (wt) from hemagglutinin__InfluenzaA__AFM45489

SEQ ID NO: 9076 - protein, 566 aa, Artificial Sequence; identical to SEQ ID NO: 9074
  derived and/or modified protein sequence (wt) from hemagglutinin__InfluenzaA__AFM45494

SEQ ID NO: 9077 - protein, 566 aa, Artificial Sequence
  derived and/or modified protein sequence (wt) from hemagglutinin__InfluenzaA__AFM68954
MKARLLVLLCALAATDADTICIGYHANNSTDTVDTLLEKNVTVTHSVNLLEDSHNGKLCKLKGIAPLQLGKCNIAGWLLGNPECDSLLPARSWSYIVETPNSENGACYPGDFIDYEELKEQLSSVSSLERFEIFPKESSWPNHNTLKGVTASCSHGGKSSFYRNLLWLTKTEDSYPKLSNSYVNNKGKEVLVLWGVHHPSSSDEQQSLYHNVNAYVSVVSSNYNGRFTPEIAARPKVRNQPGRMNYYWTLLEPGDTIIFEATGNLIAPWYAFALSRGFGSGIITSNASMHECNTKCQTPQGAINSSLPFQNIHPVTIGECPKYVRSTKLRMVTGLRNIPSIQFRGLFGAIAGFIEGGWTGMIDGWYGYHHQNEQGSGYAADQKSTQNAINGITNKVNSVIEKMNTQFTAVSKEFNNLEKRMENLNKKVDDGFLDIWTYNAELLVLLENERTLDFHDLNVKNLYEKVKSQLKNNAKEIGNGCFEFYHKCDNKCMESVRNGTYDYPKYSEESKLNREKIDGVKLESMGVYQILAIYSTVASSLVLLVSLGAISFWMCSNGSLQCRICI

SEQ ID NO: 9078 - protein, 566 aa, Artificial Sequence
  derived and/or modified protein sequence (wt) from hemagglutinin__InfluenzaA__AFM68965
MKTIIALSYIFCQVLAQNLPGNDNSTATLCLGHHAVPNGTLVKTITNDQIEVTNATELVQSSSTGRICDSPHRILDGKNCTLIDALLGDPHCDGFQNEKWDLFVERSKAFSNCYPYDVPDYASLRSLVASSGTLEFINEGFNWTGVTQNGGSYACKRGPDNSFFSRLNWLYKSESTYPVLNVTMPNNDNFDKLYIWGVHHPSTDKEQTNLYVQASGRVTVSTKRSQQTIIPNVGSRPWVRGLSSGISIYWTIVKPGDILLINSNGNLIAPRGYFKIRTGKSSIMRSDAPIGTCSSECITPNGSIPNDKPFQNVNKITYGACPKYVKQNTLKLATGMRNVPEKQTRGIFGAKAGFIENGWEGMIDGWYGFRHQNSEGTGQAADLKSTQAAIDQINGKLNRVIEKTNEKFHQIEKEFSEVEGRIQDLEKYVEDTKIDLWSYNAELLVALENQHTIDLTDSEMNKLFEKTRRQLRENAEDMGNGCFKIYHKCDNACIGSIRNGTYDHDVYRDEALNNRFQIKGVELKSGYKDWILWISFAISCFLLCVVLLGFIMWACQKGNIRCNICI

SEQ ID NO: 9079 - protein, 566 aa, Artificial Sequence
  derived and/or modified protein sequence (wt) from hemagglutinin__InfluenzaA__AFM68987
MKTIIALSYIFCLVFAQNLPGNDNSTATLCLGHHAVPNGTLVKTITNDQIEVTNATELVQSSSTGRICDSPHRILDGKNCTLIDALLGDPHCDGFQNEKWDLFVERSKAFSNCYPYDVPDYASLRSLVASSGTLEFINEGFNWTGVTQSGGSYACKRGSDKSFFSRLNWLYESESKYPVLNVTMPNNGNFDKLYIWGVHHPSTDKEQTNLYVRASGRVTVSTKRSQQTVIPNIGSRPWVRGLSSRISIYWTIVKPGDILLINSNGNLIAPRGYFKIRTGKSSIMRSDAPIGTCSSECITPNGSIPNDKPFQNVNKITYGACPKYVKQNTLKLATGMRNVPEKQTRGIFGAIAGFIENGWEGMVDGWYGFRHQNSEGTGQAADLKSTQAAIDQINGKLNRVIEKTNEKFHQIEKEFSEVEGRIQDLEKYVEDTKIDLWSYNAELLVALENQHTIDLTDSEMNKLFEKTRRQLRENAEDMGNGCFKIYHKCDNACIGSIRNGTYDHDVYRDEALNNRFQIKGVELKSGYKDWILWISFAISCFLLCVVLLGFIMWACQKGNIRCNICI

SEQ ID NO: 9080 - protein, 566 aa, Artificial Sequence
  derived and/or modified protein sequence (wt) from hemagglutinin__InfluenzaA__AFM71720
MKTIIALSYIFCLVFAQKLPGNDNSTATLCLGHHAVPNGTLVKTITNDQIEVTNATELVQSSSTGRICDSPHRILDGKNCTLIDALLGDPHCDGFQNEKWDLFVERSKAYSNCYPYDVPDYASLRSLVASSGTLEFINEDFNWTGVTQSGGSYACKRGSVNSFFSRLNWLHESEYKYPALNVAMPNNGKFDKLYIWGVHHPITDREQTNLYVRASGRVTVSTKRSQQTVIPNIGSRPWVRGLSSRISIYWTIVKPGDILFINSTGNLIAPRGYFKIRTGKSSIMRSDAPIGTCSSECITPNGSIPNDKPFQNVNKITYGACPRYVKQNTLKLATGMRNVPEKQTRGIFGAIAGFIENGWEGMVDGWYGFRHQNSEGTGQAADLKSTQAAIDQINGKLNRLIEKTNEKFHQIEKEFSEVEGRIQDLEKYVEDTKIDLWSYNAELLVALENQHTIDLTDSEMNKLFEKTRKQLRENAEDMGNGCFKIYHKCDNACIGSIRNGTYDHDVYRDEALNNRFQIKGVELKSGYKDWILWISFAISCFLLCVVLLGFIMWACQKGNIRCNICI

SEQ ID NO: 9081 - protein, 566 aa, Artificial Sequence
  derived and/or modified protein sequence (wt) from hemagglutinin__InfluenzaA__AFM71731
MKTIIALSYILCLVFAQKLPGNDNSTATLCLGHHAVPNGTLVKTITNDQIEVTNATELVQSSSTGRICDSPHRILDGKNCTLIDALLGDPHCDGFQNKEWDLFVERSKAYSNCYPYDVPDYASLRSLVASSGTLEFINEDFNWTGVAQSGESYACKRGSVKSFFSRLNWLHKSEYKYPALNVTMPNNGKFDKLYIWGVHHPSTDREQTNLYVRASGRVTVSTKRSQQTVIPNIGSRPWVRGLSSRISIYWTIVKPGDILLINSTGNLIAPRGYFKIRTGKSSIMRSDAPIGTCSSECITPNGSIPNDKPFQNVNRITYGACPRYVKQNTLKLATGMRNVPEKQTRGIFGAIAGFIENGWEGMVDGWYGFRHQNSEGTGQAADLKSTQAAIDQINGKLNRLIEKTNEKFHQIEKEFSEVEGRIQDLEKYVEDTKIDLWSYNAELLVALENQHTIDLTDSEMNKLFEKTRKQLRENAEDMGNGCFKIYHKCDNACIGSIRNGTYDHDVYRDEALNNRFQIKGVELKSGYKDWILWISFAISCFLLCVVLLGFIMWACQKGNIRCNICI

SEQ ID NO: 9082 - protein, 566 aa, Artificial Sequence
  derived and/or modified protein sequence (wt) from hemagglutinin__InfluenzaA__AFM71754
MKTIIALSYILCLVFAQKLPGNDNSTATLCLGHHAVPNGTIVKTITNDQIEVTNATELVQSSSTGEICDSPHQILDGKNCTLIDALLGDPQCDGFQNKKWDLFVERSKAYSNCYPYDVPDYASLRSLVASSGTLEFNNESFNWTGVTQNGTSSACIRRSKNSFFSRLNWLTHLNFKYPALNVTMPNNEQFDKLYIWGVHHPGTDKDQIFPYAQASGRITVSTKRSQQTAIPNIGSRPRVRNIPSRISIYWTIVKPGDILLINSTGNLIAPRGYFKIRSGKSSIMRSDAPIGKCNSECITPNGSIPNDKPFQNVNRITYGACPRYVKQNTLKLATGMRNVPEKQTRGIFGAIAGFIENGWEGMVDGWYGFRHQNSEGRGQAADLKSTQAAIDQINGKLNRLIGKTNEKFHQIEKEFSEVEGRIQDLEKYVEDTKIDLWSYNAELLVALENQHTIDLTDSEMNKLFEKTKKQLRENAEDMGNGCFKIYHKCDNACIGSIRNGTYAHDVYRDEALNNRFQIKGVELKSGYKDWILWISFAISCFLLCVALLGFIMWACQKGNIRCNICI

SEQ ID NO: 9083 - protein, 566 aa, Artificial Sequence
  derived and/or modified protein sequence (wt) from hemagglutinin__InfluenzaA__AFM71768
MKTIIALSYILCLVFAQKLPGNDNSTATLCLGHHAVPNGTIVKTITNDQIEVTNATELVQSSSTGEICDSPHQILDGKNCTLIDALLGDPQCDDFQNKKWDLFVERSKAYSNCYPYDVPDYASLRSLVASSGTLEFNNESFNWTGVTQNGTSSACIRRSKNSFFSRLNWLTHLNFKYPALNVTMPNNEQFDKLYIWGVHHPGTDKDQIFPYAQASGRITVSTKRSQQTAIPNIGSRPRVRNIPSRISIYWTIVKPGDILLINSTGNLIAPRGYFKIRSGKSSIMRSDAPIGKCNSECITPNGSIPNDKPFQNVNRITYGACPRYVKQNTLKLATGMRNVPEKQTRGIFGAIAGFIENGWEGMVDGWYGFRHQNSEGRGQAADLKSTQAAIDQINGKLNRLIGKTNEKFHQIEKEFSEVEGRIQDLEKYVEDTKIDLWSYNAELLVALENQHTIDLTDSEMNKLFEKTKKQLRENAEDMGNGCFKIYHKCDNACIGSIRNGTYAHDVYRDEALNNRFQIKGVELKSGYKDWILWISFAISCFLLCVALLGFIMWACQKGNIRCNICI

SEQ ID NO: 9084 - protein, 566 aa, Artificial Sequence
  derived and/or modified protein sequence (wt) from hemagglutinin__InfluenzaA__AFM71791
MKTIIALSYTLCLVFAQKLPGNDNSTATLCLGHHAVPNGTIVKTITNDQIEVTNATELVQSSSTGEICDSPHQILDGKNCTLIDALLGDPQCDGFQNKKWDLFVERSKAYSNCYPYDVPDYASLRSLVASSGTLEFNNESFNWTGVTQNGTSSACIRRSKNSFFSRLNWLTHLNFKYPALNVTMPNNEQFDKLYIWGVHHPGTDKDQIFPYAQASGRITVSTKRSQQTVIPNIGSRPRVRNIPSRISIYWTIVKPGDILLINSTGNLIAPRGYFKIRSGKSSIMRSDAPIGKCNSECITPNGSIPNDKPFQNVNRITYGACPRYVKQNTLKLATGMRNVPEKQTRGIFGAIAGFIENGWEGMVDGWYGFRHQNSEGRGQAADLKSTQAAIDQINGKLNRLIGKTNEKFHQIEKEFSEVEGRIQDLEKYVEDTKIDLWSYNAELLVALENQHTIELTDSEMNKLFEKTKKQLRENAEDMGNGCFKIYHKCDNACIGSIRNGTYDHDVYRDEALNNRFQIKGVELKSGYKDWILWISFAISCFLLCVALLGFIMWACQKGNIRCNICI

SEQ ID NO: 9085 - protein, 566 aa, Artificial Sequence
  derived and/or modified protein sequence (wt) from hemagglutinin__InfluenzaA__AFM71824
MKTIIALSYILCLVFAQKLPGNDNSTATLCLGHHAVPNGTIVKTITNDQIEVTNATELVQSSSTGEICDSPHQILDGKNCTLIDALLGDPQCDGFQNKKWDLFVERSKAYSNCYPYDVPDYASLRSLVASSGTLEFNNESFNWTGVTQDGTSSACIRRSKNSFFSRLNWLTHLNFKYPALNVTMPNNEQFDKLYIWGVHHPGTDKDQIFPYAQASGRITVSTKRSQQTAIPNIGSRPRVRNIPSRISIYWTIVKPGDILLINSTGNLIAPRGYFKIRSGKSSIMRSDAPIGKCNSECITPNGSIPNDKPFQNVNRITYGACPRYVKQNTLKLATGMRNVPEKQTRGIFGAIAGFIENGWEGMVDGWYGFRHQNSEGRGQAADLKSTQAAIDQINGKLNRLIGKTNEKFHQIEKEFSEVEGRIQDLEKYVEDTKIDLWSYNAELLVALENQHTIDLTDSEMNKLFEKTKKQLRENAEDMGNGCFKIYHKCDNACIGSIRNGTYDHDVYRDEALNNRFQIKGVELKSGYKDWILWISFAISCFLLCVALLGFIMWACQKGNIRCNICI

SEQ ID NO: 9086 - protein, 566 aa, Artificial Sequence
  derived and/or modified protein sequence (wt) from hemagglutinin__InfluenzaA__AFM71835
MKTIIALSYILCLVFAQKLPGNDNSTATLCLGHHAVPNGTIVKTITNDQIEVTNATELVQSSSTGEICDSPHQILDGENCTLIDALLGDPQCDGFQNKKWDLFVERSKAYSSCYPYDVPDYASLRSLVASSGTLEFNSESFNWTGVTQNGTSSACIRRSYNSFFSRLNWLTHLNFKYPALNVTMPNNEQFDKLYIWGVHHPGTDKDQIFPYAQASGRITVSTKRSQQAVIPNIGSRPRVRNIPSRISIYWTIVKPGDILLINSTGNLIAPRGYFKIRSGKSSIMRSDAPIGKCNSECITPNGSIPNDKPFQNVNRITYGACPRYIKQSTLKLATGMRNVPEKQTRGIFGAIAGFIENGWEGMVDGWYGFRHQNSEGRGQAADLKSTQAAIDQINGKLNRLIGKTNEKFHQIEKEFSEVEGRIQDLEKYVEDTKIDLWSYNAELLVALENQHTIDLTDSEMNKLFEKTKKQLRENAEDMGNGCFKIYHKCDNACIGSIRNGTYDHDVYRDEALNNRFQIKGVELKSGYKDWILWISLAISCFLLCVALLGFIMWACQKGNIRCNICI

SEQ ID NO: 9087 - protein, 565 aa, Artificial Sequence
  derived and/or modified protein sequence (wt) from hemagglutinin__InfluenzaA__AFM71846
MKANLLVLLCALAAADADTICIGYHANNSTDTVDTVLEKNVTVTHSVNLLEDSHNGKLCRLKGIAPLQLGKCNIAGWLLGNPECDPLLPVRSWSYIVETPNSENGICYPGDFIDYEELREQLSSVSSFERFEIFPKESSWPNHNTNGVTAACSHEGKSSFYRNLLWLTEKEGSYPKLKNSYVNKKGKEVLVLWGIHHPSNSKEQQNLYQNENAYVSVVTSNYNRRFTPEIAERPKVRDQAGRMNYYWTLLKPGDTIIFEANGNLIAPMYAFALSRGFGSGIITSNASMHECNTKCQTPLGAINSSLPYQNIHPVTIGECPKYVRSAKLRMVTGLRNIPSIQSRGLFGAIAGFIEGGWTGMIDGWYGYHHQNEQGSGYAADQKSTQNAINGITNKVNTVIEKMNIQFTAVGKEFNKLEKRMENLNKKVDDGFLDIWTYNAELLVLLENERTLDFHDSNVKNLYEKVKSQLKNNAKEIGNGCFEFYHKCDNECMESVRNGTYDYPKYSEESKLNREKVDGVKLESMGIYQILAIYSTVASSLVLLVSLGAISFWMCSNGSLQCRICI

SEQ ID NO: 9088 - protein, 566 aa, Artificial Sequence; identical to SEQ ID NO: 2318
  derived and/or modified protein sequence (wt) from hemagglutinin__InfluenzaA__AFM71857

SEQ ID NO: 9089 - protein, 566 aa, Artificial Sequence
  derived and/or modified protein sequence (wt) from hemagglutinin__InfluenzaA__AFM71868
MKTIIALSYILCLVFAQKLPGNDNSTATLCLGHHAVPNGTIVKTITNDQIEVTNATELVQSSSTGGICDSPHQILDGENCTLIDALLGDPQCDGFQNKKWDLFVERSKAYSNCYPYDVPDYASLRSLVASSGTLEFNNESFNWTGVTQNGTSSSCKRRSNNSFFSRLNWLTHLKFKYPALNVTMPNNEKFDKLYIWGVHHPVTDNDQIRLYAQASGRITVSTKRSQQTVIPNIGSRPRVRDIPSRISIYWTIVKPGDILLINSTGNLIAPRGYFKIRSGKSSIMRSDAPIGKCNSECITPNGSIPNDKPFQNVNRITYGACPRYVKQNTLKLATGMRNVPEKQTRGIFGAIAGFIENGWEGMVDGWYGFRHQNSEGIGQAADLKSTQAAINQINGKLNRLIGKTNEKFHQIEKEFSEVEGRIQDLEKYVEDTKIDLWSYNAELLVALENQHTIDLTDSEMNKLFERTKKQLRENAEDMGNGCFKIYHKCDNACIGSIRNGTYDHDVYRDEALNNRFQIKGVELKSGYKDWILWISFAISCFLLCVVLLGFIMWACQKGNIRCNICI

SEQ ID NO: 9090 - protein, 566 aa, Artificial Sequence; identical to SEQ ID NO: 6998
  derived and/or modified protein sequence (wt) from hemagglutinin__InfluenzaA__AFM71879

SEQ ID NO: 9091 - protein, 566 aa, Artificial Sequence
  derived and/or modified protein sequence (wt) from hemagglutinin__InfluenzaA__AFM71890
MKARLLVLLCALAATDADTICIGYHANNSTDTVDTLLEKNVTVTHSVNLLEDSHNGKLCKLKGIAPLQLGKCNIAGWLLGNPECDSLLPARSWSYIVETPNSENGACYPGDFIDYEELKEQLSSVSSLERFEIFPKESSWPNHNTLKGVTASCSHGGKSSFYRNLLWLTKTEDSYPKLSNSYVNNKGKEVLVLWGVHHPSSSDEQQSLYHNVNAYVSVVSSNYNRRFTPEIAARPKVRNQPGRMNYYWTLLEPGDTIIFEATGNLIAPWYAFALSRGFGSGIITSNASMHECNTKCQTPQGAINSSLPFQNIHPVTIGECPKYVRSTKLRMVTGLRNIPSIQFRGLFGAIAGFIEGGWTGMIDGWYGYHHQNEQGSGYAADQKSTQNAINGITNKVNSVIEKMNTQFTAVSKEFNNLEKRMENLNKKVDDGFLDIWTYNAELLVLLENERTLDFHDLNVKNLYEKVKSQLKNNAKEIGNGCFEFYHKCDNKCMESVRNGTYDYPKYSEESKLNREKIDGVKLESMGVYQILAIYSTVASSLVLLVSLGAISFWMCSNGSLQCRICI

SEQ ID NO: 9092 - protein, 566 aa, Artificial Sequence; identical to SEQ ID NO: 9077
  derived and/or modified protein sequence (wt) from hemagglutinin__InfluenzaA__AFM71901

SEQ ID NO: 9093 - protein, 566 aa, Artificial Sequence
  derived and/or modified protein sequence (wt) from hemagglutinin__InfluenzaA__AFM71923
MKTIIALSYIFCLVLGQDLPGNDNSTATLCLGHHAVPNGTLVKTITNDQIEVTNATELVQSSSTGKICNNPHRILDGIDCTLIDALLGDPHCDSFQNETWDLFVERSKAFSNCYPYDVPDYASLRSLVASSGTLEFINEGFTWTGVTQNGGSNACKRGPDSGFFSRLNWLYKSGSTYPVLNVTMPNNDNFDKLYIWGVHHPSTNQEQTSLYVQASGRVTVSTKRSQQTIIPNIGSRPWVRGLSSRISIYWTIVKPGDILVINSNGNLIAPRGYFKMRTGKSSIMRSDAPIGTCISECITPNGSIPNDKPFQNVNKITYGACPKYVKQNTLKLATGMRNVPEKQTRGLFGAIAGFIENGWEGMIDGWYGFRHQNSEGTGQAADLKSTQAAIDQINGKLNRVIEKTNEKFHQIEKEFSEVEGRIQDLEKYVEDTKIDLWSYNAELLVALENQHTIDLTDSEMNKLFEKTRRQLRENAEDMGNGCFRIYHKCDNACIGSIRNGTYDHDVYRDEALNNRFQIKGVELKSGYKDWILWISFAISCFLLCVVLLGFIMWACQKGNIRCNICI

SEQ ID NO: 9094 - protein, 566 aa, Artificial Sequence
  derived and/or modified protein sequence (wt) from hemagglutinin__InfluenzaA__AFM71934
MKTIIALSYIFCLVLGQDLPGNDNSTATLCLGHHAVPNGTLVKTITNDQIEVTNATELVQSSSTGKICNNPHRILDGIDCTLIDALLGDPHCDGFQNETWDLFVERSKAFSNCYPYDVPDYASLRSLVASSGTLEFINEGFTWTGVTQNGGSNACKRGPDSGFFSRLNWLYKSGSTYPVLNVTMPNNDNFDKLYIWGVHHPSTNQEQTSLYVQASGRVTVSTKGSQQTIIPNIGSRPWVRGLSSRISIYWTIVKPGDILVINSNGNLIAPRGYFKMRTGKSSIMRSDAPIGTCISECITPNGSIPNDKPFQNVNKITYGACPKYVKQNTLKLATGMRNVPEKQTRGLFGAIAGFIENGWEGMIDGWYGFRHQNSEGTGQAADLKSTQAAIDQINGKLNRVIEKTNEKFHQIEKEFSEVEGRIQDLEKYVEDTKIDLWSYNAELLVALENQHTIDLTDSEMNKLFEKTRRQLRENAEDMGNGCFRIYHKCDNACIGSIRNGTYDHDVYRDEALNNRFQIKGVELKSGYKDWILWISFAISCFLLCVVLLGFIMWACQKGNIRCNICI

SEQ ID NO: 9095 - protein, 566 aa, Artificial Sequence
  derived and/or modified protein sequence (wt) from hemagglutinin__InfluenzaA__AFM71945
MKTIIALSYIFCLVLGQDFPGNDNSTATLCLGHHAVPNGTLVKTITNDQIEVTNATELVQSSSTGKICNNPHRILDGINCTLIDALLGDPHCDGFQNETWDLFVERSKAFSNCYPYDVPDYASLRSLVASSGTLEFINEGFTWTGVTQNGGSNACKRGPDSGFFSRLNWLYKSGSAYPVLNVTMPNNDNFDKLYIWGVHHPSTDQEQTNLYVQASGRVTVSTKRSQQTIIPNIGSRPWVRGLSSRISIYWTIVKPGDILVINSNGNLIAPRGYFKMRTGKSSIMRSDAPIGTCISECITPNGSIPNDKPFQNVNKITYGACPKYVKQNTLKLATGMRNVPEKQTRGIFGAIAGFIENGWEGMIDGWYGFRHQNSEGTGQAADLKSTQAAIDQINGKLNRVIEKTNEKFHQIEKEFSEVEGRIQDLEKYVEDTKIDLWSYNAELLVALENQHTIDLTDSEMNKLFEKTRRQLRENAEDMGNGCFKIYHKCDNACIGSIRNGTYDHDVYRDEALNNRFQIKGVELKSGYKDWILWISFAISCFLLCVVLLGFIMWACQKGNIRCNICI

SEQ ID NO: 9096 - protein, 566 aa, Artificial Sequence; identical to SEQ ID NO: 9095
  derived and/or modified protein sequence (wt) from hemagglutinin__InfluenzaA__AFM71956

SEQ ID NO: 9097 - protein, 567 aa, Artificial Sequence
  derived and/or modified protein sequence (wt) from hemagglutinin__InfluenzaA__AFM71978
MKTIIALSYIFCLVFAQDLPGNDNNSTATLCLGHHAVPNGTLVKTITNDQIEVTNATELVQSSSTGKICNNPHRILDGINCTLIDALLGDPHCDGFQNEKWDLFVERSKAFSNCYPYDVPDYASLRSLVASSGTLEFINEGFNWTGVTQNGGSNACKRGPDSGFFSRLNWLYKSGSTYPVQNVTMPNNDNSDKLYIWGVHHPSTDKEQTNLYVQASGKVTVSTKRSQQTIIPNVGSRPWVRGLSSRISIYWTIVKPGDILVINSNGNLIAPRGYFKMRTGKSSIMRSDAPIGTCSSECITPNGSIPNDKPFQNVNKITYGACPKYVKQNTLKLATGMRNVPEKQTRGIFGAIAGFIENGWEGMIDGWYGFRHQNSEGTGQAADLKSTQAAIDQINGKLNRVIEKTNEKFHQIEKEFSEVEGRIQDLEKYVEDTKIDLWSYNAELLVALENQHTIDLTDSEMNKLFEKTRRQLRENAEDMGNGCFKIYHKCDNACIGSIRNGTYDHDVYRDEALNNRFQIKGVELKSGYKDWILWISFAISCFLLCVVLLGFIMWACQKGNIRCNICI

SEQ ID NO: 9098 - protein, 566 aa, Artificial Sequence
  derived and/or modified protein sequence (wt) from hemagglutinin__InfluenzaA__AFM71989
MKTIIALSYILCLVFAQKLPGNDNSTATLCLGHHAVPNGTIVKTITNDQIEVTNATELVQSSSTGEICNSPHQILDGENCTLIDALLGDPQCDGFQNKKWDLFVERSKAHSNCYPYDVPDYASLRSLVASSGTLEFNNESFNWTGVTQNGTSSACIRRSNNSFFSRLNWLTHLNFKYPALNVTMPNNEQFDKLYIWGVHHPSTDKDQIFLYTQAAGRITVSTKRSQQAVIPNIGSRPRVRNIPSRVSIYWTIVKPGDILLINSTGNLIAPRGYFKIRSGKSSIMRSDAPIGKCNSACITPNGSIPNDKPFQNVNRITYGACPRYVKQNTLKLATGMRNVPEKQTRGIFGAIAGFIENGWEGMVDGWYGFRHQNSEGRGQAADLKSTQAAIDQINGKLNRLIGKTNEKFHQIEKEFSEVEGRIQDLEKYVEDTKIDLWSYNAELLVALENQHTIDLTDSEMNKLFEKTKKQLRENAEDMGNGCFKIYHKCDNACIGSIRNGTYDHDVYRDEALNNRFQIKGVELKSGYKDWILWISFAISCFLLCVALLGFIMWACQKGNIRCNICI

SEQ ID NO: 9099 - protein, 566 aa, Artificial Sequence
  derived and/or modified protein sequence (wt) from hemagglutinin__InfluenzaA__AFM72010
MKTIIALSYIFCQVLAQNLPGNDNSTATLCLGHHAVPNGTLVKTITNDQIEVTNATELVQSSSTGRICDSPHRILDGKNCTLIDALLGDPHCDGFQNEKWDLFVERSKAFSNCYPYDVPDYASLRSLVASSGTLEFINEGFNWTGVTQNGGSYACKRGPDKSFFSRLNWLYESESTYPVLNVTMPNNDNFDKLYIWGVHHPSTDKEQTKLYVQASGRVTVSTKRSQQTIIPNVGSRPWVRGLSSRISIYWTIVKPGDILLINSNGNLIAPRGYFKIRTGKSSIMRSDAPIGTCSSECITPNGSIPNDKPFQNVNKITYGACPKYVKQNTLKLATGMRNVPEKQTRGIFGAIAGFIENGWEGMIDGWYGFRHQNSEGTGQAADLKSTQAAIDQINGKLNRVIEKTNEKFHQIEKEFSEVEGRIQDLEKYVEDTKIDLWSYNAELLVALENQHTIDLTDSEMNKLFEKTRRQLRENAEDMGNGCFKIYHKCDNACIGSIRNGTYDHDVYRDEALNNRFQIKGVELKSGYKDWILWISFAISCFLLCVVLLGFIMWACQKGNIRCNICI

SEQ ID NO: 9100 - protein, 566 aa, Artificial Sequence; identical to SEQ ID NO: 915
  derived and/or modified protein sequence (wt) from hemagglutinin__InfluenzaA__AFM72021

SEQ ID NO: 9101 - protein, 566 aa, Artificial Sequence
  derived and/or modified protein sequence (wt) from hemagglutinin__InfluenzaA__AFM72032
MKTIIALSYMFCLVFAQNLPGNDNSTATLCLGHHAVPNGTLVKTITNDQIEVTNATELVQSSSTGRICDSPHRILDGKNCTLIDALLGDPHCDGFQNEKWDLFVERSKAFSNCYPYDVPDYASLRSLVASSGTLEFINEGFNWTGVTQSGGSYTCKRGSNNSFFSRLNWLYESESKYPVLNVTMPNNGKFDKLYIWGIHHPSTDKEQTNLYIRASGRVTVSTKRSQQTVIPNIGSRPWVRGLSSRISIYWTIVKPGDILLINSTGNLIAPRGYFKIRTGKSSIMRSDAPIGTCSSECITPNGSIPNDKPFQNVNKITYGACPRYVKQNTLKLATGMRNVPEKQTRGIFGAIAGFIENGWEGMVDGWYGFRHQNSEGTGQAADLKSTQAAIDQINGKLNRVIEKTNEKFHQIEKEFSEVEGRIQDLEKYVEDTKIDLWSYNAELLVALENQHTIDLTDSEMNKLFEKTRKQLRENAEDMGNGCFKIYHKCDNACIGSIRNGTYDHDVYRDEALNNRFQIKGVELKSGYKDWILWISFAISCFLLCVVLLGFIMWACQKGNIRCNICI

SEQ ID NO: 9102 - protein, 566 aa, Artificial Sequence
  derived and/or modified protein sequence (wt) from hemagglutinin__InfluenzaA__AFM72043
MKTIIALSYMFCLVFAQNLPGNDNSTATLCLGHHAVPNGTLVKTITNDQIEVTNATELVQSSSTGRICDSPHRILDGKNCTLIDALLGDPHCDGFQNEKWDLFVERSKAFSNCYPYDVPDYASLRSLVASSGTLEFINEGFNWTGVTQSGGSSTCKRGSNNSFFSRLNWLYESESKYPVLNVTMPNNGKFDKLYIWGIHHPSTDKEQTNLYIRASGRVTVSTKRSQQTVIPNIGSRPWVRGLSSRISIYWTIVKPGDILLINSTGNLIAPRGYFKIRTGKSSIMRSDAPIGTCSSECITPNGSIPNDKPFQNVNKITYGACPRYVKQNTLKLATGMRNVPEKQTRGIFGAIAGFIENGWEGMVDGWYGFRHQNSEGTGQAADLKSTQAAIDQINGKLNRVIEKTNEKFHQIEKEFSEVEGRIQDLEKYVEDTKIDLWSYNAELLVALENQHTIDLTDSEMNKLFEKTRKQLRENAEDMGNGCFKIYHKCDNACIGSIRNGTYDHDVYRDEALNNRFQIKGVELKSGYKDWILWISFAISCFLLCVVLLGFIMWACQKGNIRCNICI

SEQ ID NO: 9103 - protein, 566 aa, Artificial Sequence
  derived and/or modified protein sequence (wt) from hemagglutinin__InfluenzaA__AFM72054
MKAKLLVLLCALSATDADTICIGYHANNSTDTVDTVLEKNVTVTHSVNLLEDNHNGKLCKLKGIAPLQLGKCSIAGWILGNPECESLFSKKSWSYIAETPNSENGTCYPGYFADYEELREQLSSVSSFERFEIFPKESSWPKHNVTKGVTAACSHKGKSSFYRNLLWLTEKNGSYPNLSKSYVNNKEKEVLVLWGVHHPSNIEDQKTIYRKENAYVSVVSSHYNRRFTPEIAKRPKVRNQEGRINYYWTLLEPGDTIIFEANGNLIAPWYAFALSRGFGSGIITSNASMDECDAKCQTPQGAINSSLPFQNVHPVTIGECPKYVRSTKLRMVTGLRNIPSIQSRGLFGAIAGFIEGGWTGMIDGWYGYHHQNEQGSGYAADQKSTQNAINGITNKVNSIIEKMNTQFTAVGKEFNKLEKRMENLNKKVDDGFLDIWTYNAELLVLLENERTLDFHDSNVKNLYEKVKSQLKNNAKEIGNGCFEFYHKCNNECMESVKNGTYDYPKYSEESKLNREKIDGVKLESMGVYQILAIYSTVASSLVLLVSLGAISFWMCSNGSLQCRICI

SEQ ID NO: 9104 - protein, 566 aa, Artificial Sequence; identical to SEQ ID NO: 9103
  derived and/or modified protein sequence (wt) from hemagglutinin__InfluenzaA__AFM72065

SEQ ID NO: 9105 - protein, 566 aa, Artificial Sequence
  derived and/or modified protein sequence (wt) from hemagglutinin__InfluenzaA__AFM72087
MKTIIALSYIFCLVFAQKLPGNDNSTATLCLGHHAVPNGTLVKTITNDQIEVTNATELVQSSSTGRICDSPHRILDGKNCTLIDALLGDPHCDGFQNEKWDLFIERSKAFSNCYPYDVPDYASLRSLVASSGTLEFINEGFNWTGVTQSGGSYTCKRGSVNSFFSRLNWLYESEYKYPALNVTMPNNGKFDKLYIWGVHHPSTEKEQTNLYVRASGRVTVSTKRSQQTVIPNIGSSPWVRGLSSRISIYWTIVKPGDILLINSTGNLIAPRGYFKIRTGKSSIMRSDAPIGTCSSECITPNGSIPNDKPFQNVNKITYGACPRYVKQNTLKLATGMRNVPEKQTRGIFGAIAGFIENGWEGMVDGWYGFRHQNSEGTGQAADLKSTQAAIDQINGKLNRLIEKTNEKFHQIEKEFSEVEGRIQDLEKYVEDTKIDLWSYNAELLVALENQYTIDLTDSEMNKLFEKTRKQLRENAEDMGNGCFKIYHKCDNACIGSIRNGTYDHDVYRDEALNNRFQIKGVELKSGYKDWILWISFAISCFLLCVVLLGFIMWACQKGNIRCNICI

SEQ ID NO: 9106 - protein, 566 aa, Artificial Sequence
  derived and/or modified protein sequence (wt) from hemagglutinin__InfluenzaA__AFM72098
MKTIIALSYIFCLVFAQKLPGNDNSTATLCLGHHAVPNGTLVKTITNDQIEVTNATELVQSSSTGRICDSPHRILDGKNCTLIDALLGDPHCDGFQNEKWDLFVERSKAYSNCYPYDVPDYASLRSLVASSGTLEFINEDFNWTGVTQSGGSYACKRGSVNSFFSRLNWLYKSEYKYPALNVTMPNNGKFDKLYIWGVHHPVTDREQTNLYVRASGRVTVSTKRSQQTVIPNIGSRPWVRGLSSRISIYWTIVKPGDILLINSTGNLIAPRGYFKIRTGKSSIMRSDAPIGTCSSECITPNGSIPNDKPFQNVNKITYGACPRYVKQNTLKLATGMRNVPEKQTRGIFGAIAGFIENGWEGMVDGWYGFRHQNSEGTGQAADLKSTQAAIDQINGKLNRLIEKTNEKFHQIEKEFSEVEGRIQDLEKYVEDTKIDLWSYNAELLVALENQHTIDLTDSEMNKLFEKTRKQLRENAEDMGNGCFKIYHKCDNACIGSIRNGTYDHDVYRDEALNNRFQIKGVELKSGYKDWILWISFAISCFLLCVVLLGFIMWACQKGNIRCNICI

SEQ ID NO: 9107 - protein, 566 aa, Artificial Sequence
  derived and/or modified protein sequence (wt) from hemagglutinin__InfluenzaA__AFM72109
MKTIIALSYIFCLVFAQKLPGNDNSTATLCLGHHAVPNGTLVKTITNDQIEVTNATELVQSSSTGRICDSPHRILDGKNCTLIDALLGDPHCDGFQNEKWDLFVERSKAYSNCYPYDVPDYASLRSLVASSGTLEFINEDFNWTGVTQSGGSYACKRGSVNSFFSRLNWLHKSEYKYPALNVTMPNNGKFDKLYIWGVHHPITDREQTNLYVRASGRVTVSTKRSQQTVIPNIGSRPWVRGLSSRISIYWTIVKPGDILLINSTGNLIAPRGYFKIRTGKSSIMRSDAPIGTCSSECITPNGSIPNDKPFQNVNKITYGACPRYVKQNTLKLATGMRNVPEKQTRGIFGAIAGFIENGWEGMVDGWYGFRHQNSEGTGQAADLKSTQAAIDQINGKLNRLIEKTNEKFHQIEKEFSEVEGRIQDLEKYVEDTKIDLWSYNAELLVALENQHTIDLTDSEMNKLFEKTRRQLRENAEDMGNGCFKIYHKCDNACIGSIRNGTYDHDVYRDEALNNRFQIKGVELKSGYKDWILWISFAISCFLLCVVLLGFIMWACQKGNIRCNICI

SEQ ID NO: 9108 - protein, 566 aa, Artificial Sequence
  derived and/or modified protein sequence (wt) from hemagglutinin__InfluenzaA__AFM72120
MKTIIALSYIFCLVFAQKLPGNDNSTATLCLGHHAVPNGTLVKTITNDQIEVTNATELVQSSSTGRICDSPHRILDGKNCTLIDALLGDPHCDGFQNEKWDLFVERSKAYSNCYPYDVPDYASLRSLVASSGTLEFINEDFNWTGVTQSGGSYACKRGSVNSFFSRLNWLHESEYKYPALNVTMPNNGKFDKLYIWGVHHPITDREQTNLYVRASGRVTVSTKRSQQTVIPNIGFRPWVRGLSSRISIYWTIVKPGDILLINSTGNLIAPRGYFKIRNGKSSIMRSDAPIGTCSSECITPNGSIPNDKPFQNVNKITYGACPRYVKQNTLKLATGMRNVPEKQTRGIFGAIAGFIENGWEGMVDGWYGFRHQNSEGTGQAADLKSTQAAIDQINGKLNRLIEKTNEKFHQIEKEFSEVEGRIQDLEKYVEDTKIDLWSYNAELLVALENQHTIDLTDSEMNKLFEKTRKQLRENAEDMGNGCFKIYHKCDNACIGSIRNGTYDHDVYRDEALNNRFQIKGVELKSGYKDWILWISFAISCFLLCVVLLGFIMWACQKGNIRCNICI

SEQ ID NO: 9109 - protein, 566 aa, Artificial Sequence
  derived and/or modified protein sequence (wt) from hemagglutinin__InfluenzaA__AFM72131
MKTIIALSYILCLVFAQKLPGNDNSTATLCLGHHAVPNGTLVKTITNDQIEVTNATELVQSSSTGRICDSPHRILDGKDCTLIDALLGDPHCDGFQNKEWDLFVERSKAYSNCYPYDVPDYASLRSLVASSGTLEFINEDFNWNGVAQSGESYACKRGSVKSFFSRLNWLHESEYKYPALNVTMPNNGKFDKLYIWGVHHPSTDREQTKLYVRASGRVTVSTKRSQQTVIPNIGSRPWVRGLSSRISIYWTIVKPGDILLINSTGNLIAPRGYFKIRTGKSSIMRSDAPIGTCSSECITPNGSIPNDKPFQNVNRITYGACPRYVKQNTLKLATGMRNVPEKQTRGIFGAIAGFIENGWEGMVDGWYGFRHQNSEGTGQAADLKSTQAAIDQINGKLNRLIEKTNEKFHQIEKEFSEVEGRIQDLEKYVEDTKIDLWSYNAELLVALENQHTIDLTDSEMNKLFEKTRKQLRENAEDMGNGCFKIYHKCDNACIGSIRNGTYDHDVYRDEALNNRFQIKGVELKSGYKDWILWISFAISCFLLCVVLLGFIMWACQKGNIRCNICI

SEQ ID NO: 9110 - protein, 566 aa, Artificial Sequence
  derived and/or modified protein sequence (wt) from hemagglutinin__InfluenzaA__AFM72142
MKTIIALSYISCLVFAQKLPGNDNSTATLCLGHHAVPNGTLVKTITNDQIEVTNATELVQSSSTGRICDSPHRILDGKNCTLIDALLGDPHCDGFQNKEWDLFVERSKAYSNCYPYDVPDYASLRSLVASSGTLEFINEDFNWTGVAQDGGSYACKRGSVNSFFSRLNWLHKLEYKYPALNVTMPNNGKFDKLYIWGVHHPSTDRDQTSLYVRASGRVTVSTKRSQQTVIPNIGSRPWVRGQSSRISIYWTIVKPGDILLINSTGNLIAPRGYFKIRNGKSSIMRSDAPIGNCSSECITPNGSIPNDKPFQNVNRITYGACPRYVKQNTLKLATGMRNVPEKQTRGIFGAIAGFIENGWEGMVDGWYGFRHQNSEGTGQAADLKSTQAAIDQINGKLNRLIEKTNEKFHQIEKEFSEVEGRIQDLEKYVEDTKIDLWSYNAELLVALENQHTIDLTDSEMNKLFERTRKQLRENAEDMGNGCFKIYHKCDNACIGSIRNGTYDHDVYRDEALNNRFQIKGVELKSGYKDWILWISFAISCFLLCVVLLGFIMWACQKGNIRCNICI

SEQ ID NO: 9111 - protein, 566 aa, Artificial Sequence
  derived and/or modified protein sequence (wt) from hemagglutinin__InfluenzaA__AFM72153
MKTIIALSYILCLVFAQKLPGNDNSTATLCLGHHAVPNGTLVKTITNDQIEVTNATELVQSSSTGRICGSPHRILDGKNCTLIDALLGDPHCDGFQNKEWDLFVERSKAYSNCYPYDVPDYASLRSLVASSGTLEFINEDFNWTGVAQDGGSYACKRGSVNSFFSRLNWLHKLEYKYPALNVTMPNNGKFDKLYIWGVHHPSTDSDQTSLYVRASGRVTVSTKRSQQTVTPNIGSRPWVRGQSSRIGIYWTIVKPGDILLINSTGNLIAPRGYFKIRNGKSSIMRSDAPIGNCSSECITPNGSIPNDKPFQNVNRITYGACPRYVKQNTLKLATGMRNVPEKQTRGIFGAIAGFIENGWEGMVDGWYGFRHQNSEGTGQAADLKSTQAAIDQINGKLNRLIEKTNEKFHQIEKEFSEVEGRIQDLEKYVEDTKIDLWSYNAELLVALENQHTIDLTDSEMNKLFEKTRKQLRENAEDMGNGCFKIYHKCDNACIGSIRNGTYDHDVYRDEALNNRFQIKGVELKSGYKDWILWISFAISCFLLCVVLLGFIMWACQKGNIRCNICI

SEQ ID NO: 9112 - protein, 566 aa, Artificial Sequence
  derived and/or modified protein sequence (wt) from hemagglutinin__InfluenzaA__AFM72164
MKTIIALSYILCLVFAQKLPGNDNSTATLCLGHHAVPNGTLVKTITNDQIEVTNATELVQSSPTGRICDSPHRILDGKNCTLIDALLGDPHCDGFQNKEWDLFVERSKAYSNCYPYDVPDYASLRSLVASSGTLEFINENFNWTGVAQDGKSYACKRGSVNSFFSRLNWLHKLEYKYPALNVTMPNNGKFDKLYIWGVHHPSTDSDQTSLYVRASGRVTVSTKRSQQTVIPDIGYRPWVRGQSSRISIHWTIVKPGDILLINSTGNLIAPRGYFKIRNGKSSIMRSDAPIGNCSSECITPNGSIPNDKPFQNVNRITYGACPRYVKQNTLKLATGMRNVPEKQTRGIFGAIAGFIENGWEGMVDGWYGFRHQNSEGTGQAADLKSTQAAIDQINGKLNRLVEKTNEKFHQIEKEFSEVEGRIQDLEKYVEDTKIDLWSYNAELLVALENQHTIDLTDSEMNKLFERTRKQLRENAEDMGNGCFKIYHKCDNACIGSIRNGTYDHDVYRDEALNNRFQIKGVELKSGYKDWILWISFAISCFLLCVVLLGFIMWACQKGNIRCNICI

SEQ ID NO: 9113 - protein, 566 aa, Artificial Sequence
  derived and/or modified protein sequence (wt) from hemagglutinin__InfluenzaA__AFM72175
MKTIIALSYILCLVFAQKLPGNDNSTATLCLGHHAVPNGTLVKTITNDQIEVTNATELVQSSPTGRICDSPHRILDGKNCTLIDALLGDPHCDGFQNKEWDLFVERSKAYSNCYPYDVPDYASLRSLVASSGTLEFINENFNWTGVAQDGKSYACKRGSVNSFFSRLNWLHKLEYKYPALNVTMPNNGKFDKLYIWGVHHPSTDSDQTNLYVRASGRVTVSTKRSQQTVIPDIGYRPWVRGQSSRISIHWTIVKPGDILLINSTGNLIAPRGYFKIRNGKSSIMRSDAPIGNCSSECITPNGSIPNDKPFQNVNRITYGACPRYVKQNTLKLATGMRNVPEKQTRGIFGAIAGFIENGWEGMVDGWYGFRHQNSEGTGQAADLKSTQAAIDQINGKLNRLVEKTNEKFHQIEKEFSEVEGRIQDLEKYVEDTKIDLWSYNAELLVALENQHTIDLTDSEMNKLFERTRKQLRENAEDMGNGCFKIYHKCDNACIGSIRNGTYDHDVYRDEALNNRFQIKGVELKSGYKDWILWISFAISCFLLCVVLLGFIMWACQKGNIRCNICI

SEQ ID NO: 9114 - protein, 566 aa, Artificial Sequence
  derived and/or modified protein sequence (wt) from hemagglutinin__InfluenzaA__AFM72197
MKTIIALSYILCMVFAQKLPGNDNSTATLCLGHHAVPNGTLVKTITNDQIEVTNATELVQSSSTGRICDSPHRILDGKNCTLIDALLGDPHCDGFQNKEWDLFVERSKAYSNCYPYDVPDYASLRSLVASSGTLEFNNESFNWTGVAQNGTSYACKRRSVKSFFSRLNWLHKLEYKYPALNVTMPNNDKFDKLYIWGVHHPITDSEQTSLYVQASGRVTVSTKRSQQTVIPNIGYRPWVRGVSSRISIYWTIVKPGDILLINSTGNLIAPRGYFKIRSGKSSIMRSDAPIGNCNSECITPNGSIPNDKPFQNVNRITYGACPRYVKQNTLKLATGMRNVPEKQTRGIFGAIAGFIENGWEGMVDGWYGFRHQNSEGTGQAADLKSTQAAINQINGKLNRLIEKTNEKFHQIEKEFSEVEGRIQDLEKYVEDTKIDLWSYNAELLVALENQHTIDLTDSEMNKLFERTRKQLRENAEDMGNGCFKIYHKCDNACIGSIRNGTYDHDVYRDEALNNRFQIKGVELKSGYKDWILWISFAISCFLLCVVLLGFIMWACQKGNIKCNICI

SEQ ID NO: 9115 - protein, 566 aa, Artificial Sequence
  derived and/or modified protein sequence (wt) from hemagglutinin__InfluenzaA__AFM72208
MKTIIALSYILCLVFAQKLPGNDNSTATLCLGHHAVPNGTLVKTITNDQIEVTNATELVQSSSTGRICDSPHQILDGENCTLIDALLGDPHCDGFQNKEWDLFVERSKAYSNCYPYDVPDYASLRSLVASSGTLEFNNESFNWTGVAQNGTSSACKRRSINSFFSRLNWLHQLKYRYPALNVTMPNNDKFDKLYIWGVHHPSTDSDQTSLYTQASGRVTVSTKRSQQTVIPNIGSRPWVRGISSRISIYWTIVKPGDILLINSTGNLIAPRGYFKIRSGKSSIMRSDAPIGKCNSECITPNGSIPNDKPFQNVNRITYGACPRYVKQNTLKLATGMRNVPEKQTRGIFGAIAGFIENGWEGMMDGWYGFRHQNSEGTGQAADLKSTQAAINQINGKLNRLIEKTNEKFHQIEKEFSEVEGRIQDLEKYVEDTKIDLWSYNAELLVALENQHTIDLTDSEMNKLFERTRKQLRENAEDMGNGCFKIYHKCDNACIGSIRNGTYDHDVYRDEALNNRFQIKGVELKSGYKDWILWISFAISCFLLCVVLLGFIMWACQKGNIRCNICI

SEQ ID NO: 9116 - protein, 566 aa, Artificial Sequence
  derived and/or modified protein sequence (wt) from hemagglutinin__InfluenzaA__AFM72219
MKTIIALSYILCLVFAQKLPGNDNSTATLCLGHHAVPNGTLVKTITNDQIEVTNATELVQSSSTGRICDSPHQILDGENCTLIDALLGDPHCDGFQNKEWDLFVERSKAYSNCYPYDVPDYASLRSLVASSGTLEFNNESFNWTGVAQNGTSSACKRRSINSFFSRLNWLHQLKYRYPALNVTMPNNDKFDKLYIWGVHHPSTDSDQTSLYTQASGRVTVSTKRSQQTVIPNIGSRPWVRGISSRISIYWTIVKPGDILLIKSTGNLIAPRGYFKIRSGKSSIMRSDAPIGKCNSECITPNGSIPNDKPFQNVNRITYGACPRYVKQNTLKLATGMRNVPEKQTRGIFGAIAGFIENGWEGMMDGWYGFRHQNSEGTGQAADLKSTQAAINQINGKLNRLIEKTNEKFHQIEKEFSEVEGRIQDLEKYVEDTKIDLWSYNAELLVALENQHTIDLTDSEMNKLFERTRKQLRENAEDMGNGCFKIYHKCDNACIGSIRNGTYDHDVYRDEALNNRFQIKGVELKSGYKDWILWISFAISCFLLCVVLLGFIMWACQKGNIRCNICI

SEQ ID NO: 9117 - protein, 565 aa, Artificial Sequence
  derived and/or modified protein sequence (wt) from hemagglutinin__InfluenzaA__AFM72230
MKAKLLVLLCTFTATYADTICIGYHANNSTDTVDTVLEKNVTVTHSVNLLEDSHNGKLCLLKGIAPLQLGNCSVAGWILGNPECELLISKKSWSYIVETPNPENGTCYPGYFADYEELREQLSSVSSFERFEIFPKESSWPNHTVTGVSASCSHNGKSSFYRNLLWLTGKNGLYPNLSKSYVNNKEKEVLVLWGVHHPPNIGNQRALYHTENAYVSVVSSHYSRRFTPEIAKRPKVRDQEGRINYYWTLLEPGDTIIFEANGNLIAPWYAFALSRGFGSGIITSNAPMDECDAKCQTPQGAINSSLPFQNVHPVTIGECPKYVRSAKLRMVTGLRNIPSIQSRGLFGAIAGFIEGGWTGMVDGWYGYHHQNEQGSGYAADQKSTQNAINGITNKVNSVIEKMNTQFTAVGKEFNKLERRMENLNKKVDDGFLDIWTYNAELLVLLENERTLDFHDSNVKNLYEKVKSQLKNNAKEIGNGCFEFYHKCNNECMESVKNGTYDYPKYSEESKLNREKIDGVKLESMGVYQILAIYSTVASSLVLLVSLGAISFWMCSNGSLQCRICI

SEQ ID NO: 9118 - protein, 566 aa, Artificial Sequence
  derived and/or modified protein sequence (wt) from hemagglutinin__InfluenzaA__AFM72246
MKTIIALSYILCLVFAQKLPGNDNSTATLCLGHHAVSNGTLVKTITNDQIEVTNATELVQSSSTGRICDSPHQILDGENCTLIDALLGDPHCDGFQNKEWDLFVERSKAYSNCYPYDVPDYASLRSLVASSGTLEFNNESFNWTGVAQNGTSSACKRRSNKSFFSRLNWLHQLKYKYPALNVTMPNNEKFDKLYIWGVHHPSTDSDQISIYAQASGRVTVSTKRSQQTVIPNIGSSPWVRGVSSRISIYWTIVKPGDILLINSTGNLIAPRGYFKIRSGKSSIMRSDAPIGKCNSECITPNGSIPNDKPFQNVNRITYGACPRYVKQNTLKLATGMRNVPEKQTRGIFGAIAGFIENGWEGMVDGWYGFRHQNSEGTGQAADLKSTQAAINQINGKLNRLIEKTNEKFHQIEKEFSEVEGRIQDLEKYVEDTKIDLWSYNAELLVALENQHTIDLTDSEMNKLFERTKKQLRENAEDMGNGCFKIYHKCDNACIGSIRNGTYDHDVYRDEALNNRFQIKGVELKSGYKDWILWISFAISCFLLCVVLLGFIMWACQKGNIRCNICI

SEQ ID NO: 9119 - protein, 566 aa, Artificial Sequence
  derived and/or modified protein sequence (wt) from hemagglutinin__InfluenzaA__AFM72257
MKTIIALSYILCLVFAQKLPVNDNSTATLCLGHHAVPNGTLVKTITNDHIEVTNATELVQSSSTGRICDSPHQILDGENCTLIDALLGDPHCDGFQNKEWDLFVERSTAYSNCYPYDVPDYASLRSLVASSGTLEFNNESFNWTGVAQNGTSSACKRRSIKSFFSRLNWLHQLNYKYPALNVTMPNNEKFDKLYIWGVHHPSTDSDQISIYAQASGRVTVSTKRSQQTVIPNIGSRPWVRGVSSGISIYWTIVKPGDILLINSTGNLIAPRGYFKIRSGKSSIMRSNAPIGKCNSECITPNGSIPNDKPFQNVNRITYGACPRYVKQNTLKLATGMRNVPEKQTRGIFGAIAGFIENGWEGMVDGWYGFRHQNSEGTGQAADLKSTQAAINQINGKLNRLIEKTNEKFHQIEKEFSEVEGRIQDLEKYVEDTKIDLWSYNAELLVALENQHTIDLTDSEMNKLFERTRKQLRENAEDMGNGCFKIYHKCDNACIGSIRNGTYDHDVYRDEALNNRFQIKGVELKSGYKDWILWISFAISCFLLCVVLLGFIMWACQKGNIRCNICI

SEQ ID NO: 9120 - protein, 566 aa, Artificial Sequence
  derived and/or modified protein sequence (wt) from hemagglutinin__InfluenzaA__AFM72268
MKTIIALSYILCLVFAQKLPVNDNSTATLCLGHHAVPNGTLVKTITNDHIEVTNATELVQSSSTGRICDSPHQILDGENCTLIDALLGDPHCDGFQNKEWDLFVERSTAYSNCYPYDVPDYASLRSLVASSGTLEFNNESFNWTGVAQNGTSSACKRRSIKSFFSRLNWLHQLNYKYPALNVTMPNNEKFDKLYIWGVHHPNTDSDQISIYAQASGRVTVSTKRSQQTVIPNIGSRPWVRGVSSGISIYWTIVKPGDILLINSTGNLIAPRGYFKIRSGKSSIMRSNAPIGKCNSECITPNGSIPNDKPFQNVNRITYGACPRYVKQNTLKLATGMRNVPEKQTRGIFGAIAGFIENGWEGMVDGWYGFRHQNSEGTGQAADLKSTQAAINQINGKLNRLIEKTNEKFHQIEKEFSEVEGRIQDLEKYVEDTKIDLWSYNAELLVALENQHTIDLTDSEMNKLFERTRKQLRENAEDMGNGCFKIYHKCDNACIGSIRNGTYDHDVYRDEALNNRFQIKGVELKSGYKDWILWISFAISCFLLCVVLLGFIMWACQKGNIRCNICI

SEQ ID NO: 9121 - protein, 566 aa, Artificial Sequence
  derived and/or modified protein sequence (wt) from hemagglutinin__InfluenzaA__AFM72279
MKTIIALSYILCLVFAQKLPVNDNSTATLCLGHHAVPNGTLVKTITNDHIEVTNATELVQSSSTGRICDSPHQILDGENCTLIDALLGDPHCDGFQNKEWDLFVERSTAYSNCYPYDVPDYASLRSLVASSGTLEFNNESFNWTGVAQNGTSSACKRRSIKSFFSRLNWLHQLKYKYPALNVTMPNNEKFDKLYIWGVHHPSTDSDQISIYAQASGRVTVSTKRSQQTVIPNIGSKHWVRGVSSRISIYWTIVKPGDILLINSTGNLIAPRGYFKIRSGKSSIMRSNAPIGKCNSECITPNGSIPNDKPFQNVNRITYGACPRYVKQNTLKLATGMRNVPEKQTRGIFGAIAGFIENGWEGMVDGWYGFRHQNSEGTGQAADLKSTQAAINQINGKLNRLIEKTNEKFHQIEKEFSEVEGRIQDLEKYVEDTKIDLWSYNAELLVALENQHTIDLTDSEMNKLFERTRKQLRENAEDMGNGCFKIYHKCDNACIGSIRNGTYDHDVYRDEALNNRFQIKGVELKSGYKDWILWISFAISCFLLCVVLLGFIMWACQKGNIRCNICI

SEQ ID NO: 9122 - protein, 566 aa, Artificial Sequence
  derived and/or modified protein sequence (wt) from hemagglutinin__InfluenzaA__AFM72290
MKTIIALSYILCLVFAQKLPVNDNSTATLCLGHHAVPNGTLVKTITNDHIEVTNATELVQSSSTGRICDSPHQILDGENCTLIDALLGDPHCDGFQNKEWDLFVERSTAYSNCYPYDVPDYASLRSLVASSGTLEFNNESFNWTGVAQNGTSSACKRRSIKSFFSRLNWLHQLKDKYPALNVTMPNNEKFDKLYIWGVHHPSTDSDQISIYAQASGRVTVSTKRSQQTVIPNIGSKHWVRGVSSRISIYWTIVKPGDILLINSTGNLIAPRGYFKIRSGKSSIMRSNAPIGKCNSECITPNGSIPNDKPFQNVNRITYGACPRYVKQNTLKLATGMRNVPEKQTRGIFGAIAGFIENGWEGMVDGWYGFRHQNSEGTGQAADLKSTQAAINQINGKLNRLIEKTNEKFHQIEKEFSEVEGRIQDLEKYVEDTKIDLWSYNAELLVALENQHTIDLTDSEMNKLFERTRKQLRENAEDMGNGCFKIYHKCDNACIGSIRNGTYDHDVYRDEALNNRFQIKGVELKSGYKDWILWISFAISCFLLCVVLLGFIMWACQKGNIRCNICI

SEQ ID NO: 9123 - protein, 566 aa, Artificial Sequence
  derived and/or modified protein sequence (wt) from hemagglutinin__InfluenzaA__AFM72301
MKTIIALSYILCLVFSQKLPGNDNSTATLCLGHHAVPNGTIVKTITNDQIEVTNATELVQSSSTGGICDSPHQILDGENCTLIDALLGDPQCDGFQNKKWDLFVERSKAYSNCYPYDVPDYASLRSLVASSGTLEFNNESFNWAGVTQNGTSSACKRRSNKSFFSRLNWLTQLKYKYPALNVTMPNNEKFDKLYIWGVHHPVTDSDQISLYAQASGRITVSTKRSQQTVIPNIGYRPRVRDISSRISIYWTIVKPGDILLINSTGNLIAPRGYFKIRSGKSSIMRSDAPIGKCNSECITPNGSIPNDKPFQNVNRITYGACPRYVKQNTLKLATGMRNVPEKQTRGIFGAIAGFIENGWEGMVDGWYGFRHQNSEGTGQAADLKSTQAAINQINGKLNRLIGKTNEKFHQIEKEFSEVEGRIQDLEKYVEDTKIDLWSYNAELLVALENQHTIDLTDSEMNKLFERTKKQLRENAEDMGNGCFKIYHKCDNACIESIRNGTYDHDVYRDEALNNRFQIKGVELKSGYKDWILWISFAISCFLLCVALLGFIMWACQKGNIRCNICI

SEQ ID NO: 9124 - protein, 566 aa, Artificial Sequence
  derived and/or modified protein sequence (wt) from hemagglutinin__InfluenzaA__AFM72312
MKTIIALSYILCLVFAQKLPGNDNSTATLCLGHHAVPNGTIVKTITNDQIEVTNATELVQSSSTGGICDSPHQILDGENCTLIDALLGDPQCDGFQNKKWDLFVERSKAYSNCYPYDVPDYASLRSLVASSGTLEFNNESFNWTGVTQNGTSSACKRRSNKSFFSRLNWLTHLKYKYPALNVTMPNNEKFDKLYIWGVHHPVTDSDQINLYAQASGRITVSTKRSQQTVIPNIGYRPRVRDIPSRISIYWTIVKPGDILLINSTGNLIAPRGYFKIRSGKSSIMRSDAPIGKCNSECITPNGSIPNDKPFQNVNRITYGACPRYVKQNTLKLATGMRNVPEKQTRGIFGAIAGFIENGWEGMVDGWYGFRHQNSEGTGQAADLKSTQAAINQINGKLNRLIGKTNEKFHQIEKEFSEVEGRIQDLEKYVEDTKIDLWSYNAELLVALENQHTIDLTDSEMNKLFERTKKQLRENAEDMGNGCFKIYHKCDNACIGSIRNGTYDHDVYRDEALNNRFQIKGVELKSGYKDWILWISFAISCFLLCVALLGFIMWACQKGNIRCNICI

SEQ ID NO: 9125 - protein, 566 aa, Artificial Sequence
  derived and/or modified protein sequence (wt) from hemagglutinin__InfluenzaA__AFM72323
MKAIIALSYILCLVFAQKLPGNDNSTATLCLGHHAVPNGTIVKTITNDQIEVTNATELVQSSSTGGICDSPHQILDGENCTLIDALLGDPQCDGFQNKKWDLFVERSKAYSNCYPYDVPDYASLRSLVASSGTLEFNNESFNWTGVTQNGTSSACKRRSNKSFFSRLNWLTHLKYKYPALNVTMPNNEKFDKLYIWGVHHPVTDSDQINLYAQASGRITVSTKRSQQTVIPNIGYRPRVRDNPSRISIYWTIVKPGDILLINSTGNLIAPRGYFKIRSGKSSIMRSDAPIGKCNSECITPNGSIPNDKPFQNVNRITYGACPRYVKQNTLKLATGMRNVPEKQTRGIFGAIAGFIENGWEGMVDGWYGFRHQNSEGTGQAADLKSTQAAINQINGKLNRLIGKTNEKFHQIEKEFSEVEGRIQDLEKYVEDTKIDLWSYNAELLVALENQHTIDLTDSEMNKLFERTKKQLRENAEDMGNGCFKIYHKCDNACIGSIRNGTYDHDVYRDEALNNRFQIKGVELKSGYKDWILWISFAISCFLLCVALLGFIMWACQKGNIRCNICI

SEQ ID NO: 9126 - protein, 566 aa, Artificial Sequence
  derived and/or modified protein sequence (wt) from hemagglutinin__InfluenzaA__AFM72334
MKTIIALSYILCLVFAQKLPGNDNSTATLCLGHHAVPNGTIVKTITNDQIEVTNATELVQSSSTGEICNSPHQILDGENCTLIDALLGDPQCDGFQNKKWDLFVERSKAHSNCYPYDVPDYASLRSLVASSGTLEFNNESFNWTGVTQNGTSSACIRRSNNSFFSRLNWLTHLNFKYPALNVTMPNNEQFDKLYIWGVLHPGTYKDQIFLYAQASGRITVSTKRSQQAVIPNIGSRPRVRNIPSRVSIYWTIVKPGDILLINSTGNLIAPRGYFKIRSGKSSIMRSDAPIGKCNSACITPNGSIPNDKPFQNVNRITYGACPRYVKQNTLKLATGMRNVPEKQTRGIFGAIAGFIENGWEGMVDGWYGFRHQNSEGRGQAADLKSTQAAIDQINGKLNRLIGKTNEKFHQIEKEFSEVEGRIQDLEKYVEDTKIDLWSYNAELLVALENQHTIDLTDSEMNKLFEKTKKQLRENAEDMGNGCFKIYHKCDNACIGSIRNGTYDHDVYRDEALNNRFQIKGVELKSGYKDWILWISFAISCFLLCVALLGFIMWACQKGNIRCNICI

SEQ ID NO: 9127 - protein, 566 aa, Artificial Sequence
  derived and/or modified protein sequence (wt) from hemagglutinin__InfluenzaA__AFM72345
MKTIIALSYILCLVFAQKLPGNDNSTATLCLGHHAVPNGTIVKTITNDQIEVTNATELVQSSSTGGICDSPHQILDGENCTLIDALLGDPQCDGFQNKKWDLFVERSKAYSNCYPYDVPDYASLRSLVASSGTLEFNNESFDWTGVTQNGTSSACKRRSNKSFFSRLNWLTHLKYKYPALNVTMPNNEKFDKLYIWGVHHPVTDSDQISLYTQASGRITVSTKRSQQTVIPNIGFRPRVRDISSRISIYWTIVKPGDILLINSTGNLIAPRGYFKIRSGKSSIMRSDAPIGKCNSECITPNGSIPNDKPFQNVNRITYGACPRYVKQNTLKLATGMRNVPEKQTRGIFGAIAGFIENGWEGMVDGWYGFRHQNSEGTGQAADLKSTQAAINQINGKLNRLIGKTNEKFHQIEKEFSEVEGRIQDLEKYVEDTKIDLWSYNAELLVALENQHTIDLTDSEMNKLFERTKKQLRENAEDMGNGCFKIYHKCDNACIGSIRNGTYDHDVYRDEALNNRFQIKGVELKSGYKDWILWISFAISCFLLCVALLGFIMWACQKGNIRCNICI

SEQ ID NO: 9128 - protein, 566 aa, Artificial Sequence
  derived and/or modified protein sequence (wt) from hemagglutinin__InfluenzaA__AFM72356
MKTIIALSYILCLVFAQKLPGNDNSTATLCLGHHAVPNGTIVKTITNDQIEVTNATELVQSSSTGGICDSPHQILDGENCTLIDALLGDPQCDGFQNKKWDLFVERSKAYSNCYPYDVPDYASLRSLVASSGTLEFNNESFNWTGVTQNGTSSACKRRSNKSFFSRLNWLTHLKFKYPALNVTMPNNEKFDKLYIWGVHHPGTDNDQINLYVQASGRITVSTKRSQQTVIPNIGSRPRVRDVPSRISIYWTIVKPGDILLISSTGNLIAPRGYFKIRSGKSSIMRSDAPIGKCNSECITPNGSIPNDKPFQNVNRITYGACPRYVKQNTLKLATGMRNVPEKQTRGIFGAIAGFIENGWEGMVDGWYGFRHQNSEGTGQAADLKSTQAAINQINGKLNRLIGKTNEKFHQIEKEFSEVEGRIQDLEKYVEDTKIDLWSYNAELLVALENQHTIDLTDSEMNKLFERTKKQLRENAEDMGNGCFKIYHKCDNACIGSIRNGTYDHDVYRDEALNNRFQIKGVELKSGYKDWILWISFAISCFLLCVALLGFIMWACQKGNIRCNICI

SEQ ID NO: 9129 - protein, 566 aa, Artificial Sequence
  derived and/or modified protein sequence (wt) from hemagglutinin__InfluenzaA__AFM72367
MKTIIALSYILCLVFAQKLPGNDNSTATLCLGHHAVPNGTIVKTITNDQIEVTNATELVQSSSTGGICDSPHQILDGENCTLIDALLGDPQCDGFQNKKWDLFVERSKAYSNCYPYDVPDYASLRSLVASSGTLEFNNESFNWTGVTQNGTSSACKRRSNKSFFSRLNWLTHLKFKYPALNVTMPNNEKFDKLYIWGVHHPVTDNDQINLYAQASGRITVSTKRSQQTVIPNIGSRPRVRDVPSRISIYWTIVKPGDILLISSTGNLIAPRGYFKIRSGKSSIMRSDAPIGKCNSECITPNGSIPNDKPFQNVNRITYGACPRYVKQNTLKLATGMRNVPEKQTRGIFGAIAGFIENGWEGMVDGWYGFRHQNSEGTGQAADLKSTQAAINQINGKLNRLIGKTNEKFHQIEKEFSEVEGRIQDLEKYVEDTKIDLWSYNAELLVALENQHTIDLTDSEMNKLFERTKKQLRENAEDMGNGCFKIYHKCDNACIGSIRNGTYDHDVYRDEALNNRFQIKGVELKSGYKDWILWISFAISCFLLCVALLGFIMWACQKGNIRCNICI

SEQ ID NO: 9130 - protein, 566 aa, Artificial Sequence
  derived and/or modified protein sequence (wt) from hemagglutinin__InfluenzaA__AFM72378
MKTIIALSYILCLVFAQKLPGNDNSTATLCLGHHAVPNGTIVKTITNDQIEVTNATELVQSSSTGEICNSPHQILDGENCTLIDALLGDPQCDGFQNKKWDLFVERSKAHSNCYPYDVPDYASLRSLVASSGTLEFNNESFNWTGVTQNGTSSACIRRSNNSFFSRLNWLTQLNFKYPALNVTMPNNEQFDKLYIWGVHHPVTDKDQIFLYAQASGRITVSTKRSQQAVIPNIGYRPRVRNIPSRVSIYWTIVKPGDILLINSTGNLIAPRGYFKIRSGKSSIMRSDAPIGKCNSACITPNGSIPNDKPFQNVNRITYGACPRYVKQNTLKLATGMRNVPEKQTRGIFGAIAGFIENGWEGMVDGWYGFRHQNSEGRGQAADLKSTQAAIDQINGKLNRLIGKTNEKFHQIEKEFSEVEGRIQDLEKYVEDTKIDLWSYNAELLVALENQHTIDLTDSEMNKLFEKTKKQLRENAEDMGNGCFKIYHKCDNACIGSIRNGTYDHDVYRDEALNNRFQIKGVELKSGYKDWILWISFAISCFLLCVALLGFIMWACQKGNIRCNICI

SEQ ID NO: 9131 - protein, 566 aa, Artificial Sequence
  derived and/or modified protein sequence (wt) from hemagglutinin__InfluenzaA__AFM72389
MKTIIALSYILCLVFAQKLPGNDNSTATLCLGHHAVPNGTIVKTITNDQIEVTNATELVQSSSTGEICNSPHQILDGENCTLIDALLGDPQCDGFQNKKWDLFVERSKAHSNCYPYDVPDYASLRSLVASSGTLEFNNESFNWTGVTQNGTSSACIRRSNNSFFSRLNWLTHLNFKYPALNVTMPNNEQFDKLYIWGVHHPVTDKDQIFLYAQASGRITVSTKRSQQAVIPNIGYRPRVRNNPSRVSIYWTIVKPGDILLINSTGNLIAPRGYFKIRSGKSSIMRSDAPIGKCNSACITPNGSIPNDKPFQNVNRITYGACPRYVKQNTLKLATGMRNVPEKQTRGIFGAIAGFIENGWEGMVDGWYGFRHQNSEGRGQAADLKSTQAAIDQINGKLNRLIGKTNEKFHQIEKEFSEVEGRIQDLEKYVEDTKIDLWSYNAELLVALENQHTIDLTDSEMNKLFEKTKKQLRENAEDMGNGCFKIYHKCDNACIGSIRNGTYDHDVYRDEALNNRFQIKGVELKSGYKDWILWISFAISCFLLCVALLGFIMWACQKGNIRCNICI

SEQ ID NO: 9132 - protein, 566 aa, Artificial Sequence
  derived and/or modified protein sequence (wt) from hemagglutinin__InfluenzaA__AFM72400
MKTIIALSYILCLVFAQKLPGIDNSTATLCLGHHAVPNGTIVKTITNDQIEVTNATELVQSSSTGEICDSPHQILDGENCTLIDALLGDPQCDGFQNKKWDLFVERSKAYSNCYPYDVPDYASLRSLVASSGTLEFNNESFNWAGVTQNGTSSACKRGSNNSFFSRLNWLTHSKFKYPALNVTMPNNEEFDKLYIWGVLHPGTDNDQIFLYAQASGRITVSTKRSQQTVIPNIGSRPRVRNIPSRISIYWTIVKPGDILLINSTGNLIAPRGYFKIRSGKSSIMRSDAPIGKCNSECITPNGSIPNDKPFQNVNRITYGACPRYVKQNTLKLATGMRNVPEKQTRGIFGAIAGFIENGWEGMVDGWYGFRHQNSEGIGQAADLKSTQAAIDQINGKLNRLIGKTNEKFHQIEKEFSEVEGRIQDLEKYVEDTKIDLWSYNAELLVALENQHTIDLTDSEMNKLFEKTKKQLRENAEDMGNGCFKIYHKCDNACIGSIRNGTYDHDVYRDEALNNRFQIKGVELKSGYKDWILWISFAISCFLLCVALLGFIMWACQKGNIRCNICI

SEQ ID NO: 9133 - protein, 566 aa, Artificial Sequence
  derived and/or modified protein sequence (wt) from hemagglutinin__InfluenzaA__AFM72411
MKTIIALSYILCLVFAQKLPGIDNSTATLCLGHHAVPNGTIVKTITNDQIEVTNATELVQSSSTGEICDSPHQILDGENCTLIDALLGDPQCDGFQNKKWDLFVERSKAYSNCYPYDVPDYASLRSLVASSGTLEFNNESFNWAGVTQNGTSSACKRGSNNSFFSRLNWLTQSKFKYPALNVTMPNNEEFDKLYIWGVHHPVTDNDQIFLYAQASGRITVSTKRSQQTVIPNIGSRPRVRNIPSRISIYWTIVKPGDILLINSTGNLIAPRGYFKIRSGKSSIMRSDAPIGKCNSECITPNGSIPNDKPFQNVNRITYGACPRYVKQNTLKLATGMRNVPEKQTRGIFGAIAGFIENGWEGMVDGWYGFRHQNSEGIGQAADLKSTQAAIDQINGKLNRLIGKTNEKFHQIEKEFSEVEGRIQDFEKYVEDTKIDLWSYNAELLVALENQHTIDLTDSEMNKLFEKTKKQLRENAEDMGNGCFKIYHKCDNACIGSIRNGTYDHDVYRDEALNNRFQIKGVELKSGYKDWILWISFAISCFLLCVALLGFIMWACQKGNIRCNICI

SEQ ID NO: 9134 - protein, 566 aa, Artificial Sequence
  derived and/or modified protein sequence (wt) from hemagglutinin__InfluenzaA__AFM72422
MKTIIALSYILCLVFAQKLPGNDNSTATLCLGHHAVPNGTIVKTITNDQIEVTNATELVQSSSTGEICDSPHQILDGENCTLIDALLGDPQCDGFQNKKWDLFVERSKAYSNCYPYDVPDYASLRSLVASSGTLEFNNESFNWTGVTQNGTSSACIRRSNNSFFSRLNWLTHLKFKYPALNVTMPNNEEFDKLYIWGVHHPVTDNDQIFLYAQASGRITVSTKRSQQTVIPNIGFRPRVRNIPSRISIYWTIVKPGDILLINSTGNLIAPRGYFKIRSGKSSIMRSDAPIGKCNSECITPNGSIPNDKPFQNVNRITYGACPRYVKQNTLKLATGMRNVPEKQTRGIFGAIAGFIENGWEGMVDGWYGFRHQNSEGIGQAADLKSTQAAIDQINGKLNRLIGKTNEKFHQIEKEFSEVEGRIQDLEKYAEDTKIDLWSYNAELLVALENQHTIDLTDSEMNKLFEKTKKQLRENAEDMGNGCFKIYHKCDNACIGSIRNGTYDHDVYRDEALNNRFQIKGVELKSGYKDWILWISFAISCFLLCVALLGFIMWACQKGNIRCNICI

SEQ ID NO: 9135 - protein, 566 aa, Artificial Sequence
  derived and/or modified protein sequence (wt) from hemagglutinin__InfluenzaA__AFM72433
MKTIIALSYILCLVFAQKLPGNDNSTATLCLGHHAVPNGTIVKTITNDQIEVTNATELVQSSSTGEICDSPHQILDGENCTLIDALLGDPQCDGFQNKKWDLFVERSKAYSNCYPYDVPDYASLRSLVASSGTLEFNNESFNWTGVTQNGTSSACIRRSNNSFFSRLNWLTHLKFKYPALNVTMPNNEEFDKLYIWGVHHPVTDNDQIFLYAQASGRITVSTKRSQQTVIPNIGFRPRVRNNPSRISIYWTIVKPGDILLINSTGNLIAPRGYFKIRSGKSSIMRSDAPIGKCNSECITPNGSIPNDKPFQNVNRITYGACPRYVKQNTLKLATGMRNVPEKQTRGIFGAIAGFIENGWEGMVDGWYGFRHQNSEGIGQAADLKSTQAAIDQINGKLNRLIGKTNEKFHQIEKEFSEVEGRIQDLEKYAEDTKIDLWSYNAELLVALENQHTIDLTDSEMNKLFEKTKKQLRENAEDMGNGCFKIYHKCDNACIGSIRNGTYDHDVYRDEALNNRFQIKGVELKSGYKDWILWISFAISCFLLCVALLGFIMWACQKGNIRCNICI

SEQ ID NO: 9136 - protein, 566 aa, Artificial Sequence
  derived and/or modified protein sequence (wt) from hemagglutinin__InfluenzaA__AFM72444
MKTIIALSYILCLVFAQKLPGNDNSTATLCLGHHAVPNGTIVKTITNDQIEVTNATELVQSSSTGEICDSPHQILDGENCTLIDALLGDPQCDGFQNKKWDLFVERSKAYSNCYPYDVPDYASLRSLVASSGTLEFNNESFNWTGVTQNGTSSACIRRSNNSFFSRLNWLTHLKFKYPALNVTMPNNEEFDKLYIWGVHHPVTDNDQILLYAQASGRITVSTKRSQQTVIPNIGFRPRVRNNPSRISIYWTIVKPGDILLINSTGNLIAPRGYFKIRSGKSSIMRSDAPIGKCNSECITPNGSIPNDKPFQNVNRITYGACPRYVKQNTLKLATGMRNVPEKQTRGIFGAIAGFIENGWEGMVDGWYGFRHQNSEGIGQAADLKSTQAAIDQINGKLNRLIGKTNEKFHQIEKEFSEVEGRIQDLEKYAEDTKIDLWSYNAELLVALENQHTIDLTDSEMNKLFEKTKKQLRENAEDMGNGCFKIYHKCDNACIGSIRNGTYDHDVYRDEALNNRFQIKGVELKSGYKDWILWISFAISCFLLCVALLGFIMWACQKGNIRCNICI

SEQ ID NO: 9137 - protein, 566 aa, Artificial Sequence
  derived and/or modified protein sequence (wt) from hemagglutinin__InfluenzaA__AFM72455
MKTIIALSYILCLVFAQKLPGNDNSTATLCLGHHAVPNGTIVKTITNDQIEVTNATELVQSSSTGEICDSPHQILDGENCTLIDALLGDPQCDGFQNKKWDLFVERSKAYSNCYPYDVPDYASLRSLVASSGTLEFNNESFNWTGVTQNGTSSACIRRSNNSFFSRLNWLTQLKFKYPALNVTMPNNEEFDKLYIWGVHHPVTDNDQIFLYAQASGRITVSTKRSQQTVIPNIGFRPRVRNNPSRISIYWTIVKPGDILLINSTGNLIAPRGYFKIRSGKSSIMRSDAPIGKCNSECITPNGSIPNDKPFQNVNRITYGACPRYVKQNTLKLATGMRNVPEKQTRGIFGAIAGFIENGWEGMVDGWYGFRHQNSEGIGQAADLKSTQAAIDQINGKLNRLIGKTNEKFHQIEKEFSEVEGRIQDLEKYAEDTKIDLWSYNAELLVALENQHTIDLTDSEMNKLFEKTKKQLRENAEDMGNGCFKIYHKCDNACIGSIRNGTYDHDVYRDEALNNRFQIKGVELKSGYKDWILWISFAISCFLLCVALLGFIMWACQKGNIRCNICI

SEQ ID NO: 9138 - protein, 566 aa, Artificial Sequence
  derived and/or modified protein sequence (wt) from hemagglutinin__InfluenzaA__AFM72466
MKTIIALSYILCLVFAQKLPGNDNSTATLCLGHHAVPNGTIVKTITNDQIEVTNATELVQSSSTGEICDSPHQILDGENCTLIDALLGDPQCDGFQNKKWDLFVERSKAYSNCYPYDVPDYASLRSLVASSGTLEFNNESFNWTGVTQNGTSSACIRRSNNSFFSRLNWLTHLKFKYPALNVTMPNNEEFDKLYIWGVHHPVTDKDQIFLYAQASGRITVSTKRSQQTVIPNIGFRPRVRNNPSRISIYWTIVKPGDILLINSTGNLIAPRGYFKIRSGKSSIMRSDAPIGKCNSECITPNGSIPNDKPFQNVNRITYGACPRYVKQNTLKLATGMRNVPEKQTRGIFGAIAGFIENGWEGMVDGWYGFRHQNSEGIGQAADLKSTQAAIDQINGKLNRLIGKTNEKFHQIEKEFSEVEGRIQDLEKYAEDTKIDLWSYNAELLVALENQHTIDLTDSEMNKLFEKTKKQLRENAEDMGNGCFKIYHKCDNACIGSIRNGTYDHDVYRDEALNNRFQIKGVELKSGYKDWILWISFAISCFLLCVALLGFIMWACQKGNIRCNICI

SEQ ID NO: 9139 - protein, 566 aa, Artificial Sequence
  derived and/or modified protein sequence (wt) from hemagglutinin__InfluenzaA__AFM72488
MKTIIALSYILCLVFAQKLPGNDNSTATLCLGHHAVPNGTIVKTITNDQIEVTNATELVQSSSTGGICDSPHQILDGENCTLIDALLGDPQCDGFQNKKWDLFVERSKAYSNCYPYDVPDYASLRSLVASSGTLEFNNESFNWTGVTQNGTSSACKRRSNNSFFSRLNWLTQLKFKYPALNVTMPNNEKFDKLYIWGVHHPVTDNEQIFLYAQASGRITVSTKRSQQTVIPNIGFRPRVRNIPSRISIYWTIVKPGDILLINSTGNLIAPRGYFKIRSGKSSIMRSDAPIGKCNSKCITPNGSIPNDKPFQNVNRITYGACPRYVKQNTLKLATGMRNVPEKQTRGIFGAIAGFIENGWEGMVDGWYGFRHQNSEGIGQAADLKSTQAAIDQINGKLNRLIGKTNEKFHQIEKEFSEVEGRIQDLEKYVEDTKIDLWSYNAELLVALENQHTIDLTDSEMNKLFEKTKKQLRENAEDMGNGCFKIYHKCDNACIGSIRNGTYDHDVYRDEALNNRFQIKGVELKSGYKDWILWISFAISCFLLCVALLGFIMWACQKGNIRCNICI

SEQ ID NO: 9140 - protein, 566 aa, Artificial Sequence
  derived and/or modified protein sequence (wt) from hemagglutinin__InfluenzaA__AFM72499
MKTIIALSYILCLVFAQKLPGNDNSTATLCLGHHAVPNGTIVKTITNDQIEVTNATELVQSSSTGGICDSPHQILDGENCTLIDALLGDPQCDGFQNKKWDLFVERSKAYSNCYPYDVPDYASLRSLVASSGTLEFNNESFNWTGVTQNGTSSACKRRSNNSFFSRLNWLTQLKFKYPALNVTMPNNEKFDKLYIWGVHHPVTDNDQIFLYAQASGRITVSTKRSQQTVIPNIGSRPRVRNIPSRISIYWTIVKPGDILLINSTGNLIAPRGYFKIRSGKSSIMRSDAPIGKCNSECITPNGSIPNDKPFQNVNRITYGACPRYVKQNTLKLATGMRNVPEKQTRGIFGAIAGFIENGWEGMVDGWYGFRHQNSEGIGQAADLKSTQAAIDQINGKLNRLIGKTNEKFHQIEKEFSEVEGRIQDLEKYVEDTKIDLWSYNAELLVALENQHTIDLTDSEMNKLFEKTKKQLRENAEDMGNGCFKIYHKCDNACIGSIRNGTYDHDVYRDEALNNRFQIKGVELKSGYKDWILWISFAISCFLLCVALLGFIMWACQKGNIRCNICI

SEQ ID NO: 9141 - protein, 565 aa, Artificial Sequence
  derived and/or modified protein sequence (wt) from hemagglutinin__InfluenzaA__AFM72521
MKVKLLVLLCTFTATYADTICIGYHANNSTDTVDTVLEKNVTVTHSVNLLENSHNGRLCLLKGIAPLQLGNCSVAGWILGNPECELLISKESWSYIVEKPNPENGTCYPGHFADYEELREQLSSVSSLERFEIFPKESSWPNHTVTGVSASCSHNGESSFYRNLLWLTGKNGLYPNLSKSYANNKEKEVLVLWGVHHPPNIGNQKALYHTENAYVSVVSSHYSRKFTPEIAKRPKVRDQEGRINYYWTLLEPGDTIIFEANGNLIAPRYAFALSRGFGSGIINSNAPMDKCDAKCQTPQGAINSSLPFQNVHPVTIGECPKYVRSAKLRMVTGLRNIPSIQSRGLFGAIAGFIEGGWTGMVDGWYGYHHQNEQGSGYAADQKSTQNAINGITNKVNSVIEKMNTQFTAVGKEFNKLERRMENLNKKVDDGFIDIWTYNAELLVLLENERTLDFHDSNVKNLYEKVKSQLKNNAKEIGNGCFEFYHKCNDECMESVKNGTYDYPKYSEESKLNREKIDGVKLESMGVYQILAIYSTVASSLVLLVSLGAISFWMCSNGSLQCRICI

SEQ ID NO: 9142 - protein, 565 aa, Artificial Sequence; identical to SEQ ID NO: 9141
  derived and/or modified protein sequence (wt) from hemagglutinin__InfluenzaA__AFM72532

SEQ ID NO: 9143 - protein, 565 aa, Artificial Sequence; identical to SEQ ID NO: 9141
  derived and/or modified protein sequence (wt) from hemagglutinin__InfluenzaA__AFM72543

SEQ ID NO: 9144 - protein, 565 aa, Artificial Sequence
  derived and/or modified protein sequence (wt) from hemagglutinin__InfluenzaA__AFM72554
MKVKLLVLLCTFTATYADTICIGYHANNSTDTVDTVLEKNVTVTHSVNLLENSHNGRLCLLKGIAPLQLGNCSVAGWILGNPECELLISKESWSYIVEKPNPENGTCYPGHFADYEELREQLSSVSSLERFEIFPKESSWPNHTVTGVSASCSHNGESSFYRNLLWLTGKNGLYPNLSKSYANNKEKEVLVLWGVHHPPNIGNQKALYHTENAYVSVVSSHYSRKFTPEIAKRPKVRDQEGRINYYWTLLEPGDTIIFEANGNLIAPRYAFALSRGFGSGIINSNAPMDKCDAKCQTPQGAINSSLPFQNVHPVTIGECPKYVRSAKLRMVTGLRNIPSIQSRGLFGAIAGFIEGGWTGMVDGWYGYHHQNEQGSGYAADQKSTQNAINGITNKVNSVIEKMNTQFTAVGKEFNKLERRMENLNKKVDDGFIDIWTYNAELLVLLENERTLDFHDSNVKNLYEKVKSQLKNNAKEIGNGCFEFYHKCNDECMESVKNGTYDYPKYSEESKLNREKIDEVKLESMGVYQILAIYSTVASSLVLLVSLGAISFWMCSNGSLQCRICI

SEQ ID NO: 9145 - protein, 566 aa, Artificial Sequence
  derived and/or modified protein sequence (wt) from hemagglutinin__InfluenzaA__AFM72565
MKTIIALSYILCLVFAQKLPGNDNSTATLCLGHHAVPNGTIVKTITNDQIEVTNATELVQSSSTGEICDSPHQILDGENCTLIDALLGDPQCDGFQNKKWDLFVERSKAYSNCYPYDVPDYASLRSLVASSGTLEFNNESFNWTGVTQNGTSSSCIRRSNNSFFSRLNWLTHLKFKYPALNVTMPNNEKFDKLYIWGVHHPGTDNDQIFPYAQASGRITVSTKRSQQTVIPNIGSRPRVRNIPSRISIYWTIVKPGDILLINSTGNLIAPRGYFKIRSGKSSIMRSDAPIGKCNSECITPNGSIPNDKPFQNVNRITYGACPRYVKQNTLKLATGMRNVPEKQTRGIFGAIAGFIENGWEGMVDGWYGFRHQNSEGIGQAADLKSTQAAIDQINGKLNRLIGKTNEKFHQIEKEFSEVEGRIQDLEKYVEDTKIDLWSYNAELLVALENQHTIDLTDSEMNKLFEKTKKQLRENAEDMGNGCFKIYHKCDNACIGSIRNGTYDHDVYRDEALNNRFQIKGVELKSGYKDWILWISFAISCFLLCVALLGFIMWACQKGNIRCNICI

SEQ ID NO: 9146 - protein, 566 aa, Artificial Sequence
  derived and/or modified protein sequence (wt) from hemagglutinin__InfluenzaA__AFM72576
MKTIIALSYILCLVFAQKLPGNDNSTATLCLGHHAVPNGTIVKTITNDQIEVTNATELVQSSSTGEICDSPHQILDGENCTLIDALLGDPQCDGFQNKKWDLFVERSKAYSNCYPYDVPDYASLRSLVASSGTLEFNNESFNWTGVTQNGTSSSCIRGSNNSFFSRLNWLTHLKFKYPALNVTMPNNEKFDKLYIWGVHHPGTDNDQIFPYAQASGRITVSTKRSQQTVIPNIGSRPRVRNIPSRISIYWTIVKPGDILLINSTGNLIAPRGYFKIRSGKSSIMRSDAPIGKCNSECITPNGSIPNDKPFQNVNRITYGACPRYVKQNTLKLATGMRNVPEKQTRGIFGAIAGFIENGWEGMVDGWYGFRHQNSEGIGQAADLKSTQAAIDQINGKLNRLIGKTNEKFHQIEKEFSEVEGRIQDLEKYVEDTKIDLWSYNAELLVALENQHTIDLTDSEMNKLFEKTKKQLRENAEDMGNGCFKIYHKCDNACIGSIRNGTYDHDVYRDEALNNRFQIKGVELKSGYKDWILWISFAISCFLLCVALLGFIMWACQKGNIRCNICI

SEQ ID NO: 9147 - protein, 565 aa, Artificial Sequence
  derived and/or modified protein sequence (wt) from hemagglutinin__InfluenzaA__AFM72799
MKVKLLVLLCTFTATYADTICIGYHANNSTDTVDTVLEKNVTVTHSVNLLEDNHNGKLCLLKGKAPLQLGNCSVAGWILGNPECGLLISKESWSYIVERPNPENGTCYPGHFADYEELREQLSSVSSFERFEIFPKESSWPNHTVTGVSASCSHNGESSFYKNLLWLTGKNGLYPNLSKSYANNKEKEVLVLWGVHHPPNIGNQMTLYHKENAYVSVVSSHYSRKFTPEIAKRPKVRDQEGRINYYWTLLEPGDTIIFEANGNLIAPRYAFALSRGFGSGIINSNAPMDECDAKCQTPQGAINSSLPFQNVHPVTIGECPKYVRSAKLRMVTGLRNIPSIQSRGLFGAIAGFIEGGWTGMVDGWYGYHHQNEQGSGYAADQKSTQNAINGITNKVNSVIEKMNTQFTAVGKEFNKLERRMENLNKKVDDGFIDVWTYNAELLVLLENERTLDFHDSNVKNLYEKVKNQLKNNAKEIGNGCFEFYHKCNDECMESVKNGTYDYPKYSEESKLSREKIDGVKLESMGVYQILAIYSTVASSLVLLVSLGAISFWMCSNGSLQCRICI

SEQ ID NO: 9148 - protein, 565 aa, Artificial Sequence; identical to SEQ ID NO: 9147
  derived and/or modified protein sequence (wt) from hemagglutinin__InfluenzaA__AFM72810

SEQ ID NO: 9149 - protein, 565 aa, Artificial Sequence; identical to SEQ ID NO: 9147
  derived and/or modified protein sequence (wt) from hemagglutinin__InfluenzaA__AFM72821

SEQ ID NO: 9150 - protein, 566 aa, Artificial Sequence
  derived and/or modified protein sequence (wt) from hemagglutinin__InfluenzaA__AFM72852
MKAILVVLLYTFATANADTLCIGYHANNSTDTVDTVLEKNVTVTHSVNLLEDKHNGKLCKLRGVAPLHLGKCNIAGWILGNPECESLSTASSWSYIVETPSSDNGTCYPGDFIDYEELREQLSSVSSFERFEIFPKTSSWPNHDSDKGVTAACPHAGAKSFYKNLIWLVKKGNSYPKLSKSYINDKGKEVLVLWGIHHPSTSADQQSLYQNADAYVFVGSSRYSKTFKPEIAIRPKVRDREGRMNYYWTLVEPGDKITFEATGNLVVPRYAFAMERNAGSGIIISDTPVHDCNTTCQTPKGAINTSLPFQNIHPITIGKCPKYVKSTKLRLATGLRNIPSIQSRGLFGAIAGFIEGGWTGMVDGWYGYHHQNEQGSGYAADLKSTQNAIDEITNKVNSVIEKMNTQFTAVGKEFNHLEKRIENLNKKVDDGFLDIWTYNAELLVLLENERTLDYHDSNVKNLYEKVRSQLKNNAKEIGNGCFEFYHKCDNTCMESVKNGTYDYPKYSEEAKLNREEIDGVKLESTRIYQILAIYSTVASSLVLVVSLGAISFWMCSNGSLQCRICI

SEQ ID NO: 9151 - protein, 566 aa, Artificial Sequence
  derived and/or modified protein sequence (wt) from hemagglutinin__InfluenzaA__AFM72862
MKAILVVLLYTFATANADTLCIGYHANNSTDTVDTVLEKNVTVTHSVNLLEDKHNGKLCKLRGVAPLHLGKCNIAGWILGNPECESLSTASSWSYIVETPSSDNGTCYPGDFIDYEELREQLSSVSSFERFEIFPKTSSWPNHDSNKGVTAACPHAGAKSFYKNLIWLVKKGNSYPKLSNSYINDKGKEVLVLWGIHHPSTSADQQSLYQNADAYVFVGSSRYSKTFKPEIAIRPKVRDREGRMNYYWTLVEPGDKITFEATGNLVVPRYAFAMERNAGSGIIISDTPVHDCNTTCQTPKGAINTSLPFQNIHPITIGKCPKYVKSTKLRLATGLRNIPSIQSRGLFGAIAGFIEGGWTGMVDGWYGYHHQNEQGSGYAADLKSTQNAIDEITNKVNSVIEKMNTQFTAVGKEFNHLEKRIENLNKKVDDGFLDIWTYNAELLVLLENERTLDYHDSNVKNLYEKVRSQLKNNAKEIGNGCFEFYHKCDNTCMESVKNGTYDYPKYSEEAKLNREEIDGVKLESTRIYQILAIYSTVASSLVLVVSLGAISFWMCSNGSLQCRICI

SEQ ID NO: 9152 - protein, 566 aa, Artificial Sequence
  derived and/or modified protein sequence (wt) from hemagglutinin__InfluenzaA__AFM72872
MKTIIALSYTLCLVFAQKLPGNDNSTATLCLGHHAVPNGTIVKTITNDQIEVTNATELVQSSSTGEICDSPHQILDGKNCTLIDALLGDPQCDGFQNKKWDLFVERSKAYSNCYPYDVPDYASLRSLVASSGTLEFNNESFNWTGVTQNGTSSACIRRSKNSFFSRLNWLTHLNFKYPALNVTMPNNEQFDKLYIWGVHHPGTDKDQIFPYAQASGRITVSTKRSQQTAIPNIGSRPRVRNIPSRISIYWTIVKPGDILLINSTGNLIAPRGYFKIRSGKSSIMRSDAPIGKCNSECITPNGSIPNDKPFQNVNRITYGACPRYVKQNTLKLATGMRNVPEKQTRGIFGAIAGFIENGWEGMVDGWYGFRHQNSEGRGQAADLKSTQAAIDQINGKLNRLIGKTNEKFHQIEKEFSEVEGRIQDLEKYVEDTKIDLWSYNAELLVALENQHTIDLTDSEMNKLFEKTKKQLRENAEDMGNGCFKIYHKCDNACIGSIRNGTYDHDVYRDEALNNRFQIKGVELKSGYKDWILWISFAISCFLLCVALLGFIMWACQKGNIRCNICI

SEQ ID NO: 9153 - protein, 566 aa, Artificial Sequence
  derived and/or modified protein sequence (wt) from hemagglutinin__InfluenzaA__AFM72883
MKTIIALSYILCLVFAQKLPGNDNSTATLCLGHHAVPNGTIVKTITNDQIEVTNATELVQNSSTGEICDSPHQILDGKNCTLIDALLGDPQCDGFQNKKWDLFVERSKAYSNCYPYDVPDYASLRSLVASSGTLEFNNESFNWTGVTQNGTSSACIRRSKNSFFSRLNWLTHLNFKYPALNVTMPNNEQFDKLYIWGVHHPVTDKDQIFLYAQASGRITVSTKRSQQTVIPNIGSRPRVRNIPTRISIYWTIVKPGDILLINSTGNLIAPRGYFKMQSGKSSIMRSDAPIGKCNSECITPNGSIPNDKPFQNVNRITYGACPRYVKQNTLKLATGMRNVPEKQTRGIFGAIAGFIENGWEGMVDGWYGFRHQNSEGRGQAADLKSTQAAIDQINGKLNRLIGKTNEKFHQIEKEFSEVEGRIQDLEKYVEDTKIDLWSYNAELLVALENQHTIDLTDSEMNKLFEKTKKQLRENAEDMGNGCFKIYHKCDNACIGSIRNGTYDHNVYRDEALNNRFQIKGVELKSGYKDWILWISFAISCFLLCVALLGFIMWACQKGNIRCNICI

SEQ ID NO: 9154 - protein, 566 aa, Artificial Sequence
  derived and/or modified protein sequence (wt) from hemagglutinin__InfluenzaA__AFM72894
MKTIIALSYILCLVFAQKLPGNDNSTATLCLGHHAVPNGTIVKTITNDQIEVTNATELVQNSSTGEICDSPHQILDGKNCTLIDALLGDPQCDGFQNKKWDLFVERSKAYSNCYPYDVPDYASLRSLVASSGTLEFNNESFNWTGVTQNGTSSACIRRSKNSFFSRLNWLTQLNFKYPALNVTMPNNEQFDKLYIWGVHHPVTDKDQIFLYAQASGRITVSTKRSQQTVIPNIGSRPRVRNIPSRISIYWTIVKPGDILLINSTGNLIAPRGYFKMQSGKSSIMRSDAPIGKCNSECITPNGSIPNDKPFQNVNRITYGACPRYVKQNTLKLATGMRNVPEKQTRGIFGAIAGFIENGWEGMVDGWYGFRHQNSEGRGQAADLKSTQAAIDQINGKLNRLIGKTNEKFHQIEKEFSEVEGRIQDLEKYVEDTKIDLWSYNAELLVALENQHTIDLTDSEMNKLFEKTKKQLRENAEDMGNGCFKIYHKCDNACIGSIRNGTYDHNVYRDEALNNRFQIKGVELKSGYKDWILWISFAISCFLLCVALLGFIMWACQKGNIRCNICI

SEQ ID NO: 9155 - protein, 566 aa, Artificial Sequence
  derived and/or modified protein sequence (wt) from hemagglutinin__InfluenzaA__AFM72916
MKTIIALSYILCLVFAQKIPGNDNSTATLCLGHHAVPNGTIVKTITNDQIEVTNATELVQSSSTGEICDSPHQILDGKNCTLIDALLGDPQCDGFQNKKWDLFVERSKAYSNCYPYDVPDYASLRSLVASSGTLEFNNESFNWTGVTQNGTSSACIRRSKNSFFSRLNWLTHLNFKYPALNVTMPNNEQFDKLYIWGVHHPGTDKDQIFPYAQASGRITVSTKRSQQTAIPNIGSRPRVRNIPSRISIYWTIVKPGDILLINSTGNLIAPRGYFKIRSGKSSIMRSDAPIGKCNSGCITPNGSIPNDKPFQNVNRITYGACPRYVKQNTLKLATGMRNVPEKQTRGIFGAIAGFIENGWEGMVDGWYGFRHQNSEGRGQAADLKSTQAAIDQINGKLNRLIGKTNEKFHQIEKEFSEVEGRIQDLEKYVEDTKIDLWSYNAELLVALENQHTIDLTDSEMNKLFEKTKKQLRENAEDMGNGCFKIYHKCDNACIGSIRNGTYDHDVYRDEALNNRFQIKGVELKSGYKDWFLWISFAISCFLLCVALLGFIMWACQKGNIRCNICI

SEQ ID NO: 9156 - protein, 566 aa, Artificial Sequence
  derived and/or modified protein sequence (wt) from hemagglutinin__InfluenzaA__AFM72927
MKTIIALSYILCLVFAQKLPGNDNSTATLCLGHHAVPNGTIVKTITNDQIEVTNATELVQSSSTGEICDSPHQILDGENCTLIDALLGDPQCDGFQNKKWDLFVERSKAYSNCYPYDVPDYASLRSLVASSGTLEFNNESFNWTGVTQNGTSSACIRRSNNSFFSRLNWLTHLKFKYPALNVTMPNNEQFDKLYIWGVHHPGTDNDQTSLYAQASGRITVSTKRSQQTVIPNIGSRPRVRNIPSRISIYWTIVKPGDILLINSIGNLIAPRGYFKIRSGKSSIMRSDAPIGKCNSECITPNGSIPNDKPFQNVNRITYGACPRYVKQNTLKLATGMRNVPEKQTRGIFGAIAGFIENGWEGMVDGWYGFRHQNSEGRGQAADLKSTQAAIDQINGKLNRLIGKTNEKFHQIEKEFSEVEGRIQDLEKYVEDTKIDLWSYNAELLVALENQHTIDLTDSEMNKLFEKTKKQLRENAEDMGNGCFKIYHKCDNACIGSIRNGTYDHNVYRDEALNNRFQIKGVELKSGYKDWILWISFAISCFLLCVALLGFIMWACQKGNIRCNICI

SEQ ID NO: 9157 - protein, 566 aa, Artificial Sequence
  derived and/or modified protein sequence (wt) from hemagglutinin__InfluenzaA__AFM72938
MKTIIALSYILCLVFAQKLPGNDNSTATLCLGHHAVPNGTIVKTITNDQIEVTNATELVQSSSTGEICDSPHQILDGENCTLIDALLGDPQCDGFQNKKWDLFVERSKAYSNCYPYDVPDYASLRSLVASSGTLEFNNESFNWTGVTQNGTSSACIRRSNNSFFSRLNWLTHLKFKYPALNVTMPNNEQFDKLYIWGVHHPGTDNDQTSLYAQASGRITVSTKRSQQTVIPNIGSRPRVRNNPSRISIYWTIVKPGDILLINSIGNLIAPRGYFKIRSGKSSIMRSDAPIGKCNSECITPNGSIPNDKPFQNVNRITYGACPRYVKQNTLKLATGMRNVPEKQTRGIFGAIAGFIENGWEGMVDGWYGFRHQNSEGRGQAADLKSTQAAIDQINGKLNRLIGKTNEKFHQIEKEFSEVEGRIQDLEKYVEDTKIDLWSYNAELLVALENQHTIDLTDSEMNKLFEKTKKQLRENAEDMGNGCFKIYHKCDNACIGSIRNGTYDHNVYRDEALNNRFQIKGVELKSGYKDWILWISFAISCFLLCVALLGFIMWACQKGNIRCNICI

SEQ ID NO: 9158 - protein, 566 aa, Artificial Sequence
  derived and/or modified protein sequence (wt) from hemagglutinin__InfluenzaA__AFM72949
MKTIIALSYILCLVFAQKLPGNDNSTATLCLGHHAVPNGTIVKTITNDQIEVTNATELVQSSSTGEICDSPHQILDGENCTLIDALLGDPQCDGFQNKKWDLFVERSKAYSNCYPYDVPDYASLRSLVASSGTLEFNNESFNWTGVTQNGTSSACIRRSNNSFFSRLNWLTQLKFKYPALNVTMPNNEQFDKLYIWGVHHPGTDNDQTSLYAQASGRITVSTKRSQQTVIPNIGSRPRVRNNPSRISIYWTIVKPGDILLINSIGNLIAPRGYFKIRSGKSSIMRSDAPIGKCNSECITPNGSIPNDKPFQNVNRITYGACPRYVKQNTLKLATGMRNVPEKQTRGIFGAIAGFIENGWEGMVDGWYGFRHQNSEGRGQAADLKSTQAAIDQINGKLNRLIGKTNEKFHQIEKEFSEVEGRIQDLEKYVEDTKIDLWSYNAELLVALENQHTIDLTDSEMNKLFEKTKKQLRENAEDMGNGCFKIYHKCDNACIGSIRNGTYDHNVYRDEALNNRFQIKGVELKSGYKDWILWISFAISCFLLCVALLGFIMWACQKGNIRCNICI

SEQ ID NO: 9159 - protein, 566 aa, Artificial Sequence
  derived and/or modified protein sequence (wt) from hemagglutinin__InfluenzaA__AFM72960
MKTIIALSYILCLVFAQKLPGNDNSTATLCLGHHAVPNGTIVKTITNDQIEVTNATELVQSSSTGEICDSPHQILDGENCTLIDALLGDPQCDGFQNKKWDLFVERSKAYSNCYPYDVPDYASLRSLVASSGTLEFNNESFKWTGVTQNGTSSACIRRSNNSFFSRLNWLTHLKFKYPALNVTMPNNEQFDKLYIWGVHHPGTDNDQTSLYAQASGRITVSTKRSQQTVIPNIGSRPRVRNIPSRISIYWTIVKPGDILLINSIGNLIAPRGYFKIRSGKSSIMRSDAPIGKCNSECITPNGSIPNDKPFQNVNRITYGACPRYVKQNTLKLATGMRNVPEKQTRGIFGAIAGFIENGWEGMVDGWYGFRHQNSEGRGQAADLKSTQAAIDQINGKLNRLIGKTNEKFHQIEKEFSEVEGRIQDLEKYVEDTKIDLWSYNAELLVALENQHTIDLTDSEMNKLFEKTKKQLRENAEDMGNGCFKIYHKCDNACIGSIRNGTYDHNVYRDEALNNRFQIKGVELKSGYKDWILWISFAISCFLLCVALLGFIMWACQKGNIRCNICI

SEQ ID NO: 9160 - protein, 566 aa, Artificial Sequence
  derived and/or modified protein sequence (wt) from hemagglutinin__InfluenzaA__AFM72971
MKTIIALSYILCLVFAQKLPGNDNSTATLCLGHHAVPNGTIVKTITNDQIEVTNATELVQSSSTGEICDSPHQILDGENCTLIDALLGDPQCDGFQNKKWDLFVERSKAYSNCYPYDVPDYASLRSLVASSGTLEFNNESFKWTGVTQNGTSSACIRRSNNSFFSRLNWLTQLNFKYPALNVTMPNNEQFDKLYIWGVHHPGTDNDQTSLYAQASGRITVSTKRSQQTVIPNIGSRPRVRNIPSRISIYWTIVKPGDILLINSIGNLIAPRGYFKIRSGKSSIMRSDAPIGKCNSECITPNGSIPNDKPFQNVNRITYGACPRYVKQNTLKLATGMRNVPEKQTRGIFGAIAGFIENGWEGMVDGWYGFRHQNSEGRGQAADLKSTQAAIDQINGKLNRLIGKTNEKFHQIEKEFSEVEGRIQDLEKYVEDTKIDLWSYNAELLVALENQHTIDLTDSEMNKLFEKTKKQLRENAEDMGNGCFKIYHKCDNACIGSIRNGTYDHNVYRDEALNNRFQIKGVELKSGYKDWILWISFAISCFLLCVALLGFIMWACQKGNIRCNICI

SEQ ID NO: 9161 - protein, 566 aa, Artificial Sequence
  derived and/or modified protein sequence (wt) from hemagglutinin__InfluenzaA__AFM72982
MKTIIALSYILCLVFAQKLPGNDNSTATLCLGHHAVPNGTIVKTITNDQIEVTNATELVQSSSTGEICDSPHQILDGENCTLIDALLGDPQCDGFQNKKWDLFVERSKAYSNCYPYDVPDYASLRSLVASSGTLEFNSESFNWTGVTQNGTSSACIRRSNNSFFSRLNWLTHLNFKYPALNVTMPNNEQFDKLYIWGVHHPGTDKDQIFPYAQASGRITVSTKRSQQAVIPNIGSRPRVRNIPSRISIYWTIVKPGDILLINSTGNLIAPRGYFKIRSGKSSIMRSDAPIGKCNSECITPNGSIPNDKPFQNVNRITYGACPRYIKQSTLKLATGMRNVPEKQTRGIFGAIAGFIENGWEGMVDGWYGFRHQNSEGRGQAADLKSTQAAIDQINGKLNRLIGKTNEKFHQIEKEFSEVEGRIQDLEKYVEDTKIDLWSYNAELLVALENQHTIDLTDSEMNKLFEKTKKQLRENAEDMGNGCFKIYHKCDNACIGSIRNGTYDHDVYRDEALNNRFQIKGVELKSGYKDWILWISLAISCFLLCVALLGFIMWACQKGNIRCNICI

SEQ ID NO: 9162 - protein, 566 aa, Artificial Sequence
  derived and/or modified protein sequence (wt) from hemagglutinin__InfluenzaA__AFM72993
MKTIIALSYILCLVFAQKLPGNDNSTATLCLGHHAVPNGTIVKTITNDQIEVTNATELVQSSSAGEICDSPHQILDGENCTLIDALLGDPQCDGFQNKKWDLFVERSRAYSNCYPYDVPDYASLRSLVASSGTLEFNNESFNWTGVTQNGTSSACIRRSNNSFFSRLNWLTHLNFKYPALNVTMPNNEQFDKLYIWGVLHPGTYKDQIFLYAQASGRITVSTKRSQQAVIPNIGSRPRVRNIPSRISIYWTIVKPGDILLINSTGNLIAPRGYFKIRSGKSSIMRSDAPIGKCNSECITPNGSIPNDKPFQNVNRITYGACPRYVKQSTLKLATGMRNVPEKQTRGIFGAIAGFIENGWEGMVDGWYGFRHQNSEGRGQAADLKSTQAAIDQINGKLNRLIGKTNEKFHQIEKEFSEVEGRIQDLEKYVEDTKIDLWSYNAELLVALENQHTIDLTDSEMNKLFEKTKKQLRENAEDMGNGCFKIYHKCDNACIGSIRNGTYDHDVYRDEALNNRFQIKGVELKSGYKDWILWISFAISCFLLCVALLGFIMWACQKGNIRCNICI

SEQ ID NO: 9163 - protein, 566 aa, Artificial Sequence
  derived and/or modified protein sequence (wt) from hemagglutinin__InfluenzaA__AFM73004
MKTIIALSYILCLVFAQKLPGNDNSTATLCLGHHAVPNGTIVKTITNDQIEVTNATELVQSSSAGEICDSPHQILDGENCTLIDALLGDPQCDGFQNKKWDLFVERSRAYSNCYPYDVPDYASLRSLVASSGTLEFNNESFNWTGVTQNGTSSACIRRSNNSFFSRLNWLTHLNFKYPALNVTMPNNEQFDKLYIWGVLHPGTYKDQIFLYAQASGRVTVSTKRSQQAVIPNIGSRPRVRNIPSRISIYWTIVKPGDILLINSTGNLIAPRGYFKIRSGKSSIMRSDAPIGKCNSECITPNGSIPNDKPFQNVNRITYGACPRYVKQSTLKLATGMRNVPEKQTRGIFGAIAGFIENGWEGMVDGWYGFRHQNSEGRGQAADLKSTQAAIDQINGKLNRLIGKTNEKFHQIEKEFSEVEGRIQDLEKYVEDTKIDLWSYNAELLVALENQHTIDLTDSEMNKLFEKTKKQLRENAEDMGNGCFKIYHKCDNACIGSIRNGTYDHDVYRDEALNNRFQIKGVELKSGYKDWILWISFAISCFFLCVALLGFIMWACQKGNIRCNICI

SEQ ID NO: 9164 - protein, 566 aa, Artificial Sequence
  derived and/or modified protein sequence (wt) from hemagglutinin__InfluenzaA__AFM73015
MKAILVVLLYTFATANADTLCIGYHANNSTDTVDTVLEKNVTVTHSVNLLEDKHNGKLCKLRGVAPLHLGKCNIAGWILGNPECESLSTASSWSYIVETSSSDNGTCYPGDFIDYEELREQLSSVSSFERFEIFPKTSSWPNHDSNKGVTAACPHAGAKGFYKNLIWLVKKGNSYPKLSKSYINDKGKEVLVLWGIHHPSTTADQQSLYQNADTYVFVGTSRYSKKFKPEIAIRPKVRDREGRMNYYWTLVEPGDKITFEATGNLVVPRYAFAMERNAGSGIIISDTPVHDCNTTCQTPKGAINTSLPFQNIHPITIGKCPKYVKSTKLRLATGLRNVPSIQSRGLFGAIAGFIEGGWTGMVDGWYGYHHQNEQGSGYAADLKSTQNAIDKITNKVNSVIEKMNTQFTAVGKEFNHLEKRIENLNKKVDDGFLDIWTYNAELLVLLENERTLDYHDSNVKNLYEKVRNQLKNNAKEIGNGCFEFYHKCDNTCMESVKNGTYDYPKYSEEAKLNREEIDGVKLESTRIYQILAIYSTVASSLVLVVSLGAISFWMCSNGSLQCRICI

SEQ ID NO: 9165 - protein, 566 aa, Artificial Sequence
  derived and/or modified protein sequence (wt) from hemagglutinin__InfluenzaA__AFM73025
MKAILVVLLYTFATANADTLCIGYHANNSTDTVDTVLEKNVTVTHSVNLLEDKHNGKLCKLRGVAPLHLGKCNIAGWILGNPECESLSTASSWSYIVETSSSDNGTCYPGDFIDYEELREQLSSVSSFERFEIFPKTSSWPNHDSNKGVTAACPHAGAKGFYKNLIWLVKKGNSYPKLSKSYINDKGKEVLVLWGIHHPSTTDDQQSLYQNADTYVFVGTSRYSKKFKPEIAIRPKVRDREGRMNYYWTLVEPGDKITFEATGNLVVPRYAFAMERNAGSGIIISDTPVHDCNTTCQTPKGAINTSLPFQNIHPITIGKCPKYVKSTKLRLATGLRNVPSIQSRGLFGAIAGFIEGGWTGMVDGWYGYHHQNEQGSGYAADLKSTQNAIDKITNKVNSVIEKMNTQFTAVGKEFNHLEKRIENLNKKVDDGFLDIWTYNAELLVLLENERTLDYHDSNVKNLYEKVRNQLKNNAKEIGNGCFEFYHKCDNTCMESVKNGTYDYPKYSEEAKLNREEIDGVKLESTRIYQILAIYSTVASSLVLVVSLGAISFWMCSNGSLQCRICI

SEQ ID NO: 9166 - protein, 566 aa, Artificial Sequence; identical to SEQ ID NO: 9165
  derived and/or modified protein sequence (wt) from hemagglutinin__InfluenzaA__AFM73035

SEQ ID NO: 9167 - protein, 566 aa, Artificial Sequence
  derived and/or modified protein sequence (wt) from hemagglutinin__InfluenzaA__AFM73045
MKAILVVLLYTFATANADTLCIGYHANNSTDTVDTVLERNVTVTHSVNLLEDKHNGKLCKLRGVAPLHLGKCNIAGWILGNPECESLSTASSWSYIVETSSSDNGTCYPGDFIDYEELREQLSSVSSFERFEIFPKTSSWPNHESNKGVTAACPHAGAKSFYKNLIWLVKKGNSYPKLSKSYINDKGKEVLVLWGIHHPSTSADQQSLYQNADAYVFVGTSRYSKKFKPEIAIRPKVRDQEGRMNYYWTLVEPGDKITFEATGNLVVPRYAFAMERNAGSGIIISDTPVHDCNTTCQTPKGAINTSLPFQNIHPITIGKCPKYVKSTKLRLATGLRNVPSIQSRGLFGAIAGFIEGGWTGMVDGWYGYHHQNEQGSGYAADLKSTQNAIDEITNKVNSVIEKMNTQFTAVGKEFNHLEKRIENLNKKVDDGFLDIWTYNAELLVLLENERTLDYHDSNVKNLYEKVRSQLKNNAKEIGNGCFEFYHKCDNTCMESVKNGTYDYPKYSEEAKLNREEIDGVKLESTRIYQILAIYSTVASSLVLVVSLGAISFWMCSNGSLQCRICI

SEQ ID NO: 9168 - protein, 566 aa, Artificial Sequence
  derived and/or modified protein sequence (wt) from hemagglutinin__InfluenzaA__AFM73055
MKAILVVLLYTFATANADTLCIGYHANNSTDTVDTVLERNVTVTHSVNLLEDKHNGKLCKLRGVAPLHLGKCNIAGWILGNPECESLSTASSWSYIVETSSSDNGTCYPGDFIDYEELREQLSSVSSFERFEIFPKTSSWPNHDSNKGVTAACPHAGAKSFYKNLIWLVEKGNSYPKLSKSYINDKGKEVLVLWGIHHPSTSADQQSLYQNADAYVFVGTSRYSKKFKPEIAIRPKVRDREGRMNYYWTLVEPGDKITFEATGNLVVPRYAFAMERNAGSGIIISDTPVHDCNTTCQTPKGAINTSLPFQNIHPITIGKCPKYVKSTKLRLATGLRNVPSIQSRGLFGAIAGFIEGGWTGMVDGWYGYHHQNEQGSGYAADLKSTQNAIDEITNKVNSVIEKMNTQFTAVGKEFNHLEKRIENLNKKVDDGFLDIWTYNAELLVLLENERTLDYHDSNVKNLYEKVRSQLKNNAKEIGNGCFEFYHKCDNTCMESVKNGTYDYPKYSEEAKLNREEIDGVKLESTRIYQILAIYSTVASSLVLVVSLGAISFWMCSNGSLQCRICI

SEQ ID NO: 9169 - protein, 566 aa, Artificial Sequence
  derived and/or modified protein sequence (wt) from hemagglutinin__InfluenzaA__AFM73065
MKAILVVLLYTFATANADTLCIGYHANNSTDTVDTVLERNVTVTHSVNLLEDKHNGKLCKLRGVAPLHLGKCNIAGWILGNPECESLSTASSWSYIVETSSSDNGTCYPGDFIDYEELREQLSSVSSFERFEIFPKTSSWPNHDSNKGVTAACPHAGAKSFYKNLIWLVKEGNSYPKLSKSYINDKGKEVLVLWGIHHPSTSADQQSLYQNADAYVFVGTSRYSKKFKPEIAIRPKVRDREGRMNYYWTLVEPGDKITFEATGNLVVPRYAFAMERNAGSGIIISDTPVHDCNTTCQTPKGAINTSLPFQNIHPITIGKCPKYVKSTKLRLATGLRNVPSIQSRGLFGAIAGFIEGGWTGMVDGWYGYHHQNEQGSGYAADLKSTQNAIDEITNKVNSVIEKMNTQFTAVGKEFNHLEKRIENLNKKVDDGFLDIWTYNAELLVLLENERTLDYHDSNVKNLYEKVRSQLKNNAKEIGNGCFEFYHKCDNTCMESVKNGTYDYPKYSEEAKLNREEIDGVKLESTRIYQILAIYSTVASSLVLVVSLGAISFWMCSNGSLQCRICI

SEQ ID NO: 9170 - protein, 566 aa, Artificial Sequence; identical to SEQ ID NO: 915
  derived and/or modified protein sequence (wt) from hemagglutinin__InfluenzaA__AFM73477

SEQ ID NO: 9171 - protein, 568 aa, Artificial Sequence
  derived and/or modified protein sequence (wt) from hemagglutinin__InfluenzaA__AFM78567
MEKIVLLLAIVSLVKSDQICIGYHANNSTEQVDTIMEKNVTVTHAQDILEKTHNGKLCDLDGVKPLILRDCSVAGWLLGNPMCDEFINVPEWSYIVEKANPTNDLCYPGSFNDYEELKHLLSRINHFEKIQIIPKSSWSDHEASSGVSSACPYLGSPSFFRNVVWLIKKNSTYPTIKKSYNNTNQEDLLVLWGIHHPNDAAEQTRLYQNPTTYISIGTSTLNQRLVPKIATRSKVNGQSGRMEFFWTILKPNDAINFESNGNFIAPEYAYKIVKKGDSAIMKSELEYGNCNTKCQTPMGAINSSMPFHNIHPLTIGECPKYVKSNRLVLATGLRNSPQRESRRKKRGLFGAIAGFIEGGWQGMVDGWYGYHHSNEQGSGYAADKESTQKAIDGVTNKVNSIIDKMNTQFEAVGREFNNLERRIENLNKKMEDGFLDVWTYNAELLVLMENERTLDFHDSNVKNLYDKVRLQLRDNAKELGNGCFEFYHKCDNECMESIRNGTYNYPQYSEEARLKREEISGVKLESIGTYQILSIYSTVASSLALAIMMAGLSLWMCSNGSLQCRICI

SEQ ID NO: 9172 - protein, 566 aa, Artificial Sequence
  derived and/or modified protein sequence (wt) from hemagglutinin__InfluenzaA__AFM78646
MKAILVVLLYTFATANADTLCIGYHANNSTDTVDTVLEKNVTVTHSVNLLEDKHNGKLCKLRGVAPLHLGKCNIAGWILGNPECESLSTASSWSYIVETSSSDNGTCYPGDFIDYEELREQLSSVSSFERFEIFPKTSSWPNHDPNKGVTAACPHAGAKSFYKNLIWLVKKGNSYPKLSKSYINDKGKEVLVLWGIHHPSTSADQQGLYQNADAYVFVGTSRYSKKFKPEIAIRPKVRDQEGRMNYYWTLVEPGDKITFEATGNLVVPRYAFAMERNAGSGIIISDTPVHDCNTTCQTPKGAINTSLPFQNIHPITIGKCPKYVKSTKLRLATGLRNVPSIQSRGLFGAIAGFIEGGWTGMVDGWYGYHHQNEQGSGYAADLKSTQNAIDEITNKVNSVIEKMNTQFTAVGKEFNHLEKRIENLNKKVDDGFLDIWTYNAELLVLLENERTLDYHDSNVKNLYEKVRSQLKNNAKEIGNGCFEFYHKCDNTCMESVKNGTYDYPKYSEEAKLNREEIDGVKLESTRIYQILAIYSTVASSLVLVVSLGAISFWMCSNGSLQCRICI

SEQ ID NO: 9173 - protein, 565 aa, Artificial Sequence
  derived and/or modified protein sequence (wt) from hemagglutinin__InfluenzaA__AFM85179
MKVKLLILLCTFTATYADTICIGYHANNSTDTVDTVLEKNVTVTHSVNLLENSHNGKLCLLKGIAPLQLGNCSVAGWILGNPECELLISKESWSYIVETPNPENGTCYPGYFADYEELREQLSSVSSFERFEIFPKESSWPNHTVTGVSASCSHNGKSSFYRNLLWLTGKNGLYPNLSKSYANNKEKEVLILWGVHHPPNIGDQRTLYYTENAYVSVVSSHYSRRFTPEITKRPKVRDQEGRINYYWTLLEPGDTIIFEANGNLIAPWYAFALSRGFGSGIIISNAPMDECDAKCQTPQGAINSSLPFQNVHPVTIGECPKYVRSAKLRMVTGLRNIPSIQSRGLFGAIAGFIEGGWTGMVDGWYGYHHQNEQGSGYAADQKSTQNAINGITNKVNSVIEKMNTQFTAVGKEFNKFERRMENLNKKVDDGFLDIWTYNAELLVLLENERTLDFHDSNVKNLYEKVKSQLKNNAKEIGNGCFEFYHKCNNECMESVKNGTYDYPKYSEESKLNREKIDGVKLESMGVYQILAIYSTVASSLVLLVSLGAISFWMCSNGSLQCRICI

SEQ ID NO: 9174 - protein, 566 aa, Artificial Sequence
  derived and/or modified protein sequence (wt) from hemagglutinin__InfluenzaA__AFN11846
MKTIIALSYILCLVFAQKLPGNDNSTATLCLGHHAVPNGTLVKTITNDQIEVTNATELVQSSSTGRICDSPHRILDGKNCTLIDALLGDPHCDGFQNKEWDLFVERSKAYSNCYPYDVPDYASLRSLVASSGTLEFTNEGFNWTGVAQDGKSYACKRGSVKSFFSRLNWLHKLEYKYPALNVTMPNNDKFDKLYIWGVHHPSTDSDQTSLYVQASGRVTVSTKRSQQTVIPNIGSRPWVRGISSRISIYWTIVKPGDILLINSTGNLIAPRGYFKIRNGKSSIMRSDAPIGNCNSECITPNGSIPNDKPFQNVNRITYGACPRYVKQNTLKLATGMRNVPEKQTRGIFGAIAGFIENGWEGMVDGWYGFRHQNSEGTGQAADLKSTQAAIDQINGKLNRLIEKTNEKFHQIEKEFSEVEGRIQDLEKYVEDTKIDLWSYNAELLVALENQHTIDLTDSEMNKLFERTRKQLRENAEDMGNGCFKIYHKCDNACIGSIRNGTYDHDVYRDEALNNRFQIKGVELKSGYKDWILWISFAISCFLLCVVLLGFIMWACQKGNIRCNICI

SEQ ID NO: 9175 - protein, 566 aa, Artificial Sequence; identical to SEQ ID NO: 3530
  derived and/or modified protein sequence (wt) from hemagglutinin__InfluenzaA__AFN17371

SEQ ID NO: 9176 - protein, 566 aa, Artificial Sequence; identical to SEQ ID NO: 2669
  derived and/or modified protein sequence (wt) from hemagglutinin__InfluenzaA__AFN17381

SEQ ID NO: 9177 - protein, 566 aa, Artificial Sequence; identical to SEQ ID NO: 2669
  derived and/or modified protein sequence (wt) from hemagglutinin__InfluenzaA__AFN17391

SEQ ID NO: 9178 - protein, 566 aa, Artificial Sequence; identical to SEQ ID NO: 2669
  derived and/or modified protein sequence (wt) from hemagglutinin__InfluenzaA__AFN17401

SEQ ID NO: 9179 - protein, 566 aa, Artificial Sequence; identical to SEQ ID NO: 2669
  derived and/or modified protein sequence (wt) from hemagglutinin__InfluenzaA__AFN17411

SEQ ID NO: 9180 - protein, 566 aa, Artificial Sequence; identical to SEQ ID NO: 2669
  derived and/or modified protein sequence (wt) from hemagglutinin__InfluenzaA__AFN17421

SEQ ID NO: 9181 - protein, 566 aa, Artificial Sequence; identical to SEQ ID NO: 2760
  derived and/or modified protein sequence (wt) from hemagglutinin__InfluenzaA__AFN17431

SEQ ID NO: 9182 - protein, 566 aa, Artificial Sequence
  derived and/or modified protein sequence (wt) from hemagglutinin__InfluenzaA__AFN17441
MKAILVVLLYTFATANADTLCIGYHANNSTDTVDTVLEKNVTVTHSVNLLEDKHNGKLCKLRGVAPLHLGKCNIAGWILGNPECESLSKASSWSYIVETSSSDNGTCYPGDFIDYEELREQLSSVSSFERFEIFPKTSSWPNHDSNKGVTAACPHAGAKSFYKNLIWLVKKGNSYPKLSKSYINDKGKEVLVLWGIHHPSTSADQQSLYQNADAYVFVGTSRYSKKFKPEIAIRPKVRDQEGRMNYYWTLVEPGDKITFEATGNLVVPRYAFAMERNAGSGIIISDTPVHDCNTTCQTPKGAINTSLPFQNIHPITIGKCPKYVKSTKLRLATGLRNVPSIQSRGLFGAIAGFIEGGWTGMVDGWYGYHHQNEQGSGYAADLKSTQNAIDEITNKVNSVIEKMNTQFTAVGKEFNHLEKRIENLNKKVDDGFLDIWTYNAELLVLLENERTLDYHDSNVKNLYEKVRSQLKNNAKEIGNGCFEFYHKCDNTCMESVKNGTYDYPKYSEEAKLNREEIDGVKLESTRIYQILAIYSTVASSLVLVVSLGAISFWMCSNGSLQCRICI

SEQ ID NO: 9183 - protein, 566 aa, Artificial Sequence; identical to SEQ ID NO: 5224
  derived and/or modified protein sequence (wt) from hemagglutinin__InfluenzaA__AFN17451

SEQ ID NO: 9184 - protein, 566 aa, Artificial Sequence; identical to SEQ ID NO: 3511
  derived and/or modified protein sequence (wt) from hemagglutinin__InfluenzaA__AFN17467

SEQ ID NO: 9185 - protein, 566 aa, Artificial Sequence; identical to SEQ ID NO: 2669
  derived and/or modified protein sequence (wt) from hemagglutinin__InfluenzaA__AFN17477

SEQ ID NO: 9186 - protein, 566 aa, Artificial Sequence; identical to SEQ ID NO: 3530
  derived and/or modified protein sequence (wt) from hemagglutinin__InfluenzaA__AFN17487

SEQ ID NO: 9187 - protein, 566 aa, Artificial Sequence; identical to SEQ ID NO: 2669
  derived and/or modified protein sequence (wt) from hemagglutinin__InfluenzaA__AFN17497

SEQ ID NO: 9188 - protein, 566 aa, Artificial Sequence; identical to SEQ ID NO: 2669
  derived and/or modified protein sequence (wt) from hemagglutinin__InfluenzaA__AFN17507

SEQ ID NO: 9189 - protein, 566 aa, Artificial Sequence; identical to SEQ ID NO: 3511
  derived and/or modified protein sequence (wt) from hemagglutinin__InfluenzaA__AFN17517

SEQ ID NO: 9190 - protein, 566 aa, Artificial Sequence; identical to SEQ ID NO: 3530
  derived and/or modified protein sequence (wt) from hemagglutinin__InfluenzaA__AFN17527

SEQ ID NO: 9191 - protein, 566 aa, Artificial Sequence; identical to SEQ ID NO: 2669
  derived and/or modified protein sequence (wt) from hemagglutinin__InfluenzaA__AFN17537

SEQ ID NO: 9192 - protein, 566 aa, Artificial Sequence; identical to SEQ ID NO: 2911
  derived and/or modified protein sequence (wt) from hemagglutinin__InfluenzaA__AFN17547

SEQ ID NO: 9193 - protein, 566 aa, Artificial Sequence; identical to SEQ ID NO: 4200
  derived and/or modified protein sequence (wt) from hemagglutinin__InfluenzaA__AFN17557

SEQ ID NO: 9194 - protein, 566 aa, Artificial Sequence; identical to SEQ ID NO: 3511
  derived and/or modified protein sequence (wt) from hemagglutinin__InfluenzaA__AFN17567

SEQ ID NO: 9195 - protein, 566 aa, Artificial Sequence; identical to SEQ ID NO: 2911
  derived and/or modified protein sequence (wt) from hemagglutinin__InfluenzaA__AFN17574

SEQ ID NO: 9196 - protein, 566 aa, Artificial Sequence; identical to SEQ ID NO: 2669
  derived and/or modified protein sequence (wt) from hemagglutinin__InfluenzaA__AFN17580

SEQ ID NO: 9197 - protein, 566 aa, Artificial Sequence; identical to SEQ ID NO: 2669
  derived and/or modified protein sequence (wt) from hemagglutinin__InfluenzaA__AFN17586

SEQ ID NO: 9198 - protein, 566 aa, Artificial Sequence; identical to SEQ ID NO: 3530
  derived and/or modified protein sequence (wt) from hemagglutinin__InfluenzaA__AFN17595

SEQ ID NO: 9199 - protein, 566 aa, Artificial Sequence; identical to SEQ ID NO: 2669
  derived and/or modified protein sequence (wt) from hemagglutinin__InfluenzaA__AFN17605

SEQ ID NO: 9200 - protein, 566 aa, Artificial Sequence; identical to SEQ ID NO: 2669
  derived and/or modified protein sequence (wt) from hemagglutinin__InfluenzaA__AFN17615

SEQ ID NO: 9201 - protein, 566 aa, Artificial Sequence; identical to SEQ ID NO: 2669
  derived and/or modified protein sequence (wt) from hemagglutinin__InfluenzaA__AFN17625

SEQ ID NO: 9202 - protein, 566 aa, Artificial Sequence; identical to SEQ ID NO: 2669
  derived and/or modified protein sequence (wt) from hemagglutinin__InfluenzaA__AFN17635

SEQ ID NO: 9203 - protein, 566 aa, Artificial Sequence
  derived and/or modified protein sequence (wt) from hemagglutinin__InfluenzaA__AFN17645
MKAILVVLLYTFATANADTLCIGYHANNSTDTVDTVLEKNVTVTHSVNLLEDKHNGKLCKLRGVAPLHLGKCNIAGWILGNPECESLSTASSWSYIVETSSSDNGTCYPGDFIDYEELREQLSSVSSFERVEIFPKTSSWPNHDSNKGVTAACPHAGAKSFYKNLIWLVKKGNSYPKLSKSYINDKGKEVLVLWGIHHPSTSADQQSLYQNADAYVFVGTSRYSKKFKPEIAIRPKVRDQEGRMNYYWTLVEPGDKITFEATGNLVVPRYAFAMERNAGSGIIISDTPVHDCNTTCQTPKGAINTSLPFQNIHPITIGKCPKYVKSTKLRLATGLRNVPSIQSRGLFGAIAGFIEGGWTGMVDGWYGYHHQNEQGSGYAADLKSTQNAIDEITNKVNSVIEKMNTQFTAVGKEFNHLEKRIENLNKKVDDGFLDIWTYNAELLVLLENERTLDYHDSNVKNLYEKVRSQLKNNAKEIGNGCFEFYHKCDNTCMESVKNGTYDYPKYSEEAKLNREEIDGVKLESTRIYQILAIYSTVASSLVLVVSLGAISFWMCSNGSLQCRICI

SEQ ID NO: 9204 - protein, 566 aa, Artificial Sequence; identical to SEQ ID NO: 3530
  derived and/or modified protein sequence (wt) from hemagglutinin__InfluenzaA__AFN17655

SEQ ID NO: 9205 - protein, 566 aa, Artificial Sequence; identical to SEQ ID NO: 3530
  derived and/or modified protein sequence (wt) from hemagglutinin__InfluenzaA__AFN17665

SEQ ID NO: 9206 - protein, 566 aa, Artificial Sequence
  derived and/or modified protein sequence (wt) from hemagglutinin__InfluenzaA__AFN17675
MKAILIVLLYTFATANADTLCIGYHANNSTDTVDTVLEKNVTVTHSVNLLEDKHNGKLCKLRGVAPLHLGKCNIAGWILGNPECESLSTASSWSYIVETSSSDNGTCYPGDFIDYEELREQLSSVSSFERFEIFPKTSSWPNHDSNKGVTAACPHAGAKSFYKNLIWLVKKGNSYPKLSESYINDKGKEVLVLWGIHHPSTSADQQSLYQNADAYVFVGTSRYSKKFKPEIAIRPKVRDQEGRMNYYWTLVEPGDKITFEATGNLVVPRYAFAMERNAGSGIIISDTPVHDCNTTCQTPKGAINTSLPFQNIHPITIGKCPKYVKSTKLRLATGLRNVPSIQSRGLFGAIAGFIEGGWTGMVDGWYGYHHQNEQGSGYAADLKSTQNAIDEITNKVNSVIEKMNTQFTAVGKEFNHLEKRIENLNKKVDDGFLDIWTYNAELLVLLENERTLDYHDSNVKNLYEKVRSQLKNNAKEIGNGCFEFYHKCDNTCMESVKNGTYDYPKYSEEAKLNREEIDGVKLESTRIYQILAIYSTVASSLVLVVSLGAISFWMCSNGSLQCRICI

SEQ ID NO: 9207 - protein, 566 aa, Artificial Sequence
  derived and/or modified protein sequence (wt) from hemagglutinin__InfluenzaA__AFN17685
MKAILVVLLYTFATANADTLCIGYHANNSTDTVDTILEKNVTVTHSVNLLEDKHNGKLCKLRGVAPLHLGKCNIAGWILGNPECESLSTASSWSYIVETSSSDNGTCYPGDFIDYEELREQLSSVSSFERFEIFPKTSSWPNHDSNKGVTAACPHAGAKSFYKNLIWLVKKGNSYPKLSKSYINDKGKEVLVLWGIHHPSTSADQQSLYQNADAYVFVGTSRYSKKFKPEIAIRPKVRDQEGRMNYYWTLVEPRDKITFEATGNLVVPRYAFAMERNAGSGIIISDTPVHDCNTTCQTPKGAINTSLPFQNIHPITIGKCPKYVKSTKLRLATGLRNVPSIQSRGLFGAIAGFIEGGWTGMVDGWYGYHHQNEQGSGYAADLKSTQNAIDEITNKVNSVIEKMNTQFTAVGKEFNHLEKRIENLNKKVDDGFLDIWTYNAELLVLLENERTLDYHDSNVKNLYEKVRSQLKNNAKEIGNGCFEFYHKCDNTCMESVKNGTYDYPKYSEEAKLNREEIDGVKLESTRIYQILAIYSTVASSLVLVVSLGAISFWMCSNGSLQCRICI

SEQ ID NO: 9208 - protein, 566 aa, Artificial Sequence; identical to SEQ ID NO: 2669
  derived and/or modified protein sequence (wt) from hemagglutinin__InfluenzaA__AFN17695

SEQ ID NO: 9209 - protein, 566 aa, Artificial Sequence; identical to SEQ ID NO: 2669
  derived and/or modified protein sequence (wt) from hemagglutinin__InfluenzaA__AFN17705

SEQ ID NO: 9210 - protein, 566 aa, Artificial Sequence; identical to SEQ ID NO: 3298
  derived and/or modified protein sequence (wt) from hemagglutinin__InfluenzaA__AFN17715

SEQ ID NO: 9211 - protein, 566 aa, Artificial Sequence
  derived and/or modified protein sequence (wt) from hemagglutinin__InfluenzaA__AFN17725
MKAILVVLLYTFATANADTLCIGYHANNSTDTVDTVLEKNVTVTHSVNLLEDKHNGKLCKLRGVAPLHLGKCNIAGWILGNPECESLSTASSWSYIVETSSSDNGTCYPGDFIDYEELREQLSSVSSFERFEIFPKTSSWPNHDSNKGVTAACPHAGAKSFYKNLIWLVKKGNSYPKLSKSYINDKGKEVLVLWGIHHPSTSADQQSLYQNADAYVFVGTSRYSKKFKPEIAIRPQVRDQEGRMNYYWTLVEPGDKITFEATGNLVVPRYAFAMERNAGSGIIISDTPVHDCNTTCQTPKGAINTSLPFQNIHPITIGKCPKYVKSTKLRLATGLRNVPSIQSRGLFGAIAGFIEGGWTGMVDGWYGYHHQNEQGSGYAADLKSTQNAIDEITNKVNSVIEKMNTQFTAVGKEFNHLEKRIENLNKKVDDGFLDIWTYNAELLVLLENERTLDYHDSNVKNLYEKVRSQLKNNAKEIGNGCFEFYHKCDNTCMESVKNGTYDYPKYSEEAKLNREEIDGVKLESTRIYQILAIYSTVASSLVLVVSLGAISFWMCSNGSLQCRICI

SEQ ID NO: 9212 - protein, 566 aa, Artificial Sequence; identical to SEQ ID NO: 2669
  derived and/or modified protein sequence (wt) from hemagglutinin__InfluenzaA__AFN17735

SEQ ID NO: 9213 - protein, 566 aa, Artificial Sequence; identical to SEQ ID NO: 2669
  derived and/or modified protein sequence (wt) from hemagglutinin__InfluenzaA__AFN17742

SEQ ID NO: 9214 - protein, 566 aa, Artificial Sequence; identical to SEQ ID NO: 2669
  derived and/or modified protein sequence (wt) from hemagglutinin__InfluenzaA__AFN17748

SEQ ID NO: 9215 - protein, 566 aa, Artificial Sequence; identical to SEQ ID NO: 2669
  derived and/or modified protein sequence (wt) from hemagglutinin__InfluenzaA__AFN17757

SEQ ID NO: 9216 - protein, 566 aa, Artificial Sequence; identical to SEQ ID NO: 3298
  derived and/or modified protein sequence (wt) from hemagglutinin__InfluenzaA__AFN17767

SEQ ID NO: 9217 - protein, 566 aa, Artificial Sequence; identical to SEQ ID NO: 7679
  derived and/or modified protein sequence (wt) from hemagglutinin__InfluenzaA__AFN17774

SEQ ID NO: 9218 - protein, 566 aa, Artificial Sequence; identical to SEQ ID NO: 2669
  derived and/or modified protein sequence (wt) from hemagglutinin__InfluenzaA__AFN17783

SEQ ID NO: 9219 - protein, 566 aa, Artificial Sequence; identical to SEQ ID NO: 3298
  derived and/or modified protein sequence (wt) from hemagglutinin__InfluenzaA__AFN17793

SEQ ID NO: 9220 - protein, 566 aa, Artificial Sequence; identical to SEQ ID NO: 2669
  derived and/or modified protein sequence (wt) from hemagglutinin__InfluenzaA__AFN17803

SEQ ID NO: 9221 - protein, 566 aa, Artificial Sequence; identical to SEQ ID NO: 2669
  derived and/or modified protein sequence (wt) from hemagglutinin__InfluenzaA__AFN17813

SEQ ID NO: 9222 - protein, 566 aa, Artificial Sequence
  derived and/or modified protein sequence (wt) from hemagglutinin__InfluenzaA__AFN17823
MKAILVVLLYTFATANADTLCIGYHANNSTDTVDTVLEKNVTVTHSVNLLEDKHNGKLCKLRGVAPLHLGKCNIAGWILGNPECESLSTASSWSYIVETSSSDNGTCYPGDFIDYEELREQLSSVSSFERFEIFPKTSSWPNHDSNKGVTAACPHAGAKSFYKNLIWLVKKGNSYPKLSESYINDKGKEVLVLWGIHHPSTSADQQSLYQNADAYVFVGTSRYSKKFKPEIAIRPKVRDQEGRMNYYWTLVEPGDKITFEATGNLVVPRYAFAMERNAGSGIIISDTPVHDCNTTCQTPKGAINTSLPFQNIHPITIGKCPKYVKSTKLRLATGLRNVPSIQSRGLFGAIAGFIEGGWTGMVDGWYGYHHQNEQGSGYAADLKSTQNAIDEITNKVNSVIEKMNTQFTAVGKEFNHLEKRIENLNKKVDDGFLDIWTYNAELLVLLENERTLDYHDSNVKNLYEKVRSQLKNNAKEIGNGCFEFYHKCDNTCMESVKNGTYDYPKYSEEAKLNREEIDGVKLESTRIYQILAIYSTVASSLVLVVSLGAISFWMCSNGSLQCRICI

SEQ ID NO: 9223 - protein, 566 aa, Artificial Sequence
  derived and/or modified protein sequence (wt) from hemagglutinin__InfluenzaA__AFN17833
MKAILVVLLYTFATANADTLCIGYHANNSTDTVDTVLEKNVTVTHSVNLLEDKHNGKLCKLRGVAPLHLGKCNIAGWILGNPECESLSTASSWSYIVETSSSDNGTCYPGDFIDYEELREQLSSVSSFERFEIFPKTSSWPNHDSNKGVTAACPNAGAKSFYKNLIWLVKKGNSYPKLSKSYINDKGKEVLVLWGIHHPSTSADQQSLYQNADAYVFVGTSRYSKKFKPEIAIRPKVRDQEGRMNYYWTLVEPGDKITFEATGNLVVPRYAFAMERNAGSGIIISDTPVHDCNTTCQTPKGAINTSLPFQNIHPITIGKCPKYVKSTKLRLATGLRNVPSIQSRGLFGAIAGFIEGGWTGMVDGWYGYHHQNEQGSGYAADLKSTQNAIDEITNKVNSVIEKMNTQFTAVGKEFNHLEKRIENLNKKVDDGFLDIWTYNAELLVLLENERTLDYHDSNVKNLYEKVRSQLKNNAKEIGNGCFEFYHKCDNTCMESVKNGTYDYPKYSEEAKLNREEIDGVKLESTRIYQILAIYSTVASSLVLVVSLGAISFWMCSNGSLQCRICI

SEQ ID NO: 9224 - protein, 566 aa, Artificial Sequence; identical to SEQ ID NO: 7178
  derived and/or modified protein sequence (wt) from hemagglutinin__InfluenzaA__AFN17843

SEQ ID NO: 9225 - protein, 566 aa, Artificial Sequence; identical to SEQ ID NO: 2669
  derived and/or modified protein sequence (wt) from hemagglutinin__InfluenzaA__AFN17853

SEQ ID NO: 9226 - protein, 566 aa, Artificial Sequence; identical to SEQ ID NO: 2911
  derived and/or modified protein sequence (wt) from hemagglutinin__InfluenzaA__AFN17863

SEQ ID NO: 9227 - protein, 566 aa, Artificial Sequence
  derived and/or modified protein sequence (wt) from hemagglutinin__InfluenzaA__AFN17873
MKAILVVLLYTFATANADTLCIGYHANNSTDTVDTVLEKNVTVTHSVNLLEDKHNGKLCKLRGVAPLHLGKCNIAGWILGNPECESLSTAGSWSYIVETSSSDNGTCYPGDFIDYEELREQLSSVSSFERFEIFPKTSSWPNHDLNKGVTAACPHAGAKSFYKNLIWLVKKGNSYPKLSKSYINDKGKEVLVLWGIHHPSTSADQQSLYQNADAYVFVGTSRYSKKFKPEIAIRPKVRDQEGRMNYYWTLVEPGDKITFEATGNLVVPRYAFAMERNAGSGIIISDTPVHDCNTTCQTPKGAINTSLPFQNIHPITIGKCPKYVKSTKLRLATGLRNVPSIQSRGLFGAIAGFIEGGWTGMVDGWYGYHHQNEQGSGYAADLKSTQNAIDEITNKVNSVIEKMNTQFTAVGKEFNHLEKRIENLNKKVDDGFLDIWTYNAELLVLLENERTLDYHDSNVKNLYEKVRSQLKNNAKEIGNGCFEFYHKCDNTCMESVKNGTYDYPKYSEEAKLNREEIDGVKLESTRIYQILAIYSTVASSLVLVVSLGAISFWMCSNGSLQCRICI

SEQ ID NO: 9228 - protein, 566 aa, Artificial Sequence
  derived and/or modified protein sequence (wt) from hemagglutinin__InfluenzaA__AFN17883
MKAILVVLLYTFATANADTLCIGYHANNSTDTVDTVLEKNVTVTHSVNLLEDKHNGKLCKLRGVAPLHLGKCNIAGWILGNPECESLSTASSWSYIVETSSSDNGTCYPGDFIDYEELREQLSSVSSFERFEIFPKTSSWPNHDSNKGVTAACPHAGAKSFYKNLIWLVKKGNSYPKLSKSYINDKGKEVLVLWGIHHPSTSADQQSLYQNADAYVFVGTSRYSKKFKPEIAIRPKVRDQEGRMNYYWTLVEPGDKITFEATGNLVVPRYAFAMERNAGSGIIISDTPVHDCNTTCQTLKGAINTSLPFQNIHPITIGKCPKYVKSTKLRLATGLRNVPSIQSRGLFGAIAGFIEGGWTGMVDGWYGYHHQNEQGSGYAADLKSTQNAIDEITNKVNSVIEKMNTQFTAVGKEFNHLEKRIENLNKKVDDGFLDIWTYNAELLVLLENERTLDYHDSNVKNLYEKVRSQLKNNAKEIGNGCFEFYHKCDNTCMESVKNGTYDYPKYSEEAKLNREEIDGVKLESTRIYQILAIYSTVASSLVLVVSLGAISFWMCSNGSLQCRICI

SEQ ID NO: 9229 - protein, 566 aa, Artificial Sequence; identical to SEQ ID NO: 2669
  derived and/or modified protein sequence (wt) from hemagglutinin__InfluenzaA__AFN17893

SEQ ID NO: 9230 - protein, 566 aa, Artificial Sequence
  derived and/or modified protein sequence (wt) from hemagglutinin__InfluenzaA__AFN17903
MKAILVVLLYTFATANADTLCIGYHANNSTDTVDTVLEKNVTVTHSVNLLEDKHNGKLCKLRGVAPLHLGKCNIAGWILGNPECESLSTASSWSYIVETSSSDNGTCYPGDFIDYEELREQLSSVSSFERFEIFPKTSSWPNHESNKGVTAACPHAGAKSFYKNLIWLVKKGNSYPKLSKSYVNDKGKEVLVLWGIHHPSTSADQQSLYQNADAYVFVGTSRYSKKFKPEIAIRPKVRDQEGRMNYYWTLVEPGDKITFEATGNLVVPRYAFAMERNAGSGIIISDTPVHDCNTTCQTPKGAINTSLPFQNIHPITIGKCPKYVKSTKLRLATGLRNVPSIQSRGLFGAIAGFIEGGWTGMVDGWYGYHHQNEQGSGYAADLKSTQNAIDEITNKVNSVIEKMNTQFTAVGKEFNHLEKRIENLNKKVDDGFLDIWTYNAELLVLLENERTLDYHDSNVKNLYEKVRSQLKNNAKEIGNGCFEFYHKCDNTCMESVKNGTYDYPKYSEEAKLNREEIDGVKLESTRIYQILAIYSTVASSLVLVVSLGAISFWMCSNGSLQCRICI

SEQ ID NO: 9231 - protein, 566 aa, Artificial Sequence; identical to SEQ ID NO: 3022
  derived and/or modified protein sequence (wt) from hemagglutinin__InfluenzaA__AFN17919

SEQ ID NO: 9232 - protein, 566 aa, Artificial Sequence; identical to SEQ ID NO: 2911
  derived and/or modified protein sequence (wt) from hemagglutinin__InfluenzaA__AFN17929

SEQ ID NO: 9233 - protein, 566 aa, Artificial Sequence; identical to SEQ ID NO: 8927
  derived and/or modified protein sequence (wt) from hemagglutinin__InfluenzaA__AFN17939

SEQ ID NO: 9234 - protein, 566 aa, Artificial Sequence; identical to SEQ ID NO: 3530
  derived and/or modified protein sequence (wt) from hemagglutinin__InfluenzaA__AFN17949

SEQ ID NO: 9235 - protein, 566 aa, Artificial Sequence
  derived and/or modified protein sequence (wt) from hemagglutinin__InfluenzaA__AFN17959
MKAILVVLLYTFATANADTLCIGYHANNSTDTVDTVLEKNVTVTHSVNLLEDKHNGKLCKLRGVAPLHLGKCNIAGWILGNPECESLSTASSWSYIVETSSSDNGTCYPGDFIDYEELREQLSSVSSFERFEIFPKTSSWPNHDSNKGVTAACPHAGAKSFYKNLIWLVKKGNSYPKLSKSYVNDKGKEVLVLWGIHHPSTSADQQSLYQNADAYVFVGTSRYSKKFKPEIAIRPKVRDQEGRMNYYWTLVEPGDKITFEATGNLVVPRYAFAMERNAGSGIIISDTPVHDCNTTCQTPKGAINTSLPFQNIHPITIGKCPKYVKSTKLRLATGLRNVPSIQSRGLFGAIAGFIEGGWTGMVDGWYGYHHQNEQGSGYAADLKSTQNAIDEITNKVNSVIEKMNTQFTAVGKEFNHLEKRIENLNKKVDDGFLDIWTYNAELLVLLENERTLDYHDSNVKNLYEKVRSQLKNNAKEIGNGCFEFYHKCDNTCMESVKNGTYDYPKYSEEAKLNREEIDGVKLESTRIYQILAIYSTVASSLVLVVSLGAISFWMCSNGSLQCRICI

SEQ ID NO: 9236 - protein, 566 aa, Artificial Sequence; identical to SEQ ID NO: 4351
  derived and/or modified protein sequence (wt) from hemagglutinin__InfluenzaA__AFN17969

SEQ ID NO: 9237 - protein, 566 aa, Artificial Sequence; identical to SEQ ID NO: 3530
  derived and/or modified protein sequence (wt) from hemagglutinin__InfluenzaA__AFN17979

SEQ ID NO: 9238 - protein, 566 aa, Artificial Sequence
  derived and/or modified protein sequence (wt) from hemagglutinin__InfluenzaA__AFN17989
MKAILVVLLYTFATANADTLCIGYHANNSTDTVDTVLEKNVTVTHSVNLLEDKHNGKLCKLRGVAPLHLGKCNIAGWILGNPECESLSTASSWSYIVETSSSDNGTCYPGDFIDYEELREQLSSVSSFERFEIFPKTSSWPNHDSNKGVTAACPHAGAKSFYKNLIWLVKKGNSYPKLSKSYINDKGKEVLVLWGIHHPSTSADQQSLYQNADAYVFVGTSRYSKKFKPEIAIRPKVRDQEGRMNYYWTLVEPGDKITFEATGNLVVPRYAFAMERNAGSGIIISDTPVHDCNTTCQTPKGAINTSLPFQNIHPITIGKCPKYVKSTKLRLATGLRNVPSIQSRGLFGAIAGFIEGGWTGMVDGWYGYHHQNEQGSGYAADLKSTQNAIDEITNKVNSVIGKMNTQFTAVGKEFNHLEKRIENLNKKVDDGFLDIWTYNAELLVLLENERTLDYHDSNVKNLYEKVRSQLKNNAKEIGNGCFEFYHKCDNTCMESVKNGTYDYPKYSEEAKLNREEIDGVKLESTRIYQILAIYSTVASSLVLVVSLGAISFWMCSNGSLQCRICI

SEQ ID NO: 9239 - protein, 566 aa, Artificial Sequence; identical to SEQ ID NO: 2669
  derived and/or modified protein sequence (wt) from hemagglutinin__InfluenzaA__AFN17999

SEQ ID NO: 9240 - protein, 566 aa, Artificial Sequence
  derived and/or modified protein sequence (wt) from hemagglutinin__InfluenzaA__AFN18019
MKAILVVLLYTFATAKADTLCIGYHANNSTDTVDTVLEKNVTVTHSVNLLEDKHNGKLCKLRGVAPLHLGKCNIAGWILGNPECESLSTASSWSYIVETSSSDNGTCYPGDFIDYEELREQLSSVSSFERFEMFPKTSSWPNHDSNKGVTAACPHAGAKSFYKNLIWLVKKGNSYPKLSKSYINDKGKEVLVLWGIHHPSTSADQQSLYQNADAYVFVGTSRYSKKFKPEIAIRPKVRDQEGRMNYYWTLVEPGDKITFEATGNLVVPRYAFAMERNAGSGIIISDTPVHDCNTTCQTPKGAINTSLPFQNIHPITIGKCPKYVKSTKLRLATGLRNVPSIQSRGLFGAIAGFIEGGWTGMVDGWYGYHHQNEQGSGYAADLKSTQNAIDEITNKVNSVIEKMNTQFTAVGKEFNHLEKRIENLNKKVDDGFLDIWTYNAELLVLLENERTLDYHDSNVKNLYEKVRSQLKNNAKEIGNGCFEFYHKCDNTCMESVKNGTYDYPKYSEEAKLNREEIDGVKLESTRIYQILAIYSTVASSLVLVVSLGAISFWMCSNGSLQCRICI

SEQ ID NO: 9241 - protein, 566 aa, Artificial Sequence; identical to SEQ ID NO: 3530
  derived and/or modified protein sequence (wt) from hemagglutinin__InfluenzaA__AFN18039

SEQ ID NO: 9242 - protein, 566 aa, Artificial Sequence; identical to SEQ ID NO: 2669
  derived and/or modified protein sequence (wt) from hemagglutinin__InfluenzaA__AFN18049

SEQ ID NO: 9243 - protein, 566 aa, Artificial Sequence
  derived and/or modified protein sequence (wt) from hemagglutinin__InfluenzaA__AFN18059
MKAILVVLLYTFATANADTLCIGYHANNSTDTVDTVLEKNVTVTHSVNLLEDKHNGKLCKLRGVAPLHLGKCNIAGWILGNPECESLSTASSWSYIVETSSSDNGTCYPGDFIDYEELREQLSSVSSFERFEIFPKTSSWPNHDSNKGVTAACPHAGAKSFYKNLIWLVKKGNSYPKLSKSYINDKGKEVLVLWGIHHPSTSADQQSLYQNADAYVFVGTSRYSKKFKPEIAIRPKVRDQEGRMNYYWTLVEPGDKITFEATGNLVVPRYAFAMERNAGSGIIISDTPVHDCNTTCQTPKGAINTSLPFQNIHPITIGKCPKYVKSTKLRLATGLRNVPSIQSRGLFGAIAGFIEGGWTGMVDGWYGYHHQNEQGSGYAADLKSTQNAIDEITNKVNSVIEKMNTQFTAVGKEFNHLEKRIENLNKKVDDGFLDIWTYNAELLVLLENERTLDYHDSNVKNLYEKVRSQLKNNAKEIGNGCFEFYHKCDNACMESVKNGTYDYPKYSEEAKLNREEIDGVKLESTRIYQILAIYSTVASSLVLVVSLGAISFWMCSNGSLQCRICI

SEQ ID NO: 9244 - protein, 566 aa, Artificial Sequence; identical to SEQ ID NO: 2669
  derived and/or modified protein sequence (wt) from hemagglutinin__InfluenzaA__AFN18078

SEQ ID NO: 9245 - protein, 566 aa, Artificial Sequence
  derived and/or modified protein sequence (wt) from hemagglutinin__InfluenzaA__AFN18088
MKAILVVLLYTFATANADTLCIGYHANNSTDTVDTVLEKNVTVTHSVNLLEDKHNGKLCKLRGVAPLHLGKCNIAGWILGNPECESLSTASSWSYIVETSSSDNGTCYPGDFIDYEELREQLSSVSSFERFEIFPKTSSWPNHDSNKGVTAACPHAGAKSFYKNLIWLVKKGNSYPKLSKSYINDKGKEVLVLWGIHHPSTSADQQSLYQNADTYVFVGTSRYSKKFKPEIAIRPKVRDQEGRMNYYWTLVEPGDKITFEATGNLVVPRYAFAMVRNAGSGIIISDTPVHDCNTTCQTPKGAINTSLPFQNIHPITIGKCPKYVKSTKLRLATGLRNVPSIQSRGLFGAIAGFIEGGWTGMVDGWYGYHHQNEQGSGYAADLKSTQNAIDEITNKVNSVIEKMNTQFTAVGKEFNHLEKRIENLNKKVDDGFLDIWTYNAELLVLLENERTLDYHDSNVKNLYEKVRSQLKNNAKEIGNGCFEFYHKCDNTCMESVKNGTYDYPKYSEEAKLNREEIDGVKLESTRIYQILAIYSTVASSLVLVVSLGAISFWMCSNGSLQCRICI

SEQ ID NO: 9246 - protein, 566 aa, Artificial Sequence
  derived and/or modified protein sequence (wt) from hemagglutinin__InfluenzaA__AFN18098
MKAILVVLLYTFATANADTLCIGYHANNSTDTVDTVLEKNVTVTHSVNLLEDKHNGKLCKLRGIAPLHLGKCNIAGWILGNPECESLSTASSWSYIVETSSSDNGTCYPGNFIDYEELREQLSSVSSFERFEIFPKTSSWPNHDSNKGVTAACPHAGAKSFYKNLIWLVKKGNSYPKLSKSYINDKGKEVLVLWGIHHPSTSADQQSLYQNADAYVFVGTSRYSKKFKPEIAIRPKVRDQEGRMNYYWTLVEPGDKITFEATGNLVVPRYAFAVERNAGSGIIISDTPVHDCNTTCQTPKGAINTSLPFQNIHPITIGKCPKYVKSTKLRLATGLRNVPSIQSRGLFGAIAGFIEGGWTGMVDGWYGYHHQNEQGSGYAADLKSTQNAIDEITNKVNSVIEKMNTQFTAVGKEFNHLEKRIENLNKKVDDGFLDIWTYNAELLVLLENERTLDYHDSNVKNLYEKVRSQLKNNAKEIGNGCFEFYHKCDNTCMESVKNGTYDYPKYSEEAKLNREEIDGVKLESTRIYQILAIYSTVASSLVLVVSLGAISFWMCSNGSLQCRICI

SEQ ID NO: 9247 - protein, 566 aa, Artificial Sequence
  derived and/or modified protein sequence (wt) from hemagglutinin__InfluenzaA__AFN18105
MKAILIVLLYTFATANADTLCIGYHANNSTDTVDTVLEKNVTVTHSVNLLEDKHNGKLCKLRGVAPLHLGKCNIAGWILGNPECESLSTASSWSYIVETSSSDNGTCYPGDFIDYEELREQLSSVSSFERFEIFPKTSSWPNHDSNKGVTAACPHAGAKSFYKNLIWLVKKGNSYPKLSKSYINDKGKEVLVLWGIHHPSTSADQQSLYQNADAYVFVGTSRYSKKFKPEIAIRPKVRDQEGRMNYYWTLVEPGDKITFEATGNLVVPRYAFAMERNAGSGIIISDTPVHDCNTNCQTPKGAINTSLPFQNIHPITIGKCPKYVKSTKLRLATGLRNVPSIQSRGLFGAIAGFIEGGWTGMVDGWYGYHHQNEQGSGYAADLKSTQNAIDEITNKVNSVIEKMNTQFTAVGKEFNHLEKRIENLNKKVDDGFLDIWTYNAELLVLLENERTLDYHDSNVKNLYEKVRSQLKNNAKEIGNGCFEFYHKCDNTCMESVKNGTYDYPKYSEEAKLNREEIDGVKLESTRIYQILAIYSTVASSLVLVVSLGAISFWMCSNGSLQCRICI

SEQ ID NO: 9248 - protein, 566 aa, Artificial Sequence; identical to SEQ ID NO: 2911
  derived and/or modified protein sequence (wt) from hemagglutinin__InfluenzaA__AFN18107

SEQ ID NO: 9249 - protein, 566 aa, Artificial Sequence; identical to SEQ ID NO: 9243
  derived and/or modified protein sequence (wt) from hemagglutinin__InfluenzaA__AFN18117

SEQ ID NO: 9250 - protein, 566 aa, Artificial Sequence; identical to SEQ ID NO: 2669
  derived and/or modified protein sequence (wt) from hemagglutinin__InfluenzaA__AFN18119

SEQ ID NO: 9251 - protein, 566 aa, Artificial Sequence
  derived and/or modified protein sequence (wt) from hemagglutinin__InfluenzaA__AFN18121
MKAILVVLLYTFATANADTLCIGYHANNSTDTVDTVLEKNVTVTHSVNLLEDKHNGKLCKLRGVAPLHLGKCNIAGWILGNPECESLSTASSWSYIVETSSSDNGTCYPGDFIDYEELREQLSSVSSFERFEIFPKTSSWPNHDSNKGVTAACPHAGARSFYKNLIWLVKKGNSYPKLSKSYINDKGKEVLVLWGIHHPSTSADQQSLYQNADAYVFVGTSRYSKKFKPEIAIRPKVRDQEGRMNYYWTLVEPGDKITFEATGNLVVPRYAFAMVRNAGSGIIISDTPVHDCNTTCQTPKGAINTSLPFQNIHPITIGKCPKYVKSTKLRLATGLRNVPSIQSRGLFGAIAGFIEGGWTGMVDGWYGYHHQNEQGSGYAADLKSTQNAIDEITNKVNSVIEKMNTQFTAVGKEFNHLEKRIENLNKKVDDGFLDIWTYNAELLVLLENERTLDYHDSNVKNLYEKVRSQLKNNAKEIGNGCFEFYHKCDNTCMESVKNGTYDYPKYSEEAKLNREEIDGVKLESTRIYQILAIYSTVASSLVLVVSLGAISFWMCSNGSLQCRICI

SEQ ID NO: 9252 - protein, 566 aa, Artificial Sequence; identical to SEQ ID NO: 9243
  derived and/or modified protein sequence (wt) from hemagglutinin__InfluenzaA__AFN18133

SEQ ID NO: 9253 - protein, 566 aa, Artificial Sequence; identical to SEQ ID NO: 8927
  derived and/or modified protein sequence (wt) from hemagglutinin__InfluenzaA__AFN18135

SEQ ID NO: 9254 - protein, 566 aa, Artificial Sequence; identical to SEQ ID NO: 3511
  derived and/or modified protein sequence (wt) from hemagglutinin__InfluenzaA__AFN18137

SEQ ID NO: 9255 - protein, 566 aa, Artificial Sequence
  derived and/or modified protein sequence (wt) from hemagglutinin__InfluenzaA__AFN18139
MEAILVVLLYTFATANADTLCIGYHANNSTDTVDTVLEKNVTVTHSVNLLEDKHNGKLCKLRGVAPLHLGKCNIAGWILGNPECESLSTASSWSYIVETSSSDNGTCYPGDFIDYEELREQLSSVSSFERFEIFPKTSSWPNHDSNKGVTAACPHAGAKSFYKNLIWLVKKGNSYPKLSKSYINDKGKEVLVLWGIHHPSTSADQQGLYQNADAYVFVGSSRYSKKFKPEIAIRPKVRDQEGRMNYYWTLVEPGDKITFEATGNLVVPRYAFAMERNAGSGIIISDTPVHDCNTTCQTPKGAINTSLPFHNIHPITIGKCPKYVKSTKLRLATGLRNVPSIQSRGLFGAIAGFIEGGWTGMVDGWYGYHHQNEQGSGYAADLKSTQNAIDEITNKVNSVIEKMNTQFTAVGKEFNHLEKRIENLNKKVDDGFLDIWTYNAELLVLLENERTLDYHDSNVKNLYEKVRSQLKNNAKEIGNGCFEFYHKCDNTCMESVKNGTYDYPKYSEEAKLNREEIDGVKLESTRIYQILAIYSTVASSLVLVVSLGAISFWMCSNGSLQCRICI

SEQ ID NO: 9256 - protein, 566 aa, Artificial Sequence; identical to SEQ ID NO: 9251
  derived and/or modified protein sequence (wt) from hemagglutinin__InfluenzaA__AFN18141

SEQ ID NO: 9257 - protein, 566 aa, Artificial Sequence; identical to SEQ ID NO: 3530
  derived and/or modified protein sequence (wt) from hemagglutinin__InfluenzaA__AFN18148

SEQ ID NO: 9258 - protein, 566 aa, Artificial Sequence; identical to SEQ ID NO: 3833
  derived and/or modified protein sequence (wt) from hemagglutinin__InfluenzaA__AFN18155

SEQ ID NO: 9259 - protein, 566 aa, Artificial Sequence
  derived and/or modified protein sequence (wt) from hemagglutinin__InfluenzaA__AFN18157
MKAILVVLLYTFATANADTLCIGYHANNSTDTVDTVLEKNVTVTHSVNLLEDKHNGKLCKLRGVAPLHLGKCNIAGWILGNPECESLSTASSWSYIVETSSSGNGTCYPGDFIDYEELREQLSSVSSFERFEIFPKTSSWPNHDSNKGVTAACPHAGAKSFYKNLIWLVKKGNSYPKLSKSYINDKGKEVLVLWGIHHPSTSADQQSLYQNADAYAFVGTSRYSKKFKPEIAIRPKVRDQEGRMNYYWTLVEPGDKITFEATGNLVVPRYAFAMERNAGSGIIISDTPVHDCNTTCQTPKGAINTSLPFQNIHPITIGKCPKYVKSTKLRLATGLRNVPSIQSRGLFGAIAGFIEGGWTGMVDGWYGYHHQNEQGSGYAADLKSTQNAIDEITNKVNSVIEKMNTQFTAVGKEFNHLEKRIENLNKKVDDGFLDIWTYNAELLVLLENERTLDYHDSNVKNLYEKVRSQLKNNAKEIGNGCFEFYHKCDNTCMESVKNGTYDYPKYSEEAKLNREEIDGVKLESTRIYQILAIYSTVASSLVLVVSLGAISFWMCSNGSLQCRICI

SEQ ID NO: 9260 - protein, 566 aa, Artificial Sequence
  derived and/or modified protein sequence (wt) from hemagglutinin__InfluenzaA__AFN18159
MEAILVVLLYTFATANADTLCIGYHANNSTDTVDTVLEKNVTVTHSVNLLEDKHNGKLCKLRGVAPLHLGKCNIAGWILGNPECESLSTASSWSYIVETSSSDNGTCYPGDFIDYEELREQLSSVSSFERFEIFPKTSSWPNHDSNKGVTAACPHAGSKSFYKNLIWLVKKGNSYPKLSKSYINDKGKEVLVLWGIHHPSTSADQQSLYQNADAYVFVGSSRYSKKFKPEIAIRPKVRDQEGRMNYYWTLVEPGDKITFEATGNLVVPRYAFAMERNAGSGIIISDTPVHDCNTTCQTPKGAINTSLPFHNIHPITIGKCPKYVKSTKLRLATGLRNVPSIQSRGLFGAIAGFIEGGWTGMVDGWYGYHHQNEQGSGYAADLKSTQNAIDEITNKVNSVIEKMNTQFTAVGKEFNHLEKRIENLNKKVDDGFLDIWTYNAELLVLLENERTLDYHDSNVKNLYEKVRNQLKNNAKEIGNGCFEFYHKCDNTCMESVKNGTYDYPKYSEEAKLNREEIDGVKLESTRIYQILAIYSTVASSLVLVVSLGAISFWMCSNGSLQCRICI

SEQ ID NO: 9261 - protein, 566 aa, Artificial Sequence
  derived and/or modified protein sequence (wt) from hemagglutinin__InfluenzaA__AFN18164
MKAILVVLLYTFATTNADTLCIGYHANNSTDTVDTVLEKNVTVTHSVNLLEDKHNGKLCKLRGVAPLHLGKCNIAGWILGNPECESLSTASSWSYIVETSSSDNGTCYPGDFIDYEELREQLSSVSSFERFEIFPKTSSWPNHDSNKGVTAACPHAGAKSFYKNLIWLVKKGNSYPKLSKSYINDKGKEVLVLWGIHHPSTSADQQSLYQNADAYVFVGTSRYSKKFKPEIAIRPKVRDQEGRMNYYWTLVEPGDKITFEATGNLIVPRYAFAMERNAGSGIIISNTPVHDCNTTCQTPKGAINTSLPFQNIHPITIGKCPKYVKSTKLRLATGLRNVPSIQSRGLFGAIAGFIEGGWTGMVDGWYGYHHQNEQGSGYAADLKSTQNAIDKITNKVNSVIEKMNTQFTAVGKELNHLEKRIENLNKKVDDGFLDIWTYNAELLVLLENERTLDYHDSNVKNLYEKVRSQLKNNAKEIGNGCFEFYHKCDNTCMESVKNGTYDYPKYSEEAKLNREEIDGVKLESTRIYQILAVYSTVASSLVLVVSLGAISFWMCSNGSLQCRICI

SEQ ID NO: 9262 - protein, 566 aa, Artificial Sequence
  derived and/or modified protein sequence (wt) from hemagglutinin__InfluenzaA__AFN18171
MKAILVVLLYTFATANADTLCIGYHANNSTDTVDTVLEKNVTVTHSVNLLEDKHSGKLCKLRGVAPLHLGKCNIAGWILGNPECESLSTASSWSYIVETSSSDNGKCYPGDFIDYEELREQLSSVSSFERFEIFPKTSSWPNHDSNKGVTAACPHAGAKSFYKNLIWLVKKGNSYPKLSKSYINDKGKEVLVLWGIHHPSTSADQQSLYQNADAYVFVGTSKYSKKFKPEIAIRPKVRDQEGRMNYYWTLVEPGDKITFEATGNLVVPRYAFAMERNAGSGIIISDTPVKDCNTTCQTPKGAINTSLPFQNIHPITIGKCPKYVKSTKLRLATGLRNVPSIQSRGLFGAIAGFIEGGWTGMVDGWYGYHHQNEQGSGYAADLKSTQNAIDEITNKVNSVIEKMNTQFTAVGKEFNHLEKRIENLNKKVDDGFLDIWTYNAELLVLLENERTLDYHDSNVKNLYEKVRSQLKNNAKEIGNGCFEFYHKCDNTCMESVKNGTYDYPKYSEEAKLNREEIDGVKLESTRIYQILAIYSTVASSLVLVVSLGAISFWMCSNGSLQCRICI

SEQ ID NO: 9263 - protein, 566 aa, Artificial Sequence
  derived and/or modified protein sequence (wt) from hemagglutinin__InfluenzaA__AFN18176
MKAILVVLLYTFATANADTLCIGYHANNSTDTVDTVLEKNVTVTHSVNLLEDKHNGKLCKLRGVAPLHLGKCNIAGWILGNPECESLSTASSWSYIVETSSSDNGTCYPGDFIDYEELREQLSSVSSFERFEIFPKTSSWPNHDSNKGVTAACPHAGAKSFYKNLIWLVKKGNSYPKLSKSYINDKGKEVLVLWGIHHPSTSADQQSLYQNADAYVFVGTSRYSKKFKPEIAIRPKVRDQEGRMNYYWTLVEPGDKITFEATGNLLVPRYAFAMERNAGSGIIISDTPVHDCNTTCQTPKGAINTSLPFQNIHPITIGKCPKYVKSTKLRLATGLRNIPSIQSRGLFGAIAGFIEGGWTGMVDGWYGYHHQNEQGSGYAADLKSTQNAIDEITNKVNSVIEKMNTQFTAVGKEFNHLEKRIENLNKKVDDGFLDIWTYNAELLVLLENERTLDYHDSNVKNLYEKVRSQLKNNAKEIGNGCFEFYHKCDNTCMESVKNGTYDYPKYSEEAKLNREEIDGVKLESTRIYQILAIYSTVASSLVLVVSLGAISFWMCSNGSLQCRICI

SEQ ID NO: 9264 - protein, 566 aa, Artificial Sequence
  derived and/or modified protein sequence (wt) from hemagglutinin__InfluenzaA__AFN18183
MKAILVVLLYTFATANADTLCIGYHANNSTDTVDTILEKNVTVTHSVNLLEDKHNGKLCKLRGVAPLHLGKCNIAGWILGNPECESLSTASSWSYIVETSSSDNGTCYPGDFIDYEELREQLSSVSSFERFEIFPKTSSWPNHDSNKGVTAACPHAGAKSFYKNLIWLVKKGNSYPKLSKSYINDKGKEVLVLWGIHHPSTSADQQSLYQNADAYVFVGTSRYSKKFKPEIAIRPKVRDQEGRMNYYWTLVEPGDKITFEATGNLMVPRYAFAMERNAGSGIIISDTPVHDCNTTCQTPKGAINTSLPFQNIHPITIGKCPKYVKSTKLRLATGLRNVPSIQSRGLFGAIAGFIEGGWTGMVDGWYGYHHQNEQGSGYAADLKSTQNAIDEITNKVNSVIEKMNTQFTAVGKEFNHLEKRIENLNKKVDDGFLDIWTYNAELLVLLENERTLDYHDSNVKNLYEKVRSQLKNNAKEIGNGCFEFYHKCDNTCMESVKNGTYDYPKYSEEAKLNREEIDGVKLESTRIYQILAIYSTVASSLVLVVSLGAISFWMCSNGSLQCRICI

SEQ ID NO: 9265 - protein, 566 aa, Artificial Sequence; identical to SEQ ID NO: 4221
  derived and/or modified protein sequence (wt) from hemagglutinin__InfluenzaA__AFN18195

SEQ ID NO: 9266 - protein, 566 aa, Artificial Sequence; identical to SEQ ID NO: 2669
  derived and/or modified protein sequence (wt) from hemagglutinin__InfluenzaA__AFN18200

SEQ ID NO: 9267 - protein, 566 aa, Artificial Sequence
  derived and/or modified protein sequence (wt) from hemagglutinin__InfluenzaA__AFN18207
MKAILVVLLYTFATANADTLCIGYHANNSTDTVDTVLEKNVTVTHSVNLLEDKHNGKLCKLRGVAPLHLGKCNIAGWILGNPECESLSTASSWSYIVETSSSDNGTCYPGDFIDYEELREQLSSVSSFERFEIFPKTSSWPNHDSNKGVTAACPHAGAKSFYKSLIWLVKKGNSYPKLSKSYINDKGREVLVLWGIHHPSTSADQQSLYQNADAYVFVGTSRYSKKFKPEIAIRPKVRDQEGRMNYYWTLVEPGDKITFEATGNLVVPRYAFAMERNAGSGIIISDTPVHDCNTTCQTPKGAINTSLPFQNIHPITIGKCPKYVKSTKLRLATGLRNVPSIQSRGLFGAIAGFIEGGWTGMVDGWYGYHHQNEQGSGYAADLKSTQNAIDEITNKVNSVIEKMNTQFTAVGKEFNHLEKRIENLNKKVDDGFLDIWTYNAELLVLLENERTLDYHDSNVKNLYEKVRSQLKNNAKEIGNGCFEFYHKCDNTCMESVKNGTYDYPKYSEEAKLNREEIDGVKLESTRIYQILAIYSTVASSLVLVVSLGAISFWMCSNGSLQCRICI

SEQ ID NO: 9268 - protein, 566 aa, Artificial Sequence
  derived and/or modified protein sequence (wt) from hemagglutinin__InfluenzaA__AFN18214
MKAILVVLLYTFATANADTLCIGYHANNSTDTVDTVLEKNVTVTHSVNILEDKHNGKLCKLRGVAPLHLGKCNIAGWILGNPECESLSTASSWSYIVETSSSDNGTCYPGDFINYEELREQLSSVSSFERFEIFPKTSSWPNHDSNKGVTAACPHAGAKSFYKNLIWLVKKGNSYPKLSKSYINDKGKEVLVLWGIHHPSTSADQQSLYQNADAYVFVGSSRYSKKFKPEIAIRPKVRDQEGRMNYYWTLVEPGDKITFEATGNLVVPRYAFAMERNAGSGIIISDTPVHDCNTTCQTPKGAINTSLPFQNIHPITIGKCPKYVKSTKLRLATGLRNVPSIQSRGLFGAIAGFIEGGWTGMVDGWYGYHHQNEQGSGYAADLKSTQNAIDEITNKVNSVIEKMNTQFTAVGKEFNHLEKRIENLNKKVDDGFLDIWTYNAELLVLLENERTLDYHDSNVKNLYEKVRSQLKNNAKEVGNGCFEFYHKCDNTCMESVKNGTYDYPKYSEEAKLNREEIDGVKLESTRIYQILAIYSTAASSLVLVVSLGAISFWMCSNGSLQCRICI

SEQ ID NO: 9269 - protein, 566 aa, Artificial Sequence; identical to SEQ ID NO: 5224
  derived and/or modified protein sequence (wt) from hemagglutinin__InfluenzaA__AFN18224

SEQ ID NO: 9270 - protein, 566 aa, Artificial Sequence; identical to SEQ ID NO: 4221
  derived and/or modified protein sequence (wt) from hemagglutinin__InfluenzaA__AFN18231

SEQ ID NO: 9271 - protein, 566 aa, Artificial Sequence
  derived and/or modified protein sequence (wt) from hemagglutinin__InfluenzaA__AFN18233
MKAILVVLLYTFATANADTLCIGYHANNSTDTVDTVLEKNVTVTHSVNLLEDKHNGKLCKLRGVAPLHLGKCNIAGWILGNPECESLSTASSWSYIVETSSSDNGTCYPGDFIDYEELREQLSSVSSFERFEIFPKTSSWPNHDPNKGVTAACPHAGAKSFYKNLIWLVKKGNSYPKLSKSYINDKGKEVLVLWGIHHPSTSADQQSLYQNADAYVFVGTSRYSRKFKPEIAIRPKVRDQEGRMNYYWTLVEPGDKITFEATGNLVVPRYAFAMERNAGSGIIISDTPVHDCNTTCQTPKGAINTSLPFQNIHPITIGKCPKYVKSTKLRLATGLRNVPSIQSRGLFGAIAGFIEGGWTGMVDGWYGYHHQNEQGSGYAADLKSTQNAIDEITNKVNSVIEKMNTQFTAVGKEFNHLEKRIENLNKKVDDGFLDIWTYNAELLVLLENERTLDYHDSNVKKLYEKVRSQLKNNAKEIGNGCFEFYHKCDNTCMESVKNGTYDYPKYSEEAKLNREEIDGVKLESTRIYQILAIYSTVASSLVLVVSLGAISFWMCSNGSLQCRICI

SEQ ID NO: 9272 - protein, 566 aa, Artificial Sequence
  derived and/or modified protein sequence (wt) from hemagglutinin__InfluenzaA__AFN18243
MKAILVVLLYTFATANADTLCIGYHANNSTDTVDTVLEKNVTVTHSVNLLEDKHNGKLCKLRGVAPLHLGKCNIAGWILGNPECESLSTASSWSYIVETSSSDNGTCYPGDFIDYEELREQLSSVSSFERFEIFPKTSSWPNHDSNKGVTAACPHAGAKSFYKNLIWLVKKGNSYPKLSKSYINDKGKEVLVLWGIHHPSTSADQQSLYQNADTYVFVGTSRYSKKFKPEIAIRPKVRDQEGRMNYYWTLVEPGDKITFEATGNLVVPRYAFAMERNAGSGIIISDTPVHDCNTTCQTPKGAINTSLPFQNIHPITIGKCPKYVKSTKLRLATGLRNVPSIQSRGLFGAIAGFIEGGWTGMVDGWYGYHHQNEQGSGYAADLKSTQNAIDEITNKVNSVIEKMNTQFTAVGKEFNHLEKRIENLNKKVDDGFLDIWTYNAELLVLLENERTLDYHDSNVKNLYEKVRSQLKNNAKEIGNGCFEFYHKCDNTCMESVKNGTYDYPKYSEEAKLNREEIDGVKLESTRIYQILAIYSTVASSLVLVVSLGAISFWMCSNGSLQCRICI

SEQ ID NO: 9273 - protein, 566 aa, Artificial Sequence; identical to SEQ ID NO: 8758
  derived and/or modified protein sequence (wt) from hemagglutinin__InfluenzaA__AFN18245

SEQ ID NO: 9274 - protein, 566 aa, Artificial Sequence; identical to SEQ ID NO: 5224
  derived and/or modified protein sequence (wt) from hemagglutinin__InfluenzaA__AFN18255

SEQ ID NO: 9275 - protein, 566 aa, Artificial Sequence; identical to SEQ ID NO: 9272
  derived and/or modified protein sequence (wt) from hemagglutinin__InfluenzaA__AFN18260

SEQ ID NO: 9276 - protein, 566 aa, Artificial Sequence; identical to SEQ ID NO: 9272
  derived and/or modified protein sequence (wt) from hemagglutinin__InfluenzaA__AFN18267

SEQ ID NO: 9277 - protein, 566 aa, Artificial Sequence
  derived and/or modified protein sequence (wt) from hemagglutinin__InfluenzaA__AFN18269
MKAILVVLLYTFATANADTLCIGYHANNSTDTVDTVLEKNVTVTHSVNLLEDKHNGKLCKLRGVAPLHLGKCNIAGWILGNPECESLSTASSWSYIVETSSSDNGTCYPGDFIDYEELREQLSSVSSFEKFEIFPKTSSWPNHDSNKGVTAACPHAGAKSFYKNLIWLVKKGNSYPKLSKSYINDKGKEVLVLWGIHHPSTSADQQSLYQNADAYVFVGTSRYSKKFKPEIAIRPKVRDQEGRMNYYWTLVEPGDKITFEATGNLVVPRYAFAMERNAGSGIIISDTPVHDCNTTCQTPKGAINTSLPFQNIHPITIGKCPKYVKSTKLRLATGLRNVPSIQSRGLFGAIAGFIEGGWTGMVDGWYGYHHQNEQGSGYAADLKSTQNAIDEITNKVNSVIEKMNTQFTAVGKEFNHLEKRIENLNKKVDDGFLDIWTYNAELLVLLENERTLDYHDSNVKNLYEKVRSQLKNNAKEIGNGCFEFYHKCDNTCMESVKNGTYDYPKYSEEAKLNREEIDGVKLESTRIYQILAIYSTVASSLVLVVSLGAISFWMCSNGSLQCRICI

SEQ ID NO: 9278 - protein, 566 aa, Artificial Sequence; identical to SEQ ID NO: 3833
  derived and/or modified protein sequence (wt) from hemagglutinin__InfluenzaA__AFN18271

SEQ ID NO: 9279 - protein, 566 aa, Artificial Sequence; identical to SEQ ID NO: 4221
  derived and/or modified protein sequence (wt) from hemagglutinin__InfluenzaA__AFN18273

SEQ ID NO: 9280 - protein, 566 aa, Artificial Sequence; identical to SEQ ID NO: 3833
  derived and/or modified protein sequence (wt) from hemagglutinin__InfluenzaA__AFN18280

SEQ ID NO: 9281 - protein, 566 aa, Artificial Sequence; identical to SEQ ID NO: 3467
  derived and/or modified protein sequence (wt) from hemagglutinin__InfluenzaA__AFN18303

SEQ ID NO: 9282 - protein, 566 aa, Artificial Sequence
  derived and/or modified protein sequence (wt) from hemagglutinin__InfluenzaA__AFN18305
MKAILVVLLYTFATANADTLCIGYHANNSTDTVDTVLEKNVTVTHSANLLEDKHNGKLCKLRGVAPLHLGKCNIAGWILGNPECESLSTASSWSYIVETSSSDNGTCYPGDFIDYEELREQLSSVSSFERFEIFPKTSSWPNHDSNKGVTAACPHAGAKSFYKNLIWLVKKGNSYPKLSKSYINDKGKEVLVLWGIHHPSTSADQQSLYQNADAYVFVGTSRYSKKFKPEIAIRPKVRDQEGRMNYYWTLVEPGDKITFEATGNLVVPRYAFAMERNAGSGIIISDTPVHDCNTTCQTPKGAINTSLPFQNIHPITIGKCPKYVKSTKLRLATGLRNVPSIQSRGLFGAIAGFIEGGWTGMVDGWYGYHHQNEQGSGYAADLKSTQNAIDKITNKVNSVIEKMNTQFTAVGKEFNHLGKRIENLNKKVDDGFLDIWTYNAELLVLLENERTLDYHDSNVKNLYEKVRSQLKNNAKEIGNGCFEFYHKCDNTCMESVKNGTYDYPKYSEEAKLNREEIDGVKLESTRIYQILAIYSTVASSLVLVVSLGAISFWMCSNGSLQCRICI

SEQ ID NO: 9283 - protein, 566 aa, Artificial Sequence
  derived and/or modified protein sequence (wt) from hemagglutinin__InfluenzaA__AFN18307
MKAILVVLLYTFAAANADTLCIGYHANNSTDTVDTVLEKNVTVTHSVNLLEDKHNGKLCKLRGVAPLHLGKCNIAGWILGNPECESLSTASSWSYIVETSSSDNGTCYPGDFIDYEELREQLSSVSSFERFEIFPKTSSWPNHDSNKGVTAACPHAGAKSFYKNLIWLVKKGNSYPKLSKSYINDKGKEVLVLWGIHHPSTSADQQSLYQNADAYVFVGTSRYSKKFKPEIAIRPKVRDQEGRMNYYWTLVEPGDKITFEATGNLVVPRYAFAMERNTGSGIIISDTPVHDCNTTCQTPKGAINTSLPFQNIHPITIGKCPKYVKSTKLRLATGLRNVPSIQSRGLFGAIAGFIEGGWTGMVDGWYGYHHQNEQGSGYAADLKSTQNAIDKITNKVNSVIEKMNTQFTAVGKEFNHLEKRIENLNKKVDDGFLDIWTYNAELLVLLENERTLDYHDSNVKNLYEKVRSQLKNNAKEIGNGCFEFYHKCDNTCMESVKNGTYDYPKYSEEAKLNREEIDGVKLESTRIYQILAIYSTVASSLVLVVSLGAISFWMCSNGSLQCRICI

SEQ ID NO: 9284 - protein, 566 aa, Artificial Sequence
  derived and/or modified protein sequence (wt) from hemagglutinin__InfluenzaA__AFN18312
MKAILVVLLYTFATANADTLCIGYHANNSTDTVDTVLEKNVTVTHSVNLLEDKHNGKLCKLRGVAPLHLGKCNIAGWILGNPECESLSTASSWSYIVETSSSDNGTCYPGDFIDYEELREQLSSVSSFERFEIFPKTSSWPNHDSNKGITAACPHAGAKSFYKNLIWLVKKGNSYPKLSKSYINDKGKEVLVLWGIHHPSTSADQQSLYQNADAYVFVGTSRYSKKFKPEIAIRPKVRDQEGRMNYYWTLVEPGDKITFEATGNLVVPRYAFAMERNAGSGIIISDTPVHDCNTTCQTPKGAINTSLPFQNIHPITIGKCPKYVKSTKLRLATGLRNVPSIQSRGLFGAIAGFIEGGWTGMVDGWYGYHHQNEQGSGYAADLKSTQNAIDKITNKVNSVIEKMNTQFTAVGKEFNHLEKRIENLNKKVDDGFLDIWTYNAELLVLLENERTLDYHDSNVKNLYEKVRSQLKNNAKEIGNGCFEFYHKCDNTCMESVKNGTYDYPKYSEEAKLNREEIDGVKLESTRIYQILAIYSTVASSLVLVISLGAISFWMCSNGSLQCRICI

SEQ ID NO: 9285 - protein, 566 aa, Artificial Sequence; identical to SEQ ID NO: 5034
  derived and/or modified protein sequence (wt) from hemagglutinin__InfluenzaA__AFN18319

SEQ ID NO: 9286 - protein, 566 aa, Artificial Sequence; identical to SEQ ID NO: 7131
  derived and/or modified protein sequence (wt) from hemagglutinin__InfluenzaA__AFN18324

SEQ ID NO: 9287 - protein, 566 aa, Artificial Sequence; identical to SEQ ID NO: 3022
  derived and/or modified protein sequence (wt) from hemagglutinin__InfluenzaA__AFN18334

SEQ ID NO: 9288 - protein, 566 aa, Artificial Sequence; identical to SEQ ID NO: 4785
  derived and/or modified protein sequence (wt) from hemagglutinin__InfluenzaA__AFN18344

SEQ ID NO: 9289 - protein, 566 aa, Artificial Sequence; identical to SEQ ID NO: 2669
  derived and/or modified protein sequence (wt) from hemagglutinin__InfluenzaA__AFN18354

SEQ ID NO: 9290 - protein, 566 aa, Artificial Sequence
  derived and/or modified protein sequence (wt) from hemagglutinin__InfluenzaA__AFN18364
MKAILVVLLYTFATANADTLCIGYHANNSTDTVDTVLEKNVTVTHSVNLLEDKHNGKLCKLRGVAPLHLGKCNIAGWILGNPECESLSTASSWSYIVETSSSDNGTCYPGDFIDYEELREQLSSVSSFERFEIFPKTSSWPNHDLNKGVTAACPHAGAKSFYKNLIWLVKKGNSYPKLSKSYINDKGKEVLVLWGIHHPSTSADQQSLYQNADAYVFVGTSRYSKKFKPEIAIRPKVRDQEGRMNYYWTLVEPGDKITFEATGNLVVPRYAFAMERNAGSGIIISDTPVHDCNTTCQTPKGAINTSLPFQNIHPITIGKCPKYVKSTKLRLATGLRNVPSIQSRGLFGAIAGFIEGGWTGMVDGWYGYHHQNEQGSGYAADLKSTQNAIDEITNKVNSVIEKMNTQFTAVGKEFNHLEKRIENLNKKIDDGFLDIWTYNAELLVLLENERTLDYHDSNVKNLYEKVRSQLKNNAKEIGNGCFEFYHKCDNTCMESVKNGTYDYPKYSEEAKLNREEIDGVKLESTRIYQILAIYSTVASSLVLVVSLGAISFWMCSNGSLQCRICI

SEQ ID NO: 9291 - protein, 566 aa, Artificial Sequence; identical to SEQ ID NO: 2669
  derived and/or modified protein sequence (wt) from hemagglutinin__InfluenzaA__AFN18374

SEQ ID NO: 9292 - protein, 566 aa, Artificial Sequence
  derived and/or modified protein sequence (wt) from hemagglutinin__InfluenzaA__AFN18381
MKAILVVLLYTFATANADTLCIGYHANNSTDTVDTVLEKNVTVTHSVNLLEDKHNGKLCKLRGVAPLHLGKCNIAGWILGNPECESLSTASSWSYIVETSSSDNGTCYPGDFIDYEELREQLSSVSSFERFEIFPKTSSWPNHDSNKGVTAACPHAGAKSFYKNLIWLVKKGNSYPKLSKSYINDKGKEVLVLWGIHHPSTSADQQSLYQNADAYVFVGTSKYSKKFKPEIAIRPKVRDQEGRMNYYWTLVKPGDKITFEATGNLVVPRYAFAMERNAGSGIIISDTPVQDCNTTCQTPKGAINTSLPFQNIHPITIGKCPKYVKSTKLRLATGLRNVPSIQSRGLFGAIAGFIEGGWTGMVDGWYGYHHQNEQGSGYAADLKSTQNAIDEITNKVNSVIEKMNTQFTAVGKEFNHLEKRIENLNKKVDDGFLDIWTYNAELLVLLENERTLDYHDSNVKNLYEKVRSQLKNNAKEIGNGCFEFYHKCDNTCMESVKNGTYDYPKYSEEAKLNREEIDGVKLESTRIYQILAIYSTVASSLVLVVSLGAISFWMCSNGSLQCRICI

SEQ ID NO: 9293 - protein, 566 aa, Artificial Sequence
  derived and/or modified protein sequence (wt) from hemagglutinin__InfluenzaA__AFN18390
MKAILVVLLYTFATANADTLCIGYHANNSTDTVDTVLEKNVTVTHSVNLLEDKHNGKLCKLRGVAPLHLGKCNIAGWILGNPECESLSTASSWSYIVETSSSDNGTCYPGDFIDYEELREQLSSVSSFERFEIFPKTSSWPNHDSNKGVTAACPHAGAKSFYKNLIWLVKKGNSYPKLSKSYINDKGKEVLVLWGIHHPSTSADQQSLYQNADAYVFVGTSRYSKKFKPEIAIRPKVRDQEGRMNYYWTLVEPGDKITFEATGNLVVPRYAFAMERNAGSGIIISDTPVHDCNTTCQTPKGAINTSLPFQNIHPITIGKCPKYVKSTKLRLATGLRNVPSIQSRGLFGAIAGFIEGGWTGMVDGWYGYHHQNEQGSGYAADLKSTQNAIDEITNKVNSVIEKMNTQFTAVGKEFNHLEKRIENLNKKVDDGFLDIWTYNAELLVLLENERTLDYHDSNVKNLYEKIRSQLKNNAKEIGNGCFEFYHKCDNTCMESVKNGTYDYPKYSEEAKLNREEIDGVKLESTRIYQILAIYSTVASSLVLVVSLGAISFWMCSNGSLQCRICI

SEQ ID NO: 9294 - protein, 566 aa, Artificial Sequence
  derived and/or modified protein sequence (wt) from hemagglutinin__InfluenzaA__AFN18400
MKAILVVLLYTFATANADTLCIGYHANNSTDTVDTVLEKNVTVTHSVNLLEDKHNGKLCKLRGVTPLHLGKCNIAGWILGNPECESLSKASSWSYIVETSSSDNGTCYPGDFIDYEELREQLSSVSSFERFEIFPKTSSWPNHDSNKGVTAACPHAGAKSFYKNLIWLVKKGNSYPKLSKSYINDKGKEVLVLWGIHHPSTSADQQSLYQNADAYVFVGTSRYSKKFKPEIAIRPKVRDQEGRMNYYWTLVEPGDKITFEATGNLVVPRYAFAMERNVGSGIIISDTPVHDCNTTCQTPKGAINTSLPFQNIHPITIGKCPKYVKSTKLRLATGLRNVPSIQSRGLFGAIAGFIEGGWTGMVDGWYGYHHQNEQGSGYAADLKSTQNAIDEITNKVNSVIEKMNTQFTAVGKEFNHLEKRIENLNKKVDDGFLDIWTYNAELLVLLENERTLDYHDSNVKNLYEKVRSQLKNNAKEIGNGCFEFYHKCDNTCMESVKNGTYDYPKYSEEAKLNREEIDGVKLESTRIYQILAIYSTVASSLVLVVSLGAISFWMCSNGSLQCRICI

SEQ ID NO: 9295 - protein, 566 aa, Artificial Sequence; identical to SEQ ID NO: 2760
  derived and/or modified protein sequence (wt) from hemagglutinin__InfluenzaA__AFN18410

SEQ ID NO: 9296 - protein, 566 aa, Artificial Sequence; identical to SEQ ID NO: 2669
  derived and/or modified protein sequence (wt) from hemagglutinin__InfluenzaA__AFN18420

SEQ ID NO: 9297 - protein, 566 aa, Artificial Sequence
  derived and/or modified protein sequence (wt) from hemagglutinin__InfluenzaA__AFN18430
MKAILVVLLYTFATANADTLCIGYHANNSTDTVDTVLEKNVTVTHSVNLLENKHNGKLCKLRGVAPLHLGKCNIAGWILGNPECESLSTASSWSYIVETSSSDNGTCYPGDFIDYEELREQLSSVSSFERFEIFPKTSSWPNHDSNKGVTAACPHAGAKSFYKNLIWLVKKGNSYPKLSKSYINDKGKEVLVLWGIHHPSTSADQQSLYQNADAYVFVGTSRYSKKFKPEIAIRPKVRDQEGRMNYYWTLVEPGDKITFEATGNLVVPRYAFAMVRNAGSGIIISDTPVHDCNTTCQTPKGAINTSLPFQNIHPITIGKCPKYVKSTKLRLATGLRNVPSIQSRGLFGAIAGFIEGGWTGMVDGWYGYHHQNEQGSGYAADLKSTQNAIDEITNKVNSVIEKMNTQFTAVGKEFNHLEKRIENLNKKVDDGFLDIWTYNAELLVLLENERTLDYHDSNVKNLYEKVRSQLKNNAKEIGNGCFEFYHKCDNTCMESVKNGTYDYPKYSEEAKLNREEIDGVKLESTRIYQILAIYSTVASSLVLVVSLGAISFWMCSNGSLQCRICI

SEQ ID NO: 9298 - protein, 566 aa, Artificial Sequence; identical to SEQ ID NO: 2669
  derived and/or modified protein sequence (wt) from hemagglutinin__InfluenzaA__AFN18440

SEQ ID NO: 9299 - protein, 566 aa, Artificial Sequence; identical to SEQ ID NO: 2669
  derived and/or modified protein sequence (wt) from hemagglutinin__InfluenzaA__AFN18450

SEQ ID NO: 9300 - protein, 566 aa, Artificial Sequence; identical to SEQ ID NO: 5224
  derived and/or modified protein sequence (wt) from hemagglutinin__InfluenzaA__AFN18460

SEQ ID NO: 9301 - protein, 566 aa, Artificial Sequence; identical to SEQ ID NO: 3530
  derived and/or modified protein sequence (wt) from hemagglutinin__InfluenzaA__AFN18470

SEQ ID NO: 9302 - protein, 566 aa, Artificial Sequence; identical to SEQ ID NO: 2760
  derived and/or modified protein sequence (wt) from hemagglutinin__InfluenzaA__AFN18480

SEQ ID NO: 9303 - protein, 566 aa, Artificial Sequence; identical to SEQ ID NO: 3530
  derived and/or modified protein sequence (wt) from hemagglutinin__InfluenzaA__AFN18490

SEQ ID NO: 9304 - protein, 566 aa, Artificial Sequence; identical to SEQ ID NO: 2669
  derived and/or modified protein sequence (wt) from hemagglutinin__InfluenzaA__AFN18497

SEQ ID NO: 9305 - protein, 566 aa, Artificial Sequence; identical to SEQ ID NO: 2669
  derived and/or modified protein sequence (wt) from hemagglutinin__InfluenzaA__AFN18512

SEQ ID NO: 9306 - protein, 566 aa, Artificial Sequence
  derived and/or modified protein sequence (wt) from hemagglutinin__InfluenzaA__AFN18519
MKAILVVLLYTFATANADTLCIGYHANNSTDTVDTVLEKNVTVTHSVNLLEDKHNGKLCKLRGVAPLHLGKCNIAGWILGNPECESLSTASSWSYIVETSSSDNGTCYPGDFIDYEELREQLSSVSSFERFEIFPKTSSWPNHDSNKGVTAACPHAGAKSFYKNLIWLVKKENSYPKLSKSYINDKGKEVLVLWGIHHPSTSADQQSLYQNADAYVFVGTSRYSKKFKPEIAIRPKVRDQEGRMNYYWTLVEPGDKITFEATGNLVVPRYAFAMERNAGSGIIISDTPVHDCNTTCQTPKGAINTSLPFQNIHPITIGKCPKYVKSTKLRLATGLRNVPSIQSRGLFGAIAGFIEGGWTGMVDGWYGYHHQNEQGSGYAADLKSTQNAIDEITNKVNSVIEKMNTQFTAVGKEFNHLEKRIENLNKKVDDGFLDIWTYNAELLVLLENERTLDYHDSNVKNLYEKVRSQLKNNAKEIGNGCFEFYHKCDNTCMESVKNGTYDYPKYSEEAKLNREEIDGVKLESTRIYQILAIYSTVASSLVLVVSLGAISFWMCSNGSLQCRICI

SEQ ID NO: 9307 - protein, 566 aa, Artificial Sequence
  derived and/or modified protein sequence (wt) from hemagglutinin__InfluenzaA__AFN18521
MKAILVVLLYTFATANADTLCIGYHANNSTDTVDTVLEKNVTVTHSVNLLEDKHNGKLCKLRGVAPLHLGKCNIAGWILGNPECESLSTASSWSYIVETSSSDNGTCYPGDFIDYEELREQLSSVSSFERFEIFPKTSSWPNHDSNKGVTAACPHAGAKSFYKNLIWLVKKGNSYPKLSKSYINDKGKEVLVLWGIHHPSTSADQQSLYQNADAYVFVGTSRYSKKFKPEIAIRPKVRDQEGRMNYYWTLVEPGDKITFEATGNLVVPRYAFAMVRNAGSGIIISDTPVHDCNTTCQTPKGAINTSLPFQNIHPITIGKCPKYVKSTKLRLATGLRNVPSIQSRGLFGAIAGFIEGGWTGMVDGWYGYHHQNEQGSGYAADLKSTQNAIDEITNKVNSVIEKMNTQFTAVGKEFNHLEKRIENLNKKVDDGFLDIWTYNAELLVLLENERTLDYHDSNVKNLYEKVRSQLKNNAKEIGNGCFEFYHKCDNTCMESVKNGTYDYPKYSGEAKLNREEIDGVKLESTRIYQILAIYSTVASSLVLVVSLGAISFWMCSNGSLQCRICI

SEQ ID NO: 9308 - protein, 566 aa, Artificial Sequence; identical to SEQ ID NO: 2669
  derived and/or modified protein sequence (wt) from hemagglutinin__InfluenzaA__AFN18528

SEQ ID NO: 9309 - protein, 566 aa, Artificial Sequence; identical to SEQ ID NO: 2669
  derived and/or modified protein sequence (wt) from hemagglutinin__InfluenzaA__AFN18531

SEQ ID NO: 9310 - protein, 566 aa, Artificial Sequence; identical to SEQ ID NO: 5266
  derived and/or modified protein sequence (wt) from hemagglutinin__InfluenzaA__AFN18543

SEQ ID NO: 9311 - protein, 566 aa, Artificial Sequence; identical to SEQ ID NO: 7551
  derived and/or modified protein sequence (wt) from hemagglutinin__InfluenzaA__AFN18545

SEQ ID NO: 9312 - protein, 566 aa, Artificial Sequence; identical to SEQ ID NO: 3530
  derived and/or modified protein sequence (wt) from hemagglutinin__InfluenzaA__AFN18550

SEQ ID NO: 9313 - protein, 566 aa, Artificial Sequence
  derived and/or modified protein sequence (wt) from hemagglutinin__InfluenzaA__AFN18557
MKAILVVLLYTFATANADTLCIGYHANNSTDTVDTVLEKNVTVTHSVNLLEDKHNGKLCKLRGVAPLHLGKCNIAGWILGNPECESLSTASSWSYIVETSSSDNGTCYPGDFIDYEELREQLSSVSSFERFEIFPKTSSWPNHDSNKGVTAACPHAGAKSFYKNLIWLVKKGNSYPKLSKSYINDKGKEVLVLWGIHHPSTSADQQSLYQNADAYVFVGTSRYSKKFKPEIAIRPKVRDQEGRMNYYWTLVEPGDKITFEATGNLVVPRYAFAMERNAGSGIIISDTPAHDCNTTCQTPKGAINTSLPFQNIHPITIGKCPKYVKSTKLRLATGLRNVPSIQSRGLFGAIAGFIEGGWTGMVDGWYGYHHQNEQGSGYAADLKSTQNAIDEITNKVNSVIEKMNTQFTAVGKEFNHLEKRIENLNKKVDDGFLDIWTYNAELLVLLENERTLDYHDSNVKNLYEKVRSQLKNNAKEIGNGCFEFYHKCDNTCMESVKNGTYDYPKYSEEAKLNREEIDGVKLESTRIYQILAIYSTVASSLVLVVSLGAISFWMCSNGSLQCRICI

SEQ ID NO: 9314 - protein, 566 aa, Artificial Sequence
  derived and/or modified protein sequence (wt) from hemagglutinin__InfluenzaA__AFN18559
MKAILVVLLYTFATANADTLCIGYHANNSTDTVDTVLEKNVTVTHSVNLLEDKHNGKLCKLRGVAPLHLGKCNIAGWILGNPECESLSTASSWSYIVETSSSDNGTCYPGDFIDYEELREQLSSVSSFERFEIFPKTSSWPNHDSNKGVTAACPHAGAKSFYKNLIWLVKKGNSYPKLSKSYINDKGKEVLVLWGIHHPSTSADQQNLYQNADAYVFVGTSRYSKKFKPEIAIRPKVRDQEGRMNYYWTLVEPGDKITFEATGNLVVPRYAFAMERNAGSGIIISDTPVHDCNTTCQTPKGAINTSLPFQNIHPITIGKCPKYVKSTKLRLATGLRNVPSIQSRGLFGAIAGFIEGGWTGMVDGWYGYHHQNEQGSGYAADLKSTQNAIDEITNKVNSVIEKMNTQFTAVGKEFNHLEKRIENLNKKVDDGFLDIWTYNAELLVLLENERTLDYHDSNVKNLYEKVRSQLKNNAKEIGNGCFEFYHKCDNTCMESVKNGTYDYPKYSEEAKLNREEIDGVKLESTRIYQILAIYSTVASSLVLVVSLGAISFWMCSNGSLQCRICI

SEQ ID NO: 9315 - protein, 566 aa, Artificial Sequence; identical to SEQ ID NO: 3535
  derived and/or modified protein sequence (wt) from hemagglutinin__InfluenzaA__AFN18561

SEQ ID NO: 9316 - protein, 566 aa, Artificial Sequence; identical to SEQ ID NO: 3771
  derived and/or modified protein sequence (wt) from hemagglutinin__InfluenzaA__AFN18563

SEQ ID NO: 9317 - protein, 566 aa, Artificial Sequence
  derived and/or modified protein sequence (wt) from hemagglutinin__InfluenzaA__AFN18565
MKAILVVLLYTFATANADTLCIGYHANNSTDTVDTVLEKNVTVTHSVNLLEDKHNGKLCKLRGVAPLHLGKCNIAGWILGNPECESLSTASSWSYIVETSSSDNGTCYPGDFIDYEELREQLSSVSSFERFEIFPKTSSWPNHDSNKGVTAACPHAGAKSFYKNLIWLVKKGNSYPKLSKSYINDKGKEVLVLWGIHHPSTSADQQSLYQNADAYVFVGTSRYSKKFKPEIAIRPKVRDQEGRMNYYWTLVEPGDKITFEATGNLVVPRYAFAMVRNAGSGIIISDTPVHDCNTTCQTPKGAINTSLPFQNIHPITIGKCPKYVKSTKLRLATGLRNVPSIQSRGLFGAIAGFIEGGWTGMVDGWYGYHHQNEQGSGYAADLKSTQNAIDEITNKVNSVIEKMNTQFTAVGKEFNHLEKRMENLNKKVDDGFLDIWTYNAELLVLLENERTLDYHDSNVKNLYEKVRSQLKNNAKEIGNGCFEFYHKCDNTCMESVKNGTYDYPKYSEEAKLNREEIDGVKLESTRIYQILAIYSTVASSLVLVVSLGAISFWMCSNGSLQCRICI

SEQ ID NO: 9318 - protein, 566 aa, Artificial Sequence
  derived and/or modified protein sequence (wt) from hemagglutinin__InfluenzaA__AFN18570
MKAILVVLLYTFATANADTLCIGYHANNSTDTVDTVLEKNVTVTHSVNLLEDKHNGKLCKLRGVAPLHLGKCNIAGWILGNPECESLSTVSSWSYIVETSSSDNGTCYPGDFIDYEELREQLSSVSSFERFEIFPKTSSWPNHDSNKGVTAACPHAGAKSFYKNLIWLVKKGNSYPKLSKSYINDKGKEVLVLWGIHHPSTSADQQSLYQNADAYVFVGTSRYSKKFKPEIAIRPKVRDQEGRMNYYWTLVEPGDKITFEATGNLVVPRYAFAMERNAGSGIIISDTPVHDCNTTCQTPKGAINTSLPFQNIHPITIGKCPKYVKSTKLRLATGLRNVPSIQSRGLFGAIAGFIEGGWTGMVDGWYGYHHQNEQGSGYAADLKSTQNAIDEITNKVNSVIEKMNTQFTAVGKEFNHLEKRIENLNKKVDDGFLDIWTYNAELLVLLENERTLDYHDSNVKNLYEKVRSQLKNNAKEIGNGCFEFYHKCDNTCMESVKNGTYDYPKYSEEAKLNREEIDGVKLESTRIYQILAIYSTVASSLVLVVSLGAISFWMCSNGSLQCRICI

SEQ ID NO: 9319 - protein, 566 aa, Artificial Sequence; identical to SEQ ID NO: 2669
  derived and/or modified protein sequence (wt) from hemagglutinin__InfluenzaA__AFN18580

SEQ ID NO: 9320 - protein, 566 aa, Artificial Sequence; identical to SEQ ID NO: 2911
  derived and/or modified protein sequence (wt) from hemagglutinin__InfluenzaA__AFN18590

SEQ ID NO: 9321 - protein, 566 aa, Artificial Sequence
  derived and/or modified protein sequence (wt) from hemagglutinin__InfluenzaA__AFN18600
MKAILVVLLYTFATANADTLCIGYHANNSTDTVDTVLEKNVTVTHSVNLLEDKHNGKLCKLRGVAPLHLGKCNIAGWILGNPECESLSTASSWSYIVETSSSDNGTCYPGDFIDYEELREQLSSVSSFERFEIFPKTSSWPNHDSNKGVTAACPHAGAKSFYKNLIWLVKKGNSYPKLSKSYINDKGKEVLVLWGIHHPSTSADQQNLYQNADAYVFVGTSRYSKKFKPEIAIRPKVRDQEGRMNYYWTLVEPGDKITFEATGNLVVPRYAFAMERNAGSGIIISDTPVHDCNTTCQTPKGAINTSLPFQNIHPITIGKCPKYVKSTKLRLATGLRNVPSIQSRGLFGAIAGFIEGGWTGMVDGWYGYHHQNEQGSGYAADLKSTQNAIDEITNKVNSVIEKMNTQFTAVGKEFNHLEKRIENLNKKVDDGFLDIWTYNAELLVLLENERTLDYHDSNVKNLYEKVRSQLKNNAKEIGNGCFEFYHKCDNACMESVKNGTYDYPKYSEEAKLNREEIDGVKLESTRIYQILAIYSTVASSLVLVVSLGAISFWMCSNGSLQCRICI

SEQ ID NO: 9322 - protein, 566 aa, Artificial Sequence; identical to SEQ ID NO: 2669
  derived and/or modified protein sequence (wt) from hemagglutinin__InfluenzaA__AFN18610

SEQ ID NO: 9323 - protein, 566 aa, Artificial Sequence
  derived and/or modified protein sequence (wt) from hemagglutinin__InfluenzaA__AFN18617
MKAILVVLLYTFATANADTLCIGYHANNSTDTVDTVLEKNVTVTHSVNLLEDKHNGKLCKLRGVAPLHLGKCNIAGWILGNPECESLSTASSWSYIVETSSSDNGTCYPGDFIDYEELREQLSSVSSFERFEIFPKTSSWPNHDSNKGVTAACPHAGAKSFYKNLIWLVKKGNSYPKLSKSYINDKGKEVLVLWGIHHPSTSADQQSLYQNADAYVFVGTSRYSKKFKPEIAIRPKVRDQEGRMNYYWTLVEPGDKITFEATGNLVVPRYAFAMVRNAGSGIIISDTPVHDCNTTCQTPKGAINTSLPFQNIHPITIGKCPKYVKSTKLRLATGLRNVPSIQSRGLFGAIAGFIEGGWTGMVDGWYGYHHQNEQGSGYAADLKSTQSAIDEITNKVNSVIEKMNTQFTAVGKEFNHLEKRIENLNKKVDDGFLDIWTYNAELLVLLENERTLDYHDSNVKNLYEKVRSQLKNNAKEIGNGCFEFYHKCDNTCMESVKNGTYDYPKYSEEAKLKREEIDGVKLESTRIYQILAIYSTVASSLVLVVSLGAISFWMCSNGSLQCRICI

SEQ ID NO: 9324 - protein, 566 aa, Artificial Sequence; identical to SEQ ID NO: 3530
  derived and/or modified protein sequence (wt) from hemagglutinin__InfluenzaA__AFN18622

SEQ ID NO: 9325 - protein, 566 aa, Artificial Sequence; identical to SEQ ID NO: 2669
  derived and/or modified protein sequence (wt) from hemagglutinin__InfluenzaA__AFN18629

SEQ ID NO: 9326 - protein, 566 aa, Artificial Sequence; identical to SEQ ID NO: 2911
  derived and/or modified protein sequence (wt) from hemagglutinin__InfluenzaA__AFN18634

SEQ ID NO: 9327 - protein, 566 aa, Artificial Sequence
  derived and/or modified protein sequence (wt) from hemagglutinin__InfluenzaA__AFN18644
MKAILVVLLYTFATANADTLCIGYHANNSTDTVDTVLEKNVTVTHSVNLLEDKHNGKLCKLRGVAPLHLGKCNIAGWILGNPECESLSTASSWSYIVETSSSDNGTCYPGDFIDYEELREQLSSVSSFERFEIFPKTSSWPNHDSNKGVTAACPHAGAKSFYKNLIWLVKKGNSYPKLSKSYINDKGKEVLVLWGIHHPSTSADQQSLYQNADAYVFVGTSRYSKKFKPEIAIRPKVRDQEGRMNYYWTLVEPGDKITFEATGNLVVPRYAFAMVRNAGSGIIISDTPVHDCNTTCQTPKGAINTSLPFQNIHPITIGKCPKYVKSTKLRLATGLRNVPSIQSRGLFGAIAGFIEGGWTGMVDGWYGYHHQNEQGSGYAADLKSTQSAIDEITNKVNSVIEKVNTQFTAVGKEFNHLEKRIENLNKKVDDGFLDIWTYNAELLVLLENERTLDYHDSNVKNLYEKVRSQLKNNAKEIGNGCFEFYHKCDNTCMESVKNGTYDYPKYSEEAKLNREEIDGVKLESTRIYQILAIYSTVASSLVLVVSLGAISFWMCSNGSLQCRICI

SEQ ID NO: 9328 - protein, 566 aa, Artificial Sequence; identical to SEQ ID NO: 3530
  derived and/or modified protein sequence (wt) from hemagglutinin__InfluenzaA__AFN18654

SEQ ID NO: 9329 - protein, 566 aa, Artificial Sequence; identical to SEQ ID NO: 2669
  derived and/or modified protein sequence (wt) from hemagglutinin__InfluenzaA__AFN18664

SEQ ID NO: 9330 - protein, 566 aa, Artificial Sequence; identical to SEQ ID NO: 2911
  derived and/or modified protein sequence (wt) from hemagglutinin__InfluenzaA__AFN18674

SEQ ID NO: 9331 - protein, 566 aa, Artificial Sequence; identical to SEQ ID NO: 2669
  derived and/or modified protein sequence (wt) from hemagglutinin__InfluenzaA__AFN18684

SEQ ID NO: 9332 - protein, 566 aa, Artificial Sequence; identical to SEQ ID NO: 3530
  derived and/or modified protein sequence (wt) from hemagglutinin__InfluenzaA__AFN18694

SEQ ID NO: 9333 - protein, 566 aa, Artificial Sequence
  derived and/or modified protein sequence (wt) from hemagglutinin__InfluenzaA__AFN18704
MKAILVVLLYTFATANADTLCIGYHANNSTDTVDTVLEKNVTVTHSVNLLEDKHNGKLCKLRGVAPLHLGKCNIAGWILGNPECESLSTASSWSYIVETSSSDNGTCYPGDFIDYEELREQLSSVSSFERFEIFPKTSSWPNHDSNKGVTAACPHAGAKSFYKNLIWLVKKGNSYPKLSKSYINDKGKEVLVLWGIHHPSTSADQQSLYQNADAYVFVGTSRYSKKFKPEIAIRPKVRDQEGRMNYYWTLVEPGDKITFEATGNLVVPRYAFAMVRNAGSGIIISDTPVHDCNTTCQTPKGAINTSLPFQNIHPITIGKCPKYVKSTKLRLATGLRNVPSIQSRGLFGAIAGFIEGGWTGMVDGWYGYHHQNEQGSGYAADLKSTQSAIDEITNKVNSVIEKMNTQFTAVGKEFNHLEKRIENLNKKVDDGFLDIWTYNAELLVLLENERTLDYHDSNVKNLYEKVRSQLKNNAKEIGNGCFEFYHKCDNTCMESVKNGTYDYPKYSEEAKLNREEIDGVKLESTRIYQILAIYSTVASSLVLVVSLGAISFWMCSNGSLQCRICI

SEQ ID NO: 9334 - protein, 566 aa, Artificial Sequence; identical to SEQ ID NO: 4903
  derived and/or modified protein sequence (wt) from hemagglutinin__InfluenzaA__AFN18714

SEQ ID NO: 9335 - protein, 566 aa, Artificial Sequence; identical to SEQ ID NO: 2669
  derived and/or modified protein sequence (wt) from hemagglutinin__InfluenzaA__AFN18721

SEQ ID NO: 9336 - protein, 566 aa, Artificial Sequence; identical to SEQ ID NO: 5335
  derived and/or modified protein sequence (wt) from hemagglutinin__InfluenzaA__AFN18725

SEQ ID NO: 9337 - protein, 566 aa, Artificial Sequence
  derived and/or modified protein sequence (wt) from hemagglutinin__InfluenzaA__AFN18735
MKAILVVLLYTFATANADTLCIGYHANNSTDTVDTVLEKNVTVTHSVNLLEDKHNGKLCKLRGVAPLHLGKCNIAGWILGNPECESLSTASSWSYIVETSSSDNGTCYPGDFIDYEELREQLSSVSSFERFEIFPKTSSWPNHDSNKGVTAACPHAGAKSFYKTLIWLVKKGNSYPKLSKSYINDKGKEVLVLWGIHHPSTSADQQSLYQNADAYVFVGTSRYSKKFKPEIAIRPKVRDQEGRMNYYWTLVEPGDKITFEATGNLVVPRYAFAMERNAGSGIIISDTPVHDCNTTCQTPKGAINTSLPFQNIHPITIGKCPKYVKSTKLRLATGLRNVPSIQSRGLFGAIAGFIEGGWTGMVDGWYGYHHQNEQGSGYAADLKSTQNAIDEITNKVNSVIEKMNTQFTAVGKEFNHLEKRIENLNKKVDDGFLDIWTYNAELLVLLENERTLDYHDSNVKNLYEKVRSQLKNNAKEIGNGCFEFYHKCDNTCMESVKNGTYDYPKYSEEAKLNREEIDGVKLESTRIYQILAIYSTVASSLVLVVSLGAISFWMCSNGSLQCRICI

SEQ ID NO: 9338 - protein, 566 aa, Artificial Sequence; identical to SEQ ID NO: 2669
  derived and/or modified protein sequence (wt) from hemagglutinin__InfluenzaA__AFN18742

SEQ ID NO: 9339 - protein, 566 aa, Artificial Sequence; identical to SEQ ID NO: 3771
  derived and/or modified protein sequence (wt) from hemagglutinin__InfluenzaA__AFN18747

SEQ ID NO: 9340 - protein, 566 aa, Artificial Sequence
  derived and/or modified protein sequence (wt) from hemagglutinin__InfluenzaA__AFN18757
MKAILVVLLYTFATANADTLCIGYHANNSTDTVDTVLEKNVTVTHSVNLLEDKHNGKLCKLRGVAPLHLGKCNIAGWILGNPECESLSTASSWSYIVETSSSDNGTCYPGDFIDYEELREQLSSVSSFERFEIFPKTSSWPNHDSNKGVTAACPHAGAKSFYKNLIWLVKKGNSYPKLSKSYINDKGKEVLVLWGIHHPSTSADQQSLYQNADAYVFVGTSRYSKKFKPEIAIRPKVRDQEGRMNYYWTLVEPGDKITFEATGNLAVPRYAFAMERNAGSGIIISDTPVHDCNTTCQTPKGAINTSLPFQNIHPITIGKCPKYVKSTKLRLATGLRNVPSIQSRGLFGAIAGFIEGGWTGMVDGWYGYHHQNEQGSGYAADLKSTQNAIDEITNKVNSVIEKMNTQFTAVGKEFNHLEKRIENLNKKVDDGFLDIWTYNAELLVLLENERTLDYHDSNVKNLYEKVRSQLKNNAKEIGNGCFEFYHKCDNTCMESVKNGTYDYPKYSEEAKLNREEIDGVKLESTRIYQILAIYSTVASSLVLVVSLGAISFWMCSNGSLQCRICI

SEQ ID NO: 9341 - protein, 566 aa, Artificial Sequence; identical to SEQ ID NO: 2669
  derived and/or modified protein sequence (wt) from hemagglutinin__InfluenzaA__AFN18767

SEQ ID NO: 9342 - protein, 566 aa, Artificial Sequence; identical to SEQ ID NO: 9333
  derived and/or modified protein sequence (wt) from hemagglutinin__InfluenzaA__AFN18774

SEQ ID NO: 9343 - protein, 566 aa, Artificial Sequence; identical to SEQ ID NO: 2669
  derived and/or modified protein sequence (wt) from hemagglutinin__InfluenzaA__AFN18776

SEQ ID NO: 9344 - protein, 566 aa, Artificial Sequence; identical to SEQ ID NO: 3535
  derived and/or modified protein sequence (wt) from hemagglutinin__InfluenzaA__AFN18778

SEQ ID NO: 9345 - protein, 566 aa, Artificial Sequence; identical to SEQ ID NO: 2669
  derived and/or modified protein sequence (wt) from hemagglutinin__InfluenzaA__AFN18784

SEQ ID NO: 9346 - protein, 566 aa, Artificial Sequence; identical to SEQ ID NO: 3535
  derived and/or modified protein sequence (wt) from hemagglutinin__InfluenzaA__AFN18789

SEQ ID NO: 9347 - protein, 566 aa, Artificial Sequence; identical to SEQ ID NO: 2669
  derived and/or modified protein sequence (wt) from hemagglutinin__InfluenzaA__AFN18799

SEQ ID NO: 9348 - protein, 566 aa, Artificial Sequence; identical to SEQ ID NO: 2669
  derived and/or modified protein sequence (wt) from hemagglutinin__InfluenzaA__AFN18809

SEQ ID NO: 9349 - protein, 566 aa, Artificial Sequence; identical to SEQ ID NO: 3771
  derived and/or modified protein sequence (wt) from hemagglutinin__InfluenzaA__AFN18816

SEQ ID NO: 9350 - protein, 566 aa, Artificial Sequence; identical to SEQ ID NO: 2669
  derived and/or modified protein sequence (wt) from hemagglutinin__InfluenzaA__AFN18818

SEQ ID NO: 9351 - protein, 566 aa, Artificial Sequence
  derived and/or modified protein sequence (wt) from hemagglutinin__InfluenzaA__AFN18820
MKAILVVLLYTFATANADTLCIGYHANNSTDTVDTVLEKNVTVTHSVNLLEDKHNGKLCKLRGVAPLHLGNCNIAGWILGNPECESLSTASSWSYIVETSSSDNGTCYPGDFIDYEELREQLSSVSSFERFEIFPKTSSWPNHDSNKGVTAACPHAGAKSFYKNLIWLVKKGNSYPKLSKSYINDKGKEVLVLWGIHHPSTSADQQSLYQNADAYVFVGTSRYSKKFKPEIAIRPKVRDQEGRMNYYWTLVEPGDKITFEATGNLVVPRYAFAMERNAGSGIIISDTPVHDCNTTCQTPKGAINTSLPFQNIHPITIGKCPKYVKSTKLRLATGLRNVPSIQSRGLFGAIAGFIEGGWTGMVDGWYGYHHQNEQGSGYAADLKSTQNAIDEITNKVNSVIEKMNTQFTAVGKEFNHLEKRIENLNKKVDDGFLDIWTYNAELLVLLENERTLDYHDSNVKNLYEKVRSQLKNNAKEIGNGCFEFYHKCDNTCMESVKNGTYDYPKYSEEAKLNREEIDGVKLESTRIYQILAIYSTVASSLVLVVSLGAISFWMCSNGSLQCRICI

SEQ ID NO: 9352 - protein, 566 aa, Artificial Sequence; identical to SEQ ID NO: 2669
  derived and/or modified protein sequence (wt) from hemagglutinin__InfluenzaA__AFN18822

SEQ ID NO: 9353 - protein, 566 aa, Artificial Sequence
  derived and/or modified protein sequence (wt) from hemagglutinin__InfluenzaA__AFN18824
MKAILVVLLYTFATANADTLCIGYHANNSTDTVDTVLEKNVTVTHSVNLLEDKHNGKLCKLRGVAPLHLGKCNIAGWILGNPECESLSTASSWSYIVETSSSDNGTCYPGDFIDYEELREQLSSVSSFERFEIFPKTSSWPNHDSNKGVTAACPHAGAKSFYKNLIWLVKKGNSYPKLSKSYINDKGKEVLVLWGIHHPSTSADQQSLYQNADAYVFVGTSRYSKKFKPEIAIRPKVRDQEGRMNYYWTLVEPGDKITFEATGNLVVPRYAFAMERNAGSGIIISDTPVHDCNTTCQTPKGAINTSLPFQNIHPITIGKCPKYVKSTKLRLATGLRNVPSIQSRGLFGAIAGFIEGGWTGMVDGWYGYHHQNEQGSGYAADLKSTQNAIDEITNKVNSVIEKMNTQFTAVGKEFNHLEKRIENLNKKVDDGFLDIWTYNAELLVLLENERTLDYHDSNVKNLYEKVRSQLKNNAKEIGNGCFEFYHKCDNTCMESVKNGTYDYPKYSEEAKLNREEIDGVRLESTRIYQILAIYSTVASSLVLVVSLGAISFWMCSNGSLQCRICI

SEQ ID NO: 9354 - protein, 566 aa, Artificial Sequence; identical to SEQ ID NO: 9277
  derived and/or modified protein sequence (wt) from hemagglutinin__InfluenzaA__AFN18826

SEQ ID NO: 9355 - protein, 566 aa, Artificial Sequence
  derived and/or modified protein sequence (wt) from hemagglutinin__InfluenzaA__AFN18828
MKAILVVLLYTFATANADTLCIGYHANNSTDTVDTVLEKNVTVTHSVNLLEDKHNGKLCKLRGVAPLHLGKCNIAGWILGNPECESLSTASSWSYIVETSSSDNGTCYPGDFIDYEELREQLSSVSSFERFEIFPKTSSWPNHDSNKGVTAACPHAGAKSFYKNLIWLVKKGNSYPKLSKSYINDKGKEVLVLWGIHHPSTSADQQSLYQNADAYVFVGTSRYSKKFKPEIAIRPKVRDQEGRMNYYWTLVEPGDKITFEATGNLVVPRYAFAMERNAGSGIIISDTPVHDCNTTCQTPKGAINTSLPFQNIHPITIGKCPKYVKSIKLRLATGLRNVPSIQSRGLFGAIAGFIEGGWTGMVDGWYGYHHQNEQGSGYAADLKSTQNAIDEITNKVNSVIEKMNTQFTAVGKEFNHLEKRIENLNKKVDDGFLDIWTYNAELLVLLENERTLDYHDSNVKNLYEKVRSQLKNNAKEIGNGCFEFYHKCDNTCMESVKNGTYDYPKYSEEAKLNREEIDGVKLESTRIYQILAIYSTVASSLVLVVSLGAISFWMCSNGSLQCRICI

SEQ ID NO: 9356 - protein, 566 aa, Artificial Sequence; identical to SEQ ID NO: 9340
  derived and/or modified protein sequence (wt) from hemagglutinin__InfluenzaA__AFN18830

SEQ ID NO: 9357 - protein, 566 aa, Artificial Sequence; identical to SEQ ID NO: 2669
  derived and/or modified protein sequence (wt) from hemagglutinin__InfluenzaA__AFN18832

SEQ ID NO: 9358 - protein, 566 aa, Artificial Sequence; identical to SEQ ID NO: 3535
  derived and/or modified protein sequence (wt) from hemagglutinin__InfluenzaA__AFN18834

SEQ ID NO: 9359 - protein, 566 aa, Artificial Sequence
  derived and/or modified protein sequence (wt) from hemagglutinin__InfluenzaA__AFN18849
MKAILVVLLYTFATANADTLCIGYHANNSTDTVDTVLEKNVTVTHSVNLLEDKHNGKLCKLRGVAPLHLGKCNIAGWILGNPECESLSTASSWSYIVETSSSDNGTCYPGDFIDYEELREQLSSVSSFERFEIFPKTSSWPNHDSNKGVTAACPHAGAKSFYKNLIWLVKKGNSYPKLSKSYINDKGKEVLVLWGIHHPSTSADQQSLYQNVDAYVFVGTSRYSKKFKPEIAIRPKVRDQEGRMNYYWTLVEPGDKITFEATGNLVVPRYAFAMERNAGSGIIISDTPVHDCNTTCQTPKGAINTSLPFQNIHPITIGKCPKYVKSTKLRLATGLRNVPSIQSRGLFGAIAGFIEGGWTGMVDGWYGYHHQNEQGSGYAADLKSTQNAIDEITNKVNSVIEKMNTQFTAVGKEFNHLEKRIENLNKKVDDGFLDIWTYNAELLVLLENERTLDYHDSNVKNLYEKVRSQLKNNAKEIGNGCFEFYHKCDNTCMESVKNGTYDYPKYSEEAKLNREEIDGVKLESTRIYQILAIYSTVASSLVLVVSLGAISFWMCSNGSLQCRICI

SEQ ID NO: 9360 - protein, 566 aa, Artificial Sequence
  derived and/or modified protein sequence (wt) from hemagglutinin__InfluenzaA__AFN18856
MKAILVVLLYTFATANADTLCIGYHANNSTDTVDTVLEKNVTVTHSVNLLENKHNGKLCKLRGVAPLHLGKCNIAGWILGNPECESLSTASSWSYIVETSSSDNGTCYPGDFIDYEELREQLSSVSSFERFEIFPKTSSWPNHDSNKGVTAACPHAGAKSFYKNLIWLVKKGNSYPKLSKSYINDKGKEVLVLWGIHHPSTSADQQSLYQNADAYVFVGTSRYSKKFKPEIAIRPKVRDQEGRMNYYWTLVEPGDKITFEATGNLVVPRYAFAMERNAGSGIIISDTPVHDCNTTCQTPKGAINTSLPFQNIHPITIGKCPKYVKSTKLRLATGLRNVPSIQSRGLFGAIAGFIEGGWTGMVDGWYGYHHQNEQGSGYAADLKSTQNAIDEITNKVNSVIEKMNTQFTAVGKEFNHLEKRIENLNKKVDDGFLDIWTYNAELLVLLENERTLDYHDSNVKNLYEKVRSQLKNNAKEIGNGCFEFYHKCDNTCMESVKNGTYDYPKYSEEAKLNREEIDGVKLESTRIYQILAIYSTVASSLVLVVSLGAISFWMCSNGSLQCRICI

SEQ ID NO: 9361 - protein, 566 aa, Artificial Sequence; identical to SEQ ID NO: 3530
  derived and/or modified protein sequence (wt) from hemagglutinin__InfluenzaA__AFN18858

SEQ ID NO: 9362 - protein, 566 aa, Artificial Sequence
  derived and/or modified protein sequence (wt) from hemagglutinin__InfluenzaA__AFN18860
MKAILVVLLYTFATANADTLCIGYHANNSTDTVDTVLEKNVTVTHSVNLLEDKHNGKLCKLRGVAPLHLGKCNIAGWILGNPECESLSTASSWSYIVETSSSDNGTCYPGDFIDYEELREQLSSVSSFERFEIFPKTSSWPNHDSNKGVTAACSHAGAKSFYKNLIWLVKKGNSYPKLSKSYINDKGKEVLVLWGIHHPSTSADQQSLYQNADAYVFVGTSRYSKKFKPEIAIRPKVRDQEGRMDYYWTLVEPGDKITFEATGNLVVPRYAFAMERNAGSGIIISDTPVHDCNTTCQTPKGAINTSLPFQNIHPITIGKCPKYVKSTKLRLATGLRNVPSIQSRGLFGAIAGFIEGGWTGMVDGWYGYHHQNEQGSGYAADLKSTQNAIDEITNKVNSVIEKMNTQFTAVGKEFNHLEKRIENLNKKVDDGFLDIWTYNAELLVLLENERTLDYHDSNVKNLYEKVRSQLKNNAKEIGNGCFEFYHKCDNTCMESVKNGTYDYPKYSEEAKLNREEIDGVKLESTRIYQILAIYSTVASSLVLVVSLGAISFWMCSNGSLQCRICI

SEQ ID NO: 9363 - protein, 566 aa, Artificial Sequence
  derived and/or modified protein sequence (wt) from hemagglutinin__InfluenzaA__AFN18865
MKAILVVLLYTFATANADTLCIGYHANNSTDTVDTVLEKNVTVTHSVNLLEDKHNGKLCKLRGVAPLHLGKCNIAGWILGNPECESLSTASSWSYIVETSSSDNGTCYPGDFIDYEELREQLSSVSSFERFEIFPKTSSWPNHDSNKGVTAACPHAGAKSFYKNLIWLVKKGNSYPKLSKSYINDKGKEVLVLWGIHHPSTSADQQSLYQNADAYVFVGTSRYSKKFKPEIAIRPKVRDQEGRMNYYWTLVEPGDKITFEATGNLVVPRYAFAMERNAGSGIIISDTSVHDCNTTCQTPKGAINTSLPFQNIHPITIGKCPKYVKSTKLRLATGLRNVPSIQSRGLFGAIAGFIEGGWTGMVDGWYGYHHQNEQGSGYAADLKSTQNAIDKITNKVNSVIEKMNTQFTAVGKEFNHLEKRIENLNKKVDDGFLDIWTYNAELLVLLENERTLDYHDSNVKNLYEKVRSQLKNNAKEIGNGCFEFYHKCDNTCMESVKNGTYDYPKYSEEAKLNREEIDGVKLESTRIYQILAIYSTVASSLVLVVSLGAISFWMCSNGSLQCRICI

SEQ ID NO: 9364 - protein, 566 aa, Artificial Sequence
  derived and/or modified protein sequence (wt) from hemagglutinin__InfluenzaA__AFN18875
MEAILVVLLYTFATANADTLCIGYHANNSTDTVDTVLEKNVTVTHSVNLLEDKHNGKLCKLRGVAPLHLGKCNIAGWILGNPECESLSTASSWSYIVETSSSDNGTCYPGDFIDYEELREQLSSVSSFERFEIFPKTSSWPNHDSNKGVTAACPHAGAKSFYKNLIWLVKKGNSYPKLSKSYINDKGKEVLVLWGIHHPSTSAAQQSLYQNADAYVFVGSSRYSKKFKPEIAIRPKVRDQEGRMNYYWTLVEPGDKITFEATGNLVVPRYAFAMERNAGSGIIISDTPVHDCNTTCQTPKGAINTSLPFHNIHPITIGKCPKYVKSTKLRLATGLRNVPSIQSRGLFGAIAGFIEGGWTGMVDGWYGYHHQNEQGSGYAADLKSTQNAIDEITNKVNSVIEKMNTQFTAVGKEFNHLEKRIENLNKKVDDGFLDIWTYNAELLVLLENERTLDYHDSNVKNLYEKVRSQLKNNAKEIGNGCFEFYHKCDNTCMESVKNGTYDYPKYSEEAKLNREEIDGVKLESTRIYQILAIYSTVASSLVLVVSLGAISFWMCSNGSLQCRICI

SEQ ID NO: 9365 - protein, 566 aa, Artificial Sequence
  derived and/or modified protein sequence (wt) from hemagglutinin__InfluenzaA__AFN18885
MKAILIVLLYTFATANADTLCIGYHANNSTDTVDTVLEKNVTVTHSVNLLEDKHNGKLCKLRGVAPLHLGKCNIAGWILGNPECESLSTASSWSYIVETSSSDNGTCYPGDFIDYEELREQLSSVSSFERFEIFPKTSSWPNHDSNKGVTAACPHAGAKSFYKNLIWLVKKGNSYPKLSKSYINDKGKEVLVLWGIHHPSTSADQQSLYQNADAYVFVGTSRYSKKFKPEIAIRPKVRDQEGRMNYYWTLVEPGDKITFEATGNLVVPRYAFAMERNAGSGIIISDTPVHDCNTTCQTPKGAINTNLPFQNIHPITIGKCPKYVKSTKLRLATGLRNVPSTQSRGLFGAIAGFIEGGWTGMVDGWYGYHHQNEQGSGYAADLKSTQNAIDEITNKVNSVIEKMNTQFTAVGKEFNHLEKRIENLNKKVDDGFLDIWTYNAELLVLLENERTLDYHDSNVKNLYEKVRSQLKNNAKEIGNGCFEFYHKCDNTCMESVKNGTYDYPKYSEEAKLNREEIDGVKLESTRIYQILAIYSTVASSLVLVVSLGAISFWMCSNGSLQCKICI

SEQ ID NO: 9366 - protein, 566 aa, Artificial Sequence; identical to SEQ ID NO: 2669
  derived and/or modified protein sequence (wt) from hemagglutinin__InfluenzaA__AFN18892

SEQ ID NO: 9367 - protein, 566 aa, Artificial Sequence; identical to SEQ ID NO: 2911
  derived and/or modified protein sequence (wt) from hemagglutinin__InfluenzaA__AFN18894

SEQ ID NO: 9368 - protein, 566 aa, Artificial Sequence; identical to SEQ ID NO: 9333
  derived and/or modified protein sequence (wt) from hemagglutinin__InfluenzaA__AFN18903

SEQ ID NO: 9369 - protein, 566 aa, Artificial Sequence; identical to SEQ ID NO: 3771
  derived and/or modified protein sequence (wt) from hemagglutinin__InfluenzaA__AFN18910

SEQ ID NO: 9370 - protein, 566 aa, Artificial Sequence
  derived and/or modified protein sequence (wt) from hemagglutinin__InfluenzaA__AFN18912
MEAILVVLLYTFATANADTLCIGYHANNSTDTVDTVLEKNVTVTHSVNLLEDKHNGKLCKLRGVAPLHLGKCNIAGWILGNPECESLSTASSWSYIVETSSSDNGTCYPGDFIDYEELREQLSSVSSFERFEIFPKTSSWPNHDSNKGVTAACPHAGAKSFYKNLIWLVKKGNSYPKLSKSYINDKGKEVLVLWGIHHPSTSADQQSLYQNADAYVFVGSSRYSKKFKPEIAIRPKVRDQEGRMNYYWTLVEPGDKITFEATGNLVVPRYAFAMERNAGSGIIISDTSVHDCNTTCQTPKGAINTSLPFHNIHPITIGKCPKYVKSTKLRLATGLRNVPSIQSRGLFGAIAGFIEGGWTGMVDGWYGYHHQNEQGSGYAADLKSTQNAIDEITNKVNSVIEKMNTQFTAVGKEFNHLEKRIENLNKKVDDGFLDIWTYNAELLVLLENERTLDYHDSNVKNLYEKVRSQLKNNAKEIGNGCFEFYHKCDNTCMESVKNGTYDYPKYSEEAKLNREEIDGVKLESTRIYQILAIYSTVASSLVLVVSLGAISFWMCSNGSLQCRICI

SEQ ID NO: 9371 - protein, 566 aa, Artificial Sequence; identical to SEQ ID NO: 3771
  derived and/or modified protein sequence (wt) from hemagglutinin__InfluenzaA__AFN18917

SEQ ID NO: 9372 - protein, 566 aa, Artificial Sequence; identical to SEQ ID NO: 2669
  derived and/or modified protein sequence (wt) from hemagglutinin__InfluenzaA__AFN18927

SEQ ID NO: 9373 - protein, 566 aa, Artificial Sequence; identical to SEQ ID NO: 5335
  derived and/or modified protein sequence (wt) from hemagglutinin__InfluenzaA__AFN18937

SEQ ID NO: 9374 - protein, 566 aa, Artificial Sequence
  derived and/or modified protein sequence (wt) from hemagglutinin__InfluenzaA__AFN18952
MKAILVVLLYTFATANADTLCIGYHANNSTDTVDTVLEKNVTVTHSVNILEDKHNRKLCKLRGVAPLHLGKCNIAGWILGNPECESLSTASSWSYIVETSSSDNGTCYPGDFIDYEELREQLSSVSSFERFEIFPKTSSWPNHDSNKGVTAACPHAGAKSFYKNLIWLVKKGNSYPKLSKSYINDKGKEVLVLWGIHHPSTSADQQSLYQNADAYVFVGTSRYSKKFKPEIAIRPKVRDQEGRMNYYWTLVEPGDKITFEATGNLVVPRYAFAMERNAGSGIIISDTPVHDCNTTCQTPKGAINTSLPFQNIHPITIGKCPKYVKSTKLRLATGLRNVPSIQSRGLFGAIAGFIEGGWTGMVDGWYGYHHQNEQGSGYAADLKSTQNAIDEITNKVNSVIEKMNTQFTAVGKEFNHLEKRIENLNKKVDDGFLDIWTYNAELLVLLENERTLDYHDSNVKNLYEKVRSQLKNNAKEIGNGCFEFYHKCDNTCMESVKNGTYDYPKYSEEAKLNREKIDGVKLESTRIYQILAIYSTVASSLVLVVSLGAISFWMCSNGSLQCRICI

SEQ ID NO: 9375 - protein, 566 aa, Artificial Sequence
  derived and/or modified protein sequence (wt) from hemagglutinin__InfluenzaA__AFN18957
MKAILVVLLYTFATANADTLCIGYHANNSTDTVDTVLEKNVTVTHSVNLLEDNHNGKLCKLRGVAPLHLGKCNIAGWILGNPECESLSTASSWSYIVETSSSDNGTCYPGDFIDYEELREQLSSVSSFERFEIFPKTSSWPNHDSNKGVTAACPHAGAKSFYKNLIWLVKKGNSYPKLSKSYINDKGKEVLVLWGIHHPSTSADQQSLYQNADAYVFVGTSRYSKKFKPEIAIRPKVRDQEGRMNYYWTLVEPGDKITFEATGNLVVPRYAFAMERNAGSGIIISDTPVHDCNTTCQTPKGAINTSLPFQNIHPITIGKCPKYVKSTKLRLATGLRNVPSIQSRGLFGAIAGFIEGGWTGMVDGWYGYHHQNEQGSGYAADLKSTQNAIDEITNKVNSVIEKMNTQFTAVGKEFNHLEKRIENLNKKVDDGFLDIWTYNAELLVLLENERTLDYHDSNVKNLYEKVRSQLKNNAKEIGNGCFEFYHKCDNTCMESVKNGTYDYPKYSEEAKLNREEIDGVKLESTRIYQILAIYSTVASSLVLVVSLGAISFWMCSNGSLQCRICI

SEQ ID NO: 9376 - protein, 566 aa, Artificial Sequence; identical to SEQ ID NO: 8758
  derived and/or modified protein sequence (wt) from hemagglutinin__InfluenzaA__AFN18964

SEQ ID NO: 9377 - protein, 566 aa, Artificial Sequence
  derived and/or modified protein sequence (wt) from hemagglutinin__InfluenzaA__AFN18974
MKAILVVLLYTFATANADTLCIGYHANNSTDTVDTVLEKNVTVTHSVNLLEDKHNGKLCKLRGVAPLHLGKCNIAGWILGNPECESLSTASSWSYIVETSSSDNGTCYPGDFIDYEELREQLSSMSSFERFEIFPKTSSWPNHDPNKGVTAACPHAGAKSFYKNLIWLVKKGNSYPKLSKSYINDKGKKVLVLWGIHHPSTSADQQSLYQNADAYVFVGTSRYSKKFKPEIAIRPKVRDQEGRMNYYWTLVEPGDKITFEATGNLVVPRYAFAMERNAGSGIIISDTPVHDCNTTCQTPKGAINTSLPFQNIHPITIGKCPKYVKSTKLRLATGLRNVPSIQSRGLFGAIAGFIEGGWTGMVDGWYGYHHQNEQGSGYAADLKSTQNAIDEITNKVNSVIEKMNTQFTAVGKEFNHLEKRIENLNKKVDDGFLDIWTYNAELLVLLENERTLDYHDSNVKNLYEKVRSQLKNNAKEIGNGCFEFYHKCDNTCMESVKNGTYDYPKYSDEAKLNREEIDGVKLESTRIYQILAIYSTVASSLVLVVSLGAISFWMCSNGSLQCRICI

SEQ ID NO: 9378 - protein, 566 aa, Artificial Sequence; identical to SEQ ID NO: 4221
  derived and/or modified protein sequence (wt) from hemagglutinin__InfluenzaA__AFN18979

SEQ ID NO: 9379 - protein, 566 aa, Artificial Sequence
  derived and/or modified protein sequence (wt) from hemagglutinin__InfluenzaA__AFN18982
MKAILVVLLYTFAIANADTLCIGYHANNSTDTVDTVLEKNVTVTHSVNLLEDKHNGKLCKLRGVAPLHLGKCNIAGWILGNPECESLSTASSWSYIVETSSSDNGTCYPGDFIDYEELREQLSSVSSFERFEIFPKTNSWPNHDSNKGVTAACPHAGAKSFYKNLIWLVKKGNSYPKLSKSYINDKGKEVLVLWGIHHPSTSADQQSLYQNADAYVFVGTSRYSKKFKPEIAIRPKVRDQEGRMNYYWTLVEPGDKITFEATGNLVVPRYAFAMERNAGSGIIISDTPVHDCNTTCQTPKGAINTSLPFQNIHPITIGKCPKYVKSTKLRLATGLRNVPSIQSRGLFGAIAGFIEGGWTGMVDGWYGYHHQNEQGSGYAADLKSTQHAIDEITNKVNSVIEKMNTQFTAVGKEFNHLEKRIENLNKKVDDGFLDIWTYNAELLVLLENERTLDYHDSNVKNLYEKVRSQLKNNAKEIGNGCFEFYHKCDNTCMESVKNGTYDYPKYSEEAKLNREEINGVKLESTRIYQILAIYSTVASSLVLVVSLGAISFWMCSNGSLQCRICI

SEQ ID NO: 9380 - protein, 566 aa, Artificial Sequence; identical to SEQ ID NO: 9272
  derived and/or modified protein sequence (wt) from hemagglutinin__InfluenzaA__AFN18984

SEQ ID NO: 9381 - protein, 566 aa, Artificial Sequence; identical to SEQ ID NO: 2669
  derived and/or modified protein sequence (wt) from hemagglutinin__InfluenzaA__AFN18986

SEQ ID NO: 9382 - protein, 566 aa, Artificial Sequence; identical to SEQ ID NO: 2669
  derived and/or modified protein sequence (wt) from hemagglutinin__InfluenzaA__AFN18988

SEQ ID NO: 9383 - protein, 566 aa, Artificial Sequence; identical to SEQ ID NO: 3833
  derived and/or modified protein sequence (wt) from hemagglutinin__InfluenzaA__AFN18993

SEQ ID NO: 9384 - protein, 566 aa, Artificial Sequence; identical to SEQ ID NO: 3833
  derived and/or modified protein sequence (wt) from hemagglutinin__InfluenzaA__AFN18999

SEQ ID NO: 9385 - protein, 566 aa, Artificial Sequence; identical to SEQ ID NO: 3467
  derived and/or modified protein sequence (wt) from hemagglutinin__InfluenzaA__AFN19006

SEQ ID NO: 9386 - protein, 566 aa, Artificial Sequence; identical to SEQ ID NO: 2669
  derived and/or modified protein sequence (wt) from hemagglutinin__InfluenzaA__AFN19026

SEQ ID NO: 9387 - protein, 566 aa, Artificial Sequence; identical to SEQ ID NO: 3809
  derived and/or modified protein sequence (wt) from hemagglutinin__InfluenzaA__AFN19036

SEQ ID NO: 9388 - protein, 566 aa, Artificial Sequence; identical to SEQ ID NO: 2669
  derived and/or modified protein sequence (wt) from hemagglutinin__InfluenzaA__AFN19043

SEQ ID NO: 9389 - protein, 566 aa, Artificial Sequence; identical to SEQ ID NO: 2669
  derived and/or modified protein sequence (wt) from hemagglutinin__InfluenzaA__AFN19053

SEQ ID NO: 9390 - protein, 566 aa, Artificial Sequence; identical to SEQ ID NO: 2669
  derived and/or modified protein sequence (wt) from hemagglutinin__InfluenzaA__AFN19063

SEQ ID NO: 9391 - protein, 566 aa, Artificial Sequence; identical to SEQ ID NO: 2669
  derived and/or modified protein sequence (wt) from hemagglutinin__InfluenzaA__AFN19070

SEQ ID NO: 9392 - protein, 566 aa, Artificial Sequence
  derived and/or modified protein sequence (wt) from hemagglutinin__InfluenzaA__AFN19076
MKAILVVLLYTFATANADTLCIGYHANNSTDTVDTVLEKDVTVTHSVNLLEDKHNGKLCKLRGVAPLHLGKCNIAGWILGNPECESLSTASSWSYIVETSSSDNGTCYPGDFIDYEELREQLSSVSSFERFEIFPKTSSWPNHDSNKGVTAACPHAGAKSFYKNLIWLVKKGNSYPKLSKSYINDKGKEVLVLWGIHHPSTSADQQSLYQNADAYVFVGTSRYSKKFKPEIAIRPKVRDQEGRMNYYWTLVEPGDKITFEATGNLVVPRYAFAMERNAGSGIIISDTPVHDCNTTCQTPKGAINTSLPFQNIHPITIGKCPKYVKSTKLRLATGLRNVPSIQSRGLFGAIAGFIEGGWTGMVDGWYGYHHQNEQGSGYAADLKSTQNAIDEITNKVNSVIEKMNTQFTAVGKEFNHLEKRIENLNKKVDDGFLDIWTYNAELLVLLENERTLDYHDSNVKNLYEKVRSQLKNNAKEIGNGCFEFYHKCDNTCMESVKNGTYDYPKYSEEAKLNREEIDGVKLESTRIYQILAIYSTVASSLVLVVSLGAISFWMCSNGSLQCRICI

SEQ ID NO: 9393 - protein, 566 aa, Artificial Sequence; identical to SEQ ID NO: 2669
  derived and/or modified protein sequence (wt) from hemagglutinin__InfluenzaA__AFN19082

SEQ ID NO: 9394 - protein, 566 aa, Artificial Sequence; identical to SEQ ID NO: 2669
  derived and/or modified protein sequence (wt) from hemagglutinin__InfluenzaA__AFN19088

SEQ ID NO: 9395 - protein, 566 aa, Artificial Sequence; identical to SEQ ID NO: 2669
  derived and/or modified protein sequence (wt) from hemagglutinin__InfluenzaA__AFN19097

SEQ ID NO: 9396 - protein, 566 aa, Artificial Sequence; identical to SEQ ID NO: 2669
  derived and/or modified protein sequence (wt) from hemagglutinin__InfluenzaA__AFN19104

SEQ ID NO: 9397 - protein, 566 aa, Artificial Sequence; identical to SEQ ID NO: 2669
  derived and/or modified protein sequence (wt) from hemagglutinin__InfluenzaA__AFN19113

SEQ ID NO: 9398 - protein, 566 aa, Artificial Sequence; identical to SEQ ID NO: 2669
  derived and/or modified protein sequence (wt) from hemagglutinin__InfluenzaA__AFN19119

SEQ ID NO: 9399 - protein, 566 aa, Artificial Sequence; identical to SEQ ID NO: 5180
  derived and/or modified protein sequence (wt) from hemagglutinin__InfluenzaA__AFN19125

SEQ ID NO: 9400 - protein, 566 aa, Artificial Sequence; identical to SEQ ID NO: 2669
  derived and/or modified protein sequence (wt) from hemagglutinin__InfluenzaA__AFN19134

SEQ ID NO: 9401 - protein, 566 aa, Artificial Sequence; identical to SEQ ID NO: 2669
  derived and/or modified protein sequence (wt) from hemagglutinin__InfluenzaA__AFN19144

SEQ ID NO: 9402 - protein, 566 aa, Artificial Sequence; identical to SEQ ID NO: 5224
  derived and/or modified protein sequence (wt) from hemagglutinin__InfluenzaA__AFN19154

SEQ ID NO: 9403 - protein, 566 aa, Artificial Sequence; identical to SEQ ID NO: 2669
  derived and/or modified protein sequence (wt) from hemagglutinin__InfluenzaA__AFN19164

SEQ ID NO: 9404 - protein, 566 aa, Artificial Sequence; identical to SEQ ID NO: 2669
  derived and/or modified protein sequence (wt) from hemagglutinin__InfluenzaA__AFN19174

SEQ ID NO: 9405 - protein, 566 aa, Artificial Sequence; identical to SEQ ID NO: 2669
  derived and/or modified protein sequence (wt) from hemagglutinin__InfluenzaA__AFN19184

SEQ ID NO: 9406 - protein, 566 aa, Artificial Sequence; identical to SEQ ID NO: 2669
  derived and/or modified protein sequence (wt) from hemagglutinin__InfluenzaA__AFN19194

SEQ ID NO: 9407 - protein, 566 aa, Artificial Sequence; identical to SEQ ID NO: 2669
  derived and/or modified protein sequence (wt) from hemagglutinin__InfluenzaA__AFN19203

SEQ ID NO: 9408 - protein, 566 aa, Artificial Sequence; identical to SEQ ID NO: 2669
  derived and/or modified protein sequence (wt) from hemagglutinin__InfluenzaA__AFN19213

SEQ ID NO: 9409 - protein, 566 aa, Artificial Sequence; identical to SEQ ID NO: 2669
  derived and/or modified protein sequence (wt) from hemagglutinin__InfluenzaA__AFN19223

SEQ ID NO: 9410 - protein, 566 aa, Artificial Sequence; identical to SEQ ID NO: 2669
  derived and/or modified protein sequence (wt) from hemagglutinin__InfluenzaA__AFN19233

SEQ ID NO: 9411 - protein, 566 aa, Artificial Sequence
  derived and/or modified protein sequence (wt) from hemagglutinin__InfluenzaA__AFN19243
MKAILVVLLYTFATANADTLCIGYHANNSTDTVDTVLEKNVTVTHSVNLLEDKHNGKLCKLRGVAPLHLGKCNIAGWILGNPECESLSTASSWSYIVETSSSDNGTCYPGDFIDYEELREQLSSVSSFERFEIFPKTSSWPNHDSNKGVTAACPHAGAKSFYKNLIWLVKKGNSYPKLSKSYINDKGKEVLVLWGIHHPSTSADQQSLYQNADAYVFVGTSKYSKKFKPEIAIRPKVRDQEGRMNYYWTLVEPGDKITFEATGNLVVPRYAFAMERNAGSGIIISDTPVQDCNTTCQTPKGAINTSLPFQNIHPITIGKCPKYVKSTKLRLATGLRNVPSIQSRGLFGAIAGFIEGGWTGMVDGWYGYHHQNEQGSGYAADLKSTQNAIDEITNKVNSVIEKMNTQFTAVGKEFNHLEKRIENLNKKVDDGFLDIWTYNAELLVLLENERTLDYHDSNVKNLYEKVRSQLKNNAKEIGNGCFEFYHKCDNTCMESVKNGTYDYPKYSEEAKLNREEIDGVKLESTRIYQILAIYSTVASSLVLVVSLGAISFWMCSNGSLQCRICI

SEQ ID NO: 9412 - protein, 566 aa, Artificial Sequence; identical to SEQ ID NO: 4785
  derived and/or modified protein sequence (wt) from hemagglutinin__InfluenzaA__AFN19250

SEQ ID NO: 9413 - protein, 566 aa, Artificial Sequence; identical to SEQ ID NO: 2669
  derived and/or modified protein sequence (wt) from hemagglutinin__InfluenzaA__AFN19259

SEQ ID NO: 9414 - protein, 566 aa, Artificial Sequence; identical to SEQ ID NO: 2669
  derived and/or modified protein sequence (wt) from hemagglutinin__InfluenzaA__AFN19269

SEQ ID NO: 9415 - protein, 566 aa, Artificial Sequence; identical to SEQ ID NO: 2669
  derived and/or modified protein sequence (wt) from hemagglutinin__InfluenzaA__AFN19279

SEQ ID NO: 9416 - protein, 566 aa, Artificial Sequence; identical to SEQ ID NO: 3530
  derived and/or modified protein sequence (wt) from hemagglutinin__InfluenzaA__AFN19286

SEQ ID NO: 9417 - protein, 566 aa, Artificial Sequence; identical to SEQ ID NO: 2669
  derived and/or modified protein sequence (wt) from hemagglutinin__InfluenzaA__AFN19295

SEQ ID NO: 9418 - protein, 566 aa, Artificial Sequence; identical to SEQ ID NO: 2669
  derived and/or modified protein sequence (wt) from hemagglutinin__InfluenzaA__AFN19305

SEQ ID NO: 9419 - protein, 566 aa, Artificial Sequence; identical to SEQ ID NO: 3535
  derived and/or modified protein sequence (wt) from hemagglutinin__InfluenzaA__AFN19315

SEQ ID NO: 9420 - protein, 566 aa, Artificial Sequence; identical to SEQ ID NO: 2669
  derived and/or modified protein sequence (wt) from hemagglutinin__InfluenzaA__AFN19325

SEQ ID NO: 9421 - protein, 566 aa, Artificial Sequence; identical to SEQ ID NO: 2669
  derived and/or modified protein sequence (wt) from hemagglutinin__InfluenzaA__AFN19335

SEQ ID NO: 9422 - protein, 566 aa, Artificial Sequence; identical to SEQ ID NO: 2669
  derived and/or modified protein sequence (wt) from hemagglutinin__InfluenzaA__AFN19344

SEQ ID NO: 9423 - protein, 566 aa, Artificial Sequence
  derived and/or modified protein sequence (wt) from hemagglutinin__InfluenzaA__AFN19351
MKTIIALSYILCLVFAQKLPGNDNSMATLCLGHHAVPNGTIVKTITNDQIEVTNATELVQNSSIGEICDSPHQILDGENCTLIDALLGDPQCDGFQNKKWDLFVERSKAYSNCYPYDVPDYASLRSLVASSGTLEFNNESFNWTGVTQNGTSSACIRRSNNSFFSRLNWLTHLNFKYPALNVTMPNNEQFDKLYIWGVHHPGTDKDQIFLYAQSSGRITVSTKRSQQAVIPNIGSRPRIRNIPSRISIYWTIVKPGDILLINSTGNLIAPRGYFKIRSGKSSIMRSDAPIGKCNSECITPNGSIPNDKPFQNVNRITYGACPRYVKQSTLKLATGMRNVPEKQTRGIFGAIAGFIENGWEGMVDGWYGFRHQNSEGRGQAADLKSTQAAIDQINGKLNRLIGKTNEKFHQIEKEFSEVEGRIQDLEKYVEDTKIDLWSYNAELLVALENQHTIDLTDSEMNKLFEKTKKQLRENAEDMGNGCFKIYHKCDNACIGSIRNGTYDHDVYRDEALNNRFQIKGVELKSGYKDWILWISFAISCFLLCVALLGFIMWACQKGNVRCNICI

SEQ ID NO: 9424 - protein, 566 aa, Artificial Sequence; identical to SEQ ID NO: 9074
  derived and/or modified protein sequence (wt) from hemagglutinin__InfluenzaA__AFN19355

SEQ ID NO: 9425 - protein, 566 aa, Artificial Sequence; identical to SEQ ID NO: 9074
  derived and/or modified protein sequence (wt) from hemagglutinin__InfluenzaA__AFN19357

SEQ ID NO: 9426 - protein, 566 aa, Artificial Sequence; identical to SEQ ID NO: 9074
  derived and/or modified protein sequence (wt) from hemagglutinin__InfluenzaA__AFN19361

SEQ ID NO: 9427 - protein, 566 aa, Artificial Sequence
  derived and/or modified protein sequence (wt) from hemagglutinin__InfluenzaA__AFN19363
MKTIIALSYILCLVFAQKLPGNDNSTATLCLGHHAVPNGTIVKTITNDQIEVTNATELVQISSTGEICDSPHQILDGENCTLIDALLGDPQCDGFQNKKWDLFVERSKAYSNCYPYDVPDYASLRSLVASSGTLEFNNESFNWTGVTQNGTSSACIRRSNSSFFSRLNWLTHLNFKYPALNVTMPNNEQFDKLYIWGVHHPGTDKDQIFLYAQSSGRITVSTKRSQQAVIPNIGSRPRIRNIPSRISIYWTIVKPGDILLINSTGNLIAPRGYFKIRSGKSSIMRSDAPIGKCNSECITPNGSIPNDKPFQNVNRITYGACPRYVKQSTLKLATGMRNVPEKQTRGIFGAIAGFIENGWEGMVDGWYGFRHQNSEGRGQAADLKSTQAAIDQINGKLNRLIGKTNEKFHQIEKEFSEVEGRIQDLEKYVEDTKIDLWSYNAELLVALENQHTIDLTDSEMNKLFEKTKKQLRENAEDMGNGCFKIYHKCDNACIGSIRNGTYNHDVYRDEALNNRFQIKGVELKSGYKDWILWISFAISCFLLCVALLGFIMWACQKGNIRCNICI

SEQ ID NO: 9428 - protein, 566 aa, Artificial Sequence; identical to SEQ ID NO: 6982
  derived and/or modified protein sequence (wt) from hemagglutinin__InfluenzaA__AFN19365

SEQ ID NO: 9429 - protein, 566 aa, Artificial Sequence
  derived and/or modified protein sequence (wt) from hemagglutinin__InfluenzaA__AFN19367
MKTIIALSYILCLVFAQKLPENDNSTATLCLGHHAVPNGTIVKTITNDQIEVTNATELVQSSSTGEICDSPHQILDGVNCTLIDALLGDPQCDGFQNKKWDLFVERSKAYSNCYPYDVPDYASLRSLVASSGTLEFNNESFNWTGVTQNGTSSACIRRSNSSFFSRLNWLTHLNFKYPALNVTMPNNEQFDKLYIWGVHHPGTDKDQIFLYAQSSGRITVSTKRSQQAVIPNIGSRPRIRNIPSRISIYWTIVKPGDILLINSTGNLIAPRGYFKIQSGKSSIMRSDAPIGKCNSECITPNGSIPNDKPFQNVNRITYGACPRYVKQSTLKLATGMRNVPEKQTRGIFGAIAGFIENGWEGMVDGWYGFRHQNSEGRGQAADLKSTQAAIDQINGKLNRLIGKTNEKFHQIEKEFSEVEGRIQDLEKYVEDTKIDLWSYNAELLVALENQHTIDLTDSEMNKLFEKTKKQLRENAEDMGNGCFKIYHKCDNACIGSIRNGTYNHDVYRDEALNNRFQIKGVELKSGYKDWILWISFAISCFLLCVALLGFIMWACQKGNIRCNICI

SEQ ID NO: 9430 - protein, 566 aa, Artificial Sequence
  derived and/or modified protein sequence (wt) from hemagglutinin__InfluenzaA__AFN19369
MKTIIALSYILCLVFAQKLPENDNSTATLCLGHHAVPNGTIVKTITNDQIEVTNATELVQSSSTGEICDSPHQILDGVNCTLIDALLGDPQCDGFQNKKWDLFVERSKAYSNCYPYDVPDYASLRSLVASSGTLEFNNESFNWTGVTQNGTSSACIRRSNSSFFSRLNWLTHLNFKYPALNVTMPNNEQFDKLYIWGVHHPGTDKDQIFLYAQSSGRITVSTKRSQQAVIPNIGSRPRIRNIPSRISIYWTIVKPGDILLINSTGNLIAPRGYFKIRSGKSSIMRSDAPIGKCNSECITPNGSIPNDKPFQNVNRITYGACPRYVKQSTLKLATGMRNVPEKQTRGIFGAIAGFIENGWEGMVDGWYGFRHQNSEGRGQAADLKSTQAAIDQINGKLNRLIGKTNEKFHQIEKEFSEVEGRIQDLEKYVEDTKIDLWSYNAELLVALENQHTIDLTDSEMNKLFEKTKKQLRENAEDMGNGCFKIYHKCDNACIGSIRNGTYNHDVYRDEALNNRFQIKGVELKSGYKDWILWISFAISCFLLCVALLGFIMWACQKGNIRCNICI

SEQ ID NO: 9431 - protein, 566 aa, Artificial Sequence
  derived and/or modified protein sequence (wt) from hemagglutinin__InfluenzaA__AFN19373
MKTIIALSYILCLVFAQKLPGNDNSTATLCLGHHAVPNGTIVKTITNDQIEVTNATELVQNSSIGEICDSPHQILDGENCTLIDALLGDPQCDGFQNKKWDLFVERSKAYSNCYPYDVPDYASLRSLVASSGTLEFNNESFNWTGVTQNGTSSACIRRSNNSFFSRLNWLTHLNFKYPALNVTMPNNEQFDKLYIWGVHHPGTDKDQIFLYAQSSGRITVSTKRSQQAVIPNIGSRPRIRNIPSRISIYWTIVKPGDILLINSTGNLIAPRGYFKIRSGKSSIMRSDAPIGKCNSECITPNGSIPNDKPFQNVNRITYGACPRYVKQSTLKLATGMRNVPEKQTRGIFGAIAGFIENGWEGMVDGWYGFRHQNSEGRGQAADLKSTQAAIDQINGKLNRLIGKTNEKFHQIEKEFSEVEGRIQDLEKYVEDTKIDLWSYNAELLVALENQHTIDLTDSEMNKLFEKTKKQLRENAEDMGNGCFKIYHKCDNACIGSIRNGTYDHDVYRDEALNNRFQIKGVELKSGYKDWILWISFAISCFLLCVALLGFIMWACQKGNIRCNICI

SEQ ID NO: 9432 - protein, 566 aa, Artificial Sequence; identical to SEQ ID NO: 9074
  derived and/or modified protein sequence (wt) from hemagglutinin__InfluenzaA__AFN19375

SEQ ID NO: 9433 - protein, 566 aa, Artificial Sequence
  derived and/or modified protein sequence (wt) from hemagglutinin__InfluenzaA__AFN19377
MKTIIALSYILCLVFAQKLPENDNSTATLCLGHHAVPNGTIVKTITNDQIEVTNATELVQSSSTGEICDSPHQILDGVNCTLIDALLGDPQCDGFQNKKWDLFVERSKAYSNCYPYDVPDYASLRSLVASSGTLEFNNESFNWTGVTQNGTSSACIRRSNSSFFSRLNWLTHLNFKYPALNVTMPNNEQFDKLYIWGVHHPGTDKDQIFLYAQSSGRITVSTKRSQQAVIPNIGSRPRIRNIPSRISIYWTIVKPGDILLINSTGNLIAPRGYFKIRSGKSSIMRSDAPIGKCNSECITPNGSIPNDKPFQNVNRITYGACPRYVKQSTLKLATGMRNVPEKQTRGIFGAIAGFIENGWEGMVDGWYGFRHQNSEGRGQAADLKSTQAAIDQINGKLNRLIGKTNEKFHQIEKEFSEVEGRIQDLEKYVEDTKIDLWSYNAELLVALENQHTIDLTDSEMNKLFEKTKKQLRENAEDMGNGCFKIYHKCDNACIGSIRNGTYNHDVYRDEALNNRFQIKGVELKSGYKDWILWISFAISCFLLCVALLGFIMWACQNGNIRCNICI

SEQ ID NO: 9434 - protein, 566 aa, Artificial Sequence; identical to SEQ ID NO: 9074
  derived and/or modified protein sequence (wt) from hemagglutinin__InfluenzaA__AFN19379

SEQ ID NO: 9435 - protein, 566 aa, Artificial Sequence; identical to SEQ ID NO: 9431
  derived and/or modified protein sequence (wt) from hemagglutinin__InfluenzaA__AFN19381

SEQ ID NO: 9436 - protein, 566 aa, Artificial Sequence; identical to SEQ ID NO: 9430
  derived and/or modified protein sequence (wt) from hemagglutinin__InfluenzaA__AFN19383

SEQ ID NO: 9437 - protein, 566 aa, Artificial Sequence
  derived and/or modified protein sequence (wt) from hemagglutinin__InfluenzaA__AFN19385
MKTIIALSYILCLVFAQKLPENDNSTATLCLGHHAVPNGTIVKTITNDQIEVTNATELVQSSSTGEICDSPHQILDGVNCTLIDALLGDPQCDGFQNKKWDLFVERSKAYSNCYPYDVPDYASLRSLVASSGTLEFNNESFNWTGVTQNGTSSACIRRSNSSFFSRLNWLTHLNFKYPALNVTMPNNEQFDKLYIWGVHHPGTDKDQIFLYAQSSGRITVSTKRSQQAVIPNIGSRPRIRNIPSRISIYWTIVKPGDILLINSTGNLIAPRGYFKIQSGKSSIMRSDAPIGKCNSECITPNGSIPNDKPFQNVNRITYGACPRYVKQSTLKLATGMRNVPEKQTRGIFGAIAGFIENGWEGMVDGWYGFRHQNSEGRGQAADLKSTQAAIDQINGKLNRLIGKTNEKFHQIEKEFSEVEGRIQDLEKYVEDTKIDIWSYNAELLVALENQHTIDLTDSEMNKLFEKTKKQLRENAEDMGNGCFKIYHKCDNACIGSIRNGTYNHDVYRDEALNNRFQIKGVELKSGYKDWILWISFAISCFLLCVALLGFIMWACQKGNIRCNICI

SEQ ID NO: 9438 - protein, 566 aa, Artificial Sequence; identical to SEQ ID NO: 9430
  derived and/or modified protein sequence (wt) from hemagglutinin__InfluenzaA__AFN19387

SEQ ID NO: 9439 - protein, 566 aa, Artificial Sequence; identical to SEQ ID NO: 9074
  derived and/or modified protein sequence (wt) from hemagglutinin__InfluenzaA__AFN19389

SEQ ID NO: 9440 - protein, 566 aa, Artificial Sequence; identical to SEQ ID NO: 9074
  derived and/or modified protein sequence (wt) from hemagglutinin__InfluenzaA__AFN19391

SEQ ID NO: 9441 - protein, 566 aa, Artificial Sequence
  derived and/or modified protein sequence (wt) from hemagglutinin__InfluenzaA__AFN19393
MKTIIALSYILCLVFAQKLPGNDNSTATLCLGHHAVPNGTIVKTITNDQIEVTNATELVQSSSAGEICDSPHHILDGENCTLIDALLGDPQCDGFQNKKWDLFVERSRAYSNCYPYDVPDYASLRSLVASSGTLEFNNESFNWTGVTQNGTSSACIRRSNNSFFSRLNWLTHLNFKYPALNVTMPNNEQFDKLYIWGVHHPGTDKDQIFLYAQASGRITVSTKRSQQAVIPNIGSRPRVRNIPSRISIYWTIVKPGDILLINSTGNLIAPRGYFKIRSGKSSIMRSDAPIGKCNSECITPNGSIPNDKPFQNVNRITYGACPRYVKQSTLKLATGMRNVPEKQTRGIFGAIAGFIENGWEGMMDGWYGFRHQNSEGRGQAADLKSTQAAIDQINGKLNRLIGKTNEKFHQIEKEFSEVEGRIQDLEKYVEDTKIDLWSYNAELLVALENQHTIDLTDSEMNKLFEKTKKQLRENAEDMGNGCFKIYHKCDNACIGSIRNGTYDHDVYRDEALSNRFQIKGVELKSGYKDWILWISFAISCFLLCVALLGFIMWACQKGNIRCNICI

SEQ ID NO: 9442 - protein, 566 aa, Artificial Sequence; identical to SEQ ID NO: 9430
  derived and/or modified protein sequence (wt) from hemagglutinin__InfluenzaA__AFN19397

SEQ ID NO: 9443 - protein, 566 aa, Artificial Sequence; identical to SEQ ID NO: 9074
  derived and/or modified protein sequence (wt) from hemagglutinin__InfluenzaA__AFN19399

SEQ ID NO: 9444 - protein, 566 aa, Artificial Sequence; identical to SEQ ID NO: 9430
  derived and/or modified protein sequence (wt) from hemagglutinin__InfluenzaA__AFN19401

SEQ ID NO: 9445 - protein, 566 aa, Artificial Sequence; identical to SEQ ID NO: 9074
  derived and/or modified protein sequence (wt) from hemagglutinin__InfluenzaA__AFN19403

SEQ ID NO: 9446 - protein, 566 aa, Artificial Sequence; identical to SEQ ID NO: 9430
  derived and/or modified protein sequence (wt) from hemagglutinin__InfluenzaA__AFN19405

SEQ ID NO: 9447 - protein, 566 aa, Artificial Sequence
  derived and/or modified protein sequence (wt) from hemagglutinin__InfluenzaA__AFN19407
MKTIIALSYILCLVFAQKLPGNDNSTATLCLGHHAVPNGTIVKTITNDQIEVTNATELVQNSSIGEICDSPHQILDGENCTLIDALLGDPQCDGFQNKKWDLFVERSKAYSNCYPYDVPDYASLRSLVASSGTLEFNNESFNWSGVTQNGTSSACMRRSNSSFFSRLNWLTHLNFKYPALNVTMPNNEQFDKLYIWGVHHPGTDKDQIFLYAQSSGRITVSTKRSQQAVIPNIGSRPRIRNIPSRISIYWTIVKPGDILLINSTGNLIAPRGYFKIRSGKSSIMRSDAPIGKCNSECITPNGSIPNDKPFQNVNRITYGACPRYVKQSTLKLATGMRNVPEKQTRGIFGAIAGFIENGWEGMVDGWYGFRHQNSEGRGQAADLKSTQAAIDQINGKLNRLIGKTNEKFHQIEKEFSEVEGRIQDLEKYVEDTKIDLWSYNAELLVALENQHTIDLTDSEMNKLFEKTKKQLRENAEDMGNGCFKIYHKCDNACIGSIRNGTYDHDVYRDEALNNRFQIKGVELKSGYKDWILWISFAISCFLLCVALLGFIMWACQKGNIRCNICI

SEQ ID NO: 9448 - protein, 566 aa, Artificial Sequence
  derived and/or modified protein sequence (wt) from hemagglutinin__InfluenzaA__AFN19409
MKTIIALSYILCLVFAQKLPGNDNSTATLCLGHHAVPNGTIVKTITNDQIEVTNATELVQSSSIGEICDSPHQILDGENCTLIDALLGDPQCDGFQNKKWDLFVERSKAYSNCYPYDVPDYASLRSLVASSGTLEFNNESFNWTGVTQNGTSSACIRRSNSSFFSRLNWLTHLNFKYPALNVTMPNNEQFDKLYIWGVHHPGTDKDQIFLYAQSSGRITVSTKRSQQAVIPNIGSRPRIRNIPSRISIYWTIVKPGDILLINSTGNLIAPRGYFKIRSGKSSIMRSDAPIGKCNSECITPNGSIPNDKPFQNVNRITYGACPRYVKQSTLKLATGMRNVPEKQTRGIFGAIAGFIENGWEGMVDGWYGFRHQNSEGRGQAADLKSTQAAIDQINGKLNRLIGKTNEKFHQIEKEFSEVEGRIQDLEKYVEDTKIDLWSYNAELLVALENQHTIDLTDSEMNKLFEKTKKQLRENAEDMGNGCFKIYHKCDNACIGSIRNGTYNHDVYRDEALNNRFQIKGVELKSGYKDWILWISFAISCFLLCVALLGFIMWACQKGNIRCNICI

SEQ ID NO: 9449 - protein, 566 aa, Artificial Sequence; identical to SEQ ID NO: 9430
  derived and/or modified protein sequence (wt) from hemagglutinin__InfluenzaA__AFN19411

SEQ ID NO: 9450 - protein, 566 aa, Artificial Sequence; identical to SEQ ID NO: 9074
  derived and/or modified protein sequence (wt) from hemagglutinin__InfluenzaA__AFN19413

SEQ ID NO: 9451 - protein, 566 aa, Artificial Sequence
  derived and/or modified protein sequence (wt) from hemagglutinin__InfluenzaA__AFN19415
MKTIIALSYILCLVFAQKLPGNDNSTATLCLGHHAVPNGTIVKTITNDQIEVTNATELVQSSSTGEICDSPHQILDGENCTLIDALLGDPQCDGFQNKKWDLFVERSKAYSNCYPYDVPDYASLRSLVASSGTLEFNNESFNWTGVTQNGTSSACIRRSNSSFFSRLNWLTHLNFKYPALNVTMPNNEQFDKLYIWGVHHPGTDKDQIFLYAQSSGRITVSTKRSQQAVIPNIGSRPRIRNIPSRISIYWTIVKPGDILLINSTGNLIAPRGYFKIRSGKSSVMRSDAPIGKCNSECITPNGSIPNDKPFQNVNRITYGACPRYVKQSTLKLATGMRNVPEKQTRGIFGAIAGFIENGWEGMVDGWYGFRHQNSEGRGQAADLKSTQAAIDQINGKLNRLIGKTNEKFHQIEKEFSEVEGRIQDLEKYVEDTKIDLWSYNAELLVALENQHTIDLTDSEMNKLFEKTKKQLRENAEDMGNGCFKIYHKCDNACIGSIRNGTYNHDVYRDEALNNRFQIKGVELKSGYKDWILWISFAISCFLLCVALLGFIMWACQKGNIRCNICI

SEQ ID NO: 9452 - protein, 566 aa, Artificial Sequence
  derived and/or modified protein sequence (wt) from hemagglutinin__InfluenzaA__AFN19417
MKTIIALSYILCLVFAQKLPGNDNSTATLCLGHHAVPNGTIVKTITNDQIEVTNATELVQSSSTGEICDSPHQILDGENCTLIDALLGDPQCDGFQNKKWDLFVERSKAYSNCYPYDVPDYASLRSLIASSGTLEFNNESFNWTGVTQNGTSSACIRRSNSSFFSRLNWLTHLNFKYPALNVTMPNNEQFDKLYIWGVHHPGTDKDQIFLYAQSSGRITVSTKRSQQAVIPNIGSRPRIRNIPSRISIYWTIVKPGDILLINSTGNLIAPRGYFKIRSGKSSIMRSDAPIGKCNSECITPNGSIPNDKPFQNVNRITYGACPRYVKQSTLKLATGMRNVPEKQTRGIFGAIAGFIENGWEGMVDGWYGFRHQNSEGRGQAADLKSTQAAIDQINGKLNRLIGKTNEKFHQIEKEFSEVEGRIQDLEKYVEDTKIDLWSYNAELLVALENQHTIDLTDSEMNKLFEKTKKQLRENAEDMGNGCFKIYHKCDNACIGSIRNGTYNHDVYRDEALNNRFQIKGVELKSGYKDWILWISFAISCFLLCVALLGFIMWACQKGNIRCNICI

SEQ ID NO: 9453 - protein, 566 aa, Artificial Sequence
  derived and/or modified protein sequence (wt) from hemagglutinin__InfluenzaA__AFN19423
MKTIIALSYILCLVFAQKLPGNDNSTATLCLGHHAVPNGTIVKTITNDRIEVTNATELVQNSSIGEICDSPHQILDGENCTLIDALLGDPQCDGFQNKKWDLFVERSKAYSNCYPYDVPDYASLRSLVASSGTLEFNNESFNWTGVTQNGTSSACIRRSNNSFFSRLNWLTHLNFKYPALNVTMPNNEQFDKLYIWGVHHPGTDKDQIFLYAQSSGRITVSTKRSQQAVIPNIGSRPRIRNIPSRISIYWTIVKPGDILLINSTGNLIAPRGYFKIRSGKSSIMRSDAPIGKCKSECITPNGSIPNDKPFQNVNRITYGACPRYVKQSTLKLATGMRNVPEKQTRGIFGAIAGFIENGWEGMVDGWYGFRHQNSEGRGQAADLKSTQAAIDQINGKLNRLIGKTNEKFHQIEKEFSEVEGRIQDLEKYVEDTKIDLWSYNAELLVALENQHTIDLTDSEMNKLFEKTKKQLRENAEDMGNGCFKIYHKCDNACIGSIRNGTYDHDVYRDEALNNRFQIKGVELKSGYKDWILWISFAISCFLLCVALLGFIMWACQKGNIRCNICI

SEQ ID NO: 9454 - protein, 566 aa, Artificial Sequence; identical to SEQ ID NO: 9430
  derived and/or modified protein sequence (wt) from hemagglutinin__InfluenzaA__AFN19425

SEQ ID NO: 9455 - protein, 566 aa, Artificial Sequence
  derived and/or modified protein sequence (wt) from hemagglutinin__InfluenzaA__AFN19437
MKTIIALSYILCLVFAQKLPGNDNSTATLCLGHHAVPNGTIVKTITNDQIEVTNATELVQNSSIGEICDSPHQILDGENCTLIDALLGDPQCDGFQNKKWDLFVERSKAYSNCYPYDVPDYASLRSLVASSGTLEFNNESFNWTGVTQNGTSSACIRRSNSSFFSRLNWLTHLNFKYPALNVTMPNNEQFDKLYIWGVHHPGTDKDQIFLYAQSSGRITVSTKRSQQAVIPNIGSRPRIRNIPSRISIYWTIVKPGDILLINSTGNLIAPRGYFRIRSGKSSIMRSDAPIGKCNSECITPNGSIPNDKPFQNVNRITYGACPRYVKQSTLKLATGMRNVPEKQTRGIFGAIAGFIENGWEGMVDGWYGFRHQNSEGRGQAADLKSTQAAIDQINRKLNRLIGKTNEKFHQIEKEFSEVEGRIQDLEKYVEDTKIDLWSYNAELLVALENQHTIDLTDSEMNKLFEKTKKQLRENAEDMGNGCFKIYHKCDNACIGSIRNGTYDHYVYRDEALNNRFQIKGVELKSGYKDWILWISFAISCFLLCVALLGFIMWACQKGNIRCNICI

SEQ ID NO: 9456 - protein, 566 aa, Artificial Sequence
  derived and/or modified protein sequence (wt) from hemagglutinin__InfluenzaA__AFN19439
MKTIIALSHILCLVFAQKLPENDNSTATLCLGHHAVPNGTIVKTITNDQIEVTNATELVQSSSTGEICDSPHQILDGINCTLIDALLGDPQCDGFQNKKWDLFVERSKAYSNCYPYDVPDYASLRSLVASSGTLEFNNESFNWTGVTQNGTSSACIRRSNSSFFSRLNWLTHLNFKYPALNVTMPNNEQFDKLYIWGVHHPGTDKDQIFLYAQPSGRITVSTKRSQQAVIPNIGSRPRIRNIPSRISIYWTIVKPGDILLINSTGNLIAPRGYFKIRSGKSSIMRSDAPIGKCNSECITPNGSIPNDKPFQNVNRITYGACPRYVKQSTLKLATGMRNVPEKQTRGIFGAIAGFIENGWEGMVDGWYGFRHQNSEGRGQAADLKSTQAAIDQINGKLNRLIGKTNEKFHQIEKEFSEVEGRIQDLEKYVEDTKIDLWSYNAELLVALENQHTIDLTDSEMNKLFEKTKKQLRENAEDMGNGCFKIYHKCDNACIGSIRNGTYNHDVYRDEALNNRFQIKGVELKSGYKDWILWISFAISCFLLCVALLGFIMWACQKGNIRCNICI

SEQ ID NO: 9457 - protein, 566 aa, Artificial Sequence; identical to SEQ ID NO: 9431
  derived and/or modified protein sequence (wt) from hemagglutinin__InfluenzaA__AFN19443

SEQ ID NO: 9458 - protein, 566 aa, Artificial Sequence
  derived and/or modified protein sequence (wt) from hemagglutinin__InfluenzaA__AFN19445
MKTIIALSYILCLVFAQKLPGNDNSTATLCLGHHAVPNGTIVKTITNDRIEVTNATELVQNSSIGEICDSPHQILDGENCTLIDALLGDPQCDGFQNKKWDLFVERSKAYSNCYPYDVPDYASLRSLVASSGTLEFNNESFNWTGVTQNGTSSACIRRSNNSFFSRLNWLTHLNFKYPALNVTMPNNEQFDKLYIWGVHHPGTDKDQIFLYAQSSGRITVSTKRSQQAVIPNIGSRPRIRNIPSRISIYWTIVKPGDILLINSTGNLIAPRGYFKIRSGKSSIMRSDAPIGKCKSECITPNGSIPNDKPFQNVNRITYGACPRYVKQSTLRLATGMRNVPEKQTRGIFGAIAGFIENGWEGMVDGWYGFRHQNSEGRGQAADLKSTQAAIDQINGKLNRLIGKTNEKFHQIEKEFSEVEGRIQDLEKYVEDTKIDLWSYNAELLVALENQHTIDLTDSEMNKLFEKTKKQLRENAEDMGNGCFKIYHKCDNACIGSIRNGTYDHDVYRDEALNNRFQIKGVELKSGYKDWILWISFAISCFLLCVALLGFIMWACQKGNIRCNICI

SEQ ID NO: 9459 - protein, 566 aa, Artificial Sequence; identical to SEQ ID NO: 9453
  derived and/or modified protein sequence (wt) from hemagglutinin__InfluenzaA__AFN19447

SEQ ID NO: 9460 - protein, 566 aa, Artificial Sequence
  derived and/or modified protein sequence (wt) from hemagglutinin__InfluenzaA__AFN19451
MKTIIALSYILCLVFAQKLPGNDNSTATLCLGHHAVPNGTIVKTITNDQIEVTNATELVQNSSIGEICDSPHQILDGENCTLIDALLGDPQCDGFQNKKWDLFVERSKAYSNCYPYDVPDYASLRSLVASSGTLEFNNESFNWTGVTQNGTSSACIRRSNSSFFSRLNWLTHLNFKYPALNVTMPNNEQFDKLYIWGVHHPGTDKDQIFLYAQSSGRITVSTKRSQQAVIPNIGSRPRIRNIPSRISIYWTIVKPGDILLINSTGNLIAPRGYFKIRSGKSSIMRSDAPIGKCNSECITPNGSIPNDKPFQNVNRITYGACPRYVKQSTLKLATGMRNVPEKQTRGIFGAIAGFIENGWEGMVDGWYGFRHQNSEGRGQAADLKSTQAAIDQINGKLNRLIGKTNEKFHQIEKEFSEVEGRIQDLEKYVEDTKIDLWSYNAELLVALENQHTIDLTDSEMNKLFEKTKKQLRENAEDMGNGCFKIYHKCDNACIGSIRNGTYDHDVYRDEALNNRFQINGVELKSGYKDWILWISFAISCFLLCVALLGFIMWACQKGNIRCNICI

SEQ ID NO: 9461 - protein, 566 aa, Artificial Sequence
  derived and/or modified protein sequence (wt) from hemagglutinin__InfluenzaA__AFN19453
MKTIIALSYILCLVFAQKLPGNDNSTATLCLGHHAVPNGTIVKTITNDQIEVTNATELVQNSSIGEICDSPHQILDGENCTLIDALLGDPQCDGFQNKKWDLFVERSKAYSNCYPYDVPDYASLRSLVASSGTLEFNNESFNWTGVTQNGTSSACIRRSNSSFFSRLNWLTHLNFKYPALNVTMPNNEQFDKLYIWGVHHPGTDKDQIFLYAQSSGRITVSTKRSQQAVIPNIGSRPRIRNIPSRISIYWTIVKPGDILLINSTGNLIAPRGYFKIRSGKSSIMRSDAPIGKCNSECITPNGSIPNDKPFQNVNRITYGACPRYVKQSTLKLATGMRNVPEKQTRGIFGAIAGFIENGWEGMVDGWYGFRHQNSEGRGQAADLKSTQAAIDQINGKLNRLIGKTNEKFHQIEKEFSEVEGRIQDLEKYVEDTKIDLWSYNAELLVALENQHTIDLTDSEMNKLFEKTKKQLRENAEDMGNGCFKIYHKCDNACIGSIRNGTYDHDVYRDEALNNRFQVKGVELKSGYKDWILWISFAISCFLLCVALLGFIMWACQKGNIRCNICI

SEQ ID NO: 9462 - protein, 566 aa, Artificial Sequence; identical to SEQ ID NO: 9453
  derived and/or modified protein sequence (wt) from hemagglutinin__InfluenzaA__AFN19455

SEQ ID NO: 9463 - protein, 566 aa, Artificial Sequence; identical to SEQ ID NO: 9074
  derived and/or modified protein sequence (wt) from hemagglutinin__InfluenzaA__AFN19457

SEQ ID NO: 9464 - protein, 566 aa, Artificial Sequence; identical to SEQ ID NO: 9074
  derived and/or modified protein sequence (wt) from hemagglutinin__InfluenzaA__AFN19459

SEQ ID NO: 9465 - protein, 566 aa, Artificial Sequence; identical to SEQ ID NO: 9431
  derived and/or modified protein sequence (wt) from hemagglutinin__InfluenzaA__AFN19461

SEQ ID NO: 9466 - protein, 566 aa, Artificial Sequence
  derived and/or modified protein sequence (wt) from hemagglutinin__InfluenzaA__AFN19465
MKTIIALSYILCLVFAQKLPGNDNSTATLCLGHHAVPNGTIVKTITNDQIEVTNATELVQSSSTGEICDSPHQILDGENCTLIDALLGDPQCDGFQNKKWDLFVERSKAYSNCYPYDVPDYASLRSLVASSGTLEFNNESFNWTGVTQNGTSSACIRRSNSSFFSRLNWLTHLNFKYPALNVTMPNNEQFDKLYIWGVHHPGTDKDQIFLYAQSSGRITVSTKRSQQAVIPNIGSRPRIRNIPSRISIYWTIVKPGDILLINSTGNLIAPRGYFKIRSGKSSIMRSDAPIGKCNSECITPNGSIPNDKPFQNVNRITYGACPRYVKQSTLKLATGMRNVPEKQTRGIFGAIAGFIENGWEGMVDGWYGFRHQNSEGRGQAADLKSTQAAIDQINGKLNRLIGKTNEKFHQIEKEFSEVEGRIQDLEKYVEDTKIDLWSYNAELLVALENQHTIDLTDSEMNKLFEKTKKQLRENAEDIGNGCFKIYHKCDNACIGSIRNGTYNHDVYRDEALNNRFQIKGVELKSGYKDWILWISFAISCFLLCIALLGFIMWACQKGNIRCNICI

SEQ ID NO: 9467 - protein, 566 aa, Artificial Sequence; identical to SEQ ID NO: 9453
  derived and/or modified protein sequence (wt) from hemagglutinin__InfluenzaA__AFN19467

SEQ ID NO: 9468 - protein, 566 aa, Artificial Sequence; identical to SEQ ID NO: 9461
  derived and/or modified protein sequence (wt) from hemagglutinin__InfluenzaA__AFN19469

SEQ ID NO: 9469 - protein, 566 aa, Artificial Sequence; identical to SEQ ID NO: 9074
  derived and/or modified protein sequence (wt) from hemagglutinin__InfluenzaA__AFN19471

SEQ ID NO: 9470 - protein, 566 aa, Artificial Sequence
  derived and/or modified protein sequence (wt) from hemagglutinin__InfluenzaA__AFN19473
MKTIIALSYILCLVFAQKLPGNDNSTATLCLGHHAVPNGTIVKTITNDQIEVTNATELVQSSSTGEICGSPHQILDGENCTLIDALLGDPQCDGFQNKKWDLFVERSKAYSNCYPYDVPDYASLRSLVASSGTLEFNNESFNWTGVTQNGTSSACIRRSNSSFFSRLNWLTHLNFKYPALNVTMPNNEQFDKLYIWGVHHPGTDKDQIFLYAQSSGRITVSTKRSQQAVIPNIGSRPRIRNIPSRISIYWTIVKPGDILLINSTGNLIAPRGYFKIRSGKSSIMRSDAPIGKCNSECITPNGSIPNDKPFQNVNRITYGACPRYVKQSTLKLATGMRNVPEKQTRGIFGAIAGFIENGWEGMVDGWYGFRHQNSEGRGQAADLKSTQAAIDQINGKLNRLIGKTNEKFHQIEKEFSEVEGRIQDLEKYVEDTKIDLWSYNAELLVALENQHTIDLTDSEMNKLFEKTKKQLRENAEDMGNGCFKIYHKCDNACIGSIRNGTYNHDVYRDEALNNRFQIKGVELKSGYKDWILWISFAISCFLLCVALLGFIMWACQKGNIRCNICI

SEQ ID NO: 9471 - protein, 566 aa, Artificial Sequence; identical to SEQ ID NO: 9453
  derived and/or modified protein sequence (wt) from hemagglutinin__InfluenzaA__AFN19475

SEQ ID NO: 9472 - protein, 566 aa, Artificial Sequence; identical to SEQ ID NO: 9074
  derived and/or modified protein sequence (wt) from hemagglutinin__InfluenzaA__AFN19477

SEQ ID NO: 9473 - protein, 566 aa, Artificial Sequence
  derived and/or modified protein sequence (wt) from hemagglutinin__InfluenzaA__AFN19479
MKTIIALSCILCLVFAQKLPGNDNSTATLCLGHHAVPNGTIVKTITNDQIEVTNATELVQNSSIGEICDSPHQILDGENCTLIDALLGDPQCDGFQNKKWDLFVERSKAYSNCYPYDVPDYASLRSLVASSGTLEFNNESFNWTGVTQNGTSSACIRRSNSSFFSRLNWLTHLNFKYPALNVTMPNNEQFDKLYIWGVHHPGTDKDQIFLYAQSSGRITVSTKRSQQAVIPNIGSRPRIRNIPSRISIYWTIVKPGDILLINSTGNLIAPRGYFKIRSGKSSIMRSDAPIGKCNSECITPNGSIPNDKPFQNVNRITYGACPRYVKQSTLKLATGMRNVPEKQTRGIFGAIAGFIENGWEGMVDGWYGFRHQNSEGRGQAADLKSTQAAIDQINGKLNRLIGKTNEKFHQIEKEFSEVEGRIQDLEKYVEDTKIDLWSYNAELLVALENQHTIDLTDSEMNKLFEKTKKQLRENAEDMGNGCFKIYHKCDNACIGSIRNGTYDHDVYRDEALNNRFQIKGVELKSGYKDWILWISFAISCFLLCVALLGFIMWACQKGNIRCNICI

SEQ ID NO: 9474 - protein, 566 aa, Artificial Sequence; identical to SEQ ID NO: 9453
  derived and/or modified protein sequence (wt) from hemagglutinin__InfluenzaA__AFN19483

SEQ ID NO: 9475 - protein, 566 aa, Artificial Sequence; identical to SEQ ID NO: 6855
  derived and/or modified protein sequence (wt) from hemagglutinin__InfluenzaA__AFN19485

SEQ ID NO: 9476 - protein, 566 aa, Artificial Sequence; identical to SEQ ID NO: 9074
  derived and/or modified protein sequence (wt) from hemagglutinin__InfluenzaA__AFN19487

SEQ ID NO: 9477 - protein, 566 aa, Artificial Sequence
  derived and/or modified protein sequence (wt) from hemagglutinin__InfluenzaA__AFN19491
MKTIIALSYILCLVFAQKLPGNDNSTATLCLGHHAVPNGTIVKTITNDQIEVTNATELVQSSSTGEICDSPHQILDGENCTLIDALLGDPQCDGFQNKKWDLFVERSKAYSNCYPYDVPDYASLRSLVASSGTLEFNNESFNWTGVTQNGTSSACIRRSNSSFFSRLNWLTHLNFKYPALNVTMPNNEQFDKLYIWGVHHPGTDKDQIFLYAQSSGRITVSTKRSQQAVIPNIGSRPRIRNIPSRISIYWTIVKPGDILLINSTGNLIAPRGYFKIRSGKSSIMRSDAPIGKCNSECITPNGSIPNDKPFQNVNRITYGACPRYVKQSTLKLATGMRNVPEKQTRGIFGAIAGFIENGWEGMVDGWYGFRHQNSEGRGQAADLKSTQAAIDQINGKLNRLIGKTNEKFHQIEKEFSEVEGRIQDLEKYVEDTKIDLWSYNAELLVALENQHTIDLTDSEMNKLFEKTKKQLRENAEDMGNGCFKIYHKCDNACIGSIRNGTYNHDVYRDEALNNRFQIKGVELKSGYKDWILWISFAISCFLLCVVLLGFIMWACQKGNIRCNICI

SEQ ID NO: 9478 - protein, 566 aa, Artificial Sequence
  derived and/or modified protein sequence (wt) from hemagglutinin__InfluenzaA__AFN19493
MKTIIALSYILCLVFAQKLPGNDNSTATLCLGHHAVPNGTIVKTITNDQIEVTNATELVQSSSTGEICNSPHQILDGENCTLIDALLGDPQCDGFQNKKWDLFVERSKAHSNCYPYDVPDYASLRSLVASSGTLEFNNESFNWTGVTQNGTSSACIRRSNNSFFSRLNWLTHLNFKYPALNVTMPNNEQFDKLYIWGVHHPGTDKDQIFLYAQASGRITVSTKRSQQTVIPNIGSRPRVRNIPSRVSIYWTIVKPGDILLINSTGNLIAPRGYFKIRSGKSSIMRSDAPIGKCNSACITPNGSIPNDKPFQNVNRITYGACPRYVKQNTLKLATGMRNVPEKQTRGIFGAIAGFIENGWEGMVDGWYGFRHQNSEGRGQAADLKSTQAAIDQINGKLNRLIGKTNEKFHQIEKEFSEVEGRIQDLEKYVEDTKIDLWSYNAELLVALENQHTIDLTDSEMNKLFEKTKKQLRENAEDMGNGCFKIYHKCDNACIGSIRNGTYDHDVYRDEALNNRFQIKGVELKSGYKDWILWISFAISCFLLCVALLGFIMWACQKGNIRCNICI

SEQ ID NO: 9479 - protein, 566 aa, Artificial Sequence
  derived and/or modified protein sequence (wt) from hemagglutinin__InfluenzaA__AFN19495
MKTIIALSYILCLVFAQKIPGNDNSTATLCLGHHAVPNGTIVKTITNDQIEVTNATELVQSSSAGEICDSPHHILDGENCTLIDALLGDPQCDGFQNKKWDLFVERSRAYSNCYPYDVPDYASLRSLVASSGTLEFNNESFNWTGVTQNGTSSACIRRSNNSFFSRLNWLTHLNFKYPALNVTMPNNEQFDKLYIWGVHHPGTDKDQIFLYAQASGRITVSTKRSQQAVIPNIGSRPRVRNIPSRISIYWTIVKPGDILLINSTGNLIAPRGYFKIRSGKSSIMRSDAPIGKCNSECITPNGSIPNDKPFQNVNRITYGACPRYVKQSTLKLATGMRNVPEKQTRGIFGAIAGFIENGWEGMMDGWYGFRHQNSEGRGQAADLKSTQAAIDQINGKLNRLIGKTNEKFHQIEKEFSEVEGRIQDLEKYVEDTKIDLWSYNAELLVALENQHTIDLTDSEMNKLFEKTKKQLRENAEDMGNGCFKIYHKCDNACIGSIRNGTYDHDVYRDEALNNRFQIKGVELKSGYKDWILWISFATSCFLLCVALLGFIMWACQKGNIRCNICI

SEQ ID NO: 9480 - protein, 566 aa, Artificial Sequence
  derived and/or modified protein sequence (wt) from hemagglutinin__InfluenzaA__AFN19497
MKTIIALSYILCLVFAQKLPENDNSTATLCLGHHAVPNGTIVKTITNDQIEVTNATELVQSSSTGEICNSPHQILDGENCTLIDALLGDPQCDGFQNKKWDLFVERSKAHSNCYPYDVPDYASLRSLVASSGTLEFNNESFNWTGVTQNGTSSACIRRSNNSFFSRLNWLTHLNFKYPALNVTMPNNEQFDKLYIWGVHHPGTDKDQIFLYAQASGRITVSTKRSQQAVIPNIGSRPRVRNIPSRVSIYWTIVKPGDILLINSTGNLIAPRGYFKIRSGKSSIMRSDAPIGKCNSTCITPNGSIPNDKPFQNVNRITYGACPRYVKQNTLKLATGMRNVPEKQTRGIFGAIAGFIENGWEGMVDGWYGFRHQNSEGRGQAADLKSTQAAIDQINGKLNRLIGKTNEKFHQIEKEFSEVEGRIQDLEKYVEDTKIDLWSYNAELLVALENQHTIDLTDSEMNKLFEKTKKQLRENAEDMGNGCFKIYHKCDNACIGSIRNGTYDHDVYRDEALNNRFQIKGVELKSGYKDWILWISFAISCFLLCVALLGFIMWACQKGNIRCNICI

SEQ ID NO: 9481 - protein, 566 aa, Artificial Sequence; identical to SEQ ID NO: 9431
  derived and/or modified protein sequence (wt) from hemagglutinin__InfluenzaA__AFN19499

SEQ ID NO: 9482 - protein, 566 aa, Artificial Sequence; identical to SEQ ID NO: 9430
  derived and/or modified protein sequence (wt) from hemagglutinin__InfluenzaA__AFN19501

SEQ ID NO: 9483 - protein, 566 aa, Artificial Sequence; identical to SEQ ID NO: 6982
  derived and/or modified protein sequence (wt) from hemagglutinin__InfluenzaA__AFN19503

SEQ ID NO: 9484 - protein, 566 aa, Artificial Sequence; identical to SEQ ID NO: 9431
  derived and/or modified protein sequence (wt) from hemagglutinin__InfluenzaA__AFN19507

SEQ ID NO: 9485 - protein, 566 aa, Artificial Sequence; identical to SEQ ID NO: 9430
  derived and/or modified protein sequence (wt) from hemagglutinin__InfluenzaA__AFN19509

SEQ ID NO: 9486 - protein, 566 aa, Artificial Sequence; identical to SEQ ID NO: 9431
  derived and/or modified protein sequence (wt) from hemagglutinin__InfluenzaA__AFN19513

SEQ ID NO: 9487 - protein, 566 aa, Artificial Sequence; identical to SEQ ID NO: 9430
  derived and/or modified protein sequence (wt) from hemagglutinin__InfluenzaA__AFN19515

SEQ ID NO: 9488 - protein, 566 aa, Artificial Sequence; identical to SEQ ID NO: 9431
  derived and/or modified protein sequence (wt) from hemagglutinin__InfluenzaA__AFN19517

SEQ ID NO: 9489 - protein, 566 aa, Artificial Sequence; identical to SEQ ID NO: 9431
  derived and/or modified protein sequence (wt) from hemagglutinin__InfluenzaA__AFN19519

SEQ ID NO: 9490 - protein, 566 aa, Artificial Sequence; identical to SEQ ID NO: 9074
  derived and/or modified protein sequence (wt) from hemagglutinin__InfluenzaA__AFN19521

SEQ ID NO: 9491 - protein, 566 aa, Artificial Sequence; identical to SEQ ID NO: 9430
  derived and/or modified protein sequence (wt) from hemagglutinin__InfluenzaA__AFN19523

SEQ ID NO: 9492 - protein, 566 aa, Artificial Sequence
  derived and/or modified protein sequence (wt) from hemagglutinin__InfluenzaA__AFN19527
MKTIIALSYTLCLVFAQKLPGNDNSTATLCLGHHAVPNGTIVKTITNDQIEVTNATELVQNSSIGEICDSPHQILDGENCTLIDALLGDPQCDGFQNKKWDLFVERSKAYSNCYPYDVPDYASLRSLVASSGTLEFNNESFNWTGVTQNGTSSACIRRSNSSFFSRLNWLTHLNFKYPALNVTMPNNEQFDKLYIWGVHHPGTDKDQIFLYAQSSGRITVSTKRSQQAVIPNIGSRPRIRNIPSRISIYWTIVKPGDILLINSTGNLIAPRGYFKIRSGKSSIMRSDAPIGKCNSECITPNGSIPNDKPFQNVNRITYGACPRYVKQSTLKLATGMRNVPEKQTRGIFGAIAGFIENGWEGMVDGWYGFRHQNSEGRGQAADLKSTQAAIDQINGKLNRLIGKTNEKFHQIEKEFSEVEGRIQDLEKYVEDTKIDLWSYNAELLVALENQHTIDLTDSEMNKLFEKTKKQLRENAEDMGNGCFKIYHKCDNACIGSIRNGTYDHDVYRDEALNNRFQIKGVELKSGYKDWILWISFAISCFLLCVALLGFIMWACQKGNIRCNICI

SEQ ID NO: 9493 - protein, 566 aa, Artificial Sequence
  derived and/or modified protein sequence (wt) from hemagglutinin__InfluenzaA__AFN19529
MKTIIALSYILCLVFAQKLPGNDNSTATLCLGHHAVPNGTIVKTITNDQIEVTNATELVQNSSIGEICDSPHQILDGENCTLIDALLGDPQCDGFQNKKWDLFVERSKAYSNCYPYDVPDYASLRSLVASSGTLEFNNESFNWTGVTQNGTSSACIRRSNSSFFSRLNWLTHLNFKYPALNVTMPNNEQFDKLYIWGVHHPGTDKDQIFLYAQSSGRITVSTKRSQQAVIPNIGSRPRIRNIPSRISIYWTIVKPGDILLINSTGNLIAPRGYFKIRSGKSSIMRSDAPIGKCNSECITPNGSIPNDKPFQNVNRITYGACPRYVKQSTLKLATGMRNVPEKQTRGIFGAIAGFIENGWEGMVDGWYGFRHQNSEGRGQAADLKSTQAAIDQINGKLNRLIGKTNEKFHQIEKEFSEVEGRIQDLEKYVEDTKIDLWSYNAELLVALENQHTIDLTDSEMNKLFEKTKKQLRENAEDMGNGCFKIYHKCDNACIGSIRNGTYDHDVYRDEALNNRFQIKGVELKSGYKDWILWISFAISCFLLCVALLGFIMWACQKGNIRCNICI

SEQ ID NO: 9494 - protein, 566 aa, Artificial Sequence; identical to SEQ ID NO: 9074
  derived and/or modified protein sequence (wt) from hemagglutinin__InfluenzaA__AFN19531

SEQ ID NO: 9495 - protein, 566 aa, Artificial Sequence; identical to SEQ ID NO: 9493
  derived and/or modified protein sequence (wt) from hemagglutinin__InfluenzaA__AFN19533

SEQ ID NO: 9496 - protein, 566 aa, Artificial Sequence
  derived and/or modified protein sequence (wt) from hemagglutinin__InfluenzaA__AFN19535
MKTIIALSYILCLVFAQKIPGNDNSTATLCLGHHAVPNGTIVKTITNDQIEVTNATELVQSSSTGEICDSPHQILDGENCTLIDALLGDPQCDGFQNKKWDLFVERSKAYSNCYPYDVPDYASLRSLVASSGTLEFNNESFNWTGVTQNGTSSACIRRSNSSFFSRLNWLTHLNFKYPALNVTMPNNEQFDKLYIWGVHHPGTDKDQIFLYAQSSGRITVSTKRSQQAVIPNIGSRPRIRNIPSRISIYWTIVKPGDILLINSTGNLIAPRGYFKIRSGKSSIMRSDAPIGKCNSECITPNGSIPNDKPFQNVNRITYGACPRYVKQSTLKLATGMRNVPEKQTRGIFGAIAGFIENGWEGMVDGWYGFRHQNSEGRGQAADLKSTQAAIDQINGKLNRLIGKTNEKFHQIEKEFSEVEGRIQDLEKYVEDTKIDLWSYNAELLVALENQHTIDLTDSEMNKLFEKTKKQLRENAEDMGNGCFKIYHKCDNACIGSIRNGTYNHDVYRDEALNNRFQIKGVELKSGYKDWILWISFAISCFLLCVALLGFIMWACQKGNIRCNICI

SEQ ID NO: 9497 - protein, 566 aa, Artificial Sequence; identical to SEQ ID NO: 9074
  derived and/or modified protein sequence (wt) from hemagglutinin__InfluenzaA__AFN19537

SEQ ID NO: 9498 - protein, 566 aa, Artificial Sequence; identical to SEQ ID NO: 9074
  derived and/or modified protein sequence (wt) from hemagglutinin__InfluenzaA__AFN19539

SEQ ID NO: 9499 - protein, 566 aa, Artificial Sequence; identical to SEQ ID NO: 9074
  derived and/or modified protein sequence (wt) from hemagglutinin__InfluenzaA__AFN19543

SEQ ID NO: 9500 - protein, 566 aa, Artificial Sequence
  derived and/or modified protein sequence (wt) from hemagglutinin__InfluenzaA__AFN19545
MKTIIALSYILCLVFAQKLPGSDNSTATLCLGHHAVPNGTIVKTITNDRIEVTNATELVQNSSIGEICDSPHQILDGENCTLIDALLGDPQCDGFKNKKWDLFVERSKAYSNCYPYDVPDYASLRSLVASSGTLEFNNESFNWTGVTQNGTSSACIRRSNNSFFSRLNWLTHLNFKYPALNVTMPNNEQFDKLYIWGVHHPGTDKDQIFLYAQSSGRITVSTKRSQQAVIPNIGSRPRIRNIPSRISIYWTIVKPGDILLINSTGNLIAPRGYFKIQSGKSSIMRSDAPIGKCKSECITPNGSIPNDKPFQNVNRITYGACPRYVKQSTLKLATGMRNVPEKQTRGIFGAIAGFIENGWEGMVDGWYGFRHQNSEGRGQAADLKSTQAAIDQINGKLNRLIGKTNEKFHQIEKEFSEVEGRIQDLEKYVEDTKIDLWSYNAELLVALENQHTIDLTDSEMNKLFEKTKKQLRENAEDMGNGCFKIYHKCDNACIGSIRNGTYDHDVYRDEALNNRFQIKGVELKSGYKDWILWISFAISCFLLCVALLGFIMWACQKGNIRCNICI

SEQ ID NO: 9501 - protein, 566 aa, Artificial Sequence; identical to SEQ ID NO: 9074
  derived and/or modified protein sequence (wt) from hemagglutinin__InfluenzaA__AFN19547

SEQ ID NO: 9502 - protein, 566 aa, Artificial Sequence
  derived and/or modified protein sequence (wt) from hemagglutinin__InfluenzaA__AFN19549
MKTIIALSYILCLVFAQKLPGNDNSTATLCLGHHAVPNGTIVKTITNDQIEVTNATELVQSSSKGEICNSPHQILDGGNCTLIDALLGDPQCDGFQNKKWDLFVERSKAHSNCYPYDVPDYASLRSLVASSGTLEFNNESFNWTGVTQNGTSSACMRRSNNSFFSRLNWLTHLNFKYPALNVTMPNNEQFDKLYIWGVHHPGTDKDQIFLYAQASGRITVSTKRSQQAVIPNIGSRPRVRNIPSRVSIYWTIVKPGDILLINSTGNLIAPRGYFKIRSGKSSIMRSDAPIGKCNSACITPNGSIPNDKPFQNVNRITYGACPRYVKQNTLKLATGMRNVPEKQTRGIFGAIAGFIENGWEGMVDGWYGFRHQNSEGRGQAADLKSTQAAIDQINGKLNRLIGKTNEKFHQIEKEFSEVEGRIQDIEKYVEDTKIDLWSYNAELLVALENQHTIDLTDSEMNKLFEKTKKQLRENAEDMGNGCFKIYHKCDNACIGSIRNGTYDHDVYRDEALNNRFQIKGVELKSGYKDWILWISFAISCFLLCVALLGFIMWACQKGNIRCNICI

SEQ ID NO: 9503 - protein, 566 aa, Artificial Sequence
  derived and/or modified protein sequence (wt) from hemagglutinin__InfluenzaA__AFN19551
MKTIIALSYILCLVFAQKIPGNDNSTATLCLGHHAVPNGTIVKTITNDQIEVTNATELVQSSSTGEICDSPHQILDGENCTLIDALLGDPHCDGFQNKKWDLFVERSKAYSNCYPYDVPDYASLRSLVASSGTLEFNNESFNWTGVTQNGTSSACIRRSNSSFFSRLNWLTHLNFKYPALNVTMPNNEQFDKLYIWGVHHPGTDKDQIFLYAQSSGRITVSTKRSQQAVIPNIGSRPRIRNIPSRISIYWTIVKPGDILLINSTGNLIAPRGYFKIRSGKSSIMRSDAPIGKCNSECITPNGSIPNDKPFQNVNRITYGACPRYVKQSTLKLATGMRNVPEKQTRGIFGAIAGFIENGWEGMVDGWYGFRHQNSEGRGQAADLKSTQAAIDQINGKLNRLIGKTNEKFHQIEKEFSEVEGRIQDLEKYVEDTKIDLWSYNAELLVALENQHTIDLTDSEMNKLFEKTKKQLRENAEDMGNGCFKIYHKCDNACIGSIRNGTYNHDVYRDEALNNRFQIKGVELKSGYKDWILWISFAISCFLLCVALLGFIMWACQKGNIRCNICI

SEQ ID NO: 9504 - protein, 566 aa, Artificial Sequence; identical to SEQ ID NO: 9453
  derived and/or modified protein sequence (wt) from hemagglutinin__InfluenzaA__AFN19553

SEQ ID NO: 9505 - protein, 566 aa, Artificial Sequence; identical to SEQ ID NO: 9453
  derived and/or modified protein sequence (wt) from hemagglutinin__InfluenzaA__AFN19555

SEQ ID NO: 9506 - protein, 566 aa, Artificial Sequence; identical to SEQ ID NO: 9074
  derived and/or modified protein sequence (wt) from hemagglutinin__InfluenzaA__AFN19557

SEQ ID NO: 9507 - protein, 566 aa, Artificial Sequence; identical to SEQ ID NO: 9453
  derived and/or modified protein sequence (wt) from hemagglutinin__InfluenzaA__AFN19559

SEQ ID NO: 9508 - protein, 566 aa, Artificial Sequence; identical to SEQ ID NO: 9461
  derived and/or modified protein sequence (wt) from hemagglutinin__InfluenzaA__AFN19561

SEQ ID NO: 9509 - protein, 566 aa, Artificial Sequence
  derived and/or modified protein sequence (wt) from hemagglutinin__InfluenzaA__AFN19563
MKTIIALSYILCLVFAQKLPGNDNSTATLCLGHHAVPNGTIVKTITNDRIEVTNATELVQNSSIGEICDSPHQILDGENCTLIDALLGDPQCDGFQNKKWDLFVERSKAYSNCYPYDVPDYASLRSLVASSGTLEFNNESFNWTGVTQNGTSSACIRRSNNSFFSRLNWLTHLNFKYPALNVTMPNNEQFDKLYIWGVHHPGTDKDQIFLYAQSSGRITVSTKRSQQAVIPNIGSRPRIRNIPSRISIYWTIVKPGDILLINSTGNLIAPRGYFKIRSGKSSIMRSDAPIGKCKSECITPNGSIPNDKPFQNVNRITYGACPRYVKQSTLKLATGMRNVPEKQTRGIFGAIAGFIENGWEGMVDGWYGFRHQNSEGRGQAADLKSTQAAIDQINGKLNRLIGKTNEKFHQIEKEFSEVEGRIQDLEKYVEDTKIDLWSYNAELLVALENQHTIDLTDSEMNKLFEKTKKQLRENAEDMGNGCFKIYHKCDNACIGSIRNGTYDHDVYRDEALNNRFQIKGVELKSGYKDWILWISFATSCFLLCVALLGFIMWACQKGNIRCNICI

SEQ ID NO: 9510 - protein, 566 aa, Artificial Sequence; identical to SEQ ID NO: 9431
  derived and/or modified protein sequence (wt) from hemagglutinin__InfluenzaA__AFN19565

SEQ ID NO: 9511 - protein, 566 aa, Artificial Sequence
  derived and/or modified protein sequence (wt) from hemagglutinin__InfluenzaA__AFN19567
MKTIIALSYILCLVFAQKIPGNDNSTATLCLGHHAVPNGTIVKTITNDRIEVTNATELVQNSSIGEICDSPHQILDGENCTLIDALLGDPQCDGFQNKKWDLFVERSKAYSNCYPYDVPDYASLRSLVASSGTLEFNNESFNWTGVTQNGTSSACIRRSNNSFFSRLNWLTHLNFKYPALNVTMPNNEQFDKLYIWGVHHPGTDKDQIFLYAQSSGRITVSTKRSQQAVIPNIGSRPRIRNIPSRISIYWTIVKPGDILLINSTGNLIAPRGYFKIRSGKSSIMRSDAPIGKCKSECITPNGSIPNDKPFQNVNRITYGACPRYVKQSTLKLATGMRNVPEKQTRGIFGAIAGFIENGWEGMVDGWYGFRHQNSEGRGQAADLKSTQAAIDQINGKLNRLIGKTNEKFHQIEKEFSEVEGRIQDLEKYVEDTKIDLWSYNAELLVALENQHTIDLTDSEMNKLFEKTKKQLRENAEDMGNGCFKIYHKCDNACIGSIRNGTYDHDVYRDEALNNRFQIKGVELKSGYKDWILWISFAISCFLLCVALLGFIMWACQKGNIRCNICI

SEQ ID NO: 9512 - protein, 566 aa, Artificial Sequence; identical to SEQ ID NO: 9074
  derived and/or modified protein sequence (wt) from hemagglutinin__InfluenzaA__AFN19569

SEQ ID NO: 9513 - protein, 566 aa, Artificial Sequence
  derived and/or modified protein sequence (wt) from hemagglutinin__InfluenzaA__AFN19571
MKTIIALSYILCLVFAQKLPGNDNSTATLCLGHHAVPNGTIVKTITNDQIEVTNATELVQSSSTGEICDSPHQILDGENCTLIDALLGDPQCDGFQNKKWDLFVERSKAYSNCYPYDVPDYASLRSLVASSGTLEFNNESFNWTGVTQNGTSSACIRRSNSSFFSRLNWLTHLNFKYPALNVTMPNNEQFDKLYIWGVHHPGTDKDQIFLYSQSSGRITVSTKRSQQAVIPNIGSRPRIRNIPSRISIYWTIVKPGDILLINSTGNLIAPRGYFRIRSGKSSIMRSDAPIGKCNSECITPNGSIPNDKPFQNVNRITYGPCPRYVKQSTLKLATGMRNVPEKQTRGIFGAIAGFIENGWEGMVDGWYGYRHQNSEGRGQAADLKSTQAAIDQINGKLNRLIGKTNEKFHQIEKEFSEVEGRIQDLEKYVEDTKIDLWTYNAELLVALENQHTIDLTDSEMNKLFEKTKKQLRENAEDMGNGCFKIYHKCDNACIGSIRNGTYNHDVYRDEALNNRFQIKGVELKSGYKDWILWISFAISCFLLCVALLGFIMWACQKGNIRCNICI

SEQ ID NO: 9514 - protein, 566 aa, Artificial Sequence
  derived and/or modified protein sequence (wt) from hemagglutinin__InfluenzaA__AFN19573
MKTIIALSYILCLVFAQKLPGNDNSTATLCLGHHAVPNGTIVKTITNDQIEVTNATELVQSSSTGKICDSPHQILDGKNCTLIDALLGDPQCDGFQNKKWDLFVERSKAYSNCYPYDVPDYASLRSLVASSGTLEFNNESFNWTGVTQNGTSSACIRRSKNSFFSRLNWLTHLNFKYSALNVTMPNKEQFDKLYIWGVHHPGTDKDQISLYAQASGRITVSTKRSQQTVIPNIGSRPRVRNIPSRISIYWTIVKPGDILLINSTGNLIAPRGYFKMQSGKSSIMRSDAPIGKCNSECITPNGSIPNDKPFQNVNRITYGACPRYVKQNTLKLATGMRNVPEKQTRGIFGAIAGFIENGWEGMVDGWYGFRHQNSEGRGQAADLKSTQAAIDQINGKLNRLIGKTNEKFHQIEKEFSEVEGRIQDLEKYVEDTKIDLWSYNAELLVALENQHTIDLTDSEMNKLFEKTKKQLRENAEDMGNGCFKIYHKCDNACIGSIRNGTYDHDVYRDEALNNRFQIKGVELKSGYKDWILWISFAISCFLLCVALLGFIMWACQKGNIRCNICI

SEQ ID NO: 9515 - protein, 566 aa, Artificial Sequence
  derived and/or modified protein sequence (wt) from hemagglutinin__InfluenzaA__AFN19575
MKTIIALSYILCLVFAQKLPGNDNSTATLCLGHHAVPNGTIVKTITNDQIEVTNATELVQSSSTGEICDNPHQILDGENCTLIDALLGDPQCDGFQNKKWDLFVERSKAYSNCYPYDVPDYASLRSLVASSGTLEFNNESFNWTGVTQNGTSSACIRRSNNSFFSRLNWLTHLNFKYPALNVTMPNNEQFDKLYIWGVHHPGTDKDQIFLYAQSSGRITVSTKRSQQAVIPNIGSRPRVRNIPSRISIYWTIVKPGDILLINSTGNLIAPRGYFKIRSGKSSIMRSDAPIGKCNSECITPNGSIPNDKPFQNVNRITYGACPRYVKQSTLKLATGMRNVPEKQTRGIFGAIAGFIENGWEGMVDGWYGFRHQNSEGRGQAADLKSTQAAIDQINGKLNRLIGKTNEKFHQIEKEFSEVEGRIQDLEKYVEDTKIDLWSYNAELLVALENQHTIDLTDSEMNKLFEKTKKQLRENAEDMGNGCFKIYHKCDNACIGSIRNGTYDHDVYRDEALNNRFQIKGVELKSGYKDWILWISFAISCFLLCVALLGFIMWACQKGNIRCNICI

SEQ ID NO: 9516 - protein, 566 aa, Artificial Sequence; identical to SEQ ID NO: 9430
  derived and/or modified protein sequence (wt) from hemagglutinin__InfluenzaA__AFN19577

SEQ ID NO: 9517 - protein, 566 aa, Artificial Sequence; identical to SEQ ID NO: 9430
  derived and/or modified protein sequence (wt) from hemagglutinin__InfluenzaA__AFN19579

SEQ ID NO: 9518 - protein, 566 aa, Artificial Sequence; identical to SEQ ID NO: 9430
  derived and/or modified protein sequence (wt) from hemagglutinin__InfluenzaA__AFN19581

SEQ ID NO: 9519 - protein, 566 aa, Artificial Sequence; identical to SEQ ID NO: 9430
  derived and/or modified protein sequence (wt) from hemagglutinin__InfluenzaA__AFN19583

SEQ ID NO: 9520 - protein, 566 aa, Artificial Sequence
  derived and/or modified protein sequence (wt) from hemagglutinin__InfluenzaA__AFN19587
MKTIIALSYILCLVFAQKLPENDNSTATLCLGHHAVPNGTIVKTITNDQIEVTNATELVQSSSTGEICDSPHQILDGVNCTLIDALLGDPQCDGFQNKKWDLFVERSKAYSNCYPYDVPDYASLRSLVASSGTLEFNNESFNWTGVTQNGTSSACIRRSNSSFFSRLNWLTHLNFKYPALNVTMPNNEQFDKLYIWGVHHPGTDKDQIFLYAQSSGRITVSTKRSQQAVIPNIGSRPRIRNIPSRISIYWTIVKPGDILLINSTGNLIAPRGYFKIRSGKSSIMRSDAPIGKCNSECITPNGSIPNDKPFQNVNRITYGACPRYVKQSTLKLATGMRNVPEKQTRGIFGAIAGFIENGWEGMVDGWYGFRHQNSEGRGQAADLKSTQAAIDQINGKLNRLIGKTNEKFHQIEKEFSEVEGRIQDLEKYVEDTKIDLWSYNAELLVALENQHTIDLTDSEMNKLFEKTKKQLRENAEDMGNGCFKIYHECDNACIGSIRNGTYNHDVYRDEALNNRFQIKGVELKSGYKDWILWISFAISCFLLCVALLGFIMWACQKGNIRCNICI

SEQ ID NO: 9521 - protein, 566 aa, Artificial Sequence; identical to SEQ ID NO: 9430
  derived and/or modified protein sequence (wt) from hemagglutinin__InfluenzaA__AFN19589

SEQ ID NO: 9522 - protein, 566 aa, Artificial Sequence
  derived and/or modified protein sequence (wt) from hemagglutinin__InfluenzaA__AFN19591
MKTIIALSYILCLVFAQKLPGNDNSTATLCLGHHAVPNGTIVKTITNDQIEVTNATELVQNSSIGEICDSPHQILDGENCTLIDALLGDPQCDGFQNKKWDLFVERSKAYSNCYPYDVPDYASLRSLVASSGTLEFNNESFNWTGVTQNGTSSACMRRSNSSFFSRLNWLTHLNFKYPALNVTMPNNEQFDKLYIWGVHHPGTDKDQIFLYAQSSGRITVSTKRSQQAVIPNIGSRPRIRNIPSRISIYWTIVKPGDILLINSTGNLIAPRGYFKIRSGKSSIMRSDAPIGKCNSECITPNGSIPNDKPFQNVNRITYGACPRYVKQSTLKLATGMRNVPEKQTRGIFGAIAGFIENGWEGMVDGWYGFRHQNSEGRGQAADLKSTQAAIDQINGKLNRLIGKTNEKFHQIEKEFSEVEGRIQDLEKYVEDTKIDLWSYNAELLVALENQHTIDLTDSEMNKLFEKTKKQLRENAEDMGNGCFKIYHKCDNACIGSIRNGTYDHDVYRDEALNNRFQIKGVELKSGYKDWILWISFAISCFLLCVALLGFIMWACQNGNIRCNICI

SEQ ID NO: 9523 - protein, 566 aa, Artificial Sequence; identical to SEQ ID NO: 9430
  derived and/or modified protein sequence (wt) from hemagglutinin__InfluenzaA__AFN19593

SEQ ID NO: 9524 - protein, 566 aa, Artificial Sequence; identical to SEQ ID NO: 9431
  derived and/or modified protein sequence (wt) from hemagglutinin__InfluenzaA__AFN19595

SEQ ID NO: 9525 - protein, 566 aa, Artificial Sequence; identical to SEQ ID NO: 9431
  derived and/or modified protein sequence (wt) from hemagglutinin__InfluenzaA__AFN19599

SEQ ID NO: 9526 - protein, 566 aa, Artificial Sequence; identical to SEQ ID NO: 9493
  derived and/or modified protein sequence (wt) from hemagglutinin__InfluenzaA__AFN19601

SEQ ID NO: 9527 - protein, 566 aa, Artificial Sequence; identical to SEQ ID NO: 9074
  derived and/or modified protein sequence (wt) from hemagglutinin__InfluenzaA__AFN19607

SEQ ID NO: 9528 - protein, 566 aa, Artificial Sequence; identical to SEQ ID NO: 9430
  derived and/or modified protein sequence (wt) from hemagglutinin__InfluenzaA__AFN19609

SEQ ID NO: 9529 - protein, 566 aa, Artificial Sequence
  derived and/or modified protein sequence (wt) from hemagglutinin__InfluenzaA__AFN19611
MKTIIALSYILCLVFAQKLPGNDNSTATLCLGHHAVPNGTIVKTITNDQIEVTNATELVQNSSIGEICDSPHQILDGENCTLIDALLGDPQCDGFQNKKWDLFVERSKAYSNCYPYDVPDYASLRSLVASSGTLEFNNESFNWTGVTQNGTSSACIRRSNNSFFSRLNWLTHLNFKYPALNVTMPNNEQFDKLYIWGVHHPGTDKDQIFLYAQSSGRITVSTKRSQQAVIPNIGSRPRIRNIPSRISIYWTIVEPGDILLINSTGNLIAPRGYFKIRSGKSSIMRSDAPIGKCNSECITPNGSIPNDKPFQNVNRITYGACPRYVKQSTLKLATGMRNVPEKQTRGIFGAIAGFIENGWEGMVDGWYGFRHQNSEGRGQAADLKSTQAAIDQINGKLNRLIGKTNEKFHQIEKEFSEVEGRIQDLEKYVEDTKIDLWSYNAELLVALENQHTIDLTDSEMNKLFEKTKKQLRENAEDMGNGCFKIYHKCDNACIGSIRNGTYDHDVYRDEALNNRFQIKGVELKSGYKDWILWISFAISCFLLCVALLGFIMWACQKGNIRCNICI

SEQ ID NO: 9530 - protein, 566 aa, Artificial Sequence; identical to SEQ ID NO: 9453
  derived and/or modified protein sequence (wt) from hemagglutinin__InfluenzaA__AFN19613

SEQ ID NO: 9531 - protein, 566 aa, Artificial Sequence; identical to SEQ ID NO: 9431
  derived and/or modified protein sequence (wt) from hemagglutinin__InfluenzaA__AFN19617

SEQ ID NO: 9532 - protein, 566 aa, Artificial Sequence
  derived and/or modified protein sequence (wt) from hemagglutinin__InfluenzaA__AFN19619
MKTIIALSHILCLVFAQKLPGNDNSTATLCLGHHAVPNGTIVKTITNDQIEVTNATELVQSSSTGEICDSPHQILDGENCTLIDALLGDPQCDGFQNKKWDLFVERSKAYSNCYPYDVPDYASLRSLVASSGTLEFNNESFNWTGVTQNGTSSACIRRSNSSFFSRLNWLTHLNFKYPALNVTMPNNEQFDKLYIWGVHHPGTDKDQIFLYAQSSGRITVSTKRSQQAVIPNIGSKPRIRNIPSRISIYWTIVKPGDILLINSTGNLIAPRGYFKIRSGKSSIMRSDAPIGKCNSECITPNGSIPNDKPFQNVNRITYGACPRYVKQSTLKLATGMRNVPEKQTRGIFGAIAGFIENGWEGMVDGWYGFRHQNSEGRGQAADLKSTQAAIDQINGKLNRLIGKTNEKFHQIEKEFSEVEGRIQDLEKYVEDTKIDLWSYNAELLVALENQHTIDLTDSEMNKLFEKTKKQLRENAEDMGNGCFKIYHKCDNACIGSIRNGTYNHDVYRDEALNNRFQIKGVELKSGYKDWILWISFAISCFLLCVVLLGFIMWACQKGNIRCNICI

SEQ ID NO: 9533 - protein, 566 aa, Artificial Sequence; identical to SEQ ID NO: 9493
  derived and/or modified protein sequence (wt) from hemagglutinin__InfluenzaA__AFN19623

SEQ ID NO: 9534 - protein, 566 aa, Artificial Sequence; identical to SEQ ID NO: 9430
  derived and/or modified protein sequence (wt) from hemagglutinin__InfluenzaA__AFN19629

SEQ ID NO: 9535 - protein, 566 aa, Artificial Sequence
  derived and/or modified protein sequence (wt) from hemagglutinin__InfluenzaA__AFN19631
MKTIIALSYILCLVFAQKLPENDYSTATLCLGHHAVPNGTIVKTITNDQIEVTNATELVQSSSTGEICDSPHQILDGINCTLIDALLGDPQCDGFQNKKWDLFVERSKAYSNCYPYDVPDYASLRSLVASSGTLEFNNESFNWTGVTQNGTSSACIRRSTSSFFSRLNWLTHLNFKYPALNVTMPNNEQFDKLYIWGVHHPGTDKDQIFLYAQPSGRITVSTKRSQQAVIPNIGSRPRIRNIPSRISIYWTIVKPGDILLINSTGNLIAPRGYFKIRSGKSSIMRSDAPIGKCNSECITPNGSIPNDKPFQNVNRITYGACPRYVKQSTLKLATGMRNVPEKQTRGIFGAIAGFIENGWEGMVDGWYGFRHQNSEGRGQAADLKSTQAAIDQINGKLNRLIGKTNEKFHQIEKEFSEVEGRIQDLEKYVEDTKIDLWSYNAELLVALENQHTIDLTDSEMNKLFEKTKKQLRENAEDMGNGCFKIYHKCDNACIGSIRNGTYNHDVYRDEALNNRFQIKGVELKSGYKDWILWISFAISCFLLCVALLGFIMWACQKGNIRCNICI

SEQ ID NO: 9536 - protein, 566 aa, Artificial Sequence
  derived and/or modified protein sequence (wt) from hemagglutinin__InfluenzaA__AFN19633
MKTIIALSYILCLVFAQKLPGNDNSTATLCLGHHAVPNGTIVKTITNDQIEVTNATELVQSSSTGEICDSPHQILDGENCTLIDALLGDPQCDGFQNKKWDLFVERSKAYSNCYPYDVPDYASLRSLVASSGTLEFNNESFNWTGVTQNGTSSACIRRSNSSFFSRLNWLTHLNFKYPALNVTMPNNEQFDKLYIWGVHHPGTDKDQIFLYAQSSGRITISTKRSQQAVIPNIGSRPRIRNIPSRISIYWTIVKPGDILLINSTGNLIAPRGYFKIRSGKSSIMRSDAPIGKCNSECITPNGSIPNDKPFQNVNRITYGACPRYVKQSTLKLATGMRNVPEKQTRGIFGAIAGFIENGWEGMVDGWYGFRHQNSEGRGQAADLKSTQAAIDQINGKLNRLIGKTNEKFHQIEKEFSEVEGRIQDLEKYVEDTKIDLWSYNAELLVALENQHTIDLTDSEMNKLFEKTKKQLRENAEDMGNGCFKIYHKCDNACIGSIRNGTYNHDVYRDEALNNRFQIKGVELKSGYKDWILWISFAISCFLLCVALLGFIMWACQKGNIRCNICI

SEQ ID NO: 9537 - protein, 566 aa, Artificial Sequence
  derived and/or modified protein sequence (wt) from hemagglutinin__InfluenzaA__AFN19635
MKTIIALSYILCLVFAQKLPENDNSTATLCLGHHAVPNGTIVKTITNDQIEVTNATELVQSSSTGEICDSPHQILDGINCTLIDALLGDPQCDGFQNKKWDLFVERSKAYSNCYPYDVPDYASLRSLVASSGTLEFNNESFNWTGVTQNGTSSACIRRSNSSFFSRLNWLTHLNFKYPALNVTMPNNEQFDKLYIWGVHHPGTDKDQIFLYAQPSGRITVSTKRSQQAVIPNIGSRPRIRNIPSRISIYWTIVKPGDILLINSTGNLIAPRGYFKIRSGKSSIMRSDAPIGKCNSECITPNGSIPNDKPFQNVNRITYGACPRYVKQSTLKLATGMRNVPEKQTRGIFGAIAGFIENGWEGMVDGWYGFRHQNSEGRGQAADLKSTQAAIDQINGKLNRLIGKTNEKFHQIEKEFSEVEGRIQDLEKYVEDTKIDLWSYNAELLVALENQHTIDLTDSEMNKLFEKTKKQLRENAEDMGNGCFKIYHKCDNACIGSIRNGTYNHDVYRDEALNNRFQIKGVELKSGYKDWILWISFAISCFLLCVALLGFIMWACQKGNIRCNICI

SEQ ID NO: 9538 - protein, 566 aa, Artificial Sequence; identical to SEQ ID NO: 9537
  derived and/or modified protein sequence (wt) from hemagglutinin__InfluenzaA__AFN19637

SEQ ID NO: 9539 - protein, 566 aa, Artificial Sequence; identical to SEQ ID NO: 9074
  derived and/or modified protein sequence (wt) from hemagglutinin__InfluenzaA__AFN19639

SEQ ID NO: 9540 - protein, 566 aa, Artificial Sequence; identical to SEQ ID NO: 9493
  derived and/or modified protein sequence (wt) from hemagglutinin__InfluenzaA__AFN19641

SEQ ID NO: 9541 - protein, 566 aa, Artificial Sequence; identical to SEQ ID NO: 9537
  derived and/or modified protein sequence (wt) from hemagglutinin__InfluenzaA__AFN19643

SEQ ID NO: 9542 - protein, 566 aa, Artificial Sequence; identical to SEQ ID NO: 9074
  derived and/or modified protein sequence (wt) from hemagglutinin__InfluenzaA__AFN19645

SEQ ID NO: 9543 - protein, 566 aa, Artificial Sequence
  derived and/or modified protein sequence (wt) from hemagglutinin__InfluenzaA__AFN19647
MKTIIALSYILCLVFAQKLPENDNSTATLCLGHHAVPNGTIVKTITNDQIEVTNATELVQSSSTGEICDSPHQILDGVNCTLIDALLGDPQCDGFQNKKWDLFVERSKAYSNCYPYDVPDYASLKSLVASSGTLEFNNESFNWTGVTQNGTSSACIRRSNSSFFSRLNWLTHLNFKYPALNVTMPNNEQFDKLYIWGVHHPGTDKDQIFLYAQSSGRITVSTKRSQQAVIPNIGSRPRIRNIPSRISIYWTIVKPGDILLINSTGNLIAPRGYFKIQSGKSSIMRSDAPIGKCNSECITPNGSIPNDKPFQNVNRITYGACPRYVKQSTLKLATGMRNVPEKQTRGIFGAIAGFIENGWEGMVDGWYGFRHQNSEGRGQAADLKSTQAAIDQINGKLNRLIGKTNEKFHQIEKEFSEVEGRIQDLEKYVEDTKIDLWSYNAELLVALENQHTIDLTDSEMNKLFEKTKKQLRENAEDMGNGCFKIYHKCDNACIGSIRNGTYNHDVYRDEALNNRFQIKGVELKSGYKDWILWISFAISCFLLCVALLGFIMWACQKGNIRCNICI

SEQ ID NO: 9544 - protein, 566 aa, Artificial Sequence
  derived and/or modified protein sequence (wt) from hemagglutinin__InfluenzaA__AFN19649
MKTIIALSYILCLVFAQKLPGNDNSTATLCLGHHAVPNGTIVKTITNDQIEVTNATELVQNSSISEICDSPHQILDGENCTLIDALLGDPQCDGFQNKKWDLFVERSKAYSNCYPYDVPDYASLRSLVASSGTLEFNNESFNWTGVTQNGTSSACIRRSNSSFFSRLNWLTHLNFKYPALNVTMPNNEQFDKLYIWGVHHPGTDKDQIFLYAQSSGRITVSTKRSQQAVIPNIGSRPRIRNIPSRISIYWTIVKPGDILLINSTGNLIAPRGYFKIRSGKSSIMRSDAPIGKCNSECITPNGSIPNDKPFQNVNRITYGACPRYVKQSTLKLATGMRNVPEKQTRGIFGAIAGFIENGWEGMMDGWYGFRHQNSEGRGQAADLKSTQAAIDQINGKLNRLIGKTNEKFHQIEKEFSEVEGRIQDLEKYVEDTKIDLWSYNAELLVALENQHTIDLTDSEMNKLFEKTKKQLRENAEDMGNGCFKIYHKCDNACIGSIRNGTYDHDVYRDEALNNRFQIKGVELKSGYKDWILWISFAISCFLLCVALLGFIMWACQKGNIRCNICI

SEQ ID NO: 9545 - protein, 566 aa, Artificial Sequence; identical to SEQ ID NO: 9537
  derived and/or modified protein sequence (wt) from hemagglutinin__InfluenzaA__AFN19653

SEQ ID NO: 9546 - protein, 566 aa, Artificial Sequence; identical to SEQ ID NO: 9453
  derived and/or modified protein sequence (wt) from hemagglutinin__InfluenzaA__AFN19663

SEQ ID NO: 9547 - protein, 566 aa, Artificial Sequence; identical to SEQ ID NO: 9461
  derived and/or modified protein sequence (wt) from hemagglutinin__InfluenzaA__AFN19665

SEQ ID NO: 9548 - protein, 566 aa, Artificial Sequence
  derived and/or modified protein sequence (wt) from hemagglutinin__InfluenzaA__AFN19667
MKTIIALSYILCLVFAQKLPGNDNSTATLCLGHHAVPNGTIVKTITNDQIEVTNATELVQNSSIGEICDSPHQILDGENCTLIDALLGDPQCDGFQNKKWDLFVERSKAYSNCYPYDVPDYASLRSLVASSGTLEFNNESFNWTGVTQNGTSSACMRRSNSSFFSRLNWLTHLNFKYPALNVTMPNNEQFDKLYIWGVHHPGTDKDQIFLYAQSSGRITVSTKRSQQAVIPNIGSRPRIRNIPSRISIYWTIVKPGDILLINSTGNLIAPRGYFKIRSGKSSIMRSDAPIGKCNSECITPNGSIPNDKPFQNVNRITYGACPRYVKQSTLKLATGMRNVPEKQTRGIFGAIAGFIENGWEGMVDGWYGFRHQNSEGRGQAADLKSTQAAIDQINGKLNRLIGKTNEKFHQIEKEFSEVEGRIQDLEKYVEDTKIDLWSYNAELLVALENQHTIDLTDSEMNKLFEKTKKQLRENAEDMGNGCFKIYHKCDNACIGSIRNGTYDHDVYRDEALNNRFQIKGVELKSGYKDWILWISFAISCFLLCVALLGFIMWACQKGNIRCNICI

SEQ ID NO: 9549 - protein, 566 aa, Artificial Sequence
  derived and/or modified protein sequence (wt) from hemagglutinin__InfluenzaA__AFN19669
MKTIIALSYILCMVFAQKLPGNDNSTATLCLGHHAVPNGTIVKTITNDQIEVTNATELVQNSSIGEICDSPHQILDGENCTLIDALLGDPQCDGFQNKKWDLFVERSKAYSNCYPYDVPNYASLRSLVASSGTLEFNNESFNWTGVTQNGTSSACMRRSNSSFFSRLNWLTHLNFKYPALNVTMPNNEQFDKLYIWGVHHPGTDKDQIFLYAQSSGRITVSTKRSQQAVIPNIGSRPRIRNIPSRISIYWTIVKPGDILLINSTGNLIAPRGYFKIRSGKSSIMRSDAPIGKCNSECITPNGSIPNDKPFQNVNRITYGACPRYVKQSTLKLATGMRNVPEKQTRGIFGAIAGFIENGWEGMVDGWYGFRHQNSEGRGQAADLKSTQAAIDQINGKLNRLIGKTNEKFHQIEKEFSEVEGRIQDLEKYVEDTKIDLWSYNAELLVALENQHTIDLTDSEMNKLFEKTKKQLRENAEDMGNGCFKIYHKCDNACIGSIRNGTYDHDVYRDEALNNRFQIKGVELKSGYKDWILWISFAISCFLLCVALLGFIMWACQKGNIRCNICI

SEQ ID NO: 9550 - protein, 566 aa, Artificial Sequence
  derived and/or modified protein sequence (wt) from hemagglutinin__InfluenzaA__AFN19671
MKTIIALSYILCLVFAQKLPGNDNSTATLCLGHHAVPNGTIVKTITNDRIEVTNATELVQNSSIGEICDSPHQILDGENCTLIDALLGDPQCDGFQNKKWDLFVERSKAYSNCYPYDVPDYASLRSLVASSGTLEFNNESFNWTGVTQNGTSSACIRRSNNSFFSRLNWLTHLNFKYPALNVTMPNNEQFDKLYIWGVHHPGTDKDQIFLYAQSSGRITVSTKRSQQAVIPNIGSRPRIRNIPSRISIYWTIVKPGDILLINSTGNLIAPRGYFKIRSGKSSIMRSDAPIGKCKSECITPNGSIPNDKPFQNVNRITYGACPRYVKQSTLKLATGMRNVPEKQTRGIFGAIAGFIENGWEGMVDGWYGFRHQNSEGRGQAADLKSTQAAIDQINGKLNRLIGKTNEKFHQIEKEFSEVEGRIQDLEKYVEDTKIDLWSYNAELLVALENQHTIDLTDSEMNKLFEKTKKQLRENAEDMGNGCFKIYHKCDNACIESIRNGTYDHDVYRDEALNNRFQIKGVELKSGYKDWILWISFAISCFLLCVALLGFIMWACQKGNIRCNICI

SEQ ID NO: 9551 - protein, 566 aa, Artificial Sequence; identical to SEQ ID NO: 9074
  derived and/or modified protein sequence (wt) from hemagglutinin__InfluenzaA__AFN19674

SEQ ID NO: 9552 - protein, 566 aa, Artificial Sequence; identical to SEQ ID NO: 9074
  derived and/or modified protein sequence (wt) from hemagglutinin__InfluenzaA__AFN19676

SEQ ID NO: 9553 - protein, 566 aa, Artificial Sequence; identical to SEQ ID NO: 9461
  derived and/or modified protein sequence (wt) from hemagglutinin__InfluenzaA__AFN19678

SEQ ID NO: 9554 - protein, 566 aa, Artificial Sequence
  derived and/or modified protein sequence (wt) from hemagglutinin__InfluenzaA__AFN19682
MKTIIALSYILCLVFAQKLPGNDNSTATLCLGHHAVPNGTIVKTITNDQIEVTNATELVQNSSIGEICDSPHQILDGENCTLIDALLGDPQCDGFQNKKWDLFVERSKAYSNCYPYDVPNYASLRSLVASSGTLEFNNESFNWTGVTQNGTSSACMRRSNSSFFSRLNWLTHLNFKYPALNVTMPNNEQFDKLYIWGVHHPGTDKDQIFLYAQSSGRITVSTKRSQQAVIPNIGSRPRIRNIPSRISIYWTIVKPGDILLINSTGNLIAPRGYFKIRSGKSSIMRSDAPIGKCNSECITPNGSIPNDKPFQNVNRITYGACPRYVKQSTLKLATGMRNVPEKQTRGIFGAIAGFIENGWEGMVDGWYGFRHQNSEGRGQAADLKSTQAAIDQINGKLNRLIGKTNEKFHQIEKEFSEVEGRIQDLEKYVEDTKIDLWSYNAELLVALENQHTIDLTDSEMNKLFEKTKKQLRENAEDMGNGCFKIYHKCDNACIGSIRNGTYDHDVYRDEALNNRFQIKGVELKSGYKDWILWISFAISCFLLCVALLGFIMWACQKGNIKCNICI

SEQ ID NO: 9555 - protein, 566 aa, Artificial Sequence
  derived and/or modified protein sequence (wt) from hemagglutinin__InfluenzaA__AFN19684
MKTIIALSYILCLAFAQKLPGNDNSTATLCLGHHAVPNGTIVKTITNDQIEVTNATELVQSSSTGEICDSPHQILDGENCTLIDALLGDPQCDGFQNKKWDLFVERSKAYSNCYPYDVPDYASLRSLVASSGTLEFNNESFNWTGVTQNGTSSACIRGSNSSFFSRLNWLTHLNFKYPALNVTMPNNEQFDKLYIWGVHHPGTDKDQIFLYAQSSGRITVSTKRSQQAVIPNIGSRPRIRNIPSRISIYWTIVKPGDILLINSTGNLIAPRGYFKIRSGKSSIMRSDAPIGKCNSECITPNGSIPNDKPFQNVNRITYGACPRYVKQSTLKLATGMRNVPEKQTRGIFGAIAGFIENGWEGMVDGWYGFRHQNSEGRGQAADLKSTQAAIDQINGKLNRLIGKTNEKFHQIEKEFSEVEGRIQDLEKYVEDTKIDLWSYNAELLVALENQHTIDLTDSEMNKLFEKTKKQLRENAEDMGNGCFKIYHKCDNACIGSIRNGTYNHNVYRDEALNNRFQIKGVELKSGYKDWILWISFAISCFLLCVALLGFIMWACQKGNIRCNICI

SEQ ID NO: 9556 - protein, 566 aa, Artificial Sequence
  derived and/or modified protein sequence (wt) from hemagglutinin__InfluenzaA__AFN19686
MKTIIALSYILCLAFAQKLPGNDNSTATLCLGHHAVPNGTIVKTITNDQIEVTNATELVQSSSTGEICDSPHQILDGENCTLIDALLGDPQCDGFQNKKWDLFVERSKAYSNCYPYDVPDYASLRSLVASSGTLEFNNESFNWTGVTQNGTSSACIRRSNSSFFSRLNWLTHLNFKYPALNVTMPNNEQFDKLYIWGVHHPGTDKDQIFLYAQSSGRITVSTKRSQQAVIPNIGSRPRIRNIPSRISIYWTIVKPGDILLINSTGNLIAPRGYFKIRSGKSSIMRSDAPIGKCNSECITPNGSIPNDKPFQNVNRITYGACPRYVKQSTLKLATGMRNIPEKQTRGIFGAIAGFIENGWEGMVDGWYGFRHQNSEGRGQAADLKSTQAAIDQINGKLNRLIGKTNEKFHQIEKEFSEVEGRIQDLEKYVEDTKIDLWSYNAELLVALENQHTIDLTDSEMNKLFEKTKKQLRENAEDMGNGCFKIYHKCDNACIGSIRNGTYNHNVYRDEALNNRFQIKGVELKSGYKDWILWISFAISCFLLCVALLGFIMWACQKGNIRCNICI

SEQ ID NO: 9557 - protein, 566 aa, Artificial Sequence
  derived and/or modified protein sequence (wt) from hemagglutinin__InfluenzaA__AFN19688
MKTIIALSYILCLVFAQELPGNDNSTATLCLGHHAVPNGTIVKTITNDQIEVTNATELVQSSSTGEICDSPHQILDGENCTLIDALLGDPQCDGFQNKKWDLFVERSKAYSNCYPYDVPDYASLRSLVASSGTLEFNNESFNWTGVTQNGTSSACIRRSNSSFFSRLNWLTHLNFKYPALNVTMPNNEQFDKLYIWGVHHPGTDKDQIFLYAQSSGRITVSTKRSQQAVIPNIGSRPRIRNIPSRISIYWTIVKPGDILLINSTGNLIAPRGYFKIRSGKSSIMRSDAPIGKCNSECITPNGSIPNDKPFQNVNRITYGACPRYVKQSTLKLATGMRNVPEKQTRGIFGAIAGFIENGWEGMVDGWYGFRHQNSEGRGQAADLKSTQAAIDQINGKLNRLIGKTNEKFHQIEKEFSEVEGRIQDLEKYVEDTKIDLWSYNAELLVALENQHTIDLTDSEMNKLFEKTKKQLRENAEDMGNGCFKIYHKCDNACIGSIRNGTYNHDVYRDEALNNRFQIKGVELKSGYKDWILWISFAISCFLLCVALLGFIMWACQKGNIRCNICI

SEQ ID NO: 9558 - protein, 566 aa, Artificial Sequence
  derived and/or modified protein sequence (wt) from hemagglutinin__InfluenzaA__AFN19690
MKTTIALSYILCLVFAQKLPGNDNSTATLCLGHHAVPNGTIVKTITNDRIEVTNATELVQNSSIGEICDSPHQILDGENCTLIDALLGDPQCDGFQNKKWDLFVERSKAYSNCYPYDVPDYASLRSLVASSGTLEFNNESFNWTGVTQNGTSSACIRRSNNSFFSRLNWLTHLNFKYPALNVTMPNNEQFDKLYIWGVHHPGTDKDQIFLYAQSSGRITVSTKRSQQAVIPNIGSRPRIRNIPSRISIYWTIVKPGDILLINSTGNLIAPRGYFKIRSGKSSIMRSDAPIGKCKSECITPNGSIPNDKPFQNVNRITYGACPRYVKQSTLKLATGMRNVPEKQTRGIFGAIAGFIENGWEGMVDGWYGFRHQNSEGRGQAADLKSTQAAIDQINGKLNRLIGKTNEKFHQIEKEFSEVEGRIQDLEKYVEDTKIDLWSYNAELLVALENQHTIDLTDSEMNKLFEKTKKQLRENAEDMGNGCFKIYHKCDNACIGSIRNGTYDHDVYRDEALNNRFQIKGVDLKSGYKDWILWISFAISCFLLCVALLGFIMWACQKGNIRCNICI

SEQ ID NO: 9559 - protein, 566 aa, Artificial Sequence
  derived and/or modified protein sequence (wt) from hemagglutinin__InfluenzaA__AFN19692
MKTIIALSYILCLVFAQKIPGNDNSTATLCLGHHAVPNGTIVKTITNDQIEVTNATELVQSSSTGEICDSPHQILDGENCTLIDALLGDPQCDGFQNKKWDLFVERSKAYSNCYPYDVPDYASLRSLVASSGTLEFNNESFNWTGVTQNGTSSACIRRSDSSFFSRLNWLTHLNFKYPALNVTMPNNEQFDKLYIWGVHHPGTDKDQIFLYAQASGRITVSTKRSQQAVIPNIGSRPRIRNIPSRISIYWTIVKPGDILLINSTGNLIAPRGYFKIRSGKSSIMRSDAPIGKCNSECITPNGSIPNDKPFQNVNRITYGACPRYVKQNTLKLATGMRNVPEKQTRGIFGAIAGFIENGWEGMVDGWYGFRHQNSEGRGQAADLKSTQAAIDQINGKLNRLIGKTNEKFHQIEKEFSEVEGRIQDLEKYVEDTKIDLWSYNAELLVALENQHTIDLTDSEMNKLFEKTKKQLRENAEDMGNGCFKIYHKCDNACIGSIRNGTYNHDVYRDEALNNRFQIKGVELKSGYKDWILWISFAISCFLLCVALLGFIMWACQKGNIRCNICI

SEQ ID NO: 9560 - protein, 566 aa, Artificial Sequence
  derived and/or modified protein sequence (wt) from hemagglutinin__InfluenzaA__AFN19694
MKTIIALSYILCLVFAQKLPGNDNSTATLCLGHHAVPNGTIVKTITNDRIEVTNATELVQNSPIGEICDSPHQILDGENCTLIDALLGDPQCDGFQNKKWDLFVERSKAYSNCYPYDVPDYASLRSLVASSGTLEFNNESFNWTGVTQNGTSSACIRRSNNSFFSRLNWLTHLNFKYPALNVTMPNNEQFDKLYIWGVHHPGTDKDQIFLYAQSSGRITVSTKRSQQAVIPNIGSRPRIRNIPSRISIYWTIVKPGDILLINSTGNLIAPRGYFKIRSGKSSIMRSDAPIGKCKSECITPNGSIPNDKPFQNVNRITYGACPRYVKQSTLKLATGMRNVPEKQTRGIFGAIAGFIENGWEGMVDGWYGFRHQNSEGRGQAADLKSTQAAIDQINGKLNRLIGKTNEKFHQIEKEFSEVEGRIQDLEKYVEDTKIDLWSYNAELLVALENQHTIDLTDSEMNKLFEKTKKQLRENAEDMGNGCFKIYHKCDNACIGSIRNGTYDHDVYRDEALNNRFQIKGVELKSGYKDWILWISFAISCFLLCVALLGFIMWACQKGNIRCNICI

SEQ ID NO: 9561 - protein, 566 aa, Artificial Sequence
  derived and/or modified protein sequence (wt) from hemagglutinin__InfluenzaA__AFN19700
MKTIIALSYILCLVFAQKLPGNDNSTATLCLGHHAVPNGTIVKTITNDQIEVTNATELVQNSSIGEICDSPHQILDGENCTLIDALLGDPQCDGFQNKKWDLFVERSKAYSNCYPYDVPDYASLRSLVASSGTLEFNNERFNWSGVTQNGTSSACMRRSNSSFFSRLNWLTHLNFKYPALNVTMPNNEQFDKLYIWGVHHPGTDKDQIFLYAQSSGRITVSTKRSQQAVIPNIGSRPRIRNIPSRISIYWTIVKPGDILLINSTGNLIAPRGYFKIRSGKSSIMRSDAPIGKCNSECITPNGSIPNDKPFQNVNRITYGACPRYVKQSTLKLATGMRNVPEKQTRGIFGAIAGFIENGWEGMVDGWYGFRHQNSEGRGQAADLKSTQAAIDQINGKLNRLIGKTNEKFHQIEKEFSEVEGRIQDLEKYVEDTKIDLWSYNAELLVALENQHTIDLTDSEMNKLFEKTKKQLRENAEDMGNGCFKIYHKCDNACIGSIRNGTYDHDVYRDEALNNRFQIKGVELKSGYKDWILWISFAISCFLLCVALLGFIMWACQKGNIRCNICI

SEQ ID NO: 9562 - protein, 566 aa, Artificial Sequence
  derived and/or modified protein sequence (wt) from hemagglutinin__InfluenzaA__AFN19702
MKTIIALSYILCLVFAQKLPGNDNSTATLCLGHHAVPNGTIVKTITNDRIEVTNATELVQNSSIGEICDSPHQILDGENCTLIDALLGDPQCDGFQNKKWDLFVERGKAYSNCYPYDVPDYASLRSLVASSGTLEFNNESFNWTGVTQNGTSSACIRRSNNSFFSRLNWLTHLNFKYPALNVTMPNNEQFDKLYIWGVHHPGTDKDQIFLYAQSSGRITVSTKRSQQAVIPNIGSRPRIRNIPSRISIYWTIVKPGDILLINSTGNLIAPRGYFKIRSGKSSIMRSDAPIGKCKSECITPNGSIPNDKPFQNVNRITYGACPRYVKQSTLKLATGMRNVPEKQTRGIFGAIAGFIENGWEGMVDGWYGFRHQNSEGRGQAADLKSTQAAIDQINGKLNRLIGKTNEKFHQIEKEFSEVEGRIQDLEKYVEDTKIDLWSYNAELLVALENQHTIDLTDSEMNKLFEKTKKQLRENAEDMGNGCFKIYHKCDNACIGSIRNGTYDHDVYRDEALNNRFQIKGVELKSGYKDWILWISFAISCFLLCVALLGFIMWACQKGNIRCNICI

SEQ ID NO: 9563 - protein, 566 aa, Artificial Sequence; identical to SEQ ID NO: 6815
  derived and/or modified protein sequence (wt) from hemagglutinin__InfluenzaA__AFN19709

SEQ ID NO: 9564 - protein, 566 aa, Artificial Sequence
  derived and/or modified protein sequence (wt) from hemagglutinin__InfluenzaA__AFN19719
MKAILVVLLYTFATANADTLCIGYHANNSTDTVDTVLEKNVTVTHSVNLLEDKHNGKLCKLRGVAPLHLGKCNIAGWILGNPECESLSTASSWSYIVETSSSDNGTCYPGDFIDYEELREQLSSVSSFERFEIFPKTSSWPNHDSNKGVTAACPHAGAKSFYKNLIWLVKKGNSYPKLSKSYINDKGKEVLVLWGIHHPSTTADQQSLYQNADTYVFVGTSRYSKKFKPEIAIRPKVRDQEGRMNYYWTLVEPGDKITFEATGNLVVPRYAFAMERNAGSGIIISDTPVHDCNTTCQTPKGAINTSLPFQNIHPITIGKCPKYVKSTKLRLATGLRNVPSIQSRGLFGAIAGFIEGGWTGMVDGWYGYHHQNEQGSGYAADLKSTQNAIDKITNKVNSVIEKMNTQFTAVGKEFNHLEKRIENLNKKVDDGFLDIWTYNAELLVLLENERTLDYHDSNVKNLYEKVRTQLKNNAKEIGNGCFEFYHKCDNTCMESVKNGTYDYPKYSEEAKLNREEIDGVKLESTRVYQILAIYSTVASSLVLVVSLGAISFWMCSNGSLQCRICI

SEQ ID NO: 9565 - protein, 566 aa, Artificial Sequence; identical to SEQ ID NO: 6435
  derived and/or modified protein sequence (wt) from hemagglutinin__InfluenzaA__AFN19730

SEQ ID NO: 9566 - protein, 566 aa, Artificial Sequence; identical to SEQ ID NO: 6815
  derived and/or modified protein sequence (wt) from hemagglutinin__InfluenzaA__AFN19736

SEQ ID NO: 9567 - protein, 566 aa, Artificial Sequence
  derived and/or modified protein sequence (wt) from hemagglutinin__InfluenzaA__AFN19748
MKAILVVLLYTFATANADTLCIGYHANNSTDTVDTVLEKNVTVTHSVNLLEDKHNGKLCKLRGVAPLHLGKCNIAGWILGNPECESLSTASSWSYIVETSSSDNGTCYPGDFIDYEELREQLSSVSSFERFEIFPKTSSWPNHDSNKGVTAACPHAGAKSFYKNLIWLVKTGNSYPKLSKSYINDKGKEVLVLWGIHHPSTTADQQSLYQNADTYVFVGTSRYSKKFKPEIAIRPKVRDQEGRMNYYWTLVEPGDKITFEATGNLVVPRYAFAMERNAGSGIIISDTPVHDCNTTCQTPKGAINTSLPFQNIHPITIGKCPKYVKSTKLRLATGLRNVPSIQSRGLFGAIAGFIEGGWTGMVDGWYGYHHQNEQGSGYAADLKSTQNAIDKITNKVNSVIEKMNTQFTAVGKEFNHLEKRIENLNKKVDDGFLDIWTYNAELLVLLENERTLDYHDSNVKNLYEKVRNQLKNNAKETGNGCFEFYHKCDNTCMESVKNGTYDYPKYSEEAKLNREEIDGVKLESTRIYQILAIYSTVASSLVLVVSLGAISFWMCSNGSLQCRICI

SEQ ID NO: 9568 - protein, 566 aa, Artificial Sequence; identical to SEQ ID NO: 6824
  derived and/or modified protein sequence (wt) from hemagglutinin__InfluenzaA__AFN19757

SEQ ID NO: 9569 - protein, 566 aa, Artificial Sequence; identical to SEQ ID NO: 6815
  derived and/or modified protein sequence (wt) from hemagglutinin__InfluenzaA__AFN19768

SEQ ID NO: 9570 - protein, 566 aa, Artificial Sequence
  derived and/or modified protein sequence (wt) from hemagglutinin__InfluenzaA__AFN19781
MKAILVVLLYTFATANADTLCIGYHANNSTDTVDTVLEKNVTVTHSVNLLEDKHNGKLCKLRGVAPLHLGKCNIAGWILGNPECESLSTASSWSYIVETSSSDNGTCYPGDFIDYEELREQLSSVSSFERFEIFPKTSSWPNHDSNKGVTAACPHAGAKSFYKNLIWLVKKGNSYPKLSKSYINDKGKEVLVLWGIHHPSTTADQQSLYQNADTYVFVGTSRYSKKFKPEIAIRPKVRDQEGRMNYYWTLVEPGDKITFEATGNLVVPRYAFAVERNAGSGIIISDTPVHDCNTTCQTPKGAINTSLPFQNIHPITIGKCPKYVKSTKLRLATGLRNVPSIQSRGLFGAIAGFIEGGWTGMVDGWYGYHHQNEQGSGYAADLKSTQNAIDKITNKVNSVIEKMNTQFTAVGKEFNHLEKRIENLNKKVDDGFLDIWTYNAELLVLLENERTLDYHDSNVKNLYEKVRNQLKNNAKEIGNGCFEFYHKCDNTCMESVKNGTYDYPKYSEEAKLNREEIDGVKLESTRIYQILAIYSTVASSLVLVVSLGAISFWMCSNGSLQCRICI

SEQ ID NO: 9571 - protein, 566 aa, Artificial Sequence
  derived and/or modified protein sequence (wt) from hemagglutinin__InfluenzaA__AFN19791
MKAILVVLLYTFAIANADTLCIGYHANNSTDTVDTVLEKNVTVTHSVNLLEDKHNGKLCKLRGVAPLHLGKCNIAGWILGNPECESLSTASSWSYIVETSSSDNGTCYPGDFINYEELREQLSSVSSFERFEIFPKTSSWPNHDSNKGVTAACPHAGAKSFYKNLIWLVKKGNSYPKLSKSYINDKGKEVLVLWGIHHPSTSADQQSLYQNADAYVFVGTSKYSKKFKPEIAVRPKVRDQEGRMNYYWTLVEPGDKITFEATGNLLVPRYAFAMERNAGSGIIISDTPVHDCNTTCQTPEGAINTSLPFQNIHPITIGKCPKYVKSTKLRLATGLRNVPSIQSRGLFGAIAGFIEGGWTGMVDGWYGYHHQNEQGSGYAADLKSTQNAIDKITNKVNSVIEKMNTQFTAVGKEFNHLEKRIENLNKKVDDGFLDIWTYNAELLVLLENERTLDYHDSNVKNLYEKVRSQLKNNAKEIGNGCFEFYHKCDNTCMESVKNGTYDYPKYSEEAKLNREEIDGVKLESTRIYQILAIYSTVASSLVLIVSLGAISFWMCSNGSLQCRICI

SEQ ID NO: 9572 - protein, 566 aa, Artificial Sequence; identical to SEQ ID NO: 6815
  derived and/or modified protein sequence (wt) from hemagglutinin__InfluenzaA__AFN19806

SEQ ID NO: 9573 - protein, 566 aa, Artificial Sequence
  derived and/or modified protein sequence (wt) from hemagglutinin__InfluenzaA__AFN19808
MKAILVVLLYTFATANADTLCIGYHANNSTDTVDTVLEKNVTVTHSVNLLEDKHNGKLCKLRGVAPLHLGKCNIAGWILGNPECESLSTANSWSYIVETSSSDNGTCYPGDFIDYEELREQLSSVSSFERFEIFPKTNSWPNHDSNKGVTAACPHAGAKSFYKNLIWLVKKGNSYPKLSKSYINDKGKEVLVLWGIHHPSTSADQQSLYQNADAYVFVGTSRYSKKFKPEIAIRPKVRDQEGRMNYYWTLVEPGDKITFEATGNLVVPRYAFAMERNAGSGIIISDTPAHDCNTTCQTPKGAINTSLPFQNIHPITIGKCPKYVNSTKLRLATGLRNVPSIQSRGLFGAIAGFIEGGWTGMVDGWYGYHHQNEQGSGYAADLKSTQNAIDKITNKVNSVIEKMNTQFTAVGKEFNHLEKRIENLNKKVDDGFLDIWTYNAELLVLLENERTLDYHDSNVKNLYEKVRSQLKNNAKEIGNGCFEFYHKCDNTCMESVKNGTYDYPKYSEEAKLNREEIDGVKLESTRIYQILAIYSTVASSLVLVVSLGAISFWMCSNGSLQCRICI

SEQ ID NO: 9574 - protein, 566 aa, Artificial Sequence; identical to SEQ ID NO: 6824
  derived and/or modified protein sequence (wt) from hemagglutinin__InfluenzaA__AFN19814

SEQ ID NO: 9575 - protein, 566 aa, Artificial Sequence
  derived and/or modified protein sequence (wt) from hemagglutinin__InfluenzaA__AFN19816
MKAILVVLLYTFATANADTLCIGYHANNSTDTVDTVLEKNVTVTHSVNLLEDKHNGKLCKLRGVAPLHLGKCNIAGWILGNPECESLSTASSWSYIVETSSSDNGTCYPGDFIDYEELREQLSSVSSFERFEIFPKTSSWPNHDSNKGVTAACPHAGAKGFYKNLIWLVKKGNSYPKLSKSYINDKGKEVLVLWGIHHPSTTADQQSLYQNADTYVFVGTSRYSKKFKPEIAIRPKVRDQEGRMNYYWTLVEPGDKITFEATGNLVVPRYAFAMERDAGSGIIISDTPVHDCNTTCQTPKGAINTSLPFQNIHPITIGKCPKYVKSTKLRLATGLRNVPSIQSRGLFGAIAGFIEGGWTGMVDGWYGYHHQNEQGSGYAADLKSTQNAIDKITNKVNSVIEKMNTQFTAVGKEFNHLEKRIENLNKKVDDGFLDIWTYNAELLVLLENERTLDYHDSNVKNLYEKVRNQLKNNAKEIGNGCFEFYHKCDNTCMESVKNGTYDYPKYSEEAKLNREEIDGVKLESTRIYQILAIYSTVASSLVLVVSLGAISFWMCSNGSLQCRICI

SEQ ID NO: 9576 - protein, 566 aa, Artificial Sequence
  derived and/or modified protein sequence (wt) from hemagglutinin__InfluenzaA__AFN19821
MKAILVVLLYTFATANADTLCIGYHANNSTDTVDTVLEKNVTVTHSVNLLEDKHNGKLCKLRGVAPLHLGKCNIAGWILGNPECESLSTASSWSYIVETSSSDNGTCYPGDFIDYEELREQLSSVSSFERFEIFPKTSSWPNHDSNKGVTAACPHAGAKSFYKNLIWLVKKGNSYPKLSKSYINDKGKEVLVLWGIHHPSTTADQQSLYQNADTYVFVGTSRYSKKLKPEIAIRPKVRDQEGRMNYYWTLVEPGGKITFEATGNLVVPRYAFAMERNAGSGIIISDTPVHDCNTTCQTPKGAINTSLPFQNIHPITIGKCPKYVKSTKLRLATGLRNVPSIQSRGLFGAIAGFIEGGWTGMVDGWYGYHHQNEQGSGYAADLKSTQNAIDKITNKVNSVIEKMNTQFTAVGKEFNHLEKRIENLNKKVDDGFLDIWTYNAELLVLLENERTLDYHDSNVKNLYEKVRNQLKNNAKEIGNGCFEFYHKCDNTCMESVKNGTYDYPKYSEEAKLNREEIDGVKLESTRIYQILAIYSTVASSLVLVVSLGAISFWMCSNGSLQCRICI

SEQ ID NO: 9577 - protein, 566 aa, Artificial Sequence; identical to SEQ ID NO: 6435
  derived and/or modified protein sequence (wt) from hemagglutinin__InfluenzaA__AFN19831

SEQ ID NO: 9578 - protein, 566 aa, Artificial Sequence
  derived and/or modified protein sequence (wt) from hemagglutinin__InfluenzaA__AFN19849
MKAILVVLLYTFATANADTLCIGYHANNSTDTVDTVLEKNVTVTHSVNLLEDKHNGKLCKLRGVAPLHLGKCDIAGWILGNPECESLSTASSWSYIVETSSSDNGTCYPGDFINYEELREQLSSVSSFERFEIFPKTSSWPNHDSNKGVTAACPQAGAKSFYKNLIWLVKKGNSYPKLSKSYINDKGKEVLVLWGIHHPSTSADQQSLYQNADAYVFVGTSKYSKKFKPEIAVRPKVRDQEGRMNYYWTLVEPGDKITFEATGNLLVPRYAFAMERNAGSGIIISDTPVHDCNTTCQTPKGAINTSLPFQNIHPITIGKCPKYVKSTKLRLATGLRNVPSIQSRGLFGAIAGFIEGGWTGMVDGWYGYHHQNAQGSGYAADLKSTQNAIDKITNKVNSVIEKMNTQFTAVGKEFNHLEKRIENLNKKVDDGFLDIWTYNAELLVLLENERTLDYHDSNVKNLYEKVRSQLKNNAKEIGDGCFEFYHKCDNTCMESVKNGTYDYPKYSEEAKLNREEIDGVKLESTRIYQILAIYSTVASSLVLVVSLGAISFWMCSNGSLQCRICI

SEQ ID NO: 9579 - protein, 566 aa, Artificial Sequence
  derived and/or modified protein sequence (wt) from hemagglutinin__InfluenzaA__AFN19865
MKAILVVLLYTFATANADTLCIGYHANNSTDTVDTVLEKNVTVTHSVNLLEDKHNGKLCKLRGVAPLHLGKCNIAGWILGNPECESLSTASSWSYIVETSSSDNGTCYPGDFIDYEELREQLSSVSSFERFEIFPKTSSWPNHDSNKGVTAACPHAGAKSFYKNLIWLVKKGNSYPKLSKSYINDKGKEVLVLWGIHHPSTTADQQSLYQNADAYVFVGTSRYSKKFKPEIAIRPKVRDQEGRMNYYWTLVEPGDKITFEATGNLVVPRYAFAMERNAGSGIIISDTLVHDCNTTCQTPKGAINTSLPFQNIHPITIGKCPKYVKSTKLRLATGLRNVPSIQSRGLFGAIAGFIEGGWTGMVDGWYGYHHQNEQGSGYAADLKSTQNAIDKITNKVNSVIEKMNTQFTAVGKEFNHLEKRIENLNKKVDDGFLDIWTYNAELLVLLENERTLDYHDSNVKNLYEKVRNQLKNNAKEIGNGCFEFYHKCDNTCMESVKNGTYDYPKYSEEAKLNREEIDGVKLESTRIYQILAIYSTVASSLVLVVSLGAISFWMCSNGSLQCRICI

SEQ ID NO: 9580 - protein, 566 aa, Artificial Sequence
  derived and/or modified protein sequence (wt) from hemagglutinin__InfluenzaA__AFN19875
MKAILVVLLYTFATANADTLCIGYHANNSTDTVDTVLEKNVTVTHSVNLLEDKHNGKLCKLRGVAPLHLGKCNIAGWILGNPECESLSTASSWSYIVETSSSDNGTCYPGDFINYEELREQLSSVSSFERFEIFPKTSSWPNHDSNKGVTAACPHAGEKSFYKNLIWLVKKGNSYPKLSKSYINDKGKEVLVLWGIHHPSTSADQQSLYQNADAYVFVGTSKYSKKFKPEIAVRPKVRDQEGRMNYYWTLVEPGDKITFEATGNLLVPRYAFAMERNAGSGIIISDTPVHDCNTTCQTPKGAINTSLPFQNIHPITIGKCPKYVKSTKLRLATGLRNVPSIQSRGLFGAIAGFIEGGWTGMVDGWYGYHHQNEQGSGYAADLKSTQNAIDKITNKVNSVIEKMNTQFTAVGKEFNHLEKRIENLNKKVDDGFLDIWTYNAELLVLLENERTLDYHDSNVKNLYEKVRSQLKNNAKEIGNGCFEFYHKCDNTCMESVKNGTYDYPKYSEEAKLNREEIDGVKLESTRIYQILAIYSTVASSLVLVVSLGAISFWMCSNGSLQCRICI

SEQ ID NO: 9581 - protein, 566 aa, Artificial Sequence
  derived and/or modified protein sequence (wt) from hemagglutinin__InfluenzaA__AFN19895
MKAILVVLLYTFATANADTLCIGYHANNSTDTVDTVLEKNVTVTHSVNLLEDKHNGKLCKLRGVAPLHLGKCNIAGWILGNPECESLSTASSWSYIVETSSSDNGTCYPGDFIDYEELREQLSSVSSFERFEIFPKTSSWPNHDSNKGVTAACPHAGAKSFYKNLIWLVKKGNSYPKISKSYINDKGKEVLVLWGIHHPSTTADQQSLYQNADTYVFVGTSRYSKKFKPEIAIRPKVRDQEGRMNYYWTLVEPGDKITFEATGNLVVPRYAFAMERNAGSGIIISDTPVHDCNTTCQTPKGAINTSLPFQNIHPITIGRCPKYVKSTKLRLATGLRNVPSIQSRGLFGAIAGFIEGGWTGMVDGWYGYHHQNEQGSGYAADLKSTQNAIDKITNKVNSVIEKMNTQFTAVGKEFNHLEKRIENLNKKVDDGFLDIWTYNAELLVLLENERTLDYHDSNVKNLYEKVRNQLKNNAKETGNGCFEFYHKCDNTCMESVKNGTYDYPKYSEEAKLNREVIDGVKLESTRIYQILAIYSTVASSLVLVVSLGAISFWMCSNGSLQCRICI

SEQ ID NO: 9582 - protein, 566 aa, Artificial Sequence
  derived and/or modified protein sequence (wt) from hemagglutinin__InfluenzaA__AFN19905
MKAILVVLLYTFATANADTLCIGYHANNSTDTVDTVLEKNVTVTHSVNLLEDKHNGKLCKLRGVAPLHLGKCNIAGWILGNPECESLSTASSWSYIVETSSSDNGTCYPGDFIDYEELREQLSSVSSFERFEIFPKTSSWPNHDSNKGVTAACPHAGAKGFYKNLIWLVKKGNSYPKLSKSYINDKGKEVLVLWGIHHPSTTADQQSLYQNADTYVFVGTSRYSKKFKPEIAIRPKVRDQEGRMNYYWTLVEPGDKITFEATGNLVVPRYAFAMERNAGSGIIISDTPVHDCNTTCQTPKGAINTSLPFQNIHPITIGKCPKYVKSTKLRLATGLRNVPSIQSRGLFGAIAGFIEGGWTGMVDGWYGYHHQNEQGSGYAADLKSTQNAVDKITNKVNSVIEKMNTQFTAVGKEFNHLEKRIENLNKKVDDGFLDIWTYNAELLVLLENERTLDYHDSNVKNLYEKVRNQLKNNAKEIGNGCFEFYHKCDNTCMESVKNGTYDYPKYSEEAKLNREKIDGVKLESTRIYQILAIYSTVASSLVLIVSLGAISFWMCSNGSLQCRICI

SEQ ID NO: 9583 - protein, 566 aa, Artificial Sequence
  derived and/or modified protein sequence (wt) from hemagglutinin__InfluenzaA__AFN19915
MKAILVVLLYTFATANADTLCIGYHANNSTDTVDTVLEKNVTVTHSVNLLEDKHNGKLCKLRGVAPLHLGKCNIAGWILGNPECESLSTASSWSYIVETSSSDNGTCYPGDFINYEELREQLSSVSSFERFEIFPKTSSWPNHDSNKGVTAACPQAGAKSFYKNLIWLVKKGNSYPKLSSSYINDKGKEVLVLWGIHHPSTSADQQSLYQNADAYVFVGTSEYSKKFKPEIAVRPKVRDQEGRMNYYWTLVEPGDKITFEATGNLLVPRYAFAMERNAGSGIIISDTPVHDCNTTCQTPKGAINTSLPFQNIHPITIGKCPKYVKSTKLRLATGLRNVPSIQSRGLFGAIAGFIEGGWTGMVDGWYGYHHQNAQGSGYAADLKSTQNAIDKITNKVNSVIEKMNTQFTAVGKEFNHLEKRIENLNKKVDDGFLDIWTYNAELLVLLENERTLDYHDSNVKNLYEKVRSQLKNNAKEIGNGCFEFYHKCDNTCMESVKNGTYDYPKYSEEAKLNREEIDGVKLESTRIYQILAIYSTVASSLVLVVSLGAISFWMCSNGSLQCRICI

SEQ ID NO: 9584 - protein, 566 aa, Artificial Sequence
  derived and/or modified protein sequence (wt) from hemagglutinin__InfluenzaA__AFN19922
MKAILVVVLYTFATANADTLCIGYHANNSTDTVDTVLEKNVTVTHSVNLLEDKHNGKLCKLRGVAPLHLGKCNIAGWILGNPECESLSTASSWSYIVETSSSDNGTCYPGDFIDYEELREQLSSVSSFERFEIFPKTSSWPNHDSNKGVTAACPHAGAKGFYKNLIWLVKKGNSYPKLSRSYINDKGKEVLVLWGIHHPSTTADQQSLYQNADTYVFVGTSRYSKKFKPEIAIRPKVRDQEGRMNYYWTLVEPGDKITFEATGNLVVPRYAFAMERNAGSGIIISDTPAQDCNTTCQTPKGAINTSLPFQNIHPITIGKCPKYVKSTKLRLATGLRNVPSIQSRGLFGAIAGFIEGGWTGMVDGWYGYHHQNEQGSGYAADLKSTQNAIDKITNKVNSVIEKMNTQFTAVGKEFNHLEKRIENLNKKVDDGFLDIWTYNAELLVLLENERTLDYHDSNVKNLYEKVRNQLKNNAKEIGNGCFEFYHKCDNTCMESVKNGTYDYPKYSEEAKLNREEIDGVKLESTRIYQILAIYSTVASSLVLVVSLGAISFWMCSNGSLQCRICI

SEQ ID NO: 9585 - protein, 566 aa, Artificial Sequence; identical to SEQ ID NO: 6454
  derived and/or modified protein sequence (wt) from hemagglutinin__InfluenzaA__AFN19931

SEQ ID NO: 9586 - protein, 566 aa, Artificial Sequence
  derived and/or modified protein sequence (wt) from hemagglutinin__InfluenzaA__AFN19941
MKAILVVLLYTFATANADTLCIGYHANNSTDTVDTVLEKNVTVTHSVNLLEDKHNGKLCKLRGVAPLHLGKCNIAGWILGNPECESLSTASSWSYIVETSISDNGTCYPGDFINYEELREQLSSVSSFERFEIFPKTSSWPNHDSNKGVTAACPQAGAKSFYKNLIWLVKKGNSYPKLSKSYINDKGKEVLVLWGIHHPSTSADQQSLYQNADAYVFVGTSKYSKKFKPEIAVRPKVRDQEGRMNYYWTLVEPGDKITFEATGNLLVPRYAFAMERNAGSGIIISDTPVHDCNTTCQTPKGAINTSLPFQNIHPITIGKCPKYVKSTKLRLATGLRNVPSIQSRGLFGAIAGFIEGGWTGMVDGWYGYHHQNAQGSGYAADLKSTQNAIDKITNKVNSVIEKMNTQFTAVGKEFNHLEKRIENLNKKVDDGFLDIWTYNAELLVLLENERTLDYHDSNVKNLYEKVRSQLKNNAKEIGNGCFEFYHKCDNTCMESVKNGTYDYPKYSEEAKLNREEIDGVKLESTRIYQILAIYSTVASSLVLVVSLGAISFWMCSNGSLQCRICI

SEQ ID NO: 9587 - protein, 566 aa, Artificial Sequence
  derived and/or modified protein sequence (wt) from hemagglutinin__InfluenzaA__AFN19951
MKAILVVLLYTFATANADTLCIGYHANNSTDTVDTVLEKNVTVTHSVNLLEDKHNGKLCKLRGVAPLHLGKCNIAGWILGNPECESLSTASSWSYIVETSSSDNGTCYPGDFIDYEELREQLSSVSSFERFEIFPKTSSWPNHDSNKGVTAACPHAGAKSFYKNLIWLVKKGNSYPKLSKSYINDKGKEVLVLWGIHHPSTTADQQSLYQNADTYVFVGTSRYSKKFKPEIAIRPKVRDQEGRMNYYWTLVEPGDKITFEATGNLVVPRYAFAMERNAGSGIIISDTPVHDCNTTCQTPKGAINTSLPFQNIHPITIGKCPKYVKSTKLRLATGLRNVPSIQSRGLFGAIAGFIEGGWTGMVDGWYGYHHQNEQGSGYAADLKSTQNAIDKITNKVNSVIEKMNTQFTAVGKEFNHLEKRIENLNKKVDDGFLDIWTYNAELLVLLENERTLDYHDSNVKNLYEKVRNQLKNNAKETGNGCFEFYHKCDNTCMESVKNGTYDYPKYSEEAKLNREEIDGVKLESTRIYQILAIYSTAASSLVLVVSLGAISFWMCSNGSLQCRICI

SEQ ID NO: 9588 - protein, 566 aa, Artificial Sequence; identical to SEQ ID NO: 6815
  derived and/or modified protein sequence (wt) from hemagglutinin__InfluenzaA__AFN19966

SEQ ID NO: 9589 - protein, 566 aa, Artificial Sequence
  derived and/or modified protein sequence (wt) from hemagglutinin__InfluenzaA__AFN19972
MKAILVVLLYTFATANADTLCIGYHANNSTDTVDTVLEKNVTVTHSVNLLEDKHNGKLCKLRGVAPLHLGKCNIAGWILGNPECESLSTASSWSYIVETSSSDNGTCYPGDFIDNEELREQLSSVSSFERFEIFPKTSSWPNHDSNKGVTAACPHAGAKSFYKNLIWLVKKGNSYPKLSKSYINDKGKEVLVLWGIHHPSTTADQQSLYQNADTYVFVGTSRYSKKFKPEIAIRPKVRDQEGRMNYYWTLVEPGDKITFEATGNLVVPRYAFAMERNAGSGIIISDTPVHDCNTTCQTPKGAINTSLPFQNIHPITIGKCPKYVKSTKLRLATGLRNVPSIQSRGLFGAIAGFIEGGWTGMVDGWYGYHHQNEQGSGYAADLKSTQNAIDKITNKVNSVIEKMNTQFTAVGKEFNHLEKRIENLNKKVDDGFLDIWTYNAELLVLLENERTLDYHDSNVKNLYEKVRNQLKNNAKEIGNGCFEFYHKCDNTCMESVKNGTYDYPKYSEEAKLNREEIDGVKLESTRVYQILAIYSTVASSLVLVVSLGAISFWMCSNGSLQCRICI

SEQ ID NO: 9590 - protein, 566 aa, Artificial Sequence
  derived and/or modified protein sequence (wt) from hemagglutinin__InfluenzaA__AFN19978
MKAILVVMLYTFATANADTLCIGYHANNSTDTVDTVLEKNVTVTHSVNLLEDKHNGKLCKLRGVAPLHLGKCNIAGWILGNPECESLSTASSWSYIVETSSSDNGTCYPGDFIDYEELREQLSSVSSFERFEIFPKTSSWPNHDSNKGVTAACPHAGAKGFYKNLIWLVKKGNSYPKLSKSYINDKGKEVLVLWGIHHPSTTADQQSLYQNADTYVFVGTSRYSKKFKPEIAIRPKVRDQEGRMNYYWTLVEPGDKITFEATGNLVVPRYAFAMERNAGSGIIISDTPVHDCNTTCQTPKGAINTSLPFQNIHPITIGKCPKYVKSTKLRLATGLRNVPSIQSRGLFGAIAGFIEGGWTGMVDGWYGYHHQNEQGSGYAADLKSTQNAIDKITNKVNSVIEKMNTQFTAVGKEFNHLEKRIENLNKKVDDGFLDIWTYNAELLVLLENERTLDYHDSNVKNLYEKVRNQLKNNAKEIGNGCFEFYHKCDNTCMESVKNGTYDYPKYSEEAKLNREKIDGVKLESTRIYQILAIYSTVASSLVLVVSLGAISFWMCSNGSLQCRICI

SEQ ID NO: 9591 - protein, 566 aa, Artificial Sequence; identical to SEQ ID NO: 6815
  derived and/or modified protein sequence (wt) from hemagglutinin__InfluenzaA__AFN19983

SEQ ID NO: 9592 - protein, 566 aa, Artificial Sequence
  derived and/or modified protein sequence (wt) from hemagglutinin__InfluenzaA__AFN19993
MKAILVVLLYTVATTNADTLCIGYHANNSTDTVDTVLEKNVTVTHSVNLLEDKHNGKLCKLRGVAPLHLGKCNIAGWILGNPECESLSTASSWSYIVETSSSDNGTCYPGDFIDYEELREQLSSVSSFERFEIFPKTSSWPNHDSNKGVTAACPHAGAKGFYKNLIWLVKKGNSYPKLSKSYINDKGKEVLVLWGIHHPSTTADQQSLYQNADTYVFVGTSRYSKKFKPEIAIRPKVRDQEGRMNYYWTLVEPGDKITFEATGNLVVPRYAFAMERNAGSGIIISDTPVHDCNTTCQTPKGAINTSLPFQNIHPITIGKCPKYVKSTKLRLATGLRNVPSIQSRGLFGAIAGFIEGGWTGMVDGWYGYHHQNEQGSGYAADLKSTQNAIDKITNKVNSVIEKMNTQFTAVGKEFNHLEKRIENLNKKVDDGFLDIWTYNAELLVLLENERTLDYHDSNVKNLYEKVRNQLKNNAKEIGNGCFEFYHKCDNTCMESVKNGTYDYPKYSEEAKLNREEIDGVKLESTRIYQILAIYSTVASSLVLVVSLGAISFWMCSNGSLQCRICI

SEQ ID NO: 9593 - protein, 566 aa, Artificial Sequence; identical to SEQ ID NO: 6815
  derived and/or modified protein sequence (wt) from hemagglutinin__InfluenzaA__AFN20000

SEQ ID NO: 9594 - protein, 566 aa, Artificial Sequence; identical to SEQ ID NO: 6822
  derived and/or modified protein sequence (wt) from hemagglutinin__InfluenzaA__AFN20006

SEQ ID NO: 9595 - protein, 566 aa, Artificial Sequence; identical to SEQ ID NO: 6454
  derived and/or modified protein sequence (wt) from hemagglutinin__InfluenzaA__AFN20012

SEQ ID NO: 9596 - protein, 566 aa, Artificial Sequence
  derived and/or modified protein sequence (wt) from hemagglutinin__InfluenzaA__AFN20018
MKAILVVLLYTFATANADTLCIGYHANNSTDTVDTVLEKNVTVTHSVNLLEDKHNGKLCKLRGVAPLHLGKCNIAGWILGNPECESLSTASSWSYIVETSSSDNGTCYPGDFINYEELREQLSSVSSFERFEIFPKTSSWPNHDSNKGVTAACPQAGAKSFYKNLIWLVKKGNSYPKLSNSYINDKGKEVLVLWGIHHPSTSADQQSLYQNADAYVFVGTSKYSKKFKPEIAVRPKVRDQEGRMNYYWTLVEPGDKITFEATGNLLVPRYAFAMERNAGSGIIISDTPVHDCNTTCQTPKGAINTSLPFQNIHPITIGKCPKYVKSTKLRLATGLRNVPSIQSRGLFGAIAGFIEGGWTGMVDGWYGYHHQNAQGSGYAADLKSTQNAIDKITNKVNSVIEKMNTQFTAVGKEFNHLEKRIENLNKKVDDGFLDIWTYNAELLVLLENERTLDYHDSNVKNLYEKVRSQLKNNAKEIGNGCFEFYHKCDNTCMESVKNGTYDYPKYSEEAKLNREEIDGVKLESTRIYQILAIYSTVASSLVLVVSLGAISFWMCSNGSLQCRICI

SEQ ID NO: 9597 - protein, 566 aa, Artificial Sequence; identical to SEQ ID NO: 6824
  derived and/or modified protein sequence (wt) from hemagglutinin__InfluenzaA__AFN20019

SEQ ID NO: 9598 - protein, 566 aa, Artificial Sequence; identical to SEQ ID NO: 6454
  derived and/or modified protein sequence (wt) from hemagglutinin__InfluenzaA__AFN20021

SEQ ID NO: 9599 - protein, 566 aa, Artificial Sequence; identical to SEQ ID NO: 6824
  derived and/or modified protein sequence (wt) from hemagglutinin__InfluenzaA__AFN20034

SEQ ID NO: 9600 - protein, 566 aa, Artificial Sequence; identical to SEQ ID NO: 6815
  derived and/or modified protein sequence (wt) from hemagglutinin__InfluenzaA__AFN20040

SEQ ID NO: 9601 - protein, 566 aa, Artificial Sequence; identical to SEQ ID NO: 9587
  derived and/or modified protein sequence (wt) from hemagglutinin__InfluenzaA__AFN20046

SEQ ID NO: 9602 - protein, 566 aa, Artificial Sequence; identical to SEQ ID NO: 6824
  derived and/or modified protein sequence (wt) from hemagglutinin__InfluenzaA__AFN20052

SEQ ID NO: 9603 - protein, 566 aa, Artificial Sequence; identical to SEQ ID NO: 6824
  derived and/or modified protein sequence (wt) from hemagglutinin__InfluenzaA__AFN20061

SEQ ID NO: 9604 - protein, 566 aa, Artificial Sequence
  derived and/or modified protein sequence (wt) from hemagglutinin__InfluenzaA__AFN20076
MKAILVVLLYTFATANADTLCIGYHANNSTDTVDTVLEKNVTVTHSVNLLEDKHNGKLCKLRGVAPLHLGKCNIAGWILGNPDCESLSTASSWSYIVETSSSDNGTCYPGDFIDYEELREQLSSVSSFERFEIFPKTSSWPNHDSNKGVTAACPHAGAKSFYKNLIWLVKKGNSYPKLSKSYINDKGKEVLVLWGIHHPSTTADQQSLYQNADTYVFVGTSRYSKKFKPEIAIRPKVRDQEGRMNYYWTLVEPGDKITFEATGNLVVPRYAFAMERNAGSGIIISDTPVHDCNTTCQTPKGAINTSLPFQNIHPITIGKCPKYVKSTKLRLATGLRNVPSIQSRGLFGAIAGFIEGGWTGMVDGWYGYHHQNEQGSGYAADLKSTQNAIDKITNKVNSVIEKMNTQFTAVGKEFNHLEKRIENLNKKVDDGFLDIWTYNAELLVLLENERTLDYHDSNVKNLYEKVRNQLKNNAKETGNGCFEFYHKCDNTCMESVKNGTYDYPKYSEEAKLNREEIDGVKLESTRIYQILAIYSTVASSLVLVVSLGAISFWMCSNGSLQCRICI

SEQ ID NO: 9605 - protein, 566 aa, Artificial Sequence
  derived and/or modified protein sequence (wt) from hemagglutinin__InfluenzaA__AFN20081
MKAILVVLLYTFATANADTLCIGYHANNSTDTVDTVLEKNVTVTHSVNLLEDKHNGKLCKLRGVAPLHLGKCNIAGWILGNPECESLSTASSWSYIVETSSSDNGTCYPGDFIDYEELREQLSSVSSFERFEIFPKTSSWPNHDSNKGVTAACPHAGAKSFYKNLIWLVKKGNSYPKISKSYINDKGKEVLVLWGIHHPSTTADQQSLYQNADTYVFVGTSRYSKKFKPEIAIRPKVRDQEGRMNYYWTLVEPGDKITFEATGNLVIPRYAFAMERNAGSGIIISDTPVHDCNTTCQTPKGAINTSLPFQNIHPITIGRCPKYVKSTKLRLATGLRNVPSIQSRGLFGAIAGFIEGGWTGMVDGWYGYHHQNEQGSGYAADLKSTQNAIDKITNKVNSVIEKMNTQFTAVGKEFNHLEKRIENLNKKVDDGFLDIWTYNAELLVLLENERTLDYHDSNVKNLYEKVRNQLKNNAKETGNGCFEFYHKCDNTCMESVKNGTYDYPKYSEEAKLNREVIDGVKLESTRIYQILAIYSTVASSLVLVVSLGAISFWMCSNGSLQCRICI

SEQ ID NO: 9606 - protein, 566 aa, Artificial Sequence; identical to SEQ ID NO: 6824
  derived and/or modified protein sequence (wt) from hemagglutinin__InfluenzaA__AFN20092

SEQ ID NO: 9607 - protein, 566 aa, Artificial Sequence; identical to SEQ ID NO: 9586
  derived and/or modified protein sequence (wt) from hemagglutinin__InfluenzaA__AFN20099

SEQ ID NO: 9608 - protein, 566 aa, Artificial Sequence
  derived and/or modified protein sequence (wt) from hemagglutinin__InfluenzaA__AFN20112
MKAILVVLLYTFATANADTLCIGYHANNSTDTVDTVLEKNVTVTHSVNLLEDKHNGKLCKLRGVAPLHLGKCNIAGWILGNPECKSLSTASSWSYIVETSSSDNGTCYPGDFIDYEELREQLSSVSSFERFEIFPKTSSWPNHNPNKGVTAACPHAGAKSFYKNLIWLVKNGNSYPKLNTSYINDKGKEVLVLWGIHHPSTSADQQSLYQNADAYAFVGTSRYSKKFKPEIAIRPKVRDQEGRMNYYWTLVEPGDKITFEATGNLVVPRYAFAMERNAGSGIIISDTSVHDCNTTCQTPKGAINTSLPFQNVHPITIGKCPKYVKSTKLRLATGLRNVPSIQSRGLFGAIAGFIEGGWTGMVDGWYGYHHQNEQGSGYAADLKSTQNAFDKITNKVNSVIEKMNTQFTAVGKEFNHLEKRIENLNKKVDDGFLDIWTYNAELLVLLENERTLDYHDSNVKNLYEKVRSQLKTNAKEIGNGCFEFYHKCDNTCMESVKNGTYDYPKYSEEAKLNREEIDGVKLESTRIYQILAIYSTVASSLVLVVSLGAISFWMCSNGSLQCRICI

SEQ ID NO: 9609 - protein, 566 aa, Artificial Sequence
  derived and/or modified protein sequence (wt) from hemagglutinin__InfluenzaA__AFN87924
MKAILVVLLYTFATANADTLCIGYHANNSTDTVDTVLEKNVTVTHSVNLLEDKHNGKLCKLRGVAPLHLGKCNIAGWILGNPECESLSTASSWSYIVETSSSDNGTCYPGDFIDYEELREQLSSVSSFERFEIFPKTSSWPNHDPNKGVTAACPHAGAKSFYKNLIWLVKKGNSYPKLSTSYINDKRKEVLVLWGIHHPSTSADQQSLYQNADAYAFVGTSRYSKKFKPEIAIRPKVRDQEGRMNYYWTLVEPGDKITFEATGNLVVPRYAFAMERNAGSGIIISDTSVHDCNTTCQTPKGAINTSLPFQNVHPITIGKCPKYVKSTKLRLATGLRNVPSIQSRGLFGAIAGFIEGGWTGMVDGWYGYHHQNEQGSGYAADLKSTQNAFDKITNKVNSVIEKMNTQFTAVGKEFNHLEKRIENLNKKVDDGFLDIWTYNAELLVLLENERTLDYHDSNVKNLYEKVRSQLKNNAKEIGNGCFEFYHKCDNTCMESVKNGTYDYPKYSEEAKLNREEIDGVKLESTRIYQILAIYSTVASSLVLVVSLGAISFWMCSNGSLQCRICI

SEQ ID NO: 9610 - protein, 566 aa, Artificial Sequence; identical to SEQ ID NO: 2669
  derived and/or modified protein sequence (wt) from hemagglutinin__InfluenzaA__AFN87926

SEQ ID NO: 9611 - protein, 566 aa, Artificial Sequence
  derived and/or modified protein sequence (wt) from hemagglutinin__InfluenzaA__AFN87927
MKAILVVLLYTFATANADTLCIGYHANNSTDTVDTVLEKNVTVTHSVNLLEDKHNGKLCKLRGVAPLHLGKCNIAGWILGNPECESLSTASSWSYIVETSSSDNGTCYPGDFIDYEELREQLSSVSSFERFEIFPKTSSWPNHDSNKGVTAACPHAGAKSFYKNLIWLVKKGNSYPKLSKSYINDKRKEVLVLWGIHHPSTSADQQSLYQNADAYVFVGTSRYSKKFKPEIAIRPKVRDQEGRMNYYWTLVEPGDKITFEATGNLVVPRYAFAMERNAGSGIIISGTPVHDCNTTCQTPKGAINTSLPFQNIHPITIGKCPKYVKSTKLRLATGLRNVPSIQSRGLFGAIAGFIEGGWTGMVDGWYGYHHQNEQGSGYAADLKSTQNAIDKITNRVNSVIEKMNTQFTAVGKEFNHLEKRIENLNKKVDDGFLDIWTYNAELLVLLENERTLDYHDSNVKNLYEKVRSQLKNNAKEIGNGCFEFYHKCDNTCMESVKNGTYDYPKYSEEAKLNREEIDGVKLESTRIYQILAIYSTVASSLVLVVSLGAISFWMCSNGSLQCRICI

SEQ ID NO: 9612 - protein, 566 aa, Artificial Sequence
  derived and/or modified protein sequence (wt) from hemagglutinin__InfluenzaA__AFN87928
MKAILVVLLYTFATANADTLCIGYHANNSTDTVDTVLEKNVTVTHSVNLLEDKHNGKLCKLRGVAPLHLGKCNIAGWILGNPECESLSTASSWSYIVETSSSDNGTCYPGDFIDYEELREQLSSVSSFERFEIFPKTSSWPNHDSNKGVTAACPHAGAKSFYKNLIWLVKKGNSYPKLSKSYINDKGKEVLVLWGIHHPSTSADQQSLYQNADAYVFVGTSRYSKKFKPEIAIRPKVRDREGRMNYYWTLVEPGDKITFEATGNLVVPRYAFAMERNAGSGIIISDTPVHDCNTTCQTPKGAINTSLPFQNIHPITIGKCPKYVKSTKLRLATGLRNVPSIQSRGLFGAIAGFIEGGWTGMVDGWYGYHHQNEQGSGYAADLKSTQNAIDKITNKVNSVIEKMNTQFTAVGKEFNHLEKRIENLNKKVDDGFLDIWTYNAELLVLLENERTLDYHDSNVKNLYEKVRSQLKNNAKEIGNGCFEFYHKCDNTCMESVKNGTYDYPKYSEEAKLNREEIDGVKLESTRIYQILAIYSTVASSLVLAVSLGAISFWMCSNGSLQCRICI

SEQ ID NO: 9613 - protein, 566 aa, Artificial Sequence; identical to SEQ ID NO: 3833
  derived and/or modified protein sequence (wt) from hemagglutinin__InfluenzaA__AFN87929

SEQ ID NO: 9614 - protein, 566 aa, Artificial Sequence; identical to SEQ ID NO: 3833
  derived and/or modified protein sequence (wt) from hemagglutinin__InfluenzaA__AFN87930

SEQ ID NO: 9615 - protein, 566 aa, Artificial Sequence
  derived and/or modified protein sequence (wt) from hemagglutinin__InfluenzaA__AFN87931
MKAILVVLLYTFATANADTLCIGYHANNSTDTVDTVLEKNVTVTHSVNLLEEKHNGKLCKLRGVAPLHLGKCNIAGWILGNPECESLSTASSWSYIVETSSSDNGTCYPGDFIDYEELREQLSSVSSFERFEIFPKTSSWPNHDSNKGVTAACPHAGAKSFYKNLIWLVKKGNSYPKLSKSYINDKGKEVLVLWGIHHPSTSADQQSIYQNADAYVFVGTSRYSKKFKPEIAIRPKVRDQEGRMNYYWTLVEPGDKITFEATGNLVVPRYAFTMERNAGSGIIISDTPVHDCNTTCQTPKGAINTSLPFQNIHPITIGKCPKYVKSTKLRLATGLRNVPSIQSRGLFGAIAGFIEGGWTGMVDGWYGYHHQNEQGSGYAADLKSTQNAIDKITNKVNSVIEKMNTQFTAVGKEFNHLEKRIENLNKKVDDGFLDIWTYNAELLVLLENERTLDYHDSNVKNLYEKVRSQLKNNAKEIGNGCFEFYHKCDNTCMESVKNGTYDYPKYSEEAKLNREEIDGVKLESTRIYQILAIYSTVASSLVLVVSLGAISFWMCSNGSLQCRICI

SEQ ID NO: 9616 - protein, 566 aa, Artificial Sequence
  derived and/or modified protein sequence (wt) from hemagglutinin__InfluenzaA__AFN87932
MEAILVVLLYTFATANADTLCIGYHANNSTDTVDTVLEKNVTVTHSVNLLEDKHNGKLCKLRGVAPLHLGKCNIAGWILGNPECESLSTASSWSYIVETSSSDNGTCYPGDFIDYEELREQLSSVSSFERFEIFPKTSSWPNHDSNKGVTAACPHAGAKSFYKNLIWLVKKGNSYPKLSKSYINDKGKEVLVLWGIHHPSTSADQQSLYQNADAYVFVGSSRYSKKFKPEIAIRPKVRDREGRMNYYWTLVEPGDKITFEATGNLVVPRYAFAMERNAGSGIIISDTPVHDCNTTCQTPKGAINTSLPFHNIHPITIGKCPKYVKSTKLRLATGLRNVPSIQSRGLFGAIAGFIEGGWTGMVDGWYGYHHQNEQGSGYAADLKSTQNAIDEITNKVNSVIEKMNTQFTAVGKEFNHLEKRIENLNKKVDDGFLDIWTYNAELLVLLENERTLDYHDSNVKNLYEKVRSQLKNNAKEIGNGCFEFYHKCDNTCMESVKNGTYDYPKYSEEAKLNREEIDGVKLESTRIYQILAIYSTVASSLVLVVSLGAISFWMCSNGSLQCRICI

SEQ ID NO: 9617 - protein, 566 aa, Artificial Sequence; identical to SEQ ID NO: 3833
  derived and/or modified protein sequence (wt) from hemagglutinin__InfluenzaA__AFN87933

SEQ ID NO: 9618 - protein, 566 aa, Artificial Sequence
  derived and/or modified protein sequence (wt) from hemagglutinin__InfluenzaA__AFN87934
MKAILVVMLYTFATANADTLCIGYHANNSTDTVDTVLEKNVTVTHSVNLLEDKHNGKLCKLRGVAPLQLGKCNIAGWILGNPECESLSTASSWSYIVETSSSDNGTCYPGDFIDYEELREQLSSVSSFERFEIFPKTSSWPNHDSNKGVTAACPHAGAKGFYKNLIWLVKKGNSYPKLSKSYINDKGKEVLVLWGIHHPSTSADQQSLYQNADTYVFVGTSRYSKKFKPEIAIRPKVRDQEGRMNYYWTLVEPGDKITFEATGNLVVPRYAFAMERNAGSGIIISDTPVHDCNTTCQTPKGAINTSLPFQNIHPITIGKCPKYVKSTKLRLATGLRNVPSIQSRGLFGAIAGFIEGGWTGMVDGWYGYHHQNEQGSGYAADLKSTQNAIDKITNKVNSVIEKMNTQFTAVGKEFNHLEKRIENLNKKVDDGFLDIWTYNAELLVLLENERTLDYHDSNVKNLYEKVRSQLKNNAKEIGNGCFEFYHKCDNTCMESVKNGTYDYPKYSEEAKLNREEIDGVKLESTRIYQILAIYSTVASSLVLVVSLGAISFWMCSNGSLQCRICI

SEQ ID NO: 9619 - protein, 566 aa, Artificial Sequence
  derived and/or modified protein sequence (wt) from hemagglutinin__InfluenzaA__AFN87936
MKAILVVLLYTFATANADTLCIGYHANNSTDTVDTVLEKNVTVTHSVNLLEDKHNGKLCKLRGVAPLHLGKCNIAGWILGNPECESLSTASSWSYIVETSISDNGTCYPGDFIDYEELREQLSSVSSFERFEIFPKTSSWPNHDPNKGVTAACPHAGAKSFYKNLIWLVKKGNSYPKLSTSYINDKGKEVLVLWGIHHPSTSADQQSLYQNADAYAFVGTSRYSKKFKPEIAIRPKVRDQEGRMNYYWTLVEPGDKITFEATGNLVVPRYAFAMERNAGSGIIISDTSVHDCNTTCQTPKGAINTSLPFQNVHPITIGKCPKYVKSTKLRLATGLRIVPSIQSRGLFGAIAGFIEGGWTGMVDGWYGYHHQNEQGSGYAADLKSTQNAFDKITNKVNSVIEKMNTQFTAVGKEFNHLEKRIENLNKKVDDGFLDIWTYNAELLVLLENERTLDYHDSNVKNLYEKVRSQLKNNAKEIGNGCFEFYHKCDNTCMESVKNGTYDYPKYSEEAKLNREEIDGVKLESTRIYQILAIYSTVASSLVLVVSLGAISFWMCSNGSLQCRICI

SEQ ID NO: 9620 - protein, 566 aa, Artificial Sequence
  derived and/or modified protein sequence (wt) from hemagglutinin__InfluenzaA__AFN87938
MKAILVVLLYTFATANADTLCIGYHANNSTDTVDTVLEKNVTVTHSVNLLEDKHNGKLCKLRGVAPLHLGKCNIAGWILGNPECESLSTASSWSYIVETSSSDNGTCYPGDFIDYEELREQLSSVSSFERFEIFPKTSSWPNHDPNKGVTAACPHAGAKSFYKNLIWLVKKGNSYPKLSKSYINDKGKEVLVLWGIHHPSTSADQQSLYQNADAYVFVGTSRYSKKFKPEIAIRPKVRDQEGRMNYYWTLVEPGDKITFEATGNLVVPRYAFAMERNAGSGIIISDTPVHDCNTTCQTSKGAINTSLPFQNIHPITIGKCPKYVKSTKLRLATGLRNVPSIQSRGLFGAIAGFIEGGWTGMVDGWYGYHHQNEQGSGYAADLKSTQNAIDEITNKVNSVIEKMNTQFTAVGKEFNHLEKRIENLNKKVDDGFLDIWTYNAELLVLLENERTLDYHDSNVKNLYEKVRNQLKNNAKEIGNGCFEFYHKCDNTCMESVKNGTYDYPKYSEEAKLNREEIDGVKLESTRIYQILAIYSTVASSLVLVVSLGAISFWMCSNGSLQCRICI

SEQ ID NO: 9621 - protein, 566 aa, Artificial Sequence
  derived and/or modified protein sequence (wt) from hemagglutinin__InfluenzaA__AFN87939
MKAILVVLLYTFATANADTLCIGYHANNSTDTVDTVLEKNVTVTHSVNLLEDKHNGKLCKLRGVAPLHLGKCNIAGWILGNPECESLSTASSWSYIVETSSSDNGTCYPGDFIDYEELREQLSSVSSFERFEIFPKTSSWPNHDPNKGVTAACPHAGAKSFYKNLIWLVKKGNSYPKLSTSYINDKGKEVLVLWGIHHPSTSADQQSLYQNADAYAFVGTSRYSKKFKPEIAIRPKVRDQEGRMNYYWTLVEPGDKITFEATGNLVVPRYAFAMERNAGSGIIISDTSVHDCNTTCQTPKGAINTSLPFQNVHPITIGKCPKYVKSTKLRLATGLRNVPSIQSRGLFGAIAGFIEGGWTGMVDGWYGYHHQNEQGSGYAADLKSTQNAIDEITNKVNSVIEKMNTQFTAVGKEFNHLEKRIENLNKKVDDGFLDIWTYNAELLVLLENERTLDYHDSNVKNLYEKVRSQLKNNAKEIGNGCFEFYHKCDNTCMESVKNGTYDYPKYSEEAKLNREEIDGVKLESTRIYQILAIYSTVASSLVLVVSLGAISFWMCSNGSLQCRICI

SEQ ID NO: 9622 - protein, 566 aa, Artificial Sequence
  derived and/or modified protein sequence (wt) from hemagglutinin__InfluenzaA__AFN87941
MKAILVVLLYTFATANADTLCIGYHANNSTDTVDTVLEKNVTVTHSVNLLEDKHNGKLCKLRGVAPLHLGKCNIAGWILGNPECESLSTASSWSYIVETSSSDNGTCYPGDFIDYEELREQLSSVSSFERFEIFPKTSSWPNHDPNKGVTAACPHAGAKSFYKNLIWLVKKGNSYPKLSKSYINDKGKEVLVLWGIHHPSTSADQQSLYQNADAYVFVGTSRYSKKFKPEIAIRPKVRDQEGRMNYYWTLVEPGDKITFEATGNLVVPRYAFAMERNAGSGIIISDTPVHDCNTTCQTPKGAINTSLPFQNIHPITIGKCPKYVKSTKLRLATGLRNVPSIQSRGLFGAIAGFIEGGWTGMVDGWYGYHHQNEQGSGYAADLKSTQNAIDEITNKVNSVIEKMNTQFTAVGKEFNHLEKRIENLNKKVDDGFLDIWTYNAELLVLLENERTLDYHDSNVKNLYEKVRNQLKNNAKEIGNGCFEFYHKCDNTCMESVKNGTYDYPKYSEEAKLNREEIDGVKLESTRIYQILAIYSTVASSLVLVVSLGAISFWMCSNGSLQCRICI

SEQ ID NO: 9623 - protein, 566 aa, Artificial Sequence
  derived and/or modified protein sequence (wt) from hemagglutinin__InfluenzaA__AFN87943
MKAILVVLLYTFATANADTLCIGYHANNSTDTVDTVLEKNVTVTHSVNLLEDKHNGKLCKLRGVAPLHLGKCNIAGWILGNPECESLSTASSWSYIVETSISDNGTCYPGDFIDYEELREQLSSVSSFERFEIFPKTSSWPNHDPNKGVTAACPHAGAKSFYKNLIWLVKKGNSYPKLSTSYINDKGKEVLVLWGIHHPSTSADQQSLYQNADAYAFVGTSRYSKKFKPEIAIRPKVRDQEGRMNYYWTLVEPGDKITFEATGNLVVPRYAFAMERNAGSGIIISDTSVHDCNTTCQTPKGAINTSLPFQNVHPITIGKCPKYVKSTKLRLATGLRNVPSIQSRGLFGAIAGFIEGGWTGMVDGWYGYHHQNEQGSGYAADLKSTQNAIDEITNKVNSVIEKMNTQFTAVGKEFNHLEKRIENLNKKVDDGFLDIWTYNAELLVLLENERTLDYHDSNVKNLYEKVRSQLKNNAKEIGNGCFEFYHKCDNTCMESVKNGTYDYPKYSEEAKLNREEIDGVKLESTRIYQILAIYSTVASSLVLVVSLGAISFWMCSNGSLQCRICI

SEQ ID NO: 9624 - protein, 566 aa, Artificial Sequence
  derived and/or modified protein sequence (wt) from hemagglutinin__InfluenzaA__AFN87945
MKAILVVLLYTFATANADTLCIGYHANNSTDTVDTVLEKNVTVTHSVNLLEDKHDGKLCKLRGVAPLHLGKCNIAGWILGNPECESLSTASSWSYIVETSSSDNGTCYPGDFIDYEELREQLSSVSSFERFEIFPKTSSWPNHDSNKGVTAACPHAGAKSFYKNLIWLVKKGNSYPKLSQSYINDKGKEVLVLWGIHHPSTSADQQSLYQNADAYVFVGTSRYSKKFKPEIAIRPKVRDQEGRMNYYWTLVEPGDKITFEATGNLVVPRYAFAMERNAGSGIIISDTPVHDCNTTCQTPKGAINTSLPFQNIHPITIGKCPKYVKSTKLRLATGLRNVPSIQSRGLFGAIAGFIEGGWTGMVDGWYGYHHQNEQGSGYAADLKSTQNAIDKITNKVNSVIEKMNTQFTAVGKEFNHLEKRIENLNKKVDDGFLDIWTYNAELLVLLENERTLDYHDSNVKNLYEKVRSQLKNNAKEIGNGCFEFYHKCDNTCMESVKNGTYDYPKYSEEAKLNREEIDGVKLESTRIYQILAIYSTVASSLVLVVSLGAISFWMCSNGSLQCRICI

SEQ ID NO: 9625 - protein, 566 aa, Artificial Sequence
  derived and/or modified protein sequence (wt) from hemagglutinin__InfluenzaA__AFN87947
MKAILVVLLYTFATANADTLCIGYHANNSTDTVDTVLEKNVTVTHSVNLLEDKHNGKLCKLRGVAPLHLGKCNIAGWILGNPECESLSTASSWSYIVETSSSDNGTCYPGDFIDYEELREQLSSVSSFERFEIFPKTSSWPNHDPNKGVTAACPHAGAKSFYKNLIWLVKKGNSYPKLSTSYINDKGKEVLVLWGIHHPSTSADQQSLYQNADAYAFVGTSRYSKKFKPEIAIRPKVRDQEGRMNYYWTLVEPGDKITFEATGNLVVPRYAFAMERNAGSGIIISDTSVHDCNTTCQTPKGAINTSLPFQNVHPITIGKCPKYVKSTKLRLATGLRNVPSIQSRGLFGAIAGFIEGGWTGMVDGWYGYHHQNEQGSGYAADLKSTQNAFDEITNKVNSVIEKMNTQFTAVGKEFNHLEKRIENLNKKVDDGFLDIWTYNAELLVLLENERTLDYHDSNVKNLYEKVRSQLKNNAKEIGNGCFEFYHKCDNTCMESVKNGTYDYPKYSEEAKLNREEIDGVKLESTRIYQILAIYSTVASSLVLVVSLGAISFWMCSNGSLQCRICI

SEQ ID NO: 9626 - protein, 566 aa, Artificial Sequence
  derived and/or modified protein sequence (wt) from hemagglutinin__InfluenzaA__AFN87949
MKAILVVMLYTFATANADTLCIGYHANNSTDTVDTVLEKNVTVTHSVNLLEDKHNGKLCKLRGVAPLHLGKCNIAGWILGNPECESLSTASSWSYIVETSSSDNGTCYPGDFIDYEELREQLSSVSSFERFEIFPKTSSWPNHDSNKGVTAACPHAGAKGFYKNLIWLVKKGNSYPKLSKSYINDKGKEVLVLWGIHHPSTSADQQSLYQNADTYVFVGTSRYSKKFKPEIAIRPKVRDQEGRMNYYWTLVEPGDKITFEATGNLVVPRYAFAMERNAGSGIIISDTPVHDCNTTCQTPKGAINTSLPFQNIHPITIGKCPKYVKSTKLRLATGLRNVPSIQSRGLFGAIAGFIEGGWTGMVDGWYGYHHQNEQGSGYAADLKSTQNAIDKITNKVNSVIEKMNTQFTAVGKEFNHLEKRIENLNKKVDDGFLDIWTYNAELLVLLENERTLDYHDSNVKNLYEKVRSQLKNNAKEIGNGCFEFYHKCDNTCMESVKNGTYDYPKYSEEAKLNREEIDGVKLESTRIYQILAIYSTVASSLVLVVSLGAISFWMCSNGSLQCRICI

SEQ ID NO: 9627 - protein, 566 aa, Artificial Sequence; identical to SEQ ID NO: 6940
  derived and/or modified protein sequence (wt) from hemagglutinin__InfluenzaA__AFN87951

SEQ ID NO: 9628 - protein, 566 aa, Artificial Sequence
  derived and/or modified protein sequence (wt) from hemagglutinin__InfluenzaA__AFN87953
MKAILVVLLYTFATANADTLCIGYHANNSTDTVDTVLEKNVTVTHSANLLEDKHNGKLCKLRGVAPLHLGKCNIAGWILGNPECESLSTASSWSYIVETSSSDNGTCYPGDFIDYEELREQLSSVSSFERFEIFPKTSSWPNHDLNKGVTAACPHAGAKSFYKNLIWLVKKGNSYPKLSKSYINDKGKEVLVLWGIHHPSTSADQQSLYQNADAYVFVGTSRYSKKFKPEIAIRPKVRDQEGRMNYYWTLVEPGDKITFEATGNLVVPRYAFAMERNAGSGIIISDTPVHDCNTTCQTPKGAINTSLPFQNIHPITIGKCPKYVKSTKLRLATGLRNVPSIQSRGLFGAIAGFIEGGWTGMVDGWYGYHHQNEQGSGYAADLKSTQNAIDEITNKVNSVIEKMNTQFTAVGKEFNHLEKRIENLNKKVDDGFLDIWTYNAELLVLLENERTLDYHDSNVKNLYEKVRSQLKNNAKEIGNGCFEFYHKCDNTCMESVKNGTYDYPKYSEEAKLNREEIDGVKLESTRIYQILAIYSTVASSLVLVVSLGAISFWMCSNGSLQCRICI

SEQ ID NO: 9629 - protein, 566 aa, Artificial Sequence
  derived and/or modified protein sequence (wt) from hemagglutinin__InfluenzaA__AFN87955
MKAILVVMLYTFATANADTLCIGYHANNSTDTVDTVLEKNVTVTHSVNLLEDKHNGKLCKLRGVAPLHLGKCNIAGWILGNPECESLSTASSWSYIVETSSSDNGTCYPGDFIDYEELREQLSSVSSFERFEIFPKTSSWPNHDSNKGVTAACPHAGAKGFYKNLIWLVKKGNSYPKLSKSYINDKGKEVLVLWGIHHPSTTADQQSLYQNADTYVFVGTSRYSKKFKPEIAIRPKVRDQEGRMNYYWTLVEPGDKITFEATGNLVVPRYAFAMERNAGSGIIISDTPVHDCNTTCQTPKGAINTSLPFQNIHPITIGKCPKYVKSTKLRLATGLRNVPSIQSRGLFGAIAGFIEGGWTGMVDGWYGYHHQNEQGSGYAADLKSTQNAIDEITNKVNSVIEKMNTQFTAVGKEFNHLEKRIENLNKKVDDGFLDIWTYNAELLVLLENERTLDYHDSNVKNLYEKVRSQLKNNAKEIGNGCFEFYHKCDNTCMESVKNGTYDYPKYSEEAKLNREEIDGVKLESTRIYQILAIYSTVASSLVLVVSLGAISFWMCSNGSLQCRICI

SEQ ID NO: 9630 - protein, 566 aa, Artificial Sequence
  derived and/or modified protein sequence (wt) from hemagglutinin__InfluenzaA__AFN87957
MKAILVVLLYTFATANADTLCIGYHANNSTDTVDTVLEKNVTVTHSVNLLEDKHNGKLCKLRGVAPLHLGKCNIAGWILGNPECESLSTASSWSYIVETSISDNGTCYPGDFIDYEELREQLSSVSSFERFEIFPKTSSWPNHDPNKGVTAACPHAGAKSFYKNLIWLVKKGNSYPKLSTSYINDKGKEVLVLWGIHHPSTSADQQSLYQNADAYAFVGTSRYSKKFKPEIAIRPKVRDQEGRMNYYWTLVEPGDKITFEATGNLVVPRYAFAMERNAGSGIIISDTSVHDCNTTCQTPKGAINTSLPFQNVHPITIGKCPKYVKSTKLRLATGLRNVPSIQSRGLFGAIAGFIEGGWTGMVDGWYGYHHQNEQGSGYAADLKSTQNAFDEITNKVNSVIEKMNTQFTAVGKEFNHLEKRIENLNKKVDDGFLDIWTYNAELLVLLENERTLDYHDSNVKNLYEKVRSQLKNNAKEIGNGCFEFYHKCDNKCMESVKNGTYDYPKYSEEAKLNREEIDGVKLESTRIYQILAIYSTVASSLVLVVSLGAISFWMCSNGSLQCRICI

SEQ ID NO: 9631 - protein, 566 aa, Artificial Sequence
  derived and/or modified protein sequence (wt) from hemagglutinin__InfluenzaA__AFN87959
MKAILVVMLYTFATANADTLCIGYHANNSTDTVDTVLEKNVTVTHSVNLLEDKHNGKLCKLRGVAPLHLGKCNIAGWILGNPECESLSTASSWSYIVETSSSDNGTCYPGDFIDYEELREQLSSVSSFERFEIFPKTSSWPNHDSNKGVTAACPHAGAKGFYKNLIWLVKKGNSYPKLSKSYINDKGKEVLVLWGIHHPSTSADQQSLYQNADTYVFVGTSRYSKKFKPEIAIRPKVRDQEGRMNYYWTLVEPGDKITFEATGNLVVPRYAFAMERNAGSGIIISDTPVHDCNTTCQTPKGAINTSLPFQNIHPITIGKCPKYVKSTKLRLATGLRNVPSIQSRGLFGAIAGFIEGGWTGMVDGWYGYHHQNEQGSGYAADLKSTQNAIDKITNKVNSVIEKMNTQFTAVGKEFNHLEKRIENLNKKVDDGFLDIWTYNAELLVLLENERTLDYHDSNVKNLYEKVRNQLKNNAKEIGNGCFEFYHKCDNTCMESVKNGTYDYPKYSEEAKLNREEIDGVKLESTRIYQILAIYSTVASSLVLVVSLGAISFWMCSNGSLQCRICI

SEQ ID NO: 9632 - protein, 566 aa, Artificial Sequence; identical to SEQ ID NO: 3154
  derived and/or modified protein sequence (wt) from hemagglutinin__InfluenzaA__AFN87961

SEQ ID NO: 9633 - protein, 565 aa, Artificial Sequence
  derived and/or modified protein sequence (wt) from hemagglutinin__InfluenzaA__AFO64802
MKAKLLVLLCTFTATYADTICIGYHANNSTDTVDTVLEKNVTVTHSVNLLEDSHNGKLCLLKGIAPLQLGNCSVAGWILGNPECELLISKESWSYIVETPNPENGTCYPGYFADYEELREQLSSVSSFERFEIFPKESSWPNHTVTGVSASCSHNGKSSFYRNLLWLTVKNGLYPNLSKSYVNNKGKEVLVLWGVHHPSNIRDQRAIYHTENAYVSVVSSHYSRRFTPEIAKRPKVRDQEGRINYYWTLLEPGDTIIFEANGNLIAPWYAFALSRGFGSGIITSNAPMDECDAKCQTPQGAINSSLPFQNVHPVTIGECPKYVRSAKLRMVTGLRNIPSIQSRGLFGAIAGFIEGGWTGMIDGWYGYHHQNEQGSGYAADQKSTQNAINGITNKVNSVIEKMNTQFTAVGKEFNKLERRMENLNKKVDDGFLDIWTYNAELLVLLENERTLDFHDSNVKNLYEKVKSQLKNNAKEIGNGCFEFYHKCNNECMESVKNGTYDYPKYSEESKLNREKIDGVKLESMGVYQILAIYSTVASSLVLLVSLGAISFWMCSNGSLQCRICI

SEQ ID NO: 9634 - protein, 566 aa, Artificial Sequence
  derived and/or modified protein sequence (wt) from hemagglutinin__InfluenzaA__AFO64813
MKAKLLVLLCAFTATDADTICIGYHANNSTDTVDTVLEKNVTVTHSVNLLEDSHNGKLCRLKGIAPLQLGNCSIAGWILGNPECESLFSKKSWSYIAETPNSENGTCYPGYFADYEELREQLSSVSSFERFEIFPKESSWPNHTVTKGVTASCSHKGRSSFYRNLLWLTEKNGSYPNLSKSYVNNKEKEVLVLWGVHHPSNIRDQRAIYHTENAYVSVVSSHYNRRFTPEIAKRPKVRDQEGRINYYWTLLEPGDTIIFEANGNLIAPWYAFALSRGFGSGIITSNASMDECDAKCQTPQGAINSSLPFQNVHPVTIGECPKYVRSTKLRMVTGLRNIPSIQSRGLFGAIAGFIEGGWTGMIDGWYGYHHQNEQGSGYAADQKSTQNAINGITNKVNSVIEKMNTQFTAVGKEFNKLERRMENLNKKVDDGFLDIWTYNAELLVLLENERTLDFHDSNVKNLYEKVKSQLKNNAKEIGNGCFEFYHKCNNECMESVKNGTYDYPKYSEESKLNREKIDGVKLESMGVYQILAIYSTVASSLVLLVSLGAISFWMCSNGSLQCRICI

SEQ ID NO: 9635 - protein, 566 aa, Artificial Sequence
  derived and/or modified protein sequence (wt) from hemagglutinin__InfluenzaA__AFO64824
MKAILLVLLCAFTATDADTICIGYHANNSTDTVDTVLEKNVTVTHSVNLLEDSHNGKLCRLKGIAPLQLGNCSIAGWILGNPECESLFSKKSWSYIAETPNSENGTCYPGYFADYEELREQLSSVSSFERFEIFPKESSWPNHTVTKGVTASCSHKGRSSFYRNLLWLTEKNGLYPNLSKSYVNNKEKEVLVLWGVHHPSNIGDQRAIYHTENAYVSVVSSHYNRRFTPEIAKRPKVRGQEGRINYYWTLLEPGDTIIFEANGNLIAPWYAFALSRGFGSGIITSNASMDECDAKCQTPQGAINSSLPFQNVHPVTIGECPKYVRSTKLKMVTGLRNIPSIQSRGLFGAIAGFIEGGWTGMIDGWYGYHHQNEQGSGYAADQKSTQNAINGITNKVNSVIEKMNTQFTAVGKEFNKLEKRMENLNKKVDDGFLDIWTYNAELLVLLENERTLDFHDSNVKNLYEKVKNQLKNNAKEIGNGCFEFYHKCNNECMESVKNGTYDYPKYSEESKLNREKIDGVKLESMGVYQILAIYSTVASSLVLLVSLGAISFWMCSNGSLQCRICI

SEQ ID NO: 9636 - protein, 566 aa, Artificial Sequence
  derived and/or modified protein sequence (wt) from hemagglutinin__InfluenzaA__AFO64835
MKAKLLVLLCAFTATYADTICIGYHANNSTDTVDTVLEKNVTVTHSVNLLEDSHNGKLCRLKGIAPLQLGNCSVAGWILGNPECESLFSKESWSYIAETPDPENGTCYPGYFADYEELREQLSSVSSFERFEIFPKESSWPNHTVTKGVTASCSHNGKSSFYRNLLWLTKKNGLYPNLSKSYVNNKEKEVLVLWGVHHPSNIGEQRAIYHTENAYVSVVSSHYSRRFTPEIAKRPKVRDQEGRINYYWTLLEPGDTIIFEANGNLIAPWYAFALSRGFGSGIITSNASMDECDAKCQTPQGAINSSLPFQNVHPVTIGECPKYVRSTKLRMVTGLRNIPSIQSRGLFGAIAGFIEGGWTGMIDGWYGYHHQNEQGSGYAADQKSTQNAINGITNKVNSVIEKMNTQFTAVGKEFNKLERRMENLNKKVDDGFLDIWTYNAELLVLLENERTLDFHDSNVKNLYEKVKNQLKNNAKEIGNGCFEFYHKCNNECMESVKNGTYDYPKYSEESKLNREKIDGVKLESMGVYQILAIYSTVASSLVLLVSLGAISFWMCSNGSLQCRICI

SEQ ID NO: 9637 - protein, 566 aa, Artificial Sequence
  derived and/or modified protein sequence (wt) from hemagglutinin__InfluenzaA__AFO64846
MKAKLLVLLCAFTATYADTICIGYHANNSTDTVDTVLEKNVTVTHSVNLLEDSHNGKLCRLKGIAPLQLGNCSVAGWILGNPECESLFTKESWSYIAETPNPENGTCYPGYFADYEELREQLSSVSSFERFEIFPKESSWPNHTVTKGVTASCSHNGKSSFYRNLLWLTEKNGLYPNLSKSYVNNKEKEVLVLWGVHHPSNMGDQRAIYHTENAYVSVVSSHYSRRFTPEIAKRPKVRGQEGRINYYWTLLEPGDTIIFEANGNLIAPRYAFALSRGFGSGIITSNASMDECDAKCQTPQGAINSSLPFQNVHPVTIGECPKYVRSTKLRMVTGLRNIPSIQSRGLFGAIAGFIEGGWTGMIDGWYGYHHQNEQGSGYAADQKSTQNAINGITNKVNSVIEKMNTQFTAVGKEFNKLERRMENLNKKVDDGFLDIWTYNAELLVLLENERTLDFHDSNVKNLYEKVKSQLKNNAKEIGNGCFEFYHKCNNECMESVKNGTYDYPKYSEESKLNREKIDGVKLESMGVYQILAIYSTVASSLVLLVSLGAISFWMCSNGSLQCRICI

SEQ ID NO: 9638 - protein, 566 aa, Artificial Sequence
  derived and/or modified protein sequence (wt) from hemagglutinin__InfluenzaA__AFO64857
MKAKLLVLLCAFTATYADTICIGYHANNSTDTVDTVLEKNVTVTHSVNLLEDSHNGKLCRLKGTAPLQLGNCSVAGWILGNPECESLFSKESWSYIAETPNPENGTCYPGYFADYEELREQLSSVSSFERFEIFPKESSWPNHTVTKGVTASCSHNGKSSFYKNLLWLTEKNGLYPNLSKSYVNNKEKEVLVLWGVHHPSNIGDQRAIYHTENAYVSVVSSHYSRRFTPEIAKRPKVRGQEGRINYYWTLLEPGDTIIFEANGNLIAPWYAFALSRGFGSGIITSTASMGECDAKCQTPQGAINSSLPFQNVHPVTIGECPKYVRSTKLRMVTGLRNIPSIQSRGLFGAIAGFIEGGWTGMIDGWYGYHHQNEQGSGYAADQKSTQNAIDGITNKVNSVIEKMNTQFTAVGKEFNKLERRMENLNKKVDDGFLDIWTYNAELLVLLENGRTLDFHDSNVKNLYEKVKNQLKNNAKEIGNGCFEFYHKCNNECMESVKNGTYDYPKYSEESKLNREKIDGVKLESMGVYQILAIYSTVASSLVLLVSLGAISFWMCSNGSLQCRICI

SEQ ID NO: 9639 - protein, 566 aa, Artificial Sequence
  derived and/or modified protein sequence (wt) from hemagglutinin__InfluenzaA__AFO64868
MKVKLLVLLCAFTATYADTICIGYHANNSTDTVDTVLEKNVTVTHSVNLLEDSHNGKLCRLKGTAPLQLGNCSVAGWILGNPECESLFSKESWSYIAETPNPENGTCYPGCFADYEELREQLSSVSSFERFEIFPKESSWPNHTVTKGVTASCSHNGKSSFYKNLLWLTEKNGLYPNLSKSYVNNKEKEVLVLWGVHHPSNIRDQRAIYHTENAYVSVVSSHYSRRFTPEIAKRPKVRGQEGRINYYWTLLEPGDTIIFEANGNLIAPWYAFALSRGFGSGIITSNASMGECDAKCQTPQGAINSSLPFQNVHPVTIGECPKYVRSTKLRMVTGLRNIPSIQSRGLFGAIAGFIEGGWTGMIDGWYGYHHQNEQGSGYAADQKSTQNAIDGITNKVNSVIEKMNTQFTAVGKEFNKLERRMENLNKKVDDGFLDIWTYNAELLVLLENERTLDFHDSNVKNLYEKVKNQLKNNAKEIGNGCFEFYHKCNNECMESVKNGTYDYPKYSEESKLNREKIDGVKLESMGVYQILAIYSTVASSLVLLVSLGAISFWMCSNGSLQCRICI

SEQ ID NO: 9640 - protein, 565 aa, Artificial Sequence
  derived and/or modified protein sequence (wt) from hemagglutinin__InfluenzaA__AFO64879
MKAKLLVLLCTFTATYADTICIGYHANNSTDTVDTVLEKNVTVTHSVNLLEDSHNGKLCLLKGIAPLQLGNCSVAGWILGNPECESLIFKESWSYIVETPNPENGTCYPGYFADYEELREQLSSVSSFERFEIFPKESSWPNHTVTGVSASCSHNGKSSFYRNLLWLTEKNGLYPNLSKSYVNNKEKEVLVLWGVHHPSNIRDQRAIYHTENAYVSVVSSHYSRRFTPEIAKRPKVRGQEGRINYYWTLLEPGDTIIFEANGNLIAPWYAFALSRGFGSGIITSNAPMDECDAKCQTPQGAINSSLPFQNVHPVTIGECPKYVRSAKLRMVTGLRNIPSIQSRGLFGAIAGFIEGGWTGMIDGWYGYHHQNEQGSGYAADQKSTQNAINGITNKVNSVIEKMNTQFTAVGKEFNKLERRMENLNKKVDDGFLDIWTYNAELLVLLENERTLDFHDSNVKNLYEKVKSQLKNNAKEIGNGCFEFYHKCNNECMESVKNGTYDYPKYSEESKLNREKIDGVKLESMGVYQILAIYSTVASSLVLLVSLGAISFWMCSNGSLQCRICI

SEQ ID NO: 9641 - protein, 565 aa, Artificial Sequence
  derived and/or modified protein sequence (wt) from hemagglutinin__InfluenzaA__AFO64890
MKAKLLVLLCTFTATYADTICIGYHANNSTDTVDTVLEKNVTVTHSVNLLEDSHNGKLCLLKGIAPLQLGNCSVAGWILGNPECESLISKESWSYIVETPNPENGTCYPGYFADYEELREQLSSVSSFERFEIFPKESSWPNHTVTGVSASCSHNGKSSFYRNLLWLTEKNGLYPNLSKSYVNNKEKEVLVLWGVHHPSNIRDQRAIYHTENAYVSVVSSHYSRRFTPEIAKRPKVRGQEGRINYYWTLLEPGDTIIFEANGNLIAPWYAFALSRGFGSGIITSNAPMDECDVKCQTPQGAINSSLPFQNVHPVTIGECPKYVRSAKLRMVTGLRNIPSIQSRGLFGAIAGFIEGGWTGMIDGWYGYHHQNEQGSGYAADQKSTQNAINGITNKVNSVIEKMNTQFTAVGKEFNKLERRMENLNKKVDDGFLDIWTYNAELLVLLENERTLDFHDSNVKNLYEKVKSQLKNNAKEIGNGCFEFYHKCNNECMESVKNGTYDYPKYSEESKLNREKIDGVKLESMGVYQILAIYSTVASSLVLLVSLGAISFWMCSNGSLQCRICI

SEQ ID NO: 9642 - protein, 566 aa, Artificial Sequence
  derived and/or modified protein sequence (wt) from hemagglutinin__InfluenzaA__AFO64901
MKAKLLVLLCAFTATYADTICIGYHANNSTDTVDTVLEKNVTVTHSVNLLEDSHNGKLCRLKGTAPLQLGNCSIAGWILGNPECESLFSKESWSYIAETPNPENGTCYPGYFADYEELREQLSSVSSFERFEIFPKESSWPNHTVTKGVTASCSHNGKSSFYKNLLWLTEKNGLYPNLSKSYVNNKKKEVLVLWGVHHPSNIGDQRAIYHTENAYVSVVSSHYSRRFTPEIAKRPKVRNQEGRINYYWTLLEPGDTIIFEANGNLIAPWYAFALSRGFESGIITSNASMGECDAKCQTPQGAINSSLPFQNVHPVTIGECPKYVRSTKLRMVTGLRNIPSIQSRGLFGAIAGFIEGGWTGMIDGWYGYHHQNEQGSGYAADQKSTQNAINGITNKVNSIIEKMNTQFTAVGKEFNKLERRMENLNKKVDDGFLDIWTYNAELLVLLENERTLDFHDSNVKNLYEKVKNQLKNNAKEIGNGCFEFYHKCNNECMESVKNGTYDYPKYSKESKLNREKIDGVKLESMGVYQILAIYSTVASSLVLLVSLGAISFWMCSNGSLQCRICI

SEQ ID NO: 9643 - protein, 565 aa, Artificial Sequence
  derived and/or modified protein sequence (wt) from hemagglutinin__InfluenzaA__AFO65016
MKAKLLVLLCTFTATYADTICIGYHANNSTDTVDTVLEKNVTVTHSVNLLEDSHNGKLCLLKGIAPLQLGNCSVAGWILGNPECESLISKESWSYIVETPNPENGTCYPGYFADYEELREQLSSVSSFERFEIFPKESSWPNHTVTGVSASCSHNGKSSFYRNLLWLTKKNGLYPNLSKSYVNNKEKEVLVLWGVHHPSNIGDQRTIYHTENAYVSVVSSHYSRRFTPEIAKRPKVRDQEGRINYYWTLLEPGDTIIFEANGNLIAPWYAFALSRGFGSGIITSNAPMDECDAKCQTPQGAINSSLPFQNVHPITIGECPKYVRSAKLRMVTGLRNIPSIQSRGLFGAIAGFIEGGWTGMIDGWYGYHHQNEQGSGYAADQKSTQNAINGITNKVNSVIEKMNTQFTAVGKEFNNLERRMENLNKKVDDGFLDIWTYNAELLVLLENERTLDFHDSNVKNLYEKVKSQLKNNAKEIGNGCFEFYHKCNNECMESVKNGTYDYPKYSEESKLNREKIDGVKLESMGVYQILAIYSTVASSLVLLVSLGAISFWMCSNGSLQCRICI

SEQ ID NO: 9644 - protein, 565 aa, Artificial Sequence; identical to SEQ ID NO: 2115
  derived and/or modified protein sequence (wt) from hemagglutinin__InfluenzaA__AFO65027

SEQ ID NO: 9645 - protein, 565 aa, Artificial Sequence
  derived and/or modified protein sequence (wt) from hemagglutinin__InfluenzaA__AFO65038
MKAKLLVLLCTFTATYADTICIGYHANNSTDTVDTVLEKNVTVTHSVNLLEDSHNGKLCLLKGIAPLQLGNCSVAGWILGNPECELLISKESWSYIVETPNPENGTCYPGYFADYEELREQLSSVSSFERFEIFPKESSWPNHTVTGVSASCSHNGKSSFYRNLLWLTGKNGLYPNLSMSYVNNKEKEVLVLWGVHHPPNIGNQRALYHTENAYVSVVSSHYSRRFTPEIAKRPKVRDQEGRINYYWTLLEPGDTIIFEANGNLIAPWYAFALSRGFGSGIITSNAPMDECDAKCQTPQGAINSSLPFQNVHPVTIGECPKYVRSAKLRMVTGLRNIPSIQSRGLFGAIAGFIEGGWTGMVDGWYGYHHQNEQGSGYAADQKSTQNAINGITNKVNSVIEKMNTQFTAVGKEFNKLERRMENLNKKVDDGFLDIWTYNAELLVLLENERTLDFHDSNVKNLYEKVKSQLKNNAKEIGNGCFEFYHKCNNECMESVKNGTYDYPKYSEESKLNREKIDGVKLESMGVYQILAIYSTVASSLVLLVSLGAISFWMCSNGSLQCRICI

SEQ ID NO: 9646 - protein, 565 aa, Artificial Sequence
  derived and/or modified protein sequence (wt) from hemagglutinin__InfluenzaA__AFO66136
MKVKLLVLLCTFTATYADTICIGYHANNSTDTVDTVLEKNVTVTHSVNLLEDSHNGKLCLLKGIAPLQLGNCSVAGWILGNPECELLISKESWSYIVETPNPENGTCYPGYFADYEELREQLSSVSSFERFEIFPKESSWPNHTVTGVSASCSHNGKSSFYRNLLWLTGKNGLYPNLSKSYANNKEKEVLVLWGVHHPPNIGNQRALYHTENAYVSVVSSHYSRRFTPEIAKRPKVRDQEGRINYYWTLLEPGDTIIFEANGNLIAPRYAFALSRGFGSGIITSNAPMDECDAKCQTPQGAINSSLPFQNVHPVTIGECPKYVRSAKLRMVTGLRNIPSIQSRGLFGAIAGFIEGGWTGMVDGWYGYHHQNEQGSGYAADQKSTQNAINGITNKVNSVIEKMNTQFTAVGKEFNKLERRMENLNKKVDDGFLDIWTYNAELLVLLENERTLDFHDSNVKNLYEKVKSQLKNNAKEIGNGCFEFYHKCNNECMESVKNGTYDYPKYSEESKLNREKIDGVKLESMGVYQILAIYSTVASSLVLLVSLGAISFWMCSNGSLQCRICI

SEQ ID NO: 9647 - protein, 566 aa, Artificial Sequence
  derived and/or modified protein sequence (wt) from hemagglutinin__InfluenzaA__AFO66147
MKAKLLVLLCAFTTTYADTICIGYHANNSTDTVDTVLEKNVTVTHSVNLLEDSHNGKLCRLKGTAPLQLGNCSIAGWILGNPECESLFSKESWSYIAETPNPKNGTCYPGYFADYEELREQLSSVSSFERFEIFPKDSSWPNHTVTKGVTASCSHNGKSSFYKNLLWLTGKNGLYPNLSKSYVNKKGKEVLVLWGVHHPSNMGDQRAIYHKENAYVSVLSSHYSRRFTPEIAKRPKVRDQEGRINYYWTLLEPGDTIIFEANGNLIAPWYAFALSRGFGSGIIISNASMGECDAKCQTPQGAINSSLPFQNVHPVTIGECPKYVRSTKLRMVTGLRNVPSIQSRGLFGAIAGFIEGGWTGMIDGWYGYHHQNEQGSGYAADQKSTQNAINGITNKVNSIIEKMNTQFTAVGKEFNKLERRMENLNKKVDDGFLDIWTYNAELLVLLENERTLDFHDSNVKNLYEKVKNQLKNNAKEIGNGCFEFYHKCNNECMESVKNGTYDYPKYSKESKLNREKIDGVKLESMGVYQILAIYSTVASSLVLLVSLGAISFWMCSNGSLQCRICI

SEQ ID NO: 9648 - protein, 565 aa, Artificial Sequence
  derived and/or modified protein sequence (wt) from hemagglutinin__InfluenzaA__AFO66158
MKAKLLVLLCTFTATYADTICIGYHANNSTDTVDTVLEKNVTVTHSVNLLEDSHNGKLCLLKGIAPLQLGNCSVAGWILGNPECELLISKGSWSYIVETPNPENGTCYPGYFADYEELREQLSSVSSFERFEIFPKGSSWPNHTVTGVSASCSHNGKSSFYRNLLWLTGKNGLYPNLSMSYVNNKEKEVLVLWGVHHPPNIGNQRALYHTENAYVSVVSSHYSRRFTPEIAKRPKVRDQEGRINYYWTLLEPGDTIIFEANGNLIAPWYAFALSRGFGSGIITSNAPMGECDAKCQTPQGAINSSLPFQNVHPVTIGECPKYVRSAKLRMVTGLRNIPSIQSRGLFGAIAGFIEGGWTGMVDGWYGYHHQNEQGSGYAADQKSTQNAINGITNKVNSVIEKMNTQFTAVGKEFNKLERRMENLNKKVDDGFLDIWTYNAELLVLLENERTLDFHDSNVKNLYEKVKSQLKNNAKEIGNGCFEFYHKCNNECMESVKNGTYDYPKYSEESKLNREKIDGVKLESMGVYQILAIYSTVASSLVLLVSLGAISFWMCSNGSLQCRICI

SEQ ID NO: 9649 - protein, 565 aa, Artificial Sequence
  derived and/or modified protein sequence (wt) from hemagglutinin__InfluenzaA__AFO66169
MKVKLLVLLCTFTATYADTICIGYHANNSTDTVDTVLEKNVTVTHSVNLLEDSHNGKLCLLKGIAPLQLGNCSVAGWILGNPECELLISKESWSYIVETSNPENGTCYPGYFTDYEELREQLSSVSSFERFEIFPKESSWPNHTVTGVSASCSHNGKSSFYKNLLWLTGKNGLYPNLSKSYANNKEKEVLVLWGVHHPPNIGDQRALYHTENAYVSVVSSHYSRRFTPEIAKRPKVRDQEGRINYYWTLLEPGDTIIFEANGNLIAPRYAFALSRGFGSGIITSNAPMDECDAKCQTPHGAINSSLPFQNVHPVTIGECPKYVRSAKLRMVTGLRNIPSIQSRGLFGAIAGFIEGGWTGMVDGWYGYHHQNEQGSGYAADQKSTQNAINGITNKVNSVIEKMNTQFTAVGKEFNKLERRMENLNKKVDDGFIDIWTYNAELLVLLENERTLDFHDSNVKNLYEKVKSQLKNNAKEIGNGCFEFYHKCNDECMESVKNGTYDYPKYSEESKLNREKIDGVKLESMGVYQILAIYSTVASSLVLLVSLGAISFWMCSNGSLQCRICI

SEQ ID NO: 9650 - protein, 565 aa, Artificial Sequence
  derived and/or modified protein sequence (wt) from hemagglutinin__InfluenzaA__AFO66180
MKAKLLVLLCTFTATYADTICIGYHANNSTDTVDTVLEKNVTVTHSVNLLEDSHNGKLCLLKGIAPLQLGNCSVAGWILGNPECELLISKESWSYIVETPNPENGTCYPGYFADYEELREQLSSVSSFERFEIFPKGSSWPNHTVTGVSASCSHNGKSSFYRNLLWLTGKNGLYPNLSMSYVNNKEKEVLVLWGVHHPPNIGDQRALYHTENAYVSVVSSHYSRRFTPEIAKRPKVRNQEGRINYYWTLLEPGDTIIFEANGNLIAPWYAFALSRGFGSGIITSNAPMGECDAKCQTPQGAINSSLPFQNVHPVTIGECPKYVRSAKLRMVTGLRNIPSIQSRGLFGAIAGFIEGGWTGMVDGWYGYHHQNEQGSGYAADQKSTQNAINGITNKVNSVIEKMNTQFTAVGKEFNKLERRMENLNKKVDDGFLDIWTYNAELLVLLENERTLDFHDSNVKNLYEKVKSQLKNNAKEIGNGCFEFYHKCNNECMESVKNGTYDYPKYSEESKLNREKIDGVKLESMGVYQILAIYSTVASSLVLLVSLGAISFWMCSNGSLQCRICI

SEQ ID NO: 9651 - protein, 565 aa, Artificial Sequence
  derived and/or modified protein sequence (wt) from hemagglutinin__InfluenzaA__AFO66191
MKAKLLVLLCTFTATYADTICIGYHANNSTDTVDTVLEKNVTVTHSVNLLEDSHNGKLCLLKGIAPLQLGNCSVAGWILGNPECELLISKESWSYIVETPNPENGTCYPGYFADYEELREQLSSVSSFERFEIFPKGSSWPNHTVTGVSASCSHNGKSSFYRNLLWLTGKNGLYPNLSMSYVNNKEKEVLVLWGVHHPPNIGNQRALYHTENAYVSVVSSHYSRRFTPEIAKRPKVRDQEGRINYYWTLLEPGDTIIFEANGNLIAPWYAFALSRGFGSGIITSNAPMDECDAKCQTPQGAINSSLPFQNVHPVTIGECPKYVRSAKLRMVTGLRNIPSIQSRGLFGAIAGFIEGGWTGMVDGWYGYHHQNEQGSGYAADQKSTQNAINGITNKVNSVIEKMNTQFTAVGKEFNKLERRMENLNKKVDDGFLDIWTYNAELLVLLENERTLDFHDSNVKNLYEKVKSQLKNNAKEIGNGCFEFYHKCNNECMESVKNGTYDYPKYSEESKLNREKIDGVKLESMGVYQILAIYSTVASSLVLLVSLGAISFWMCSNGSLQCRICI

SEQ ID NO: 9652 - protein, 565 aa, Artificial Sequence; identical to SEQ ID NO: 512
  derived and/or modified protein sequence (wt) from hemagglutinin__InfluenzaA__AFO66202

SEQ ID NO: 9653 - protein, 565 aa, Artificial Sequence
  derived and/or modified protein sequence (wt) from hemagglutinin__InfluenzaA__AFO66213
MKVKLLVLLCTFTATYADTICIGYHANNSTDTVDTVLEKNVTVTHSVNLLEDSHNGKLCLLKGIAPLQLGNCSVAGWILGNPECELLISKESWSYIVETPNPENGTCYPGYFADYEELREQLSSVSSFERFEIFPKESSWPNHTVTGVSASCSHNGKSSFYRNLLWLTGKNGLYPNLSKSYANNKKKEVLVLWGVHHPPNIGNQRALYHTENAYVSVVSSHYSRRFTPEIAKRPKVRDQEGRINYYWTLLEPGDTIIFEANGNLIAPRYAFALSRGFGSGIITSNAPMDECDAKCQTPQGAINSSLPFQNVHPVTIGECPKYVRSAKLRMVTGLRNIPSIQSRGLFGAIAGFIEGGWTGMVDGWYGYHHQNEQGSGYAADQKSTQNAINGITNKVNSVIEKMNTQFTAVGKEFNKLERRMENLNKKVDDGFLDIWTYNAELLVLLENERTLDFHDSNVKNLYEKVKSQLKNNAKEIGNGCFEFYHKCNDECMESVKNGTYDYPKYSEESKLNREKIDGVKLESMGVYQILAIYSTVASSLVLLVSLGAISFWMCSNGSLQCRICI

SEQ ID NO: 9654 - protein, 565 aa, Artificial Sequence
  derived and/or modified protein sequence (wt) from hemagglutinin__InfluenzaA__AFO66224
MKVKLLVLLCTFTATYADTICIGYHANNSTDTVDTVLEKNVTVTHSVNLLEDSHNGKLCLLKGIAPLQLGNCSVAGWILGNPECELLISKESWSYIVETPNPENGTCYPGYFADYEELREQLSSVSSFERFEIFPKESSWPNHTVTGVSASCSHNGKSSFYRNLLWLTGKNGLYPNLSKSYANNKEKEVLVLWGVHHPPNIGNQRALYHTENAYVSVVSSHYSRRFTPEIAKRPKVRDQEGRINYYWTLLEPGDTIIFEANGNLIAPRYAFALSRGFGSGIITSNAPMDECDAKCQTPQGAINSSLPFQNVHPVTIGECPKYVRSAKLRMVTGLRNIPSIQSRGLFGAIAGFIEGGWTGMVDGWYGYHHQNEQGSGYAADQKSTQNAINGITNKVNSVIEKMNTQFTAVGKEFNKLERRMENLNKKVDDGFLDIWTYNAELLVLLENERTLDFHDSNVKNLYEKVKSQLKNNAKEIGNGCFEFYHKCNDECMESVKNGTYDYPKYSEESKLNREKIDGVKLESMGVYQILAIYSTVASSLVLLVSLGAISFWMCSNGSLQCRICI

SEQ ID NO: 9655 - protein, 565 aa, Artificial Sequence
  derived and/or modified protein sequence (wt) from hemagglutinin__InfluenzaA__AFO66235
MKVKLLVLLCTFTATYADTICIGYHANNSTDTVDTVLEKNVTVTHSVNLLEDSHNGKLCLLKGIAPLQLGNCSVAGWILGNPECELLISKESWSYIVEKPNPENGTCYPGHFADYEELREQLSSVSSFERFEIFPKESSWPNHTVTGVSASCSHNGKSSFYKNLLWLTGKNGLYPNLSKSYANNKEKEVLVLWGVHHPPNIGVQRALYHTENAYVSVVSSHYSRKFTPEIAKRPKVRDQEGRINYYWTLLEPGDTIIFEANGNLIAPRYAFALSRGFGSGIINSNAPMDECDAKCQTPQGAINSSLPFQNVHPVTIGECPKYVRSAKLRMVTGLRNIPSIQSRGLFGAIAGFIEGGWTGMVDGWYGYHHQNEQGSGYAADQKSTQNAINGITNKVNSVIEKMNTQFTAVGKEFNKLERRMENLNKKVDDGFIDIWTYNAELLVLLENERTLDFHDSNVKNLYEKVKSQLKNNAKEIGNGCFEFYHKCNDECMESVKNGTYDYPKYSEESKLNREKIDGVKLESMGVYQILAIYSTVASSLVLLVSLGAISFWMCSNGSLQCRICI

SEQ ID NO: 9656 - protein, 565 aa, Artificial Sequence
  derived and/or modified protein sequence (wt) from hemagglutinin__InfluenzaA__AFO66246
MKVKLLVLLCTFTATYADTICIGYHANNSTDTVDTVLEKNVTVTHSVNLLEDSHNGKLCLLKGIAPLQLGNCSVAGWILGNPECELLISKESWSYIVEKPNPENGTCYPGHFADYEELREQLSSVSSFERFEIFPKESSWPNHTVTGVSASCSHNGKSSFYKNLLWLTGKNGLYPNLSKSYANNKEKEVLVLWGVHHPPNIGNQRALYHTENAYVSVVSSHYSRKFTPEIAKRPKVRDQEGRINYYWTLLEPGDTIIFEANGNLIAPRYAFALSRGFGSGIINSNAPMDECDAECQTPQGAINSSLPFQNVHPVTIGECPKYVRSAKLRMVTGLRNIPSIQSRGLFGAIAGFIEGGWTGMVDGWYGYHHQNEQGSGYAADQKSTQNAINGITNKVNSVIEKMNTQFTAVGKEFNKLERRMENLNKKVDDGFIDIWTYNAELLVLLENERTLDFHDSNVKNLYEKVKSQLKNNAKEIGNGCFEFYHKCNDECMESVKNGTYDYPKYSEESKLNREKIDGVKLESMGVYQILAIYSTVASSLVLLVSLGAISFWMCSNGSLQCRICI

SEQ ID NO: 9657 - protein, 566 aa, Artificial Sequence
  derived and/or modified protein sequence (wt) from hemagglutinin__InfluenzaA__AFP33324
MKAKLLVLLCTFTATYADTICIGYHANNSTDTVDTVLEKNVTVTHSVNLLEDSHNGKLCRLKGTAPLQLGNCSIAGWILGNPECESLFSKESWSYIAETPNPKNGTCYPGYFADYEELREQLSSVSSFERFEIFPKDSSWPNHTVTKGVTASCSHNGKSSFYKNLLWLTGKNGLYPNLSKSYVNKKGKEVLVLWGVHHPSNMGDQRAIYHKENAYVSVLSSHYSRRFTPEIAKRPKVRDQEGRINYYWTLLEPGDTIIFEANGNLIAPWYAFALSRGFGSGIIISNASMGECDAKCQTPQGAINSSLPFQNVHPVTIGECPKYVRSTKLRMVTGLRNVPSIQSRGLFGAIAGFIEGGWTGMIDGWYGYHHQNEQGSGYAADQKSTQNAINGITNKVNSIIEKMNTQFTAVGKEFNKLERRMENLNKKVDDGFLDIWTYNAELLVLLENERTLDFHDSNVKNLYEKVKTQLKNNAKEIGNGCFEFYHKCNNECMESVKNGTYDYPKYSKESKLNREKIDGVKLESMGVYQILAIYSTVASSLVLLVSLGAISFWMCSNGSLQCRICI

SEQ ID NO: 9658 - protein, 565 aa, Artificial Sequence
  derived and/or modified protein sequence (wt) from hemagglutinin__InfluenzaA__AFP33325
MKVKLLVLLCTFTATYADTICIGYHANNSTDTVDTVLEKNVTVTHSVNLLEDSHNGKLCLLKGIAPLQLGNCSVAGWILGNPECELLIPKESWSYIVETPNPENGTCYPGYFADYEELREQLSSVSSFERFEIFPKESSWPSHTVTGVSASCSHNGKSSFYRNLLWLTGKNGLYPNLSKSYSNNKEKEVLVLWGVHHPPNIGDQRALYHTENAYVSVVSSHYSRRFTPEIAKRPKVRGQEGRINYYWTLLEPGDTIIFEANGNLIAPWYAFALSRGFGSGIITSNAPMDECDAKCQTPQGAINSSLPFQNVHPVTIGECPKYVRSAKLRMVTGLRNIPSIQSRGLFGAIAGFIEGGWTGMVDGWYGYHHQNEQGSGYAADQKSTQNAINGITNKVNSVIEKMNTQFTAVGKEFNKLERRMENLNKKVDDGFLDIWTYNAELLVLLENERTLDFHDSNVKNLYEKVKSQLKNNAKEIGNGCFEFYHKCNDECMESVKNGTYDYPKYSEESKLNREKIDGVKLESMGVYQILAIYSTVASSLVLLVSLGAISFWMCSNGSLQCRICI

SEQ ID NO: 9659 - protein, 566 aa, Artificial Sequence
  derived and/or modified protein sequence (wt) from hemagglutinin__InfluenzaA__AFQ32573
MKTIIALSYILCLVFAQKLPGNDNSTATLCLGHHAVPNGTIVKTITNDQIEVTNATELVQSSSTGEICNSPHQILDGENCTLIDALLGDPQCDGFQNKKWDLFVERSKAHSNCYPYDVPDYASLRSLVASSGTLEFNNESFNWTGVTQNGTSSACIRRSNNSFFSRLNWLTHLNFKYPALNVTMPNNEQFDKLYIWGVHHPGTDKDQIFLYAQASGRITVSTKRSQQAVIPNIGSRPRVRNIPSRVSIYWTIVKPGDILLINSTGNLIAPRGYFKIRSGKSSIMRSDAPIGKCNSACITPNGSIPNDKPFQNVNRITYGACPRYVKQNTLKLATGMRNVPEKQTRGIFGAIAGFIENGWEGMVDGWYGFRHQNSEGRGQAADLKSTQAAIDQINGKLNRLIGKTNEKFHQIEKEFSEVEGRIQDLEKYVGDTKIDLWSYNAELLVALENQHTIDLTDSEMNKLFEKTKKQLRENAEDMGNGCFKIYHKCDNACIGSIRNGTYDHDVYRDEALNNRFQIKGVELKSGYKDWILWISFAISCFLLCVALLGFIMWACQKGNIRCNICI

SEQ ID NO: 9660 - protein, 566 aa, Artificial Sequence
  derived and/or modified protein sequence (wt) from hemagglutinin__InfluenzaA__AFQ37281
MKAILVVLLYTFATTNADTLCIGYHANNSTDTVDTVLEKNVTVTHSVNLLEDKHNGKLCKLRGVAPLHLGKCNIAGWILGNPECESLSTASSWSYIVETSSSDNGTCYPGDFIDYEELREQLSSVSSFERFEIFPKTSSWPNHDSNKGVTAACPHAGAKSFYKNLIWLVKKGNSYPKLSKSYINDKGKEVLVLWGIHHPSTSTDQQSLYQNADAYVFVGTSRYSKKFKPEIAIRPKVRDREGRMNYYWTLVEPGDKITFEATGNLVVPRYAFAMERNAGSGIIISDTPAHDCNTTCQTPKGAINTSLPFQNVHPITIGKCPKYVKSTKLRLATGLRNVPSIQSRGLFGAIAGFIEGGWTGMVDGWYGYHHQNEQGSGYAADLKSTQNAIDKITNKVNSVIEKMNTQFTAVGKEFNHLEKRIENLNKKVDDGFLDIWTYNAELLVLLENERTLDYHDSNVKNLYEKVRSQLKNNAKEIGNGCFEFYHKCDDKCMESVKNGTYDYPKYSEEAKLNREEIDGVKLESTRIYQILAIYSTAASSLVLVVSLGAISFWMCSNGSLQCRICI

SEQ ID NO: 9661 - protein, 568 aa, Artificial Sequence
  derived and/or modified protein sequence (wt) from hemagglutinin__InfluenzaA__AFQ55689
MNTQILALIACMLIGAKGDKICLGHHAVANGTKVNTLTERGIEVVNATETVETANTKKICTQGKRPTDLGQCGLLGTLIGPPQCDQFLEFDADLIIERREGTDVCYPGKFTNEESLRQILRGSGGIDKESMGFTYSGIRTNGATSACRRSGSSFYAEMKWLLSNSDNAAFPQMTKSYRNPRNKPALIIWGVHHSGSATEQTKLYGSGNKLITVGSSKYQQSFTPSPGARPQVNGQSGRIDFHWLLLDPNDTVTFTFNGAFIAPDRASFFRGESIGVQSDVPLDSGCEGDCFHNGGTIVSSLPFQNINPRTVGKCPRYVKQTSLLLATGMRNVPENPKDRKSRHRRTRGLFGAIAGFIENGWEGLIDGWYGFRHQNAQGEGTAADYKSTQSAIDQITGKLNRLIDKTNQQFELIDNEFSEIEQQIGNVINWTRDSMTEVWSYNAELLVAMENQHTIDLADSEMNKLYERVRKQLRENAEEDGTGCFEIFHKCDDQCMESIRNNTYDHTQYRAESLQNRIQIDPVKLSSGYKDIILWFSFGASCFLLLAIAMGLVFICIKNGNMRCTICI

SEQ ID NO: 9662 - protein, 566 aa, Artificial Sequence; identical to SEQ ID NO: 8186
  derived and/or modified protein sequence (wt) from hemagglutinin__InfluenzaA__AFR68153

SEQ ID NO: 9663 - protein, 566 aa, Artificial Sequence
  derived and/or modified protein sequence (wt) from hemagglutinin__InfluenzaA__AFR68163
MKATLVVLLYTFATANADTLCIGYHANNSTDTVDTVLEKNVTVTHSANLLEDKHNGKLCKLRGVAPLHLGKCNIAGWILGNPECETLSTASSWSYIVETSSSDNGTCYPGDFIDYEELREQLSSVSSFERFEIFPKTSSWPNHDSNKGVTAACPHAGAKGFYKNLIWLVKKGNSYPKLSKSYINDKGKEVLVLWGIHHPSTTADQQSLYQNADTYVFVGTSRYSKKFKPEIAIRPKVRDQEGRMNYYWTLVEPGDKITFEATGNLVVPRYAFAMERDAGSGIIISDTPVHDCNTTCQTPKGAINTSLPFQNIHPITIGKCPKYVKSTKLRLATGLRNVPSIQSRGLFGAIAGFIEGGWTGMVDGWYGYHHQNEQGSGYAADLKSTQNAIDKITNKVNSVIEKMNTQFTAVGKEFNHLEKRIENLNKKVDDGFLDIWTYNAELLVLLENERTLDYHDSNVKNLYEKVRNQLKNNAKEIGNGCFEFYHKCDNTCMESVKNGTYDYPKYSEEAKLNREEIDGVKLESTRIYQILAIYSTAASSLVLVVSLGAISFWMCSNGSLQCRICI

SEQ ID NO: 9664 - protein, 566 aa, Artificial Sequence
  derived and/or modified protein sequence (wt) from hemagglutinin__InfluenzaA__AFR68173
MKTIIALSYILCLVFAQKLPGNDNSTATLCLGHHAVPNGTIVKTITNDQIEVTNATELVQSSSTGEICDSPHQILDGENCTLIDALLGDPQCDGFQNKKWDLFVERSKAYSNCYPYDVPDYASLRSLVASSGTLEFNNESFNWTGVTQNGTSSACIRRSNSSFFSRLNWLTHLNFKYPALNVTMPNNEQFDKLYIWGVHHPGTDKDQIFLYAQASGRITVSTKRSQQSVIPNIGSRPRIRNIPSRISIYWTIVKPGDILLINSTGNLIAPRGYFKIRSGKSSIMRSDAPIGKCNSECITPNGSIPNDKPFQNVNRITYGACPRYVKQNTLKLATGMRNVPEKQTRGIFGAIAGFIENGWEGMVDGWYGFRHQNSEGRGQAADLKSTQAAIDQINGKLNRLIGKTNEKFHQIEKEFSEVEGRIQDLEKYVEDTKIDLWSYNAELLVALENQHTIDLTDSEMNKLFEKTKKQLRENAEDMGNGCFKIYHKCDNACIGSIRNGTYNHDVYRDEALNNRFQIKGVELKSGYKDWILWISFAISCFLLCVALLGFIMWACQKGNIRCNICI

SEQ ID NO: 9665 - protein, 566 aa, Artificial Sequence; identical to SEQ ID NO: 2669
  derived and/or modified protein sequence (wt) from hemagglutinin__InfluenzaA__AFR84675

SEQ ID NO: 9666 - protein, 566 aa, Artificial Sequence; identical to SEQ ID NO: 3022
  derived and/or modified protein sequence (wt) from hemagglutinin__InfluenzaA__AFR84685

SEQ ID NO: 9667 - protein, 566 aa, Artificial Sequence; identical to SEQ ID NO: 2849
  derived and/or modified protein sequence (wt) from hemagglutinin__InfluenzaA__AFR84694

SEQ ID NO: 9668 - protein, 566 aa, Artificial Sequence; identical to SEQ ID NO: 2656
  derived and/or modified protein sequence (wt) from hemagglutinin__InfluenzaA__AFR84704

SEQ ID NO: 9669 - protein, 566 aa, Artificial Sequence
  derived and/or modified protein sequence (wt) from hemagglutinin__InfluenzaA__AFR84714
MKAILVVLLYTFATANADTLCIGYRANNSTDTVDTVLEKNVTVTHSVNILEDKHNGKLCKLRGVAPLHLGKCNIAGWILGNPECESLSTASSWSYIVETSSSDNGTCYPGDFIDYEELREQLSSVSSFERFEIFPKTSSWPNHDSNKGVTAACPHAGAKSFYKNLIWLVKKGNSYPKLSKSYINDKGKEVLVLWGIHHPSTSADQQSLYQNADAYVFVGSSRYSKKFKPEIAIRPKVRDQEGRMNYYWTLVEPGDKITFEATGNLVVPRYAFAMERNAGSGIIISDTPVHDCNTTCQTPKGAINTSLPFQNIHPITIGKCPKYVKSTKLRLATGLRNVPSIQSRGLFGAIAGFIEGGWTGMVDGWYGYHHQNEQGSGYAADLKSTQNAIDEITNKVNSVIEKMNTQFTAVGKEFNHLEKRIENLNKKVDDGFLDIWTYNAELLVLLENERTLDYHDSNVKNLYEKVRSQLKNNAKEIGNGCFEFYHKCDNTCMESVKNGTYDYPKYSEEAKLNREEIDGVKLESTRIYQILAIYSTVASSLVLVVSLGAISFWMCSNGSLQCRICI

SEQ ID NO: 9670 - protein, 566 aa, Artificial Sequence; identical to SEQ ID NO: 2849
  derived and/or modified protein sequence (wt) from hemagglutinin__InfluenzaA__AFR84724

SEQ ID NO: 9671 - protein, 566 aa, Artificial Sequence; identical to SEQ ID NO: 2849
  derived and/or modified protein sequence (wt) from hemagglutinin__InfluenzaA__AFR84734

SEQ ID NO: 9672 - protein, 566 aa, Artificial Sequence; identical to SEQ ID NO: 2849
  derived and/or modified protein sequence (wt) from hemagglutinin__InfluenzaA__AFR84754

SEQ ID NO: 9673 - protein, 566 aa, Artificial Sequence; identical to SEQ ID NO: 2849
  derived and/or modified protein sequence (wt) from hemagglutinin__InfluenzaA__AFR84764

SEQ ID NO: 9674 - protein, 566 aa, Artificial Sequence; identical to SEQ ID NO: 2849
  derived and/or modified protein sequence (wt) from hemagglutinin__InfluenzaA__AFR84774

SEQ ID NO: 9675 - protein, 566 aa, Artificial Sequence
  derived and/or modified protein sequence (wt) from hemagglutinin__InfluenzaA__AFR84784
MKAILVGLLYTFATANADTLCIGYHANNSTDTVDTVLEKNVTVTHSVNILEDKHNGKLCKLRGVAPLHLGKCNIAGWILGNPECESLSTASSWSYIVETSSSDNGTCYPGDFIDYEELREQLSSVSSFERFEIFPKTSSWPNHDSNKGVTAACPHAGAKSFYKNLIWLVKKGNSYPKLSKSYINDKGKEVLVLWGIHHPSTSADQQSLYQNADAYVFVGSSRYSKKFKPEIAIRPKVRDQEGRMNYYWTLVEPGDKITFEATGNLVVPRYAFAMERNAGSGIIISDTPVHDCNTTCQTPKGAINTSLPFQNIHPITIGKCPKYVKSTKLRLATGLRNVPSIQSRGLFGAIAGFIEGGWTGMVDGWYGYHHQNEQGSGYAADLKSTQNAIDEITNKVNSVIEKMNTQFTAVGKEFNHLEKRIENLNKKVDDGFLDIWTYNAELLVLLENERTLDYHDSNVKNLYEKVRSQLKNNAKEIGNGCFEFYHKCDNTCMESVKNGTYDYPKYSEEAKLNREEIDGVKLESTRIYQILAIYSTVASSLALVVSLGAISFWMCSNGSLQCRICI

SEQ ID NO: 9676 - protein, 566 aa, Artificial Sequence; identical to SEQ ID NO: 2849
  derived and/or modified protein sequence (wt) from hemagglutinin__InfluenzaA__AFR84794

SEQ ID NO: 9677 - protein, 566 aa, Artificial Sequence; identical to SEQ ID NO: 2669
  derived and/or modified protein sequence (wt) from hemagglutinin__InfluenzaA__AFR84804

SEQ ID NO: 9678 - protein, 566 aa, Artificial Sequence; identical to SEQ ID NO: 2849
  derived and/or modified protein sequence (wt) from hemagglutinin__InfluenzaA__AFR84814

SEQ ID NO: 9679 - protein, 566 aa, Artificial Sequence; identical to SEQ ID NO: 2669
  derived and/or modified protein sequence (wt) from hemagglutinin__InfluenzaA__AFR84824

SEQ ID NO: 9680 - protein, 566 aa, Artificial Sequence; identical to SEQ ID NO: 2695
  derived and/or modified protein sequence (wt) from hemagglutinin__InfluenzaA__AFR84834

SEQ ID NO: 9681 - protein, 566 aa, Artificial Sequence; identical to SEQ ID NO: 7869
  derived and/or modified protein sequence (wt) from hemagglutinin__InfluenzaA__AFR84844

SEQ ID NO: 9682 - protein, 566 aa, Artificial Sequence; identical to SEQ ID NO: 2911
  derived and/or modified protein sequence (wt) from hemagglutinin__InfluenzaA__AFR84854

SEQ ID NO: 9683 - protein, 566 aa, Artificial Sequence; identical to SEQ ID NO: 2669
  derived and/or modified protein sequence (wt) from hemagglutinin__InfluenzaA__AFR84864

SEQ ID NO: 9684 - protein, 566 aa, Artificial Sequence; identical to SEQ ID NO: 2849
  derived and/or modified protein sequence (wt) from hemagglutinin__InfluenzaA__AFR84874

SEQ ID NO: 9685 - protein, 566 aa, Artificial Sequence; identical to SEQ ID NO: 2656
  derived and/or modified protein sequence (wt) from hemagglutinin__InfluenzaA__AFR84893

SEQ ID NO: 9686 - protein, 566 aa, Artificial Sequence; identical to SEQ ID NO: 2656
  derived and/or modified protein sequence (wt) from hemagglutinin__InfluenzaA__AFR84903

SEQ ID NO: 9687 - protein, 566 aa, Artificial Sequence; identical to SEQ ID NO: 2656
  derived and/or modified protein sequence (wt) from hemagglutinin__InfluenzaA__AFR84913

SEQ ID NO: 9688 - protein, 566 aa, Artificial Sequence; identical to SEQ ID NO: 2656
  derived and/or modified protein sequence (wt) from hemagglutinin__InfluenzaA__AFR84923

SEQ ID NO: 9689 - protein, 562 aa, Artificial Sequence
  derived and/or modified protein sequence (wt) from hemagglutinin__InfluenzaA__AFV53205
MAIIYLILLFATVRGDQICIGYHANNSTEKVDTILERNVTVTHAKDILEKTHNGKLCKLNGIPPLELGDCSIAGWLLGNPECDRLLRVPEWSYIMEKENPRYSLCYPGSLNDYEELKHLLSSVRHFEKVRILPKDRWTQHTTTGDSKACAVSGKPSFFRNMVWLTKKGPDYPVAKGSYNNTSGEQMLIIWGVHHPIDEAEQRELYQKVGTYVSASTSTLNKRSIPEIAARPEVNGLRSRMEFSWTLLDVWDTINFESTGNLIAPEYGFKISKRGSSGIMKTEGTLGNCETKCQTPLGAINTTLPFHNVHPLTIGECPKYVKSEKLVLATGLRNVPQIESRGLFGAIAGFIEGGWQGMVDGWYGYHHSNDQGSGYAADKESTQKAFDEITNKVNSVIEKMNTQFEAVGKEFNNLEKRLENLNKKMEDGFLDVWTYNAELLVLMENERTLDFHDSNVKNLYEKVRMQLRDNVKELGNGCFEFYHKCDDECINSVKNGTYDYPKYEEESKLKRNEIKGVKLSSMGVYQILAIYATVAGSLSLAIMMAGISFWMCSNGSLQCRICI

SEQ ID NO: 9690 - protein, 562 aa, Artificial Sequence
  derived and/or modified protein sequence (wt) from hemagglutinin__InfluenzaA__AFV53216
MAIIYLILLFTAVRGDQICIGYHANNSTEKVDTILERNVTVTHAKDILEKTHNGKLCKLNGIPPLELGDCSIAGWLLGNPECDRLLSVPEWSYIMEKENPRDGLCYPGSFNDYEELKHLLSSVKHFEKVKILPKDRWTQHTTTGGSRACAVSGNPSFFRNMVWLTEKGSNYPVAKGSYNNTSGEQMLIIWGVHHPNDETEQRTLYQNVGTYVSVGTSTLNKRSTPDIATRPKVNGQGGRMEFSWTLLDMWDTINFESTGNLIAPEYGFKISKRGSSGIMKTEGTLGNCETKCQTPLGAINTTLPFHNVHPLTIGECPKYVKSEKLVLATGLRNVPQIESRGLFGAIAGFIEGGWQGMVDGWYGYHHSNDQGSGYAADKESTQKAFDGITNKVNSVIEKMNTQFEAVEKEFSNLERRLENLNKKMEDGFLDVWTYNAELLVLMENERTLDFHDSNVKNLYDKVRMQLRDNVKELGNGCFEFYHKCDDECMNSVKNGTYDYPKYEEESKLNRNEIKGVKLSSMGIYQILAIYATVAGSLSLAIMMAGISFWMCSNGSLQCRICI

SEQ ID NO: 9691 - protein, 562 aa, Artificial Sequence
  derived and/or modified protein sequence (wt) from hemagglutinin__InfluenzaA__AFV53227
MIIIYLILLFTAVRGDQICIGYHANNSTEKVDTILERNVTVTHAKDILEKTHNGKLCKLNGIPPLELGDCSIAGWLLGNPECDRLLRVPEWSYIMEKENPRYSLCYPGSFNDYEELKHLLSSVKHFEKVKILPKDGWTQHKTDGGSKACAVSGKASFFRNMVWLTKEGPNYQVAKRSYNNTSGEQMLIIWGVHHPKDEAEQIALYQKVGTYVSASTSTLNKRSTPEIAARPEVNGLGSRMEFSWTLLDVWDTINFESTGNLVAPEYGFKISKRGSSGIMKTEGTLGNCETKCQTPLGAINTTLPFHNVHPLTIGECPKYVKSEKLVLATGLRNVPQIESRGLFGAIAGFIEGGWQGMVDGWYGYHHSNDQGSGYAADKESTQKAFDRITNKVNSVIEKMNIQFEAVGKEFSNLEKRLENLNKKMEDGFLDVWTYNAELLVLMENERTLDFHDSNVKNLYDKVRMQLRDNVKELGNGCFEFYHKCDDECMNSVKNGTYDYPKYEEESKLKRNEIKGVKLSSMGVYQILAIYATVAGSLSLAIMIAGISFWMCSNGSLQCRVCI

SEQ ID NO: 9692 - protein, 562 aa, Artificial Sequence
  derived and/or modified protein sequence (wt) from hemagglutinin__InfluenzaA__AFV53238
MAIIYLILLFTAVRGDQICIGYHANNSTEKVDTILERNVTVTHAKDILEKTHNGKLCKLNGIPPLELGDCSIAGWLLGNPECDRLLRVPEWSYIMEKENPRYSLCYPGSFNDYEELKHLLSSVKHFEKVKILPKDRWTQHTTTGGSMACAVSGKPSFFRNMVWLTTKGPNYPVAQGSYNNTSGEQMLIIWGVHHPNDEAEQRALYQKVGTYVSASTSTLYKRSIPEIAARPKVNGLGSRMEFSWTLLDMWDTINFESTGNLVAPEYGFKISKRGSSGIMKTEGTLENCETKCQTPLGAINTTLPFHNVHPLTIGECPKYVKSEKLVLATGLRNVPQIESRGLFGAIAGFIEGGWQGMVDGWYGYHHSNDQGSGYAADKESTQKAFDGITNKVNSVIEKMNTQFEAVGKEFSNLEKRLENLNKKMEDGFLDVWTYNAELLVLMENERTLDFHDSNVKNLYDKVRMQLRDNVKELGNGCFEFYHKCDNECMDSVKNGTYDYPKYEEESKLNRNEIKGVKLSSMGVYQILAIYATVAGSLSLAIMMAGISFWMCSNGSLQCRICI

SEQ ID NO: 9693 - protein, 562 aa, Artificial Sequence
  derived and/or modified protein sequence (wt) from hemagglutinin__InfluenzaA__AFV53249
MAIIYLILLFATVRGDQICIGYHANNSTETVDTILERNVTVTHAKDILEKTHNGKLCKLNGIPPLELGDCSIAGWLLGNPECDRLLRVPEWSYIMEKENPRYSLCYPGSLNDYEELKHLLSSVKHFEKVRILPKDRWTNHTTTGGSKACAVSGEPSFFRNMVWLTKKGPNYPVAKGSYNNTSGEQMLIIWGVHHPNDEAEQRALYQKVGTYVSASTSTLYKRSIPEIAARPKVNGLGSRMEFSWTLLNVWDTINFESTGNLVAPEYGFKISKRGRSGIMKTEGTLGNCETKCQTPLGAINTTLPFHNVHPLTIGECPKYVKSEKLVLATGLRNVPQIESRGLFGAIAGFIEGGWQGMVDGWYGYHHSNDQGSGYAADKESTQKAFDGITNKVNSVIEKMNTQFEAVGKEFNNLEKRLENLNKKMEDGFLDVWTYNAELLVLMENERTLDFHDSNVKNLYEKVRMQLRDNVKELGNGCFEFYHKCDDECMNSVKNGTYDYPKYEEESKLKRNEIKGVKLSSMGVYQILAIYATVAGSLSLAIMVAGISFWMCSNGSLQCRICI

SEQ ID NO: 9694 - protein, 565 aa, Artificial Sequence
  derived and/or modified protein sequence (wt) from hemagglutinin__InfluenzaA__AFV53260
MKAKLLILLCALSATDADTICIGYHANNSTDTVDTVLEKNVTVTHSVNLLEDSHNGKLCRLKGKAPLQLGNCNIAGWVLGNPECESLLSNRSWSYIAETPNSENGTCYPGDFADYEELREQLSSVSSFERFEIFPKERSWPNHTTRGVTAACPHAMKSSFYKNLVWLTEANGSYPNLSRSYVNNQEKEVLVLWGVHHPSNIEDQRTLYRKDNAYVSVVSSNYNRRFTPEIAKRPKVRGQSGRINYYWTLLEPGDTIIFEATGNLIAPWYAFALSRGPGSGIITSNAPLDECDTKCQTPQGAINSSLPFQNIHPVTIGECPKYVRSTKLRMVTGLRNIPSFQSRGLFGAIAGFIEGGWTGMMDGWYGYHHQNEQGSGYAADQKSTQNAINGITNKVNSVIEKMNTQFTAVGKEFNKLEKRMENLNKKVDDGFLDIWTYNAELLVLLENERTLDFHDSNVKNLYEKVKNQLRNNAKELGNGCFEFYHKCDNECMESVKNGTYDYPKYSEESKLNREKIDGVKLESMGVYRILAIYSTVASSLVLLVSLGAISFWMCSNGSLQCRICI

SEQ ID NO: 9695 - protein, 562 aa, Artificial Sequence
  derived and/or modified protein sequence (wt) from hemagglutinin__InfluenzaA__AFV53271
MAITYLILLFTAVRGDQICIGYHANNSTEKVDTILERNVTVTHAKDILEKTHNGKLCKLNGIPPLELGDCSIAGWLLGNPECDRFLRVPEWSYIMEKENPRYSLCYPGSFNDYEELKHLLSSVKHFEKVKILPKDGWTQHTTTGGSMACAVSGKPSFFRNMVWLTEKGQNYPVAKGSYNNTSGEQMLIIWGVHHPNDEAEQRALYQKVGTYVSASTSTLNKRSTPEIAARPKVNGLGSRMEFSWTLLDMWDTINFESTGNLVAPEYGFKISKRGSSGIMKTEGTLENCETKCQTPLGAINTTLPFHNVHPLTIGECPKYVKSEKLVLATGLRNIPQIESRGLFGAIAGFIEGGWQGMVDGWYGYHHSNDQGSGYAADKESTQKAFDGITNKVNSVIEKMNTQFEAVGKEFSNLEKRLENLNKKMEDGFLDVWTYNAELLVLMENERTLDFHDSNVKNLYDKVRMQLRDNVKELGNGCFEFYHKCDNECMDSVKNGTYDYPKYEEESKLNRNEIKGVKLSSMGVYQILAIYATVAGSLSLAIMMAGISFWMCSNGSLQCRICI

SEQ ID NO: 9696 - protein, 562 aa, Artificial Sequence
  derived and/or modified protein sequence (wt) from hemagglutinin__InfluenzaA__AFV53282
MAIIYLILLFTAVRGDQICIGYHANNSTEKVDTILERNVTVTHAKDILEKTHNGKLCKLNGIPPLELGDCSIAGWLLGNPECDRLLSVPEWSYIMEKENPRDGLCYPGSFNDYEELKHLLSSVKHFEKVKILPKDRWTQHTTTGGSRACAVSGNPSFFRNMVWLTKKGTNYPVAKGSYNNTSGEQMLIIWGVHHPNDETEQRTLYQNVGTYVSVGTSTLNKRSTPEIATRPKVNGLGSRMEFSWTLLDMWDTINFESTGNLIAPEYGFKISKRGSSGIMKTEGTLENCETKCQTPLGAINTTLPFHNVHPLTIGECPKYVKLEKLVLATGLRNVPQIESRGLFGAIAGFIEGGWQGMVDGWYGYHHSNDQGSGYAADKESTQKAFDVITNKVNSVIEKMNTQFEAVGKEFSNLERRLENLNKKMEDGFLDVWTYNAELLVLMENERTLDFHDSNVKNLYDKVRMQLRDNVKELGNGCFEFYHKCDDECMNSVKNGTYDYPKYEEESKLNRNEIKGVKLSSMGVYQILAIYATVAGSLSLAIMMAGISFWMCSNGSLQCRICI

SEQ ID NO: 9697 - protein, 562 aa, Artificial Sequence
  derived and/or modified protein sequence (wt) from hemagglutinin__InfluenzaA__AFV53293
MAIIYLILLFTSVRGDQICIGYHANNSTEKVDTILERNVTVTHAKNILEKTHNGKLCKLNGIPPLELGDCSIAGWLLGNPECDRLLRVPEWSYIMEKENPKYSLCYPGSFNDYEELKHLLSSVKHFEKVKILPKDGWTQHTTNGGSRACAVSGNPSFFRNMVWLTKKGPNYPVAKGSYNNTSGEQMLIIWGVHHPNDEAEQRALYQEVGTYVSASTSTLNKRSTPEIAARPKVNGLGSRMEFSWTLLDMWDTINFESTGNLVAPEYGFKISKRGSSGVMKTEGTLENCETKCQTPLGAINTTLPFHNVHPLTIGECPKYVKSEKLVLATGLRNVPQIESRGLFGAIAGFIEGGWQGMVDGWYGYHHSNDQGSGYAADKESTQKAFDGITNKVNSVIEKMNTQFEAVGKEFSNLEKRLENLNKKMEDGFLDVWTYNAELLVLMENERTLDFHDSNVKNLYDKVRMQLRDNVKELGNGCFEFYHKCDDECMDSVKNGTYDYPKYEEESKLNRNEIKGVKLSSMGVYQILAIYATVAGSLSLAIMMAGISFWMCSNGSLQCRICI

SEQ ID NO: 9698 - protein, 562 aa, Artificial Sequence
  derived and/or modified protein sequence (wt) from hemagglutinin__InfluenzaA__AFV53304
MAIIYLILLFTAVRGDQICIGYHANNSTEKVDTILEQNVTVTHAKDILEKTHNGKLCKLNGIPPLELGDCSIAGWLLGNPECDRLLSVPEWSYIMEKENPRDGLCYPGSFNDYEELKHLLSSVKHFEKVKILPKDRWTQHTTTGGSRACAVSGNPSFFRNMVWLTKKESNYPVAKGSYNNTSGEQMLIIWGVHHPNDETEQRTLYQNVGTYVSVGTSTLNKRSTPNIATRPKVNGLGSRMEFSWTLLDMWDTINFESTGNLIAPEYGFKISKRGSSGIMKTEGTLENCETKCQTPLGAINTTLPFHNVHPLTIGECPKYVKSEKLVLATGLRNVPQIESRGLFGAIAGFIEGGWQGMVDGWYGYHHSNDQGSGYAADKESTQKAFDGITNKVNSVIEKMNTQFEAVGKEFSNLERRLENLNKKMEDGFLDVWTYNAELLVLMENERTLDFHDSNVKNLYDKVRMQLRDNVKELGNGCFEFYHKCDDECMNSVKNGTYDYPKYEEESKLNRNEIKGVKLSSMGVYQILAIYATVAGSLSLAIMMAGISFWMCSNGSLQCRICI

SEQ ID NO: 9699 - protein, 562 aa, Artificial Sequence
  derived and/or modified protein sequence (wt) from hemagglutinin__InfluenzaA__AFV53314
MAIIYLILLFTAVRGDKICIGYHANNSTETVDTILERNVTVTHAKDILEKTHNGKLCKLNGIPPLELGDCSIAGWLLGNPECDRLLSVPEWSYIMEKENPRNGLCYPGNFNDYEELKHLLSSVKHFEKVKILPKDRWTQHTTTGGSQACAVSGNPSFFRNMVWLTEKESNYPVAKGSYNNTSGEQMLIIWGVHHPIDETEQRTLYQNVGTYVSVGTSTLNKRSTPEIAKRPKVNGLGSRMEFSWTLLDMWDTITFESTGNLIAPEYGFKISKRGSSGIMKTEGTLENCETKCQTPLGAINTTLPFHNVHPLTIGECPKYVKSEKLVLATGLRNVPQIESRGLFGAIAGFIEGGWQGMVDGWYGYHHSNDQGSGYAADKESTQKAFDGITNKVNAVIEKINTQFEAVGKEFSNLERRLENLNKKMEDGFLDVWTYNAELLVLMENERTLDFHDSNVKNLYDKVRMQLRDNVKELGNGCFEFYHKCDDECMNSVKNGTYDYPKYEEESKLNRNEIKGVKLSSMGVYQILAIYATVAGSLSLAIMMAGISFWMCSNGSLQCRICI

SEQ ID NO: 9700 - protein, 562 aa, Artificial Sequence
  derived and/or modified protein sequence (wt) from hemagglutinin__InfluenzaA__AFV53325
MAIIYLILLFTAVRGDQICIGYHANNSTEKVDTILERNVTVTHAKDILEKTHNGKLCKLNGIPPLELGDCSIAGWLLGNPECDRLLSVPEWSYIMEKENPRDGLCYPGSFNDYEELKHLLSSVKHFEKVKILPKDRWTQHTTTGGSRACAVSGNPSFFRNMVWLTKKGSNYTVAKGSYNNTSGEQMLIIWGVHHPNDETEQRTLYQNVGTYVSVSTSTLNKRSTPEIATRPKVNGLGSRMEFSWTLLDMWDTINFESTGNLIAPEYGFKISKRGSSGIMKTEGTLENCETKCQTPLGAINTTLPFHNVHPLTIGECPKYVKSEKLVLATGLRNVPQIESRGLFGAIAGFIEGGWQGMVDGWYGYHHSNDQGSGYAADKESTQKAFDGITNKVNSVIEKMNTQFEAVGKEFSNLERRLENLNKKMEDGFLDVWTYNAELLVLMENERTLDFHDSNVKNLYDKVRMQLRDNVKELGNGCFEFYHKCDDECMNSVKNGTYDYPKYEEESKLNRNEIKGVKLSSMGVYQILAIYATVAGSLSLAIMMAGISFWMCSNGSLQCRICI

SEQ ID NO: 9701 - protein, 562 aa, Artificial Sequence
  derived and/or modified protein sequence (wt) from hemagglutinin__InfluenzaA__AFV53336
MAIIYLILLFTAVRGDQICIGYHANNSTEKVDTILERNVTVTHAKDILEKTHNGKLCKLNGIPPLELGDCSIAGWLLGNPECDRLLRVPEWSYIMEKENPRYSLCYPGSFNDYEELKHLLSSVKHLEKVKILPKDGWTQHETDGGSKACAVSGKPSFFRNMVWLTKKGPNYPVAKRSYNNTSGEQMLIIWGVHHPNDEAEQRALYQKVGTYVSASTSTLNKRSTPEIAARPEVSGLGSRMEFSWTLLDVWDTISFESTGNLVAPEYGFKISKRGSSGIMKTEGTLGNCETKCQTPLGAINTTLPFHNVHPLTIGECPKYVKSEKLVLATGLRNVPQIESRGLFGAIAGFIEGGWQGMVDGWYGYHHSNDQGSGYAADKESTQKAFDRITNKVNSVIEKMNTQFEAVGKEFSNLEKRLENLNKKMEDGFLDVWTYNAELLVLMENERILDFHDSNVKNLYDKVRMQLRDNVKELGNGCFEFYHKCDDECMNSVKNGTYDYPKYEEESKLKRNEIKGVKLSSMGVYQILAIYATVAGSLSLAIMIAGISFWMCSNGSLQCRICI

SEQ ID NO: 9702 - protein, 566 aa, Artificial Sequence
  derived and/or modified protein sequence (wt) from hemagglutinin__InfluenzaA__AFV68720
MKTIIALSYILCLVFAQKLPGNDNSTATLCLGHHAVPNGTIVKTITNDQIEVTNATELVQSSSTGEICDSPHQILDGENCTLIDALLGDPQCDGFQNKKWDLFVERSKAYSNCYPYDVPDYASLRSLVASSGTLEFNNESFNWTGVTQNGTSSACIRRSDSSFFSRLNWLTHLNFKYPALNVTMPNNEQFDKLYIWGVHHPGTDKDQIFLYAQASGRITVSTKRSQQAVIPNIGSRPRIRNIPSRISIYWTIVKPGDILLINSTGNLIAPRGYFKIRSGKSSIMRSDAPIGKCNSECITPNGSIPNDKPFQNVNRITYGACPRYVKQNTLKLATGMRNVPEKQTRGIFGAIAGFIENGWEGMVDGWYGFRHQNSEGRGQAADLKSTQAAIDQINGKLNRLIGKTNEKFHQIEKEFSEVEGRIQDLEKYVEDTKIDLWSYNAELLVALENQHTIDLTDSEMNKLFEKTKKQLRENAEDMGNGCFKIYHKCDNACIGSIRNGTYNHDVYRDEALNNRFQIKGVELKSGYKDWILWISFAISCFLLCVALLGFIMWACQKGNIRCNICI

SEQ ID NO: 9703 - protein, 566 aa, Artificial Sequence; identical to SEQ ID NO: 2669
  derived and/or modified protein sequence (wt) from hemagglutinin__InfluenzaA__AFX96347

SEQ ID NO: 9704 - protein, 566 aa, Artificial Sequence
  derived and/or modified protein sequence (wt) from hemagglutinin__InfluenzaA__AFX96359
MKAILVVLLYTFATANADTLCIGYHANNSTDTVDTVLEKNVTVTHSVNLLEDKHNGKLCKLRGVAPLHLGKCNIAGWILGNPECESLSTASSWSYIVETSSSDNGTCYPGDFIDYEELREQLSSVSSFERFEIFPKTSSWPNHDSNKGVTAACPHAGAKSFYKNLIWLVKKGNSYPKLSKSYINDKGKEVLVLWGIHHPSTSADQQSLYQNADTYVFVGTSRYSKKFKPEIAIRPKVRDQEGRMNYYWTLVEPGDKITFEATGNLVVPRYAFAMERNAGSGIIISDTPVHDCNTTCQTPKGAINTSLPFQNIHPITIGKCPKYVKSTKLRLATGLRNVPSIQSRGLFGAIAGFIEGGWTGMVDGWYGYHHQNEQGSGYAADLKSTQNAIDEITNKVNSVIEKMNTQFTAVGKEFNHLEKRIENLNKKIDDGFLDIWTYNAELLVLLENERTLDYHDSNVKNLYEKVRSQLKNNAKEIGNGCFEFYHKCDNTCMESVKNGTYDYPKYSEEAKLNREEINGVKLESTRIYQILAIYSTVASSLVLVVSLGAISFWMCSNGSLQCRICI

SEQ ID NO: 9705 - protein, 566 aa, Artificial Sequence
  derived and/or modified protein sequence (wt) from hemagglutinin__InfluenzaA__AFX96366
MKAILVVLLYTFATANADTLCIGYHANNSTDTVDTVLEKNVTVTHSVNLLEDKHNGKLCKLRGVAPLHLGKCNIAGWILGNPECESLSTASSWSYIVETSSSDNGTCYPGDFIDYEELREQLSSVSSFERFEIFPKTSSWPNHDSNKGVTAACPHAGAKSFYKNLIWLVKKGNSYPKLSKSYINDRGKEVLVLWGIHHPSTSADQQSLYQNADAYVFVGTSRYSKKFKPEIAIRPKVRDQEGRMNYYWTLVEPGDKITFEATGNLVVPRYAFAMERNAGSGIIISDTPVHDCNTTCQTPKGAINTSLPFQNIHPITIGKCPKYVKSTKLRLATGLRNVPSIQSRGLFGAIAGFIEGGWTGMVDGWYGYHHQNEQGSGYAADLKSTQNAIDKITNKVNSVIEKMNTQFTAVGKEFNQLEKRIENLNKKVDDGFLDIWTYNAELLVLLENERTLDYHDSNVKNLYEKVRSQLKNNAKEIGNGCFEFYHKCDNTCMESVKNGTYDYPKYSEEAKLNREEIDGVKLESTRIYQILAIYSTVASSLVLVVSLGAISFWMCSNGSLQCRICI

SEQ ID NO: 9706 - protein, 566 aa, Artificial Sequence; identical to SEQ ID NO: 4169
  derived and/or modified protein sequence (wt) from hemagglutinin__InfluenzaA__AFX96383

SEQ ID NO: 9707 - protein, 566 aa, Artificial Sequence; identical to SEQ ID NO: 2669
  derived and/or modified protein sequence (wt) from hemagglutinin__InfluenzaA__AFX96398

SEQ ID NO: 9708 - protein, 566 aa, Artificial Sequence; identical to SEQ ID NO: 2669
  derived and/or modified protein sequence (wt) from hemagglutinin__InfluenzaA__AFX96408

SEQ ID NO: 9709 - protein, 566 aa, Artificial Sequence; identical to SEQ ID NO: 2669
  derived and/or modified protein sequence (wt) from hemagglutinin__InfluenzaA__AFX96418

SEQ ID NO: 9710 - protein, 566 aa, Artificial Sequence; identical to SEQ ID NO: 2669
  derived and/or modified protein sequence (wt) from hemagglutinin__InfluenzaA__AFX96428

SEQ ID NO: 9711 - protein, 566 aa, Artificial Sequence; identical to SEQ ID NO: 2669
  derived and/or modified protein sequence (wt) from hemagglutinin__InfluenzaA__AFX96438

SEQ ID NO: 9712 - protein, 566 aa, Artificial Sequence; identical to SEQ ID NO: 2669
  derived and/or modified protein sequence (wt) from hemagglutinin__InfluenzaA__AFX96448

SEQ ID NO: 9713 - protein, 566 aa, Artificial Sequence; identical to SEQ ID NO: 2669
  derived and/or modified protein sequence (wt) from hemagglutinin__InfluenzaA__AFX96458

SEQ ID NO: 9714 - protein, 566 aa, Artificial Sequence; identical to SEQ ID NO: 2669
  derived and/or modified protein sequence (wt) from hemagglutinin__InfluenzaA__AFX96468

SEQ ID NO: 9715 - protein, 566 aa, Artificial Sequence; identical to SEQ ID NO: 2669
  derived and/or modified protein sequence (wt) from hemagglutinin__InfluenzaA__AFX96478

SEQ ID NO: 9716 - protein, 566 aa, Artificial Sequence; identical to SEQ ID NO: 2669
  derived and/or modified protein sequence (wt) from hemagglutinin__InfluenzaA__AFX96488

SEQ ID NO: 9717 - protein, 566 aa, Artificial Sequence
  derived and/or modified protein sequence (wt) from hemagglutinin__InfluenzaA__AFX96498
MKAILVVLLYTFATANADTLCIGYHANNSTDTVDTVLEKNVTVTHSVNLLEDKHNGKLCKLRGVAPLHLGKCNIAGWILGNPECESLSTASSWSYIVETSSSDNGTCYPGDFIDYEELREQLSSVSSFERFEIFPKTSSWPNHDSNKGVTAACPHAGAKSFYKNLIWLVKKGNSYPKISKSYINDKGKEVLVLWGIHHPSTSADQQSLYQNADAYVFVGTSRYSKKFKPEIAIRPKVRDQEGRMNYYWTLVEPGDKITFEATGNLVVPRYAFAMERNAGSGIIISDTPVHDCNTTCQTPKGAINTSLPFQNIHPITIGKCPKYVKSTKLRLATGLRNVPSIQSRGLFGAIAGFIEGGWTGMVDGWYGYHHQNEQGSGYAADLKSTQNAIDEITNKVNSVIEKMNTQFTAVGKEFNHLEKRIENLNKKVDDGFLDIWTYNAELLVLLENERTLDYHDSNVKNLYEKVRSQLKNNAKEIGNGCFEFYHKCDNTCMESVKNGTYDYPKYSEEAKLNREEIDGVKLESTRIYQILAIYSTVASSLVLVVSLGAISFWMCSNGSLQCRICI

SEQ ID NO: 9718 - protein, 566 aa, Artificial Sequence; identical to SEQ ID NO: 2669
  derived and/or modified protein sequence (wt) from hemagglutinin__InfluenzaA__AFX96508

SEQ ID NO: 9719 - protein, 566 aa, Artificial Sequence; identical to SEQ ID NO: 4169
  derived and/or modified protein sequence (wt) from hemagglutinin__InfluenzaA__AFX96518

SEQ ID NO: 9720 - protein, 566 aa, Artificial Sequence; identical to SEQ ID NO: 2669
  derived and/or modified protein sequence (wt) from hemagglutinin__InfluenzaA__AFX96528

SEQ ID NO: 9721 - protein, 566 aa, Artificial Sequence; identical to SEQ ID NO: 4169
  derived and/or modified protein sequence (wt) from hemagglutinin__InfluenzaA__AFX96538

SEQ ID NO: 9722 - protein, 566 aa, Artificial Sequence
  derived and/or modified protein sequence (wt) from hemagglutinin__InfluenzaA__AFX96548
MKAILVVLLYTFATANADTLCIGYHANNSTDTVDTVLEKNVTVTHSVNLLEDKHNGKLCKLRGVAPLHLGKCNIAGWILGNPECESLSTASSWSYIVETSSSDNGTCYPGDFIDYEELREQLSSVSSFERFEIFPKTSSWPNHDSNKGVTAACPHAGAKSFYKNLIWLVKKGNSYPKLSKSYINDKGKEVLVLWGIHHPSTSADQQSLYQNADTYVFVGTSRYSKKFKPEIAIRPKVRDQEGRMNYYWTLVEPGDKITFEATGNLVVPRYAFAMERNAGSGIIISDTPVHDCNTTCQTPKGAINTSLPFQNIHPITIGKCPKYVKSTKLRLATGLRNVPSIQSRGLFGAIAGFIEGGWTGMVDGWYGYHHQNEQGSGYAADLKSTQNAIDKITNKVNSVIEKMNTQFTAVGKEFNHLEKRIENLNKKIDDGFLDIWTYNAELLVLLENERTLDYHDSNVKNLYEKVRSQLKNNAKEIGNGCFEFYHKCDNTCMESVKNGTYDYPKYSEEAKLNREEIDGVKLESTRIYQILAIYSTVASSLVLVVSLGAISFWMCSNGSLQCRICI

SEQ ID NO: 9723 - protein, 566 aa, Artificial Sequence; identical to SEQ ID NO: 2669
  derived and/or modified protein sequence (wt) from hemagglutinin__InfluenzaA__AFX96558

SEQ ID NO: 9724 - protein, 566 aa, Artificial Sequence; identical to SEQ ID NO: 3829
  derived and/or modified protein sequence (wt) from hemagglutinin__InfluenzaA__AFX96568

SEQ ID NO: 9725 - protein, 566 aa, Artificial Sequence; identical to SEQ ID NO: 3829
  derived and/or modified protein sequence (wt) from hemagglutinin__InfluenzaA__AFX96578

SEQ ID NO: 9726 - protein, 566 aa, Artificial Sequence; identical to SEQ ID NO: 2669
  derived and/or modified protein sequence (wt) from hemagglutinin__InfluenzaA__AFX96588

SEQ ID NO: 9727 - protein, 566 aa, Artificial Sequence; identical to SEQ ID NO: 2669
  derived and/or modified protein sequence (wt) from hemagglutinin__InfluenzaA__AFX96598

SEQ ID NO: 9728 - protein, 566 aa, Artificial Sequence
  derived and/or modified protein sequence (wt) from hemagglutinin__InfluenzaA__AFX96608
MKAILVVLLYTFATANADTLCIGYHANNSTDTVDTVLEKNVTVTHSVNLLEDKHNGKLCKLRGVAPLHLGKCNIAGWILGNPECESLSTASSWSYIVETSSSDNGTCYPGDFIDYEELREQLSSVSSFERFEIFPKTSSWPNHDSNKGVTAACPHAGAKSFYKNLIWLVKKGNSYPKLSKSYINDKGKEVLVLWGIHHPSTSADQQSLYQNADAYVFVGTSRYSKKFKPEIAIRPKVRDQEGRMNYYWTLVEPGDKITFEATGNLVVPRYAFAMERNAGSGIIISDTPVHDCNTTCQTPKGAINTSLPFQNIHPITIGKCPKYVKSTKLRLATGLRNVPSIQSRGLFGAIAGFIEGGWTGMVDGWYGYHHQNEQGSGYAADLKSTQNAIDEITNKVNSVIEKMNTQFTAVGKEFNHLEKRIENLNKKVDDGFLDIWTYNAELLVLLENERTLDYHDSNVKNLYEKVRSQLKNNAKEIGNGCFEFYHKCDNTCMESVKNGTYDYPKYSEEAKLNREKIDGVKLESTRIYQILAIYSTLASSLVLVVSLGAISFWMCSNGSLQCRICI

SEQ ID NO: 9729 - protein, 566 aa, Artificial Sequence; identical to SEQ ID NO: 2669
  derived and/or modified protein sequence (wt) from hemagglutinin__InfluenzaA__AFX96618

SEQ ID NO: 9730 - protein, 566 aa, Artificial Sequence; identical to SEQ ID NO: 3829
  derived and/or modified protein sequence (wt) from hemagglutinin__InfluenzaA__AFX96628

SEQ ID NO: 9731 - protein, 566 aa, Artificial Sequence
  derived and/or modified protein sequence (wt) from hemagglutinin__InfluenzaA__AFX96638
MKAILVVLLYTFATANADTLCIGYHANNSTDTVDTVLEKNVTVTHSVNLLEDKHNGKLCKLRGVAPLHLGKCNIAGWILGNPECESLSTASSWSYIVETSSSDNGTCYPGDFINYEELREQLSSVSSFERFEIFPKTSSWPNHDSNKGVTAACPHAGAKSFYKNLVWLVKKGNSYPKLSKSYINDKGKEVLVLWGIHHPSTSADQQSLYQNADAYVFVGTSRYSKKFKPEIAIRPKVRDQEGRMNYYWTLVEPGDKITFEATGNLMVPRYAFAMERNAGSGIIISDTPVHDCNTTCQTPKGAINTSLPFQNIHPITIGKCPKYVKSTKLRLATGLRNVPSIQSRGLFGAIAGFIEGGWTGMVDGWYGYHHQNEQGSGYAADLKSTQNAIDEITNKVNSVIEKMNTQFTAVGKEFNHLEKRIENLNKKVDDGFLDIWTYNAELLVLLENERTLDYHDSNVKNLYEKVRSQLKNNAKEIGNGCFEFYHKCDNTCMESVKNGTYDYPKYSEEAKLNREEIDGVKLESTRIYQILAIYSTVASSLVLVVSLGAISFWMCSNGSLQCRICI

SEQ ID NO: 9732 - protein, 566 aa, Artificial Sequence; identical to SEQ ID NO: 2669
  derived and/or modified protein sequence (wt) from hemagglutinin__InfluenzaA__AFX96648

SEQ ID NO: 9733 - protein, 566 aa, Artificial Sequence; identical to SEQ ID NO: 3829
  derived and/or modified protein sequence (wt) from hemagglutinin__InfluenzaA__AFX96658

SEQ ID NO: 9734 - protein, 566 aa, Artificial Sequence
  derived and/or modified protein sequence (wt) from hemagglutinin__InfluenzaA__AFX96668
MKAILVVLLYTFATANADTLCIGYHANNSTDTVDTVLEKNVTVTHSVNLLEDKHNGKLCKLRGVAPLHLGKCNIAGWILGNPECESLSTASSWSYIVETSSSDNGTCYPGDFIDYEELREQLSSVSSFERFEIFPKTSSWPNHDSNKGVTAACPHAGAKSFYKNLIWLVKKGNSYPKLSKSYINDKGKEVLVLWGIHHPSTSADQQSLYQNADAYVFVGTSRYSKKFKPEIAIRPKVRDQEGRMNYYWTLVEPGDKITFEATGNLVVPRYAFAMERNAGSGIIISDTPVHDCNTTCQTPKGAINTSLPFQNIHPITIGKCSKYVKSTKLRLATGLRNVPSIQSRGLFGAIAGFIEGGWTGMVDGWYGYHHQNEQGSGYAADLKSTQNAIDEITNKVNSVIEKMNTQFTAVGKEFNHLEKRIENLNKKVDDGFLDIWTYNAELLVLLENERTLDYHDSNVKNLYEKVRSQLKNNAKEIGNGCFEFYHKCDNTCMESVKNGTYDYPKYSEEAKLNREEIDGVKLESTRIYQILAIYSTVASSLVLVVSLGAISFWMCSNGSLQCRICI

SEQ ID NO: 9735 - protein, 566 aa, Artificial Sequence
  derived and/or modified protein sequence (wt) from hemagglutinin__InfluenzaA__AFX96678
MKAILVVLLYTFATANADTLCIGYHANNSTDTVDTVLEKNVTVTHSVNLLEDKHNGKLCKLRGVAPLHLGKCNIAGWILGNPECESLSTASSWSYIVETSSSDNGTCYPGDFIDYEELREQLSSVSSFERFEIFPKTSSWPNHDSNKGVTAACSHAGAKSFYKNLIWLVKKGNSYPKLSKSYINDKGKEVLVLWGIHHPSTSADQQSLYQNADAYVFVGTSRYSKKFKPEIAIRPKVRDQEGRMNYYWTLVEPGDKITFEATGNLVVPRYAFAMERNAGSGIIISDTPVHDCNTTCQTPKGAINTSLPFQNIHPITIGKCPKYVKSTKLRLATGLRNVPSIQSRGLFGAIAGFIEGGWTGMVDGWYGYHHQNEQGSGYAADLKSTQNAIDEITNKVNSVIEKMNTQFTAVGKEFNHLEKRIENLNKKVDDGFLDIWTYNAELLVLLENERTLDYHDSNVKNLYEKVRSQLKNNAKEIGNGCFEFYHKCDNTCMESVKNGTYDYPKYSEEAKLNREEIDGVKLESTRIYQILAIYSTVASSLVLVVSLGAISFWMCSNGSLQCRICI

SEQ ID NO: 9736 - protein, 566 aa, Artificial Sequence
  derived and/or modified protein sequence (wt) from hemagglutinin__InfluenzaA__AFX96688
MKAILVVLLYTFATANADTLCIGYHANNSTDTVDTVLEKNVTVTHSVNLLEDKHNGKLCKLRGVAPLHLGKCNIAGWILGNPDCESLSTASSWSYIVETSSSDNGTCYPGDFIDYEELREQLSSVSSFERFEMFPKTSSWPNHDSNKGVTAACPHAGAKSFYKNLIWLVKKGNSYPKLSKSYINDKGKEVLVLWGIHHPSTSADQQSLYQNADAYVFVGTSRYSKKFKPEIAIRPKVRDQEGRMNYYWTLVEPGDKITFEATGNLVVPRYAFAMERNDGSGIIISDTPVHDCNTTCQTPKGAINTSLPFQNIHPITIGKCPKYVKSTKLRLATGLRNVPSIQSRGLFGAIAGFIEGGWTGMVDGWYGYHHQNEQGSGYAADLKSTQNAIDEITNKVNSVIEKMNTQFTAVGKEFNHLEKRIENLNKKVDDGFLDIWTYNAELLVLLENERTLDYHDSNVKNLYEKVRSQLKNNAKEIGNGCFEFYHKCDNTCMESVKNGTYDYPKYSEEAKLNREEIDGVKLESTRIYQILAIYSTVASSLVLVVSLGAISFWMCSNGSLQCRICI

SEQ ID NO: 9737 - protein, 566 aa, Artificial Sequence; identical to SEQ ID NO: 2669
  derived and/or modified protein sequence (wt) from hemagglutinin__InfluenzaA__AFX96698

SEQ ID NO: 9738 - protein, 566 aa, Artificial Sequence
  derived and/or modified protein sequence (wt) from hemagglutinin__InfluenzaA__AFX96718
MKAILVVLLYTFATANADTLCIGYHANNSTDTVDTVLEKNVTVTHSVNLLEDKHNGKLCKLRGVAPLHLGKCNIAGWILGNPECESLSTASSWSYIVETSSSDNGTCYPGDFIDYEELREQLSSVSSFERFEIFPKTSSWPNHDSNKGVTAACPHAGAKSFYKNLIWLVKKGNSYPKISKSYINDKGKEVLVLWGIHHPSTSADQQSLYQNADTYVFVGTSRYSKKFKPEIAIRPKVRDQEGRMNYYWTLVEPGDKITFEATGNLVVPRYAFAMERNAGSGIIISDTPVHDCNTTCQTPKGAINTSLPFQNIHPITIGKCPKYVKSTKLRLATGLRNVPSIQSRGLFGAIAGFIEGGWTGMVDGWYGYHHQNEQGSGYAADLKSTQKAIDEITNKVNSVIEKMNTQFTAVGKEFNHLEKRIENLNKKIDDGFLDIWTYNAELLVLLENERTLDYHDSNVKNLYEKVRSQLKNNAKEIGNGCFEFYHKCDNTCMESVKNGTYDYPKYSEEAKLNREEIDGVKLESTRIYQILAIYSTVASSLVLVVSLGAISFWMCSNGSLQCRICI

SEQ ID NO: 9739 - protein, 566 aa, Artificial Sequence; identical to SEQ ID NO: 9738
  derived and/or modified protein sequence (wt) from hemagglutinin__InfluenzaA__AFX96728

SEQ ID NO: 9740 - protein, 566 aa, Artificial Sequence; identical to SEQ ID NO: 3139
  derived and/or modified protein sequence (wt) from hemagglutinin__InfluenzaA__AFX96738

SEQ ID NO: 9741 - protein, 566 aa, Artificial Sequence
  derived and/or modified protein sequence (wt) from hemagglutinin__InfluenzaA__AFX96748
MKAILVVLLYTIATANADTLCIGYHANNSTDTVDTVIEKNVTVTHSVNLLEDKHNGKLCKLRGVAPLHLGKCNIAGWILGNPECESLSTASSWSYIVETSSSDNGTCYPGDFIDYEELREQLSSVSSFERFEMFPKTSSWPNHDSNKGVTAACPHAGAKSFYKNLIWLVKKGNSYPKLSKSYINDKGKEVLVLWGIHHPSTSADQQSLYQNADAYVFVGTSRYSKKFKPEIAIRPKVRDQEGRMNYYWTLVEPGDKITFEATGNLVVPRYAFAMERNAGSGIIISDTPVHDCNTTCQTPKGAINTSLPFQNIHPITIGKCPKYVKSTKLRLATGLRNVPSIQSRGLFGAIAGFIEGGWTGMVDGWYGYHHQNEQGSGYAADLKSTQNAIDEITNKVNSVIEKMNTQFTAVGKEFNHLEKRIENLNKKVDDGFLDIWTYNAELLVLLENERTLDYHDSNVKNLYEKVRSQLKNNAKEIGNGCFEFYHKCDNTCMESVKNGTYDYPKYSEEAKLNREEIDGVKLESTRIYQILAIYSTVASSLVLVVSLGAISFWMCSNGSLQCRICI

SEQ ID NO: 9742 - protein, 566 aa, Artificial Sequence
  derived and/or modified protein sequence (wt) from hemagglutinin__InfluenzaA__AFX96758
MKAILVVLLYTFATANADTLCIGYHANNSTDTVDTVLEKNVTVTHSVNLLEDKHNGKLCKLRGVAPLHLGKCNIAGWILGNPECESLSTASSWSYIVETSSSDNGTCYPGDFIDYEELREQLSSVSSFERFEMFPKTSSWPNHDSNKGVTAACPHAGAKSFYKNLIWLVKKGNSYPKLSKSYINDKGKEVLVLWGIHHPSTSADQQSLYQNADTYVFVGTSRYSKKFKPEIAIRPKVRDQEGRMNYYWTLVEPGDKITFEATGNLVVPRYAFAMERNAGSGIIISDTPVHDCNTTCQTPKGAINTSLPFQNIHPITIGKCPKYVKSTKLRLATGLRNVPSIQSRGLFGAIAGFIEGGWTGMVDGWYGYHHQNEQGSGYAADLKSTQNAIDEITNKVNSVIEKMNTQFTAVGKEFNHLEKRIENLNKKIDDGFLDIWTYNAELLVLLENERTLDYHDSNVKNLYEKVRSQLKNNAKEIGNGCFEFYHKCDNTCMESVKNGTYDYPKYSEEAKLNREEIDGVKLESTRIYQILAIYSTVASSLVLVVSLGAISFWMCSNGSLQCRICI

SEQ ID NO: 9743 - protein, 566 aa, Artificial Sequence
  derived and/or modified protein sequence (wt) from hemagglutinin__InfluenzaA__AFX96768
MKAILVVLLYTFATANADTLCIGYHANNSTDTVDTVLEKNVTVTHSVNLLEDKHNGKLCKLRGVAPLHLGKCNIAGWILGNPECESLSTAISWSYIVETSSSDNGTCYPGDFIDYEELREQLSSVSSFERFEIFPKTSSWPNHDSNKGVTAACPHAGAKSFYKNLIWLVKKGNSYPKLSKSYINDKGKEVLVLWGIHHPSTSADQQSLYQNADAYVFVGTSRYSKKFKPEIAIRPKVRDQEGRMNYYWTLVEPGDKITFEATGNLVVPRYAFAMERNAGSGIIISDTPVHDCNTTCQTPKGAINTSLPFQNIHPITIGKCPKYVKSTKLRLATGLRNVPSIQSRGLFGAIAGFIEGGWTGMVDGWYGYHHQNEQGSGYAADLKSTQNAIDEITNKVNSVIEKMNTQFTAVGKEFNHLEKRIENLNKKVDDGFLDIWTYNAELLVLLENERTLDYHDSNVKNLYEKVRSQLKNNAKEIGNGCFEFYHKCDNTCMESVKNGTYDYPKYSEEAKLNREEIDGVKLESTKIYQILAIYSTVASSLVLVVSLGAISFWMCSNGSLQCRICI

SEQ ID NO: 9744 - protein, 566 aa, Artificial Sequence
  derived and/or modified protein sequence (wt) from hemagglutinin__InfluenzaA__AFX96778
MKAILVILLYTFATANADTLCIGYHANNSTDTVDTILEKNVTVTHSVNLLEDKHNGKLCKLRGVAPLHLGKCNIAGWILGNPECESLSTASSWSYIVETSSSDNGTCYPGDFIDYEELREQLSSVSSFERFEIFPKTSSWPNHDSNKGVTAACPHAGAKSFYKNLIWLVKKGNSYPKLSKSYINDKGKEVLVLWGIHHPSTSADQQSLYQNADAYVFVGTSRYSKKFKPEIAIRPKVRDQEGRMNYYWTLVEPGDKITFEATGNLVVPRYAFAMERNAGSGIIISDTPVHDCNTTCQTPKGAINTSLPFQNIHPITIGKCPKYVKSTKLRLATGLRNVPSIQSRGLFGAIAGFIEGGWTGMVDGWYGYHHQNEQGSGYAADLKSTQNAIDEITNKVNSVIEKMNTQFTAVGKEFNHLEKRIENLNKKVDDGFLDIWTYNAELLVLLENERTLDYHDSNVKNLYEKVRSQLKNNAKEIGNGCFEFYHKCDNTCMESVKNGTYDYPKYSEEAKLNREEIDGVKLESTRIYQILAIYSTVASSLVLVVSLGAISFWMCSNGSLQCRICI

SEQ ID NO: 9745 - protein, 566 aa, Artificial Sequence
  derived and/or modified protein sequence (wt) from hemagglutinin__InfluenzaA__AFX96788
MKAILVVLLYTFATANADTLCIGYHANNSTDTVDTVLEKNVTVTHSVNLLEDKHNGKLCKLRGVAPLHLGKCNIAGWILGNPECESLSTASSWSYIVETSSSDNGTCYPGDFIDYEELREQLSSVSSFERFEIFPKTSSWPNHDSNKGVTAACPHAGAKSFYKNLIWLVKKGNSYPKLSKSYINDKGKEVLVLWGIHHPSTSADQQSLYQNADAYVFVGTSRYSKKFKPEIAIRPKVRDQEGRMNYYWTLVEPGDKITFEATGNLVVPRYAFAMEKNAGSGIIISDTPVHDCNTTCQTPKGAINTSLPFQNIHPITIGKCPKYVKSTKLRLATGLRNVPSIQSRGLFGAIAGFIEGGWTGMVDGWYGYHHQNEQGSGYAADLKSTQNAIDKITNKVNSVIEKMNTQFTAVGKEFNHLEKRIENLNKKVDDGFLDIWTYNAELLVLLENERTLDYHDSNVKNLYEKVRSQLKNNAKEIGNGCFEFYHKCDNTCMESVKNGTYDYPKYSEEAKLNREEIDGVKLESTRIYQILAIYSTVASSLVLVVSLGAISFWMCSNGSLQCRICI

SEQ ID NO: 9746 - protein, 566 aa, Artificial Sequence; identical to SEQ ID NO: 9745
  derived and/or modified protein sequence (wt) from hemagglutinin__InfluenzaA__AFX96798

SEQ ID NO: 9747 - protein, 566 aa, Artificial Sequence; identical to SEQ ID NO: 3829
  derived and/or modified protein sequence (wt) from hemagglutinin__InfluenzaA__AFX96808

SEQ ID NO: 9748 - protein, 566 aa, Artificial Sequence; identical to SEQ ID NO: 6909
  derived and/or modified protein sequence (wt) from hemagglutinin__InfluenzaA__AFX96818

SEQ ID NO: 9749 - protein, 566 aa, Artificial Sequence; identical to SEQ ID NO: 9745
  derived and/or modified protein sequence (wt) from hemagglutinin__InfluenzaA__AFX96828

SEQ ID NO: 9750 - protein, 566 aa, Artificial Sequence; identical to SEQ ID NO: 5266
  derived and/or modified protein sequence (wt) from hemagglutinin__InfluenzaA__AFX96838

SEQ ID NO: 9751 - protein, 566 aa, Artificial Sequence
  derived and/or modified protein sequence (wt) from hemagglutinin__InfluenzaA__AFX96856
MKAILVVLLYTFATANADTLCIGYHANNSTDTVDTVLEKNVTVTHSVNLLEDKHNGKLCKLRGVAPLHLGKCNIAGWILGNPECESLSTASSWSYIVETSSSDNGTCYPGDFIDYEELREQLSSVSSFERFEIFPKTSSWPNHDSNKGVTAACTHAGAKSFYKNLIWLVKKGNSYPKLSKSYINDKGKEVLVLWGIHHPSTSADQQSLYQNADAYVFVGTSRYSKKFKPEIAIRPKVRDQEGRMNYYWTLVEPGDKITFEATGNLVVPRYAFAMERNAGSGIIISDTPVHDCNTTCQTPKGAINTSLPFQNIHPITIGKCPKYVKSTKLRLATGLRNVPSIQSRGLFGAIAGFIEGGWTGMVDGWYGYHHQNEQGSGYAADLKSTQNAIDEITNKVNSVIEKMNTQFTAVGKEFNHLEKRIENLNKKVDDGFLDIWTYNAELLVLLENERTLDYHDSNVKNLYEKVRSQLKNNAKEIGNGCFEFYHKCDNTCMESVKNGTYDYPKYSEEAKLNREEIDGVKLESTRIYQILAIYSTVASSLVLVVSLGAISFWMCSNGSLQCRICI

SEQ ID NO: 9752 - protein, 566 aa, Artificial Sequence; identical to SEQ ID NO: 9734
  derived and/or modified protein sequence (wt) from hemagglutinin__InfluenzaA__AFX96904

SEQ ID NO: 9753 - protein, 566 aa, Artificial Sequence; identical to SEQ ID NO: 4169
  derived and/or modified protein sequence (wt) from hemagglutinin__InfluenzaA__AFX96914

SEQ ID NO: 9754 - protein, 566 aa, Artificial Sequence
  derived and/or modified protein sequence (wt) from hemagglutinin__InfluenzaA__AFX96924
MKAILVVLLYTFATANADTLCIGYHANNSTDTVDTVLEKNVTVTHSVNLLEDKHNGKLCKLRGVAPLHLGKCNIAGWILGNPECESLSTASSWSYIVETSSSDNGTCYPGDFIDYEELREQLSSVSSFERFEIFPKTSSWPNHDSNKGVTAACPHAGAKSFYKNLIWLVKKGNSYPKLSKSYINDKGKEVLVLWGIHHPSTSADQQSLYQNADAYVFVGTSRYSKRFKPEIAIRPKVRDQEGRMNYYWTLVEPGDKITFEATGNLVVPRYAFAMERNAGSGIIISDTPVHDCNTTCQTPKGAINTSLPFQNIHPITIGKCPKYVKSTKLRLATGLRNVPSIQSRGLFGAIAGFIEGGWTGMVDGWYGYHHQNEQGSGYAADLKSTQNAIDEITNKVNSVIEKMNTQFTAVGKEFNHLEKRIENLNKKVDDGFLDIWTYNAELLVLLENERTLDYHDSNVKNLYEKVRSQLKNNAKEIGNGCFEFYHKCDNTCMESVKNGTYDYPKYSEEAKLNREEIDGVKLESTRIYQILAIYSTVASSLVLVVSLGAISFWMCSNGSLQCRICI

SEQ ID NO: 9755 - protein, 566 aa, Artificial Sequence; identical to SEQ ID NO: 2669
  derived and/or modified protein sequence (wt) from hemagglutinin__InfluenzaA__AFX96934

SEQ ID NO: 9756 - protein, 566 aa, Artificial Sequence
  derived and/or modified protein sequence (wt) from hemagglutinin__InfluenzaA__AFY24097
MKAILVVLLYTFATANADTLCIGYHADNSTDTVDTVLEKNVTVTHSVDLLEDKHNGKLCKLRGVAPLHLGKCNIAGWILGNPECESLSTASSWSYIVETSSSDNGTCYPGDFIDYEELREQLSSVSSFERFEIFPKTSSWPNHDSNKGVTAACPHAGAKSFYKNLIWLVKKGNSYPKLNKSYINDKGKEVLVLWGIHHPSTSTDQQSLYQNADAYVFVGTSRYSKKFKPEIAIRPKVRDQEGRMNYYWTLVEPGDKITFEATGNLVVPRYAFAMERNAGSGIIISDTPVHDCNTTCQTPKGAINTSLPFQNIHPITIGKCPKYVKSTKLRLATGLRNVPSIQSRGLFGAIAGFIEGGWTGMVDGWYGYHHQNEQGSGYAADLKSTQNAIDEITNKVNSVIEKMNTQFTAVGKEFNHLEKRIENLNKKVDDGFLDIWTYNAELLVLLENERTLDYHDSNVKNLYEKVRSQLKNNAKEIGNGCFEFYHKCDNTCMESVKNGTYDYPKYSEEAKLNREEIDGVKLESTRIYQILAIYSTVASSLVLVVSLGAISFWMCSNGSLQCRICI

SEQ ID NO: 9757 - protein, 566 aa, Artificial Sequence; identical to SEQ ID NO: 630
  derived and/or modified protein sequence (wt) from hemagglutinin__InfluenzaA__AFY24162

SEQ ID NO: 9758 - protein, 566 aa, Artificial Sequence
  derived and/or modified protein sequence (wt) from hemagglutinin__InfluenzaA__AFY24195
MKTIIALSYILCLVFAQKLPGNDNSTATLCLGHHAVPNGTIVKTITNDQIEVTNATELVQSSSTGGICDSPHQILDGENCTLIDALLGDPQCDGFQNKKWDLFVERSKAYSNCYPYDVPDYASLRSLVASSGTLEFNNESFNWTGVTQNGTSSACKRRSNNSFFSRLNWLTHLKFKYPALNVTMPNNEKFDKLYIWGVHHPGTDNDQIFLYAQASGRITVSTKRSQQTVIPNIGSRPRIRNIPSRISIYWTIVKPGDILLINSTGNLIAPRGYFKIRSGKSSIMRSDAPIGKCNSECITPNGSIPNDKPFQNVNRITYGACPRYVKQNTLKLATGMRNVPEKQTRGIFGAIAGFIENGWEGMVDGWYGFRHQNSEGIGQAADLKSTQAAINQINGKLNRLIGKTNEKFHQIEKEFSEVEGRIQDLEKYVEDTKIDLWSYNAELLVALENQHTIDLTDSEMNKLFERTKKQLRENAEDMGNGCFKIYHKCDNACIGSIRNGTYDHDVYRDEALNNRFQIKGVELKSGYKDWILWISFAISCFLLCVALLGFIMWACQKGNIRCNICI

SEQ ID NO: 9759 - protein, 566 aa, Artificial Sequence; identical to SEQ ID NO: 185
  derived and/or modified protein sequence (wt) from hemagglutinin__InfluenzaA__AFY24217

SEQ ID NO: 9760 - protein, 566 aa, Artificial Sequence
  derived and/or modified protein sequence (wt) from hemagglutinin__InfluenzaA__AGB08294
MKAILVVLLYTFATANADTLCIGYHANNSTDTVDTVLEKNVTVTHSVNLLEDKHNGKLCKLRGVAPLHLGKCNIAGWILGNPECESLSTASSWSYIVETSSSDNGTCYPGDFINYEELREQLSSVSSFERFEIFPKTSSWPNHDSNKGVTAACPQAGAKSFYKNLIWLVKKGNSYPKLIKSYINDKGKEVLVLWGIHHPSTSADQQSLYQNADAYVFVGTSKYSKKFKPEIAVRPKVRDQEGRMNYYWTLVEPGDKITFEATGNLLVPRYAFVMERNAGSGIIISDTPVHDCNTTCQTPKGAINTSLPFQNIHPITIGKCPKYVKSTKLRLATGLRNIPSIQSRGLFGAIAGFIEGGWTGMVDGWYGYHHQNAQGSGYAADLKSTQNAIDKITNKVNSVIEKMNTQFTAVGKEFNHLEKRIENLNKKVDDGFLDIWTYNAELLVLLENERTLDYHDSNVKNLYEKVRSQLKNNAKEIGNGCFEFYHKCDNTCMESVKNGTYDYPRYSEEAKLNREEIDGVKLESTRIYQILAIYSTVASSLVLVVSLGAISFWMCSNGSLQCRICI

SEQ ID NO: 9761 - protein, 566 aa, Artificial Sequence
  derived and/or modified protein sequence (wt) from hemagglutinin__InfluenzaA__AGB08295
MKAILVVLLYTFATANADTLCIGYHANNSTDTVDTVIEKNVTVTHSVNLLEDKHNGKLCKLRGVAPLHLGKCNIAGWILGNPECESLSTASSWSYIVETSSSDNGTCYPGDFINYEELREQLSSVSSFERFEIFPKTSSWPNHDSNKGVTAACPHAGAKSFYKNLIWLVKKGNSYPKLSKSYINDKRKEVLVLWGIHHPSTTADQQSLYQNADAYVFVGTSRYSKKFKPEIAIRPKVRDQEGRMNYYWTLVEPGDKITFEATGNLVVPRYAFAMERTAGSGIIISDTPVHDCNTTCQTPKGAINTSLPFQNIHPITIGKCPKYVKSTKLRLATGLRNIPSIQSRGLFGAIAGFIEGGWTGMVDGWYGYHHQNEQGSGYAADLKSTQNAIDKITNKVNSVIEKMNTQFTAVGKEFNHLEKRIENLNKKVDDGFLDIWTYNAELLVLLENERTLDYHDSNVKNLYEKVRNQLKNNAKEIGNGCFEFYHKCDNTCMESVKNGTYDYPKYSEEAKLNREEIDGVKLESTRIYQILAIYSTVASSLVLVVSLGAISFWMCSNGSLQCRICI

SEQ ID NO: 9762 - protein, 566 aa, Artificial Sequence
  derived and/or modified protein sequence (wt) from hemagglutinin__InfluenzaA__AGB08296
MKAILVVLLYTFATANADTLCIGYHANNSTDTVDTVLEKNVTVTHSVNLLEDKHNGKLCKLRGVAPLHLGKCNIAGWILGNPECESLSTASSWSYIVETSSSDNGTCYPGDFINYEELREQLSSVSSFERFEIFPKTSSWPNHDSNKGVTAACPHAGAKSFYKNLIWLVKKGNSYPKLSKSYINDKGKEVLVLWGIHHPSTTADQQSLYQNADAYVFVGTSRYSKKFKPEIAIRPKVRGQEGRMNYYWTLVEPGDKITFEATGNLVVPRYAFAMERTAGSGIIISDTPVHDCNTTCQTPKGAINTSLPFQNIHPITIGKCPKYVKSTKLRLATGLRNVPSIQSRGLFGAIAGFIEGGWTGMVDGWYGYHHQNEQGSGYAADLKSTQNAIDKITNKVNSVIEKMNTQFTAVGKEFNHLEKRIENLNKKVDDGFLDIWTYNAELLVLLENERTLDYHDSNVKNLYEKVRNQLKNNAKEIGNGCFEFYHKCDNTCMESVKNGTYDYPKYSEEAKLNREEIDGVKLESTRIYQILAIYSTVASSLVLVVSLGAISFWMCSNGSLQCRICI

SEQ ID NO: 9763 - protein, 566 aa, Artificial Sequence
  derived and/or modified protein sequence (wt) from hemagglutinin__InfluenzaA__AGB08297
MKAILVVLLYTFATANADTLCIGYHANNSTDTVDTVLEKNVTVTHSVNLLEDKHNGKLCKLRGVAPLHLGKCNIAGWILGNPECESLSTASSWSYIVETSSSDNGTCYPGDFINYEELREQLSSVSSFERFEIFPKTSSWPNHDSNKGVTAACPHAGAKSFYKNLIWLVKKGNSYPKLSESYINDKGKEVLVLWGIHHPSTTADQQSLYQNADAYVFVGTSRYSKKFKPEIAIRPKVRDQEGRMNYYWTLVEPGDKITFEATGNLVVPRYAFAMERTAGSGIIISDTPVHDCNTTCQTPKGAINTSLPFQNIHPITIGKCPKYVKSTKLRLATGLRNVPSIQSRGLFGAIAGFIEGGWTGMVDGWYGYHHQNEQGSGYAADLKSTQNAIDKITNKVNSVIEKMNTQFTAVGKEFNHLEKRIENLNKKVDDGFLDIWTYNAELLVLLENERTLDYHDSNVKNLYEKVRNQLKNNAKEIGNGCFEFYHKCDNTCMESVKNGTYDYPKYSEEAKLNREEIDGVKLESTRIYQILAIYSTVASSLVLVVSLGAISFWMCSNGSLQCRICI

SEQ ID NO: 9764 - protein, 566 aa, Artificial Sequence
  derived and/or modified protein sequence (wt) from hemagglutinin__InfluenzaA__AGB08298
MKAILVVLLYTFATANADTLCIGYHANNSTDTVDTVLEKNVTVTHSVNLLEDKHNGKLCKLRGIAPLHLGKCNIAGWILGNPECESLSTASSWSYIVETSSSDNGTCYPGDFINYEELREQLSSVSSFERFEIFPKTSSWPNHDSNKGVTAACPHAGAKSFYKNLIWLVKKGNSYPRLSKSYINDKGKEVLVLWGIHHPSTTADQQSLYQNADAYVFVGTSRYSKKFKPEIAIRPKVRDQEGRMNYYWTLVEPGDKITFEATGNLVVPRYAFAMERTAGSGIIISDTPVHDCNTTCQTPKGAINTSLPFQNIHPITIGKCPKYVKSTKLRLATGLRNVPSIQSRGLFGAIAGFIEGGWTGMVDGWYGYHHQNEQGSGYAADLKSTQNAIDKITNKVNSVIEKMNTQFTAVGKEFNQLEKRIENLNKKVDDGFLDIWTYNAELLVLLENERTLDYHDSNVKNLYEKVRNQLKNNAKEIGNGCFEFYHKCDNTCMESVKNGTYDYPKYSEEAKLNREEIDGVKLESTRIYQILAIYSTVASSLVLVVSLGAISFWMCSNGSLQCRICI

SEQ ID NO: 9765 - protein, 566 aa, Artificial Sequence
  derived and/or modified protein sequence (wt) from hemagglutinin__InfluenzaA__AGB08301
MKTIIALSYILCLVFAQELPGNDDSTATLCLGHHAVPNGTIVKTITNDQIEVTNATELVQSSSTGEICNSPHQILDGENCTLIDALLGDPQCDGFQNKKWDLFVERSKAHSNCYPYDVPDYASLRSLVASSGTLEFNNESFNWTGVTQNGTSSACIRRSNNSFFSRLNWLTHLNFKYPALNVTMPNNEQFDKLYIWGVHHPGTDKDQIFLYAQASGRITVSTKRSQQAVIPNIGSRPRVRNIPSRVSIYWTVVKPGDILLINSTGNLIAPRGYFKIRSGKSSIMRSDAPIGKCNSACITPNGSIPNDKPFQNVNRITYGACPRYVKQNTLKLATGMRNVPEKQTRGIFGAIAGFIENGWEGMVDGWYGFRHQNSEGRGQAADLKSTQAAIDQINGKLNRLIGKTNEKFHQIEKEFSEVEGRIQDLEKYVEDTKIDLWSYNAELLVALENQHTIDLTDSEMNKLFEKTKKQLRENAEDMGNGCFKIYHKCDNACIGSIRNGTYDHNVYRDEALNNRFQIKGVELKSGYKDWILWISFAISCFLLCVALLGFIMWACQKGNIRCNICI

SEQ ID NO: 9766 - protein, 566 aa, Artificial Sequence
  derived and/or modified protein sequence (wt) from hemagglutinin__InfluenzaA__AGB08343
MKTIIALSYIFCLVLAQDLPGNDNSTATLCLGHHAVPNGTLVKTITNDQIEVTNATELVQSSSTGRICNNPHRILDGINCTLIDALLGDPHCDGFQNKKWDLFVERSKAFSNCYPYDVPDYASLRSLVASSGTLEFINEGFNWTGVTQNGGSYACKRGPDNGFFSRLNWLYKSESTYPVLNVTMPNNDNFDKLYIWGVHHPSTDKEQTNLYVQASGRVTVSTKRSQQTIIPNVGSRPWVRGLSSRISIYWTIVKPGDILVINSNGNLIAPRGYFKIRNGKSSIMRSDAPIGTCSSECITPNGSIPNDKPFQNVNKITYGACPKYVKQNTLKLATGMRNVPEKQTRGIFGAIAGFIENGWEGMIDGWYGFRHQNSEGTGQAADLKSTQAAIDQINGKLNRVIEKTNEKFHQIEKEFSEVEGRIQDLEKYVEDTKIDLWSYNAELLVALENQHTIDLTDSEMNKLFEKTRRQLRENAEDMGNGCFKIYHKCDNACIGSIRNGTYDHDVYRDEALNNRFQIKGVELKSGYKDWILWISFAISCFLLCVVLLGFIMWACQKGNIRCNICI

SEQ ID NO: 9767 - protein, 566 aa, Artificial Sequence
  derived and/or modified protein sequence (wt) from hemagglutinin__InfluenzaA__AGB08362
MKTIIALSYIFCLALGQDLPGNDNSTATLCLGHHAVPNGTLVKTITDDQIEVTNATELVQSSSTGKICNNPHRILDGINCTLIDALLGDPHCDVFQDETWDLFVERSKAFSNCYPYDVPDYASLRSLVASSGTLEFITEGFTWTGVTQNGGSNACKRGPGSGFFSRLNWLTKSGSTYPVLNVTMPNNDNFDKLYIWGVHHPSTNQEQTSLYVQASGRVTVSTRRSQQTIIPNIGSRPWVRGLSSRISIYWTIVKPGDVLVINSNGNLIAPRGYFKMRTGKSSIMRSDAPIDTCISECITPNGSIPNDKPFQNVNKITYGACPKYVKQNTLKLATGMRNVPEKQTRGLFGAIAGFIENGWEGMIDGWYGFRHQNSEGTGQAADLKSTQAAIDQINGKLNRVIEKTNEKFHQIEKEFSEVEGRIQDLEKYVEDTKIDLWSYNAELLVALENQHTIDLTDSEMNKLFDKTRRQLRENAEDMGNGCFKIYHKCDNACIESIRNGTYDHDVYRDEALNNRFQIKGVELKSGYKDWILWISFAISCFLLCVVLLGFIMWACQRGNIRCNICI

SEQ ID NO: 9768 - protein, 566 aa, Artificial Sequence; identical to SEQ ID NO: 6822
  derived and/or modified protein sequence (wt) from hemagglutinin__InfluenzaA__AGB12986

SEQ ID NO: 9769 - protein, 566 aa, Artificial Sequence; identical to SEQ ID NO: 7086
  derived and/or modified protein sequence (wt) from hemagglutinin__InfluenzaA__AGB13006

SEQ ID NO: 9770 - protein, 566 aa, Artificial Sequence
  derived and/or modified protein sequence (wt) from hemagglutinin__InfluenzaA__AGB13016
MKAILVVLLYTIATANADTLCIGYHANNSTDTVDTVLEKNVTVTHSVNLLEDKHNGKLCKLRGVAPLHLGKCNIAGWILGNPECESLSTASSWSYIVETSSSDNGTCYPGDFINYEELREQLSSVSSFERFEIFPKTSSWPNHDSNKGVTAACPHAGAKSFYKNLIWLVKKGNSYPKLSKSYINDKGKEVLVLWGIHHPSTTADQQSLYQNADAYVFVGTSRYSKKFKPEIAIRPKVRDQEGRMNYYWTLVEPGDKITFEAIGNLVVPRYAFAMEKNAGSGIIISDTPVHDCNTTCQTPKGAINTSLPFQNIHPITIGKCPKYVKSTKLRLATGLRNVPSIQSRGLFGAIAGFIEGGWTGMVDGWYGYHHQNEQGSGYAADLKSTQNAIDKITNKVNSVIEKMNTQFTAVGKEFNHLEKRIENLNKKVDDGFLDIWTYNAELLVLLENERTLDYHDSNVKNLYEKVRNQLKNNAKEIGNGCFEFYHKCDNTCMESVKNGTYDYPKYSEEAKLNREEIDGVKLESARVYQILAIYSTVASSLVLVVSLGAISFWMCSNGSLQCRICI

SEQ ID NO: 9771 - protein, 566 aa, Artificial Sequence; identical to SEQ ID NO: 6867
  derived and/or modified protein sequence (wt) from hemagglutinin__InfluenzaA__AGB13026

SEQ ID NO: 9772 - protein, 566 aa, Artificial Sequence; identical to SEQ ID NO: 6809
  derived and/or modified protein sequence (wt) from hemagglutinin__InfluenzaA__AGB13036

SEQ ID NO: 9773 - protein, 566 aa, Artificial Sequence
  derived and/or modified protein sequence (wt) from hemagglutinin__InfluenzaA__AGB13048
MKAILVVLLYTFATANADTLCIGYHANNSTDTVDTVLEKNVTVTHSVNLLEDKHNGKLCKLRGVAPLHLGKCNIAGWILGNPECESLSTASSWSYIVETSSSDNGTCYPGDFINYEELREQLSSVSSFERFEIFPKTSSWPNHDSNKGVTAACPHAGAKSFYKNLIWLVKKGNSYPKLSKSYINDKGKEVLVLWGIHHPSTTADQQSLYQNADAYVFVGTSRYSKKFKPEIAIRPKVRDQEGRMNYYWTLVEPGDKITFEATGNLVVPRYAFAMERNAGSGIIISDTPVHDCNTTCQTPKGAINTSLPFQNIHPITIGKCPKYVKSTKLRLATGLRNVPSIQSRGLFGAIAGFIEGGWTGMVDGWYGYHHQNEQGSGYAADLKSTQNAIDKITNKVNSVIEKMNTQFTAVGKEFNHLEKRIENLNKKVDDGFLDIWTYNAELLVLLENERTLDYHDSNVKNLYEKVRNQLKNNAKEIGNGCFEFYHKCDNTCIESVKNGTYDYPKYSEEAKLNREEIDGVKLESTRIYQILAIYSTVASSLVLVVSLGAISFWMCSNGSLQCRICI

SEQ ID NO: 9774 - protein, 566 aa, Artificial Sequence
  derived and/or modified protein sequence (wt) from hemagglutinin__InfluenzaA__AGB13066
MKAILVVLLYTFATANADTLCIGYHANNSTDTVDTVLEKNVTVTHSVNLLEDKHNGKLCKLRGVAPLHLGKCNIAGWILGNPECESLSTASSWSYIVETSSSDNGTCYPGDFIDYEELREQLSSVSSFERFEIFPKTSSWPNHDSNKGVTAACPHAGAKSFYKNLIWLVKKGNSYPKLSKSYINDKGKEVLVLWGIHHPSTSADQQSLYQNADAYVFVGTSRYSKKFKPEIAIRPKVRDQEGRMNYYWTLVEPGDKITFEATGNLVVPRYAFAMERNAGSGIIISDTPVHDCNTTCQTPKGAINTSLPFQNIHPITIGKCPKYVKGTKLRLATGLRNVPSIQSRGLFGAIAGFIEGGWTGMVDGWYGYHHQNEQGSGYAADLKSTQHAIDEITNKVNSVIEKMNTQFTAVGKEFNHLEKRIENLNKKVDDGFLDIWTYNAELLVLLENERTLDYHDSNVKNLYEKVRSQLKNNAKEIGNGCFEFYHKCDNTCMESVKNGTYDYPKYSEEAKLNREEIDGVKLESTRIYQILAIYSTVASSLVLVVSLGAISFWMCSNGSLQCRICI

SEQ ID NO: 9775 - protein, 566 aa, Artificial Sequence; identical to SEQ ID NO: 6909
  derived and/or modified protein sequence (wt) from hemagglutinin__InfluenzaA__AGB13082

SEQ ID NO: 9776 - protein, 566 aa, Artificial Sequence; identical to SEQ ID NO: 6809
  derived and/or modified protein sequence (wt) from hemagglutinin__InfluenzaA__AGB13105

SEQ ID NO: 9777 - protein, 566 aa, Artificial Sequence; identical to SEQ ID NO: 6867
  derived and/or modified protein sequence (wt) from hemagglutinin__InfluenzaA__AGB13125

SEQ ID NO: 9778 - protein, 566 aa, Artificial Sequence; identical to SEQ ID NO: 6867
  derived and/or modified protein sequence (wt) from hemagglutinin__InfluenzaA__AGB13130

SEQ ID NO: 9779 - protein, 566 aa, Artificial Sequence
  derived and/or modified protein sequence (wt) from hemagglutinin__InfluenzaA__AGB13140
MKAILVVLLYTFATANADTLCIGYHANNSTDTVDTVLEKNVTVTHSVNLLEDKHNGKLCKLRGVAPLHLGKCNIAGWILGNPECESLSTASLWSYIVETSSSDNGTCYPGDFIDYEELREQLSSVSSFERFEIFPKTSSWPNHDSNKGVTAACPHAGAKSFYKNLIWLVKKGNSYPKLSKSYINDKGKEVLVLWGIHHPSTTADQQSLYQNADTYVFVGTSRYSKKFKPEIAIRPKVRDQEGRMNYYWTLVEPGDKITFEATGNLVVPRYAFAMERNAGSGIIISDTPVHDCNTTCQTPKGAINTSLPFQNIHPITIGKCPKYVKSTKLRLATGLRNVPSIQSRGLFGAIAGFIEGGWTGMVDGWYGYHHQNEQGSGYAADLKSTQNAIDKITNKVNSVIEKMNTQFTAVGKEFNHLEKRIENLNKKVDDGFLDIWTYNAELLVLLENERTLDYHDSNVKNLYEKVRNQLKNNAKEIGNGCFEFYHKCDNTCMESVKNGTYDYPKYSEEAKLNREEIDGVKLESTRIYQILAIYSTVASSLVLVVSLGAISFWMCSNGSLQCRICI

SEQ ID NO: 9780 - protein, 566 aa, Artificial Sequence
  derived and/or modified protein sequence (wt) from hemagglutinin__InfluenzaA__AGB13159
MKAILVVMLYTFATANADTLCIGYHANNSTDTVDTVLEKNVTVTHSVNLLEDKHNGKLCKLRGVASLHLGKCNIAGWILGNPECESLSTASSWSYIVETSSSDNGTCYPGDFIDYEELREQLSSVSSFERFEIFPKTSSWPNHDSNKGVTAACPHAGAKGFYKNLIWLVKKGNSYPKLSKSYINDKGKEVLVLWGIHHPSTTADQQSLYQNADTYVFVGTSRYSKKFKPEIAIRPKVRDQEGRMNYYWTLVEPGDKITFEATGNLVVPRYAFAMERNAGSGIIISDTPVHDCNTTCQTPKGAINTSLPFQNIHPITIGKCPKYVKSTKLRLATGLRNVPSIQSRGLFGAIAGFIEGGWTGMVDGWYGYHHQNEQGSGYAADLKSTQNAIDKITNKVNSVIEKMNTQFTAVGKEFNHLEKRIENLNKKVDDGFLDIWTYNAELLVLLENERTLDYHDSNVKNLYEKVRNQLKNNAKEIGNGCFEFYHKCDNTCMESVKNGTYDYPKYSEEAKLNREEIDGVKLESTRIYQILAIYSTVASSLVLVVSLGAISFWMCSNGSLQCRICI

SEQ ID NO: 9781 - protein, 566 aa, Artificial Sequence; identical to SEQ ID NO: 6824
  derived and/or modified protein sequence (wt) from hemagglutinin__InfluenzaA__AGB13170

SEQ ID NO: 9782 - protein, 566 aa, Artificial Sequence
  derived and/or modified protein sequence (wt) from hemagglutinin__InfluenzaA__AGB13180
MKAILVVLLYTFATANADTLCIGYHANNSTDTVDTVLEKNVTVTHSVNLLEDKHNGKLCKLRGVAPLHLGKCNIAGWILGNPECESLSTASSWSYIVETSSSDNGTCYPGDFINYEELREQLSSVSSFERFEIFPKTSSWPNHDSNKGVTAACPHAGAKSFYKNLIWLVKKGNSYPKLSKSYINDKGKEVLVLWGIHHPSTTADQQSLYQNADAYVFVGTSRYSKKFKPEIAIRPKVRDQEGRMNYYWTLVEPGDKITFEATGNLVVPRYAFAMERNAGSGIIISDTSVHDCNTTCQTPKGAINTSLPFQNIHPITIGKCPKYVKSTKLRLATGLRNVPSIQSRGLFGAIAGFIEGGWTGMVDGWYGYHHQNEQGSGYAADLKSTQNAIDKITNKVNSVIEKMNTQFTAVGKEFNHLEKRIENLNKKVDDGFLDIWTYNAELLVLLENERTLDYHDSNVKNLYEKVRNQLKNNAKEIGNGCFEFYHKCDNTCMESVKNGTYDYPKYSEEAKLNREEIDGVKLESTRIYQILAIYSTVASSLVLVVSLGAISFWMCSNGSLQCRICI

SEQ ID NO: 9783 - protein, 566 aa, Artificial Sequence; identical to SEQ ID NO: 6867
  derived and/or modified protein sequence (wt) from hemagglutinin__InfluenzaA__AGB13190

SEQ ID NO: 9784 - protein, 566 aa, Artificial Sequence
  derived and/or modified protein sequence (wt) from hemagglutinin__InfluenzaA__AGB13200
MKAILVVLLYTFATANADTLCIGYHANNSTDTVDTVLEKNVTVTHSVNLLEDKHNGKLCKLRGVAPLHLGKCNIAGWILGNPECESLSTASSWSYIVETSSSDNGTCYPGDFINYEELREQLSSVSSFERFEIFPKTSSWPNHDSNKGVTAACPHAGVKSFYKNLIWLVKKGNSYPKLSKSYINDKGKEVLVLWGIHHPSTTTDQQSLYQNADAYVFVGTSKYSKKFKPEIAIRPKVRDQEGRMNYYWTLVEPGDKITFEATGNLVVPRYAFAMERNAGSGIIISDTPVHDCNTTCQTPKGAINTSLPFQNIHPITIGKCPKYVKSTKLRLATGLRNVPSIQSRGLFGAIAGFIEGGWTGMVDGWYGYHHQNEQGSGYAADLKSTQNAIDKITNKVNSVIEKMNTQFTAVGKEFNHLEKRIENLNKKVDDGFLDIWTYNAELLVLLENERTLDYHDSNVKNLYEKVRNQLKNNAKEIGNGCFEFYHKCDNTCMESVKNGTYDYPKYSEEAKLNREEIDGVKLESTRIYQILAIYSTVASSLVLVVSLGAISFWMCSNGSLQCRICI

SEQ ID NO: 9785 - protein, 566 aa, Artificial Sequence
  derived and/or modified protein sequence (wt) from hemagglutinin__InfluenzaA__AGB13210
MKATLVVLLYTFATANADTLCIGYHANNSTDTVDTVLEKNVTVTHSVNLLEDKHNGKLCKLRGVAPLHLGKCNIAGWILGNPECESLSTASSWSYIVETSSSDNGTCYPGDFINYEELREQLSSVSSFERFEIFPKTSSWPNHDSNKGVTAACPHAGAKSFYKNLIWLVKKGNSYPKLSKSYINDKGKEVLVLWGIHHPSTSADQQSLYQNADAYVFVGTSKYSKKFKPEIAVRPKVRDQEGRMNYYWTLVEPGDKITFEATGNLLVPRYAFAMERNAGSGIIISDTPVHDCNTTCQTPKGAINTSLPFQNIHPITIGKCPKYVKSTKLRLATGLRNVPSIQSRGLFGAIAGFIEGGWTGMVDGWYGYHHQNEQGSGYAADLKSTQNAIDKITNKVNSVIEKMNTQFTAVGKEFNHLEKRIENLNKKVDDGFLDIWTYNAELLVLLENERTLDYHDSNVKNLYEKVRSQLKNNAKEIGNGCFEFYHKCDNTCMESVKNGTYDYPKYSEEAKLNREEIDGVKLESTRIYQILAIYSTVASSLVLVVSLGAISFWMCSNGSLQCRICI

SEQ ID NO: 9786 - protein, 566 aa, Artificial Sequence
  derived and/or modified protein sequence (wt) from hemagglutinin__InfluenzaA__AGB13220
MKAILVVLLYTFATANADTLCIGYHANNSTDTVDTVLEKNVTVTHSVNLLEDKHNGKLCKLRGVAPLHLGKCNIAGWILGNPECESLSTASSWSYIVETSISDNGTCYPGDFINYEELREQLSSVSSFERFEIFPKTSSWPNHDSNKGVTAACPHAGAKSFYKNLIWLVKKGNSYPKLSKSYINDKGKEVLVLWGIHHPSTTADQQSLYQNADAYVFVGTSKYSKKFKPEIAIRPKVRDQEGRMNYYWTLVEPGDKITFEATGNLVVPRYAFAMERNAGSGIIISDTPVHDCNTTCQTPKGAINTSLPFQNIHPITIGKCPKYVKSTKLRLATGLRNVPSIQSRGLFGAIAGFIEGGWTGMVDGWYGYHHQNEQGSGYAADLKSTQNAIDKITNKVNSVIEKMNTQFTAVGKEFNHLEKRIENLNKKVDDGFLDIWTYNAELLVLLENERTLDYHDSNVKNLYEKVRNQLKNNAKEIGNGCFEFYHKCDNTCMESVKNGTYDYPKYSEEAKLNREEIDGVKLESTRIYQILAIYSTVASSLVLVVSLGAISFWMCSNGSLQCRICI

SEQ ID NO: 9787 - protein, 566 aa, Artificial Sequence
  derived and/or modified protein sequence (wt) from hemagglutinin__InfluenzaA__AGB13230
MKAILVVLLYTFATANADTLCIGYHANNSTDTVDTVLEKNVTVTHSVNLLEDNHNGKLCKLRGVAPLHLGKCNIAGWILGNPECESLSTASSWSYIVETSSSDNGTCYPGDFINYEELREQLSSVSSFERFEIFPKTSSWPNHDSNKGVTAACPHAGAKSFYKNLIWLVKKGNSYPKLSKSYINDKGKEVLVLWGIHHPSTTADQQSLYQNADAYVFVGTSRYSKKFKPEIAIRPKVRDQEGRMNYYWTLVEPGDKITFEATGNLVVPRYAFAMERNAGSGIIISDTPVHDCNTTCQTPKGAINTSLPFQNIHPITIGKCPKYVKSTKLRLATGLRNVPSIQSRGLFGAIAGFIEGGWTGMVDGWYGYHHQNEQGSGYAADLKSTQNAIDKITNKVNSVIEKMNTQFTAVGKEFNRLEKRIENLNKKVDDGFLDIWTYNAELLVLLENERTLDYHDSNVKNLYEKVRNQLKNNAKEIGNGCFEFYHKCDNTCMESVKNGTYDYPKYSEEAKLNREEIDGVKLESTRIYQILAIYSTVASSLVLVVSLGAISFWMCSNGSLQCRICI

SEQ ID NO: 9788 - protein, 566 aa, Artificial Sequence; identical to SEQ ID NO: 6867
  derived and/or modified protein sequence (wt) from hemagglutinin__InfluenzaA__AGB13240

SEQ ID NO: 9789 - protein, 566 aa, Artificial Sequence; identical to SEQ ID NO: 6867
  derived and/or modified protein sequence (wt) from hemagglutinin__InfluenzaA__AGB13250

SEQ ID NO: 9790 - protein, 566 aa, Artificial Sequence
  derived and/or modified protein sequence (wt) from hemagglutinin__InfluenzaA__AGB13260
MKAILVVLLYTFATANADTLCIGYHANNSTDTVDTVLEKNVTVTHSVNLLEDKHNGKLCKLRGVAPLHLGKCNIAGWILGNPECESLSTASSWSYIVETSSSDNGTCYPGDFIDYEELREQLSSVSSFERFEIFPKTSSWPNHDSNKGVTTACPHAGSKSFYKNLIWLVKKGNSYPKLSKSYINDKGKEVLVLWGIHHPPTSADQQSLYQNADAYVFVGTSRYSKKFKPEIAIRPKVRDQEGRMNYYWTLVEPGDKITFEATGNLVVPRYAFAMERNAGSGIIISDTPVHDCNTTCQTPKGAINTSLPFQNVHPITIGKCPKYVKSTKLRLATGLRNVPSIQSRGLFGAIAGFIEGGWTGMVDGWYGYHHQNEQGSGYAADLKSTQNAIDEITNKVNSVIEKMNTQFTAVGKEFNHLEKRIENLNKKVDDGFLDIWTYNAELLVLLENERTLDYHDSNVKNLYEKVRSQLKNNAKEIGNGCFEFYHKCDNTCMESIKNGTYDYPKYSEEAKLNREEIDGVKLESTRIYQILAIYSTVASSLVLVVSLGAISFWMCSNGSLQCRICI

SEQ ID NO: 9791 - protein, 566 aa, Artificial Sequence
  derived and/or modified protein sequence (wt) from hemagglutinin__InfluenzaA__AGB13270
MKAILVVLLYTFATANADTLCIGYHANNSTDTVDTVLEKNVTVTHSVNLLEDKHNGKLCKLRGVAPLHLGKCNIAGWILGNPECESLSTASSWSYIVETSSSDNGTCYPGDFINYEELREQLSSVSSFERFEIFPKTSSWPNHDSNKGVTAACPHAGAKSFYKNLIWLVKKGNSYPKLSKSYINDKGKEVLVLWGIHHPSTSADQQSLYQNADAYVFVGTSKYSKKFKPEIAVRPKVRDQEGRMNYYWTLVEPGDKITFEATGNLLVPRYAFAMERNAGSGIIISDTPVHDCNTTCQTPKGAINTSLPFQNIHPITIGKCPKYVKSTKLRLATGLRNVPSIQSRGLFGAIAGFIEGGWTGMVDGWYGYHHQNEQGSGYAADLKSTQNAIDKITNKVNSVIEKMNTQFTAVGKEFNHLEKRIENLNKKVDDGFLDIWTYNAELLVLLENERTLDYHDSNVKNLYEKVRSQLKNNAKEIGNGCFEFYHKCDNTCMESVKNGTYDYPKYSEEAKLNREKIDGVKLESTRIYQILAIYSTVASSLVLVVSLGAISFWMCSNGSLQCRICI

SEQ ID NO: 9792 - protein, 566 aa, Artificial Sequence
  derived and/or modified protein sequence (wt) from hemagglutinin__InfluenzaA__AGB13280
MKAILVVLLYTFATANADTLCIGYHANNSTDTVDTVLEKNVTVTHSVNLLEDKHNGKLCKLRGVAPLHLGKCNIAGWILGNPECESLSTASSWSYIVETSSSDNGTCYPGDFINYEELREQLSSVSSFERFEIFPKTSSWPNHDSNKGVTAACPHAGAKSFYKNLIWLVKKGNSYPKLSKSYINDKGKEVLVLWGIHHPSTNADQQSLYQNADAYVFVGTSKYSKKFKPEIAVRPKVRDQEGRMNYYWTLVEPGDKITFEATGNLLVPRYAFAMERNAGSGIIISDTPVHDCNTTCQTPKGAINTSLPFQNIHPITIGKCPKYVKSTKLRLATGLRNVPSIQSRGLFGAIAGFIEGGWTGMVDGWYGYHHQNGQGSGYAADLKSTQNAIDKITNKVNSVIEKMNTQFTAVGKEFNHLEKRIENLNKKVDDGFLDIWTYNAELLVLLENERTLDYHDSNVKNLYEKVRSQLKNNAKEIGNGCFEFYHKCDNTCMESVKNGTYDYPKYSEEAKLNREEIDGVKLESTRIYQILAIYSTVASSLVLVVSLGAISFWMCSNGSLQCRICI

SEQ ID NO: 9793 - protein, 566 aa, Artificial Sequence
  derived and/or modified protein sequence (wt) from hemagglutinin__InfluenzaA__AGB13290
MKAILVVLLYTFATANADTLCIGYHANNSTDTVDTVLEKNVTVTHSVNLLEVKHNGKLCKLRGVAPLHLGKCNIAGWILGNPECESLSTASSWSYIVETSSSDNGTCYPGDFINYEELREQLSSVSSFERFEIFPKTSSWPNHDSNKGVTAACPHAGAKSFYKNLIWLVKKGNSYPKLSKSYINDKGKEVLVLWGIHHPSTTADQQSLYQNADAYVFVGTSRYSKKFKPEIAIRPKVRDQEGRMNYYWTLVEPGDKITFEATGNLVVPRYAFAMERNAGSGIIISDTPVHDCNTTCQTPKGAINTSLPFQNIHPITIGKCPKYVKSTKLRLATGLRNVPSIQSRGLFGAIAGFIEGGWTGMVDGWYGYHHQNEQGSGYAADLKSTQNAIDKITNKVNSVIEKMNTQFTAVGKEFNHLEKRIENLNKKVDDGFLDIWTYNAELLVLLENERTLDYHDSNVKNLYEKVRNQLKNNAKEIGNGCFEFYHKCDNTCMESVKNGTYDYPKYSEEAKLNREEIDGVKLESTRIYQILAIYSTVASSLVLVVSLGAISFWMCSNGSLQCRICI

SEQ ID NO: 9794 - protein, 566 aa, Artificial Sequence; identical to SEQ ID NO: 6867
  derived and/or modified protein sequence (wt) from hemagglutinin__InfluenzaA__AGB13300

SEQ ID NO: 9795 - protein, 566 aa, Artificial Sequence
  derived and/or modified protein sequence (wt) from hemagglutinin__InfluenzaA__AGB13310
MKAILVVLLYTFATANADTLCIGYHANNSTDTVDTVLEKNVTVTHSVNLLEDKHNGKLCKLRGVAPLHLGKCNIAGWILGNPECESLSTASSWSYIVETSSSDNGTCYPGDFIDYEELREQLSSVSSFERFEIFPKTSSWPNHDSNKGVTAACPHAGAKSFYKNLIWLVKKGNSYPKLSKSYINDKGKEVLVLWGVHHPSTSADQQSLYQNADAYVFVGTSRYSKKFKPEIAIRPKVRDQEGRMNYYWTLVEPGDKITFEATGNLVVPRYAFAMERNAGSGIIISDTPVHDCNTTCQTPKGAINTSLPFQNIHPITIGKCPKYVKSTKLRLATGLRNVPSIQSRGLFGAIAGFIEGGWTGMVDGWYGYHHQNEQGSGYAADLKSTQHAIDEITNKVNSVIEKMNTQFTAVGKEFNHLEKRIENLNKKVDDGFLDIWTYNAELLVLLENERTLDYHDSNVKNLYEKVRSQLKNNAKEIGNGCFEFYHKCDNTCMESVKNGTYDYPKYSEEAKLNREEIDGVKLESTRIYQILAIYSTVASSLVLVVSLGAISFWMCSNGSLQCRICI

SEQ ID NO: 9796 - protein, 566 aa, Artificial Sequence
  derived and/or modified protein sequence (wt) from hemagglutinin__InfluenzaA__AGB13320
MKAILVVLLYTIATANADTLCIGYHANNSTDTVDTVLEKNVTVTHSVNLLEDKHNGKLCKLRGVAPLHLGKCNIAGWILGNPECESLSTASSWSYIVETSSSDNGTCYPGDFINYEELREQLSSVSSFERFEIFPKTSSWPNHDSNKGVTAACPHAGAKSFYKNLIWLVKKGNSYPKLSKSYINDKGKEVLVLWGIHHPSTTADQQSLYQNADAYVFVGTSRYSKKFKPEIAIRPKVRDQEGRMNYYWTLVEPGDKITFEATGNLVVPRYAFAMEKNAGSGIIISDTPVHDCNTTCQTPKGAINTSLPFQNIHPITIGKCPKYVKSTKLRLATGLRNVPSIQSRGLFGAIAGFIEGGWTGMVDGWYGYHHQNEQGSGYAADLKSTQNAIDKITNKVNSVIEKMNTQFTAVGKEFNHLEKRIENLNKKVDDGFLDIWTYNAELLVLLENERTLDYHDSNVKNLYEKVRNQLKNNAKEIGNGCFEFYHKCDNTCMESVKNGTYDYPKYSEEAKLNREEIDGVKLESARVYQILAIYSTVASSLVLVVSLGAISFWMCSNGSLQCRICI

SEQ ID NO: 9797 - protein, 566 aa, Artificial Sequence
  derived and/or modified protein sequence (wt) from hemagglutinin__InfluenzaA__AGB13330
MKAILVVMLYTFATANADTLCIGYHANNSTDTVDTVLEKNVTVTHSVNLLEDKHNGKLCKLRGVAPLHLGKCNIAGWILGNPECESLSTASSWSYIVETSSSDNGTCYPGDFIDYEELREQLSSVSSFERFEIFPKTSSWPNHDSNKGVTAACPHAGAKGFYKNLIWLVKKGNSYPKLSKSYSNDKGKEVLVLWGIHHPSTTADQQSLYQNADTYVFVGTSRYSKKFKPEIAIRPKVRDQEGRMNYYWTLVEPGDKITFEATGNLVVPRYAFAMERNAGSGIIISDTPVHDCNTTCQTPKGAINTSLPFQNIHPITIGKCPKYVKSTKLRLATGLRNVPSIQSRGLFGAIAGFIEGGWTGMVDGWYGYHHQNEQGSGYAADLKSTQNAIDKITNKVNSVIEKMNTQFTAVGKEFNHLEKRIENLNKKVDDGFLDIWTYNAELLVLLENERTLDYHDSNVKNLYEKVRNQLKNNAKEIGNGCFEFYHKCDNTCMESVKNGTYDYPKYSEEAKLNREEIDGVKLESTRIYQILAIYSTVASSLVLVVSLGAISFWMCSNGSLQCRICI

SEQ ID NO: 9798 - protein, 566 aa, Artificial Sequence; identical to SEQ ID NO: 6867
  derived and/or modified protein sequence (wt) from hemagglutinin__InfluenzaA__AGB13340

SEQ ID NO: 9799 - protein, 566 aa, Artificial Sequence
  derived and/or modified protein sequence (wt) from hemagglutinin__InfluenzaA__AGB13350
MKAILVVLLYTFATANADTLCIGYHANNSTETVDTVLEKNVTVTHSVNLLEDKHNGKLCKLRGVAPLHLGKCNIAGWILGNPECESLSTASSWSYIVETSSSDNGTCYPGDFINYEELREQLSSVSSFERFEIFPKTSSWPNHDSNKGVTAACPQAGAKSFYKNLIWLVKKGNSYPKLSKSYINDKGKEVLVLWGIHHPSTSADQQSLYQNADAYVFVGTSKYSKKFKPEIAVRPKVRDQEGRMNYYWTLVEPGDKITFEATGNLLVPRYAFAMERNAGSGIIISDTPVHDCNTTCQTPKGAINTSLPFQNIHPITIGKCPKYVKSTKLRLATGLRNVPSIQSRGLFGAIAGFIEGGWTGMVDGWYGYHHQNAQGSGYAADLKSTQNAIDKITNKVNSVIEKMNTQFTAVGKEFNHLEKRIENLNKKVDDGFLDIWTYNAELLVLLENERTLDYHDSNVKNLYEKVRSQLKNNAKEIGNGCFEFYHKCDNTCMESVKNGTYDYPKYSEEAKLNREEIDGVKLESTRIYQILAIYSTVASSLVLVVSLGAISFWMCSNGSLQCRICI

SEQ ID NO: 9800 - protein, 566 aa, Artificial Sequence
  derived and/or modified protein sequence (wt) from hemagglutinin__InfluenzaA__AGB13360
MKAILVVLLYTFATANADTLCIGYHANNSTDTVDTVLEKNVTVTHSVNLLEDKHNGKLCKLRGVAPLHLGKCNIAGWILGNPECESLSTASSWSYIVETSSSDNGTCYPGDFINYEELREQLSSVSSFERFEIFPKTSSWPNHDSNKGVTAACPHAGAKSFYKNLIWLVKKGNSYPKLSKSYINDKGKEVLVLWGIHHPSTSADQQSLYQNADAYVFVGTSKYSKKFKPEIAVRPKVRDQEGRMNYYWTLVEPGDKITFEATGNLLVPRYAFAMERNAGSGIIISDTPVHDCNTTCQTPKGAINTSLPFQNIHPITIGKCPKYVKSTKLRLATGLRNVPSIQSRGLFGAIAGFIEGGWTGMVDGWYGYHHQNEQGSGYAADLKSTQNAIDKITNKVNSVIEKMNTQFTAVGKEFNHLEKRIENLNKKVDDGFLDIWTYNAEMLVLLENEKTLDYHDSNVKNLYEKVRSQLKNNAKEIGNGCFEFYHKCDNTCMESVKNGTYDYPKYSEEAKLNREEIDGVKLESTRIYQILAIYSTVASSLVLVVSLGAISFWMCSNGSLQCRICI

SEQ ID NO: 9801 - protein, 566 aa, Artificial Sequence
  derived and/or modified protein sequence (wt) from hemagglutinin__InfluenzaA__AGB13380
MKAILVVLLYTFATAKADTLCIGYHANNSTDTVDTVLEKNVTVTHSVNLLEDKHNGKLCKLRGVAPLHLGKCNIAGWILGNPECESLSTASSWSYIVETSSSDNGTCYPGDFINYEELREQLSSVSSFERFEIFPKTSSWPNHDSNKGVTAACPHAGAKSFYKNLIWLVKKGNSYPKLSKSYINDKGKEVLVLWGIHHPSTTADQQSLYQNADAYVFVGTSRYSKKFKPEIAIRPKVRDQEGRMNYYWTLVEPGDKITFEATGNLVVPRYAFAMERNPGSGIIISDTPVHDCNTTCQTPKGAINTSLPFQNIHPITIGKCPKYVKSTKLRLATGLRNVPSIQSRGLFGAIAGFIEGGWTGMVDGWYGYHHQNEQGSGYAADLKSTQNAIDKITNKVNSVIEKMNTQFTAVGKEFNHLEKRIENLNKKVDDGFLDIWTYNAELLVLLENERTLDYHDSNVKNLYEKVRNQLKNNAKEIGNGCFEFYHKCDNTCMESVKNGTYDYPKYSEEAKLNREEIDGVKLESTRIYQILAIYSTVASSLVLVVSLGAISFWMCSNGSLQCRICI

SEQ ID NO: 9802 - protein, 566 aa, Artificial Sequence; identical to SEQ ID NO: 6435
  derived and/or modified protein sequence (wt) from hemagglutinin__InfluenzaA__AGB13390

SEQ ID NO: 9803 - protein, 566 aa, Artificial Sequence; identical to SEQ ID NO: 7042
  derived and/or modified protein sequence (wt) from hemagglutinin__InfluenzaA__AGB13400

SEQ ID NO: 9804 - protein, 566 aa, Artificial Sequence; identical to SEQ ID NO: 6435
  derived and/or modified protein sequence (wt) from hemagglutinin__InfluenzaA__AGB13410

SEQ ID NO: 9805 - protein, 566 aa, Artificial Sequence; identical to SEQ ID NO: 6454
  derived and/or modified protein sequence (wt) from hemagglutinin__InfluenzaA__AGB13420

SEQ ID NO: 9806 - protein, 566 aa, Artificial Sequence
  derived and/or modified protein sequence (wt) from hemagglutinin__InfluenzaA__AGB13430
MKAILVVLLYTFATANADTLCIGYHANNSTDTVDTVLEKNVTVTHSVNLLEDKHNGKLCKLRGVAPLHLGKCNIAGWILGNPECESLSTASSWSYIVETSSSDNGTCYPGDFIDYEELREQLSSVSSFERFEMFPKTSSWPNHDSNKGVTTACPHAGAKSFYKNLIWLVKKGNSYPKLSKSYINDKGKEVLVLWGIHHPPTSADQQSLYQNADAYVFVGTSRYSKKFKPEIAIRPKVRDQEGRMNYYWTLVEPGDKITFEATGNLVVPRYAFAMERNAGSGIIISDTPVHDCNTTCQTPKGAINTSLPFQNIHPITIGKCPKYVKSTKLRLATGLRNVPSIQSRGLFGAIAGFIEGGWTGMVDGWYGYHHQNEQGSGYAADLKSTQNAIDGITNKVNSVIEKMNTQFTAVGKEFNHLEKRIENLNKKVDDGFLDIWTYNAELLVLLENERTLDYHDSNVKNLYEKVRSQLKNNAKEIGNGCFEFYHKCDNTCMESVKNGTYDYPKYSEEAKLNREEIDGVKLESTMIYQILAIYSTVASSLVLVVSLGAISFWMCSNGSLQCRICI

SEQ ID NO: 9807 - protein, 566 aa, Artificial Sequence; identical to SEQ ID NO: 7042
  derived and/or modified protein sequence (wt) from hemagglutinin__InfluenzaA__AGB13440

SEQ ID NO: 9808 - protein, 566 aa, Artificial Sequence; identical to SEQ ID NO: 6454
  derived and/or modified protein sequence (wt) from hemagglutinin__InfluenzaA__AGB13450

SEQ ID NO: 9809 - protein, 566 aa, Artificial Sequence; identical to SEQ ID NO: 6435
  derived and/or modified protein sequence (wt) from hemagglutinin__InfluenzaA__AGB13460

SEQ ID NO: 9810 - protein, 566 aa, Artificial Sequence; identical to SEQ ID NO: 6867
  derived and/or modified protein sequence (wt) from hemagglutinin__InfluenzaA__AGB13470

SEQ ID NO: 9811 - protein, 566 aa, Artificial Sequence; identical to SEQ ID NO: 6454
  derived and/or modified protein sequence (wt) from hemagglutinin__InfluenzaA__AGB13480

SEQ ID NO: 9812 - protein, 566 aa, Artificial Sequence; identical to SEQ ID NO: 6867
  derived and/or modified protein sequence (wt) from hemagglutinin__InfluenzaA__AGB13490

SEQ ID NO: 9813 - protein, 566 aa, Artificial Sequence
  derived and/or modified protein sequence (wt) from hemagglutinin__InfluenzaA__AGB13500
MKAILVVLLYTFATANADTLCIGYHANNSTDTVDTVLEKNVTVTHSVNLLEDKHNGKLCKLRGVAPLHLGKCNIAGWILGNPECESLSTASSWSYIVETSSSDNGTCYPGNFIDYEELREQLSSVSSFERFEIFPKTSSWPDHDSNKGVTAACPHAGAKGFYKNLIWLVKKGNSYPKLSKSYINDKGKEVLVLWGIHHPSTSADQQSLYQNADAYVFVGTSRYSKKFKPEIAIRPKVRDQEGRMNYYWTLVEPGDKITFEATGNLVAPRYAFAMERNAGSGIIISDTPVHDCNTTCQTPKGAINTSLPFQNIHPITIGKCPKYVKSTKLRLATGLRNVPSIQSRGLFGAIAGFIEGGWTGMVDGWYGYHHQNEQGSGYAADLKSTQNAIDKITNKVNSVIEKMNTQFTAVGKEFNHLEKRIENLNKKVDDGFLDIWTYNAELLVLLENERTLDYHDSNVKNLYEKVRSQLKNNAKEIGNGCFEFYHKCDNTCMESVKNGTYDYPKYSEEAKLNREEIDGVKLESTRIYQILAIYSTVASSLVLVVSLGAISFWMCSNGSLQCRICI

SEQ ID NO: 9814 - protein, 566 aa, Artificial Sequence; identical to SEQ ID NO: 7072
  derived and/or modified protein sequence (wt) from hemagglutinin__InfluenzaA__AGB13520

SEQ ID NO: 9815 - protein, 566 aa, Artificial Sequence
  derived and/or modified protein sequence (wt) from hemagglutinin__InfluenzaA__AGB13530
MKAILVVLLYTFATANADTLCIGYHANNSTDTVDTVLEKNVTVTHSVNLLEDKHNGKLCKLRGVAPLHLGKCNIAGWILGNPECESLSTASSWSYIVETSSSDNGTCYPGDFIDYEELREQLSSVSSFERFEIFPKTSSWPNHDSNKGVTAACPHAGAKSFYKNLIWLVKKGNSYPKLNKSYINDKGKEVLVLWGIHHPSTTADQQSLYQNADAYVFVGTSRYSKKFKPEIAIRPKVRDQEGRMNYYWTLVEPGDKITFEATGNLVVPRYAFAMERNAGSGIIISDTPVHDCNTTCQTPKGAINTSLPFQNIHPITIGKCPKYVKSTKLRLATGLRNVPSIQSRGLFGAIAGFIEGGWTGMVDGWYGYHHQNEQGSGYAADLKSTQNAIDKITNKVNSVIEKMNTQFTAVGKEFNHLEKRIENLNKKVDDGFLDIWTYNAELLVLLENERTLDYHDSNVKNLYEKVRNQLKNNAKEIGNGCFEFYHKCDNTCMESVKNGTYDYPKYSEEAKLNREEINGVKLESTRIYQILAIYSTVASSLVLVVSLGAISFWMCSNGSLQCRICI

SEQ ID NO: 9816 - protein, 566 aa, Artificial Sequence; identical to SEQ ID NO: 7086
  derived and/or modified protein sequence (wt) from hemagglutinin__InfluenzaA__AGB13540

SEQ ID NO: 9817 - protein, 566 aa, Artificial Sequence; identical to SEQ ID NO: 7050
  derived and/or modified protein sequence (wt) from hemagglutinin__InfluenzaA__AGB13550

SEQ ID NO: 9818 - protein, 566 aa, Artificial Sequence; identical to SEQ ID NO: 7050
  derived and/or modified protein sequence (wt) from hemagglutinin__InfluenzaA__AGB13560

SEQ ID NO: 9819 - protein, 566 aa, Artificial Sequence; identical to SEQ ID NO: 6867
  derived and/or modified protein sequence (wt) from hemagglutinin__InfluenzaA__AGB13570

SEQ ID NO: 9820 - protein, 566 aa, Artificial Sequence
  derived and/or modified protein sequence (wt) from hemagglutinin__InfluenzaA__AGB13580
MKAILVVLLYTFATANADTLCIGYHANNSTDTVDTVLEKNVTVTHSVNLLEDKHNGKLCKLRGVAPLHLGKCNIAGWILGNPECESLSTASSWSYIVETSSSDNGTCYPGDFINYEELREQLSSVSSFERFEIFPKTSSWPNHDSNKGVTAACPHAGAKSFYKNLIWLVKKGNSYPKLSKSYINDKGKEVLVLWGIHHPSTTADQQSLYQNADAYVFVGTSRYSKKFKPEIAIRPKVRDQEGRMNYYWTLVEPGDKITFEATGNLVVPRYAFAMERNAGSGIIISDTPVHDCNTTCQTPKGAINTSLPFQNIHPITIGKCPKYVKSTKLRLATGLRNVPSIQSRGLFGAIAGFIEGGWTGMVDGWYGYHHQNEQGSGYAADLKSTQNAIDKITNKVNSVIEKMNTQFTAVGKEFNHLEKRIENLNKKVDDGFLDIWTYNAELLVLLENERTLDYHDSNVKNLYEKVRNQLKNNAKEIGNGCFEFYHKCNNTCMESVKNGTYDYPKYSEEAKLNREEIDGVKLESTRIYQILAIYSTVASSLVLVVSLGAISFWMCSNGSLQCRICI

SEQ ID NO: 9821 - protein, 566 aa, Artificial Sequence
  derived and/or modified protein sequence (wt) from hemagglutinin__InfluenzaA__AGB13590
MKAILVVLLYTFATANADTLCIGYHANNSTDTVDTVLEKNVTVTHSVNLLEDKHNGKLCKLRGVAPLHLGKCNIAGWILGNPECESLSTASSWSYIVETSSSDNGTCYPGDFINYEELREQLSSVSSFERFEIFPKTSSWPNHDSNKGVTAACPHAGAKSFYKNLIWLVKKGNSYPKLSQSYINDKGKEVLVLWGIHHPSTTADQQSLYQNADAYVFVGTSRYSKKFKPEIAIRPKVRDQEGRMNYYWTLVEPGDKITFEATGNLVVPRYAFAMERNAGSGIIISDTPVHDCNTTCQTPKGAINTSLPFQNIHPITIGKCPKYVKSTKLRLATGLRNVPSIQSRGLFGAIAGFIEGGWTGMVDGWYGYHHQNEQGSGYAADLKSTQNAIDKITNKVNSVIEKMNTQFTAVGKEFNHLEKRIENLNKKVDDGFLDIWTYNAELLVLLENERTLDYHDSNVKNLYEKVRNQLKNNAKEIGNGCFEFYHKCDNTCMESVKNGTYDYPKYSEEAKLNREEIDGVKLESTRIYQILAIYSTVASSLVLVVSLGAISFWMCSNGSLQCRICI

SEQ ID NO: 9822 - protein, 566 aa, Artificial Sequence
  derived and/or modified protein sequence (wt) from hemagglutinin__InfluenzaA__AGB13600
MKAILVVLLYTFATANADTLCIGYHANNSTDTVDTVLEKNVTVTHSVNLLEDKHNGKLCKLRGVAPLHLGKCNIAGWILGNPECESLSTASSWSYIVETSSSDNGTCYPGDFINYEELREQLSSVSSFERFEIFPKTSSWPNHDSNKGVTAACPHAGAKSFYKNLIWLVKKGNSYPKLNKSYINDKGKEVLVLWGIHHPSTTADQQSLYQNADAYVFVGTSRYSKKFKPEIAIRPKVRDQEGRMNYYWTLVEPGDKITFEATGNLVVPRYAFAMERNAGSGIIISDTPVHDCNTTCQTPKGAINTSLPFQNIHPITIGKCPKYVKSTKLRLATGLRNVPSIQSRGLFGAIAGFIEGGWTGMVDGWYGYHHQNEQGSGYAADLKSTQNAIDKITNKVNSVIEKMNTQFTAVGKEFNHLEKRIENLNKKVDDGFLDIWTYNAELLVLLENERTLDYHDSNVKNLYEKVRNQLKNNAKEIGNGCFEFYHKCDNTCMESVKNGTYDYPKYSEEAKLNREEIDGVKLESTRIYQILAIYSTVASSLVLVVSLGAISFWMCSNGSLQCRICI

SEQ ID NO: 9823 - protein, 566 aa, Artificial Sequence; identical to SEQ ID NO: 6867
  derived and/or modified protein sequence (wt) from hemagglutinin__InfluenzaA__AGB13610

SEQ ID NO: 9824 - protein, 566 aa, Artificial Sequence; identical to SEQ ID NO: 7086
  derived and/or modified protein sequence (wt) from hemagglutinin__InfluenzaA__AGB13620

SEQ ID NO: 9825 - protein, 566 aa, Artificial Sequence; identical to SEQ ID NO: 6454
  derived and/or modified protein sequence (wt) from hemagglutinin__InfluenzaA__AGB13630

SEQ ID NO: 9826 - protein, 566 aa, Artificial Sequence
  derived and/or modified protein sequence (wt) from hemagglutinin__InfluenzaA__AGB13640
MKAILVVLLYTFATANADTLCIGYHANNSTDTVDTVLEKNVTVTHSVNLLEDKHNGKLCKLRGVAPLHLGKCNIAGWILGNPECESLSTASSWSYIVETSSSDNGTCYPGDFIDYEELREQLSSVSSFERFEIFPKTSSWPNHDSNKGVTTACPHAGAKSFYKNLIWLVKKGNSYPKLSKSYINDKGKEVLVLWGIHHPPTSADQQSLYQNADAYVFVGTSRYSKKFKPEIAIRPKVRDQEGRMNYYWTLVEPGDKITFEATGNLVVPRYAFAMERNAGSGIIISDTPVHDCNTTCQTPKGAINTSLPFQNIHPITIGKCPKYVKSTKLRLATGLRNVPSIQSRGLFGAIAGFIEGGWTGMVDGWYGYHHQNEQGSGYAADLKSTQNAIDGITNKVNSVIEKMNTQFTAVGKEFNHLEKRIENLNKKVDDGFLDIWTYNAELLVLLENERTLDYHDSNVKNLYEKVRSQLKNNAKEIGNGCFEFYHKCDNTCMESVKNGTYDYPKYSEEAKLNREEIDGVKLESTMIYQILAIYSTVASSLVLIVSLGAISFWMCSNGSLQCRICI

SEQ ID NO: 9827 - protein, 566 aa, Artificial Sequence
  derived and/or modified protein sequence (wt) from hemagglutinin__InfluenzaA__AGB13650
MKAILVVLLYTFATANADTLCIGYHANNSTDTVDTVLEKNVTVTHSVNLLEDKHNGKLCKLRGVAPLHLGKCNIAGWILGNPECESLSTASSWSYIVETSSSDNGTCYPGDFIDYEELREQLSSVSSFERFEIFPKTSSWPNHDSNKGVTTACPHAGAKSFYKNLIWLVKKGNSYPKLSKSYINDKGKEVLVLWGIHHPPTSADQQSLYQNADAYVFVGTSRYSKKFKPEIAIRPKVRDQEGRMNYYWTLVEPGDKITFEATGNLVVPRYAFAMERNAGSGIIISDTPVHDCNTTCQTPKGAINTSLPFQNIHPITIGKCPKYVKSTKLRLATGLRNVPSIQSRGLFGAIAGFIEGGWTGMVDGWYGYHHQNEQGSGYAADLKSTQNAIDGITNKVNSVIEKMNTQFTAVGKEFNHLEKRIENLNKKVDDGFLDIWTYNAELLILLENERTLDYHDSNVKNLYEKVRSQLKNNAKEIGNGCFEFYHKCDNTCMESVKNGTYDYPKYSEEAKLNREEIDGVKLESTMIYQILAIYSTVASSLVLIVSLGAISFWMCSNGSLQCRICI

SEQ ID NO: 9828 - protein, 566 aa, Artificial Sequence; identical to SEQ ID NO: 6824
  derived and/or modified protein sequence (wt) from hemagglutinin__InfluenzaA__AGB13660

SEQ ID NO: 9829 - protein, 566 aa, Artificial Sequence; identical to SEQ ID NO: 6435
  derived and/or modified protein sequence (wt) from hemagglutinin__InfluenzaA__AGB13721

SEQ ID NO: 9830 - protein, 566 aa, Artificial Sequence; identical to SEQ ID NO: 6867
  derived and/or modified protein sequence (wt) from hemagglutinin__InfluenzaA__AGB13731

SEQ ID NO: 9831 - protein, 566 aa, Artificial Sequence
  derived and/or modified protein sequence (wt) from hemagglutinin__InfluenzaA__AGB51356
MKAILLVLLCTFAATNADTLCIGYHANNSTDTVDTVLEKNVTVTHSVNLLEDRHNGKLCKLGGIAPLHLGKCNIAGWLLGNPECELLLTVSSWSYIVETSNSDNGTCYPGDFINYEELREQLSSVSSFERFEIFPKTSSWPNHETNRGVTAACPYAGANSFYRNLIWLVEKGNSYPKLSKSYVNNKGKEVLVLWGIHHPPTSTDQQSLYQNADAYVFVGSSKYNRKFKPEIAARPKVRGQAGRMNYYWTLIEPGDTITFEATGNLVVPRYAFAMNRGSGSGIIISDAPVHDCNTKCQTPKGAINTSLPFQNIHPVTIGECPKYVKSTKLRMATGLRNIPSIQSRGLFGAIAGFIEGGWTGMIDGWYGYHHQNEQGSGYAADQRSTQNAIDGITNKVNSVIEKMNTQFTAVGKEFNHLEKRIENLNKKVDDGFLDIWTYNAELLVLLENERTLDFHDSNVKNLYEKVRSQLRNNAKEIGNGCFEFYHKCDDTCMESVKNGTYDYPKYSEESKLNREEIDGVKLESTRIYQILAIYSTVASSLVLLVSLGAISFWMCSNGSLQCRICI

SEQ ID NO: 9832 - protein, 566 aa, Artificial Sequence
  derived and/or modified protein sequence (wt) from hemagglutinin__InfluenzaA__AGB97269
MKAILVVLLYTFATANADTLCIGYHANNSTDTVDTVLEKNITVTHSVNLLEDKHNGKLCKLRGVAPLHLGKCNIAGWILGNPECETLSTASSWSYIVETSSSDNGTCYPGDFIDYEELREQLSSVSSFERFEIFPKTSSWPNHDSNKGVTAACPHAGAKGFYKNLIWLVKKGNSYPKLSKSYINDKGKEVLVLWGIHHPSTTADQQSLYQNADTYVFVGTSRYSKKFKPEIAIRPKVRDQEGRMNYYWTLVEPGDKITFEATGNLVVPRYAFAMERDAGSGIIISDTPVHDCNTTCQTPKGAINTSLPFQNIHPITIGKCPKYVKSTKLRLATGLRNVPSIQSRGLFGAIAGFIEGGWTGMVDGWYGYHHQNEQGSGYAADLKSTQNAIDKITNKVNSVIEKMNTQFTAVGKEFNHLEKRIENLNKKVDDGFLDIWTYNAELLVLLENERTLDYHDSNVKNLYEKVRNQLKNNAKEIGNGCFEFYHKCDNTCMESVKNGTYDYPKYSEEAKLNREEIDGVKLESTRIYQILAIYSTAASSLVLVVSLGAISFWMCSNGSLQCRICI

SEQ ID NO: 9833 - protein, 566 aa, Artificial Sequence; identical to SEQ ID NO: 8186
  derived and/or modified protein sequence (wt) from hemagglutinin__InfluenzaA__AGB97273

SEQ ID NO: 9834 - protein, 566 aa, Artificial Sequence
  derived and/or modified protein sequence (wt) from hemagglutinin__InfluenzaA__AGB97288
MKTIIALGYILCLVFAQKLPGNDNSTATLCLGHHAVPNGTIVKTITNDRIEVTNATELVQNSSIGEICDSPHQILDGKNCTLIDALLGDPQCDGFQNKKWDLFIERSKAYSNCYPYDVPDYASLRSLVASSGTLEFNNESFNWTGVTQNGTSSACIRRSNSSFFSRLNWLTHLNFKYPALNVTMPNNEQFDKLYIWGVHHPGTDKDQIFLYAKSSGRITVSTKRSQQAVIPNIGSRPRIRNIPSRISIYWTIVKPGDILLINSTGNLIAPRGYFKIRSGKSSIMRSDAPIGKCKSECITPNGSIPNDKPFQNVNRITYGACPRYVKQSTLKLATGMRNVPEKQTRGIFGAIAGFIENGWEGMVDGWYGFRHQNSEGRGQAADLKSTQAAIDQINGKLNRLIGKTNEKFHQIEKEFSEVEGRIQDLEKYVEDTKIDLWSYNAELLVALENQHTIDLTDSEMNKLFEKTKKQLRENAEDMGNGCFKIYHKCDNACIGSIRNGTYDHNVYRDEALNNRFQIKGVELKSGYKDWILWISFAISCFLLCVALLGFIMWACQKGNIRCNICI

SEQ ID NO: 9835 - protein, 566 aa, Artificial Sequence
  derived and/or modified protein sequence (wt) from hemagglutinin__InfluenzaA__AGB97292
MKTIIALSYILCLVFAQELPGNDDSTATLCLGHHAVPNGTIVKTITNDQIEVTNATELVQSSSTGEICNSPHQILDGENCTLIDALLGDPQCDGFQNKKWDLFVERSKAHSNCYPYDVPDYASLRSLVASSGTLEFNNESFNWTGVTQNGTSSACIRRSNNSFFSRLNWLTHLNFKYPALNVTMPNNEQFDKLYIWGVHHPGTDKDQIFLYAQASGRITVSTKRSQQAVIPNIGSRPRVRNIPSRVSIYWTIVKPGDILLINSTGNLIAPRGYFKIRSGKSSIMRSDAPIGKCNSACITPNGSIPNDKPFQNVNRITYGACPRYVKQNTLKLATGMRNVPEKQTRGIFGAIAGFIENGWEGMVDGWYGFRHQNSEGRGQAADLKSTQAAIDQINGKLNRLIGKTNEKFHQIEKEFSEVEGRIQDLEKYVEDTKIDLWSYNAELLVALENQHTIDLTDSEMNKLFEKTKKQLRENAEDMGNGCFKIYHKCDNACIGSIRNGTYDHDVYRDEALNNRFQIKGVELKSGYKDWILWISFAISCFLLCVALLGFIMWACQKGNIRCNICI

SEQ ID NO: 9836 - protein, 566 aa, Artificial Sequence
  derived and/or modified protein sequence (wt) from hemagglutinin__InfluenzaA__AGB97300
MKTIIALSYILCLVFAQKLPGNDNSTATLCLGHHAVPNGTIVKTITNDRIEVTNATELVQNSSIGEICDSPHQILDGENCTLIDALLGDPQCDGFQNKKWDLFVERSKAYSNCYPYDVPDYASLRSLVASSGTLEFNNESFNWTGVTQNGTSSACIRRSNSSFFSRLNWLTHLNFKYPALNVTMPNNEQFDKLYIWGVHHPGTDKDQIFLYAQSSGRITVSTKRSQQAVIPNIGSRPRIRNIPSRISIYWTIVKPGDILLINSTGNLIAPRGYFKIRSGKSSIMRSDAPIGKCKSECITPNGSIPNDKPFQNVNRITYGACPRYVKQSTLKLATGMRNVPEKQTRGIFGAIAGFIENGWEGMVDGWYGFRHQNSEGRGQAADLKSTQAAIDQINGKLNRLIGKTNEKFHQIEKEFSEVEGRIQDLEKYVEDTKIDLWSYNAELLVALENQHTIDLTDSEMNKLFEKTRKQLRENAEDMGNGCFKIYHKCDNACIGSIRNGTYDHDVYRDEALNNRFQIKGVELKSGYKDWILWISFAISCFLLCVALLGFIMWACQKGNIRCNICI

SEQ ID NO: 9837 - protein, 566 aa, Artificial Sequence
  derived and/or modified protein sequence (wt) from hemagglutinin__InfluenzaA__AGE89267
MKAILIVLLYTFATANADTLCIGYHANNSTDTVDTVLEKNVTVTHSVDLLEDKHNGKLCKLRGVAPLHLGKCNIAGWILGNPECESLSTASSWSYIVETSSSDNGTCYPGDFIDYEELREQLSSVSSFERFEIFPKTSSWPNHDSNKGVTAACPHAGEKSFYKNLIWLVKKGNSYPKLNKSYINDKGKEVLVLWGIHHPSTSTDQQSLYQNADAYVFVGTSRYSKKFKPEIAIRPKVRDQEGRMNYYWTLVEPGDKITFEATGNLVVPRYAFAMERNAGSGIIISDTPIHDCNTTCQTPKGAINTSLPFQNIHPITIGKCPKYVKSTKLRLATGLRNVPSIQSRGLFGAIAGFIEGGWTGMVDGWYGYHHQNEQGSGYAADLKSTQNAIDEITNKVNSVIEKMNTQFTAVGKEFNHLEKRIENLNKKVDDGFLDIWTYNAELLVLLENERTLDYHDSNVKNLYEKVKSQLKNNAKEIGNGCFEFYHKCDNTCMESVKNGTYDYPKYSEEAKLNREKIDGVKLESTRIYQILAIYSTVASSLVLVVSLGAISFWMCSNGSLQCRICI

SEQ ID NO: 9838 - protein, 566 aa, Artificial Sequence
  derived and/or modified protein sequence (wt) from hemagglutinin__InfluenzaA__AGE89277
MKAILIVLLYTFATANADTLCIGYHANNSTDTVDTVLEKNVTVTHSVDLLEDKHNGKLCKLRGVAPLHLGKCNIAGWILGNPECESLSTASSWSYIVETSSSDNGTCYPGDFIDYEELREQLNSVSSFERFEIFPKTSSWPNHDSNKGVTAACPHAGEKSFYKNLIWLVKKGNSYPKLNKSYINDKGKEVLVLWGIHHPSTSTDQQSLYQNADAYVFVGTSRYSKKFKPEIAIRPKVRDQEGRMNYYWTLVEPGDKITFEATGNLVVPRYAFAMERNAGSGIIISDTPIHDCNTTCQTPKGAINTSLPFQNIHPITIGKCPKYVKSTKLRLATGLRNVPSIQSRGLFGAIAGFIEGGWTGMVDGWYGYHHQNEQGSGYAADLKSTQNAIDEITNKVNSVIEKMNTQFTAVGKEFNHLEKRIENLNKKVDDGFLDIWTYNAELLVLLENERTLDYHDSNVKNLYEKVKSQLKNNAKEIGNGCFEFYHKCDNTCMESVKNGTYDYPKYSEEAKLNREKIDGVKLESTRIYQILAIYSTVASSLVLVVSLGAISFWMCSNGSLQCRICI

SEQ ID NO: 9839 - protein, 566 aa, Artificial Sequence; identical to SEQ ID NO: 8356
  derived and/or modified protein sequence (wt) from hemagglutinin__InfluenzaA__AGE89287

SEQ ID NO: 9840 - protein, 566 aa, Artificial Sequence
  derived and/or modified protein sequence (wt) from hemagglutinin__InfluenzaA__AGE89298
MKAILVVLLYTFATANADTLCIGYHANNSTDTVDTVLEKNVTVTHSVNLLEDKHNGKLCKLRGVAPLHLGKCNIAGWILGNPECESLSTASSWSYIVETSSSDNGTCYPGDFIDYEELREQLSSVSSFERFEIFPKTSSWPNHDSNKGVTAACPHAGAKGFYKNLIWLVKKGNSYPKLSKSYINDKGKEVLVLWGIHHPSTTADQQSLYQNADTYVFVGTSRYSKKFKPEIAIRPKVRDQEGRMNYYWTLVEPGDKITFEATGNLVVPRYAFAMERNAGSGIIISDTPVHDCNTTCQTPKGAINTSLPFQNIHPITIGKCPKYVKSTKLRLATGLRNVPSIQSRGLFGAIAGFIEGGWTGMVDGWYGYHHQNEQGSGYAADLKSTQNAIDKITNKVNSVIEKMNTQFTAVGKEFNHLEKRIENLNKKVDDGFLDIWTYNAELLVLLENERTLDYHDSNVKNLYEKVRNQLKNNAKEIGNGCFEFYHKCDNTCMESVKNGTYDYPKYSEEAKLNREEIDGVKLESTRIYQILAIYSTVASSLILVVSLGAISFWMCSNGSLQCRICI

SEQ ID NO: 9841 - protein, 566 aa, Artificial Sequence; identical to SEQ ID NO: 6909
  derived and/or modified protein sequence (wt) from hemagglutinin__InfluenzaA__AGE89308

SEQ ID NO: 9842 - protein, 566 aa, Artificial Sequence; identical to SEQ ID NO: 8351
  derived and/or modified protein sequence (wt) from hemagglutinin__InfluenzaA__AGE89318

SEQ ID NO: 9843 - protein, 566 aa, Artificial Sequence
  derived and/or modified protein sequence (wt) from hemagglutinin__InfluenzaA__AGE89329
MKTIIALSYILCLVFAQKLPGNDDSTATLCLGHHAVPNGTIVKTITNDQIEVTNATELVQSSSTGEICNSPHQILDGENCTLIDALLGDPQCDGFQNKKWDLFVERSKAHSNCYPYDVPDYASLRSLVASSGTLEFNNESFNWTGVTQNGTSSACIRRSNNSFFSRLNWLTHLNFKYPALNVTMPNNEQFDKLYIWGVHHPGTDKDQIFLYAQASGRITVSTKRSQQAVIPNIGSRPRVRNIPSRVSIYWTIVKPGDILLINSTGNLIAPRGYFKIRSGKSSIMRSDAPIGKCNSACITPNGSIPNDKPFQNVNRITYGACPRYVKQNTLKLATGMRNVPEKQTRGIFGAIAGFIENGWEGMVDGWYGFRHQNSEGRGQAADLKSTQAAIDQINGKLNRLIGKTNEKFHQIEKEFSEVEGRIQDLEKYVEDTKIDLWSYNAELLVALENQHTIDLTDSEMNKLFEKTKKQLRENAEDMGNGCFKIYHKCDNACIGSIRNGTYDHDVYRDEALNNRFQIKGVELKSGYKDWILWISFAISCFLLCVALLGFIMWACQKGNIRCNICI

SEQ ID NO: 9844 - protein, 566 aa, Artificial Sequence; identical to SEQ ID NO: 6454
  derived and/or modified protein sequence (wt) from hemagglutinin__InfluenzaA__AGE89340

SEQ ID NO: 9845 - protein, 566 aa, Artificial Sequence; identical to SEQ ID NO: 8354
  derived and/or modified protein sequence (wt) from hemagglutinin__InfluenzaA__AGE89350

SEQ ID NO: 9846 - protein, 566 aa, Artificial Sequence
  derived and/or modified protein sequence (wt) from hemagglutinin__InfluenzaA__AGE89361
MKAILVVLLYTFATANADTLCIGYHANNSTDTVDTVLEKNVTVTHSVNLLEDKHNGKLCKLRGVAPLHLGKCNIAGWILGNPECESLSTASSWSYIVETSSSDNGTCYPGDFINYEELREQLSSVSSFERFEIFPKTSSWPNHDSNKGVTAACPHAGAKSFYKNLIWLVKKGNSYPKLSKSYINDKGKEVLVLWGIHHPSTTTDQQSLYQNADAYVFVGTSRYSKKFKPEIAIRPKVRDQEGRMNYYWTLVEPGDKITFEATGNLVVPRYAFAMERNAGSGIIISDTPVHDCNTTCQTPKGAINTSLPFQNIHPITIGKCPKYVKSTKLRLATGLRNVPSIQSRGLFGAIAGFIEGGWTGMVDGWYGYHHQNEQGSGYAADLKSTQNAIDKITNKVNSVIEKMNTQFTAVGKEFNHLEKRIENLNKKVDDGFLDIWTYNAELLVLLENERTLDYHDSNVKNLYEKVRNQLKNNAKEIGNGCFEFYHKCDNTCMESVKNGTYDYPKYSEEAKLNREEIDGVKLESTRIYQILAIYSTVASSLVLVVSLGAISFWMCSNGSLQCRICI

SEQ ID NO: 9847 - protein, 566 aa, Artificial Sequence; identical to SEQ ID NO: 8351
  derived and/or modified protein sequence (wt) from hemagglutinin__InfluenzaA__AGE89371

SEQ ID NO: 9848 - protein, 566 aa, Artificial Sequence
  derived and/or modified protein sequence (wt) from hemagglutinin__InfluenzaA__AGE89382
MKAILVVLLYTFATANADTLCIGYHANNSTDTVDTVLEKNVTVTHSVNLLEDKHNGKLCKLRGVAPLHLGKCNIAGWILGNPECESLSTASSWSYIVETSSSDNGTCYPGDFINYEELREQLSSVSSFERFEIFPKTSSWPNHDSNKGVTAACPHAGAKSFYKNLIWLVKKGNSYPKLSKSYINDKGKEVLVLWGIHHPSTSADQQSLYQNADAYVFVGTSKYSKKFKPEIAVRPKVRDQEGRMNYYWTLVKPGDKITFEATGNLLVPRYAFAMERNAGSGIIISDTPVHDCNTTCQTPKGAINTSLPFQNIHPITIGKCPKYVKSTKLRLATGLRNVPSIQSRGLFGAIAGFIEGGWTGMVDGWYGYHHQNEQGSGYAADLKSTQNAIDKITNKVNSVIEKMNTQFTAVGKEFNHLEKRIENLNKKVDDGFLDIWTYNAELLVLLENERTLDYHDSNVKNLYEKVRSQLKNNAKEIGNGCFEFYHKCDNTCMESVKNGTYDYPKYSEEAKLNREEIDGVKLESTRIYQILAIYSTVASSLVLVVSLGAISFWMCSNGSLQCRICI

SEQ ID NO: 9849 - protein, 566 aa, Artificial Sequence
  derived and/or modified protein sequence (wt) from hemagglutinin__InfluenzaA__AGE89392
MKTIIALSYILCLVFAQELPGNDNSTATLCLGHHAVPNGTIVKTITNDQIEVTNATELVQSSSTGEICNSPHQILDGENCTLIDALLGDPQCDGFQNKKWDLFVERSKAHSNCYPYDVPDYASLRSLVASSGTLEFNNESFNWTGVTQNGTSSACIRRSNNSFFSRLNWLTHLNFKYPALNVTMPNNEQFDKLYIWGVHHPGTDKDQIFLYAQASGRITVSTKRSQQAVIPNIGSRPRVRNIPSRVSIYWTIVKPGDILLINSTGNLIAPRGYFKIRSGKSSIMRSDAPIGKCNSACITPNGSIPNDKPFQNVNRITYGACPRYVKQNTLKLATGMRNVPEKQTRGIFGAIAGFIENGWEGMVDGWYGFRHQNSEGRGQAADLKSTQAAIDQINGKLNRLIGKTNEKFHQIEKEFSEVEGRIQDLEKYVEDTKIDLWSYNAELLVALENQHTIDLTDSEMNKLFEKTKKQLRENAEDMGNGCFKIYHKCDNACIGSIRNGTYDHDVYRDEALNNRFQIKGVELKSGYKDWILWISFAISCFLLCVALLGFIMWACQKGNIRCNICI

SEQ ID NO: 9850 - protein, 566 aa, Artificial Sequence; identical to SEQ ID NO: 9837
  derived and/or modified protein sequence (wt) from hemagglutinin__InfluenzaA__AGE89422

SEQ ID NO: 9851 - protein, 566 aa, Artificial Sequence; identical to SEQ ID NO: 8334
  derived and/or modified protein sequence (wt) from hemagglutinin__InfluenzaA__AGE89719

SEQ ID NO: 9852 - protein, 566 aa, Artificial Sequence
  derived and/or modified protein sequence (wt) from hemagglutinin__InfluenzaA__AGE89730
MKAILVVLLYTFATANADTLCIGYHANNSTDTVDTVLEKNVTVTHSVNLLEDKHNGKLCKLRGVAPLHLGKCNIAGWILGNPECESLSTASSWSYIVETSSSDNGTCYPGDFINYEELREQLSSVSSFERFEIFPKTSSWPNHDSNKGVTAACPHAGAKSFYKNLIWLVKKGNSYPKLSKSYINDKGKEVLVLWGIHHPSTSADQQSLYQNADAYVFVGTSKYSKKFKPEIAVRPKVRDQEGRMNYYWTLVEPGDKITFEATGNLLVPRYAFAMERNAGSGIIISDTPVHDCNTTCQTPKGAINTSLPFQNIHPITIGKCPKYVKSTKLRLATGLRNVPSIQSRGLFGAIAGFIEGGWTGMVDGWYGYHHQNGQGSGYAADLKSTQNAIDKITNKVNSVIEKMNTQFTAVGKEFNHLEKRIENLNKKVDDGFLDIWTYNAELLVLLENERTLDYHDSNVKNLYEKVRSQLKNNAKEIGNGCFEFYHKCDNTCMESVKNGTYDYPKYSEEAKLNREEIDGVKLESTRIYQILAIYSTVASSLVLVVSLGAISFWMCSNGSLQCRICI

SEQ ID NO: 9853 - protein, 566 aa, Artificial Sequence; identical to SEQ ID NO: 8351
  derived and/or modified protein sequence (wt) from hemagglutinin__InfluenzaA__AGE89740

SEQ ID NO: 9854 - protein, 566 aa, Artificial Sequence
  derived and/or modified protein sequence (wt) from hemagglutinin__InfluenzaA__AGE89751
MKTIIALSYILCLVFAQKLPGNDNSTATLCLGHHAVPNGTIVKTITNDQIEVTNATELVQSSSAGEICDSPHHILDGENCTLIDALLGDPQCDGFQNKKWDLFVERSRAYSNCYPYDVPDYASLRSLVASSGTLEFNNESFNWTGVTQNGTSSACIRRSNNSFFSRLNWLTHLNFKYPALNVTMPNNEQFDKLYIWGVHHPGTDKDQIFLYAQASGRITVSTKRSQQAVIPNIGSRPRVRNIPSRISIYWTIVKPGDILLINSTGNLIAPRGYFKIRSGKSSIMRSDAPIGKCNSECITPNGSIPNDKPFQNVNRITYGACPRYVKQSTLKLATGMRNVPEKQTRGIFGAIAGFIENGWEGMMDGWYGFRHQNSEGRGQAADLKSTQAAIDQINGKLNRLIGKTNEKFHQIEKEFSEVEGRIQDLEKYVEDTKIDLWSYNAELLVAMENQHTIDLTDSEMNKLFEKTKKQLRENAEDMGNGCFKIYHKCDNACIGSIRNGTYDHDVYRDEALSNRFQIKGVELKSGYKDWILWISFAISCFLLCVALLGFIMWACQKGNIRCNICI

SEQ ID NO: 9855 - protein, 566 aa, Artificial Sequence; identical to SEQ ID NO: 8354
  derived and/or modified protein sequence (wt) from hemagglutinin__InfluenzaA__AGE89762

SEQ ID NO: 9856 - protein, 566 aa, Artificial Sequence
  derived and/or modified protein sequence (wt) from hemagglutinin__InfluenzaA__AGF44891
MKAILVVLLYTFATANADTLCIGYHANNSTDTVDTVLEKNVTVTHSVNLLEDKHNGKLCKLRGVAPLHLGKCNIAGWILGNPECESLSTASSWSYIVETSSSDNGTCYPGDFINYEELREQLSSVSSFERFEIFPKTSSWPNHDSNKGVTAACPHAGAKSFYKNLIWLVKKGNSYPKLSKSYINDKGKEVLVLWGIHHPSTTADQQSLYQNADAYVFVGTSRYSKKFKPEIAIRPKVRDQEGRMNYYWTLIEPGDKITFEATGNLVVPRYAFAMERNAGSGIIISDTPVHDCNTTCQTPEGAINTSLPFQNIHPITIGKCPKYVKSTKLRLATGLRNVPSIQSRGLFGAIAGFIEGGWTGMVDGWYGYHHQNEQGSGYAADLKSTQNAVDKITNKVNSVIEKMNTQFTAVGKEFNHLEKRIENLNKKVDDGFLDIWTYNAELLVLLENERTLDYHDSNVKNLYEKVRNQLKNNAKEIGNGCFEFYHKCDNTCMESVKNGTYDYPKYSEEAKLNREKIDGVKLESTRIYQILAIYSTVASSLVLVVSLGAISFWMCSNGSLQCRICI

SEQ ID NO: 9857 - protein, 566 aa, Artificial Sequence; identical to SEQ ID NO: 9856
  derived and/or modified protein sequence (wt) from hemagglutinin__InfluenzaA__AGF44892

SEQ ID NO: 9858 - protein, 566 aa, Artificial Sequence
  derived and/or modified protein sequence (wt) from hemagglutinin__InfluenzaA__AGF44895
MKTIIALSYILCLVFAQKLPGNDNSTATLCLGHHAVPNGTIVKTITNDRIEVTNATELVQNSSIGEICDSPHQILDGENCTLIDALLGDPQCDGFQNKKWDLFVERSKAYSNCYPYDVPDYASLRSLVASSGTLEFNNESFNWTGVTQNGTSSACIRRSNSSFFSRLNWLTHLNFKYPALNVTMPNNEQFDKLYIWGVHHPGTDKDQIFLYAQSSGRITVSTKRSQQAVIPNIGSRPRIRNIPSRISIYWTIVKPGDILLINSTGNLIAPRGYFKIRSGKSSIMRSDAPIGKCKSECITPNGSIPNDKPFQNVNRITYGACPRYVKQSTLKLATGMRNVPEKQTRGIFGAIAGFIENGWEGMVDGWYGFRHQNSEGRGQAADLKSTQAAIDQINGKLNRLIGKTNEKFHQIEKEFSEVEGRIQDLEKYVEDTKIDLWSYNAELLVALENQHTIDLTDSEMNKLFEKTKKQLRENAEDMGNGCFKIYHKCDNACIGSIRNGTYDHNVYRDEALNNRFQIKGVELKSGYKDWILWISFAISCFLLCVALLGFIMWACQKGNIRCNICI

SEQ ID NO: 9859 - protein, 566 aa, Artificial Sequence; identical to SEQ ID NO: 9835
  derived and/or modified protein sequence (wt) from hemagglutinin__InfluenzaA__AGF44896

SEQ ID NO: 9860 - protein, 566 aa, Artificial Sequence
  derived and/or modified protein sequence (wt) from hemagglutinin__InfluenzaA__AGF44897
MKTIIALSYILCLVFAQELPGNDDSTATLCLGHHAVPNGTIVKTITNDQIEVTNATELVQSSSTGEICNSPHQILDGENCTLIDALLGDPQCDGFQNKKWDLFVERSKAHSNCYPYDVPDYASLRSLVASSGTLEFNNESFNWTGVTQNGTSSACMRRSNNSFFSRLNWLTHLNFKYPALNVTMPNNEQFDKLYIWGVHHPGTDKDQIFLYAQASGRITVSTKRSQQAVIPNIGSRPRVRNIPSRVSIYWTIVKPGDILLINSTGNLIAPRGYFKIQSGKSSIMRSDAPIGKCNSACITPNGSIPNDKPFQNVNRITYGACPRYVKQNTLKLATGMRNVPEKQTRGIFGAIAGFIENGWEGMVDGWYGFRHQNSEGRGQAADLKSTQAAIDQINGKLNRLIGKTNEKFHQIEKEFSEVEGRIQDLEKYVEDTKIDLWSYNAELLVALENQHTIDLTDSEMNKLFEKTKKQLRENAEDMGNGCFKIYHKCDNACIGSIRNGTYDHDVYRDEALNNRFQIKGVELKSGYKDWILWISFAISCFLLCVALLGFIMWACQKGNIRCNICI

SEQ ID NO: 9861 - protein, 566 aa, Artificial Sequence; identical to SEQ ID NO: 9858
  derived and/or modified protein sequence (wt) from hemagglutinin__InfluenzaA__AGF44900

SEQ ID NO: 9862 - protein, 566 aa, Artificial Sequence; identical to SEQ ID NO: 9858
  derived and/or modified protein sequence (wt) from hemagglutinin__InfluenzaA__AGF44901

SEQ ID NO: 9863 - protein, 566 aa, Artificial Sequence; identical to SEQ ID NO: 9858
  derived and/or modified protein sequence (wt) from hemagglutinin__InfluenzaA__AGF44902

SEQ ID NO: 9864 - protein, 566 aa, Artificial Sequence; identical to SEQ ID NO: 9858
  derived and/or modified protein sequence (wt) from hemagglutinin__InfluenzaA__AGF44903

SEQ ID NO: 9865 - protein, 566 aa, Artificial Sequence; identical to SEQ ID NO: 9858
  derived and/or modified protein sequence (wt) from hemagglutinin__InfluenzaA__AGF44904

SEQ ID NO: 9866 - protein, 566 aa, Artificial Sequence
  derived and/or modified protein sequence (wt) from hemagglutinin__InfluenzaA__AGF44905
MKTIIALSYILCLVFAQKLPGNDNSTATLCLGHHAVPNGTIVKTITNDRIEVTNATELVQNSSIGEICDSPHQILDGENCTLIDALLGDPQCDGFQNKKWDLFVERSKAYSNCYPYDVPDYASLRSLVASSGTLEFNNESFNWTGVTQNGTSSACIRRSNSSFFSRLNWLTHLNFKYPALNVTMPNNEQFDKLYIWGVHHPGTDKDQIFLYAQSSGRITVSTKRSQQAVIPNIGSRPRIRNIPSRISIYWTIVKPGDILLINSTGNLIAPRGYFKIRSGKSSIMRSDAPIGKCKSECITPNGSIPNDKPFQNVNRNTYGACPRYVKQSTLKLATGMRNVPEKQTRGIFGAIAGFIENGWEGMVDGWYGFRHQNSEGRGQAADLKSTQAAIDQINGKLNRLIGKTNEKFHQIEKEFSEVEGRIQDLEKYVEDTKIDLWSYNAELLVALENQHTIDLTDSEMNKLFEKTKKQLRENAEDMGNGCFKIYHKCDNACIGSIRNGTYDHNVYRDEALNNRFQIKGVELKSGYKDWILWISFAISCFLLCVALLGFIMWACQKGNIRCNICI

SEQ ID NO: 9867 - protein, 566 aa, Artificial Sequence; identical to SEQ ID NO: 9858
  derived and/or modified protein sequence (wt) from hemagglutinin__InfluenzaA__AGF44906

SEQ ID NO: 9868 - protein, 566 aa, Artificial Sequence
  derived and/or modified protein sequence (wt) from hemagglutinin__InfluenzaA__AGF44908
MKTIIALSYILCLVFAQKLPGNDNSTATLCLGHHAVPNGTIVKTITNDRIEVTNATELVQNSSIGEICDSPHQILDGENCTLIDALLGDPQCDGFQNKKWDLFVERSKAYSNCYPYDVPDYASLRSLVASSGTLEFNNESFNWAGVTQNGTSSACIRGSNSSFFSRLNWLTHLNFKYPALNVTMPNNEQFDKLYIWGVHHPGTDKDQIFLYAQSSGRITVSTKRSQQAVIPNIGSRPRIRNIPSRISIYWTIVKPGDILLINSTGNLIAPRGYFKIRSGKSSIMRSDAPIGKCKSECITPNGSIPNDKPFQNVNRITYGACPRYVKQSTLKLATGMRNVPEKQTRGIFGAIAGFIENGWEGMMDGWYGFRHQNSEGRGQAADLKSTQAAIDQINGKLNRLIGKTNEKFHQIEKEFSEVEGRIQDLEKYVEDTKIDLWSYNAELLVALENQHTIDLTDSEMNKLFEKTKKQLRENAEDMGNGCFKIYHKCDNACIGSIRNGTYDHDVYRDEALNNRFQIKGVELKSGYKDWILWISFAISCFLLCVALLGFIMWACQKGNIRCNICI

SEQ ID NO: 9869 - protein, 566 aa, Artificial Sequence; identical to SEQ ID NO: 9858
  derived and/or modified protein sequence (wt) from hemagglutinin__InfluenzaA__AGF44909

SEQ ID NO: 9870 - protein, 566 aa, Artificial Sequence; identical to SEQ ID NO: 9858
  derived and/or modified protein sequence (wt) from hemagglutinin__InfluenzaA__AGF44910

SEQ ID NO: 9871 - protein, 566 aa, Artificial Sequence
  derived and/or modified protein sequence (wt) from hemagglutinin__InfluenzaA__AGF44911
MKTIIALSYILCLVFAQKLPGNDNSTATLCLGHHAVPNGTIVKTITNDRIEVTNATELVQNSSIGEICDSPHQILDGENCTLIDALLGDPQCDGFQNKKWDLFVERSKAYSNCYPYDVPDYASLRSLVASSGTLEFNNESFNWAGVTQNGTSSACIRGSNSSFFSRLNWLTHLNFKYPALNVTMPNNEQFDKLYIWGVHHPGTDKDQIFLYAQSSGRITVSTKRSQQAVIPNIGSRPRIRNIPSRISIYWTIVKPGDILLINSTGNLIAPRGYFKIRSGKSSIMRSDAPIGKCKSECITPNGSIPNDKPFQNVNRITYGACPRYVKQSTLKLATGMRNVPEKQTRGIFGAIAGFIENGWEGMVDGWYGFRHQNSEGRGQAADLKSTQAAIDQINGKLNRLIGKTNEKFHQIEKEFSEVEGRIQDLEKYVEDTKIDLWSYNAELLVALENQHTIDLTDSEMNKLFEKTKKQLRENAEDMGNGCFKIYHKCDNACIGSIRNGTYDHDVYRDEALNNRFQIKGVELKSGYKDWILWISFATSCFLLCVALLGFIMWACQKGNIRCNICI

SEQ ID NO: 9872 - protein, 566 aa, Artificial Sequence; identical to SEQ ID NO: 9858
  derived and/or modified protein sequence (wt) from hemagglutinin__InfluenzaA__AGF44912

SEQ ID NO: 9873 - protein, 566 aa, Artificial Sequence; identical to SEQ ID NO: 9858
  derived and/or modified protein sequence (wt) from hemagglutinin__InfluenzaA__AGF44913

SEQ ID NO: 9874 - protein, 566 aa, Artificial Sequence
  derived and/or modified protein sequence (wt) from hemagglutinin__InfluenzaA__AGF44914
MKTIIALSYILCLVFAQKLPGNDNSTATLCLGHHAVPNGTIVKTITNDRIEVTNATELVQNSSIGEICDSPHQILDGENCTLIDALLGDPQCDGFQNKKWDLFVERSKAYSNCYPYDVPDYASLRSLVASSGTLEFNNESFNWTGVTQNGTSSACIRRSNSSFFSRLNWLTHLNFKYPALNVTMPNNEQFDKLYIWGVHHPGTDKDQIFLYAQSSGRITVSTKRSQQAVIPNIGSRPRIRNIPSRISIYWTIVKPGDILLINSTGNLIAPRGYFKIRSGKSSIMRSDAPIGKCKSECITPNGSIPNDKPFQNVNKITYGACPRYVKQSTLKLATGMRNVPEKQTRGIFGAIAGFIENGWEGMVDGWYGFRHQNSEGRGQAADLKSTQAAIDQINGKLNRLIGKTNEKFHQIEKEFSEVEGRIQDLEKYVEDTKIDLWSYNAELLVALENQHTIDLTDSEMNKLFEKTKKQLRENAEDMGNGCFKIYHKCDNACIGSIRNGTYDHNVYRDEALNNRFQIKGVELKSGYKDWILWISFAISCFLLCVALLGFIMWACQKGNIRCNICI

SEQ ID NO: 9875 - protein, 566 aa, Artificial Sequence; identical to SEQ ID NO: 9835
  derived and/or modified protein sequence (wt) from hemagglutinin__InfluenzaA__AGF44916

SEQ ID NO: 9876 - protein, 566 aa, Artificial Sequence
  derived and/or modified protein sequence (wt) from hemagglutinin__InfluenzaA__AGF44917
MKTIIALSYILCLVFAQKIPGNDNSTATLCLGHHAVPNGTIVKTITNEQIEVTNATELVQSSSTGEICNSPHQILDGENCTLIDALLGDPQCDGFQNKKWDLFVERSKAYSNCYPYDVPDYASLRSLVASSGTLEFNNESFNWTGVTQNGTSSACIRGSDSSFFSRLNWLTHLNFKYPALNVTMPNNEQFDKLYIWGVHHPGTDKDQIFLYAQASGRITVSTKRSQQAVIPNIGSRPRIRNIPSRISIYWTIVKPGDILLINSTGNLIAPRGYFKIRSGKSSIMRSDAPIGKCNSECITPNGSIPNDKPFQNVNRITYGACPRYVKQNTLKLATGMRNVPEKQTRGIFGAIAGFIENGWEGMMDGWYGFRHQNSEGRGQAADLKSTQAAIDQINGKLNRLIGKTNEKFHQIEKEFSEVEGRIQDLEKYVEDTKIDLWSYNAELLVALENQHTIDLTDSEMNKLFEKTKKQLRENAEDMGNGCFKIYHKCDNACIGSIRNGTYNHDVYRDEALNNRFQIKGVELKSGYKDWILWISFAISCFLLCVALLGFIMWACQKGNIRCNICI

SEQ ID NO: 9877 - protein, 566 aa, Artificial Sequence; identical to SEQ ID NO: 9835
  derived and/or modified protein sequence (wt) from hemagglutinin__InfluenzaA__AGF44918

SEQ ID NO: 9878 - protein, 566 aa, Artificial Sequence
  derived and/or modified protein sequence (wt) from hemagglutinin__InfluenzaA__AGF44919
MKTIIALSYILCLVFAQKLPGNDNSTATLCLGHHAVPNGTIVKTITNDRIEVTNATELVQNSSIGEICDSPHQILDGENCTLIDALLGDPQCDGFQNKKWDLFVERSKAYSNCYPYDVPDYASLRSLVASSGTLEFNNESFNWAGVTQNGTSSACIRGSNSSFFSRLNWLTHLNFKYPALNVTMPNNEQFDKLYIWGVHHPGTDKDQIFLYAQSSGRITVSTKRSQQAVIPNIGSRPRIRNIPSRISIYWTIVKPGDILLINSTGNLIAPRGYFKIRSGKSSIMRSDAPIGKCKSECITPNGSIPNDKPFQNVNRITYGACPRYVKQSTLKLATGMRNVPEKQTRGIFGAIAGFIENGWEGMVDGWYGFRHQNSEGRGQAADLKSTQAAIDQINGKLNRLIGKTNEKFHQIEKEFSEVEGRIQDLEKYVEDTKIDLWSYNAELLVALENQHTIDLTDSEMNKLFEKTKKQLRENAEDMGNGCFKIYHKCDNACIGSIRNGTYDHYVYRDEALNNRFQIKGVELKSGYKDWILWISFAISCFLLCVALLGFIMWACQKGNIRCNICI

SEQ ID NO: 9879 - protein, 566 aa, Artificial Sequence; identical to SEQ ID NO: 9835
  derived and/or modified protein sequence (wt) from hemagglutinin__InfluenzaA__AGF44920

SEQ ID NO: 9880 - protein, 566 aa, Artificial Sequence; identical to SEQ ID NO: 9858
  derived and/or modified protein sequence (wt) from hemagglutinin__InfluenzaA__AGF44921

SEQ ID NO: 9881 - protein, 566 aa, Artificial Sequence
  derived and/or modified protein sequence (wt) from hemagglutinin__InfluenzaA__AGG13411
MKTIIALSYILCLVFAQELPGNDDSTATLCLGHHAVPNGTIVKTITNDRIEVTNATELVQSSSTGEICNSPHQILDGENCTLIDALLGDPQCDGFQNKKWDLFVERSKAHSNCYPYDVPDYASLRSLVASSGTLEFNNESFNWTGVTQNGTSSACIRRSNNSFFSRLNWLTHLNFKYPALNVTMPNNEQFDKLYIWGVHHPGTDKDQIFLYAQASGRITVSTKRNQQTVIPNIGSRPRVRNIPSRVSIYWTIVKPGDILLINSTGNLIAPRGYFKIRSGKSSIMRSDAPIGKCNSACITPNGSIPNDKPFQNVNRITYGACPRYVKQNTLKLATGMRNVPEKQTRGIFGAIAGFIENGWEGMVDGWYGFRHQNSEGRGQAADLKSTQAAIDQINGKLNRLIGKTNEKFHQIEKEFSEVEGRIQDLEKYVEDTKIDLWSYNAELLVALENQHTIDLTDSEMNKLFEKTKKQLRENAEDMGNGCFKIYHKCDNACIGSIRNGTYDHDVYRDEALNNRFQIKGVELKSGYKDWILWISFAISCFLLCVALLGFIMWACQKGNIRCNICI

SEQ ID NO: 9882 - protein, 566 aa, Artificial Sequence
  derived and/or modified protein sequence (wt) from hemagglutinin__InfluenzaA__AGG13447
MKTIIALSYILCLVFAQELPGNDDSTATLCLGHHAVPNGTIVKTITNDRIEVTNATELVQSSSTGEICNSPHQILDGENCTLIDALLGDPQCDGFQNKKWDLFVERSKAHSNCYPYDVPDYASLRSLVASSGTLEFNNESFNWTGVTQNGTSSACIRRSNNSFFSRLNWLTHLNFKYPALNVTMPNNEQFDKLYIWGVHHPGTDKDQIFLYAQASGRITVSTKRSQQTVIPNIGSRPRVRNIPSRVSIYWTIVKPGDILLINSTGNLIAPRGYFKIRSGKSSIMRSDAPIGKCNSACITPNGSIPNDKPFQNVNRITYGACPRYVKQNTLKLATGMRNVPEKQTRGIFGAIAGFIENGWEGMVDGWYGFRHQNSEGRGQAADLKSTQAAIDQINGKLNRLIGKTNEKFHQIEKEFSEVEGRIQDLEKYVEDTKIDLWSYNAELLVALENQHTIDLTDSEMNKLFEKTQKQLRENAEDMGNGCFKIYHKCDNACIGSIRNGTYDHDVYRDEALNNRFQIKGVELKSGYKDWILWISFAISCFLLCVALLGFIMWACQKGNIRCNICI

SEQ ID NO: 9883 - protein, 566 aa, Artificial Sequence
  derived and/or modified protein sequence (wt) from hemagglutinin__InfluenzaA__AGG13459
MKTIIALSYILCLVFAQKLPGNDNSTATLCLGHHAVPNGTIVKTITNDRIEVTNATELVQNSSIGEICDSPHQILDGENCTLIDALLGDPQCDGFQNKKWDLFVERSKAYSNCYPYDVPDYASLRSLVASSGTLEFNNESFNWTGVTQNGTSSACIRRSNSSFFSRLNWLTHLNFKYPALNVTMPNNEQFDKLYIWGVHHPGTDKDQIFLYAQSSGRITVSTKRSQQAVIPNIGSRPRIRNIPSRISIYWTIVKPGDILLINSTGNLIAPRGYFKIRSGKSSIMRSDAPIGKCKSECITPNGSIPNDKPFQNVNRITYGACPRYVKQSTLKLATGMRNVPEKQTRGIFGAIAGFIENGWEGMVDGWYGFRHQNSEGRGQAADLKSTQAAIDQINGKLNRLIGKTNEKFHQIEKEFSEVEGRIQDLEKYVEDTKIDLWSYNAELLVALENQHTIDLTDSEMNKLFEKTKKQLRENAEDMGNGCFKIYHKCDNACIGSIRNGTYDHDVYRDEALNNRFQIKGVELKSGYKDWILWISFAISCFLLCVALLGFIMWACQKGNIRCNICI

SEQ ID NO: 9884 - protein, 566 aa, Artificial Sequence
  derived and/or modified protein sequence (wt) from hemagglutinin__InfluenzaA__AGG13495
MKTIIALSYILCLVFAQKLPGNDNSTATLCLGHHAVPNGTIVKTITNDQIEVTNATELVQSSSTGEICDSPHQILDGENCTLIDALLGDPQCDGFQNKKWDLFVERSKAYSNCYPYDVPDYASLRSLVASSGTLEFNNESFNWTGVTQNGTSSACIRRSDSSFFSRLNWLTHLNFKYPALNVTMPNNEQFDKLYIWGVHHPGTDKDQIFLYAQASGRITVSTKRSQQSVIPNIGSRPRIRNIPSRISIYWTIVKPGDILLINSTGNLIAPRGYFKIQSGKSSIMRSDAPIGKCNSECITPNGSIPNDKPFQNVNRITYGACPRYVKQNTLKLATGMRNVPEKQTRGIFGAIAGFIENGWEGMVDGWYGFRHQNSEGRGQAADLKSTQAAIDQINGKLNRLIGKTNEKFHQIEKEFSEVEGRIQDLEKYVEDTKIDLWSYNAELLVALENQHTIDLTDSEMNKLFEKTKKQLRENAEDMGNGCFKIYHKCDNACIGSIRNGTYNHDVYRDEALNNRFQIKGVELKSGYKDWILWISFAISCFLLCVALLGFIMWACQKGNIRCNICI

SEQ ID NO: 9885 - protein, 566 aa, Artificial Sequence; identical to SEQ ID NO: 9883
  derived and/or modified protein sequence (wt) from hemagglutinin__InfluenzaA__AGG13507

SEQ ID NO: 9886 - protein, 566 aa, Artificial Sequence
  derived and/or modified protein sequence (wt) from hemagglutinin__InfluenzaA__AGG13519
MKTIIALSYILCLVFAQKLPGNDNSTATLCLGHHAVPNGTIVKTITNDQIEVTNATELVQSSSTGEICDSPHQILDGENCTLIDALLGDPQCDGFQNKKWDLFVERSKAYSNCYPYDVPDYASLRSLVASSGTLEFNNESFNWTGVTQNGTSSACIRRSDSSFFSRLNWLTHLNFKYPALNVTMPNNEQFDKLYIWGVHHPGTDKDQIFLYAQASGRITVSTKRSQQSVIPNIGSRPRIRNIPSRISIYWTIVKPGDILLINSTGNLIAPRGYFKIQSGKSSIMRSDAPIGKCNSECITPNGSIPNDKPFQNVNRITYGACPRYVKQNTLKLATGMRNVPEKQTRGIFGAIAGFIENGWEGMVDGWYGFRHQNSEGRGQAADLKSTQAAIDQINGKLNRLIGKTNEKFHQIEKEFSEVEGRVQDLEKYVEDTKIDLWSYNAELLVALENQHTIDLTDSEMNKLFEKTKKQLRENAEDMGNGCFKIYHKCDNACIGSIRNGTYNHDVYRDEALNNRFQIKGVELKSGYKDWILWISFAISCFLLCVALLGFIMWACQKGNIRCNICI

SEQ ID NO: 9887 - protein, 566 aa, Artificial Sequence; identical to SEQ ID NO: 9883
  derived and/or modified protein sequence (wt) from hemagglutinin__InfluenzaA__AGG13531

SEQ ID NO: 9888 - protein, 566 aa, Artificial Sequence
  derived and/or modified protein sequence (wt) from hemagglutinin__InfluenzaA__AGG13543
MKTIIALSYILCLVFAQKLPGNDNSTATLCLGHHAVPNGTIVKTITNDRIEVTNATELVQNSSIGEICDSPHQILDGENCTLIDALLGDPQCDGFQNKKWDLFVERSKAYSNCYPYDVPDYASLRSLVASSGTLEFNNESFNWTGVTQNGTSSACIRRSNSSFFSRLNWLTHLNFKYPALNVTMPNNEQFDKLYIWGVHHPGTDKDQIFLYAQSSGRITVSTKRSQQAVIPNIGSRPRIRNIPSRISIYWTIVKPGDILLINSTGNLIAPRGYFKIRSGKSSIMRSDAPIGKCKSECITPNGSIPNDKPFQNVNRITYGACPRYVKQSTLKLATGMRNVPEKQTRGIFGAIAGFIENGWEGMVDGWYGFRHQNSEGRGQAADLKSTQAAIDQINGKLNRLIGKTNEKFHQIEKEFSEVEGRIQDIEKYVEDTKIDLWSYNAELLVALENQHTIDLTDSEMNKLFEKTKKQLRENAEDMGNGCFKIYHKCDNACIGSIRNGTYDHNVYRDEALNNRFQIKGVELKSGYKDWILWISFAISCFLLCVALLGFIMWACQKGNIRCNICI

SEQ ID NO: 9889 - protein, 566 aa, Artificial Sequence; identical to SEQ ID NO: 9883
  derived and/or modified protein sequence (wt) from hemagglutinin__InfluenzaA__AGG13555

SEQ ID NO: 9890 - protein, 566 aa, Artificial Sequence; identical to SEQ ID NO: 9883
  derived and/or modified protein sequence (wt) from hemagglutinin__InfluenzaA__AGG13567

SEQ ID NO: 9891 - protein, 566 aa, Artificial Sequence
  derived and/or modified protein sequence (wt) from hemagglutinin__InfluenzaA__AGG13591
MKTIIALSYILCLVFAQKLPGNDNSTATLCLGHHAVPNGTIVKTITNDRIEVTNATELVQNSSIGEICDSPHQILDGENCTLIDALLGDPQCDGFQNKKWDLFVERSKAYSNCYPYDVPDYASLRSLVASSGTLEFNNENFNWTGVTQNGTSSACIRRSNSSFFSRLNWLTHLNFKYPALNVTMPNNEQFDKLYIWGVHHPGTDKDQIFLYAQSSGRITVSTKRSQQAVIPNIGSRPRIRNIPSRISIYWTIVKPGDILLINSTGNLIAPRGYFKIRSGKSSIMRSDAPIGKCKSECITPNGSIPNDRPFQNVNRITYGACPRYVKQSTLKLATGMRNVPEKQTRGIFGAIAGFIENGWEGMVDGWYGFRHQNSEGRGQAADLKSTQAAIDQINGKLNRLIGKTNEKFHQIEKEFSEVEGRIQDLEKYVEDTKIDLWSYNAELLVALENQHTIDLTDSEMNKLFEKTKKQLRENAEDMGNGCFKIYHKCDNACIGSIRNGTYDHDVYRDEALNNRFQIKGVELKSGYKDWILWISFAISCFLLCVALLGFIMWACQKGNIRCNICI

SEQ ID NO: 9892 - protein, 566 aa, Artificial Sequence
  derived and/or modified protein sequence (wt) from hemagglutinin__InfluenzaA__AGG13615
MKTIIALSYILCLVFAQKIPGNDNSTATLCLGHHAVPNGTIVKTITNDRIEVTNATELVQNSSIGEICDSPHQILDGENCTLIDALLGDPQCDGFQNKKWDLFVERSKAYSNCYPYDVPDYASLRSLVASSGTLEFNNESFNWTGVTQNGTSSACIRRSNSSFFSRLNWLTHLNFKYPALNVTMPNNEQFDKLYIWGVHHPGTDKDQIFLYAQSSGRITVSTKRSQQAVIPNIGSRPRIRNIPSRISIYWTIVKPGDILLINSTGNLIAPRGYFKIRSGKSSIMRSDAPIGKCKSECITPNGSIPSDKPFQNVNRITYGACPRYVKQSTLKLATGMRNVPEKQTRGIFGAIAGFIENGWEGMVDGWYGFRHQNSEGRGQAADLKSTQAAIDQINGKLNRLIGKTNEKFHQIEKEFSEVEGRIQDLEKYVEDTKIDLWSYNAELLVALENQHTIDLTDSEMNKLFEKTKKQLRENAEDMGNGCFKIYHKCDNACIGSIRNGTYDHDVYRDEALNNRFQIKGVELKSGYKDWILWISFAISCFLLCVALLGFIMWACQKGNIRCNICI

SEQ ID NO: 9893 - protein, 566 aa, Artificial Sequence; identical to SEQ ID NO: 9891
  derived and/or modified protein sequence (wt) from hemagglutinin__InfluenzaA__AGG13627

SEQ ID NO: 9894 - protein, 566 aa, Artificial Sequence
  derived and/or modified protein sequence (wt) from hemagglutinin__InfluenzaA__AGG13639
MKTIIALSYILCLVFAQKLPGNDNSTATLCLGHHAVPNGTIVKTITNDRIEVTNATELVQNSSIGEICDSPHQILDGENCTLIDALLGDPQCDGFQNKKWDLFVERSKAYSNCYPYDVPDYASLRSLVASSGTLEFNNESFNWAGVTQNGTSSACIRGSNSSFFSRLNWLTHLNFKYPALNVTMPNNEQFDKLYIWGVHHPGTNKDQIFLYAQSSGRITVSTKRSQQAVIPNIGSRPRIRNIPSRISIYWTIVKPGDILLINSTGNLIAPRGYFKIRSGKSSIMRSDAPIGKCKSECITPNGSIPNDKPFQNVNRITYGACPRYVKQSTLKLATGMRNVPEKQTRGIFGAIAGFIENGWEGMVDGWYGFRHQNSEGRGQAADLKSTQAAIDQINGKLNRLIGKTNEKFHQIEKEFSEVEGRIQDLEKYVEDTKIDLWSYNAELLVALENQHTIDLTDSEMNKLFEKTKKQLRENAEDMGNGCFKIYHKCDNACIGSIRNGTYDHDVYRDEALNNRFQIKGVELKSGYKDWILWISFAISCFLLCVALLGFIMWACQKGNIRCNICI

SEQ ID NO: 9895 - protein, 566 aa, Artificial Sequence; identical to SEQ ID NO: 9884
  derived and/or modified protein sequence (wt) from hemagglutinin__InfluenzaA__AGG13651

SEQ ID NO: 9896 - protein, 566 aa, Artificial Sequence; identical to SEQ ID NO: 9883
  derived and/or modified protein sequence (wt) from hemagglutinin__InfluenzaA__AGG13663

SEQ ID NO: 9897 - protein, 566 aa, Artificial Sequence; identical to SEQ ID NO: 9884
  derived and/or modified protein sequence (wt) from hemagglutinin__InfluenzaA__AGG13675

SEQ ID NO: 9898 - protein, 566 aa, Artificial Sequence; identical to SEQ ID NO: 9883
  derived and/or modified protein sequence (wt) from hemagglutinin__InfluenzaA__AGG13687

SEQ ID NO: 9899 - protein, 566 aa, Artificial Sequence; identical to SEQ ID NO: 9884
  derived and/or modified protein sequence (wt) from hemagglutinin__InfluenzaA__AGG13711

SEQ ID NO: 9900 - protein, 566 aa, Artificial Sequence; identical to SEQ ID NO: 9883
  derived and/or modified protein sequence (wt) from hemagglutinin__InfluenzaA__AGG13723

SEQ ID NO: 9901 - protein, 566 aa, Artificial Sequence; identical to SEQ ID NO: 9883
  derived and/or modified protein sequence (wt) from hemagglutinin__InfluenzaA__AGG13735

SEQ ID NO: 9902 - protein, 566 aa, Artificial Sequence; identical to SEQ ID NO: 9883
  derived and/or modified protein sequence (wt) from hemagglutinin__InfluenzaA__AGG13747

SEQ ID NO: 9903 - protein, 566 aa, Artificial Sequence
  derived and/or modified protein sequence (wt) from hemagglutinin__InfluenzaA__AGG13759
MKTIIALSYILCLVFAQELPGNDDSTATLCLGHHAVPNGTIVKTITNDRIEVTNATELVQSSSTGEICNSPHQILDGENCTLIDALLGDPQCDGFQNKKWDLFVERSKAHSNCYPYDVPDYASLRSLVASSGTLEFNNESFNWTGVTQNGTSSACIRRSNNSFFSRLNWLTHLNFKYPALNVTMPNNEQFDKLYIWGVHHPGTDKDQIFLYAQASGRITVSTKRSQQTVIPNIGSRPRVRNIPSRVSIYWTIVKPGDILLINSTGNLIAPRGYFKIRSGKSSIMRSDAPIGKCNSACITPNGSIPNDKPFQNVNRITYGACPRYVKQNTLKLATGMRNVPEKQTRGIFGAIAGFIENGWEGMVDGWYGFRHQNSEGRGQAADLKSTQAAIDQINGKLNRLIGKTNEKFHQIEKEFSEVEGRIQDLEKYVEDTKIDLWSYNAELLVALENQHTIDLTDSEMNKLFEKTKKQLRENAEDMGNGCFKIYHKCDNACIGSIRNGTYDHDVYRDEALNNRFQIKGVELKSGYKDWILWISFAISCFLLCVALLGFIMWACQKGNIRCNICI

SEQ ID NO: 9904 - protein, 566 aa, Artificial Sequence
  derived and/or modified protein sequence (wt) from hemagglutinin__InfluenzaA__AGG13771
MKTIIALSYILCLVFAQKLPGNDNSTATLCLGHHAVPNGTIVKTITNDQIEVTNATELVQSSSTGEICDSPHQILDGENCTLIDALLGDPQCDGFQNKKWDLFVERSKAYSNCYPYDVPDYASLRSLVASSGTLEFNNESFNWTGVTQNGTSSACIRRSDSSFFSRLNWLTHLNFKYPALNVTMPNNEQFDKLYIWGVHHPGTDKDQIFLYAQASGRITVSTKRSQQSVIPNIGSRPRIRNIPSRISIYWTIVKPGDILLINSTGNLIAPRGYFKIQSGKSSIMRSDAPIGKCNSECITPNGSIPNDKPFQNVNRITYGACPRYVKQNTLKLATGMRNVPEKQTRGIFGAIAGFIENGWEGMVDGWYGFRHQNSEGRGQAADLKSTQAAIDQINGKLNRLIGKTNEKFHQIEKEFSEVEGRIQDLEKYVEDNKIDLWSYNAELLVALENQHTIDLTDSEMNKLFEKTKKQLRENAEDMGNGCFKIYHKCDNACIGSIRNGTYNHDVYRDEALNNRFQIKGVELKSGYKDWILWISFAISCFLLCVALLGFIMWACQKGNIRCNICI

SEQ ID NO: 9905 - protein, 566 aa, Artificial Sequence
  derived and/or modified protein sequence (wt) from hemagglutinin__InfluenzaA__AGG13783
MKTIIALSYILCLVFAQKLPGNDNSTATLCLGHHAVPNGTIVKTITNDQIEVTNATELVQNSSMGEICDSPHQILDGENCTLIDALLGDPQCDGFQNKKWDLFVERSKAYSNCYPYDVPDYASLRSLVASSGTLEFNNESFNWAGVTQNGTSSACIRGSNSSFFSRLNWLTHLNFKYPALNVTMPNNEQFDKLYIWGVHHPGTDKDQIFLYAQSSGRITVSTKRSQQAVIPNIGSRPRIRNVPSRISIYWTIVKPGDILLINSTGNLIAPRGYFKIRSGKSSIMRSDAPIGKCKSECITPNGSIPNDKPFQNVNRITYGACPRYVKQSTLKLATGMRNVPEKQTRGIFGAIAGFIENGWEGMVDGWYGFRHQNSEGRGQAADLKSTQAAIDQINGKLNRLIGKTNEKFHQIEKEFSEVEGRIQDLEKYVEDTKIDLWSYNAELLVALENQHTIDLTDSEMNKLFEKTKKQLRENAEDMGNGCFKIYHKCDNACIGSIRNGTYDHDVYRDEALNNRFQIKGVELKSGYKDWILWISFAISCFLLCVALLGFIMWACQKGNIRCNICI

SEQ ID NO: 9906 - protein, 566 aa, Artificial Sequence; identical to SEQ ID NO: 9884
  derived and/or modified protein sequence (wt) from hemagglutinin__InfluenzaA__AGG13795

SEQ ID NO: 9907 - protein, 566 aa, Artificial Sequence; identical to SEQ ID NO: 9835
  derived and/or modified protein sequence (wt) from hemagglutinin__InfluenzaA__AGG13807

SEQ ID NO: 9908 - protein, 566 aa, Artificial Sequence; identical to SEQ ID NO: 9884
  derived and/or modified protein sequence (wt) from hemagglutinin__InfluenzaA__AGG13819

SEQ ID NO: 9909 - protein, 566 aa, Artificial Sequence; identical to SEQ ID NO: 9884
  derived and/or modified protein sequence (wt) from hemagglutinin__InfluenzaA__AGG13831

SEQ ID NO: 9910 - protein, 566 aa, Artificial Sequence; identical to SEQ ID NO: 9883
  derived and/or modified protein sequence (wt) from hemagglutinin__InfluenzaA__AGG13855

SEQ ID NO: 9911 - protein, 566 aa, Artificial Sequence
  derived and/or modified protein sequence (wt) from hemagglutinin__InfluenzaA__AGG13867
MKTIIALSYILCLVFAQKLPGNDNSTATLCLGHHAVPNGTIVKTITNDRIEVTNATELVQNSSIGKICDSPHQILDGENCTLMDALLGDPQCDGFQNKKWDLFVERSKAYSNCYPYDVPDYASLRSLVASSGTLEFNNESFNWTGVTQNGTSSACIRRSNSSFFSRLNWLTHLNFKYPALNVTMPNNEQFDKLYIWGVHHPGTDKDQIFLYAQSSGRITVSTKRSQQAVIPNIGSRPRIRNIPSRISIYWTIVKPGDILLINSTGNLIAPRGYFKIRSGKSSIMRSDAPIGKCKSECITPNGSIPNDKPFQNVNRITYGACPRYVKQSTLKLATGMRNVPEKQTRGIFGAIAGFIENGWEGMVDGWYGFRHQNSEGRGQAADLKSTQAAIDQINGKLNRLIGKTNEKFHQIEKEFSEVEGRIQDLEKYVEDTKIDLWSYNAELLVALENQHTIDLTDSEMNKLFEKTKKQLRENAEDMGNGCFKIYHKCDNACIGSIRNGTYDHNVYRDEALNNRFQIKGVELKSGYKDWILWISFAISCFLLCVALLGFIMWACQKGNIRCNICI

SEQ ID NO: 9912 - protein, 566 aa, Artificial Sequence; identical to SEQ ID NO: 9883
  derived and/or modified protein sequence (wt) from hemagglutinin__InfluenzaA__AGG13879

SEQ ID NO: 9913 - protein, 566 aa, Artificial Sequence; identical to SEQ ID NO: 9883
  derived and/or modified protein sequence (wt) from hemagglutinin__InfluenzaA__AGG13891

SEQ ID NO: 9914 - protein, 566 aa, Artificial Sequence
  derived and/or modified protein sequence (wt) from hemagglutinin__InfluenzaA__AGG13903
MKTIIALSYILCLVFAQKLPGNDNSTATLCLGHHAVPNGTIVKTITNDQIEVTNATELVQSSSTGEICDSPHQILDGENCTLIDALLGDPQCDGFQNKKWDLFVERSKAYSNCYPYDVPDYASLRSLVASSGTLEFNNESFNWTGVTQNGTSSACIRRSDSSFFSRLNWLTHLNFKYPALNVTMPNNEQFDKLYIWGVHHPGTDKDQIFLYAQASGRITVSTKRSQQSVLPNIGSRPRIRNIPSRISIYWTIVKPGDILLINSTGNLIAPRGYFKIQSGKSSIMRSDAPIGKCNSECITPNGSIPNDKPFQNVNRITYGACPRYVKQNTLKLATGMRNVPEKQTRGIFGAIAGFIENGWEGMVDGWYGFRHQNSEGRGQAADLKSTQAAIDQINGKLNRLIGKTNEKFHQIEKEFSEVEGRIQDLEKYVEDTKIDLWSYNAELLVALENQHTIDLTDSEMNKLFEKTKKQLRENAEDMGNGCFKIYHKCDNACIGSIRNGTYNHDVYRDEALNNRFQIKGVELKSGYKDWILWISFAISCFLLCVALLGFIMWACQKGNIRCNICI

SEQ ID NO: 9915 - protein, 566 aa, Artificial Sequence; identical to SEQ ID NO: 9883
  derived and/or modified protein sequence (wt) from hemagglutinin__InfluenzaA__AGG13927

SEQ ID NO: 9916 - protein, 566 aa, Artificial Sequence; identical to SEQ ID NO: 9891
  derived and/or modified protein sequence (wt) from hemagglutinin__InfluenzaA__AGG13939

SEQ ID NO: 9917 - protein, 566 aa, Artificial Sequence
  derived and/or modified protein sequence (wt) from hemagglutinin__InfluenzaA__AGG13962
MKAILVVLLYTFATANADTLCIGYHANNSTDTVDTVLEKNVTVTHSVNLLEDKHNGKLCKLRGVAPLHLGKCNIAGWILGNPECESLSTASSWSYIVETSSSDNGTCYPGDFINYEELREQLSSVSSFEGFEIFPKTSSWPNHDSNKGVTAACPHAGAKSFYKNLIWLVKKGNSYPKLSKSYINDKGKEVLVLWGIHHPSTTADQQSLYQNADAYVFVGTSRYSKKFKPEIAIRPKVRDQEGRMNYYWTLIEPGDKITFEATGNLVVPRYAFAMERNAESGIIISDTPVHDCNTTCQTPEGAINTSLPFQNIHPITIGKCPKYVKSTKLRLATGLRNVPSIQSRGLFGAIAGFIEGGWTGMVDGWYGYHHQNEQGSGYAADLKSTQNAIDKITNKVNSVIEKMNTQFTAVGKEFNHLEKRIENLNKKVDDGFLDIWTYNAELLVLLENERTLDYHDSNVKNLYEKVRNQLKNNAKEIGNGCFEFYHKCDNTCMESVKNGTYDYPKYSEEAKLNREKIDGVKLESTRIYQILAIYSTVASSLVLVVSLGAISFWMCSNGSLQCRICI

SEQ ID NO: 9918 - protein, 566 aa, Artificial Sequence; identical to SEQ ID NO: 9883
  derived and/or modified protein sequence (wt) from hemagglutinin__InfluenzaA__AGG13973

SEQ ID NO: 9919 - protein, 566 aa, Artificial Sequence; identical to SEQ ID NO: 9883
  derived and/or modified protein sequence (wt) from hemagglutinin__InfluenzaA__AGG13985

SEQ ID NO: 9920 - protein, 566 aa, Artificial Sequence; identical to SEQ ID NO: 9883
  derived and/or modified protein sequence (wt) from hemagglutinin__InfluenzaA__AGG13997

SEQ ID NO: 9921 - protein, 566 aa, Artificial Sequence; identical to SEQ ID NO: 9883
  derived and/or modified protein sequence (wt) from hemagglutinin__InfluenzaA__AGG14009

SEQ ID NO: 9922 - protein, 566 aa, Artificial Sequence
  derived and/or modified protein sequence (wt) from hemagglutinin__InfluenzaA__AGG14021
MKTIIALSYILCLVFAQELPGNDDSTATLCLGHHAVPNGTIVKTITNDQIEVTNATELVQSSSTGEICNSPHQILDGENCTLIDALLGDPQCDGFQNKKWDLFVERSKAHSNCYPYDVPDYASLRSLVASSGTLEFNNESFNWTGVTQNGTSSACIRRSNNSFFSRLNWLTHLNFKYPALNVTMPNNEQFDKLYIWGVHHPGTDKDQIFLYAQASGRITVSTKRSQQAVIPNIGSRPRVRNIPSRVSIYWTIVKPGDILLINSTGNLIAPRGYFKIRSGKSSIMRSDAPIGKCNSACITPNGSIPNDKPFQNVNRITYGACPRYVKQNTLKLATGMRNVPEKQTRGIFGAIAGFIENGWEGMVDGWYGFRHQNSEGRGQAADLKSTQAAIDQINGKLNRLIGKTNEKFHQIEKEFSEVEGRIQDLEKYVEDTKIDLWSYNAELLVALENQHTIDLTDSEMNKLFEKTKKQLRENAEDMGNGCFKIYHKCDNACIGSIRNGTYDHDVYRDEALNNRFQIKGIELKSGYKDWILWISFAISCFLLCVALLGFIMWACQKGNIRCNICI

SEQ ID NO: 9923 - protein, 566 aa, Artificial Sequence; identical to SEQ ID NO: 9884
  derived and/or modified protein sequence (wt) from hemagglutinin__InfluenzaA__AGG14033

SEQ ID NO: 9924 - protein, 566 aa, Artificial Sequence; identical to SEQ ID NO: 9903
  derived and/or modified protein sequence (wt) from hemagglutinin__InfluenzaA__AGG14318

SEQ ID NO: 9925 - protein, 566 aa, Artificial Sequence
  derived and/or modified protein sequence (wt) from hemagglutinin__InfluenzaA__AGG14330
MKTIIALSYILCLVFAQKLPGNDNSTATLCLGHHAVPNGTIVKTITNDRIEVTNATELVQNSSIGEICDSPHQILDGENCTLIDALLGDPQCDGFQNKKWDLFVERSKAYSNCYPYDVPDYASLRSLVASSGTLEFNNESFNWTGVTQNGTSSACIRRSNSSFFSRLNWLTHLNFKYPALNVTMPNNEQFDKLYIWGVHHPGTDKDQIFLYAQSSGRITVSTKRSQQAVIPNIGSRPRIRNIPSRISIYWTIVKPGDILLINSTGNLIAPRGYFKIRSGKSSIIRSDAPIGKCKSECITPNGSIPNDKPFQNVNRITYGACPRYVKQSTLKLATGMRNVPEKQTRGIFGAIAGFIENGWEGMVDGWYGFRHQNSEGRGQAADLKSTQAAIDQINGKLNRLIGKTNEKFHQIEKEFSEVEGRIQDLEKYVEDTKIDLWSYNAELLVALENQHTIDLTDSEMNKLFEKTKKQLRENAEDMGNGCFKIYHKCDNACIGSIRNGTYDHDVYRDEALNNRFQIKGVELKSGYKDWILWISFAISCFLLCVALLGFIMWACQKGNIRCNICI

SEQ ID NO: 9926 - protein, 566 aa, Artificial Sequence
  derived and/or modified protein sequence (wt) from hemagglutinin__InfluenzaA__AGG84179
MKTIIALSYILCLVFAQKLPGNDNSTATLCLGHHAVPNGTIVKTITNDQIEVTNATELVQSSSASEICDSPHHILDGENCTLIDALLGDPQCDGFQNKKWDLFVERSRAYSNCYPYDVPDYASLRSLVASSGTLEFNNESFNWTGVTQNGTSSACIRRSNNSFFSRLNWLTHLNFKYPALNVTMPNNEQFDKLYIWGVHHPGTDKDQIFLYAQASGRITVSTKRSQQAVIPNIGSRPRVRNIPSRISIYWTIVKPGDILLINSTGNLIAPRGYFKIRSGKSSIMRSDAPIGKCNSECITPNGSIPNDKPFQNVNRITYGACPRYVKQSTLKLATGMRNVPEKQTRGIFGAIAGFIENGWEGMMDGWYGFRHQNSEGRGQAADLKSTQAAIDQINGKLNRLIGKTNEKFHQIEKEFSEVEGRIQDLEKYVEDTKIDLWSYNAELLVALENQHTIDLTDSEMNKLFEKTKKQLRENAEDMGNGCFKIYHKCDNACIGSIRNGTYDHDVYRDEALNNRFQIKGVELKSGYKDWILWISFAISCFLLCVALLGFIMWACQKGNIRCNICI

SEQ ID NO: 9927 - protein, 567 aa, Artificial Sequence
  derived and/or modified protein sequence (wt) from hemagglutinin__InfluenzaA__AGI02564
MEKIVLLLAIVSLVKSDQICIGYHANNSTEQVDTIMEKNVTVTHAQDILEKTHNGKLCDLDGVKPLILRDCSVAGWLLGNPMCDEFINVPEWSYIVEKANPTNDLCYPGNFNDYEELKHLLSRINHFEKIQIIPKSSWSGHEASSGVSSACPYQGTPSFFRNVVWLIKKNNTYPTIKRSYNNTNQEDLLILWGIHHSNDAAEQTKLYQNPTTYISVGTSTLNQRLVPKIATRSKVNGQSGRMDFFWTILKPNDAINFESNGNFIAPEYAYKIVKKGDSAIMKSEVEYGNCNTKCQTPIGAINSSMPFHNIHPLTIGECPKYVKSNKLVLATGLRNSPLRERRRKRGLFGAIAGFIEGGWQGMVDGWYGYHHSNEQGSGYAADKESTQKAIDGVTNKVNSIIDKMNTQFEAVGREFNNLERRIENLNKKMEDGFLDVWTYNAELLVLMENERTLDFHDSNVKNLYDKVRLQLRNNAKELGNGCFEFYHKCDNECMESVRNGTYDYPQYSEEARLKREEISGVKLESIGTYQILSIYSTVASSLALAIMVAGLSLWMCSNGSLQCRICI

SEQ ID NO: 9928 - protein, 568 aa, Artificial Sequence
  derived and/or modified protein sequence (wt) from hemagglutinin__InfluenzaA__AGI02565
MEKIVLLLAIVSLVKSDQICIGYHANNSTEQVDTIMEKNVTVTHAQDILEKTHNGKLCDLDGVKPLILRDCSVAGWLLGNPMCDEFINVPEWSYIVEKAIPANDLCYPGDFNDYEELKHLLSRINHFEKIQIIPKSSWSNHEASLGVSSACPYLGKPSFFRNVVWLIKKNSTYPTIKRSYNNTNQEDLLVLWGIHHPNDAAEQTKLYQNPTTYISVGTSTLNQRLVPKIATRSKVNGQSGRMEFFWTILKPNDAINFESNGNFIAPEYAYKIVKKGDSAIMKSELEYGNCNTKCQTPMGAINSSMPFHNIHPLTIGECPKYVKSNRLVLATGLRNSPQGERRRKKRGLFGAIAGFIEGGWQGMVDGWYGYHHSNEQGSGYAADKESTQKAIDGVTNKVNSIIDKMNTQFEAVGREFNNLERRIENLNKKMEDGFLDVWTYNAELLVLMENERTLDFHDSNVKNLYDKVRLQLRDNAKELGNGCFEFYHKCDNECMESVRNGTYDYPQYSEEARLKREEISGVKLESIGTYQILSIYSTVASSLALAIMVAGLSLWMCSNGSLQCRICI

SEQ ID NO: 9929 - protein, 567 aa, Artificial Sequence
  derived and/or modified protein sequence (wt) from hemagglutinin__InfluenzaA__AGI02566
MEKIVLLLAIVSLVKSDQICIGYHANNSTEQVDTIMEKNVTVTHAQDILEKTHNGKLCDLDGVKPLILRDCSVAGWLLGNPMCDEFINVPEWSYIVEKANPANDLCYPGNFNDYEELKHLLSRINHFEKIQIIPKSSWSDHEASSGVSSACPYQGTPSFFRNVVWLIKKNNTYPTIKRSYNNTNQENLLILWGIHHSNDAAEQIKLYQNPTTYISVGTSTLNQRLVPKIATRSKVNGQSGRMDFFWTILKPNDAINFESNGNFIAPEYAYKIVKEGDSAIMKSEVEYGNCNTKCQTPIGAINSSMPFHNIHPLTIGECPKYVKSNKLVLATGLRNSPLRERRRKRGLFGAIAGFIEGGWQGMVDGWYGYHHSNEQGSGYAADKESTQKAIDGVTNKVNSIIDKMNTQFEAVGREFNNLERRIENLNKKMEDGFLDVWTYNAELLVLMENERTLDFHDSNVKNLYDKVRLQLRDNAKELGNGCFEFYHKCDNECMESVRNGTYDYPQYSEEARLKREEISGVKLESIGTYQILSIYSTVASSLALAIMVAGLSLWMCSNGSLQCRICI

SEQ ID NO: 9930 - protein, 568 aa, Artificial Sequence
  derived and/or modified protein sequence (wt) from hemagglutinin__InfluenzaA__AGI02567
MEKIVLLLAIVSLVKSDQICIGYHANNSTEQVDTIMEKNVTVTHAQDILEKTHNGKLCDLDGVKPLILRDCSVAGWLLGNPMCDEFLNVPEWSYIVEKANPANDLCYPGNFNDYEELKHLLSRINHFEKIQIIPKSSWSDHEASSGVSSACPYQGRSSFFRNVVWLIKKNNAYPTIKRSYNNTNQEDLLVLWGIHHPNDAAEQTRLYQNPTTYISVGTSTLNQRLVPKIATRSKVNGQSGRMEFFWTILKPNDAINFESNGNFIAPEYAYKIVKKGDSTIMKSELEYGNCNTKCQTPIGAINSSMPFHNIHPLTIGECPKYVKSNRLVLATGLRNSPQGERRRKKRGLFGAIAGFIEGGWQGMVDGWYGYHHSNEQGSGYAADKESTQKAIDGVTNKVNSIIDKMNTQFEAVGREFNNLERRIENLNKKMEDGFLDVWTYNAELLVLMENERTLDFHDSNVKNLYDKVRLQLRDNAKELGNGCFEFYHRCDNECMESVRNGTYDYPQYSEEARLKREEISGVKLESIGTYQILSIYSTVASSLALAIMVAGLSLWMCSNGSLQCRICI

SEQ ID NO: 9931 - protein, 567 aa, Artificial Sequence
  derived and/or modified protein sequence (wt) from hemagglutinin__InfluenzaA__AGI02568
MEKIVLLLAIVSLVKSDQICIGYHANNSTEQVDTIMEKNVTVTHAQDILEKTHNGKLCDLDGVKPLILRDCSVAGWLLGNPMCDEFINVPEWSYIVEKANPANDLCYPGNFNDYEELKHLLSRINHFEKIQIIPKSSWSDHEASSGVSSACPYQGTPSFFRNVVWLIKKNNTYPTIKRSYNNTNQENLLILWGIHHSNDATEQIKLYQNPTTYISVGTSTLNQRLVPKIGTRSKVNGQSGRMDFFWTILKPNDAINFESNGNFIAPEYAYKIVKEGDSAIMKSEVEYGNCNTKCQTPIGAINSSMPFHNIHPLTIGECPKYVKSNKLVLATGLRNSPLRERRRKRGLFGAIAGFIEGGWQGMVDGWYGYHHSNEQGSGYAADKESTQKAIDGVTNKVNSIIDKMNTQFEAVGREFNNLERRIENLNKKMEDGFLDVWTYNAELLVLMENERTLDFHDSNVKNLYDKVRLQLRDNAKELGNGCFEFYHKCDNECMESVRNGTYDYPQYSEEARLKREEISGVKLESMGIYQILSIYSTVASSLALAIMVAGLSLWMCSNGSLQCRICI

SEQ ID NO: 9932 - protein, 560 aa, Artificial Sequence
  derived and/or modified protein sequence (wt) from hemagglutinin__InfluenzaA__AGI60301
MNTQILVFALIAIIPTNADKICLGHHAVSNGTKVNTLTERGVEVVNATETVERTNIPRICSKGKRTVDLGQCGLLGTITGPPQCDQFLEFSADLIIERREGSDVCYPGKFVNEEALRQILRESGGIDKEAMGFTYSGIRTNGATSACRRSGSSFYAEMKWLLSNTDNAAFPQMTKSYKNTRKSPALIVWGIHHSVSTAEQTKLYGSGNKLVTVGSSNYQQSFVPSPGARPQVNGISGRIDFHWLMLNPNDTVTFSFNGAFIAPDRASFLRGKSMGIQSGVQVDANCEGDCYHSGGTIISNLPFQNIDSRAVGKCPRYVKQRSLLLATGMKNVPEIPKGRGLFGAIAGFIENGWEGLIDGWYGFRHQNAQGEGTAADYKSTQSAIDQITGKLNRLIEKTNQQFELIDNEFNEVEKQIGNVINWTRDSITEVWSYNAELLVAMENQHTIDLADSEMDKLYERVKRQLRENAEEDGTGCFEIFHKCDDDCMASIRNNTYDHSKYREEAMQNRIQIDPVKLSSGYKDVILWFSFGASCFILLAIVMGLVFICVKNGNMRCTICI

SEQ ID NO: 9933 - protein, 560 aa, Artificial Sequence
  derived and/or modified protein sequence (wt) from hemagglutinin__InfluenzaA__AGJ72861
MNTQILVFALIAIIPTNADKICLGHHAVSNGTKVNTLTERGGEVVNATETVERTNIPRICSKGKKTVDLGQGGPRGTITGPPQCDQFLEFSADLIMERREGSDVCYPGKFVNEEALRQILRESGGIDKEAMGFTYSGIRTNGATSACRRSGSSFYAEMKWLLSNTDNAAFPQMTKSYKNTRKSPALIVWGIHHSVSTAEQTKLYGSGNKLVTVGSSNYQQSFVPSPGARPQVNGQSGRIDFHWLMLNPNDTVTFSFNGAFIAPDRASFLRGKSMGIQSGVQVDANCEGDCYHSGGTIISNLPFQNIDSRAVGKCPRYVKQRSLLLATGMKNVPEIPKGRGLFGAIAGFIENGWEGLIDGWYGFRHQNAQGEGTAADYKSTQSAIDQITGKLNRLIEKTNQQFELIDNEFNEVEKQIGNVINWTRDSITEVWSYNAELLVAMENQHTIDLADSEMDKLYERVKRQLRENAEEDGTGCFEIFHKCDDDCMASIRNNTYDHSKYREEAMQNRIQIDPVKLSSGYKDVILWFSFGASCFILLAIVMGLVFICVKNGNMRCTICI

SEQ ID NO: 9934 - protein, 566 aa, Artificial Sequence
  derived and/or modified protein sequence (wt) from hemagglutinin__InfluenzaA__AGJ73327
MKAILVVLLYTFATANADTLCIGYHANNSTDTVDTVLEKNVTVTHSVNLLEDKHNGKLCKLRGVAPLHLGKCNIAGWILGNPECESLSTASSWSYIVETSSSDNGTCYPGDFINYEELREQLSSVSSFERFEIFPKTSSWPNHDSNKGVTAACPHAGAKSFYKNLIWLVKKGNSYPKLSKSYINDKGKEVLVLWGIHHPSTTADHQSLYQNADAYVFVGTSRYSKKFKPEIAIRPKVRDQEGRMNYYWTLIEPGDKITFEATGNLVVPRYAFAMERNAGSGIIIPDTPVHDCNTTCQTPKGAINTSLPFQNIHPITIGKCPKYVKSTKLRLATGLRNVPSIQSRGLFGAIAGFIEGGWTGMVDGWYGYHHQNEQGSGYAADLKSTQNAIDKITNKVNSVIEKMNTQFTAVGKEFNHLEKRIENLNKKLDDGFLDIWTYNAELLVLLENERTLDYHDSNVKNLYEKVRNQLKNNAKEIGNGCFEFYHKCDNTCMESVKNGTYDYPKYSEEAKLNREKIDGVKLESTRIYQILAIYSTVASSLVLVVSLGEISFWMCSNGSLQCRICI

SEQ ID NO: 9935 - protein, 566 aa, Artificial Sequence
  derived and/or modified protein sequence (wt) from hemagglutinin__InfluenzaA__AGJ73329
MKAILVVLLYTFATANADTLCIGYHANNSTDTVDTVLEKNVTVTHSVNLLEDKHNGKLCKLRGVAPLHLGKCNIAGWILGNPECESLSTASSWSYIVETSSSDNGTCYPGDFIDYEELREQLSSVSSFERFEIFPKTSSWPNHDSNKGVTAACPHAGAKGFYKNLIWLVKKGNSYPKLSKSYINDKGKEVLVLWGIHHPSTTADQQSLYQNADTYVFVGTSRYSKKFKPEIAIRPKVRDQEGRMNYYWTLVEPGDKITFEATGNLVVPRYAFAMERNAGSGIIISDAPVHDCNTTCQTPKGAINTSLPFQNIHPITIGKCPKYVKSTKLRLATGLRNVPSIQSRGLFGAIAGFIEGGWTGMVDGWYGYHHQNEQGSGYAADLKSTQNAIDKITNKVNSVIEKMNTQFTAVGKEFNHLEKRIENLNKKVDDGFLDIWTYNAELLVLLENERTLDYHDSNVKNLYEKVRNQLKNNAKEIGNGCFEFYHKCDNTCMESVKNGTYDYPKYSEEAKLNREEIDGVKLESTRIYQILAIYSTVASSLVLVVSLGAISFWMCSNGSLQCRICI

SEQ ID NO: 9936 - protein, 566 aa, Artificial Sequence
  derived and/or modified protein sequence (wt) from hemagglutinin__InfluenzaA__AGJ73331
MKAILVVLLYTFATANADTLCIGYHANNSTDTVDTVLEKNVTVTHSVNLLEDKHNGKLCKLRGVAPLHLGKCNIAGWILGNPECESLSTASSWSYIVETSSSDNGTCYPGDFIDYEELREQLSSVSSFERFEIFPKTSSWPNHDSNKGVTTACPHAGAKSFYKNLIWLVKKGNSYPKLSKSYINDKGKEVLVLWGIHHPPTSADQQSLYQNADAYVFVGTSRYSKKFKPEIAIRPKVRGQEGRMNYYWTLVEPGDKITFEATGNLVVPRYAFAMERNAGSGIIISDTPVHDCNTTCQTPKGAINTSLPFQNIHPITIGKCPKYVKSTKLRLATGLRNVPSIQSRGLFGAIAGFIEGGWTGMVDGWYGYHHQNEQGSGYAADLKSTQNAIDEITNKVNSVIEKMNTQFTAVGKEFNHLEKRIENLNKKVDDGFLDIWTYNAELLVLLENERTLDYHDSKVKNLYEKVRSQLKNNAKEIGNGCFEFYHKCDNTCMESVKNGTYDYPKYSEEAKLNREEIDGVKLESTRIYQILAIYSTVASSLVLVVSLGAISFWMCSNGSLQCRICI

SEQ ID NO: 9937 - protein, 566 aa, Artificial Sequence
  derived and/or modified protein sequence (wt) from hemagglutinin__InfluenzaA__AGJ73333
MKAILVVLLYTFATANADTLCIGYHANNSTDTVDTVLEKNVTVTHSVNLLEDKHNGKLCKLRGVAPLHLGKCNIAGWILGNPECESLSTASSWSYIVETSSSDNGTCYPGDFIDYEELREQLSSVSSFERFEIFPKTSSWPNHDSNKGVTAACPHAGAKGFYKNLIWLVKKGNSYPKLSKSYINDKGKEVLVLWGIHHPSTSADQQSLYQNADTYVFVGTSRYSKKFKPEIAIRPKVRDQEGRMNYYWTLVEPGDKITFEATGNLVVPRYAFAMERNAGSGIIISDTPVHDCNTTCQTPKGAINTSLPFQNIHPITIGKCPKYVKSTKLRLATGLRNVPSIQSRGLFGAIAGFIEGGWTGMVDGWYGYHHQNEQGSGYAADLKSTQNAIDKITNKVNSVIEKMNTQFTAVGKEFNHLEKRIENLNKKVDDGFLDIWTYNAELLVLLENERTLDYHDSNVKNLYEKVRNQLKNNAKEIGNGCFEFYHKCDNTCMESVKNGTYDYPKYSEEAKLNREEIDGVKLESTRIYQILAIYSTVASSLVLVVSLGAISFWMCSNGSLQCRICI

SEQ ID NO: 9938 - protein, 566 aa, Artificial Sequence
  derived and/or modified protein sequence (wt) from hemagglutinin__InfluenzaA__AGJ73335
MKAILVVLLYTFATANADTLCIGYHANNSTDTVDTVLEKNVTVTHSVNLLEDKHNGKLCKLRGVAPLHLGKCNIAGWILGNPECESLSTASSWSYIVETSSSDNGTCYPGDFIDYEELREQLSSVSSFERFEIFPKTSSWPNHDSNKGVTAACPHAGAKSFYKNLIWLVKKGNSYPKLSKSYINDKGKEVLVLWGIHHPSTTADQQSLYQNADTYVFVGTSRYSKKFKPEIAIRPKVRDQEGRMNYYWTLVEPRDKITFEATGNLVVPRYAFAMERNAGSGIIISDTPVHDCNTTCQTPKGAINTSLPFQNIHPITIGKCPKYVKSTKLRLATGLRNVPSIQSRGLFGAIAGFIEGGWTGMVDGWYGYHHQNEQGSGYAADLKSTQNAIDKITNKVNSVIEKMNTQFTAVGKEFNHLEKRIENLNKKVDDGFLDIWTYNAELLVLLENERTLDYHDSNVKNLYEKVRNQLKNNAKEIGNGCFEFYHKCDNTCMESVKNGTYDYPKYSEEAKLNREEIDGVKLESTRIYQILAIYSTVASSLVLVVSLGAISFWMCSNGSLQCRICI

SEQ ID NO: 9939 - protein, 566 aa, Artificial Sequence; identical to SEQ ID NO: 6454
  derived and/or modified protein sequence (wt) from hemagglutinin__InfluenzaA__AGJ73337

SEQ ID NO: 9940 - protein, 566 aa, Artificial Sequence; identical to SEQ ID NO: 6454
  derived and/or modified protein sequence (wt) from hemagglutinin__InfluenzaA__AGJ73339

SEQ ID NO: 9941 - protein, 566 aa, Artificial Sequence; identical to SEQ ID NO: 6454
  derived and/or modified protein sequence (wt) from hemagglutinin__InfluenzaA__AGJ73341

SEQ ID NO: 9942 - protein, 566 aa, Artificial Sequence
  derived and/or modified protein sequence (wt) from hemagglutinin__InfluenzaA__AGJ73343
MKAILVVLLYTFATANADTLCIGYHANNSTDTVDTVLEKNVTVTHSVNLLEDKQNGKLCKLRGVAPLHLGKCNIAGWILGNPECESLSTASSWSYIVETSSSDNGTCYPGDFINYEELREQLSSVSSFERFEIFPKTSSWPNHDSNKGVTAACPHAGAKSFYKNLIWLVKKGNSYPKLSKSYINDKGKEVLVLWGIHHPSTSADQQSLYQNADAYVFVGTSKYSKKFKPEIAVRPKVRDQEGRMNYYWTLVEPGDKITFEATGNLLVPRYAFAMERNAGSGIIISDTPVHDCNTTCQTPKGAINTSLPFQNIHPITIGKCPKYVKSTKLRLATGLRNVPSIQSRGLFGAIAGFIEGGWTGMVDGWYGYHHQNEQGSGYAADLKSTQNAIDKITNKVNSVIEKMNTQFTAVGKEFNHLEKRIENLNKKVDDGFLDIWTYNAELLVLLENERTLDYHDSNVKNLYEKVRSQLKNNAKEIGNGCFEFYHKCDNTCMESVKNGTYDYPKYSEEAKLNREEIDGVKLESTRIYQILAIYSTVASSLVLVVSLGAISFWMCSNGSLQCRICI

SEQ ID NO: 9943 - protein, 566 aa, Artificial Sequence
  derived and/or modified protein sequence (wt) from hemagglutinin__InfluenzaA__AGJ73345
MKAILVVLLYTFATANADTLCIGYHANNSTDTVDTVLEKNVTVTHSVNLLEDKHNGKLCKLRGVAPLHLGKCNIAGWILGNPECESLSTASSWSYIVETSSSDNGTCYPGDFINYEELREQLSSVSSFERFEIFPKTSSWPNHDSNKGVTAACPHAGAKSFYKNLIWLVKKGNSYPKLSKSYINDKGKEVLVLWGIHHPSTSADQQSLYQNEDAYVFVGTSKYSKKFKPEIAVRPKVRDQEGRMNYYWTLVEPGNKITFEATGNLLVPRYAFAMERNAGSGIIISDTPVHDCNTTCQTPKGAINTSLPFQNIHPITIGKCPKYVKSTKLRLATGLRNVPSIQSRGLFGAIAGFIEGGWTGMVDGWYGYHHQNEQGSGYAADLKSTQNAIDKITNKVNSVIEKMNTQFTAVGKEFNHLEKRIENLNKKVDDGFLDIWTYNAELLVLLENERTLDYHDSNVKNLYEKVRSQLKNNAKEIGNGCFEFYHKCDNTCMESVKNGTYDYPKYSEEAKLNREEIDGVKLESTRIYQILAIYSTVASSLVLVVSLGAISFWMCSNGSLQCRICI

SEQ ID NO: 9944 - protein, 566 aa, Artificial Sequence; identical to SEQ ID NO: 7050
  derived and/or modified protein sequence (wt) from hemagglutinin__InfluenzaA__AGJ73347

SEQ ID NO: 9945 - protein, 566 aa, Artificial Sequence; identical to SEQ ID NO: 7050
  derived and/or modified protein sequence (wt) from hemagglutinin__InfluenzaA__AGJ73349

SEQ ID NO: 9946 - protein, 566 aa, Artificial Sequence
  derived and/or modified protein sequence (wt) from hemagglutinin__InfluenzaA__AGJ73351
MKAILVVLLYTFATANADTLCIGYHANNSTDTVDTVLEKNVTVTHSVNLLEDKHNGKLCKLRGVAPLHLGKCNIAGWILGNPECESLSTASSWSYIVETSSSDNGTCYPGDFIDYEELREQLSSVSSFERFEIFPKTSSWPNHDSNKGVTAACPHAGAKGFYKNLIWLVKKGNSYPKLSKSYINDKGKEVLVLWGIHHPSTTADQQSLYQNADTYVFVGTSRYSKKFKPEIAIRPKMRDQEGRMNYYWTLVEPGDKITFEATGNLVVPRYAFAMERNAGSGIIISDTPVHDCNTTCQTPKGAINTSLPFQNIHPITIGKCPKYVKSTKLRLATGLRNVPSIQSRGLFGAIAGFIEGGWTGMVDGWYGYHHQNEQGSGYAADLKSTQNAIDKITNKVNSVIEKMNTQFTAVGKEFNHLEKRIENLNKKVDDGFLDIWTYNAELLVLLENERTLDYHDSNVKNLYEKVRNQLKNNAKEIGNGCFEFYHKCDNTCMESVKNGTYDYPKYSEEAKLNREEIDGVKLESTRIYQILAIYSTVASSLVLVVSLGAISFWMCSNGSLQCRICI

SEQ ID NO: 9947 - protein, 566 aa, Artificial Sequence
  derived and/or modified protein sequence (wt) from hemagglutinin__InfluenzaA__AGJ73353
MKAILVVLLYTFATANADTLCIGYHANNSTDTVDTVLEKNVTVTHSVNLLEDKHNGKLCKLRGVAPLHLGKCNIAGWILGNPECESLSTASSWSYIVETSSSDNGTCYPGDFINYEELREQLSSVSSFERFEIFPKTSSWPNHDSNKGVTAACPHAGAKSFYKNLIWLVKKGNSYPKLSKSYINDKGKEVLVLWGIHHPSTSADQQSLYQNADAYVFVGTSKYSKKFKPEIAVRPKVRDQEGRMNYYWTLVEPGDKITFEATGNLLVPRYAFAMERNAGSGIIISDTPVHDCNTTCQTPKGAINTSLPFQSIHPITIGKCPKYVKSTKLRLATGLRNVPSIQSRGLFGAIAGFIEGGWTGMVDGWYGYHHQNEQGSGYAADLKSTQNAIDKITNKVNSVIEKMNTQFTAVGKEFNHLEKRIENLNKKVDDGFLDIWTYNAELLVLLENERTLDYHDSNVKNLYEKVRSQLKNNAKEIGNGCFEFYHKCDNTCMESVKNGTYDYPKYSEEAKLNREEIDGVKLESTRIYQILAIYSTVASSLVLVVSLGAISFWMCSNGSLQCRICI

SEQ ID NO: 9948 - protein, 566 aa, Artificial Sequence
  derived and/or modified protein sequence (wt) from hemagglutinin__InfluenzaA__AGJ73355
MKAILVVLLYTFATANADTLCIGYHANNSTDTVDTVLEKNVTVTHSVNLLEDKHNGKLCKLRGVAPLHLGKCNIAGWILGNPECESLSTASSWSYIVETSSSDNGTCYPGDFIDYEELREQLSSVSSFERFEIFPKTSSWPNHDSNKGVTAACPHAGAKGFYKNLIWLVKKGNSYPKLSKSYINDKGKEVLVLWGIHHPSTTADQQSLYQNADTYVFVGTSRYSKKFKPEIAIRPKVRDQEGRMNYYWTLVEPGDKITFEATGNLVVPRYAFAMERNAGSGIIISDTPVHDCNTTCQTPKGAINTSLPFQNIHPITIGKCPKYVKSTKLRLATGLRNVPSIQSRGLFGAIAGFIEGGWTGMVDGWYGYHHQNEQGSGYAADLKSTQNAIDKITNKVNSVIEKMNTQFTAVGKEFNHLEKRIENLNKKVDDGFLDIWTYNAELLVLLENERTLDYHDSNVKNLYEKVRNQLKNNAKEIGNGCFEFYHKCDNTCMESVKNGTYDYPKYSEEAKLNREEIDGVKLESTRIYQILAIYSTVASSLVLVVSLGATSFWMCSNGSLQCRICI

SEQ ID NO: 9949 - protein, 566 aa, Artificial Sequence; identical to SEQ ID NO: 6867
  derived and/or modified protein sequence (wt) from hemagglutinin__InfluenzaA__AGJ73357

SEQ ID NO: 9950 - protein, 566 aa, Artificial Sequence
  derived and/or modified protein sequence (wt) from hemagglutinin__InfluenzaA__AGJ73361
MKAILVVLLYTFATANADTLCIGYHANNSTDTVDTVLEKNVTVTHSVNLLEDKHNGKLCKLRGVAPLHLGKCNIAGWILGNPECESLSTSSSWSYIVETSSSDNGTCYPGDFIDYEELREQLSSVSSFERFEIFPKTSSWPNHDSNKGVTAACPHAGAKGFYKNLIWLVKKGNSYPKLSKSYINDKGKEVLVLWGIHHPSTTADQQSLYQNADTYVFVGTSRYSKKFKPEIAIRPKVRDQEGRMNYYWTLVEPGDKITFEATGNLVVPRYAFAMERNAGSGIFISDTPVHDCNTTCQTPKGAINTSLPFQNIHPITIGKCPKYVKSTKLRLATGLRNVPSIQSRGLFGAIAGFIEGGWTGMVDGWYGYHHQNEQGSGYAADLKSTQNAIDKITNKVNSVIEKMNTQFTAVGKEFNHLEKRIENLNKKVDDGFLDIWTYNAELLVLLENERTLDYHDSNVKNLYEKVRNQLKNNAKEIGNGCFEFYHKCDNTCMESVKNGTYDYPKYSEEAKLNREEIDGVKLESTRIYQILAIYSTVASSLVLVVSLGAISFWMCSNGSLQCRICI

SEQ ID NO: 9951 - protein, 566 aa, Artificial Sequence; identical to SEQ ID NO: 7050
  derived and/or modified protein sequence (wt) from hemagglutinin__InfluenzaA__AGJ73363

SEQ ID NO: 9952 - protein, 566 aa, Artificial Sequence; identical to SEQ ID NO: 6867
  derived and/or modified protein sequence (wt) from hemagglutinin__InfluenzaA__AGJ73365

SEQ ID NO: 9953 - protein, 566 aa, Artificial Sequence
  derived and/or modified protein sequence (wt) from hemagglutinin__InfluenzaA__AGJ73367
MKAILVVLLYTFATANADTLCIGYHANNSTDTVDTVLEKNVTVTHSVNLLEDKHNGKLCKLRGVAPLHLGKCNIAGWILGNPECESLSTASSWPYIVETSSSDNGTCYPGDFINYEELREQLSSVSSFERFEIFPKTSSWPNHDSNKGVAAACPHAGAKSFYKNLIWLVKKGNSYPKLSKSYINDKGKEVLVLWGIHHPSTSADQQSLYQNADAYVFVGTSKYSKKFKPEIAVRPKVRDQEGRMNYYWTLVEPGDKITFEATGNLLVPRYAFAMERNAGSGIIISDTPVQDCNTTCQTPKGAINTSLPFQNIHPITIGKCPKYVKSTKLRLATGLRNVPSIQSRGLFGAIAGFIEGGWTGMVDGWYGYHHQNEQGSGYAADLKSTQNAIDKITNKVNSVIEKMNTQFTAVGKEFNHLEKRIENLNKKVDDGFLDIWTYNAELLVLLENERTLDYHDSNVKNLYEKVRNQLKNNAKEIGNGCFEFYHKCDNTCMESVKNGTYDYPKYSEEAKLNREEIDGVKLESTRIYQILAIYSTVASSLVLVVSLGAISFWMCSNGSLQCRICI

SEQ ID NO: 9954 - protein, 566 aa, Artificial Sequence
  derived and/or modified protein sequence (wt) from hemagglutinin__InfluenzaA__AGJ73369
MKAILVVLLYTFATANADTLCIGYHANNSTDTVDTVLEKNVTVTHSVNLLEDKHNGKLCKLRGVAPLHLGKCNIAGWILGNPECESLSTASSWSYIVETSSSDNGTCYPGDFIDYEELREQLSSVSSFERFEIFPKTSSWPNHDSNKGVTAACPHAGAKGFYKNLIWLVKKGNSYPKLSKSYINDKGKEVLVLWGIHHPSTTADQQSLYQNADTYVFVGTSRYSKKFKPEIAIRPKVRDQEGRMNYYWTLVEPGDKITFEATGNLVVPRYAFAMERNAGSGIIISDTPVHDCNTTCQTPKGAINTSLPFQNIHPITIGKCPKYVKSTKLRLATGLRNVPSIQSRGLFGAIAGFIEGGWTGMVDGWYGYHHQNEQGSGYAADLKSTQNAIDKITNKVNSVIEKMNTQFTAVGKEFNHLEKRIENLNKKVDDGFLDIWTYNAELLVLLENERTLDYHDSNVKNLYEKVRNQLKNNAKEIGNGCFEFYHKCDNTCMESVKNGTYDYPKYSAEAKLNREEIDGVKLESTRIYQILAIYSTVASSLVLVVSLGAISFWMCSNGSLQCRICI

SEQ ID NO: 9955 - protein, 566 aa, Artificial Sequence; identical to SEQ ID NO: 6454
  derived and/or modified protein sequence (wt) from hemagglutinin__InfluenzaA__AGJ73371

SEQ ID NO: 9956 - protein, 566 aa, Artificial Sequence
  derived and/or modified protein sequence (wt) from hemagglutinin__InfluenzaA__AGJ73373
MKAILVVLLYTFATANADTLCIGYHANNSTDTVDTVLEKNVTVTHSVNLLEDKHNGKLCKLRGVAPLHLGKCNIAGWILGNPECESLSTASSWSYIVETSSSDNGTCYPGDFIDYEELREQLSSVSSFERFEIFPKTSSWPNHDSNKGVTAACPHAGAKGFYKNLIWLVKKGNSYPKLSKSYINDKGKEVLVLWGIHHPSTTADQQSLYQNADTYVFVGTSRYSKKFKPEIAIRPKVRDQEGRMNYYWTLVEPGDKITFEATGNLVVPRYAFAMERNAGSGIIISDTPVHDCNTTCQTPKGAINTSHPFQNIHPITIGKCPKYVKSTKLRLATGLRNVPSIQSRGLFGAIAGFIEGGWTGMVDGWYGYHHQNEQGSGYAADLKSTQNAIDKITNKVNSVIEKMNTQFTAVGKEFNHLEKRIENLNKKVDDGFLDIWTYNAELLVLLENERTLDYHDSNVKNLYEKVRNQLKNNAKEIGNGCFEFYHKCDNTCMESVKNGTYDYPKYSEEAKLNREEIDGVKLESTRIYQILAIYSTVASSLVLVVSLGAISFWMCSNGSLQCRICI

SEQ ID NO: 9957 - protein, 566 aa, Artificial Sequence
  derived and/or modified protein sequence (wt) from hemagglutinin__InfluenzaA__AGJ73375
MKAILVVLLYTFATANADTLCIGYHANNSTDTVDTVLEKNVTVTHSVNLLEDKHNGKLCKLRGVAPLHLGKCNIAGWILGNPECESLSTASSWSYIVETSSSDNGTCYPGDFINYEELREQLSSVSSFERFEIFPETSSWPNHDSNKGVTAACPHAGAKSFYKNLIWLVKKGNSYPKLSKSYINDKGKEVLVLWGIHHPSTTADQQSLYQNADAYVFVGTSRYSKKFKPEIAIRPKVRDQEGRMNYYWTLIEPGDKITFEATGNLVVPRYAFAMERNAGSGIIISDTPVHDCNTTCQTPEGAINTSLPFQNIHPITIGKCPKYVKSTKLRLATGLRNVPSIQSRGLFGAIAGFIEGGWTGMVDGWYGYHHQNEQGSGYAADLKSTQNAIDKITNKVNSVIEKMNTQFTAVGKEFNHLEKRIENLNKKVDDGFLDIWTYNAELLVLLENERTLDYHDSNVKNLYEKVRNQLKNNAKEIGNGCFEFYHKCDNTCMESVKNGTYDYPKYSEEAKLNREEIDGVKLESTRIYQILAIYSTVASSLVLVVSLGAISFWMCSNGSLQCRICI

SEQ ID NO: 9958 - protein, 566 aa, Artificial Sequence
  derived and/or modified protein sequence (wt) from hemagglutinin__InfluenzaA__AGJ73377
MKAILVVLLYTFATANADTLCIGYHANNSTDTVDTVLEKNVTVTHSVNLLEDKHNGKLCKLRGVAPLHLGKCNIAGWILGNPECESLSTASSWSYIVETSSSDNGTCYPGDFINYEELREQLSSVSSFERFEIFPKTSSWPNHDSNKGVTASCPRAGAKSFYKNLIWLVKKGNSYPKLSKSYINDKGKEVLVLWGIHHPSTTADQQSLYQNADAYVFVGTSRYSKKFKPEIAIRPKVRDQEGRMNYYWTLVEPGDKITFEATGNLLVPRYAFAMERNAGSGIIISDTPVHDCNTTCQTPKGAINTSLPFQNIHPITIGKCPKYVKSTKLRLATGLRNVPSIQSRGLFGAIAGFIEGGWTGMVDGWYGYHHQNEQGSGYAADLKSTQNAIDKITNKVNSVIEKMNTQFTAVGKEFNHLEKRIENLNKKVDDGFLDIWTYNAELLVLLENERTLDYHDSNVKNLYEKVRNQLKNNAKEIGNGCFEFNHKCDNTCMESVKNGTYDYPKYSEEAKLNKEEIDGVKLESTRIYQILAIYSTVASSLVLVVSLGAISFWMCSNGSLQCRICI

SEQ ID NO: 9959 - protein, 566 aa, Artificial Sequence
  derived and/or modified protein sequence (wt) from hemagglutinin__InfluenzaA__AGJ73380
MKAILVVLLYTFATANADTLCIGYHANNSTDTVDTVLEKNVTVTHSVNLLEDKHNGKLCKLRGVAPLHLGKCNIAGWILGNPECESLSTASSWSYIVETSSSDNGTCYPGDFINYEELREQLSSVSSFERFEIFPKTSSWPNHDSNKGVTAACPHAGAKSFYKNLIWLVKKGNSYPKLSKSYINDKGKEVLVLWGIHHPSTTADQQSLYQNADAYVFVGTSRYSKKFKPEIAIRPKVRGQEGRMNYYWTLIEPGDKITFEATGNLVVPRYAFAMERNAGSGIIISDTPVHDCNSTCQTPKGAINTSLPFQNIHPITIGKCPKYVKSTKLRLATGLRNVPSIQSRGLFGAIAGFIEGGWTGMVDGWYGYHHQNEQGSGYAADLKSTQNAIDKITNKVNSVIEKMNTQFTAVGKEFNHLEKRIENLNKKVDDGFLDIWTYNAELFVLLENERTLDYHDSNVKDLYEKVRNQLKNNAKEIGNGCFEFYHKCDNTCMESVKNGTYDYPKYSEEAKLNREKIDGVKLESTRIYQILAIYSTVASSLVLVVSLGAISFWMCSNGSLQCRICI

SEQ ID NO: 9960 - protein, 566 aa, Artificial Sequence
  derived and/or modified protein sequence (wt) from hemagglutinin__InfluenzaA__AGK62991
MKTIIALSYILCLVFAQKLPGNDNSTATLCLGHHAVPNGTIVKTITNDQIEVTNATELVQSSSTGEICDSPHQILDGENCTLIDALLGDPQCDGFQNKKWDLFVERSKAYSNCYPYDVPDYASLRSLVASSGTLEFNNESFNWTGVTQNGTSSACIRRSNSSFFSRLNWLTHLNFKYPALNVTMPNNEQFDKLYIWGVHHPGTDKDQIFLYAQASGRITVSTKRSQQAVIPNIGSRPRIRNIPSRISIYWTIVKPGDILLINSTGNLIAPRGYFKIRSGKSSIMRSDAPIGKCNSECITPNGSIPNDKPFQNVNRITYGACPRYVKQSTLKLATGMRNVPEKQTRGIFGAIAGFIENGWEGMVDGWYGFRHQNSEGRGQAADLKSTQAAIDQINGKLNRLIGKTNEKFHQIEKEFSEVEGRIQDLEKYVEDTKIDLWSYNAELLVALENQHTIDLTDSEMNKLFEKTKKQLRENAEDMGNGCFKIYHKCDNACIGSIRNGTYNHDVYRDEALNNRFQIKGVELKSGYKDWILWISFAISCFLLCVALLGFIMWACQKGNIRCNICI

SEQ ID NO: 9961 - protein, 566 aa, Artificial Sequence
  derived and/or modified protein sequence (wt) from hemagglutinin__InfluenzaA__AGK62993
MKTIIALSYILCLVFAQKLPGNDNSTATLCLGHHAVPNGTIVKTITNDQIEVTNATELVQSSSTGEICNSPHQILDGENCTLIDALLGDPQCDGFQNKKWDLFVERSKAHSNCYPYDVPDYASLRSLVASSGTLEFNNESFNWTGVTQNGTSSACIRRSNNSFFSRLNWLTHLNFKYPALNVTMPNNEQFDKLYIWGVHHPGTDKDQIFLYAQASGRITVSTKRSQQAVIPNIGSRPRVRNIPSRVSIYWTIVKPGDILLINSTGNLIAPRGYFKIRSGKSSIMRSDAPISKCNSACITTNGSIPNDKPFQNVNRITYGACPRYVKQNTLKLATGMRNVPEKQTRGIFGAIAGFIENGWEGMVDGWYGFRHQNSEGRGQAADLKSTQAAIDQINGKLNRLIGKTNEKFHQIEKEFSEVEGRIQDLEKYVEDTKIDLWSYNAELLVALENQHTIDLTDSEMNKLFEKTKKQLRENAEDMGNGCFKIYHKCDNACIGSIRNGTYDHDVYRDEALNNRFQIKGVELKSGYKDWILWISFAISCFLLCVALLGFIMWSCQKGNIRCNICI

SEQ ID NO: 9962 - protein, 566 aa, Artificial Sequence
  derived and/or modified protein sequence (wt) from hemagglutinin__InfluenzaA__AGK62995
MKTIIALSYILCLVFAQKLPGNDNSTATLCLGHHAGPNGTIVKTITNDQIEVTNATELVQSSSTGEICDSPHQILDGENCTLIDALLGDPQCDGFQNKKWDLFVERSKAYSNCYPYDVPDYASLRSLVASSGTLEFNNESFNWTGVTQNGTSSACIRRSNNSFFSRLNWLTHLNFKYPALNVTMPNNEQFDKLYIWGVHHPGTDKDQIFLYAQSSGRITVSTKRSQQAVIPNIGSRPRIRNIPSRISIYWTIVKPGDILLINSTGNLIAPRGYFKIRSGKSSIMRSDAPIGKCNSECITPNGSIPNDKPFQNVNRITYGACPRYVKQSTLKLATGMRNVPEKQTRGIFGAIAGFIENGWEGMVDGWYGFRHQNSEGRGQAADLKSTQAAIDQINGKLNRLIGKTNEKFHQIEKEFSEVEGRIQDLEKYVEDTKIDLWSYNAELLVALENQHTIDLTDSEMNKLFEKTKKQLRENAEDMGNGCFKIYHKCDNACIGSIRNGTYNHDVYRDEALNNRFQIKGVELKSGYKDWILWISFAISCFLLCVALLGFIMWACQKGNIRCNICI

SEQ ID NO: 9963 - protein, 566 aa, Artificial Sequence
  derived and/or modified protein sequence (wt) from hemagglutinin__InfluenzaA__AGK62997
MKTIIALSYILCLVFAQKLPGNDNSTATLCLGHHAVPNGTIVKTITNDQIEVTNATELVQSSSTGEICNSPHQILDGENCTLIDALLGDPQCDGFQNKKWDLFVERSKAHSNCYPYDVPDYASLRSLVASSGTLEFNNESFNWTGVTQNGTSSACIRRSNNSFFSRLNWLTHLNFKYPALNVTMPNNDKFDKLYIWGVHHPGTDKDQIFLYAQASGRITVSTKRSQQAVIPNIGSRPRVRNIPSRVSIYWTIVKPGDILLINSTGNLIAPRGYFKIRSGKSSIMRSDAPIGKCNSACITPNGSIPNDKPFQNVNRITCGACARYVKQNTLKLATGMRNVPEKQTRGIFGAIAVFIENGWEGMVDGWYGFRHQNSEGREQAAAFQSTQAAIDQIIGKLNRLIGETNEKFHQIEKEFSEVERRIQALEKYVEDTKIDLWSYNAELLVALENQHTIDLTDSEMNKLFEKTKKQLRENAEDMGNGCFKIYHKCDNACIGSIRNGTYDHDVYRDEALNNRFQIKGVELKSGYKDWILWISFAISCFLLCVALLGFIMWSCQKGNIRCNICI

SEQ ID NO: 9964 - protein, 566 aa, Artificial Sequence
  derived and/or modified protein sequence (wt) from hemagglutinin__InfluenzaA__AGK62999
MKTIIALSYILCLVFAQKLPGNDNSTATLCLGHHAVPNGTIVKTITNDQIEVTNATELVQSSSTGEICNSPHQILDGENCTLIDALLGDPQCDGFQNKKWDLFVERSKAYSNCYPYDVPDYASLRSLVASSGTLEFNNESFNWTGVTQNGTSSACIRRSNNSFFSRLNWLTHLNFKYPALNVTMPNNEQFDKLYIWGVHHPGTDKDQIFLYAQASGRITVSTKRSQQAVIPNIGSRPRVRNIPSRVSIYWTIVKPGDILLINSTGNLIAPRGYFKIRSGKSSIMRSDAPIGKCNSACITPNGSIPNDKPFQNVNRITYGACPRYVKQNTLKLATGMRNVPEKQTRGIFGAIAGFIENGWEGMVDGWYGFRHQNSEGRGQAADLKSTQAAIDQINGKLNRLIGKTNEKFHQIEKEFSEVEGRIQDLEKYVEDTKIDLWSYNAELLVALENQHTIDLTDSEMNKLFEKTKKQLRENAEDMGNGCFKIYHKCDNACIGSIRNGTYDHDVYRDEALNNRFQIKGVELKSGYKDWILWISFAISCFLLCVALLGFIMWACQKGNIRCNICI

SEQ ID NO: 9965 - protein, 566 aa, Artificial Sequence
  derived and/or modified protein sequence (wt) from hemagglutinin__InfluenzaA__AGK63001
MKTIIALSYILCLVFAQKLPGNDNSTATLCLVHHAVPNGTIVKTITNDQIEVTNATELVQSSSTGEICDSPHQILDGENCTLIDALLGDPQCDGFQNKEWDLFVERSKAYSNCYPYDVPDYASLRSLVASSGTLEFNNESFNWTGVTQNGTSSACIRRSNSSFFSRLNGLTHLNFKYPALNVTMPNNEQFDKLYIWGVHHPGTDKDQIFLYAQSSGRITVSTKRSQQAVIPNIGSRPRIRNIPSRISIYWTIVKPGDILLINSTGNLIAPRGYFKIRSGKSSIMRSDAPIGKCNSECITPNGSIPNDKPFQNVNRITYGACPRYVKQSTLKLATGMRNVPEKQTRGIFGAIAGFIENGWEGMVDGWYGFRHQNSEGREQAADFQSTQAAIDQIIGKLNRLIGKTNEKFHQIEKEFSEVERRIQDLEKYVEDTKIDLWSYNAELLVALENQHTIDLTDSEMNKLFEKTKKQLRENAEDMGNGCFKIYHKCDNACIGSIRNGTYNHDVYRDEALNNRFQIKGVELKSGYKDWILWISFAISCFLLCVALLGFIMWSCQKGNIRCNICI

SEQ ID NO: 9966 - protein, 566 aa, Artificial Sequence
  derived and/or modified protein sequence (wt) from hemagglutinin__InfluenzaA__AGK63003
MKTIIALSYILCLVFAQKLPGNDNSTATLCLGHHAGPNGTIVKTITNDQIEVTNATELVQSSSTGEICDSPHQILDGENCTLIDALLGDPQCDGFQNKKWDLFIERSKAYSNCYPYDVPDYASLRSLVASSGTLEFNNESFNWTGVTQNGTSSACIRRSNSSFFSRLNWLTHLNFKYPALNVTMPNNEQFDKLYIWGVHHPGTDKDQIFLYAQSSGRITVSTKRSQQAVIPNIGSRPRIRNIPSRISIYWTIVKPGDILLINSTGNLIAPRGYFKIRSGKSSIMRSDAPIGKCNSACITPNGSIPNDKPFQNVNRITYGACPRYVKQSTLKLATGMRNVPEKQTRGIFGAIAGFIENGWEGMVDGWYGFRHQNSEGRGQAADLKSTQAAIDQINGKLNRLIGKTNEKFHQIEKEFSEVEGRIQDLEKYVEDTKIDLWSYNAELLVALENQHTIDLTDSEMNKLFEKTKKQLRENAEDMGNGCFKIYHKCDNACIGSIRNGTYNHDVYRDEALNNRFQIKGVELKSGYKDWILWISFAISCFLLCVALLGFIMWACQKGNIRCNICI

SEQ ID NO: 9967 - protein, 566 aa, Artificial Sequence
  derived and/or modified protein sequence (wt) from hemagglutinin__InfluenzaA__AGK63005
MKTIIALSYILCLVFAQKLPGNDNSTATLCLVHHAVPNGTIVKTITNDQIEVTNATELVQSSSTGEICDSPHQILDGENCTLIDALLGDPQCDGFQNKKWDLFVERSKAYSNCYPYDVPDYASLRSLVASSGTLEFNNESFNWTGVTQNGTSSACIRRSNSSFFSRLNGLTHLNFKYPALDVTMPNNDKFDKLYIWGVHHPGTDKDQIFLYAQSSGRITVSTKRSQQAVIPNIGSRPRIRNIPSRISIYWTIVKPGDILLINSTGNLIAPRGYFKIRSGKSSIMRSDAPIGKCNSECITPNGSIPNDKPFQNVNRITYGACPRYVKQSTLKLATGMRNVPEKQTRGIFGAIAVFIENGWEGMVDGWYGFRHQNSEGREQAADFQSTQAAIDQINGKLNRLIGKTNEKFHQIEKEFSEVEGRIQDLEKYVEDTKIDLWSYNAELLVALENQHTIDLTDSEMNKLFEKTKKQLRENAEDMGNGCFKIYHKCDNACIGSIRNGTYNHDVYRDEALNNRFQIKGVELKSGYKDWILWISFAISCFLLCVALLGFIMWACQKGNIRCNICI

SEQ ID NO: 9968 - protein, 566 aa, Artificial Sequence
  derived and/or modified protein sequence (wt) from hemagglutinin__InfluenzaA__AGK63007
MKTIIALSYILCLVFAQKLPGNDNSTATLCLGHHAVPNGTIVKTITNDQIEVTNATELVQSSSTGEICDSPHQILDGENCTLIDALLGDPQCDGFQNKKWDLFVERSKAHSNCYPYDVPDYASLRSLVASSGTLEFNNESFNWTGVTQNGTSSACIRRSNNSFFSRLNWLTHLNFKYPALNVTMPNNEQFDKLYIWGVHHPGTDKDQIFLYAQASGRITVSTKRSQQAVIPNIGSRPRVRNIPSRVSIYWTIVKPGDILLINSTGNLIAPRGYFKIRSGKSSIMRSDAPIGKCNSECITPNGSIPNDKPFQNVNRITYGACPRYVKQNTLKLATGMRNVPEKQTRGIFGAIAGFIENGWEGMVDGWYGFRHQNSEGRGQAADLKSTQAAIDQINGKLNRLIGKTNEKFHQIEKEFSEVEGRIQDLEKYVEDTKIDLWSYNAELLVALENQHTIDLTDSEMNKLFEKTKKQLRENAEDMGNGCFKIYHKCDNACIGSIRNGTYDHDVYRDEALNNRFQIKGVELKSGYKDWILWISFAISCFLLCVALLGFIMWACQKGNIRCNICI

SEQ ID NO: 9969 - protein, 566 aa, Artificial Sequence
  derived and/or modified protein sequence (wt) from hemagglutinin__InfluenzaA__AGK63009
MKTIIALSYILCLVFAQKLPGNDNSTATLCLGHHAVPNGTIVKTITNDQIEVTNATELVQSSSTGEICNSPHQILDGENCTLIDALLGDPQCDGLQNKKWDLFVERSKAHSNCYPYDVPDYASLRSLVASSGTLEFNNESFNWTGVTQNGTSSACIRRSNNSFFSRLNWLTHLNFKYPALNVTMPNNEQFDKLYIWGVHHPGTDKDQIFLYAQASGRITVSTKRSQQAVIPNIGSRPRVRNIPSRVSIYWTIVKPGDILLINSTGNLIAPRGYFKIRSGKSSIMRSDAPIGKCNSACITPNGSIPNDKPFQNVNRITYGACPRYVKQNTLKLATGMRNVPEKQTRGIFGAIAGFIENGWEGMVDGWYGFRHQNSEGRGQAADLKSTQAAIDQINGKLNRLIGKTNEKFHQIEKEFSEVEGRIQDLEKYVEDTKIDLWSYNAELLVALENQHTIDLTDSEMNKLFEKTKKQLRENAEDMGNGCFKIYHKCDNACIGSIRNGTYDHDVYRDEALNNRFQIKGVELKSGYKDWILWISFAISCFLLCVALLGFIMWACQKGNIRCNICI

SEQ ID NO: 9970 - protein, 566 aa, Artificial Sequence
  derived and/or modified protein sequence (wt) from hemagglutinin__InfluenzaA__AGK63011
MKTIIALSYILCLVFAQKLPGNDNSTATLCLGHHAVPNGTIVKTITNDQIEVTNATELVQSSSTGEICDSPHQILDGENCTLIDALLGDPQCDGFQNKKWDLFVERSKAYSNCYPYDVPDYASLRSLVASSGTLEFNNESFNWTGVTQNGTSSACIRRSNNSFFSRLNWLTHLNFKYPALNVTMPNNEQFDKLYIWGVHHPGTDKDQIFLYAQASGRITVSTKRSQQAVIPNIGSRPRVRNIPSRISIYWTIVKPGDILLINSTGNLIAPRGYFKIRSGKSSIMRSDAPIGKCNSECITPNGSIPNDKPFQNVNRITYGACPRYVKQSTLKLATGMRNVPEKQTRGIFGAIAGFIENGWEGMVDGWYGFRHQNSEGRGQAADLKSTQAAIDQINGKLNRLIGKTNEKFHQIEKEFSEVEGRIQDLEKYVEDTKIDLWSYNAELLVALENQHTIDLTDSEMNKLFEKTKKQLRENAEDMGNGCFKIYHKCDNACIGSIRNGTYDHDVYRDEALNNRFQIKGVELKSGYKDWILWISFAISCFLLCVALLGFIMWACQKGNIRCNICI

SEQ ID NO: 9971 - protein, 566 aa, Artificial Sequence
  derived and/or modified protein sequence (wt) from hemagglutinin__InfluenzaA__AGK63013
MKTIIALSYILCLVFAQKLPGNDNSTATLCLGHHAVPNGTIVKTITNDQIEVTNATELVQSSSTGEICNSPHQILDGENCTLIDALLGDPQCDGFQNKKWDLFVERSKAHSNCYPYDVPDYASLRSLVASSGTLEFNNESFNWTGVTQNGTSSACIRRSNNSFFSRLNWLTHLNFKYPALDVTMPNNEQFDKLYIWGVHHPGTDKDQIFLYAQASGRITVSTKRSQQAVIPNIGSRPRVRNIPSRVSIYWTIVKPGDILLINSTGNLIAPRGYFKIRSGKSSIMRSDAPIGKCNSACITPNGSIPNDKPFQNVNRITYGACARYVKQNTLKLATGMRNVPEKQTRGIFGAIAVFIENGWEGMVDGWYGFRHQNSEGRGQAAALQSTQAAIDQITGKLNRLIGETNEKFHQIEKEFSEVEGRIQALEKYVEDTKIDLWSYNAELLVALENQHTIDLTDSEMNKLFEKTKKQLRENAEDMGNGCFKIYHKCDNACIGSIRNGTYDHDVYRDEALNNRFQIKGVELKSGYKDWILWISFAISCFLLCVALLGFIMWSCQKGNIRCNICI

SEQ ID NO: 9972 - protein, 566 aa, Artificial Sequence
  derived and/or modified protein sequence (wt) from hemagglutinin__InfluenzaA__AGK63015
MKTIIALSYILCLVFAQKLPGNDNSTATLCLGHHAVPNGTIVKTITNDQIEVTNATELVQSSSTGEICDSPHQILDGENCTLIDALLGDPQCDGFQNKKWDLFVERSKAYSNCYPYDVPDYASLRSLVASSGTLEFNNESFNWTGVTQNGTSSACIRKSNSSFFSRLNWLTHLNFKYPALNVTMPNNEQFDKLYIWGVHHPGTDKDQIFLYAQSSGRITVSTKRSQQAVIPNIGSRPRIRNIPSRISIYWTIVKPGDILLINSTGNLIAPRGYFKIRSGKSSIMRSDAPIGKCNSECITPNGSIPNDKPFQNVNRITYGACPRYVKQSTLKLATGMRNVPEKQTRGIFGAIAGFIENGWEGMVDGWYGFRHQNSEGRGQAADLKSTQAAIDQINGKLNRLIGKTNEKFHQIEKEFSEVEGRIQDLEKYVEDTKIDLWSYNAELLVALENQHTIDLTDSEMNKLFEKTKKQLRENAEDMGNGCFKIYHKCDNACIGSIRNGTYNHDVYRDEALNNRFQIKGVELKSGYKDWILWISFAISCFLLCVALLGFIMWACQKGNIRCNICI

SEQ ID NO: 9973 - protein, 566 aa, Artificial Sequence; identical to SEQ ID NO: 6982
  derived and/or modified protein sequence (wt) from hemagglutinin__InfluenzaA__AGK63017

SEQ ID NO: 9974 - protein, 566 aa, Artificial Sequence
  derived and/or modified protein sequence (wt) from hemagglutinin__InfluenzaA__AGK63019
MKTIIALSYILCLVFAQKLPGNDNSTATLCLGHHAVPNGTIVKTITNDQIEVTNATELVQSSSTGEICDSPHQILDGENCTLIDALLGDPQCDGFQNKKWDLFVERSKAYSNCYPYDVPDYASLRSLVASSGTLEFNNESFNWTGVTQNGTSSACIRRSNSSFFSRLNWLTHLNFKYPALNVTMPNNEQFDKLYIWGVHHPGTDKDQIFLYAQSSGRITVSTKRSQQAVIPNIGSRPRIRNIPSRISIYWTIVKPGDILLINSTGNLIAPRGYFKIRSGKSSIMRSDAPIGKCNSECITPNGSIPNDKPFQNVNRITYGACPRYVKQSTLKLATGMRNVPEKQTRGIFGAIAGFIENGWEGMVDGWYGFRHQNSEGRGQAADLKSTQAAIDQINGKLNRLIGKTNEKFHQIEKEFSEVEGRIQDLEKYVEDTKIDLWSYNAELLVALENQHTIDLTDSEMNKLFEKTKKQLRENAEDMGNGCFKIYHKCDNACIGSIRNGTYDHDVYRDEALNNRFQIKGVELKSGYKDWILWISFAISCFLLCVALLGFIMWACQKGNIRCNICI

SEQ ID NO: 9975 - protein, 566 aa, Artificial Sequence; identical to SEQ ID NO: 9849
  derived and/or modified protein sequence (wt) from hemagglutinin__InfluenzaA__AGK63021

SEQ ID NO: 9976 - protein, 566 aa, Artificial Sequence
  derived and/or modified protein sequence (wt) from hemagglutinin__InfluenzaA__AGK63025
MKTIIALSYILCLVFAQKLPGNDNSTATLCLGHHAVPNGTIVKTITNDQIEVTNATELVQSSSTGEICDSPHQILDGENCTLIDALLGDPQCDGFQNKKWDLFIERSKAYSNCYPYDVPDYASLRSLVASSGTLEFNNESFNWTGVTQNGTSSACIRKSNSSFFSRLNWLTHLNFKYPALNVTMPNNEQFDKLYIWGVHHPGTDKDQIFLYAQSSGRITVSTKRSQQAVIPNIGSRPRIRNIPSRISIYWTIVKPGDILLINSTGNLIAPRGYFKIRSGKSSIMRSDAPIGKCNSECITPNGSIPNDKPFQNVNRITYGACPRYVKQSTLKLATGMRNVPEKQTRGIFGAIAGFIENGWEGMVDGWYGFRHQNSEGRGQAADLKSTQAAIDQINGKLNRLIGKTNEKFHQIEKEFSEVEGRIQDLEKYVEDTKIDLWSYNAELLVALENQHTIDLTDSEMNKLFEKTKKQLRENAEDMGNGCFKIYHKCDNACIGSIRNGTYNHDVYRDEALNNRFQIKGVELKSGYKDWILWISFAISCFLLCVALLGFIMWACQKGNIRCNICI

SEQ ID NO: 9977 - protein, 566 aa, Artificial Sequence; identical to SEQ ID NO: 9074
  derived and/or modified protein sequence (wt) from hemagglutinin__InfluenzaA__AGK63027

SEQ ID NO: 9978 - protein, 566 aa, Artificial Sequence
  derived and/or modified protein sequence (wt) from hemagglutinin__InfluenzaA__AGK63029
MKTIIALSYILCLVFAQKLPGNDNSTATLCLGHHAVPNGTIVKTITNDQIEVTNATELVQSSSTGEICNSPHQILDGENCTLIDALLGDPQCDGFQNKKWDLFVERSKAHSNCYPYDVPDYASLRSLVASSGTLEFNNESFNWTGVTQNGTSSACIRRSNNSFFSRLNWLTHLNFKYPALNVTMPNNEQFDKLYIWGVHHPGTDKDQIFLYAQASGRITVSTKRSQQAVIPNIGSRPRVRNIPSRVSIYWTIVKPGDILLINSTGNLIAPRGYFKIRSGKSSIMRSDAPIGKCNSACITTNGSIPNDKPFQNVNRITYGACPRYVKQNTLKLATGMRNVPEKQTRGIFGAIAGFIENGWEGMVDGWYGFRHQNSEGRGQAADLKSTQAAIDQINGKLNRLIGKTNEKFHQIEKEFSEVEGRIQDLEKYVEDTKIDLWSYNAELLVALENQHTIDLTDSEMNKLFEKTKKQLRENAEDMGNGCFKIYHKCDNACIGSIRNGTYDHDVYRDEALNNRFQIKGVELKSGYKDWILWISFAISCFLLCVALLGFIMWACQKGNIRCNICI

SEQ ID NO: 9979 - protein, 566 aa, Artificial Sequence
  derived and/or modified protein sequence (wt) from hemagglutinin__InfluenzaA__AGK63031
MKTIIALSYILCLVFAQKLPGNDNSTATLCLGHHAVPNGTIVKTITNDQIEVTNATELVQSSSTGEICDSPHQILDGENCTLIDALLGDPQCDGFQKKKWDLFVERSKAHSNCYPYDVPDYASLRSLVASSGTLEFNNESFNWTGVTQNGTSSACIRRSNNSFFSRLNWLTHLNFKYPALNVIMPNNEQFDKLYIWGVHHPGTDKDQIFLYAQASGRITVSTKRSQQAVIPNIGSRPRVRNIPSRVSIYWTIVKPGDILLINSTGNLIAPRGYFKIRSGKSSIMRSDAPIGKCNSACITPNGSIPNDKPFQNVNRITYGACPRYVKQNTLKLATGMRNVPEKQTRGIFGAIAGFIENGWEGMVDGWYGFRHQNSEGRGQAADLKSTQAAIDQINGKLNRLIGKTNEKLHQIEKEFSEVEGRILDLEKYVEDTKIDLWSYNAELLVALENQHTIDLTDSEMNKLFEKTKKQLRENAEDMGNGCFKIYHKCDNACIGSIRNGTYDHDVYRDEALNNRFQIKGVELKSGYKDWILWISFAISCFLLCVALLGFIMWACQKGNIRCNICI

SEQ ID NO: 9980 - protein, 566 aa, Artificial Sequence
  derived and/or modified protein sequence (wt) from hemagglutinin__InfluenzaA__AGK63033
MKTIIALSYILCLVFAQKLPGNDNSTATLCLGHHAVPNGTIVKTITNDQIEVTNATELVQSSSTGEICDSPHQILDGENCTLIDALLGDPQCDGFQNKKWDLIVERSKAYSNCYPYDVPDYASLRSLVASSGTLEFNNESFNWTGVTQNGTSSACIRKSNSSFFSRLNWLTHLNFKYPALNVTMPNNEQFDKLYIWGVHHPGTDKDQIFLYAQASGRITVSTKRSQQAVIPNIGSRPRIRNIPSRISIYWTIVKPGDILLINSTGNLIAPRGYFKIRSGKSSIMRSDAPIGKCNSECITPNGSIPNDKPFQNVNRITYGACPRYVKQSTLKLATGMRNVPEKQTRGIFGAIAGFIENGWEGMVDGWYGFRHQNSEGRGQAADLKSTQAAIDQINGKLNRLIGKTNEKFHQIEKEFSEVEGRIQDLEKYVEDTKIDLWSYNAELLVALENQHTIDLTDSEMNKLFEKTKKQLRENAEDMGNGCFKIYHKCDNACIGSIRNGTYDHDVYRDEALNNRFQIKGVELKSGYKDWILWISFAISCFLLCVALLGFIMWACQKGNIRCNICI

SEQ ID NO: 9981 - protein, 566 aa, Artificial Sequence
  derived and/or modified protein sequence (wt) from hemagglutinin__InfluenzaA__AGK63035
MKTIIALSYILCLVFAQKLPGNDNSTATLCLGHHAVPNGTIVKTITNDQIEVTNATELVQSSSTGEICDSPHQILDGENCTLIDALLGDPQCDGFQNKKWDLFVERSKAYSNCYPYDVPDYASLRSLVASSGTLEFNNESFNWTGVTQNGTSSACIRRSNNSFFSRLNWLTHLNFKYPALNVTMPNNEQFDKLYIWGVHHPGTDKDQIFLYAQASGRITVSTKRSQQAVIPNIGSRPRIRNIPSRISIYWTIVKPGDILLINSTGNLIAPRGYFKIRSGKSSIMRSDAPIGKCNSECITPNGSIPNDKPFQNVNRITYGACPRYVKQSTLKLATGMRNVPEKQTRGIFGAIAGFIENGWEGMVDGWYGFRHQNSEGRGQAADLKSTQAAIDQINGKLNRLIGKTNEKFHQIEKEFSEVEGRIQDLEKYVEDTKIDLWSYNAELLVALENQHTIDLTDSEMNKLFEKTKKQLRENAEDMGNGCFKIYHKCDNACIGSIRNGTYDHDVYRDEALNNRFQIKGVELKSGYKDWILWISFAISCFLLCVALLGFIMWACQKGNIRCNICI

SEQ ID NO: 9982 - protein, 566 aa, Artificial Sequence
  derived and/or modified protein sequence (wt) from hemagglutinin__InfluenzaA__AGK63037
MKTIIALSYILCLVFAQELPGNDNSTATLCLGHHAVPNGTIVKTITNDQIEVTNATELVQSSSTGEICNSPHQILDGENCTLIDALLGDPQCDGFQNKKWDLFVERSKAHSNCNPYDVPDYASLRSLVASSGTLEFNNESFNWTGVTQNGTSSACIRRSNNSFFSRLNWLTHLNFKYPALNVTMPNNEQFDKLYIWGVHHPGTDKDQIFLYAQASGRITVSTKRSQQAVIPNIGSRPRVRNIPSRVSIYWTIVKPGDILLINSTGNLIAPRGYFKIRSGKSSIMRSDAPIGKCNSACITPNGSIPNDKPFQNVNRITYGACPRYVKQNTLKLATGMRNVPEKQTRGIFGAIAGFIENGWEGMVDGWYGFRHQNSEGRGQAADLKSTQAAIDQINGKLNRLIGKTNEKFHQIEKEFSEVEGRIQDLEKYVEDTKIDLWSYNAQLLVALENQHTIDLTDSEMNKLFEKTKKQLRENAEDMGNGCFKIYHKCDNACIGSIRNGTYDHDVYRDEALNNRFQIKGVELKSGYKDWILWISFAISCFLLCVALLGFIMWACQKGNIRCNICI

SEQ ID NO: 9983 - protein, 566 aa, Artificial Sequence
  derived and/or modified protein sequence (wt) from hemagglutinin__InfluenzaA__AGK63039
MKTIIALSYILCLVFAQKLPGNDNSTATLCLGHHAVPNGTIVKTITNDQIEVTNATELVQSSSTGEICNSPHQILDGENCTLIDALLGDPQCDGFQKKKWDLFVERSKAHSNCYPYDVPDYASLRSLVASSGTLEFNNESFNWTGVTQNGTSSACIRRSNNSFFSRLNWLTHLNFKYPALNVTLPNNEQFDKLYIWGVHHPGTDKDQIFLYAQASGRITVSTKRSQQAVIPNIGSRPRVRNIPSRVSIYWTIVKPGDILLINSTGNLIAPRGYFKIRSGKSSIMRSDAPISKCNSACITPNGSIPNDKPFQNVNRITYGACPRYVKQNTLKLATGMRNVPEKQTRGIFGAIAGFIENGWEGMVDGWYGFRHQNSEGRGQAADLKSTQAAIDQINGKLNRLIGKTNEKFHQIEKEFSEVEGRIQDLEKYVEDTKIDLWSYNAELLVALENQHTIDLTDSEMNKLFEKTKKQLRENAEDMGNGCFKIYHKCDNACIGSIRNGTYDHDVYRDEALNNRFQIKGVELKSGYKDWILWISFAISCFLLCVALLGFIMWSCQKGNIRCNICI

SEQ ID NO: 9984 - protein, 566 aa, Artificial Sequence
  derived and/or modified protein sequence (wt) from hemagglutinin__InfluenzaA__AGK63041
MKTIIALSYILCLVFAQKLPGNDNSTATLCLGHHAVPNGTIVKTITNDQIEVTNATELVQSSSTGEICDSPHQILDGENCTLIDALLGDPQCDGLQNKKWDLIVERSKAHSYCYPYDVPDYASLRSLVASSGTLEFNNESFNWTEVTQNGTSSACIRRSNNSFFSRLNWLTHLNFKYPALNVTMPNNEQFDKLYIWGVHHPGTDKDQIFLYAQASGRITVSTKRSQQAVIPNIGSRPRVRNIPSRVSIYWTIVKPGDILLINSTGNLIAPRGYFKIRSGKSSIMRSDAPIGKCNSACITPNGSIPNDKPFQNVNRITYGACPRYVKQNTLKLATGMRNVPEKQTRGIFGAIAGFIENGWEGMVDGWYGFRHQNSEGRGQAADLKSTQAAIDQINGKLNRLIGKTNEKFHQIEKEFSEVEGRIQDLEKYVEDTKIDLWSYNAELLVALENQHTIDLTDSEMNKLFEKTKKQLRENAEDMGNGCFKIYHKCDNACIGSIRNGTYDHDVYRDEALNNRFQIKGVELKSGYKDWILWISFAISCFLLCVALLGFIMWACQKGNIRCNICI

SEQ ID NO: 9985 - protein, 566 aa, Artificial Sequence
  derived and/or modified protein sequence (wt) from hemagglutinin__InfluenzaA__AGK63043
MKTIIALSYILCLVFAQKLPGNDNSTATLCLGHHAVPNGTIVKTITNDQIEVTNATELVQSSSTGEICDSPHQILDGENCTLIDALLGDPQCDGFQNKKWDLFVERSKAYSNCYPYDVPDYASLRSLVASSGTLEFNNESFNWTGVTQNGTSSACIRRSNNSFFSRLNWLTHLNFKYPALNVTMPNNEQFDKLYIWGVHHPGTDKDQIFLYAQASGRITVSTKRSQQAVIPNIGSRPRVRNIPSRVSIYWTIVKPGDILLINSTGNLIAPRGYFKIRSGKSSIMRSDAPIGKCNSACITPNGSIPNDKPFQNVNRITYGACPRYVKQSTLKLATGMRNVPEKQTRGIFGAIAGFIENGWEGMVDGWYGFRHQNSEGRGQAADLKSTQAAIDQINGKLNRLIGKTNEKFHQIEKEFSEVEGRIQDLEKYVEDTKIDLWSYNAELLVALENQHTIDLTDSEMNKLFEKTKKQLRENAEDMGNGCFKIYHKCDNACIGSIRNGTYDHDVYRDEALNNRFQIKGVELKSGYKDWILWISFAISCFLLCVALLGFIMWACQKGNIRCNICI

SEQ ID NO: 9986 - protein, 566 aa, Artificial Sequence
  derived and/or modified protein sequence (wt) from hemagglutinin__InfluenzaA__AGK63045
MKTIIALSYILCLVFAQKLPGNDNSTATLCLGHHAVPNGTIVKTITNDQIEVTNATELVQSSSTGEICNSPHQILDGENCTLIDALLGDPQCDGFQKKKWDLFVERSKAYSNCYPYDVPDYASLRSLVASSGTLEFNNESFNWTGVTQNGTSSACIRKSNSSFFSRLNWLTHLNFKYPALNVTMPNNEQFDKLYIWGVHHPGTDKDQIFLYAQASGRITVSTKRSQQAVIPNIGSRPRIRNIPSRISIYWTIVKPGDILLINSTGNLIAPRGYFKIRSGKSSIMRSDAPIGKCNSECITPNGSIPNDKPFQNVNRITYGACPRYVKQSTLKLATGMRNVPEKQTRGIFGAIAGFIENGWEGMVDGWYGFRHQNSEGRGQAADLKSTQAAIDQINGKLNRLIGKTNEKFHQIEKEFSEVEGRIQDLEKYVEDTKIDLWSYNAQLLVALENQHTIDLTDSEMNKLFEKTKKQLRENAEDMGNGCFKIYHKCDNACIGSIRNGTYDHDVYRDEALNNRFQIKGVELKSGYKDWILWISFAISCFLLCVALLGFIMWACQKGNIRCNICI

SEQ ID NO: 9987 - protein, 566 aa, Artificial Sequence
  derived and/or modified protein sequence (wt) from hemagglutinin__InfluenzaA__AGK63047
MKAILVVLLYTFATANADTLCIGYHANNSTDTVDTVLEKNVTVTHSVNLLEDKHNGKLCKLRGVAPLHLGKCNIAGWILGNPECESLSTASSWSYIVETSSSDNGTCYPGDFINYEELREQLSSVSSFERFEIFPKTSSWPNHDSNKGVTAACPHAGAKSFYKNLIWLVKKGNSYPKLSKSYINDKGKEVLVLWGIHHPSTTADQQSLYQNADAYVFVGTSRYSKKFKPEIAIRPKVRDREGRMNYYWTLIEPGDKITFEATGNLVVPRYAFAMERNAGSGIIISDTPVHDCNTACQTPEGAINTSLPFQNIHPITIGKCPKYVKSTKLRLATGLRNVPSIQSRGLFGAIAGFIEGGWTGMVDGWYGYHHQNEQGSGYAADLKSTQNAIDKITNKVNSVIEKMNTQFTAVGKEFNHLEKRIENLNKKVDDGFLDIWTYNAELLVLLENERTLDYHDSNVKNLYEKVRNQLKNNAKEIGNGCFEFYHKCDNTCMESVKNGTYDYPKYSEEAKLNREKIDGVKLESTRIYQILAIYSTVASSLVLVVSLGAISFWMCSNGSLQCRICI

SEQ ID NO: 9988 - protein, 560 aa, Artificial Sequence
  derived and/or modified protein sequence (wt) from hemagglutinin__InfluenzaA__AGK82158
MNTQILVFALIAIIPTNADKICLGHHAVSNGTKVNTLTERGVEVVNATETVERTNIPRICSKGKRTVDLGQCGLLGTITGPPQCDQFLEFSADLIIERREGSDVCYPGKFVNEEALRQILRESGGIDKEAMGFTYSGIRTNGATSACRRSGSSFYAEMKWLLSNTDNAAFPQMTKSYKNTRKSPALIVWGIHHSVSTAEQTKLYGSGNKLVTVGSSNYQQSFVPSPGARPQVNGLSGRIDFHWLMLNPNDTVTFSFNGAFIAPDRASFLRGKSMGIQSGVQVDANCEGDCYHSGGTIISNLPFQNIDSRAVGKCPRYVKQRSLLLATGMKNVPEIPKGRGLFGAIAGFIENGWEGLIDGWYGFRHQNAQGEGTAADYKSTQSAIDQITGKLNRLIEKTNQQFELIDNEFNEVEKQIGNVINWTRDSITEVWSYNAELLVAMENQHTIDLADSEMDKLYERVKRQLRENAEEDGTGCFEIFHKCDDDCMASIRNNTYDHSKYREEAMQNRIQIDPVKLSSGYKDVILWFSFGASCFILLAIVMGLVFICVKNGNMRCTICI

SEQ ID NO: 9989 - protein, 560 aa, Artificial Sequence
  derived and/or modified protein sequence (wt) from hemagglutinin__InfluenzaA__AGK84857
MNTQILVFALIAIIPTNADKICLGHHAVSNGTKVNTLTERGVEVVNATETVERTNIPRICSKGKRTVDLGQCGLLGTITGPPQCDQFLEFSADLIIERREGSDVCYPGKFVNEEALRQILRESGGIDKEAMGFTYSGIRTNGATSACRRSGSSFYAEMKWLLSNTDNAAFPQITKSYKNTRKSPALIVWGIHHSVSTAEQTKLYGSGNKLVTVGSSNYQQSFVPSPGARPQVNGLSGRIDFHWLMLNPNDTVTFSFNGAFIAPDRASFLRGKSMGIQSGVQVDANCEGDCYHSGGTIISNLPFQNIDSRAVGKCPRYVKQRSLLLATGMKNVPEIPKGRGLFGAIAGFIENGWEGLIDGWYGFRHQNAQGEGTAADYKSTQSAIDQITGKLNRLIEKTNQQFELIDNEFNEVEKQIGNVINWTRDSITEVWSYNAELLVAMENQHTIDLADSEMDKLYERVKRQLRENAEEDGTGCFEIFHKCDDDCMASIRNNTYDHSKYREEAMQNRIQIDPVKLSSGYKDVILWFSFGASCFILLAIVMGLVFICVKNGNMRCTICI

SEQ ID NO: 9990 - protein, 560 aa, Artificial Sequence
  derived and/or modified protein sequence (wt) from hemagglutinin__InfluenzaA__AGK84860
MNTQILVFALIAIIPTNADKICLGHHAVSNGTKVNTLTERGVEVVNATETVERTNIPRICSKGKMTVDLGQCGLLGTITGPPQCDQFLEFSADLIIERREGSDVCYPGKFVNEEALRQILRESGGIDKEAMGFTYSGIRTNGATSACRRSGSSFYAEMKWLLSNTDNAAFPQMTKSYKNTRKSPALIVWGIHHSVSTAEQTKLYGSGNKLVTVGSSNYQQSFVPSPGARPQVNGLSGRIDFHWLMLNPNDTVTFSFNGAFIAPDRASFLRGKSMGIQSGVQVDANCEGDCYHSGGTIISNLPFQNIDSRAVGKCPRYVKQRSLLLATGMKNVPEIPKGRGLFGAIAGFIENGWEGLIDGWYGFRHQNAQGEGTAADYKSTQSAIDQITGKLNRLIEKTNQQFELIDNEFNEVEKQIGNVINWTRDSITEVWSYNAELLVAMENQHTIDLADSEMDKLYERVKRQLRENAEEDGTGCFEIFHKCDDDCMASIRNNTYDHSKYREEAMQNRIQIDPVKLSSGYKDVILWFSFGASCFILLAIVMGLVFICVKNGNMRCTICI

SEQ ID NO: 9991 - protein, 560 aa, Artificial Sequence
  derived and/or modified protein sequence (wt) from hemagglutinin__InfluenzaA__AGK84863
MNTQILVFALIAIIPTNADKICLGHHAVSNGTKVNTLTERGVEVVNATETVERTNIPRICSKGKKTVDLGQCGLLGTITGPPQCDQFLEFSADLIIERREGSDVCYPGKFVNEEALRQILRESGGIDKEAMGFTYSGIRTNGATSACRRSGSSFYAEMKWLLSNTDNAAFPQMTKSYKNTRKSPALIVWGIHHSVSTAEQTKLYGSGNKLVTVGSSNYQQSFVPSPGARPQVNGLSGRIDFHWLMLNPNDTVTFSFNGAFIAPDRASFLRGKSMGIQSGVQVDANCEGDCYHSGGTIISNLPFQNIDSRAVGKCPRYVKQRSLLLATGMKNVPEIPKGRGLFGAIAGFIENGWEGLIDGWYGFRHQNAQGEGTAADYKSTQSAIDQITGKLNRLIEKTNQQFELIDNEFNEVEKQIGNVINWTRDSITEVWSYNAELLVAMENQHTIDLADSEMDKLYERVKRQLRENAEEDGTGCFEIFHKCDDDCMASIRNNTYDHSKYREEAMQNRIQIDPVKLSSGYKDVILWFSFGASCFILLAIVMGLVFICVKNGNMRCTICI

SEQ ID NO: 9992 - protein, 566 aa, Artificial Sequence
  derived and/or modified protein sequence (wt) from hemagglutinin__InfluenzaA__AGL07713
MKAILVVLLYTFATANADTLCIGYHANNSTDTVDTVLEKNVTVTRSVNLLEDKHNGKLCKLRGVAPLHLGKCNIAGWILGNPECESLSTASSWSYIVETSSSDNGTCYPGDFIDYEELREQLSSVSSFERFEIFPKTGSWPNHDSNKGVTAACPHAGAKGFYKNLIWLVEKGNSYPKLSKSYINDKGKEVLVLWGIHHPSTTADQQRLYQNADTYVFVGTSRYSKKFKPEIAIRPKVRDQEGRMNYYWTLVEPGDKITFEATGNLVVPRYAFAMERNAGSGIIISDTPVHDCNTTCQTPKGAINTSLPFQNIHPITIGKCPKYVKSTKLRLATGLRNVPSIQSRGLFGAIAGFIEGGWTGMVDGWYGYHHQNEQGSGYAADLKSTQNAIDKITNKVNSVIEKMNTQFTAVGKEFNHLEKRIENLNKKVDDGFLDIWTYNAELLVLLENERTLDYHDSNVKNLYEKVRNQLKNNAKEIGNGCFEFYHKCDNTCMESVKNGTYDYPKYSEEAKLNREEIDGVKLESTRIYQILAIYSTVASSLVLVVSLGAISFWMCSNGSLQCRICI

SEQ ID NO: 9993 - protein, 566 aa, Artificial Sequence
  derived and/or modified protein sequence (wt) from hemagglutinin__InfluenzaA__AGL09731
MKTIIALSYILCLVFAQKIPGNDNSTATLCLGHHAVPNGTIVKTITNDRIEVTNATELVQNSSIGEICDSPHQILDGENCTLIDALLGDPQCDGFQNKKWDLFVERSKAYSNCYPYDVPDYASLRSLVASSGTLEFNNESFNWTGVTQNGTSSACIRRSNSSFFSRLNWLTHLNFKYPALNVTMPNNEQFDKLYIWGVHHPGTDKDQIFLYAQSSGRITVSTKRSQQAVIPNIGSRPRIRNIPSRISIYWTIVKPGDILLINSTGNLIAPRGYFKIRSGKSSIMRSDAPIGKCKSECITPNGSIPNDKPFQNVNRITYGACPRYVKQSTLKLATGMRNVPEKQTRGIFGAIAGFIENGWEGMVDGWYGFRHQNSEGRGQAADLKSTQAAIDQINGKLNRLIGKTNEKFHQIEKEFSEVEGRIQDLEKYVEDTKIDLWSYNAELLVALENQHTIDLTDSEMNKLFEKTKKQLRENAEDMGNGCFKIYHKCDNACIGSIRNGTYDHDVYRDEALNNRFQIKGVELKSGYKDWILWISFAISCFLLCVALLGFIMWACQKGNIRCNICI

SEQ ID NO: 9994 - protein, 566 aa, Artificial Sequence
  derived and/or modified protein sequence (wt) from hemagglutinin__InfluenzaA__AGL09732
MKTIIALSYILCLVFAQKLPGNDNSTATLCLGHHAVPNGTIVKTITNDRIEVTNATELVQNSSIGEICDSPHQILDGENCTLIDALLGDPQCDGFQNKKWDLFVERSKAYSNCYPYDVPDYASLRSLVASSGTLEFNNESFNWAGVTQNGTSSACIRGSNSSFFSRLNWLTHLNFKYPALNVTMPNNEQFDKLYIWGVHHPGTDKDQIFLYAQSSGRITVSTKRSQQAVIPNIGSRPRIRNIPSRISIYWTIVKPGDILLINSTGNLIAPRGYFKIRSGKSSIMRSDAPIGKCKSECITPNGSIPNDKPFQNVNRITYGACPRYVKQSTLKLATGMRNVPEKQTRGIFGAIAGFIENGWEGMVDGWYGFRHQNSEGRGQAADLKSTQAAIDQINGKLNRLIGKTNEKFHQIEKEFSEVEGRIQDLEKYVEDTKIDLWSYNAELLVALENQHTIDLTDSEMNKLFEKTKKQLRENAEDMGNGCFKIYHKCDNACIGSIRNGTYDHDVYRDEALNNRFQIKGVELKSGYKDWILWISFAISCFLLCVALLGFIMWACQKGNIRCNICI

SEQ ID NO: 9995 - protein, 566 aa, Artificial Sequence
  derived and/or modified protein sequence (wt) from hemagglutinin__InfluenzaA__AGL09734
MKTIIALSYILCLVFAQKFPGNDNSTATLCLGHHAVPNGTIVKTITNDRIEVTNATELVQNSSIGEICDSPHQILDGENCTLIDALLGDPQCDGFQNKKWDLFIERSKAYSNCYPYDVPDYASLRSLVASSGTLEFNNESFNWTGVTQNGTSSACIRRSNSSFFSRLNWLTHLNFKYPALNVTMPNNEQFDKLYIWGVHHPGTDKDQIFLYAQSSGRITVSTKRSQQAVIPNIGSRPRIRNIPSRISIYWTIVKPGDILLINSTGNLIAPRGYFKIRSGKSSIMRSDAPIGKCKSECITPNGSIPNDKPFQNVNRITYGACPRYVKQSTLKLATGMRNVPEKQTRGIFGAIAGFIENGWEGMVDGWYGFRHQNSEGRGQAADLKSTQAAIDQINGKLNRLIGKTNEKFHQIEKEFSEVEGRIQDLEKYVEDTKIDLWSYNAELLVALENQHTIDLTDSEMNKLFEKTKKQLRENAEDMGNGCFKIYHKCDNACIGSIRNGTYDHDVYRDEALNNRFQIKGVELKSGYKDWILWISFAISCFLLCVALLGFIMWACQKGNIRCNICI

SEQ ID NO: 9996 - protein, 566 aa, Artificial Sequence
  derived and/or modified protein sequence (wt) from hemagglutinin__InfluenzaA__AGL09735
MKTIIALSYILCLVFAQKLPGNDNSTATLCLGHHAVPNGTIVKTITNDRIEVTNATELVQNSSIGEICDSPHQILDGENCTLIDALLGDPQCDGFQNKKWDLFVERSKAYSNCYPYDVPDYASLRSLVASSGTLEFNNESFNWAGVTQNGTSSACIRGSNSSFFSRLNWLTHLNFKYPALNVTMPNNEQFDKLYIWGVHHPGTDKDQIFLYAQSSGRITVSTKRSQQAVIPNIGSRPRIRNIPSRISIYWTIVKPGDILLINSTGNLIAPRGYFKIRSGKSSIMRSDAPIGKCKSECITPNGSIPNDKPFQNVNRITYGACPRYVKQSTLKLATGMRNVPEKQTRGIFGAIAGFIENGWEGMVDGWYGFRHQNSEGRGQAADLKSTQAAIDQINGKLNRLIGKTNEKFHQIEKEFSEVEGRIQDLEKYVEDTKIDLWSYNAELLVALENQHTIDLTDSEMNKLFEKTKKQLRENAEDMGNGCFKIYHKCDNACIGSIRNGTYDHDVYRDEALNNRFQIKGVELKSGYKDWILWISFAISCFLLCVALLGFIMWACQKGNIRCNISI

SEQ ID NO: 9997 - protein, 566 aa, Artificial Sequence
  derived and/or modified protein sequence (wt) from hemagglutinin__InfluenzaA__AGL09736
MKTIIALSYILCLVFAQKLPGNDNSTATLCLGHHAVPNGTIVKTITNDQIEVTNATELVQNSSIGEICDSPHQILDGENCTLIDALLGDPQCDGFQNKKWDLFVERSKAYSNCYPYDVPDYASLRSLVASSGTLEFNNESFNWAGVTQNGTSSACIRGSNSSFFSRLNWLTHLNFKYPALNVTMPNNEQFDKLYIWGVHHPGTDKDQIFLYAQSSGRITVSTKRSQQAVIPNIGSRPRIRNIPSRISIYWTIVKPGDILLINSTGNLIAPRGYFKIRSGKSSIMRSDAPIGKCKSECITPNGSIPNDKPFQNVNRITYGACPRYVKQSTLKLATGMRNVPEKQTRGIFGAIAGFIENGWEGMVDGWYGFRHQNSEGRGQAADLKSTQAAIDQINGKLNRLIGKTNEKFHQIEKEFSEVEGRIQDLEKYVEDTKIDLWSYNAELLVALENQHTIDLTDSEMNKLFEKTKKQLRENAEDMGNGCFKIYHKCDNACIGSIRNGTYDHDVYRDEALNNRFQIKGVELKSGYKDWILWISFAISCFLLCVALLGFIMWACQKGNIRCNICI

SEQ ID NO: 9998 - protein, 566 aa, Artificial Sequence; identical to SEQ ID NO: 9883
  derived and/or modified protein sequence (wt) from hemagglutinin__InfluenzaA__AGL09737

SEQ ID NO: 9999 - protein, 566 aa, Artificial Sequence
  derived and/or modified protein sequence (wt) from hemagglutinin__InfluenzaA__AGL09739
MKTIIALSYILCLVFAQKLPGNDNSTATLCLGHHAVPNGTIVKTITNDRIEVTNATELVQNSSIGEICDSPHQILDGENCTLIDALLGDPQCDGFQNKKWDLFVERSKAYSSCYPYDVPDYASLRSLVASSGTLEFNNESFNWTGVTQNGTSSACIRRSNSSFFSRLNWLTHLNFKYPALNVTMPNNEQFDKLYIWGVHHPGTDKDQIFLYAQSSGRITVSTKRSQQAVIPNIGSRPRIRNIPSRISIYWTIVKPGDILLINSTGNLIAPRGYFKIRSGKSSIMRSDAPIGKCKSECITPNGSIPNDKPFQNVNRITYGACPRYVKQSTLKLATGMRNVPEKQTRGIFGAIAGFIENGWEGMVDGWYGFRHQNSEGRGQAADLKSTQAAIDQINGKLNRLIGKTNEKFHQIEKEFSEVEGRIQDLEKYVEDTKIDLWSYNAELLVALENQHTIDLTDSEMNKLFEKTKKQLRENAEDMGNGCFKIYHKCDNACIGSIRNGTYDHNVYRDEALNNRFQIKGVELKSGYKDWILWISFAISCFLLCVALLGFIMWACQKGNIRCNICI

SEQ ID NO: 10000 - protein, 566 aa, Artificial Sequence; identical to SEQ ID NO: 9835
  derived and/or modified protein sequence (wt) from hemagglutinin__InfluenzaA__AGL09740

SEQ ID NO: 10001 - protein, 566 aa, Artificial Sequence; identical to SEQ ID NO: 9074
  derived and/or modified protein sequence (wt) from hemagglutinin__InfluenzaA__AGL09741

SEQ ID NO: 10002 - protein, 566 aa, Artificial Sequence
  derived and/or modified protein sequence (wt) from hemagglutinin__InfluenzaA__AGL09742
MKTIIALSYILCLVFAQELPGNDDSTATLCLGHHAVPNGTIVKTITNDQIEVTNATELVQSSSTGEICNSPHQILDGENCTLIDALLGDPQCDGFQNKKWDLFVERSKAHSNCYPYDVPDYASLRSLVASSGTLEFNNESFNWTGVTQNGTSSACIRRSNNSFFSRLNWLTHLNFKYPALNVTMPNNEQFDKLYIWGVHHPGTDKDQIFLYAQASGRITVSTKRSQQAVIPNIGSRPRVRNIPSRVSIYWTIVKPGDILLINSTGNLIAPRGYFKIRSGKSSIMRSDAPIGKCNSACITPNGSIPNDKPFQNVNRITYGACPRYVKQNTLKLATGMRNVPETQTRGIFGAIAGFIENGWEGMVDGWYGFRHQNSEGRGQAADLKSTQAAIDQINGKLNRLIGKTNEKFHQIEKEFSEVEGRIQDLEKYVEDTKIDLWSYNAELLVALENQHTIDLTDSEMNKLFEKTKKQLRENAEDMGNGCFKIYHKCDNACIGSIRNGTYDHDVYRDEALNNRFQIKGVELRSGYKDWILWISFAISCFLLCVALLGFIMWACQKGNIRCSICI

SEQ ID NO: 10003 - protein, 566 aa, Artificial Sequence; identical to SEQ ID NO: 9858
  derived and/or modified protein sequence (wt) from hemagglutinin__InfluenzaA__AGL09744

SEQ ID NO: 10004 - protein, 566 aa, Artificial Sequence
  derived and/or modified protein sequence (wt) from hemagglutinin__InfluenzaA__AGL09745
MKTIIALSYILCLVFAQKLPGNDNSTATLCLGHHAVPNGTIVKTITNDRIEVTNATELVQNSSIGEICDSPHQILDGENCTLIDALLGDPQCDGFQNKKWDLFVERSKAYSNCYPYDVPDYASLRSLVASSGTLEFNNESFNWTGVTQNGTSSACIRRSNSSFFSRLNWLTHLNFKYPALNVTMPNNEQFDKLYIWGVHHPGTDKDQIFLYAQSSGRITVSTKRSQQAVIPNIGSRPRIRNIPSRISIYWTIVKPGDILLINSTGNLIAPRGYFKIRSGKSSIMRSDAPIGKCKSECITPNGSIPNDKPFQNVNRITYGACPRYVKQSTLKLATGMRNVPEKQTRGIFGAIAGFIENGWEGMVDGWYGFRHQNSEGRGQAADLKSTQAAIDQINGKLNRLIGKTNEKFHQIEKEFSEVEGRIQDLEKYVEDTKIDLWSYNAELLVALENQHTIDLTDSEMNKLFEKTKKQLRENAEDVGNGCFKIYHKCDNTCIGSIRNGTYDHNVYRDEALNNRFQIKGVELKSGYKDWILWISFAISCFLLCVALLGFIMWACQKGNIRCNICI

SEQ ID NO: 10005 - protein, 566 aa, Artificial Sequence; identical to SEQ ID NO: 9997
  derived and/or modified protein sequence (wt) from hemagglutinin__InfluenzaA__AGL09746

SEQ ID NO: 10006 - protein, 566 aa, Artificial Sequence; identical to SEQ ID NO: 9835
  derived and/or modified protein sequence (wt) from hemagglutinin__InfluenzaA__AGL09747

SEQ ID NO: 10007 - protein, 566 aa, Artificial Sequence; identical to SEQ ID NO: 9858
  derived and/or modified protein sequence (wt) from hemagglutinin__InfluenzaA__AGL09748

SEQ ID NO: 10008 - protein, 566 aa, Artificial Sequence; identical to SEQ ID NO: 9856
  derived and/or modified protein sequence (wt) from hemagglutinin__InfluenzaA__AGL09749

SEQ ID NO: 10009 - protein, 566 aa, Artificial Sequence; identical to SEQ ID NO: 9994
  derived and/or modified protein sequence (wt) from hemagglutinin__InfluenzaA__AGL09750

SEQ ID NO: 10010 - protein, 566 aa, Artificial Sequence; identical to SEQ ID NO: 9835
  derived and/or modified protein sequence (wt) from hemagglutinin__InfluenzaA__AGL09751

SEQ ID NO: 10011 - protein, 566 aa, Artificial Sequence; identical to SEQ ID NO: 9994
  derived and/or modified protein sequence (wt) from hemagglutinin__InfluenzaA__AGL09753

SEQ ID NO: 10012 - protein, 566 aa, Artificial Sequence
  derived and/or modified protein sequence (wt) from hemagglutinin__InfluenzaA__AGL09754
MKTIIALSYILCLVFAQKLPGNDNSTATLCLGHHAVPNGTIVKTITNDRIEVTNATELVQNSSIGEICDSPHQILDGENCTLIDALLGDPQCDGFQNKKWDLFVERSKAYSNCYPYDVPDYASLRSLVASSGTLEFNNESFNWTGVTQNGTSSACIRRSNSSFFSRLNWLTHLNFKYPALNVTMPNNEQFDKLYIWGVHHPGTDKDQIFLYAQSSGRITVSTKRSQQAVIPNIGSRPRIRNIPSRISIYWTIVKPGDILLINSTGNLIAPRGYFKIRSGKSSIMRSDAPIGKCKSECITPNGSIPNDKPFQNVNRITYGACPRYVKQSTLKLATGMRNVPEKQTRGIFGAIAGFIENGWEGMVDGWYGFRHQNSEGRGQAADLKSTQAAIDQINGKLNRLIGKTNEKFHQIEKEFSEVEGRIQDLEKYVEDTKIDLWSYNAELLVALENQHTIDLTDSEMNKLFEKTKKQLRENAEDMGNGCFKIYHKCDNACIGSIRNGTYDHNVYRDEALNNRFQIKGVELKSGYKDWILWISFAISCLLLCVALLGFIMWACQKGNIRCNICI

SEQ ID NO: 10013 - protein, 566 aa, Artificial Sequence; identical to SEQ ID NO: 9997
  derived and/or modified protein sequence (wt) from hemagglutinin__InfluenzaA__AGL09756

SEQ ID NO: 10014 - protein, 566 aa, Artificial Sequence
  derived and/or modified protein sequence (wt) from hemagglutinin__InfluenzaA__AGL09758
MKAILVVLLYTFATANADTLCIGYHANNSTDTVDTVLEKNVTVTHSVNLLEDKHNGKICKLRGVAPLHLGKCNIAGWILGNPECESLSTASSWSYIVETSSSDNGTCYPGDFIDYEELREQLSSVSSFERFEIFPKTSSWPNHDSNKGVTAACPHAGAKGFYKNLIWLVKKGNSYPKLSNSYINDKGKEVLVLWGIHHPSTTADQQSLYQNADTYVFVGTSRYSKKFKPEIAIRPKVRDQEGRMNYYWTLVEPGDKITFEATGNLVVPRYAFAMERNAGSGIIISDTTVHDCNTTCQTPKGAINTSLPFQNIHPITIGKCPKYVKSTKLRLATGLRNVPSIQSRGLFGAIAGFIEGGWTGMVDGWYGYHHQNEQGSGYAADLKSTQNAIDKITNKVNSVIEKMNTQFTAVGKEFNHLEKRIENLNKKVDDGFLDIWTYNAELLVLLENERTLDYHDSNVKNLYEKVRNQLKNNAKEIGNGCFEFYHKCDNMCMESVKNGTYDYPKYSEEAKLNREKIDGVKLESTRIYQILAIYSTVASSLVLVVSLGAISFWMCSNGSLQCRICI

SEQ ID NO: 10015 - protein, 566 aa, Artificial Sequence
  derived and/or modified protein sequence (wt) from hemagglutinin__InfluenzaA__AGL09760
MKTIIAVSYILCLVFAQELPGNDDSTATLCLGHHAVPNGTIVKTITNDQIEVTNATELVQSSSTGEICNSPHQILDGENCTLIDALLGDPQCDGFQNKKWDLFVERSKAHSNCYPYDVPDYASLRSLVASSGTLEFNNESFNWTGVTQNGTSSACIRRSNNSFFSRLNWLTHLNFKYPALNVTMPNNEQFDKLYIWGVHHPGTDKDQIFLYAQASGRITVSTKRSQQAVIPNIGSRPRVRNIPSRVSIYWTIVKPGDILLINSTGNLIAPRGYFKIRSGKSSIMRSDAPIGKCNSACITPNGSIPNDKPFQNVNRITYGACPRYVKQNTLKLATGMRNVPEKQTRGIFGAIAGFIENGWEGMVDGWYGFRHQNSEGRGQAADLKSTQAAIDQINGKLNRLIGKTNEKFHQIEKEFSEVEGRIQDLEKYVEDTKIDLWSYNAELLVALENQHTIDLTDSEMNKLFEKTKKQLRENAEDMGNGCFKIYHKCDNACIGSIRNGTYDHDVYRDEALNNRFQIKGVELKSGYKDWILWISFAISCFLLCVALLGFIMWACQKGNIRCNICI

SEQ ID NO: 10016 - protein, 566 aa, Artificial Sequence; identical to SEQ ID NO: 9868
  derived and/or modified protein sequence (wt) from hemagglutinin__InfluenzaA__AGL09761

SEQ ID NO: 10017 - protein, 566 aa, Artificial Sequence
  derived and/or modified protein sequence (wt) from hemagglutinin__InfluenzaA__AGL09762
MKTIIALSYILCLVFAQKLPGNDNSTATLCLGHHAVPNGTIVKTITNDQIEVTNATELVQNSSIGEICDSPHQILDGENCTLIDALLGDPQCDGFQNKKWDLFVERSKAYSNCYPYDVPDYASLRSLVASSGTLEFNNESFNWTGVTQNGTSSACIRGSNSSFFSRLNWLTHLNFKYPALNVTMPNNEQFDKLYIWGVHHPGTDKDQIFLYAQSSGRITVSTKRSQQAVIPNIGSRPRIRNIPSRISIYWTIVKPGDILLINSTGNLIAPRGYFKIRSGKSSIMRSDAPIGKCKSECITPNGSIPNDKPFQNVNRITYGACPRYVKQSTLKLATGMRNVPEKQTRGIFGAIAGFIENGWEGMVDGWYGFRHQNSEGRGQAADLKSTQAAIDQINGKLNRLIGKTNEKFHQIEKEFSEVEGRIQDLEKYVEDTKIDLWSYNAELLVALENQHTIDLTDSEMNKLFEKTKKQLRENAEDMGNGCFKIYHKCDNACIGSIRNGTYDHDVYRDEALNNRFQIKGVELKSGYKDWILWISFAISCFLLCVALLGFIMWACQKGNIRCNICI

SEQ ID NO: 10018 - protein, 566 aa, Artificial Sequence; identical to SEQ ID NO: 9994
  derived and/or modified protein sequence (wt) from hemagglutinin__InfluenzaA__AGL09763

SEQ ID NO: 10019 - protein, 566 aa, Artificial Sequence
  derived and/or modified protein sequence (wt) from hemagglutinin__InfluenzaA__AGL09764
MKTIIALSYILCLVFAQKIPGNDNSTATLCLGHHAVPNGTIVKTITNDQIEVTNATELVQNSSIGEICDSPHQILDGENCTLIDALLGDPQCDGFQNKKWDLFVERSKAYSNCYPYDVPDYASLRSLVASSGTLEFNNESFNWTGVTQNGTSSACIRRSNSSFFSRLNWLTHLNFKYPALNVTMPNNEQFDKLYIWGVHHPGTDKDQIFLYAQSSGRITVSTKRSQQAVIPNIGSRPRIRNIPSRISIYWTIVKPGDILLINSTGNLIAPRGYFKIRSGKSSIMRSDAPIGKCKSECITPNGSIPNDKPFQNVNRITYGACPRYVKQSTLKLATGMRNVPEKQTRGIFGAIAGFIENGWEGMVDGWYGFRHQNSEGRGQAADLKSTQAAIDQINGKLNRLIGKTNEKFHQIEKEFSEVEGRIQDLEKYVEDTKIDLWSYNAELLVALENQHTIDLTDSEMNKLFEKTKKQLRENAEDMGNGCFKIYHKCDNACIGSIRNGTYDHDVYRDEALNNRFQIKGVELKSGYKDWILWISFAISCFLLCVALLGFIMWACQKGNIRCNICI

SEQ ID NO: 10020 - protein, 566 aa, Artificial Sequence; identical to SEQ ID NO: 9858
  derived and/or modified protein sequence (wt) from hemagglutinin__InfluenzaA__AGL09765

SEQ ID NO: 10021 - protein, 566 aa, Artificial Sequence
  derived and/or modified protein sequence (wt) from hemagglutinin__InfluenzaA__AGL09766
MKTIIALSYILCLVFAQKLPGNDNSTATLCLGHHAVPNGTIVKTITNDQIEVTNATELVQNSSIGEICDSPHQILDGENCTLIDALLGDPQCDGFQNKKWDLFVERSKAYSNCYPYDVPDYASLRSLVASSGTLEFNNESFNWAGVTQNGTSSACIRGSNSSFFSRLNWLTHLNFKYPALNVTMPNNEQFDKLYIWGVHHPGTDKDQIFLYAQSSGRITVSTKRSQQAVIPNIGSRPRIRNIPSRISIYWTIVKPGDILLINSTGNLIAPRGYFKILSGKSSIMRSDAPIGKCKSECITPNGSIPNDKPFQNVNRITYGACPRYVKQSTLKLATGMRNVPEKQTRGIFGAIAGFIENGWEGMVDGWYGFRHQNSEGRGQAADLKSTQAAIDQINGKLNRLIGKTNEKFHQIEKEFSEVEGRIQDLEKYVEDTKIDLWSYNAELLVALENQHTIDLTDSEMNKLFEKTKKQLRENAEDMGNGCFKIYHKCDNACIGSIRNGTYDHDVYRDEALNNRFQIKGVELKSGYKDWILWISFAISCFLLCVALLGFIMWACQKGNIRCNICI

SEQ ID NO: 10022 - protein, 566 aa, Artificial Sequence
  derived and/or modified protein sequence (wt) from hemagglutinin__InfluenzaA__AGL09767
MKTIIALSYILCLVFAQKLPGNDNSTATLCLGHHAVPNGTIVKTITNDRIEVTNATELVQNSSIGEICDSPHQILDGENCTLIDALLGDPQCDGFQNKKWDLFVERSKAYSNCYPYDVPDYASLRSLVASSGTLEFNNESFNWAGVTQNGTSSACIRGSNSSFFSRLNWLTHLNFKYPALNVTMPNNEQFDKLYIWGVHHPGTDKDQIFLYAQSSGRITVSTKRSQQAVIPNIGSRPRIRNIPSRISIYWTIVKPGDILLINSTGNLIAPRGYFKIRSGKSSIMRSDAPIGKCKSECITPNGSIPNDKPFQNVNRITYGACPRYVKQSTLKLATGMRNVPEKQTRGIFGAIAGFIENGWEGMVDGWYGFRHQNSEGRGQAADLKSTQAAIDQINGKLNRLIGKTNEKFHQIEKEFSEVEGRIQDLEKYVEDTKIDLWSYNAELLVALENQHTIDLTDSEMNKLFEKTKKQLRENAEDMGNGCFKIYHKCDNACIGSIRNGTYDHNVYRDEALNNRFQIKGVELKSGYKDWILWISFAISCFLLCVALLGFIMWACQKGNIRCNICI

SEQ ID NO: 10023 - protein, 566 aa, Artificial Sequence
  derived and/or modified protein sequence (wt) from hemagglutinin__InfluenzaA__AGL09769
MKTIIALSYILCLVFAQKIPGNDNSTATLCLGHHAVPNGTIVKTITNDRIEVTNATELVQNSSIGEICDSPHQILDGENCTLIDALLGDPQCDGFQNKKWDLFVERSKAYSNCYPYDVPDYASLRSLVASSGTLEFNNESFNWTGVTQNGTSSACIRGSNSSFFSRLNWLTHLNFKYPALNVTMPNNEQFDKLYIWGVHHPGTDKDQIFLYAQSSGRITVSTKRSQQAVIPNIGSRPRIRNIPSRISIYWTIVKPGDILLINSTGNLIAPRGYFKIRSGKSSIMRSDAPIGKCKSECITPNGSIPNDKPFQNVNRITYGACPRYVKQSTLKLATGMRNVPEKQTRGIFGAIAGFIENGWEGMVDGWYGFRHQNSEGRGQAADLKSTQAAIDQINGKLNRLIGKTNEKFHQIEKEFSEVEGRIQDLEKYVEDTKIDLWSYNAELLVALENQHTIDLTDSEMNKLFEKTKKQLRENAEDMGNGCFKIYHKCDNACIGSIRNGTYDHDVYRDEALNNRFQIKGVELKSGYKDWILWISFAISCFLLCVALLGFIMWACQKGNIRCNICI

SEQ ID NO: 10024 - protein, 566 aa, Artificial Sequence; identical to SEQ ID NO: 9858
  derived and/or modified protein sequence (wt) from hemagglutinin__InfluenzaA__AGL09770

SEQ ID NO: 10025 - protein, 566 aa, Artificial Sequence
  derived and/or modified protein sequence (wt) from hemagglutinin__InfluenzaA__AGL09771
MKTIIALSYILCLVFAQKLPGNDNSTATLCLGHHAVPNGTIVKTITNDRIEVTNATELVQNSSIGEICDSPHQILDGENCTLIDALLGDPQCDGFQNKKWDLFVERSKAYSNCYPYDVPDYASLRSLVASSGTLEFNNESFNWAGVTQNGTSSACIRGSNSSFFSRLNWLTHLNFKYPALNVTMPNNEQFDKLYIWGVHHPGTDKDQIFLYAQSSGRITVSTKRSQQAVIPNIGSRPRIRNIPSRISIYWTIVKPGDILLINSTGNLIAPRGYFKIRSGKSSIMRSDAPIGKCKSECITPNGSIPNDKPFQNVNRITYGACPRYVKQSTLKLATGMRNVPEKQTRGIFGAIAGFIENGWEGMVDGWYGFRHQNSEGRGQAADLKSTQAAIDQINGKLNRLIGKTNEKFHQIEKEFSEVEGRIQDLEKYVEDTKIDLWSYNAELLVALENQHTIDLTDSEMNKLFEKTKKQLRENAEDMGNGCFKIYHKCDNACIGSIRNGTYDHDIYRDEALNNRFQIKGVELKSGYKDWILWISFAISCFLLCVALLGFIMWACQKGNIRCNICI

SEQ ID NO: 10026 - protein, 566 aa, Artificial Sequence
  derived and/or modified protein sequence (wt) from hemagglutinin__InfluenzaA__AGL09772
MKTIIALSYILCLVFAQKLPGNDNSTATLCLGHHAVPNGTIVKTITNDQIEVTNATELVQSSSTGEICNSPHQILDGENCTLIDALLGDPQCDGFQNKKWDLFVERSKAHSNCYPYDVPDYASLRSLVASSGTLEFNNESFNWTGVTQNGTSSACIRRSNNSFFSRLNWLTHLNFKYPALNVTMPNNEQFDKLYIWGVHHPGTDKDQIFLYAQAAGRITVSTKRSQQAVIPNIGSRPRVRNIPSRVSIYWTIVKPGDILLINSTGNLIAPRGYFKIRSGKSSIMRSDAPIGKCNSACITPNGSIPNDKPFQNVNRITYGACPRYVKQNTLKLATGMRNVPEKQTRGIFGAIAGFIENGWEGMVDGWYGFRHQNSEGRGQAADLKSTQAAIDQINGKLNRLIGKTNEKFHQIEKEFSEVEGRIQDLEKYVEDTKIDLWSYNAELLVALENQHTIDLTDSEMNKLFEKTKKQLRENAEDMGNGCFKIYHKCDNACIGSIRNGTYDHYVYRDEALNNRFQIKGVELKSGYKDWILWISFATSCFLLCVALLGFIMWACQKGNIRCNICI

SEQ ID NO: 10027 - protein, 566 aa, Artificial Sequence
  derived and/or modified protein sequence (wt) from hemagglutinin__InfluenzaA__AGL09773
MKTIIALSYILCLVFAQKLPGNDNSTATLCLGHHAVPNGTIVKTITNDQIEVTNATELVQSSSTGEICNSPHQILDGENCTLIDALLGDPQCDGFQNKKWDLFVERSKAHSNCYPYDVPDYASLRSLVASSGTLEFNNESFNWTEVTQNGTSSACIRRSNNSFFSRLNWLTHLNFKYPALNVTMPNNEQFDKLYIWGVHHPGTDKDQIFLYAQAAGRITVSTKRSQQAVIPNIGSRPRVRNIPSRVSIYWTIVKPGDILLINSTGNLIAPRGYFKIRSGKSSIMRSDAPIGKCNSACITPNGSIPNDKPFQNVNRITYGACPRYVKQNTLKLATGMRNVPEKQTRGIFGAIAGFIENGWEGMVDGWYGFRHQNSEGRGQAADLKSTQAAIDQINGKLNRLIGKTNEKFHQIEKEFSEVEGRIQDLEKYVEDTKIDLWSYNAELLVALENQHTIDLTDSEMNKLFEKTKKQLRENAEDMGNGCFKIYHKCDNACIGSIRNGTYDHYVYRDEALNNRFQIKGVELKSGYKDWILWISFATSCFLLCVALLGFIMWACQKGNIRCNICI

SEQ ID NO: 10028 - protein, 566 aa, Artificial Sequence; identical to SEQ ID NO: 10026
  derived and/or modified protein sequence (wt) from hemagglutinin__InfluenzaA__AGL09774

SEQ ID NO: 10029 - protein, 566 aa, Artificial Sequence; identical to SEQ ID NO: 9868
  derived and/or modified protein sequence (wt) from hemagglutinin__InfluenzaA__AGL09775

SEQ ID NO: 10030 - protein, 566 aa, Artificial Sequence; identical to SEQ ID NO: 10026
  derived and/or modified protein sequence (wt) from hemagglutinin__InfluenzaA__AGL09776

SEQ ID NO: 10031 - protein, 566 aa, Artificial Sequence; identical to SEQ ID NO: 10026
  derived and/or modified protein sequence (wt) from hemagglutinin__InfluenzaA__AGL09777

SEQ ID NO: 10032 - protein, 566 aa, Artificial Sequence
  derived and/or modified protein sequence (wt) from hemagglutinin__InfluenzaA__AGL09778
MKTIIALSYILCLIFAQKLPGNDNSTATLCLGHHAVPNGTIVKTITNDRIEVTNATELVQNSSIGEICDSPHQILDGENCTLIDALLGDPQCDGFQNKKWDLFVERSKAYSNCYPYDVPDYASLRSLVASSGTLEFNNESFNWAGVTQNGTSSACIRGSNSSFFSRLNWLTHLNFKYPALNVTMPNNEQFDKLYIWGVHHPGTDKDQIFLYAQSSGRITVSTKRSQQAVIPNIGSRPRIRNIPSRISIYWTIVKPGDILLINSTGNLIAPRGYFKIRSGKSSIMRSDAPIGKCKSECITPNGSIPNDKPFQNVNRITYGACPRYVKQSTLKLATGMRNVPEKQTRGIFGAIAGFIENGWEGMMDGWYGFRHQNSEGRGQAADLKSTQAAIDQINGKLNRLIGKTNEKFHQIEKEFSEVEGRIQDLEKYVEDTKIDLWSYNAELLVALENQHTIDLTDSEMNKLFEKTKKQLRENAEDMGNGCFKIYHKCDNACIGSIRNGTYDHDVYRDEALNNRFQIKGVELKSGYKDWILWISFAISCFLLCVALLGFIMWACQKGNIRCNICI

SEQ ID NO: 10033 - protein, 566 aa, Artificial Sequence
  derived and/or modified protein sequence (wt) from hemagglutinin__InfluenzaA__AGL09779
MKTIIALSYILCLVFAQKLPGNNNSTATLCLGHHAVPNGTIVKTITNDRIEVTNATELVQNSSIGEICDSPHQILDGENCTLIDALLGDPQCDGFQNKKWDLFVERSKAYSNCYPYDVPDYASLRSLVASSGTLEFNNESFNWAGVTQNGTSSACIRGSNSSFFSRLNWLTHLNFKYPALNVTMPNNEQFDKLYIWGVHHPGTDKDQIFLYAQSSGRITVSTKRSQQAVIPNIGSRPRIRNIPSRISIYWTIVKPGDILLINSTGNLIAPRGYFKIRSGKSSIMRSDAPIGKCKSECITPNGSIPNDKPFQNVNRITYGACPRYVKQSTLKLATGMRNVPEKQTRGIFGAIAGFIENGWEGMVDGWYGFRHQNSEGRGQAADLKSTQAAIDQINGKLNRLIGKTNEKFHQIEKEFSEVEGRIQDLEKYVEDTKIDLWSYNAELLVALENQHTIDLTDSEMNKLFEKTKKQLRENAEDMGNGCFKIYHKCDNACIGSIRNGTYDHDVYRDEALNNRFQIKGVELKSGYKDWILWISFAISCFLLCVALLGFIMWACQKGNIRCNICI

SEQ ID NO: 10034 - protein, 566 aa, Artificial Sequence
  derived and/or modified protein sequence (wt) from hemagglutinin__InfluenzaA__AGL09780
MKTIIALSYILCLVFAQKLPGNDNSTATLCLGHHAVPNGTIVKTITNDRIEVTNATELVQNSSIGEICDSPHQILDGENCTLIDALLGDPQCDGFQNKKWDLFVERSKAYSNCYPYDVPDYASLRSLVASSGTLEFDNESFNWAGVTQNGTSSACIRGSNSSFFSRLNWLTHLNFKYPALNVTMPNNEQFDKLYIWGVHHPGTDKDQISLYAQSSGRITVSTKRSQQAVIPNIGSRPRIRNIPSRISIYWTIVKPGDILLINSTGNLIAPRGYFKIRSGKSSIMRSDAPIGKCKSECITPNGSIPNDKPFQNVNRITYGACPRYVKQSTLKLATGMRNVPEKQTRGIFGAIAGFIENGWEGMVDGWYGFRHQNSEGRGQAADLKSTQAAIDQINGKLNRLIGKTNEKFHQIEKEFSEVEGRIQDLEKYVEDTKIDLWSYNAELLVALENQHTIDLTDSEMNKLFEKTKKQLRENAEDMGNGCFKIYHKCDNACIGSIRNGTYDHDVYRDEALNNRFQIKGVELKSGYKDWILWISFAISCFLLCVALLGFIMWACQKGNIRCNICI

SEQ ID NO: 10035 - protein, 566 aa, Artificial Sequence; identical to SEQ ID NO: 9993
  derived and/or modified protein sequence (wt) from hemagglutinin__InfluenzaA__AGL09781

SEQ ID NO: 10036 - protein, 566 aa, Artificial Sequence; identical to SEQ ID NO: 9858
  derived and/or modified protein sequence (wt) from hemagglutinin__InfluenzaA__AGL09782

SEQ ID NO: 10037 - protein, 566 aa, Artificial Sequence
  derived and/or modified protein sequence (wt) from hemagglutinin__InfluenzaA__AGL09783
MKTIIALSYILCLVFAQKLPGNDNSTATLCLGHHAVPNGTVVKTITNDRIEVTNATELVQNSSIGEICDSPHQILDGENCTLIDALLGDPQCDGFQNKKWDLFVERSKAYSNCYPYDVPDYASLRSLVASSGTLEFNNESFNWTGVTQNGTSSACIRRSNNSFFSRLNWLTHLNFKYPALNVTMPNNEQFDKLYIWGVHHPGTDKDQIFLYAQSSGRITVSTKRSQQAVIPNIGSRPRIRNIPSRISIYWTIVKPGDILLINSTGNLIAPRGYFKIRSGKSSIMRSDAPIGKCKSECITPNGSIPNDKPFQNVNRITYGACPRYVKQSTLKLATGMRNVPEKQTRGIFGAIAGFIENGWEGMVDGWYGFRHQNSEGRGQAADLKSTQAAIDQINGKLNRLIGKTNEKFHQIEKEFSEVEGRTQNLEKYVEDTKIDLWSYNAELLVALENQHTIDLTDSEMNKLFEKTKKQLRENAEDMGNGCFKIYHKCDNACIGSIRNGTYDHDVYRDEALNNRFQIKGVELKSGYKDWILWISFAISCFLLCVVLLGFIMWACQKGNIRCNICI

SEQ ID NO: 10038 - protein, 566 aa, Artificial Sequence; identical to SEQ ID NO: 9868
  derived and/or modified protein sequence (wt) from hemagglutinin__InfluenzaA__AGL09785

SEQ ID NO: 10039 - protein, 566 aa, Artificial Sequence
  derived and/or modified protein sequence (wt) from hemagglutinin__InfluenzaA__AGL09786
MKTIIALSYILCLVFAQKLPGNDNSTATLCLGHHAVPNGTIVKTITNDRIEVTNATELVQNSSIGEICDSPHQILDGENCTLIDALLGDPQCDGFQNKKWDLFVERSKAYSNCYPYDVPDYASLRSLVASSGTLEFDNESFNWAGVTQNGTSSACIRGSKSSFFSRLNWLTHLNFKYPALNVTMPNNEQFDKLYIWGVHHPGTDKDQISLYAQSSGRITVSTKRSQQAVIPNIGSRPRIRNIPSRISIYWTIVKPGDILLINSTGNLIAPRGYFKIRSGKSSIMRSDAPIGKCKSECITPNGSIPNDKPFQNVNRITYGACPRYVKQSTLKLATGMRNVPEKQTRGIFGAIAGFIENGWEGMVDGWYGFRHQNSEGRGQAADLKSTQAAIDQINGKLNRLIGKTNEKFHQIEKEFSEVEGRIQDLEKYVEDTKIDLWSYNAELLVALENQHTIDLTDSEMNKLFEKTKKQLRENAEDMGNGCFKIYHKCDNACIGSIRNGTYDHDVYRDEALNNRFQIKGVELKSGYKDWILWISFAISCFLLCVALLGFIMWACQKGNIRCNICI

SEQ ID NO: 10040 - protein, 566 aa, Artificial Sequence
  derived and/or modified protein sequence (wt) from hemagglutinin__InfluenzaA__AGL09787
MKAILVVLLYTFATANADTLCIGYHANNSTDTVDTVLEKNVTVTHSVNLLEDKHNGKLCKLRGVAPLHLGKCNIAGWILGNPECESLSTASSWSYIVETSSSDNGTCYPGDFINYEELREQLSSVSSFERFEIFPKTSSWPNHDSNKGVTAACPHAGAKSFYKNLIWLVKKGNSYPKLSQSYINDKGKEVLVLWGIHHPSTTADQQSLYQNADAYVFVGTSRYSKKFKPEIAIRPKVRDQEGRMNYYWTLVEPGDKITFEATGNLVVPRYAFTMERNAGSGIIISDTPVHDCNTTCQTPEGAINTSLPFQNIHPITIGKCPKYVKSTKLRLATGLRNVPSIQSRGLFGAIAGFIEGGWTGMVDGWYGYHHQNEQGSGYAADLKSTQNAIDKITNKVNSVIEKMNTQFTAVGKEFNHLEKRIENLNKKVDDGFLDIWTYNAELLVLLENERTLDYHDSNVKNLYEKVRNQLKNNAKEIGNGCFEFYHKCDNTCMESVKNGTYDYPKYSEEAKLNREKIDGVKLESTRIYQILAIYSTVASSLVLVVSLGAISFWMCSNGSLQCRICI

SEQ ID NO: 10041 - protein, 566 aa, Artificial Sequence; identical to SEQ ID NO: 10040
  derived and/or modified protein sequence (wt) from hemagglutinin__InfluenzaA__AGL09788

SEQ ID NO: 10042 - protein, 566 aa, Artificial Sequence; identical to SEQ ID NO: 10040
  derived and/or modified protein sequence (wt) from hemagglutinin__InfluenzaA__AGL09789

SEQ ID NO: 10043 - protein, 566 aa, Artificial Sequence; identical to SEQ ID NO: 9994
  derived and/or modified protein sequence (wt) from hemagglutinin__InfluenzaA__AGL09790

SEQ ID NO: 10044 - protein, 566 aa, Artificial Sequence
  derived and/or modified protein sequence (wt) from hemagglutinin__InfluenzaA__AGL09791
MKTIIALSYILCLVFAQKLPGNDNSTATLCLGHHAVPNGTIVKTITNDRIEVTNATELVQNSSIGEICDSPHQILDGENCTLIDALLGDPQCDGFQNKKWDLFVERSKAYSNCYPYDVPDYASLRSLVASSGTLEFNNESFNWTGVTQNGTSSACIRRSNSSFFSRLNWLTHLNFKYPALNMTMPNNEQFDKLYIWGVHHPGTDKDQISLYAQSSGRITVSTKRSQQAVIPNIGSRPRIRNIPSRISIYWTIVKPGDILLINSTGNLIAPRGYFKIRSGKSSIMRSDAPIGKCKSECITPNGSIPNDKPFQNVNRITYGACPRYVKQSTLKLATGMRNVPEKQTRGIFGAIAGFIENGWEGMVDGWYGFRHQNSEGRGQAADLKSTQAAIDQINGKLNRLIGKTNEKFHQIEKEFSEVEGRIQDLEKYVEDTKIDLWSYNAELLVALENQHTIDLTDSEMNKLFEKTKKQLRENAEDMGNGCFKIYHKCDNACIGSIRNGTYDHNVYRDEALNNRFQIKGVELKSGYKDWILWISFAISCFLLCVALLGFIMWACQKGNIRCNICI

SEQ ID NO: 10045 - protein, 566 aa, Artificial Sequence; identical to SEQ ID NO: 9994
  derived and/or modified protein sequence (wt) from hemagglutinin__InfluenzaA__AGL09792

SEQ ID NO: 10046 - protein, 566 aa, Artificial Sequence
  derived and/or modified protein sequence (wt) from hemagglutinin__InfluenzaA__AGL09794
MKTIIALSYILCLVFAQKLPGNDNSTATLCLGHHAVPNGTIVKTITNDRIEVTNATELVQNSSIGEICDSPHQILDGENCTLIDALLGDPQCDGFQNKKWDLFVERSKAYSNCYPYDVPDYASLRSLVASSGTLEFNNESFNWAGVTQNGTSSACIRGSNSSFFSRLNWLTHLNFKYPALNVTMPNNEQFDKLYIWGVHHPGTDKDQIFLYAQSSGRITVSTKRSQQAVIPNIGSRPRIRNIPSRISIYWTIVKPGDILLINSTGNLIAPRGYFKIRSGKSSIMRSDTPIGKCKSECITPNGSIPNDKPFQNVNRITYGACPRYVKQSTLKLATGMRNVPEKQTRGIFGAIAGFIENGWEGMVDGWYGFRHQNSEGRGQAADLKSTQAAIDQINGKLNRLIGKTNEKFHQIEKEFSEVEGRIQDLEKYVEDTKIDLWSYNAELLVALENQHTIDLTDSEMNKLFEKTKKQLRENAEDMGNGCFKIYHKCDNACIGSIRNGTYDHDVYRDEALNNRFQIKGVELKSGYKDWILWISFAISCFLLCVALLGFIMWACQKGNIRCNICI

SEQ ID NO: 10047 - protein, 566 aa, Artificial Sequence; identical to SEQ ID NO: 9994
  derived and/or modified protein sequence (wt) from hemagglutinin__InfluenzaA__AGL09795

SEQ ID NO: 10048 - protein, 566 aa, Artificial Sequence
  derived and/or modified protein sequence (wt) from hemagglutinin__InfluenzaA__AGL09797
MKTIIALSYILCLVFSQKLPGNDNSTATLCLGHHAVPNGTIVKTITNDRIEVTNATELVQNSSIGEICDSPHQILDGENCTLIDALLGDPQCDGFQNKKWDLFVERSKAYSNCYPYDVPDYASLRSLVASSGTLEFNNESFNWAGVTQNGTSSACIRGSNSSFFSRLNWLTHLNFKYPALNVTMPNNEQFDKLYIWGVHHPGTDKDQIFLYAQSSGRITVSTKRSQQAVIPNIGSRPRIRNIPSRISIYWTIVKPGDILLINSTGNLIAPRGYFKIRSGKSSIMRSDAPIGKCKSECITPNGSIPNDKPFQNVNRITYGACPRYVKQSTLKLATGMRNVPEKQTRGIFGAIAGFIENGWEGMVDGWYGFRHQNSEGRGQAADLKSTQAAIDQINGKLNRLIGKTNEKFHQIEKEFSEVEGRIQDLEKYVEDTKIDLWSYNAELLVALENQHTIDLTDSEMNKLFEKTKKQLRENAEDMGNGCFKIYHKCDNACIGSIRNGTYDHDVYRDEALNNRFQIKGVELKSGYKDWILWISFAISCFLLCVALLGFIMWACQKGNIRCNICI

SEQ ID NO: 10049 - protein, 566 aa, Artificial Sequence
  derived and/or modified protein sequence (wt) from hemagglutinin__InfluenzaA__AGL09798
MKTIIALSYILCLVFAQKLPGNDNSTATLCLGHHAVPNGTIVKTITNDRIEVTNATELVQNSSIGEICDSPHQILDGENCTLIDALLGDPQCDGFQNKKWDLFVERSKAYSNCYPYDVPDYASLRSLVASSGTLEFNNESFNWAGVTQNGTSSACIRGSNSSFFSRLNWLTHLNFKYPALNVTMPNNEQFDKLYIWGVHHPGTDKDQIFLYAQSSGRITVSTKRSQQAVIPNIGSRPRIRNIPSRISIYWTIVKPGDILLINSTGNLIAPRGYFKIRSGKSSIMRSDAPIGKCKSECITPNGSIPNDKPFQNVNRITYGACPRYVKQSTLKLATGMRNVPEKQTRGIFGAIAGFIENGWEGMVDGWYGFRHQNFEGRGQAADLKSTQAAIDQINGKLNRLIGKTNEKFHQIEKEFSEVEGRIQDLEKYVEDTKIDLWSYNAELLVALENQHTIDLTDSEMNKLFEKTKKQLRENAEDMGNGCFKIYHKCDNACIGSIRNGTYDHYVYRDEALNNRFQIKGVELKSGYKDWILWISFAISCFLLCVALLGFIMWACQKGNIRCNICI

SEQ ID NO: 10050 - protein, 566 aa, Artificial Sequence; identical to SEQ ID NO: 10048
  derived and/or modified protein sequence (wt) from hemagglutinin__InfluenzaA__AGL09799

SEQ ID NO: 10051 - protein, 566 aa, Artificial Sequence; identical to SEQ ID NO: 9994
  derived and/or modified protein sequence (wt) from hemagglutinin__InfluenzaA__AGL09800

SEQ ID NO: 10052 - protein, 566 aa, Artificial Sequence; identical to SEQ ID NO: 9858
  derived and/or modified protein sequence (wt) from hemagglutinin__InfluenzaA__AGL09801

SEQ ID NO: 10053 - protein, 566 aa, Artificial Sequence; identical to SEQ ID NO: 9858
  derived and/or modified protein sequence (wt) from hemagglutinin__InfluenzaA__AGL09802

SEQ ID NO: 10054 - protein, 566 aa, Artificial Sequence
  derived and/or modified protein sequence (wt) from hemagglutinin__InfluenzaA__AGL09803
MKTIIALSYILCLVFAQKLPGNDNSTATLCLGHHAVPNGTIVKTITNDRIEVTNATELVQNSSIGEICDSPHQILDGENCTLIDALLGDPQCDGFQNKKWDLFVERSKAYSNCYPYDVPDYASLRSLVASSGTLEFNNESFNWTGVTQNGTSSACIRRSNSSFFSRLNWLTHLNFKYPALNVTMPNNEQFDKLYIWGVHHPGTDKDQIFLYAQSSGRITVSTKRSQQAVIPNIGSRPRIRNIPSRISIYWTIVKPGDILLINSTGNLIAPRGYFKIRSGKSSIMRSDAPIGKCKSECITPNGSIPNDKPFQNVNRITYGACPRYVKQRTLKLATGMRNVPEKQTRGIFGAIAGFIENGWEGMVDGWYGFRHQNSEGRGQAADLKSTQAAIDQINGKLNRLIGKTNEKFHQIEKEFSEVEGRIQDLEKYVEDTKIDLWSYNAELLVALENQHTIDLTDSEMNKLFEKTKKQLRENAEDMGNGCFKIYHKCDNACIGSIRNGTYDHDVYRDEALNNRFQIKGVELKSGYKDWILWISFAISCFLLCVALLGFIMWACQKGNIRCNICI

SEQ ID NO: 10055 - protein, 566 aa, Artificial Sequence; identical to SEQ ID NO: 9891
  derived and/or modified protein sequence (wt) from hemagglutinin__InfluenzaA__AGL09804

SEQ ID NO: 10056 - protein, 566 aa, Artificial Sequence; identical to SEQ ID NO: 9997
  derived and/or modified protein sequence (wt) from hemagglutinin__InfluenzaA__AGL09805

SEQ ID NO: 10057 - protein, 566 aa, Artificial Sequence; identical to SEQ ID NO: 10026
  derived and/or modified protein sequence (wt) from hemagglutinin__InfluenzaA__AGL09806

SEQ ID NO: 10058 - protein, 566 aa, Artificial Sequence; identical to SEQ ID NO: 9997
  derived and/or modified protein sequence (wt) from hemagglutinin__InfluenzaA__AGL09807

SEQ ID NO: 10059 - protein, 566 aa, Artificial Sequence
  derived and/or modified protein sequence (wt) from hemagglutinin__InfluenzaA__AGL09808
MKTIIALSYILCLVFAQKLPGNDNSTATLCLGHHAVPNGTIVKTITNDQIEVTNATELVQNSSIGEICDSPHQILDGENCTLIDALLGDPQCDGFQNKKWDLFVERSKAYSNCYPYDVPDYASLRSLVASSGTLEFNNESFNWAGVTQNGTSSACIRGSNSSFFSRLNWLTHLNFKYPALNVTMPNNEQFDKLYIWGVHHPGTDKDQIFLYAQSSGRITVSTKRSQQAVIPNVGSRPRIRNIPSRISIYWTIVKPGDILLINSTGNLIAPRGYFKIRSGKSSIMRSDAPIGKCKSECITPNGSIPNDKPFQNVNRITYGACPRYVKQSTLKLATGMRNVPEKQTRGIFGAIAGFIENGWEGMVDGWYGFRHQNSEGRGQAADLKSTQAAIDQINGKLNRLIGKTNEKFHQIEKEFSEVEGRIQDLEKYVEDTKIDLWSYNAELLVALENQHTIDLTDSEMNKLFEKTKKQLRENAEDMGNGCFKIYHKCDNACIGSIRNGTYDHDVYRDEALNNRFQIKGVELKSGYKDWILWISFAISCFLLCVALLGFIMWACQKGNIRCNICI

SEQ ID NO: 10060 - protein, 566 aa, Artificial Sequence
  derived and/or modified protein sequence (wt) from hemagglutinin__InfluenzaA__AGL09809
MKAILVVMLYTFATANADTLCIGYHANNSTDTVDTVLEKNVTVTHSVNLLEDKHNGKLCKLRGVAPLHLGKCNIAGWILGNPECESLSTASSWSYIVETSGSDNGTCYPGDFIDYEELREQLSSVSSFERFEIFPKTSSWPNHDSNKGVTAACPHAGAKGFYKNLIWLVKKGNSYPKLSISYINDKGKEVLVLWGIHHPSTTADQQSLYQNADTYVFVGTSRYSKKFKPEIAIRPKVRDQEGRMNYYWTLVEPGDKITFEATGNLVVPRYAFAMERNAGSGIIISDTPVHDCNTTCQTPKGAINTSLPFQNIHPITIGKCPKYVKSTKLRLATGLRNVPSIQSRGLFGAIAGFIEGGWTGMVDGWYGYHHQNEQGSGYAADLKSTQNAIDKITNKVNSVIEKMNTQFTAVGKEFNHLEKRIENLNKKVDDGFLDIWTYNAELLVLLENERTLDYHDSNVKNLYEKVRNQLKNNAKEIGNGCFEFYHKCDNTCMESVKNGTYDYPKYSEEAKLNREEIDGVKLESTRIYQILAIYSTAASSLVLVVSLGAISFWMCSNGSLQCRICI

SEQ ID NO: 10061 - protein, 566 aa, Artificial Sequence
  derived and/or modified protein sequence (wt) from hemagglutinin__InfluenzaA__AGL09810
MKTIIALSYILCLVFAQKLPGNDNSTATLCLGHHAVPNGTIVKTITNDRIEVTNATELVQNSSIGEICDSPHQILDGENCTLIDALLGDPQCDGFQNKKWDLFVERSKAYSNCYPYDVPDYASLRSLVASSGTLEFSNESFNWTGVTQNGTSSACIRRSNSSFFSRLNWLTHLNFKYPALNVTMPNNEQFDKLYIWGVHHPGTDKDQIFLYAQSSGRITVSTKRSQQAVIPNIGSRPRIRNIPSRISIYWTIVKPGDILLINSTGNLIAPRGYFKIRSGKSSIMRSDAPIGKCKSECITPNGSIPNDKPFQNVNRITYGTCPRYVKQSTLKLATGMRNVPEKQTRGIFGAIAGFIENGWEGMVDGWYGFRHQNSEGRGQAADLKSTQAAIDQINGKLNRLIGKTNEKFHQIEKEFSEVEGRIQDLEKYVEDTKIDLWSYNAELLVALENQHTIDLTDSEMNKLFEKTKKQLRENAEDMGNGCFKIYHKCDNACMGSIRNGTYDHDVYRDEALNNRFQIKGVELKSGYKDWILWISFAISCFLLCVALLGFIMWACQKGNIRCNICI

SEQ ID NO: 10062 - protein, 566 aa, Artificial Sequence; identical to SEQ ID NO: 9858
  derived and/or modified protein sequence (wt) from hemagglutinin__InfluenzaA__AGL09811

SEQ ID NO: 10063 - protein, 566 aa, Artificial Sequence
  derived and/or modified protein sequence (wt) from hemagglutinin__InfluenzaA__AGL09812
MKTIIALSYILCLVFAQKLPGNDNSTATLCLGHHAVPNGTIVKTITNDRIEVTNATELVQNSSIGEICDSPHQILDGENCTLIDALLGDPQCDGFQDKKWDLFVERSKAYSNCYPYDVPDYASLRSLVASSGTLEFNNESFNWAGVTQNGTSSACIRGSNSSFFSRLNWLTHLNFKYPALNVTMPNNEQFDKLYIWGVHHPGTDKDQIFLYAQSSGRITVSTKRSQQAVIPNIGSRPRIRNIPSRISIYWTIVKPGDILLINSTGNLIAPRGYFKIRSGKSSIMRSDAPIGKCKSECITPNGSIPNDKPFQNVNRITYGACPRYVKQSTLKLATGMRNVPEKQTRGIFGAIAGFIENGWEGMVDGWYGFRHQNSEGRGQAADLKSTQAAIDQINGKLNRLIGKTNEKFHQIEKEFSEVEGRIQDLEKYVEDTKIDLWSYNAELLVALENQHTIDLTDSEMNKLFEKTKKQLRENAEDMGNGCFKIYHKCDNACIGSIRNGTYDHDVYRDEALNNRFQIKGVELKSGYKDWILWISFAISCFLLCVALLGFIMWACQKGNIRCNICI

SEQ ID NO: 10064 - protein, 566 aa, Artificial Sequence; identical to SEQ ID NO: 9835
  derived and/or modified protein sequence (wt) from hemagglutinin__InfluenzaA__AGL09813

SEQ ID NO: 10065 - protein, 566 aa, Artificial Sequence; identical to SEQ ID NO: 9883
  derived and/or modified protein sequence (wt) from hemagglutinin__InfluenzaA__AGL09814

SEQ ID NO: 10066 - protein, 566 aa, Artificial Sequence
  derived and/or modified protein sequence (wt) from hemagglutinin__InfluenzaA__AGL09815
MKTIIALSYILCLVFAQKLPGNDNSTATLCLGHHAVPNGTIVKTITNDRIEVTNATELVQNSSIGEICDSPHQILDGENCTLIDALLGDPQCDGFQNKKWDLFVERSKAYSNCYPYDVPDYASLRSLVASSGTLEFNNESFNWTGVTQNGTSSACIRRSNSSFFSRLNWLTHLNFKYPALNVTMPNNEQFDKLYIWGVHHPGTDKDQIFLYAQSSGRITVSTKRSQQAVIPNIGSRPRIRSIPSRISIYWTIVKPGDILLINSTGNLIAPRGYFKIRSGKSSIMRSDAPIGKCKSECITPNGSIPNDKPFQNVNRITYGACPRYVKQSTLKLATGMRNVPEKQTRGIFGAIAGFIENGWEGMVDGWYGFRHQNSEGRGQAADLKSTQAAIDQINGKLNRLIGKTNEKFHQIEKEFSEVEGRIQDLEKYVEDTKIDLWSYNAELLVALENQHTIDLTDSEMNKLFEKTKKQLRENAEDMGNGCFKIYHKCDNACIGSIRNGTYDHDVYRDEALNNRFQIKGVELKSGYKDWILWISFAISCFLLCVALLGFIMWACQKGNIRCNICI

SEQ ID NO: 10067 - protein, 566 aa, Artificial Sequence; identical to SEQ ID NO: 9883
  derived and/or modified protein sequence (wt) from hemagglutinin__InfluenzaA__AGL09816

SEQ ID NO: 10068 - protein, 566 aa, Artificial Sequence
  derived and/or modified protein sequence (wt) from hemagglutinin__InfluenzaA__AGL09817
MKTIIALSYILCLVFAQELPGNDDSTATLCLGHHAVPNGTIVKTITNDQIEVTNATELVQSSSTGEICNSPHQILDGENCTLIDALLGDPQCDGFQNKKWDLFVERSKAHSNCYPYDVPDYASLRSLVASSGTLEFNSESFNWTGVTQNGTSSACIRRSNNSFFSRLNWLTHLNFKYPALNVTMPNNEQFDKLYIWGVHHPGTDKDQIFLYAQASGRITVSTKRSQQAVIPNIGSRPRVRNIPSRVSIYWTIVKPGDILLINSTGNLIAPRGYFKIRSGKSSIMRSDAPIGKCNSACITPNGSIPNDKPFQNVNRITYGACPRYVKQNTLKLATGMRNVPEKQTRGIFGAIAGFIENGWEGMVDGWYGFRHQNSEGRGQAADLKSTQAAIDQINGKLNRLIGKTNEKFHQIEKEFSEVEGRIQDLEKYVEDTKIDLWSYNAELLVALENQHTIDLTDSEMNKLFEKTKKQLRENAEDMGNGCFKIYHKCDNACIGSIRNGTYDHDVYRDEALNNRFQIKGVELKSGYKDWILWISFAISCFLLCVALLGFIMWACQKGNIRCNICI

SEQ ID NO: 10069 - protein, 566 aa, Artificial Sequence; identical to SEQ ID NO: 9883
  derived and/or modified protein sequence (wt) from hemagglutinin__InfluenzaA__AGL09818

SEQ ID NO: 10070 - protein, 566 aa, Artificial Sequence; identical to SEQ ID NO: 9994
  derived and/or modified protein sequence (wt) from hemagglutinin__InfluenzaA__AGL09819

SEQ ID NO: 10071 - protein, 566 aa, Artificial Sequence
  derived and/or modified protein sequence (wt) from hemagglutinin__InfluenzaA__AGL09820
MKTIIALSYILCLVFAQKLPGNDNSTATLCLGHHAVPNGTIVKTITNDQIEVTNATELVQNSSIGEICDSPHQILDGENCTLIDALLGDPQCDGFQNKKWDLFVERSKAYSNCYPYDVPDYASLRSLVASSGTLEFNNESFNWTGVTQNGTSSACIRGSNSSFFSRLNWLTHLNFKYPALNVTMPNNEQFDKLYIWGVHHPGTDKDQIFLYAQSSGRITVSTKRSQQAVIPNIGSRPRIRNIPSRISIYWTIVKPGDILLINSTGNLIAPRGYFKIRSGKSSIMRSDAPIGKCKSECITPNGSIPNDKPFQNVNRITYGACPRYVKQSTLKLATGMRNVPEKQTRGIFGAIAGFIENGWEGMVDGWYGFRHQNSEGRGQAADLKSTQAAIDQINGKLNRLIGKTNEKFHQIEKEFSEIEGRIQDLEKYVEDTKIDLWSYNAELLVALENQHTIDLTDSEMNKLFEKTKKQLRENAEDMGNGCFKIYHKCDNACIGSIRNGTYDHDVYRDEALNNRFQIKGVELKSGYKDWILWISFAISCFLLCVALLGFIMWACQKGNIRCNICI

SEQ ID NO: 10072 - protein, 566 aa, Artificial Sequence
  derived and/or modified protein sequence (wt) from hemagglutinin__InfluenzaA__AGL09821
MKTIIALSYILCLVFAQKLPGNDNSTATLCLGHHAVPNGTIVKTITNDRIEVTNATELVQNSSIGEICDSPHQILDGENCTLIDALLGDPQCDGFQNKKWDLFVERSKAYSNCYPYDVPDYASLRSLVASSGTLEFNNESFNWTGVTQNGTSSACIRRSNSSFFSRLNWLTHLNFKYPALNVTMPNNEQFDKLYIWGVHHPGTDKDQIFLYAQSSGRITVSTKRSQQAVIPNIGSRPRIRNIPSRISIYWTIVKPGDILLINSTGNLIAPRGYFKIRSGKSSIMRSDAPIGKCKSECITPNGSIPNDKPFQNVNRITYGACPRYVKQSTLKLATGMRNVPEKQTRGIFGAIAGFIENGWEGMVDGWYGFRHQNSEGRGQAADLKSTQAAIDQINGKLNRLIGKTNEKFHQIEKEFSEVEGRIQDLEKYVEDTKIDLWSYNAELLVALENQHTIDLTDSEMNKLFEKTKKQLRENAEDMGNGCFKIYHKCDNACIGSIRNGTYDHNVYRDEALNNRFQIKGIELKSGYKDWILWISFAISCFLLCVALLGFIMWACQKGNIRCNICI

SEQ ID NO: 10073 - protein, 566 aa, Artificial Sequence; identical to SEQ ID NO: 9997
  derived and/or modified protein sequence (wt) from hemagglutinin__InfluenzaA__AGL09822

SEQ ID NO: 10074 - protein, 566 aa, Artificial Sequence; identical to SEQ ID NO: 10040
  derived and/or modified protein sequence (wt) from hemagglutinin__InfluenzaA__AGL09823

SEQ ID NO: 10075 - protein, 566 aa, Artificial Sequence
  derived and/or modified protein sequence (wt) from hemagglutinin__InfluenzaA__AGL09824
MKAILVVLLYTFATANADTLCIGYHANNSTDTVDTVLEKNVTVTHSVNLLEDKHNGKLCKLRGVAPLHLGKCNIAGWILGNPECESLSTASSWSYIVETSSSDNGTCYPGDFINYEELREQLSSVSSFERFEIFPKTSSWPNHDSNKGVTAACPHAGTKSFYKNLIWLVKKGNSYPKLSKSYINDKGKEVLVLWGIHHPSTTADQQSLYQNADAYVFVGTSRYSKKFKPEIAIRPKVRDQEGRMNYYWTLIEPGDKITFEATGNLVVPRYAFAMERNAGSGIIISDTPVHDCNTTCQTPEGAINTSLPFQNIHPITIGKCPKYVKSTKLRLATGLRNVPSIQSRGLFGAIAGFIEGGWTGMVDGWYGYHHQNEQGSGYAADLKSTQNAIDKITNKVNSVIEKMNTQFTAVGKEFNHLEKRIENLNKKVDDGFLDIWTYNAELLVLLENERTLDYHDSNVKNLYEKVRNQLKNNAKEIGNGCFEFYHKCDNTCMESVKNGTYDYPKYSEEAKLNREKIDGVKLESTRIYQILAIYSTVASSLVLVVSLGAISFWMCSNGSLQCRICI

SEQ ID NO: 10076 - protein, 566 aa, Artificial Sequence; identical to SEQ ID NO: 9994
  derived and/or modified protein sequence (wt) from hemagglutinin__InfluenzaA__AGL09825

SEQ ID NO: 10077 - protein, 566 aa, Artificial Sequence; identical to SEQ ID NO: 10075
  derived and/or modified protein sequence (wt) from hemagglutinin__InfluenzaA__AGL09826

SEQ ID NO: 10078 - protein, 566 aa, Artificial Sequence; identical to SEQ ID NO: 9868
  derived and/or modified protein sequence (wt) from hemagglutinin__InfluenzaA__AGL09827

SEQ ID NO: 10079 - protein, 566 aa, Artificial Sequence
  derived and/or modified protein sequence (wt) from hemagglutinin__InfluenzaA__AGL09828
MKTIIALSYILCLVFAQKLPGNDNSTATLCLGHHAVPNGTIVKTITNDQIEVTNATELVQNSSIGEICDSPHQILDGENCTLIDALLGDPQCDGFQNKKWDLFVERSKAYSNCYPYDVPDYASLRSLVASSGTLEFNNESFNWAGVTQNGTSSACIRGSNSSFFSRLNWLTHLNFKYPALNVTMPNNEQFDKLYIWGVHHPGTDKDQIFLYAQSSGRITVSTKRSQQAVIPNIGSRPRIRNIPSRISIYWTIVKPGDILLINSTGNLIAPRGYFKIRSGKSSIMRSDAPIGKCKSECITPNGSIPNDKPFQNVNRITYGACPRYVKQSTLKLATGMRNVPEKQTRGIFGAIAGFIENGWEGMVDGWYGYRHQNSEGRGQAADLKSTQAAIDQINGKLNRLIGKTNEKFHQIEKEFSEVEGRIQDLEKYVEDTKIDLWSYNAELLVALENQHTIDLTDSEMNKLFEKTKKQLRENAEDMGNGCFKIYHKCDNACIGSIRNGTYDHDVYRDEALNNRFQIKGVELKSGYKDWILWISFAISCFLLCVALLGFIMWACQKGNIRCNICI

SEQ ID NO: 10080 - protein, 566 aa, Artificial Sequence
  derived and/or modified protein sequence (wt) from hemagglutinin__InfluenzaA__AGL09829
MKTIIALSYILCLVFAQKLPGNDNSTATLCLGHHAVPNGTIVKTITNDRIEVTNATELVQNSSIGEICDSPHQILDGENCTLIDALLGDPQCDGFQNKKWDLFVERSKAYSNCYPYDVPDYASLRSLVASSGTLEFNNESFNWAGVTQNGTSSACIRGSNSSFFSRLNWLTHLNFKYPALNVTMPNNEQFDKLYIWGVHHPGTDKDQIFLYAQSSGRITVSTKRSQQAVIPNIGSRPRIRNIPSRISIYWTIVKPGDILLINSTGNLIAPRGYFKIRSGKSSIMRSDAPIGKCKSECITPNGSIPNDKPFQNVNRITYGACPRYVKQSTLKLATGMRNVPEKQTRGIFGAIAGFIENGWEGMVDGWYGFRHQNSEGRGQAADLESTQAAIDQINGKLNRLIGKTNEKFHQIEKEFSEVEGRIQDLEKYVEDTKIDLWSYNAELLVALENQHTIDLTDSEMNKLFEKTKKQLRENAEDMGNGCFKIYHKCDNACIGSIRNGTYDHDVYRDEALNNRFQIKGVELKSGYKDWILWISFAISCFLLCVALLGFIMWACQKGNIRCNICI

SEQ ID NO: 10081 - protein, 566 aa, Artificial Sequence; identical to SEQ ID NO: 9883
  derived and/or modified protein sequence (wt) from hemagglutinin__InfluenzaA__AGL09830

SEQ ID NO: 10082 - protein, 566 aa, Artificial Sequence; identical to SEQ ID NO: 9993
  derived and/or modified protein sequence (wt) from hemagglutinin__InfluenzaA__AGL09831

SEQ ID NO: 10083 - protein, 566 aa, Artificial Sequence
  derived and/or modified protein sequence (wt) from hemagglutinin__InfluenzaA__AGL09832
MKTIIALSYILCLVFAQKLPGNDNSTATLCLGHHAVPNGTIVKTITNDRIEVTNATELVQNSSIGEICDSPHQILDGENCTLIDALLGDPQCDGFQNKKWDLFVERSKAYSNCYPYDVPDYASLRSLVASSGTLEFNNESFNWTGVTQNGTSSACIRRSNSSFFSRLNWLTHSNFKYPALNVTMPNNEQFDKLYIWGVHHPGTDKDQIFLYAQSSGRITVSTKRSQQAVIPNIGSRPRIRNIPSRISIYWTIVKPGDILLINSTGNLIAPRGYFKIRSGKSSIMRSDAPIGKCKSECITPNGSIPNDKPFQNVNRITYGACPRYVKQSTLKLATGMRNVPEKQTRGIFGAIAGFIENGWEGMVDGWYGFRHQNSEGRGQAADLKSTQAAIDQINGKLNRLIGKTNEKFHQIEKEFSEVEGRIQDLEKYVEDTKIDLWSYNAELLVALENQHTIDLTDSEMNKLFEKTKKQLRENAEDMGNGCFKIYHKCDNACIGTIRNGTYDHNVYRDEALNNRFQIKGVELKSGYKDWILWISFAISCFLLCVALLGFIMWACQKGNIRCNICI

SEQ ID NO: 10084 - protein, 566 aa, Artificial Sequence; identical to SEQ ID NO: 9994
  derived and/or modified protein sequence (wt) from hemagglutinin__InfluenzaA__AGL09833

SEQ ID NO: 10085 - protein, 566 aa, Artificial Sequence
  derived and/or modified protein sequence (wt) from hemagglutinin__InfluenzaA__AGL09881
MKTIIALSYILCLVFAQKLPGNDNSTATLCLGHHAVPNGTIVKTITNDRIEVTNATELVQNSSIGEICDSPHQILDGENCTLIDALLGDPQCDGFQNKKWDLFVERSKAYSNCYPYDVPDYASLRSLVASSGTLEFNNESFNWAGVTQNGASSACIRGSNSSFFSRLNWLTHLNFKYPALNVTMPNNEQFDKLYIWGVHHPGTDKDQIFLYAQSSGRITVSTKRSQQAVIPNIGSRPRIRNIPSRISIYWTIVKPGDILLINSTGNLIAPRGYFKIRSGKSSIMRSDAPIGKCKSECITPNGSIPNDKPFQNVNRITYGACPRYVKQSTLKLATGMRNVPEKQTRGIFGAIAGFIENGWEGMVDGWYGFRHQNSEGRGQAADLKSTQAAIDQINGKLNRLIGKTNEKFHQIEKEFSEVEGRIQDLEKYVEDTKIDLWSYNAELLVALENQHTIDLTDSEMNKLFEKTKKQLRENAEDMGNGCFKIYHKCDNACIGSIRNGTYDHDVYRDEALNNRFQIKGVELKSGYKDWILWISFAISCFLLCVALLGFIMWACQKGNIRCNICI

SEQ ID NO: 10086 - protein, 566 aa, Artificial Sequence; identical to SEQ ID NO: 9858
  derived and/or modified protein sequence (wt) from hemagglutinin__InfluenzaA__AGL09882

SEQ ID NO: 10087 - protein, 566 aa, Artificial Sequence; identical to SEQ ID NO: 9835
  derived and/or modified protein sequence (wt) from hemagglutinin__InfluenzaA__AGL09883

SEQ ID NO: 10088 - protein, 566 aa, Artificial Sequence; identical to SEQ ID NO: 9835
  derived and/or modified protein sequence (wt) from hemagglutinin__InfluenzaA__AGL09884

SEQ ID NO: 10089 - protein, 560 aa, Artificial Sequence; identical to SEQ ID NO: 9988
  derived and/or modified protein sequence (wt) from hemagglutinin__InfluenzaA__AGL44438

SEQ ID NO: 10090 - protein, 566 aa, Artificial Sequence
  derived and/or modified protein sequence (wt) from hemagglutinin__InfluenzaA__AGN69267
MKAILVVLLYTFTTGNADTLCIGYHANNSTDTVDTVLEKNVTVTHSVNLLEDRHNGKLCKLRGVAPLHLGKCNIAGWLLGNPECELLFTASSWSYIVETSNSDNGTCYPGDFINYEELREQLSSVSSFERFEIFPKASSWPNHETNRGVTAACPYAGANSFYRNLIWLVKKGNSYPKLSKSYINNKEKEVLVLWGIHHPPTSTDQQSLYQNADAYVFVGSSKYSKKFKPEIATRPKVRGQAGRMNYYWTLVEPGDTITFEATGNLVVPRYAFAMKRGSGSGIIISDTPVHDCNTTCQTPKGAINTSLPFQNIHPVTIGECPKYVKSTKLRMATGLRNIPSIQSRGLFGAIAGFIEGGWTGMIDGWYGYHHQNEQGSGYAADRKSTQNAIDGITNKVNSVIEKMNTQFTAVGKEFNHLEKRIENLNKKVDDGLLDVWTYNAELLVLLENERTLDYHDSNVKNLYEKVRSQLKNNAKEIGNGCFEFYHKCDDTCMESVKNGTYDYPKYSEEAKLNREEIDGVKLESTRIYQILAIYSTVASSLVLLVSLGAISFWMCSNGSLQCRICI

SEQ ID NO: 10091 - protein, 566 aa, Artificial Sequence
  derived and/or modified protein sequence (wt) from hemagglutinin__InfluenzaA__AGN69278
MKAILVVLLYTFTTANADTLCIGYHANNSTDTVDTVLEKNVTVTHSVNLLEDRHNGKLCKLRGVAPLHLGKCNIAGWLLGNPECELLFTASSWSYIVETSNSDNGTCYPGDFINYEELREQLSSVSSFERFEIFPKASSWPNHEPNRGVTAACPYAGANSFYRNLIWLVKKGNSYPKLSKSYINNKEKEVLVLWGIHHPPTSTDQQSLYQNADAYVFVGSSKYNKKFKPEIATRPKVRGQAGRMNYYWTLVEPGDTITFEATGNLVVPRYAFAMKRGSGSGIIISDTPVHDCNTTCQTPKGAINTSLPFQNIHPVTIGECPKYVKSTKLRMATGLRNIPSIQSRGLFGAIAGFIEGGWTGMIDGWYGYHHQNEQGSGYAADRKSTQNAIDGITNKVNSVIEKMNTQFTAVGKEFNHLEKRIENLNKKVDDGLLDVWTYNAELLVLLENERTLDYHDSNVKNLYEKVRSQLKNNAKEIGNGCFEFYHKCDDTCMESVKNGTYDYPKYSEEAKLNREEIDGVKLESTRIYQILAIYSTVASSLVLLVSLGAISFWMCSNGSLQCRICI

SEQ ID NO: 10092 - protein, 566 aa, Artificial Sequence
  derived and/or modified protein sequence (wt) from hemagglutinin__InfluenzaA__AGN69302
MEAKLFVLFCAFTALKADTICVGYHANNSTDTVDTILEKNVTVTHSVNLLENSHNGKLCSLNGKIPLQLGNCNVAGWILGNPKCDLLLTANSWSYIIETSNSKDGACYPGEFADYEELKEQLSTVSSFERFEIFPKATSWPNHDTTRGTTVACSHSGANSFYRNLLWIVKKGNSYPKLSKSYTNNKGKEVLVIWGVHHPPTDSDQQTLYQNNHTYVSVGSSKYYKRFTPEIVARPKVREQAGRMNYYWTLLDQGDTITFEATGNLIAPWHAFALKKGSSSGIMMSDAQVHNCTTKCQTPHGALKGNLPFQNVHPVTIGECPKYVKSTQLRMATGLRNIPSIQSRGLFGAIAGFIEGGWTGMVDGWYGYHHQNEQGSGYAADQKSTQIAIDGISNKVNSVIEKMNIQFTSVGKEFNSLEKRMENLNKKVDDGFLDVWTYNAELLILLENERTLDFHDLNVKNLYEKVKSQLRNNAKEIGNGCFEFYHKCDNECMESVKNGTYNYPKYSEESKLNREEIDGVKLESMGIHQILAIYSTVASSLVLLVSLGAISFWMCSNGSLQCRVCI

SEQ ID NO: 10093 - protein, 566 aa, Artificial Sequence; identical to SEQ ID NO: 10092
  derived and/or modified protein sequence (wt) from hemagglutinin__InfluenzaA__AGN69314

SEQ ID NO: 10094 - protein, 566 aa, Artificial Sequence; identical to SEQ ID NO: 10092
  derived and/or modified protein sequence (wt) from hemagglutinin__InfluenzaA__AGN69326

SEQ ID NO: 10095 - protein, 566 aa, Artificial Sequence
  derived and/or modified protein sequence (wt) from hemagglutinin__InfluenzaA__AGN69338
MEAKLFVLFCAFTALKADTICVGYHANNSTDTVDTILEKNVTVTHSVNLLENSHNGKLCSLNGKIPLQLGNCNVAGWILGNPKCDLLLTANSWSYIIETSNSKNGACYPGEFADYEELKEQLSTVSSFERFEIFPKATSWPNHDTTRGTTVACSHSGANSFYRNLLWIVKKGNSYPKLSKSYTNNKGKEVLVIWGVHHPPTDSDQQTLYQNNHTYVSVGSSKYYKRFTPEIVARPKVREQAGRMNYYWTLLHQGDTITFEATGNLIAPWHAFALNEGSSSGIMRSDAQVHNCTTKCQTPHGALKGNLPFQNVHPVTIGECPKYVKSTQLRMATGLRNIPSIQSRGLFGAIAGFIEGGWTGMVDGWYGYHHRNEQGSGYAADQKSTQIAIDGISNKVNSVIEKMNIQFTSVGKECNSLEKRMENLNKKVDDGFLDVWTYNAELLILLENERTLDFHDLNVKNLYEKVKSQLRNNAKEIGNGCFEFYHKCDNECMESVKNGTYNYPKYSEESKLNREEIDGVKLESMGIHQILAIYSTVASSLVLLVSLGAISFWMCSNGSLQCRVCI

SEQ ID NO: 10096 - protein, 566 aa, Artificial Sequence
  derived and/or modified protein sequence (wt) from hemagglutinin__InfluenzaA__AGO00265
MKARLLVLLCAIAATDADTICIGYHANNSTDTVDTILEKNVTVTHSVNLLEDSHNGKLCRLKGIAPLQLGKCNIAGWILGNPECESLLSERSWSYIVETPNSENGTCYPGDFIDYEELREQLSSVTSFERFEIFPKETSWPKHNTTKGVTAACSHAGKCSFYRNLLWLTEKDGSYPNLNNSYVNKKGKEVLVLWGVHHPSNIKDQQTLYQKENAYVSVVSSNYNRRFTPEIAERPKVRGQAGRMNYYWTLLEPGDTIIFEANGNLIAPWYAFALSRGFGSGIITSNASMHECNTKCQTPQGAINSSLPFQNIHPVTIGECPKYVRSTKLRMVTGLRNIPSIQSRGLFGAIAGFIEGGWTGMIDGWYGYHHQNEQGSGYAADQKSTQNAINGITNKVNSVIEKMNTQFTAVGKEFNNLEKRMENLNKKVDDGFLDIWTYNAELLVLLENERTLDFHDSNVKNLYEKVKSQLRNNAKEIGNGCFEFYHKCNNECMESVKNGTYDYPKYSEESKLNREKIDGVKLESMGVYQILAIYSTVASSLVLLVSLGAISFWMCSNGSLQCRICI

SEQ ID NO: 10097 - protein, 566 aa, Artificial Sequence
  derived and/or modified protein sequence (wt) from hemagglutinin__InfluenzaA__AGO00277
MKAKLLILLCALSATDADTICIGYHANNSTDTVDTVLEKNVTVTHSVNLLEDSHNGKLCRLKGIAPLQLGKCNIAGWILGNPECESLLSKRSWSYIAETPNSENGTCYPGDFADYEELREQLSSVSSFERFEIFPKERSWPNHNINIGVTAACSHAGKSSFYKNLLWLTEKDGSYPNLNKSYVNKKEKEVLVLWGVHHPSNIENQKTLYRKENAYVSVVSSNYNRRFTPEIAERPKVRGQAGRMNYYWTLLEPGDTIIFEANGNLIAPWYAFALSRGLGSGIITSNASMDECDTKCQTPQGAINSSLPFQNIHPFTIGECPKYVRSTKLRMVTGLRNIPSIQSRGLFGAIAGFIEGGWAGMIDGWYGYHHQNEQGSGYAADQKSTQNAINGITNKVNSVIEKMNTQFTAVGKEFNKLEKRMENLNKKVDDGFLDIWTYNAELLVLLENERTLDFHDSNVKNLYEKVKNQLRNNAKEIGNGCFEFYHKCNNECMESVKNGTYDYPKYSEESKLNREKIDGVKLESMGVYQILAIYSTVASSLVLLVSLGAISFWMCSNGSLQCRICI

SEQ ID NO: 10098 - protein, 566 aa, Artificial Sequence; identical to SEQ ID NO: 1634
  derived and/or modified protein sequence (wt) from hemagglutinin__InfluenzaA__AGO00289

SEQ ID NO: 10099 - protein, 565 aa, Artificial Sequence
  derived and/or modified protein sequence (wt) from hemagglutinin__InfluenzaA__AGO00301
MKAKLLILLCALSATDADTICIGYHANNSTDTVDTVLEKNVTVTHSVNLLEDSHNGKLCRLKGKAPLQLGNCNIAGWVLGNPECESLLSNRSWSYIAETPNSENGTCYPGDFADYEELREQLSSVSSFERFEIFPKERSWPNHTTRGVTAACPHARKSSFYKNLVWLTEANGSYPNLSRSYVNNQEKEVLVLWGVHHPSNIEEQRALYRKDNAYVSVVSSNYNRRFTPEIAKRPKVRDQSGRMNYYWTLLEPGDTIIFEATGNLIAPWYAFALSRGPGSGIITSNAPLDECDTKCQTPQGAINSSLPFQNIHPVTIGECPKYVRSTKLRMVTGLRNIPSVQSRGLFGAIAGFIEGGWTGMMDGWYGYHHQNEQGSGYAADQKSTQNAINGITNKVNSVIEKMNTQFTAVGKEFNKLEKRMENLNKKVDDGFMDIWTYNAELLVLLENERTLDFHDSNVKNLYEKVKNQLRNNAKELGNGCFEFYHKCDNECMESVKNGTYDYPKYSEESKLNREKIDGVKLESMGVYRILAIYSTVASSLVLLVSLGAISFWMCSNGSLQCRICI

SEQ ID NO: 10100 - protein, 566 aa, Artificial Sequence
  derived and/or modified protein sequence (wt) from hemagglutinin__InfluenzaA__AGO00313
MKTIIALSYIFCQVLAQNLPGNDNSTATLCLGHHAVPNGTLVKTITNDQIEVTNATELVQSSSTGRICDSPHRILDGKNCTLIDALLGDPHCDGFQNEKWDLFVERSKAFSNCYPYDVPDYASLRSLVASSGTLEFINEGFNWTGVTQNGGSYACKRGPDNSFFSRLNWLYKSESTYPVLNVTMPNNDNFDKLYIWGVHHPSTDKEQTNLYVQASGRVTVSTKRSQQTIIPNVGSRPWVRGLSSGISIYWTIVKPGDILLINSNGNLIAPRGYFKIRTGKSSIMRSDAPIGTCSSECITPNGSIPNDKPFQNVNKITYGACPKYVKQNTLKLATGMRNVPEKQTRGIFGAIAGFIENGWEGMIDGWYGFRHQNSEGTGQAADLKSTQAAIDQINGKLNRVIEKTNEKFHQIEKEFSEVEGRIQDLEKYVEDTKIDLWSYNAELLVALENQHTIDLTDSEMNKLFEKTRRQLRENAEDMGNGCFKIYHKCDNACIGSIRNGTYDHDVYRDEALNNRFQIKGVELKSGYKDWILWISFAISCFLLCVVLLGFIMWACQKGNIRCNICI

SEQ ID NO: 10101 - protein, 567 aa, Artificial Sequence; identical to SEQ ID NO: 9097
  derived and/or modified protein sequence (wt) from hemagglutinin__InfluenzaA__AGO00325

SEQ ID NO: 10102 - protein, 565 aa, Artificial Sequence
  derived and/or modified protein sequence (wt) from hemagglutinin__InfluenzaA__AGO00337
MKANLLVLLSALAAADADTICIGYHANNSTDTVDTVLEKNVTVTHSVNLLEDSHNGKLCRLKGIAPLQLGKCNIAGWLLGNPECDPLLPVRSWSYIVETPNSENGICYPGDFIDYEELREQLSSVSSFERFEIFPKESSWPNHNTNGVTAACSHEGKSSFYRNLLWLTEKEGSYPKLKNSYVNKKGKEVLVLWGIHHPPNSKEQQNLYQNENAYVSVVTSNYNRRFTPEIAERPKVRDQAGRMNYYWTLLKPGDTIIFEANGNLIAPMYAFALSRGFGSGIITSNASMHECNTKCQTPLGAINSSLPYQNVHPVTIGECPKYVRSAKLRMVTGLRNTPSIQSRGLFGAIAGFIEGGWTGMIDGWYGYHHQNEQGSGYAADQKSTQNAINGITNKVNTVIEKMNIQFTAVGKEFNKLEKRMENLNKKVDDGFLDIWTYNAELLVLLENERTLDFHDSNVKNLYEKVKSQLKNNAKEIGNGCFEFYHKCDNECMESVRNGTYDYPKYSEESKLNREKVDGVKLESMGIYQILAIYSTVASSLVLLVSLGAISFWMCSNGSLQCRICI

SEQ ID NO: 10103 - protein, 565 aa, Artificial Sequence; identical to SEQ ID NO: 3278
  derived and/or modified protein sequence (wt) from hemagglutinin__InfluenzaA__AGO00349

SEQ ID NO: 10104 - protein, 565 aa, Artificial Sequence
  derived and/or modified protein sequence (wt) from hemagglutinin__InfluenzaA__AGO00373
MKANLLVLLCALAAADADTICIGYHANNSTDTVDTVLEKNVTVTHSVNLLEDSHNGKLCRLKGIAPLQLGKCNIAGWLLGNPECDPLLPVRSWSYIVETPNSENGICYPGDFIDYEELREQLSSVSSFERFEIFPKESSWPDHNTNGVTAACSHEGKSSFYRNLLWLTEKESSYPKLKNSYVNKKGKEVLVLWGIHHPPNSKEQQNLYQNENAYVSVVTSNYNRRFTPEIAERPKVRDQAGRMNYYWTLLKPGDTIIFEANGNLIAPMYAFALSRGFGSGIITSNASMHECNTKCQTPLGAINSSLPYQNIHPVTIGECPKYVRSAKLRMVTGLRNIPSIQSRGLFGAIAGFIEGGWTGMIDGWYGYHHQNEQGSGYAADQKSTQNAINGITNKVNTVIEKMNIQFTAVGKEFNKLEKRMENLNKKVDDGFLDIWTYNAELLVLLENERTLDFHDSNMKNLYEKVKSQLKNNAKEIGNGCFEFYHKCDNECMESVRNGTYDYPKYSEESKLNREKVDGVKLESMGIYQILAIYSTVASSLVLLVSLGAISFWMCSNGSLQCRICI

SEQ ID NO: 10105 - protein, 565 aa, Artificial Sequence
  derived and/or modified protein sequence (wt) from hemagglutinin__InfluenzaA__AGO00385
MKANLLVLLCALAAADADTICIGYHANNSTDTVDTVLEKNVTVTHSVNLLEDSHNGKLCRLKGIAPLQLGKCNIAGWLLGNPECDPLLPVGSWSYIVETPNSENGICYPGDFIDYEELREQLSSVSSFERFEIFPKESSWPDHNTNGVTAACSHEGKSSFYRNLLWLTEKESSYPKLKNSYVNKKGKEVLVLWGIHHPPNSKEQQNLYQNENAYVSVVTSNYNRRFTPEIAERPKVRDQAGRMNYYWTLLKPGDTIIFEANGNLIAPMYAFALSRGFGSGIITSNASMHECNTKCQTPLGAINSSLPYQNIHPVTIGECPKYVRSAKLRMVTGLRNIPSIQSRGLFGAIAGFIEGGWTGMIDGWYGYHHQNEQGSGYAADQKSTQNAINGITNKVNTVIEKMNIQFTAVGKEFNKLEKRMENLNKKVDDGFLDIWTYNAELLVLLENERTLDFHDSNVKNLYEKVKSQLKNNAKEIGNGCFEFYHKCDNECMESVRNGTYDYPKYSEESKLNREKVDGVKLESMGIYQILAIYSTVASSLVLLVSLGAISFWMCSNGSLQCRICI

SEQ ID NO: 10106 - protein, 565 aa, Artificial Sequence
  derived and/or modified protein sequence (wt) from hemagglutinin__InfluenzaA__AGO00397
MKANLLVLLCALAAADADTICIGYHANNSTDTVDTVLEKNVTVTHSVNLLEDSHNGKLCRLKGIAPLQLGKCNIAGWLLGNPECDPLLPVGSWSYIVETPNSENGICYPGDFIDYEELREQLSSVSSFERFEIFPKESSWPDHNTNGVTAACSHEGKSSFYRNLLWLTEKESSYPKLKNSYVNKKGKEVLVLWGIHHPPNSKEQQNLYQNENAYVSVVTSNYNRRFTPEIAERPKVKDQAGRMNYYWTLLKPGDTIIFEANGNLIAPMYAFALSRGFGSGIITSNASMHECNTKCQTPLGAINSSLPYQNIHPVTIGECPKYVRSAKLRMVTGLRNIPSIQSRGLFGAIAGFIEGGWTGMIDGWYGYHHQNEQGSGYAADQKSTQNAINGITNKVNTVIEKMNIQFTAVGKEFNKLEKRMENLNKKVDDGFLDIWTYNAELLVLLENERTLDFHDSNVKNLYEKVKSQLKNNAKEIGNGCFEFYHKCDNECMESVRNGTYDYPKYSEESKLNREKVDGVKLESMGIYQILAIYSTVASSLVLLVSLGAISFWMCSNGSLQCRICI

SEQ ID NO: 10107 - protein, 565 aa, Artificial Sequence
  derived and/or modified protein sequence (wt) from hemagglutinin__InfluenzaA__AGO00409
MKANLLVLLCALAAADADTICIGYHANNSTDTVDTVLEKNVTVTHSVNLLEDSHNGKLCRLKGIAPLQLGKCNIAGWLLGNPECDPLLPVGSWSYIVETPNSENGICYPGDFIDYEELREQLSSVSSFERFEIFPKESSWPDHNTNGVTAACSHEGKNSFYRNLLWLTEKKSSYPELKNSYVNKKGKEVLVLWGIHHPPNSKEQQNLYQNENAYVSVVTSNYNRRFTPEIAERPKVKDQAGRMNYYWTLLKPGDTIIFEANGNLIAPMYAFALSRGFGSGIITSNASMHECNTKCQTPLGAINSSLPYQNIHPVTIGECPKYVRSAKLRMVTGLRNIPSIQSRGLFGAIAGFIEGGWTGMIDGWYGYHHQNEQGSGYAADQKSTQNAINGITNKVNTVIEKMNIQFTAVGKEFNKLEKRMENLNKKVDDGFLDIWTYNAELLVLLENERTLDFHDSNVKNLYEKVKSQLKNNAKEIGNGCFEFYHKCDNECMESVRNGTYDYPKYSEESKLNREKVDGVKLESMGIYQILAIYSTVASSLVLLVSLGAISFWMCSNGSLQCRICI

SEQ ID NO: 10108 - protein, 565 aa, Artificial Sequence
  derived and/or modified protein sequence (wt) from hemagglutinin__InfluenzaA__AGO00421
MKANLLVLLCALAAADADTICIGYHANNSTDTVDTVLEKNVTVTHSVNLLEDSHNGKLCKLKGIAPLQLGKCNIAGWLLGNPGCDPLLPVGSWSYIVETPNSENGICYPGDFIDYEELREQLSSVSSFERFKIFPKESSWPDHNTTGVTAACSHEGKNSFYRNLLWLTKKESSYPELKNSYVNKKRKEVLVLWGIHHPPNSKEQQNLYQNENAYVSVVTSNYNRRFTPEIAERPKVKGQAGRMNYYWTLLKPGDTIIFEANGNLIAPMYAFALSRGFGSGIITSNASMHECNTKCQTPLGAINSSLPYQNIHPVTIGECPKYVRSAKLRMVTGLRNIPSIQSRGLFGAIAGFIEGGWTGMIDGWYGYHHQNEQGSGYAADQKSTQNAINGITNKVNTVIEKMNIQFTAVGKEFNKLEKRMENLNKKVDDGFLDIWTYNAELLVLLENERTLDFHDSNVKNLYEKVKSQLKNNAKEIGNGCFEFYHKCDNECMESVRNGTYDYPKYSEESKLNREKVDGVKLESMGIYQILAIYSTVASSLVLLVSLGAISFWMCSNGSLQCRICI

SEQ ID NO: 10109 - protein, 565 aa, Artificial Sequence
  derived and/or modified protein sequence (wt) from hemagglutinin__InfluenzaA__AGO00433
MKANLLVLLCALAAADADTICIGYHANNSTDTVDTVLEKNVTVTHSVNLLEDSHNGKLCRLKGIAPLQLGKCNIAGWLLGNPECDPLLPVRSWSYIVETPNSENGICYPGDFIDYEELREQLSSVSSFERFEIFPKESSWPNHNTNGVTAACSHEGKSSFYRNLLWLTEKEGSYPKLENSYVNKKGKEVLVLWGIHHPPNSKEQQNLYQNENAYVSVVTSNYNRRFTPEIAERPKVRDQAGRMNYYWTLLKPGDTIIFEANGNLIAPMYAFALSRGFGSGIITSNASMHECNTKCQTPLGAINSSLPYQNIHPVTIGECPKYVRSAKLRMVTGLRNIPSIQSRGLFGAIAGFIEGGWTGMIDGWYGYHHQNEQGSGYAADQKSTQNAINGITNKVNTVIEKMNIQFTAVGKEFNKLEKRMENLNKKVDDGFLDIWTYNAELLVLLENERTLDFHDSNVKNLYEKVKSQLKNNAKEIGNGCFEFYHKCDNECMESVRNGTYDYPKYSEESKLNREKVDGVKLESMGIYQILAIYSTVASSLVLLVSLGAISFWMCSNGSLQCRICI

SEQ ID NO: 10110 - protein, 565 aa, Artificial Sequence
  derived and/or modified protein sequence (wt) from hemagglutinin__InfluenzaA__AGO00445
MKANLLVLLCALAAADADTICIGYHANNSTDTVDTVLEKNVTVTHSVNLLEDSHNGKLCRLKGIAPLQLGKCNIAGWLLGNPECDPLLPVRSWSYIVETPNSENGICYPGDFIDYEELREQLSSVSSFERFEIFPKESSWPNHNTNGVTAACSHEGKSSFYRNLLWLTEKEGSYPTLKNSYVNKKGKEVLVLWGIHHPPNSKEQQNLYQNENAYVSVVTSNYNRRFTPEIAERPKVRDQAGRMNYYWTLLKPGDTIIFEANGNLIAPMYAFALSRGFGSGIITSNASMHECNTKCQTPLGAINSSLPYQNIHPVTIGECPKYVRSAKLRMVTGLRNIPSIQSRGLFGAIAGFIEGGWTGMIDGWYGYHHQNEQGSGYAADQKSTQNAINGITNKVNTVIEKMNIQFTAVGKEFNKLEKRMENLNKKVDDGFLDIWTYNAELLVLLENERTLDFHDSNVKNLYEKVKSQLKNNAKEIGNGCFEFYHKCDNECMESVRNGTYDYPKYSEESKLNREKVDGVKLESMGIYQILAIYSTVASSLVLLVSLGAISFWMCSNGSLQCRICI

SEQ ID NO: 10111 - protein, 566 aa, Artificial Sequence
  derived and/or modified protein sequence (wt) from hemagglutinin__InfluenzaA__AGO02696
MKAILVVMLYTFATANADTLCIGYHANNSTDTVDTVLEKNVTVTHSVNLLEDKHNGKLCKLRGVAPLHLGKCNIAGWILGNPECESLSTASSWSYIVETSSSDNGTCYPGDFIDYEELREQLSSVSSFERFEIFPKTSSWPNHDSNKGVTAACPHAGAKGFYKNLIWLVKKGNSYPKLSISYINDKGKEVLVLWGIHHPSTTADQQSLYQNADTYVFVGTSRYSKKFKPEIAIRPKVRDQEGRMNYYWTLVEPGDKITFEATGNLVVPRYAFAMERNAGSGIIISDTPVHDCNTTCQTPKGAINTSLPFQNIHPITIGKCPKYVKSTKLRLATGLRNVPSIQSRGLFGAIAGFIEGGWTGMVDGWYGYHHQNEQGSGYAADLKSTQNAIDKITNKVNSVIEKMNTQFTAVGKEFNHLEKRIENLNKKVDDGFLDIWTYNAELLVLLENERTLDYHDSNVKNLYEKVRNQLKNNAKEIGNGCFEFYHKCDNTCMESVKNGTYDYPKYSEEAKLNREEIDGVKLESTRIYQILAIYSTAASSLVLVVSLGAISFWMCSNGSLQCRICI

SEQ ID NO: 10112 - protein, 566 aa, Artificial Sequence; identical to SEQ ID NO: 10040
  derived and/or modified protein sequence (wt) from hemagglutinin__InfluenzaA__AGO02697

SEQ ID NO: 10113 - protein, 566 aa, Artificial Sequence; identical to SEQ ID NO: 9858
  derived and/or modified protein sequence (wt) from hemagglutinin__InfluenzaA__AGO02698

SEQ ID NO: 10114 - protein, 566 aa, Artificial Sequence; identical to SEQ ID NO: 9858
  derived and/or modified protein sequence (wt) from hemagglutinin__InfluenzaA__AGO02699

SEQ ID NO: 10115 - protein, 566 aa, Artificial Sequence
  derived and/or modified protein sequence (wt) from hemagglutinin__InfluenzaA__AGO02700
MKAILVVLLYTFATANADTLCIGYHANNSTDTVDTVLEKNVTVTHSVNLLEDKHNGKLCKLRGVAPLHLGKCNIAGWILGNPECESLSTASSWSYIVETSSSDNGTCYPGDFINYEELREQLSSVSSFERFEIFPKTSSWPNHDSNKGVTAACPQAGAKSFYKNLIWLVKKGNSYPKLSKSYINDKGKEVLVLWGIHHPSTSADQQSLYQNADAYVFVGTSKYSKKFKPEIAVRPKVRDQEGRMNYYWTLVEPGDKITFEATGNLLVPRYAFAMERNAGSGIIISDTPVHDCNTTCQTPKGAINTSLPFQNIHPITIGKCPKYVKSTKLRLATGLRNVPSIQSRGLFGAIAGFIEGGWTGMVDGWYGYHHQNAQGSGYAADLKSTQNAIDKITNKVNSVIEKMNTQFTAVGKEFNHLEKRIENLNKKVDDGFLDIWTYNAELLVLLENERTLDYHDSNVKNLYEKVRSQLKNNAKEIGNGCFEFYHKCDNTCMESVKNGTYDYPRYSEEAKLNREEIDGIKLESTRIYQILAIYSTVASSLVLIVSLGAISFWMCSNGSLQCRICI

SEQ ID NO: 10116 - protein, 566 aa, Artificial Sequence
  derived and/or modified protein sequence (wt) from hemagglutinin__InfluenzaA__AGO02701
MKAILVVLLYTFATANADTLCIGYHANNSTDTVDTVLEKNVTVTHSVNLLEDKHNGKLCKLRGVAPLHLGKCNIAGWILGNPECESLSTASSWSYIVETSSSDNGTCYPGDFINYEELREQLSSVSHFERFEIFPKTSSWPNHDSNKGVTAACPHAGAKSFYKNLIWLVKKGNSYPKLSKSYINDKGKEVLVLWGIHHPSTSADQQSLYQNADAYVFVGTSKYSKKFKPEIAVRPKVRDQEGRMNYYWTLVEPGDKITFEATGNLLVPRYAFAMERNAGSGIIISDTPVHDCNTTCQTPKGAINTSLPFQNIHPITIGKCPKYVKSTKLRLATGLRNVPSIQSRGLFGAIAGFIEGGWTGMVDGWYGYHHQNGQGSGYAADLKSTQNAIDKITNKVNSVIEKMNTQFTAVGKEFNHLEKRIENLNKKVDDGFLDIWTYNAELLVLLENERTLDYHDSNVKNLYEKVRSQLKNNAKEIGNGCFEFYHKCDNTCMESVKNGTYDYPKYSEEAKLNREEIDGVKLESTRIYQILAIYSTVASSLVLVVSLGAISFWMCSNGSLQCRICI

SEQ ID NO: 10117 - protein, 560 aa, Artificial Sequence; identical to SEQ ID NO: 9988
  derived and/or modified protein sequence (wt) from hemagglutinin__InfluenzaA__AGO51374

SEQ ID NO: 10118 - protein, 566 aa, Artificial Sequence
  derived and/or modified protein sequence (wt) from hemagglutinin__InfluenzaA__AGO86686
MKTIIALSYILCLAFAQKLPGNDNSTATLCLGHHAVPNGTLVKTITNDQIEVTNATELVQSSSTGRICDSPHQILDGENCTLIDALLGDPHCDGFQNKEWDLFVERSKAYSNCYPYDVPDYASLRSLVASSGTLEFNNESFNWTGVAQNGTSSACKRRSIKSFFSRLNWLHQLENRYPALNVTMPNNDKFDKLYIWGVHHPSTDSDQISVYAQASGRVTVSTKRSQQTVIPNIGSRPWVRGISSRISIYWTIVKPGDILLINSTGNLIAPRGYFKIRSGKSSIMRSDAPIGKCNSECITPNGSIPNDKPFQNVNRITYGACPRYVKQNTLKLATGMRNVPEKQTRGIFGAIAGFIENGWEGMMDGWYGFRHQNSEGTGQAADLKSTQAAINQINGKLNKLIEKTNEKFHQIEKEFSEVEGRIQDLEKYVEDTKIDLWSYNAELLVALENQHTIDLTDSEMNKLFERTRKQLRENAEDMGNGCFKTYHKCDNACIGSIRNGTYDHDVYRDEALNNRFQIKGVELKSGYKDWILWISFAISCFLLCVVLLGFIMWACQKGNIRCNICI

SEQ ID NO: 10119 - protein, 566 aa, Artificial Sequence; identical to SEQ ID NO: 10040
  derived and/or modified protein sequence (wt) from hemagglutinin__InfluenzaA__AGQ16240

SEQ ID NO: 10120 - protein, 566 aa, Artificial Sequence; identical to SEQ ID NO: 10040
  derived and/or modified protein sequence (wt) from hemagglutinin__InfluenzaA__AGQ16241

SEQ ID NO: 10121 - protein, 566 aa, Artificial Sequence
  derived and/or modified protein sequence (wt) from hemagglutinin__InfluenzaA__AGQ16242
MKAILVVLLYTFATANADTLCIGYHANNSTDTVDTVLEKNVTVTHSVNLLEDKHNGKLCKLRGVAPLHLGKCNIAGWILGNPECESLSTASSWSYIVETSSSDNGTCYPGDFINYEELREQLSSVSSFERFEIFPKTSSWPNHDSNKGVTAACPHAGAKSFYKNLIWLVKKGNSYPKLSTSYINDKGKEILVLWGIHHPSTTADQQSLYQNADAYVFVGTSRYSKKFKPEIAIRPKVRDQEGRMNYYWTLVEPGDKITFEATGNLVVPRYAFAMERNAGSGIIISDTPVHDCNTTCQTPEGAINTSLPFQNIHPITIGKCPKYVKSTKLRLATGLRNVPSIQSRGLFGAIAGFIEGGWTGMVDGWYGYHHQNEQGSGYAADLKSTQNAIDKITNKVNSVIEKMNTQFTAVGKEFNHLEKRIENLNKKVDDGFLDIWTYNAELLVLLENERTLDYHDSNVKNLYEKVRNQLKNNAKEIGNGCFEFYHKCDNTCMESVKNGTYDYPKYSEEAKLNREKIDGVKLESTRIYQILAIYSTVASSLVLVVSLGAISFWMCSNGSLQCRICI

SEQ ID NO: 10122 - protein, 566 aa, Artificial Sequence; identical to SEQ ID NO: 10060
  derived and/or modified protein sequence (wt) from hemagglutinin__InfluenzaA__AGQ16243

SEQ ID NO: 10123 - protein, 566 aa, Artificial Sequence
  derived and/or modified protein sequence (wt) from hemagglutinin__InfluenzaA__AGQ16245
MKAILVVLLYTFATANADTLCIGYHANNSTDTVDTVLEKNVTVTHSVNLLEDKHNGKLCKLRGVAPLHLGKCNIAGWILGNPECESLSTASSWSYIVETSSSDNGTCYPGDFINYEELREQLSSVSSFERFEIFPKTSSWPNHDSNKGVTAACPHAGAKSFYKNLIWLVKKGNSYPKLSKSYINDKGKEVLVLWGIHHPSTTADQQSLYQNADAYVFVGTSRYSKKFKPEIAIRPKVRDQEGRMNYYWTLIEPGDKITFEATGNLVVPRYAFAMERNAGSGIIISDTPVHDCNTTCQTPEGAINTSLPFQNIHPITIGKCPKYVKSTKLRLATGLRNVPSIQSRGLFGAIAGFIEGGWTGMVDGWYGYHHQNEQGSGYAADLKSTQNAIDKITNKVNSVIEKMNTQFTAVGKEFNHLEKRIENLNKKVDDGFLDIWTYNAELLVLLENERTLDYHDSNVKNLYEKVRNQLKNNAKEIGNGCFEFYHKCDNTCMESVKNGTYDYPKYSEEAKLNREKIDGVKLESTRIYQILAIYSTVASSLVLVVSLGAISFWMCSNGSLQCRICI

SEQ ID NO: 10124 - protein, 566 aa, Artificial Sequence; identical to SEQ ID NO: 10060
  derived and/or modified protein sequence (wt) from hemagglutinin__InfluenzaA__AGQ16247

SEQ ID NO: 10125 - protein, 566 aa, Artificial Sequence
  derived and/or modified protein sequence (wt) from hemagglutinin__InfluenzaA__AGQ16248
MQAILVVLLYTFATATADTLCIGYHANNSTDTVDTVLEKNVTVTHSVNLLEDKHNGKLCKLRGVAPLHLGKCNIAGWILGNPECESLSTASSWSYIVETSSSDNGTCYPGDFINYEELREQLSSVSSFERFEIFPKTSSWPNHDSNKGVTAACPHAGAKSFYKNLIWLVKKGNSYPKLSQSYINDKGKEVLVLWGIHHPSTTADQQSLYQNADAYVFVGTSRYSKKFKPEIAIRPKVRDQEGRMNYYWTLVEPGDKITFEATGNLVVPRYAFTMERNAGSGIIISDTPIHDCNTTCQTPEGAINTSLPFQNIHPITIGKCPKYVKSTKLRLATGLRNVPSIQSRGLFGAIAGFIEGGWTGMVDGWYGYHHQNEQGSGYAADLKSTQNAIDKITNKVNSVIEKMNTQFTAVGKEFNHLEKRIENLNKKVDDGFLDIWTYNAELLVLLENERTLDYHDSNVKNLYEKVRNQLKNNAKEIGNGCFEFYHKCDNTCMESVKNGTYDYPKYSEEAKLNREKIDGVKLESTRIYQILAIYSTVASSLVLVVSLGAISFWMCSNGSLQCRICI

SEQ ID NO: 10126 - protein, 566 aa, Artificial Sequence; identical to SEQ ID NO: 9858
  derived and/or modified protein sequence (wt) from hemagglutinin__InfluenzaA__AGQ16329

SEQ ID NO: 10127 - protein, 566 aa, Artificial Sequence; identical to SEQ ID NO: 9883
  derived and/or modified protein sequence (wt) from hemagglutinin__InfluenzaA__AGQ16331

SEQ ID NO: 10128 - protein, 566 aa, Artificial Sequence; identical to SEQ ID NO: 9858
  derived and/or modified protein sequence (wt) from hemagglutinin__InfluenzaA__AGQ16332

SEQ ID NO: 10129 - protein, 566 aa, Artificial Sequence; identical to SEQ ID NO: 9858
  derived and/or modified protein sequence (wt) from hemagglutinin__InfluenzaA__AGQ16333

SEQ ID NO: 10130 - protein, 566 aa, Artificial Sequence
  derived and/or modified protein sequence (wt) from hemagglutinin__InfluenzaA__AGQ16335
MKTIIALSYILCLVFAQKLPGNDNSTATLCLGHHAVPNGTIVKTITNDRIEVTNATELVQNSSIGEICDSPHQVLDGENCTLIDALLGDPQCDGFQNKKWDLFVERSKAYSNCYPYDVPDYASLRSLVASSGTLEFNNESFNWTGVTQNGTSSACIRRSNSSFFSRLNWLTHLNFKYPALNVTMPNNEQFDKLYIWGVHHPGTDKDQIFLYAQSSGRITVSTKRSQQAVIPNIGSRPRIRNIPSRISIYWTIVKPGDILLINSTGNLIAPRGYFKIRSGKSSIMRSDAPIGKCKSECITPNGSIPNDKPFQNVNRITYGACPRYVKQNTLKLATGMRNVPEKQTRGIFGAIAGFIENGWEGMVDGWYGFRHQNSEGRGQAADLKSTQAAIDQINGKLNRLIGKTNEKFHQIEKEFSEVEGRIQDLEKYVEDTKIDLWSYNAELLVALENQHTIDLTDSEMNKLFEKTKKQLRENAEDMGNGCFKIYHKCDNACIGSIRNGTYDHDVYRDEALNNRFQIKGVELKSGYKDWILWISFAISCFLLCVALLGFIMWACQKGNIRCNICI

SEQ ID NO: 10131 - protein, 566 aa, Artificial Sequence
  derived and/or modified protein sequence (wt) from hemagglutinin__InfluenzaA__AGQ16336
MKTIIALSYILCLVFAQKLPGNDNSTATLCLGHHAVPNGTIVKTITNDRIEVTNATELVQNSSIGEICDSPHQILDGENCTLIDALLGDPQCDGFQNKKWDLFVERSKAYSNCYPYDVPDYASLRSLVASSGTLEFNNESFNWTGVTQNGTSSACIRRSNRSFFSRLNWLTHLNFKYPALNVTMPNNEQFDKLYIWGVHHPGTDKDQIFLYAQSSGRITVSTKRSQQAVIPNIGSRPRIRNIPSRISIYWTIVKPGDILLINSTGNLIAPRGYFKIRSGKSSIMRSDAPIGKCKSECITPNGSIPNDKPFQNVNRITYGACPRYVKQSTLKLATGMRNVPEKQTRGIFGAIAGFIENGWEGMVDGWYGFRHQNSEGRGQAADLKSTQAAIDQINGKLNRLIGKTNEKFHQIEKEFSEVEGRIQDLEKYVEDTKIDLWSYNAELLVALENQHTIDLTDSEMNKLFEKTKKQLRENAEDMGNGCFKIYHKCDNACIGSIRNGTYDHDVYRDEALNNRFQIKGVELKSGYKDWILWISFAISCFLLCVALLGFIMWACQKGNIRCNICI

SEQ ID NO: 10132 - protein, 566 aa, Artificial Sequence; identical to SEQ ID NO: 10130
  derived and/or modified protein sequence (wt) from hemagglutinin__InfluenzaA__AGQ16337

SEQ ID NO: 10133 - protein, 566 aa, Artificial Sequence; identical to SEQ ID NO: 9868
  derived and/or modified protein sequence (wt) from hemagglutinin__InfluenzaA__AGQ16338

SEQ ID NO: 10134 - protein, 566 aa, Artificial Sequence
  derived and/or modified protein sequence (wt) from hemagglutinin__InfluenzaA__AGQ16339
MKTIIALSYILCLVFAQKLPGNDNSTATLCLGHHAVPNGTIVKTITNDRIEVTNATELVQNSSIGEICDSPHQILDGENCTLIDALLGDPQCDGFQNKKWDLFVERSKAYSNCYPYDVPDYASLRSLVASSGTLEFNNESFNWAGVTQNGTSSACIRGSNSSFFSRLNWLTHLNFKYPALNVTMPNNEQFDKLYIWGVHHPGTDKDQIFLYAQSSGRITVSTKRSQQAVIPNIGSRPRIRNIPSRISIYWTIVKPGDILLINSTGNLIAPRGYFKIRSGKSSIMRSDAPIGKCKSECITPNGSIPNDKPFQNVNRITYGACPRYVKQSTLKLATGMRNVPEKQTRGIFGAIAGFIENGWEGMMDGWYGFRHQNSEGRGQAADLKSTQAAIDQINGKLNRLIGKTNEKFHQIEKEFSEVEGRIQDLEKYVEDTKIDLWSYNAELLVALENQHTIDLTDSEMNKLFEKTKKQLRENAEDMGNGCFKIYHKCDNACIGSIRNGTYDHDVYRDEALNNRFQIKGVELKSGYKNWILWISFAISCFLLCVALLGFIMWACQKGNIRCNICI

SEQ ID NO: 10135 - protein, 566 aa, Artificial Sequence; identical to SEQ ID NO: 9994
  derived and/or modified protein sequence (wt) from hemagglutinin__InfluenzaA__AGQ16340

SEQ ID NO: 10136 - protein, 566 aa, Artificial Sequence; identical to SEQ ID NO: 9858
  derived and/or modified protein sequence (wt) from hemagglutinin__InfluenzaA__AGQ16341

SEQ ID NO: 10137 - protein, 566 aa, Artificial Sequence; identical to SEQ ID NO: 9868
  derived and/or modified protein sequence (wt) from hemagglutinin__InfluenzaA__AGQ16342

SEQ ID NO: 10138 - protein, 566 aa, Artificial Sequence
  derived and/or modified protein sequence (wt) from hemagglutinin__InfluenzaA__AGQ16343
MKTIIALSYILCLVFAQKLPGNDNSTATLCLGHHAVPNGTIVKTITNDRIEVTNATELVQNSSIGEICDSPHQILDGENCTLIDALLGDPQCDGFQNKKWDLFVERSKAYSNCYPYDVPDYASLRSLVASSGTLEFNNESFNWAGVTQNGTSSACIRGSNSSFFSRLNWLTHLNFKYPALNVTMPNNEQFDKLYIWGVHHPGTDKDQIFLYAQSSGRITVSTKRSQQAVIPNIGSRPRIRDIPSRISIYWTIVKPGDILLINSTGNLIAPRGYFKIRSGKSSIMRSDAPIGKCKSECITPNGSIPNDKPFQNVNRITYGACPRYVKQSTLKLATGMRNVPEKQTRGIFGAIAGFIENGWEGMVDGWYGFRHQNSEGRGQAADLKSTQAAIDQINGKLNRLIGKTNEKFHQIEKEFSEVEGRIQDLEKYVEDTKIDLWSYNAELLVALENQHTIDLTDSEMNKLFEKTKKQLRENAEDMGNGCFKIYHKCDNACIGSIRNGTYDHDVYRDEALNNRFQIKGVELKSGYKDWILWISFAISCFLLCVALLGFIMWACQKGNIRCNICI

SEQ ID NO: 10139 - protein, 566 aa, Artificial Sequence; identical to SEQ ID NO: 9868
  derived and/or modified protein sequence (wt) from hemagglutinin__InfluenzaA__AGQ16344

SEQ ID NO: 10140 - protein, 566 aa, Artificial Sequence; identical to SEQ ID NO: 9858
  derived and/or modified protein sequence (wt) from hemagglutinin__InfluenzaA__AGQ16345

SEQ ID NO: 10141 - protein, 566 aa, Artificial Sequence
  derived and/or modified protein sequence (wt) from hemagglutinin__InfluenzaA__AGQ16346
MKTIIALSYILCLVFAQKLPGNDNSTATLCLGHHAVPNGTIVKTITNDRIEVTNATELVQNSSIGEICDSPHQILDGENCTLIDALLGDPQCDGFQNKKWDLFVERSKAYSNCYPYDVPDYASLRSLVASSGTLEFNNESFNWTGVTQNGTSSACIRRSNSSFFSRLNWLTHLNFKYPALNVTMPNNEQFDKLYIWGVHHPGTDKDQIFLYAQSSGRITVSTKRSQQAVIPNIGSRPRIRNIPSRISIYWTIVKPGDILLINSTGNLIAPRGYFKIRSGKSSIMRSDAPIGKCRSECITPNGSIPNDKPFQNVNRITYGACPRYVKQSTLKLATGMRNVPEKQTRGIFGAIAGFIENGWEGMVDGWYGFRHQNSEGRGQAADLKSTQAAIDQINGKLNRLIGKTNEKFHQIEKEFSEVEGRIQDLEKYVEDTKIDLWSYNAELLVALENQHTIDLTDSEMNKLFEKTKKQLRENAEDMGNGCFKIYHKCDNACIGSIRNGTYDHNVYRDEALNNRFQIKGVELKSGYKDWILWISFAISCFLLCVALLGFIMWACQKGNIRCNICI

SEQ ID NO: 10142 - protein, 566 aa, Artificial Sequence; identical to SEQ ID NO: 9858
  derived and/or modified protein sequence (wt) from hemagglutinin__InfluenzaA__AGQ16347

SEQ ID NO: 10143 - protein, 566 aa, Artificial Sequence; identical to SEQ ID NO: 9994
  derived and/or modified protein sequence (wt) from hemagglutinin__InfluenzaA__AGQ16348

SEQ ID NO: 10144 - protein, 566 aa, Artificial Sequence; identical to SEQ ID NO: 9858
  derived and/or modified protein sequence (wt) from hemagglutinin__InfluenzaA__AGQ16349

SEQ ID NO: 10145 - protein, 566 aa, Artificial Sequence
  derived and/or modified protein sequence (wt) from hemagglutinin__InfluenzaA__AGQ16350
MKTIIALSYILCLVFAQKLPGNDNSTATLCLGHHAVPNGTIVKTITNDRIEVTNATELVQNSSIGEICDSPHQILDGENCTLIDALLGDPQCDGFQNKKWDLFVERSKAYSNCYPYDVPDYASLRSLVASSGTLEFNNESFNWTGVTQNGTSSACIRRSNSSFFSRLNWLTHLNFKYPALNVTMPNNEQFDKLYIWGVHHPGTDKDQIFLYAQSSGRITVSTKRSQQAVIPNIGSRPRIRNIPSRISIYWTIVKPGDILLINSTGNLIAPRGYFKIRSGKSSIMRSDAPIGKCKSECITPNGSIPNDKPFQNVNRITYGACPRYVKQSTLKLATGMRNVPEKQTRGIFGAIAGFIENGWEGMVDGWYGFRHQNSEGRGQAADLKSTQAAIDQINGKLNRLIGKTNEKFHQIEKEFSEVEGRIQDLEKYVEDTKIDLWSYNAELLVALENQHTIDLTDSEMNKLFEKTKKQLRENAEDMGNGCFKIYHKCDNACIGSIRNGTYDHNVYRDEALNNRFQIKGVELKSGYKDWILWISFAISCFLLCVALLGFIMWTCQKGNIRCNICI

SEQ ID NO: 10146 - protein, 566 aa, Artificial Sequence
  derived and/or modified protein sequence (wt) from hemagglutinin__InfluenzaA__AGQ47719
MKAILLVLLCTFTATNADTLCIGYHANNSTDTVDTVLEKNVTVTHSVNLLEDRHNGKLCKLGGIAPLHLGKCNIAGWLLGNPECELLFTVSSWSYIVETSNSDNGTCYPGDFINYEELREQLSSVSSFERFEIFPKTSSWPDHETNRGVTAACPYAGANSFYRNLIWLVKKGNSYPKLSKSYVNNKGKEVLVLWGIHHPPTSTDQQSLYQNADAYVFVGSSKYNRKFKPEIAARPKVRGQAGRMNYYWTLIEPGDTITFEATGNLVVPRYAFAMNRGSGSGIIISDAPIHDCNTKCQTPKGAINTSLPFQNIHPVTIGECPKYVKSTKLRMATGLRNIPSIQSRGLFGAIAGFIEGGWTGMIDGWYGYHHQNGQGSGYAADQKSTQNAIDGITNKVNSVIEKMNTQFTAVGKEFNHLEKRIENLNKKVDDGFLDVWTYNAELLVLLENERTLDFHDSNVKNLYEKVRSQLRNNAKEIGNGCFEFYHKCDDTCMESVKNGTYDYPKYSEESKLNREEIDGVKLESTRIYQILAIYSTAASSLVLLVSLGAISFWMCSNGSLQCRICI

SEQ ID NO: 10147 - protein, 565 aa, Artificial Sequence; identical to SEQ ID NO: 2115
  derived and/or modified protein sequence (wt) from hemagglutinin__InfluenzaA__AGQ47728

SEQ ID NO: 10148 - protein, 566 aa, Artificial Sequence
  derived and/or modified protein sequence (wt) from hemagglutinin__InfluenzaA__AGQ47740
MKARLLVLLCALAATDADTICIGYHANNSTDTVDTLLEKNVTVTHSVNLLEDSHNGKLCKLKGIAPLQLGKCNIAGWLLGNPECDSLLPARSWSYIVETPNSENGACYPGDFIDYEELREQLSSVSSLERFEIFPKESSWPNHNTIKGVTASCSHRGQSSFYRNLLWLTKKGDSYPKLNNSYVNNKGKEVLVLWGVHHPSSSNEQQSLYRNENAYVSVVSSNYNRRFTPEIAARPKVRDQTGRMNYYWTLLEPGDTIMFEATGNLIAPWYAFALSRGFGSGIITSNASMHECNTKCQTPQGAINSSLPFQNIHPVTIGECPKYVRSTKLRMVTGLRNIPSIQSRGLFGAIAGFIEGGWTGMIDGWYGYHHQNEQGSGYAADQKSTQNAINGITNKVNSVIEKMNTQFTAVGKEFNNLEKRMENLNKKVDDGFLDIWTYNAELLVLLENERTLDFHDLNVKNLYEKVKSQLKNNAKEIGNGCFEFYHKCDNECMESVRNGTYDYPKYSEESKLNREKIDGVKLESMGVYQILAIYSTVASSLVLLVSLGAISFWMCSNGSLQCRICI

SEQ ID NO: 10149 - protein, 566 aa, Artificial Sequence
  derived and/or modified protein sequence (wt) from hemagglutinin__InfluenzaA__AGQ47752
MKAKLLILLCALSATDADTICIGYHANNSTDTVDTVLEKNVTVTHSVNLLEDSHNGKLCRLKGKAPLQLGKCNIAGWVLGNPECESLLSNRSWSYIAETPNSENGICYPGDFADYEELREQLSSVSSFERFEIFPKERSWPKHNTIRGVTAACSHAGKSSFYKNLVWLTEANGSYPALSTSYVNNQEKEVLVLWGVHHPSNIEEQRTLYRKDNAYVSVVSSNYNRRFTPEIAKRPKVRDQPGRMNYYWTLLEPGDTIIFEATGNLIAPWYAFALSRGPGSGIITSNAPMDECDTKCQTPQGAINSSLPFQNIHPVTIGECPKYVRSTKLRMVTGLRNIPSIQSRGLFGAIAGFIEGGWTGMMDGWYGYHHQNEQGSGYAADQKSTQNAINGITNKVNSVIEKMNTQFTAVGKEFNKLEKRMENLNKKVDDGFLDIWTYNAELLVLLENERTLDFHDSNVKNLYEKVKNQLRNNAKELGNGCFEFYHKCDNECMESVKNGTYDYPKYSEESKLNREKIDGVKLESMGVYRILAIYSTVASSLVLLVSLGAISFWMCSNGSLQCRICI

SEQ ID NO: 10150 - protein, 566 aa, Artificial Sequence
  derived and/or modified protein sequence (wt) from hemagglutinin__InfluenzaA__AGQ47764
MKAKLLILLCALTATDADTICIGYHANNSTDTVDTVLEKNVTVTHSVNLLEDSHNGKLCRLKGIAPLQLGKCNIAGWILGNPECESLLSKRSWSYIAETPNSENGACYPGDFADYEELREQLSSVSSFERFEIFPKERSWPKHNITRGVTAACSHAGKSSFYKNLLWLTETDGSYPKLSKSYVNNKEKEVLVLWGVHHPSNIEDQKTLYRKENAYVSVVSSNYNRRFTPEIAERPKVRGQAGRINYYWTLLEPGDTIIFEANGNLIAPWYAFALSRDFGSGIITSNASMDECDTKCQTPQGAINSSLPFQNIHPVTIGECPKYVKSTKLRMVTGLRNIPSIQSRGLFGAIAGFIEGGWTGMIDGWYGYHHQNEQGSGYAADQKSTQNAINGITNKVNSVIEKMNTQFTAVGKEFNKLEKRMENLNKKVDDGFLDIWTYNAELLVLLENERTLDFHDSNVKNLYEKVKNQLRNNAKEIGNGCFEFYHKCNNECMESVKNGTYDYPKYSEESKLNREKIDGVKLESMGVYQILAIYSTVASSLVLLVSLGAISFWMCSNGSLQCRICI

SEQ ID NO: 10151 - protein, 566 aa, Artificial Sequence
  derived and/or modified protein sequence (wt) from hemagglutinin__InfluenzaA__AGQ47776
MKAKLLILLCALSATDADTICIGYHANNSTDTVDTVLEKNVTVTHSVNLLEDSHNGKLCRLKGIAPLQLGKCNIAGWILGNPECESLLSKRSWSYIAETPNSENGTCYPGDFADYEELREQLSSVSSFERFEIFPKERSWPKHNINIGVTAACSHAGKSSFYKNLLWLTEKDGSYPNLNKSYVNKKEKEVLVLWGVHHPSNIEDQKTLYRKENAYVSVVSSNYNRRFTPEIAERPKVRGQAGRMNYYWTLLEPGDTIIFEANGNLIAPWYAFALSRGLGSGIITSNASMDECDTKCQTPQGAINSSLPFQNIHPFTIGECPKYVRSTKLRMVTGLRNIPSIQSRGLFGAIAGFIEGGWTGMIDGWYGYHHQNEQGSGYAADQKSTQNAINGITNKVNSVIEKMNTQFTAVGKEFNKLEKRMENLNKKVDDGFLDIWTYNAELLVLLENERTLDFHDSNVKNLYEKVKNQLRNNAKEIGNGCFEFYHKCNNECMESVKNGTYDYPKYSEESKLNREKIDGVKLESMGVYQILAIYSTVASSLVLLVSLGAISFWMCSNGSLQCRICI

SEQ ID NO: 10152 - protein, 566 aa, Artificial Sequence
  derived and/or modified protein sequence (wt) from hemagglutinin__InfluenzaA__AGQ47788
MKAKLLVLLCALSATDADTICIGYHANNSTDTVDTVLEKNVTVTHSVNLLEDSHNGKLCRLKGIAPLQLGKCNIAGWILGNPECESLFSKKSWSYIAETPNSENGTCYPGYFADYEELREQLSSVSSFERFEIFPKERSWPKHNVTRGVTAACSHKGKSSFYRNLLWLTEKDGSYPNLSKSYVNNKEKEVLVLWGVHHPSNIEDQKTLYRKENAYVSVVSSNYNRRFTPEIAERPKVRGQAGRINYYWTLLEPGDTIIFEANGNLIAPWHAFALSRGFGSGIITSNASMDECDTKCQTPQGAINSSLPFQNIHPVTIGECPKYVRSTKLRMVTGLRNIPSIQSRGLFGAIAGFIEGGWTGMIDGWYGYHHQNEQGSGYAADQKSTQNAINGITNKVNSVIEKMNTQFTAVGKEFNKLEKRMENLNKKVDDGFLDIWTYNAELLVLLENERTLDFHDSNVKNLYEKVKSQLKNNAKEIGNGCFEFYHKCNNECMESVKNGTYDYPKYSEESKLNREKIDGVKLESMGVYQILAIYSTVASSLVLLVSLGAISFWMCSNGSLQCRICI

SEQ ID NO: 10153 - protein, 566 aa, Artificial Sequence
  derived and/or modified protein sequence (wt) from hemagglutinin__InfluenzaA__AGQ47800
MKARLLVLLCALAATDADTICIGYHANNSTDTVDTILEKNVTVTHSVNLLEDSHNGKLCRLKGIAPLQLGKCNIAGWILGNPECESLLSERSWSYIVEIPNSENGTCYPGDFTDYEELREQLSSVSSFERFEIFPKESSWPKHNTARGVTAACSHAGKSSFYRNLLWLTEKDGSYPNLKNSYVNKKGKEVLVLWGVHHPSSIKEQQTLYQKENAYVSVVSSNYNRRFTPEIAERPKVRDQAGRMNYYWTLLEPGDTIIFEANGNLIAPWYAFALSRGFGSGIITSNASMHECDTKCQTPQGAINSSLPFQNIHPVTIGECPKYVRSTKLRMVTGLRNIPSIQSRGLFGAIAGFIEGGWTGMIDGWYGYHHQNEQGSGYAADQKSTQNAINGITNKVNSVIEKMNTQFTAVGKEFNNLEKRMENLNKKVDDGFLDIWTYNAELLILLENERTLDFHDSNVKNLYEKVKSQLRNNAKEIGNGCFEFYHKCNNECMESVKNGTYDYPKYSEESKLNREKIDGVKLESMGVYQILAIYSTVASSLVLLVSLGAISFWMCSNGSLQCRICI

SEQ ID NO: 10154 - protein, 566 aa, Artificial Sequence
  derived and/or modified protein sequence (wt) from hemagglutinin__InfluenzaA__AGQ47811
MKAKLLVLLCALSATDADTICIGYHANNSTDTVDTVLEKNVTVTHSVNLLEDSHNGKLCRLKGIAPLQLGKCNIAGWILGNPECESLFSKKSWSYIAETPNSENGTCYPGFFADYEELREQLSSVSSFERFEIFPKERSWPKHNVTRGVTAACSHKGKSSFYRNLLWLTEKNGSYPNLSKSYVNNKEKEVLVLWGVHHPSNIEDQKTIYRKENAYVSVVSSNYNRRFTPEIAERPKVRGQAGRINYYWTLLEPGDTIIFEANGNLIAPWHAFALSRGFGSGIITSNASMDECDTKCQTPQGAINSSLPFQNIHPVTIGECPKYVRSTKLRMVTGLRNIPSIQSRGLFGAIAGFIEGGWTGMIDGWYGYHHQNEQGSGYAADQKSTQNAIDGITNKVNSVIEKMNTQFTAVGKEFNKLEKRMENLNKKVDDGFLDIWTYNAELLVLLENERTLDFHDSNVKNLYEKVKSQLKNNAKEIGNGCFEFYHKCNNECMESVKNGTYDYPKYSEESKLNREKIDGVKLESMGVYQILAIYSTVASSLVLLVSLGAISFWMCSNGSLQCRICI

SEQ ID NO: 10155 - protein, 566 aa, Artificial Sequence
  derived and/or modified protein sequence (wt) from hemagglutinin__InfluenzaA__AGQ47823
MKAKLLVLLCAFTATYADTICIGYHANNSTDTVDTVLEKNVTVTHSVNLLEDSHNGKLCRLKGIAPLQLGNCSVAGWILGNPKCESLFSKESWSYIAETPNPENGTCYPGYFADYEELREQLSSVSSFERFEIFPKESSWPNHTVTKGVTTSCSHNGKSSFYRNLLWLTEKNGLYPNLSKSYVNNKEKEVLVLWGVHHPSNIRDQRAIYHTENAYVSVVSSHYSRRFTPEIAKRPKVRGQEGRINYYWTLLEPGDTIIFEANGNLIAPWYAFALSRGFGSGIITSNASMDECDAKCQTPQGAINSSLPFQNVHPVTIGECPKYVRSTKLRMVTGLRNIPSIQSRGLFGAIAGFIEGGWTGMIDGWYGYHHQNEQGSGYAADQKSTQNAINGITNKVNSVIEKMNTQFTAVGKEFNKLERRMENLNKKVDDGFLDIWTYNAELLVLLENGRTLDFHDSNVKNLYEKVKSQLKNNAKEIGNGCFEFYHKCNNECMESVKNGTYDYPKYSEESKLNRGKIDGVKLESMGVYQILAIYSTVASSLVLLVSLGAISFWMCSNGSLQCRICI

SEQ ID NO: 10156 - protein, 566 aa, Artificial Sequence
  derived and/or modified protein sequence (wt) from hemagglutinin__InfluenzaA__AGQ47835
MKTIIALSYIFCLVLGQDFPGNDNSTATLCLGHHAVPNGTIVKTITNDQIEVTNATELVQSSSTGKICNNPHRILDGINCTLIDALLGDPHCDGFQNETWDLFVERSKAFSNCYPYYVPDYASLRSLVASSGTLEFINEGFNWTGVTQNGGSNACKRGPNSGFFSRLNWLYKSGTTYPVLNVTMPNNDNFDKLYIWGVHHPSTDQEQTNLYVQASGRVTVSTKRSQQTITPNIGSRPWVRGLSSRISIYWTIVKPGDILVINSNGNLIAPRGYFKMRTGKSSIMRSDAPIGTCISECITPNGSIPNDKPFQNVNKITYGACPKYVKQNTLKLATGMRNVPEKQTRGIFGAIAGFIENGWEGMVDGWYGFRHQNSEGTGQAADLKSTQAAIDQINGKLNRVIEKTNEKFHQIEKEFSEVEGRIQDLEKYVEDTKIDLWSYNAELLVALENQHTIDLTDSEMNKLFEKTRRQLRENAEDMGNGCFKIYHKCDNACIGSIRNGTYDHDVYRDEALNNRFQIKGVELKSGYKDWILWISFAISCFLLCVVLLGFIMWACQKGNIRCNICI

SEQ ID NO: 10157 - protein, 566 aa, Artificial Sequence
  derived and/or modified protein sequence (wt) from hemagglutinin__InfluenzaA__AGQ47847
MKARLLILLCALAATDADTICIGYHANNSTDTVDTVLEKNVTVTHSVNLLEDSHNGKLCRLKGIAPLQLGKCNIAGWLLGNPECDSLLPASSWSYIVETPNSKNGICYPGDFIDYEELREQLSSVSSFERFEIFPKESSWPKHNTTKGVTAACSHAGKSSFYRNLLWLTKKEDSYPKLSNSYVNKKGKEVLVLWGVHHPSNSKEQQTLYQNENAYVSVVSSNYNRRFTPEIAERPKVRDQAGRMNYYWTLLEPGDTIIFEANGNLIAPWYAFALSRGFGSGIITSNASMHECNTKCQTPQGAINSSLPFQNIHPVTIGECPKYVKSAKLRMVTGLRNIPSIQSRGLFGAIAGFIEGGWTGMIDGWYGYHHQNEQGSGYAADQKSTQNAINGITNKVNSVIEKMNTQFTAVGKEFNNLEKRMENLNKKVDDGFLDIWTYNAELLVLLENERTLDFHDSNVKNLYEKVKIQLKNNAKEIGNGCFEFYHKCDNECMESVRNGTYDYPKYSKESKLNREKIDGVKLEPMGVYQILAIYSTVASSLVLLVSLGAISFWMCSNGSLQCRICI

SEQ ID NO: 10158 - protein, 566 aa, Artificial Sequence
  derived and/or modified protein sequence (wt) from hemagglutinin__InfluenzaA__AGQ47870
MKAILLVLLCTFAATNADTLCIGYHANNSTDTVDTVLEKNVTVTHSVNLLEDRHNGKLCKLGGIAPLHLGKCNIAGWLLGNPECELLLTVSSWSYIVETSNSDNGTCYPGDFINYEELREQLSSVSSFERFEIFPKTSSWPNHETNRGVTAACPYAGANSFYRNLIWLVKKGNSYPKLSKSYVNNKGKEVLVLWGIHHPPTSTDQQSLYQNADAYVFVGSSKYNRKFKPEIAARPKVRGQAGRMNYYWTLIEPGDTITFEATGNLVVPRYAFAMNRGSGSGIIISDAPVHDCNTKCQTPKGAINTSLPFQNIHPVTIGECPKYVKSTKLRMATGLRNIPSIQSRGLFGAIAGFIEGGWTGMIDGWYGYHHQNEQGSGYAADQRSTQNAIDGITNKVNSVIEKMNTQFTAVGKEFNHLEKRIENLNKKVDDGFLDIWTYNAELLVLLENERTLDFHDSNVKNLYEKVRSQLRNNAKEIGNGCFEFYHKCDDTCMESVKNGTYDYPKYSEESKLNREEIDGVKLESTRIYQILAIYSTVASSLVLLVSLGAISFWMCSNGSLQCRICI

SEQ ID NO: 10159 - protein, 566 aa, Artificial Sequence
  derived and/or modified protein sequence (wt) from hemagglutinin__InfluenzaA__AGQ47882
MKAILLVLLCTFAATNADTLCIGYHANNSTDTVDTVLEKNVTVTHSVNLLEDRHNGKLCKLGGIAPLHLGKCNIAGWLLGNPECELLLTVSSWSYIVETSNSDNGTCYPGDFINYEELREQLSSVSSFERFEIFPKTSSWPNHETNRGVTAACPYAGANSFYRNLIWLVKKENSYPKLSKSYVNNKGKEVLVLWGIHHPPTSTDQQSLYQNADAYVFVGSSKYNRKFKPEIAARPKVRGQAGRMNYYWTLIEPGDTITFEATGNLVVPRYAFAMNRGSGSGIIISDAPVHDCNTKCQTPKGAINTSLPFQNIHPVTIGECPKYVKSTKLRMATGLRNIPSIQSRGLFGAIAGFIEGGWTGMIDGWYGYHHQNEQGSGYAADQRSTQNAIDGITNKVNSVIEKMNTQFTAVGKEFNHLEKRIENLNKKVDDGFLDIWTYNAELLVLLENERTLDFHDSNVKNLYEKVRSQLRNNAKEIGNGCFEFYHKCDDTCMESVKNGTYDYPKYSEESKLNREEIDGVKLESTRIYQILAIYSTVASSLVLLVSLGAISFWMCSNGSLQCRICI

SEQ ID NO: 10160 - protein, 566 aa, Artificial Sequence; identical to SEQ ID NO: 9095
  derived and/or modified protein sequence (wt) from hemagglutinin__InfluenzaA__AGQ47894

SEQ ID NO: 10161 - protein, 566 aa, Artificial Sequence
  derived and/or modified protein sequence (wt) from hemagglutinin__InfluenzaA__AGQ47906
MKTIIALSYIFCLALGQDLPGNDNSTATLCLGHHAVPNGTLVKTITDDQIEVTNATELVQSSSTGKICNNPHRILDGIDCTLIDALLGDPHCDVFQNETWDLFVERSKAFSNCYPYDVPDYASLRSLVASSGTLEFITEGFTWTGVTQNGGSNACKRGPGSGFFSRLNWLTKSGSTYPVLNVTMPNNDNFDKLYIWGIHHPSTNQEQTSLYVQASGRVTVSTRRSQQTIIPNIGSRPWVRGLSSRISIYWTIVKPGDVLVINSNGNLIAPRGYFKMRTGKSSIMRSDAPIDTCISECITPNGSIPNDKPFQNVNKITYGACPKYVKQNTLKLATGMRNVPEKQTRGLFGAIAGFIENGWEGMIDGWYGFRHQNSEGTGQAADLKSTQAAIDQINGKLNRVIEKTNEKFHQIEKEFSEVEGRIQDLEKYVEDTKIDLWSYNAELLVALENQHTIDLTDSEMNKLFEKTRRQLRENAEDMGNGCFKIYHKCDNACIESIRNGTYDHDVYRDEALNNRFQIKGVELKSGYKDWILWISFAISCFLLCVVLLGFIMWACQRGNIRCNICI

SEQ ID NO: 10162 - protein, 566 aa, Artificial Sequence
  derived and/or modified protein sequence (wt) from hemagglutinin__InfluenzaA__AGQ47918
MKTIIALSYIFCLALGQDLPGNDNNTATLCLGHHAVPNGTLVKTITDDQIEVTNATELVQSSSTGKICNNPHRILDGIDCTLIDALLGDPHCDVFQNETWDLFVERSKAFSNCYPYDVPDYASLRSLVASSGTLEFITEGFTWTGVTQNGGSNACKRGPGSGFFSRLNWLTKSGSTYPVLNVTMPNNDNFDKLYIWGVHHPSTNQEQTSLYVQASGRVTVSTRRSQQTIIPNIGSRPWVRGLSSRISIYWTIVKPGDVLVINSNGNLIAPRGYFKMRTGKSSIMRSDAPIDTCISECITPNGSIPNDKPFQNVNKITYGACPKYVKQNTLKLATGMRNVPEKQTRGLFGAIAGFIENGWEGMIDGWYGFRHQNSEGTGQAADLKSTQAAIDQINGKLNRVIEKTNEKFHQIEKEFSEVEGRIQDLEKYVEDTKIDLWSYNAELLVALENQHTIDLTDSEMNKLFEKTRRQLRENAEDMGNGCFKIYHKCDNACIESIRNGTYDHDVYRDEALNNRFQIKGVELKSGYKDWILWISFAISCFLLCVVLLGFIMWACQRGNIRCNICI

SEQ ID NO: 10163 - protein, 566 aa, Artificial Sequence
  derived and/or modified protein sequence (wt) from hemagglutinin__InfluenzaA__AGQ47930
MKANLLVLLCALAAADADTICIGYHANNSTDTVDTALEKNVTVTHSVNLLEDSHNGKLCRLKGIAPLQLGKCNIAGWLLGNPECDPLLPVRSWSYIVETPNSENGICYPGDFIDYEELREQLSSVSSFERFEIFPKESSWPNHNTNKGVTAACSHAGKSSFYRNLLWLTEKEGSYPKLKNSYVNKKGKEVLVLWGIHHPSNSKDQQNLYQNENAYVSVVTSNYNRRFTPEIAERPKVRDQAGRMNYYWTLLKPGDTIIFEANGNLIAPMYAFALSRGFGSGIITSNASMHECNTKCQTPLGAINSSLPFQNIHPVTIGECPKYVRSAKLRMVTGLRNIPSIQSRGLFGAIAGFIEGGWTGMIDGWYGYHHQNEQGSGYAADQKSTQNAINGITNKVNSVIEKMNIQFTAVGKEFNKLEKRMENLNKKVDDGFLDIWTYNAELLVLLENERTLDFHDSNVKNLYEKVKSQLKNNAKEIGNGCFEFYHKCDNECMESVRNGTYDYPKYSEESKLNREKVDGVKLESMGIYQILAIYSTVASSLVLLVSLGAISFWMCSNGSLQCRICI

SEQ ID NO: 10164 - protein, 565 aa, Artificial Sequence; identical to SEQ ID NO: 3278
  derived and/or modified protein sequence (wt) from hemagglutinin__InfluenzaA__AGQ47942

SEQ ID NO: 10165 - protein, 565 aa, Artificial Sequence
  derived and/or modified protein sequence (wt) from hemagglutinin__InfluenzaA__AGQ47954
MKANLLVLLCALAAADADTICIGYHANNSTDTVDTVLEKNVTVTHSVNLLEDSHNGKLCRLKGIAPLQLGKCNIAGWLLGNPECDPLLPVRSWSYIVETPNSENGICYPGDFIDYEELREQLSSVSSFERFEIFPKESSWPNHNTNGVTAACSHEGKSSFYRNLLWLTEKEGSYPKLKNSYVNKKGKEVLVLWGIHHPPNSKEQQNLYRNENAYVSVVTSNYNRRFTPEIAERPKVRDQAGRMNYYWTLLKPGDTIIFEANGNLIAPMYAFALSRGFGSGIITSNASMHECNTKCQTPLGAINSSLPYQNIHPVTIGECPKYVRSAKLRMVTGLRNIPSIQSRGLFGAIAGFIEGGWTGMIDGWYGYHHQNEQGSGYAADQKSTQNAINGITNKVNTVIEKMNIQFTAVGKEFNKLEKRMENLNKKVDDGFLDIWTYNAELLVLLENERTLDFHDSNVKNLYEKVKSQLKNNAKEIGNGCFEFYHKCDNECMESVRNGTYDYPKYSEESKLNREKVDGVKLESMGIYQILAIYSTVASSLVLLVSLGAISFWMCSNGSLQCRICI

SEQ ID NO: 10166 - protein, 565 aa, Artificial Sequence
  derived and/or modified protein sequence (wt) from hemagglutinin__InfluenzaA__AGQ47966
MKANLLVLLCALAAADADTICIGYHANNSTDTVDTVLEKNVTVTHSVNLLEDSHNGKLCRLKGIAPLQLGKCNIAGWLLGNPECDPLLPVGSWSYIVETPNSENGICYPGDFIDYEELREQLSSVSSFERFEIFPKESSWPDHNTNGVTAACSHEGKNSFYRNLLWLTEKESSYPKLKNSYVNKKGKEVLVLWGIHHPPNSKEQQNLYQNENAYVSVVTSNYNRRFTPEIAERPKVKDQAGRMNYYWTLLKPGDTIIFEANGNLIAPMYAFALSRGFGSGIITSNASMHECNTKCQTPLGAINSSLPYQNIHPVTIGECPKYVRSAKLRMVTGLRNIPSIQSRGLFGAIAGFIEGGWTGMIDGWYGYHHQNEQGSGYAADQKSTQNAINGITNKVNTVIEKMNIQFTAVGKEFNKLEKRMENLNKKVDDGFLDIWTYNAELLVLLENERTLDFHDSNVKNLYEKVKSQLKNNAKEIGNGCFEFYHKCDNECMESVRNGTYDYPKYSEESKLNREKVDGVKLESMGIYQILAIYSTVASSLVLLVSLGAISFWMCSNGSLQCRICI

SEQ ID NO: 10167 - protein, 565 aa, Artificial Sequence
  derived and/or modified protein sequence (wt) from hemagglutinin__InfluenzaA__AGQ47978
MKANLLVLLCALAAADADTICIGYHANNSTDTVDTVLEKNVTVTHSVNLLEDSHNGKLCRLKGIAPLQLGKCNIAGWLLGNPECDPLLPVGSWSYIVETPNSENGICYPGDFIDYEELREQLSSVSSFERFEIFPKESSWPDHNTNGVTAACSHEGKNSFYRNLLWLTKKESSYPELKNSYVNKKGKEVLVLWGIHHPPNSKEQQNLYQNENAYVSVVTSNYNRRFTPEIAERPKVKDQAGRMNYYWTLLKPGDTIIFEANGNLIAPMYAFALSRGFGSGIITSNASMHECNTKCQTPLGAINSSLPYQNIHPVTIGECPKYVRSAKLRMVTGLRNIPSIQSRGLFGAIAGFIEGGWTGMIDGWYGYHHQNEQGSGYAADQKSTQNAINGITNKVNTVIEKMNIQFTAVGKEFNKLEKRMENLNKKVDDGFLDIWTYNAELLVLLENERTLDFHDSNVKNLYEKVKSQLKNNAKEIGNGCFEFYHKCDNECMESVRNGTYDYPKYSEESKLNREKVDGVKLESMGIYQILAIYSTVASSLVLLVSLGAISFWMCSNGSLQCRICI

SEQ ID NO: 10168 - protein, 565 aa, Artificial Sequence
  derived and/or modified protein sequence (wt) from hemagglutinin__InfluenzaA__AGQ47990
MKANLLVLLCALAAADADTICIGYHANNSTDTVDTVLEKNVTVTHSVNLLEDSHNGKLCRLKGIAPLQLGKCNIAGWLLGNPECDPLLPVGSWSYIVETPNSENGICYPGDFIDYEELREQLSSVSSFERFKIFPKESSWPDHNTNGVTAACSHEGKNSFYRNLLWLTKKESSYPELKNSYVNKKGKEVLVLWGIHHPPNSKEQQNLYQNENAYVSVVTSNYNRRFTPEIAERPKVKDQAGRMNYYWTLLKPGDTIIFEANGNLIAPMYAFALSRGFGSGIITSNASMHECNTKCQTPLGAINSSLPYQNIHPVTIGECPKYVRSAKLRMVTGLRNIPSIQSRGLFGAIAGFIEGGWTGMIDGWYGYHHQNEQGSGYAADQKSTQNAINGITNKVNTVIEKMNIQFTAVGKEFNKLEKRMENLNKKVDDGFLDIWTYNAELLVLLENERTLDFHDSNVKNLYEKVKSQLKNNAKEIGNGCFEFYHKCDNECMESVRNGTYDYPKYSEESKLNREKVDGVKLESMGIYQILAIYSTVASSLVLLVSLGAISFWMCSNGSLQCRICI

SEQ ID NO: 10169 - protein, 565 aa, Artificial Sequence
  derived and/or modified protein sequence (wt) from hemagglutinin__InfluenzaA__AGQ48002
MKANLLVLLCALAAADADTICIGYHANNSTDTVDTVLEKNVTVTHSVNLLEDSHNGKLCRLKGIAPLQLGKCNIAGWLLGNPECDPLLPVGSWSYIVETPNSENGICYPGDFIDYEELREQLSSVSSFERFKIFPKESSWPDHNTNGVTAACSHEGKNSFYRNLLWLTKKESSYPELKNSYVNKKRKEVLVLWGIHHPPNSKEQQNLYQNENAYVSVVTSNYNRRFTPEIAERPKVKDQAGRMNYYWTLLKPGDTIIFEANGNLIAPMYAFALSRGFGSGIITSNASMHECNTKCQTPLGAINSSLPYQNIHPVTIGECPKYVRSAKLRMVTGLRNIPSIQSRGLFGAIAGFIEGGWTGMIDGWYGYHHQNEQGSGYAADQKSTQNAINGITNKVNTVIEKMNIQFTAVGKEFNKLEKRMENLNKKVDDGFLDIWTYNAELLVLLENERTLDFHDSNVKNLYEKVKSQLKNNAKEIGNGCFEFYHKCDNECMESVRNGTYDYPKYSEESKLNREKVDGVKLESMGIYQILAIYSTVASSLVLLVSLGAISFWMCSNGSLQCRICI

SEQ ID NO: 10170 - protein, 565 aa, Artificial Sequence
  derived and/or modified protein sequence (wt) from hemagglutinin__InfluenzaA__AGQ48014
MKANLLVLLCALAAADADTICIGYHANNSTDTVDTVLEKNVTVTHSVNLLEDSHNGKLCRLKGIAPLQLGKCNIAGWLLGNPGCDPLLPVGSWSYIVETPNSENGICYPGDFIDYEELREQLSSVSSFERFKIFPKESSWPDHNTNGVTAACSHEGKNSFYRNLLWLTKKESSYPELKNSYVNKKRKEVLVLWGIHHPPNSKEQQNLYQNENAYVSVVTSNYNRRFTPEIAERPKVKDQAGRMNYYWTLLKPGDTIIFEANGNLIAPMYAFALSRGFGSGIITSNASMHECNTKCQTPLGAINSSLPYQNIHPVTIGECPKYVRSAKLRMVTGLRNIPSIQSRGLFGAIAGFIEGGWTGMIDGWYGYHHQNEQGSGYAADQKSTQNAINGITNKVNTVIEKMNIQFTAVGKEFNKLEKRMENLNKKVDDGFLDIWTYNAELLVLLENERTLDFHDSNVKNLYEKVKSQLKNNAKEIGNGCFEFYHKCDNECMESVRNGTYDYPKYSEESKLNREKVDGVKLESMGIYQILAIYSTVASSLVLLVSLGAISFWMCSNGSLQCRICI

SEQ ID NO: 10171 - protein, 565 aa, Artificial Sequence
  derived and/or modified protein sequence (wt) from hemagglutinin__InfluenzaA__AGQ48026
MKANLLVLLCALAAADADTICIGYHANNSTDTVDTVLEKNVTVTHSVNLLEDSHNGKLCKLKGIAPLQLGKCNIAGWLLGNPGCDPLLPVGSWSYIVETPNSENGICYPGDFIDYEELREQLSSVSSFERFKIFPKESSWPDHNTNGVTAACSHEGKNSFYRNLLWLTKKESSYPELKNSYVNKKRKEVLVLWGIHHPPNSKEQQNLYQNENAYVSVVTSNYNRRFTPEIAERPKVKDQAGRMNYYWTLLKPGDTIIFEANGNLIAPMYAFALSRGFGSGIITSNASMHECNTKCQTPLGAINSSLPYQNIHPVTIGECPKYVRSAKLRMVTGLRNIPSIQSRGLFGAIAGFIEGGWTGMIDGWYGYHHQNEQGSGYAADQKSTQNAINGITNKVNTVIEKMNIQFTAVGKEFNKLEKRMENLNKKVDDGFLDIWTYNAELLVLLENERTLDFHDSNVKNLYEKVKSQLKNNAKEIGNGCFEFYHKCDNECMESVRNGTYDYPKYSEESKLNREKVDGVKLESMGIYQILAIYSTVASSLVLLVSLGAISFWMCSNGSLQCRICI

SEQ ID NO: 10172 - protein, 565 aa, Artificial Sequence
  derived and/or modified protein sequence (wt) from hemagglutinin__InfluenzaA__AGQ48038
MKANLLVLLCALAAADADTICIGYHANNSTDTVDTVLEKNVTVTHSVNLLEDSHNGKLCKLKGIAPLQLGKCNIAGWLLGNPGCDPLLPVGSWSYIVETPNSENGICYPGDFIDYEELREQLSSVSSFERFKIFPKESSWPDHNTNGVTAACSHEGKNSFYRNLLWLTKKESSYPELKNSYVNKKREEVLVLWGIHHPPNSEEQQNLYQNENAYVSVVTSNYNRRFTPEIAERPKVKGQAGRMNYYWTLLKPGDTIIFEANGNLIAPMYAFALSRGFGSGIITSNASMHECNTKCQTPLGAINSSLPYQNIHPVTIGECPKYVRSAKLRMVTGLRNIPSIQSRGLFGAIAGFIEGGWTGMIDGWYGYHHQNEQGSGYAADQKSTQNAINGITNKVNTVIEKMNIQFTAVGKEFNKLEKRMENLNKKVDDGFLDIWTYNAELLVLLENERTLDFHDSNVKNLYEKVKSQLKNNAKEIGNGCFEFYHKCDNECMESVRNGTYDYPKYSEESKLNREKVDGVKLESMGIYQILAIYSTVASSLVLLVSLGAISFWMCSNGSLQCRICI

SEQ ID NO: 10173 - protein, 565 aa, Artificial Sequence
  derived and/or modified protein sequence (wt) from hemagglutinin__InfluenzaA__AGQ48050
MKANLLVLLCALAAADADTICIGYHANNSTDTVDTVLEKNVTVTHSVNLLEDSHNGKLCKLKGIAPLQLGKCNIAGWLLGNPGCDPLLPVGSWSYIVETPNSENGICYPGDFIDYEELREQLSSVSSFERFKIFPKESSWPDHNTNGVTAACSHEGKNSFYRNLLWLTKKESSYPELKNSYVNKKREEVLVLWGIHHPPDSEEQQNLYQNENAYVSVVTSNYNRRFTPEIAERPKVKGQAGRMNYYWTLLKPGDTIIFKANGNLIAPMYAFALSRGFGSGIITSNASMHECNTKCQTPLGAINSSLPYQNIHPVTIGECPKYVRSAKLRMVTGLRNIPSIQSRGLFGAIAGFIEGGWTGMIDGWYGYHHQNEQGSGYAADQKSTQNAINGITNKVNTVIEKMNIQFTAVGKEFNKLEKRMENLNKKVDDGFLDIWTYNAELLVLLENERTLDFHDSNVKNLYEKVKSQLKNNAKEIGNGCFEFYHKCDNECMESVRNGTYDYPKYSEESKLNREKVDGVKLESMGIYQILAIYSTVASSLVLLVSLGAISFWMCSNGSLQCRICI

SEQ ID NO: 10174 - protein, 562 aa, Artificial Sequence
  derived and/or modified protein sequence (wt) from hemagglutinin__InfluenzaA__AGQ80946
MAIIYLILLFTAVRGDQICIGYHSNNSTEKVDTILERNVTVTHAQDILEKTHNGKLCKLNGIPPLELGDCSIAGWLLGNPECDRLLTVPEWSYIMEKENPRNGLCYPGSFNDYEELKHLLSSVTHFEKVKILPKDRWTQHTTTGGSRACAVSGNPSFFRNMVWLTKKGPNYPVAKGSYNNTSGDQMLIIWGVHHPNDEAEQRTLYQNVGTYVSVGTSTLNKRSVPEIATRPKVNGQGGRMEFSWTILDVLDTINFESTGNLIAPEYGFKISKRGSSGIMKTEGTLENCETKCQTPLGAINTTLPFHNIHPLTIGECPKYVKSERLVLATGLRNVPQIESRGLFGAIAGFIEGGWQGMVDGWYGYHHSNDQGSGYAADKESTQKAIDGITNKVNSVIEKMNTQFEAVGKEFSNLEKRLENLNKKMEDGFLDVWTYNAELLVLMENERTLDFHDSNVKNLYDKVRMQLRDNAKELGNGCFEFYHKCDDECMNSVKNGTYDYPKYEEESKLNRNEIKGVKLSNMGVYQILAIYATVAGSLSLAIMIAGISLWMCSNGSLQCRICI

SEQ ID NO: 10175 - protein, 562 aa, Artificial Sequence
  derived and/or modified protein sequence (wt) from hemagglutinin__InfluenzaA__AGQ80947
MAIIYLILLFATVRGDQICIGYHSNNSTEKVDTILERNITVTHAQDILEKTHNGKLCKLNGIPPLELGNCSIAGWLLGNPECDRLLTVPEWSYIMEKENPRDGLCYPGSFNDYEELKHLLSSVTHFEKVKILPKDRWTQHTTTGGSRACAVSGNPSFFRNMVWLTKKGSNYPIAKGSYNNTSGEQMLIIWGVHHPNDDAEQRTLYQNVGTYVSVGTSTLNKRSIPEIATRPKVNGQGGRMEFSWTILDMLDTINFESTGNLIAPEYGFKISKRGSSGIMKTEGTLENCETKCQTPLGAINTTLPFHNIHPLTIGECPKYVKSERLVLATGLRNVPQIESRGLFGAIAGFIEGGWQGMVDGWYGYHHSNDQGSGYAADKESTQKAIDGITNKVNSVIEKMNTQFEAVGKEFNNLEKRLENLNKKMEDGFLDVWTYNAELLVLMENERTLDFHDSNVKNLYDKVRMQLKDNAKELGNGCFEFYHKCDDECMNSVKNGTYDYPKYEEESKLNRNEIKGVKLSNMGVYQILAIYATVAGSLSLAIMIAGVSLWMCSNGSLQCRICI

SEQ ID NO: 10176 - protein, 562 aa, Artificial Sequence
  derived and/or modified protein sequence (wt) from hemagglutinin__InfluenzaA__AGQ80948
MAIIYLILLFAAVRGDQICIGYHSNNSTEKVDTILERNVTVTHAQDILEKTHNGKLCKLNGIPPLELGNCSIAGWLLGNPECDRLLTVPEWSYIMEKENPRNGLCYPGSFNDYEELKHLLSSVTHFEKVKILPKDRWTQHTTTGGSRACAVFGNPSFFRNMVWLTKKGSNYPIAKGSYNNTSGEQMLIIWGVHHPNDDAEQRTLYQNVGTYVSVGTSTLNKRSIPEIATRPKVNGQGGRMEFSWTILDMLDTINFESTGNLIAPEYGFKISKRGSSGIMKTEGTLENCETKCQTPLGAINTTLPFHNIHPLTIGECPKYVKSERLVLATGLRNVPQIESRGLFGAIAGFIEGGWQGMVDGWYGYHHSNDQGSGYAADKESTQKAIDGITNKVNSVIEKMNTQFEAVGKEFNNLEKRLENLNKKMEDGFLDVWTYNAELLVLMENERTLDFHDSNVKNLYDKIRMQLKDNAKELGNGCFEFYHKCDDECMNSVKNGTYDYPKYEEESKLNRNEIKGVKLSNMGVYQILAIYATVAGSLSLAIMIAGISLWMCSNGSLQCRICI

SEQ ID NO: 10177 - protein, 562 aa, Artificial Sequence
  derived and/or modified protein sequence (wt) from hemagglutinin__InfluenzaA__AGQ80949
MAIIYLILLFAAVRGDQICIGYHSNNSTEKVDTILERNVTVTHAQDILEKTHNGKLCKLNGIPPLELGDCSIAGWLLGNPECDRLLTVPEWSYIMEKENPRNGLCYPGSFNDYEELKHLLSSVTHFEKVKILPKDRWTQHTTTGGSRACAVSGNPSFFRNMVWLTKKGSNYPIAKGSYNNTSGEQMLIIWGVHHPNDDAEQRTLYQNVGTYVSVGTSTLNKRSIPEIATRPKVNGQGGRMEFSWTILDMLDTINFESTGNLIAPEYGFKISKRGSSGIMKTEGTLENCETKCQTPLGAINTTLPFHNIHPLTIGECPKYVKSERLVLATGLRNVPQIESRGLFGAIAGFIEGGWQGMVDGWYGYHHSNDQGSGYAADKESTQKAIDGITNKVNSVIEKMNTQFEAVGKEFNNLEKRLENLNKKMEDGFLDVWTYNAELLVLMENERTLDFHDSNVKNLYDKIRMQLKDNAKELGNGCFEFYHKCDDECMNSVKNGTYDYPKYEEESKLNRNEIKGVKLSNMGVYQILAIYATVAGSLSLAIMIAGISLWMCSNGSLQCRICI

SEQ ID NO: 10178 - protein, 566 aa, Artificial Sequence
  derived and/or modified protein sequence (wt) from hemagglutinin__InfluenzaA__AGQ80950
MKTIIALSYIFCLAFGQNLPGNDSSTATLCLGHHAVLNGTIVKTITDDQIEVTNATELVQSSSTGKICNNPHKILDGRDCTLIDALLGDPHCDVFQDETWDLFVERSSAFSNCYPYDVPDYASLRSLVASSGTLEFITEGFTWTGVSQNGGSGACKRGPANGFFSRLNWLTKSGNAYPVLNVTMPNSDNFDKLYIWGVHHPSTNQEQTNLYVQASGRVTVSTRRSQQTIIPNIGSRPWVRGQSGRISIYWTIVKPGDVLVINSNGNLIAPRGYFKMRTGKSSIMRSDAPIETCISECITPNGSIPNDKPFQNVNKITYGACPKYVKQNTLKLATGMRNVPEKQTRGLFGAIAGFIENGWEGMIDGWYGFRHQNSEGTGQAADLKSTQAAIDQINGKLNRVIEKTNEKFHQIEKEFSEVEGRIQDLEKYVEDTKIDLWSYNAELLVALENQHTIDLTDSEMNKLFEKTRRQLRENAEDMGNGCFKIYHKCDNACIESIRNGTYDHDIYRDEALNNRFQIKGVELKSGYKDWILWISFAISCFLLCVVLLGFIMWACQRGNIRCNICI

SEQ ID NO: 10179 - protein, 564 aa, Artificial Sequence
  derived and/or modified protein sequence (wt) from hemagglutinin__InfluenzaA__AGQ80951
MLSIVILFLLVAESSSQNYTGNPVICMGHHAVANGTMVKTLTDDQVEVVTAQELVESQNLPELCPSPLRLVDGQTCDIINGALGSPGCDHLNGAEWDIFIERPNAMDTCYPFDVPDYQSLRSILANNGKFEFIAEEFQWSTVKQNGKSGACKRANVNDFFNRLNWLVKSDGNAYPLQNLTKVNNGDYARLYIWGVHHPSTDTEQTNLYKNNPGRVTVSTKTSQTSVVPNIGSRPWVRGQSGRISFYWTIVEPGDLIVFNTIGNLIAPRGHYKLNSQKKSTILNTATPIGSCVSKCHTDKGSLSTTKPFQNISRVAIGDCPKYVKQGSLKLATGMRNIPEKASRGLFGAIAGFIENGWQGLIDGWYGFRHQNAEGTGTAADLKSTQAAIDQINGKLNRLIEKTNEKYHQIEKEFEQVEGRIQDLEKYVEDTKIDLWSYNAELLVALENQHTIDVTDSEMNKLFERVRRQLRENAEDKGNGCFEIFHKCDNNCIESIRNGTYDHDVYRNEAINNRFQIQGVKLTQGYKDIILWISFSISCFLLVALLLAFILWACQNGNIRCQICI

SEQ ID NO: 10180 - protein, 560 aa, Artificial Sequence
  derived and/or modified protein sequence (wt) from hemagglutinin__InfluenzaA__AGQ80953
MNTQILVFALVAIIPTNADKICLGHHAVSNGTKVNTLTERGVEVVNATETVERTSIPRICSKGKRAVDLGQCGLLGTITGPPQCDQFLEFSADLIIERREGSDVCYPGKFVNEEALRQILRESGGIDKETMGFTYSGIRTNGATSACRRSGSSFYAEMKWLLSNTDNAAFPQTTKSYKNTRKDPALIIWGIHHSGSTTEQTKLYGSGNKLITVGSSNYQQSFVPSPGARPQVNGQSGRIDFHWLMLNPNDTVTFSFNGAFIAPDRASFLRGKSMGIQSGVQVDANCEGDCYHNGGTIISNLPFQNINSRAVGKCPRYVKQESLLLATGMKNVPEIPKGRGLFGAIAGFIENGWEGLIDGWYGFRHQNAQGEGTAADYKSTQSAIDQITGKLNRLIEKTNQQFELIDNEFTEVERQIGNVINWTRDSMTEVWSYNAELLVAMENQHTIDLADSEMNKLYERVRRQLRENAEEDGTGCFEIFHKCDDDCMASIRNNTYDHSKYREEAMQNRIQIDPVKLSSGYKDVILWFSFGASCFILLAIAMGLVFICVKNGNMRCTICI

SEQ ID NO: 10181 - protein, 560 aa, Artificial Sequence; identical to SEQ ID NO: 10180
  derived and/or modified protein sequence (wt) from hemagglutinin__InfluenzaA__AGQ80954

SEQ ID NO: 10182 - protein, 560 aa, Artificial Sequence; identical to SEQ ID NO: 10180
  derived and/or modified protein sequence (wt) from hemagglutinin__InfluenzaA__AGQ80955

SEQ ID NO: 10183 - protein, 560 aa, Artificial Sequence; identical to SEQ ID NO: 10180
  derived and/or modified protein sequence (wt) from hemagglutinin__InfluenzaA__AGQ80956

SEQ ID NO: 10184 - protein, 560 aa, Artificial Sequence; identical to SEQ ID NO: 10180
  derived and/or modified protein sequence (wt) from hemagglutinin__InfluenzaA__AGQ80957

SEQ ID NO: 10185 - protein, 560 aa, Artificial Sequence; identical to SEQ ID NO: 10180
  derived and/or modified protein sequence (wt) from hemagglutinin__InfluenzaA__AGQ80958

SEQ ID NO: 10186 - protein, 560 aa, Artificial Sequence
  derived and/or modified protein sequence (wt) from hemagglutinin__InfluenzaA__AGQ80959
MNTQILVFALIAIIPTNADKICLGHHAVSNGTKVNTLTERGVEVVNATETVERTNIPRICSKGKRTVDLGQCGLLGTITGPPQCDQFLEFSADLIIERREGSDVCYPGKFVNEEALRQILRESGGIDKEAMGFTYSGIRTNGATSACRRSGSSFYAEMKWLLSNTDNAAFPQMTKSYKNTRKDPALIIWGIHHSGSTAEQTKLYGSGNKLVTVGSSNYQQSFVPSPGARPQVNGQSGRIDFHWLMLNPNDTVTFSFNGAFIAPDRASFLRGKSMGIQSGVQVDANCEGDCYHGGGTIISNLPFQNIDSRAVGKCPRYVKQKSLLLATGMKNVPESPKGRGLFGAIAGFIENGWEGLIDGWYGFRHQNAQGEGTAADYKSTQSAIDQITGKLNRLIEKTNQQFELIDNEFTEVEKQIGNVINWTRDSITEVWSYNAELLVAMENQHTIDLADSEMNKLYERVKRQLRENAEEDGTGCFEIFHKCDDDCMASIRNNTYDHSKYREEAMQNRIQIDPVKLSSGYKDVILWFSFGASCFILLAIAMGLVFICVKNGNMRCTICI

SEQ ID NO: 10187 - protein, 560 aa, Artificial Sequence
  derived and/or modified protein sequence (wt) from hemagglutinin__InfluenzaA__AGQ80961
MNTQILVFALVAIIPTNADKICLGHHAVSNGTKVNTLTERGVEVVNATETVERTNVPKICSKGKRTVDLGQCGLLGTITGPPQCDQFLEFSADLIIERREGSDVCYPGKFVNEETLRQILRESGGIDKETMGFTYSGIRTNGATSACRRSGSSFYAEMKWLLSNTDNAAFPQMTKSYKNARKDPALIIWGIHHSGSTTEQTKLYGSGNKLITVGSSNYQQSFVPSPGARPQVNGQSGRIDFHWLMLNPNDTVTFSFNGAFIAPDRACFLRGKSMGIQSGVQVDASCEGDCYHSGGTIISNLPFQNINSRAVGKCPRYVKQESLMLATGMKNVPEIPKGRGLFGAIAGFIENGWEGLIDGWYGFRHQNAQGEGTAADYKSTQSAIDQITGKLNRLIEKTNQQFELIDNEFTEVEKQIGNVINWTRDSMTEVWSYNAELLVAMENQHTIDLADSEMNKLYERVKRQLRENAEEDGTGCFEIFHKCDDDCMASIRNNTYDHSKYREEAMQNRIKIDPVKLSSGYKDVILWFSFGASCFILLAIAMGLVFICVKNGNMRCTICI

SEQ ID NO: 10188 - protein, 560 aa, Artificial Sequence; identical to SEQ ID NO: 10187
  derived and/or modified protein sequence (wt) from hemagglutinin__InfluenzaA__AGQ80962

SEQ ID NO: 10189 - protein, 560 aa, Artificial Sequence
  derived and/or modified protein sequence (wt) from hemagglutinin__InfluenzaA__AGQ80964
MNTQILVFALIAIIPTNADKICLGHHAVSNGTKVNTLTERGVEVVNATETVERTNIPRICSKGKRTVDLGQCGLLGTITGPPQCDQFLEFSADLIIERREGSDVCYPGKFVNEEALRQILRESGGIDKEAMGFTYSGIRTNGATSACRRSGSSFYAEMKWLLSNTDNAAFPQMTKSYKNTRKDPALIIWGIHHSGSTAEQTKLYGSGNKLVTVGSSNYQQSFVPSPGARPQVNGQSGRIDFHWLMLNPNDTVTFSFNGAFIAPDRASFLRGKSMGIQSGVQVDADCEGDCYHSGGTIISNLPFQNIDSRAVGKCPRYVKQRSLLLATGMKNVPEIPKGRGLFGAIAGFIENGWEGLIDGWYGFRHQNAQGEGTAADYKSTQSAIDQITGKLNRLIEKTNQQFELIDNEFTEVEKQIGNVINWTRDSITEVWSYNAELLVAMENQHTIDLADSEMNKLYERVKRQLRENAEEDGTGCFEIFHKCDDDCMASIRNNTYDHSKYREEAMQNRIQIDPVKLSSGYKDVILWFSFGASCFILLAIAMGLVFICVKNGNMRCTICI

SEQ ID NO: 10190 - protein, 560 aa, Artificial Sequence; identical to SEQ ID NO: 10180
  derived and/or modified protein sequence (wt) from hemagglutinin__InfluenzaA__AGQ80965

SEQ ID NO: 10191 - protein, 560 aa, Artificial Sequence; identical to SEQ ID NO: 10180
  derived and/or modified protein sequence (wt) from hemagglutinin__InfluenzaA__AGQ80966

SEQ ID NO: 10192 - protein, 560 aa, Artificial Sequence; identical to SEQ ID NO: 10180
  derived and/or modified protein sequence (wt) from hemagglutinin__InfluenzaA__AGQ80968

SEQ ID NO: 10193 - protein, 560 aa, Artificial Sequence
  derived and/or modified protein sequence (wt) from hemagglutinin__InfluenzaA__AGQ80970
MNTQILVFALVAIIPTNADKICLGHHAVSNGTKVNTLTERGVEVVNATETVERTSIPRICSKGKKAVDLGQCGLLGTITGPPQCDQFLEFSADLIIERREGSDVCYPGKFVNEEALRQILRESGGIDKETMGFTYSGIRTNGATSACRRSGSSFYAEMKWLLSNTDNAAFPQTTKSYKNTRKDPALIIWGIHHSGSTTEQTKLYGSGNKLITVGSSNYQQSFVPSPGARPQVNGQSGRIDFHWLMLNPNDTVTFSFNGAFIAPDRASFLRGKSMGIQSGVQVDANCEGDCYHNGGTIISNLPFQNINSRAVGKCPRYVKQESLLLATGMKNVPEIPKGRGLFGAIAGFIENGWEGLIDGWYGFRHQNAQGEGTAADYKSTQSAIDQITGKLNRLIEKTNQQFELIDNEFTEVERQIGNVINWTRDSMTEVWSYNAELLVAMENQHTIDLADSEMNKLYERVRRQLRENAEEDGTGCFEIFHKCDDDCMASIRNNTYDHSKYREEAMQNRIQIDPVKLSSGYKDVILWFSFGASCFILLAIAMGLVFICVKNGNMRCTICI

SEQ ID NO: 10194 - protein, 560 aa, Artificial Sequence
  derived and/or modified protein sequence (wt) from hemagglutinin__InfluenzaA__AGQ80971
MNTQILVFALVAIIPTNADKICLGHHAVSNGTKVNTLTERGVEVVNATETVERTSIPRICSKGKKTVDLGQCGLLGTITGPPQCDQFLEFSADLIIERREGSDVCYPGKFVNEEALRQILRESGGIDKETMGFTYSGIRTNGATSACRRSGSSFYAEMKWLLSNTDNAAFPQTTKSYKNTRKDPALIIWGIHHSGSTTEQTKLYGSGNKLITVGSSNYQQSFVPSPGARPQVNGQSGRIDFHWLMLNPNDTVTFSFNGAFIAPDRASFLRGKSMGIQSGVQVDANCEGDCYHNGGTIISNLPFQNINSRAVGKCPRYVKQESLLLATGMKNVPEIPKGRGLFGAIAGFIENGWEGLIDGWYGFRHQNAQGEGTAADYKSTQSAIDQITGKLNRLIEKTNQQFELIDNEFTEVERQIGNVINWTRDSMTEVWSYNAELLVAMENQHTIDLADSEMNKLYERVRRQLRENAEEDGTGCFEIFHKCDDDCMASIRNNTYDHSKYREEAMQNRIQIDPVKLSSGYKDVILWFSFGASCFILLAIAMGLVFICVKNGNMRCTICI

SEQ ID NO: 10195 - protein, 560 aa, Artificial Sequence
  derived and/or modified protein sequence (wt) from hemagglutinin__InfluenzaA__AGQ80974
MNTQILVFALVAIIPTNADKICLGHHAVSNGTKVNTLTERGVEVVNATETVERTSIPRICSKGKRAVDLGQCGLLGTITGPPQCDQFLEFSADLIIERREGSDVCYPGKFVNEEALRQILRESGGIDKETMGFTYSGIRTNGATSACRRSGSSFYAEMKWLLSNTDNAAFPQTTKSYKNTRKDPALIIWGIHHSGSTTEQTKLYGSGNKLITVGSSNYQQSFVPSPGARPQVNGQSGRIDFHWLMLNPNDTVTFSFNGAFIAPDRASFLRGKSMGIQSGVQVDANCEGDCYHNGGTIISNLPFQNINSRAVGKCPRYVKQESLLLATGMKNVPEIPKGRGLFGAIAGFIENGWEGLVDGWYGFRHQNAQGEGTAADYKSTQSAIDQITGKLNRLIEKTNQQFELIDNEFTEVERQIGNVINWTRDSMTEVWSYNAELLVAMENQHTIDLADSEMNKLYERVRRQLRENAEEDGTGCFEIFHKCDDDCMASIRNNTYDHSKYREEAMQNRIQIDPVKLSSGYKDVILWFSFGASCFILLAIAMGLVFICVKNGNMRCTICI

SEQ ID NO: 10196 - protein, 560 aa, Artificial Sequence
  derived and/or modified protein sequence (wt) from hemagglutinin__InfluenzaA__AGQ80977
MNTQILALALAAIIPTNADKICLGHHAVSNGTKVNTLTERGVEVVNATETVERTSIPRICSKGKRAVDLGQCGLLGTITGPPQCDQFLEFSADLIIERREGSDVCYPGKFVNEEALRQILRESGGIDKETMGFTYSGIRTNGATSACRRSGSSFYAEMKWLLSNTDNAAFPQTTKSYKNTRKDPALIIWGVHHSGSTTEQTKLYGSGNKLITVGSSNYQQSFVPSPGARPQVNGQSGRIDFHWLMLNPNDTVTFSFNGAFIAPDRASFLRGKSMGIQSGVQVDANCEGDCYHNGGTIISNLPFQNINSRAVGKCPRYVKQESLLLATGMKNVPEIPKGRGLFGAIAGFIENGWEGLVDGWYGFRHQNAQGEGTAADYKSTQSAIDQITGKLNRLIEKTNQQFELIDNEFTEVERQIGNVINWTRDSMTEVWSYNAELLVAMENQHTIDLADSEMNKLYERVRRQLRENAEEDGTGCFEIFHKCDDDCMASIRNNTYDHSKYREEAMQNRIQIDPVKLSSGYKDVILWFSFGASCFILLAIAMGLVFICVKSGNMRCTICI

SEQ ID NO: 10197 - protein, 560 aa, Artificial Sequence
  derived and/or modified protein sequence (wt) from hemagglutinin__InfluenzaA__AGQ80978
MNTQILVFALVAIIPTNADKICLGHHAVSNGTKVNTLTERGVEVVNATETVERTSIPRICSKGKRAVDLGQCGLLGTITGPPQCDQFLEFSADLIIERREGSDVCYPGKFVNEEALRQILRESGGIDKETMGFTYSGIRTNGATSACRRSGSSFYAEMKWLLSNTDNAAFPQTTKSYKNTRKDPALIIWGIHHSGSITEQTKLYGSGNKLITVGSSNYQQSFVPSPGARPQVNGQSGRIDFHWLMLNPNDTVTFSFNGAFIAPDRASFLRGKSMGIQSGVQVDANCEGDCYHNGGTIISNLPFQNINSRAVGKCPRYVKQESLLLATGMKNVPEIPKGRGLFGAIAGFIENGWEGLVDGWYGFRHQNAQGEGTAADYKSTQSAIDQITGKLNRLIEKTNQQFELIDNEFTEVERQIGNVINWTRDSMTEVWSYNAELLVAMENQHTIDLADSEMNKLYERVRRQLRENAEEDGTGCFEIFHKCDDDCMASIRNNTYDHSKYREEAMQNRIQIDPVKLSSGYKDVILWFSFGASCFILLAIAMGLVFICVKNGNMRCTICI

SEQ ID NO: 10198 - protein, 560 aa, Artificial Sequence
  derived and/or modified protein sequence (wt) from hemagglutinin__InfluenzaA__AGQ80979
MNTQILVFALVAIIPTNADKICLGHHAVSNGTKVNTLTERGVEVVNATETVERTSIPRICSKGKRAVDLGQCGLLGTITGPPQCDQFLEFSADLIIERREGSDVCYPGKFVNEEALRQILRESGGIDKETMGFTYSGIRTNGATSACRRSGSSFYAEMKWLLSNTDNAAFPQTTKSYKNTRKDPALIIWGIHHSGSTTEQTKLYGSGNKLITVGSSNYQQSFVPSPGARPQVNGQSGRIDFHWLMLNPNDTVTFSFNGAFIAPDRASFLRGKSIGIQSGVQVDANCEGDCYHNGGTIISNLPFQNINSRAVGKCPRYVKQESLLLATGMKNVPEIPKGRGLFGAIAGFIENGWEGLIDGWYGFRHQNAQGEGTAADYKSTQSAIDQITGKLNRLIEKTNQQFELIDNEFTEVERQIGNVINWTRDSMTEVWSYNAELLVAMENQHTIDLADSEMNKLYERVRRQLRENAEEDGTGCFEIFHKCDDDCMASIRNNTYDHSKYREEAMQNRIQIDPVKLSSGYKDVILWFSFGASCFILLAIAMGLVFICVKNGNMRCTICI

SEQ ID NO: 10199 - protein, 560 aa, Artificial Sequence; identical to SEQ ID NO: 10195
  derived and/or modified protein sequence (wt) from hemagglutinin__InfluenzaA__AGQ80980

SEQ ID NO: 10200 - protein, 560 aa, Artificial Sequence; identical to SEQ ID NO: 10180
  derived and/or modified protein sequence (wt) from hemagglutinin__InfluenzaA__AGQ80981

SEQ ID NO: 10201 - protein, 560 aa, Artificial Sequence; identical to SEQ ID NO: 10180
  derived and/or modified protein sequence (wt) from hemagglutinin__InfluenzaA__AGQ80982

SEQ ID NO: 10202 - protein, 560 aa, Artificial Sequence; identical to SEQ ID NO: 10180
  derived and/or modified protein sequence (wt) from hemagglutinin__InfluenzaA__AGQ80983

SEQ ID NO: 10203 - protein, 560 aa, Artificial Sequence; identical to SEQ ID NO: 10180
  derived and/or modified protein sequence (wt) from hemagglutinin__InfluenzaA__AGQ80984

SEQ ID NO: 10204 - protein, 560 aa, Artificial Sequence; identical to SEQ ID NO: 10180
  derived and/or modified protein sequence (wt) from hemagglutinin__InfluenzaA__AGQ80985

SEQ ID NO: 10205 - protein, 560 aa, Artificial Sequence; identical to SEQ ID NO: 10180
  derived and/or modified protein sequence (wt) from hemagglutinin__InfluenzaA__AGQ80986

SEQ ID NO: 10206 - protein, 560 aa, Artificial Sequence; identical to SEQ ID NO: 10180
  derived and/or modified protein sequence (wt) from hemagglutinin__InfluenzaA__AGQ80987

SEQ ID NO: 10207 - protein, 560 aa, Artificial Sequence; identical to SEQ ID NO: 10180
  derived and/or modified protein sequence (wt) from hemagglutinin__InfluenzaA__AGQ80988

SEQ ID NO: 10208 - protein, 560 aa, Artificial Sequence
  derived and/or modified protein sequence (wt) from hemagglutinin__InfluenzaA__AGQ80990
MNTQILVFALVAIIPTNADKICLGHHAVSNGTKVNTLTERGVEVVNATETVERTSIPKICSKGKRAVDLGQCGLLGTITGPPQCDQFLEFSADLIIERREGSDVCYPGKFVNEEALRQILRESGGIDKETMGFTYSGIRTNGATSACRRSGSSFYAEMKWLLSNTDNAAFPQTTKSYKNTRKDPALIIWGIHHSGSTTEQTKLYGSGNKLITVGSSNYQQSFVPSPGARPQVNGQSGRIDFHWLMLNPNDTVTFSFNGAFIAPDRASFLRGKSMGIQSGVQVDANCEGDCYHNGGTIISNLPFQNINSRAVGKCPRYVKQESLLLATGMKNVPEIPKGRGLFGAIAGFIENGWEGLIDGWYGFRHQNAQGEGTAADYKSTQSAIDQITGKLNRLIEKTNQQFELIDNEFTEVERQIGNVINWTRDSMTEVWSYNAELLVAMENQHTIDLADSEMNKLYERVRRQLRENAEEDGTGCFEIFHKCDDDCMASIRNNTYDHSKYREEAMQNRIQIDPVKLSSGYKDVILWFSFGASCFILLAIAMGLVFICVKNGNMRCTICI

SEQ ID NO: 10209 - protein, 560 aa, Artificial Sequence; identical to SEQ ID NO: 10194
  derived and/or modified protein sequence (wt) from hemagglutinin__InfluenzaA__AGQ80991

SEQ ID NO: 10210 - protein, 560 aa, Artificial Sequence
  derived and/or modified protein sequence (wt) from hemagglutinin__InfluenzaA__AGQ80992
MNTQILVFALVAIIPTNADKICLGHHAVSNGTKVNTLTERGVEVVNATETVERTNVPRICSKGKRTVDLGQCGLLGTITGPPQCDQFLEFSADLIIERREGSDVCYPGKFMNEEALRQILRESGGIDKETMGFTYSGIRTNGATSACRRSGSSFYAEMKWLLSNTDNAAFPQMTKSYKNTRKDPALIIWGIHHSGSTTEQTKLYGSGNKLITVGSSNYQQSFVPSPGARPQVNGQSGRIDFHWLMLNPNDTVTFSFNGAFIAPDRACFLRGKSMGIQSGVQVDASCEGDCYHSGGTIISNLPFQNINSRAVGKCPRYVKQESLMLATGMKNVPEIPKGRGLFGAIAGFIENGWEGLIDGWYGFRHQNAQGEGTAADYKSTQSAIDQITGKLNRLIEKTNQQFELIDNEFTEVEKQIGNVINWTRDSMTEVWSYNAELLVAMENQHTIDLADSEMNKLYERVKRQLRENAEEDGTGCFEIFHKCDDDCMASIRNNTYDHSKYREEAMQNRIQIDPVKLSSGYKDVILWFSFGASCFILLAIAMGLVFICVKNGNMRCTICI

SEQ ID NO: 10211 - protein, 560 aa, Artificial Sequence; identical to SEQ ID NO: 10180
  derived and/or modified protein sequence (wt) from hemagglutinin__InfluenzaA__AGQ80993

SEQ ID NO: 10212 - protein, 560 aa, Artificial Sequence; identical to SEQ ID NO: 10187
  derived and/or modified protein sequence (wt) from hemagglutinin__InfluenzaA__AGQ80994

SEQ ID NO: 10213 - protein, 560 aa, Artificial Sequence; identical to SEQ ID NO: 10189
  derived and/or modified protein sequence (wt) from hemagglutinin__InfluenzaA__AGQ80995

SEQ ID NO: 10214 - protein, 560 aa, Artificial Sequence; identical to SEQ ID NO: 10189
  derived and/or modified protein sequence (wt) from hemagglutinin__InfluenzaA__AGQ80996

SEQ ID NO: 10215 - protein, 560 aa, Artificial Sequence
  derived and/or modified protein sequence (wt) from hemagglutinin__InfluenzaA__AGQ80997
MNTQILVFALVAIIPTNADKICLGHHAVSNGTKVNTLTERGVEVVNATETVERTNIPRICSKGKRTVDLGQCGLLGTITGPPQCDQFLEFSADLIIERREGSDVCYPGKFVNEEALRQILRESGGIDKETMGFTYSGIRTDGATSACRRSGSSFYAEMKWLLSNTDNAAFPQMTKSYKNTRKDPALIIWGIHHSGSTTEQTKLYGSGNKLITVGSSNYQQSFVPSPGARPQVNGQSGRIDFHWLMLNPNDTVTFSFNGAFIAPDRASFLRGKSMGIQSGVQVDANCEGDCYHSGGTIISNLPFQNINSRAVGKCPRYVKQESLLLATGMKNVPEIPKGRGLFGAIAGFIENGWEGLIDGWYGFRHQNSQGEGTAADYKSTQSAIDQITGKLNRLIEKTNQQFELIDNEFTEVEKQIGNVINWTRDSMTEVWSYNAELLVAMENQHTIDLADSEMNKLYERVKRQLRENAEEDGTGCFEIFHKCDDDCMASIRNNTYDHSKYREEAMQNRIQIDPVKLSSGYKDVILWFSFGASCFILLAIAMGLVFICVKNGNMRCTICI

SEQ ID NO: 10216 - protein, 560 aa, Artificial Sequence
  derived and/or modified protein sequence (wt) from hemagglutinin__InfluenzaA__AGQ81000
MNTQILVFALVAIIPTNADKICLGHHAVSNGTKVNTLTERGVEVVNATETVERTNIPRICSKGKRTVDLGQCGLLGTITGPPQCDQFLEFSADLIIERREGSDVCYPGKFVNEEALRQILRESGGIGKETMGFTYSGIRTNGATSACRRSGSSFYAEMKWLLSNTDNAAFPQMTKSYKNTRKDPALIIWGIHHSGSTTEQTKLYGSGNKLITVGSSNYQKSFVPSPGARPQVNGQSGRIDFHWLMLNPNDTVTFSFNGAFIAPDRASFLRGKSMGIQSGVQVDANCEGDCYHNGGTIISNLPFQNINSRAVGKCPRYVKQESLLLATGMKNVPEIPKGRGLFGAIAGFIENGWEGLIDGWYGFRHQNAQGEGTAADYKSTQSAIDQITGKLNRLIEKTNQQFELIDNEFTEVEKQIGNVINWTRDSMTEVWSYNAELLVAMENQHTIDLADSEMNKLYERVKRQLRENAEEDGTGCFEIFHKCDDDCMASIRNNTYDHSKYREEAMQNRIQIDPVKLSSGYKDVILWFSFGASCFILLAIAMGLVFICVKNGNMRCTICI

SEQ ID NO: 10217 - protein, 560 aa, Artificial Sequence
  derived and/or modified protein sequence (wt) from hemagglutinin__InfluenzaA__AGQ81001
MNTQILVFALVAIIPTNADKICLGHHAVSNGTKVNTLTERGVEVVNATETVERTNIPRICSKGKRTVDLGQCGLLGTITGPPQCDQFLEFSADLIIERREGSDVCYPGKFVNEEALRQILRESGGIDKETMGFTYSGIRTNGATSACRRSGSSFYAEMKWLLSNTDNAAFPQMTKSYKNTRKDPALIIWGIHHSGSTTEQTKLYGSGNKLITVGTSNYQQSFVPSPGARPQVNGQSGRIDFHWLMLNPNDTVTFSFNGAFIAPDRASFLRGKSMGIQSGVQVDANCEGDCYHNGGTIISNLPFQNINSRAVGKCPRYVKQESLLLATGMKNVPEIPKGRGLFGAIAGFIENGWEGLIDGWYGFRHQNAQGEGTAADYKSTQSAIDQITGKLNRLIEKTNQQFELIDNEFTEIEKQIGNVINWTRDSMTEVWSYNAELLVAMENQHTIDLADSEMNKLYERVKRQLRENAEEDGTGCFEIFHKCDDDCMASIRNNTYDHSKYREEAMQNRIQIDPVKLSSGYKDVILWFSFGASCFILLAIAMGLVFICVKNGNMRCTICI

SEQ ID NO: 10218 - protein, 560 aa, Artificial Sequence; identical to SEQ ID NO: 10195
  derived and/or modified protein sequence (wt) from hemagglutinin__InfluenzaA__AGQ81002

SEQ ID NO: 10219 - protein, 560 aa, Artificial Sequence; identical to SEQ ID NO: 10195
  derived and/or modified protein sequence (wt) from hemagglutinin__InfluenzaA__AGQ81003

SEQ ID NO: 10220 - protein, 560 aa, Artificial Sequence; identical to SEQ ID NO: 10195
  derived and/or modified protein sequence (wt) from hemagglutinin__InfluenzaA__AGQ81004

SEQ ID NO: 10221 - protein, 560 aa, Artificial Sequence; identical to SEQ ID NO: 10195
  derived and/or modified protein sequence (wt) from hemagglutinin__InfluenzaA__AGQ81005

SEQ ID NO: 10222 - protein, 560 aa, Artificial Sequence; identical to SEQ ID NO: 10195
  derived and/or modified protein sequence (wt) from hemagglutinin__InfluenzaA__AGQ81006

SEQ ID NO: 10223 - protein, 560 aa, Artificial Sequence; identical to SEQ ID NO: 10195
  derived and/or modified protein sequence (wt) from hemagglutinin__InfluenzaA__AGQ81007

SEQ ID NO: 10224 - protein, 560 aa, Artificial Sequence; identical to SEQ ID NO: 10195
  derived and/or modified protein sequence (wt) from hemagglutinin__InfluenzaA__AGQ81008

SEQ ID NO: 10225 - protein, 560 aa, Artificial Sequence
  derived and/or modified protein sequence (wt) from hemagglutinin__InfluenzaA__AGQ81009
MNTQILVFALVAIIPTNADKICLGHHAVSNGTKVNTLTERGVEVVNATETVERTSIPRICSKGKRAVDLGQCGLLGTITGPPQCDQFLEFSADLIIERQEGSDVCYPGKFVNEEALRQILRESGGINKETMGFTYSGIRTNGATSACRRSGSSFYAEMKWLLSNTDNAAFPQTTKSYKNTRKDPALIIWGIHHSGSTTEQTKLYGSGNKLITVGSSNYQQSFVPSPGARPQVNGQSGRIDFHWLMLNPNDTVTFSFNGAFIAPDRASFLRGKSMGIQSGVQVDANCEGDCYHNGGTIISNLPFQNINSRAVGKCPRYVKQESLLLATGMKNVPEIPKGRGLFGAIAGFIENGWEGLVDGWYGFRHQNAQGEGTAADYKSTQSAIDQITGKLNRLIEKTNQQFELIDNEFTEVERQIGNVINWTRDSMTEVWSYNAELLVAMENQHTIDLADSEMNKLYERVRRQLRENAEEDGTGCFEIFHKCDDDCMASIRNNTYDHSKYREEAMQNRIQIDPVKLSSGYKDVILWFSFGASCFILLAIAMGLVFICVKNGNMRCTICI

SEQ ID NO: 10226 - protein, 560 aa, Artificial Sequence
  derived and/or modified protein sequence (wt) from hemagglutinin__InfluenzaA__AGQ81011
MNTQILVFALIAITPTNSDKICLGHHAVSNGTKVNTLTERGVEVVNATETVERTSIPRICSKGKRTVDLGQCGLLGTITGPPQCDQFLEFSADLIIERREGSDVCYPGKFVNEEALRQILRESGGIDKEAMGFTYSGIRTNGATSACRRSESSFYAEMKWLLSNTDNAAFPPMTKSYKNTRKAPALIIWGIHHSGSTAEQTKLYGSGNKLVTVRSSNYQQSFVPSPGAGPKVNGQSGRIDFHWLMLNPNDTVTFSFNGAFIAPDRASFLRGKSMGIQSGVQVDANCEGDCYHSGGTIISNLPFQNIDSRVVGKCPRYVKQKSLLLATGMKNVPEIPKGRGLFGAIAGFIENGWEGLIDGWYGFRHQNAQGEGTAADYKSTQSAINQMTGKLNRLIEKTNQQFELIDNEFTEVEKQIGNVINWTRDSITEVWSYNAELLVAMENQHTIDLADSEMNKLYERVKRQLRENAEEDGTGCFEIFHKCDDDCMASIRNNTYDHSKYREEAMQNRIQIDPVKLSSGYKDVILWFSFGASCLILLAIAMGLVFICVKNGNMRCTICI

SEQ ID NO: 10227 - protein, 560 aa, Artificial Sequence
  derived and/or modified protein sequence (wt) from hemagglutinin__InfluenzaA__AGQ81012
MNTQILVFALIAIIPTNSDKICLGHHAVSNGTKVNTLTERGVEVVNATETVERTSIPRICSKGKRTVDLGQCGLLGTITGPPQCDQFLEFSADLIIERREGSDVCYPGKFVNEEALRQILRESGGINKEAMGFTYSGIRTNGATSACRRSGSSFYAEMKWLLSNTDNAAFPPMTKSYKNTRKAPALIIWGIHHSGSTAEQTKLYGSGNKLVTVRSSNYQQSFVPSPGAGPQVNGQSGRIDFHWLMLNPNDTVTFSFNGAFIAPDRASFLRGKSMGIQSGVQVDANCEGDCYHSGGTIISNLPFQNIDSRVVGKCPRYVKQKSLLLATGMKNVPEIPKGRGLFGAIAGFIENGWEGLIDGWYGFRHQNAQGEGTAADYKSTQSAINQMTGKLNRLIEKTNQQFELIDNEFTEVEKQIGNVINWTRDSITEVWSYNAELLVAMENQHTIDLADSEMNKLYERVKRQLRENAEEDGTGCFEIFHKCDDDCMASIRNNTYDHSKYREEAMQNRIQIDPVKLSSGYKDVILWFSFGASCFILLAIAMGLVFICVKNGNMRCTICI

SEQ ID NO: 10228 - protein, 560 aa, Artificial Sequence
  derived and/or modified protein sequence (wt) from hemagglutinin__InfluenzaA__AGQ81017
MNTQILVFALIAITPTNSDKICLGHHAVSNGTKVNTLTERGVEVVNATETVERTSIPRICSKGKRTVDLGQCGLLGTITGPPQCDQFLEFSADLIIERREGSDVCYPGKFVNEEALRQILRESGGIDKEAMGFTYSGIRTNGATSACRRSGSSFYAEMKWLLSNTDNAAFPPMTKSYKNTRKAPALIIWGIHHSGSTAEQTKLYGSGNKLVTVRSSNYQQSFVPSPGAGPQVNGQSGRIDFHWLMLNPNDTVTFSFNGAFIAPDRASFLRGKSMGIQSGVQVDANCEGDCYHSGGTIISNLPFQNIDSRVVGKCPRYVKQKSLLLATGMKNVPEIPKGRGLFGAIAGFIENGWEGLIDGWYGFRHQNAQGEGTAADYKSTQSAINQMTGKLNRLIEKTNQQFELIDNEFTEVEKQIGNVINWTRDSITEVWSYNAELLVAMENQHTIDLADSEMNKLYERVKRQLRENAEEDGTGCFEIFHKCDDDCMASIRNNTYDHSKYREEAMQNRIQIDPVKLSSGYKDVILWFSFGASCFILLAIAMGLVFICVKNGNMRCTICI

SEQ ID NO: 10229 - protein, 560 aa, Artificial Sequence
  derived and/or modified protein sequence (wt) from hemagglutinin__InfluenzaA__AGQ81018
MNTQILVFALIAIIPTNSDKICLGHHAVSNGTKVNTLTERGVEVVNATETVERTSIPRICSKGKRTVDLGQCGLLGTITGPPQCDQFLEFSADLIIERREGSDVCYPGKFVNEEALRQILRESGGIVKEAMGFTYSGIRTNGATSACRRSGSSFYAEMKWLLSNTDNAAFPPMTKSYKNTRKAPAIIIWGIHHSGSTAEQTKLYGSGNKLVTVRSSNYQQSFVPSPGAGPQVNGQSGRIDFHWLMLNPNDTVTFSFNGAFIAPDRASFLRGKSMGIQSGVQVDANCEGDCYHSRGTIISNLPFQNIDSRVVGKCPRYVKQKSLLLATGMKNVPEIPKGRGLFGAIAGFIENGWEGLIDGWYGFRHQNAQGEGTAADYKSTQSAINQMTGKLNRLIEKTNQQFELIDNEFTEVEKQIGNVINWTRDSITEVWSYNAELLVAMENQHTIDLADSEMNKLYERVKRQLRENAEEDGTGCFEIFHKCDDDCMASIRNNTYDHSKYREEAMQNRIQIDPVKLSSGYKDVILWFSFGASCFILLAIAMGLVFICVKNGNMRCTICI

SEQ ID NO: 10230 - protein, 560 aa, Artificial Sequence; identical to SEQ ID NO: 10229
  derived and/or modified protein sequence (wt) from hemagglutinin__InfluenzaA__AGQ81019

SEQ ID NO: 10231 - protein, 560 aa, Artificial Sequence; identical to SEQ ID NO: 10228
  derived and/or modified protein sequence (wt) from hemagglutinin__InfluenzaA__AGQ81020

SEQ ID NO: 10232 - protein, 560 aa, Artificial Sequence; identical to SEQ ID NO: 10229
  derived and/or modified protein sequence (wt) from hemagglutinin__InfluenzaA__AGQ81021

SEQ ID NO: 10233 - protein, 560 aa, Artificial Sequence; identical to SEQ ID NO: 10228
  derived and/or modified protein sequence (wt) from hemagglutinin__InfluenzaA__AGQ81022

SEQ ID NO: 10234 - protein, 560 aa, Artificial Sequence; identical to SEQ ID NO: 10229
  derived and/or modified protein sequence (wt) from hemagglutinin__InfluenzaA__AGQ81023

SEQ ID NO: 10235 - protein, 560 aa, Artificial Sequence
  derived and/or modified protein sequence (wt) from hemagglutinin__InfluenzaA__AGQ81025
MNTQILVFALIAIIPTNADKICLGHHAVSNGTKVNTLTERGVEVVNATETVERTSIPRICSKGKRTVDLGQCGLLGTITGPPQCDQFLEFSADLIIERREGSDVCYPGKFVNEEALRQILRESGGIDKEAMGFTYSGIRTNGVTSACRRSGSSFYAEMKWLLSNTDNAAFPPMTKSYKNTRKAPALIIWGIHHSGSTAEQTKLYGSGNKLVTVRSSNYQQSFVPSPGAGPQVNGQSGRIDFHWLMLNPNDTVTFSFNGAFIAPDRASFLRGKSMGIQSGVQVDANCEGDCYHSGGTIISNLPFQNIDSRVVGKCPRYVKQKSLLLATGMKNVPEIPKGRGLFGAIAGFIENGWEGLIDGWYGFRHQNAQGEGTAADYKSTQSAINQMTGKLNRLIEKTNQQFGLIDNEFTEVEKQIGNVINWTRDSITEVWSYNAELLVAMENQHTIDLADSEMNKLYERVKRQLRENAEEDGTGCFEIFHKCDDDCMASIRNNTYDHSKYREEAMQNRIQIDPVKLSSGYKDVILWFSFGASCFILLAIAMGLVVICVKNGNMRCTICI

SEQ ID NO: 10236 - protein, 560 aa, Artificial Sequence
  derived and/or modified protein sequence (wt) from hemagglutinin__InfluenzaA__AGQ81026
MNTQILVFALIAIIPTNADKICLGHHAVSNGTKVNTLTERGVEVVNATETVERTSIPRICSKGKRTVDLGQCGLLGTITGPPQCDQFLEFSADLIIERREGSDVCYPGKFVNEEALRQILRESGGIDKEAMGFTYSGIRTNGATSACRRSGSSFYAEMKWLLSNTDNAAFPPTTKSYKNTRKAPALIIWGIHHSGSTAEQTKLYGSGNKLVTVRSSNYQQSFVPSPGAGPQVNGQSGRIDFHWLMLNPNDTVTFSFNGAFIAPDRASFLRGKSMGIQSGVQVDANCEGDCYHSGGTIISNLPFQNIDSRVVGKCPRYVKQKSLLLATGMKNVPEIPKGRGLFGAIAGFIENGWEGLIDGWYGFRHQNAQGEGTAADYKSTQSAINQMTGKLNRLIEKTNQQFELIDNEFTEVEKQIGNVINWTRDSITEVWSYNAELLVAMENQHTIDLADSEMNKLYERVKRQLRENAEEDGTGCFEIFHKCDDDCMASIRNNTYDHSKYREEAMQNRIQIDPVKLSSGYKDVILWFSFGASCFILLAIAMGLVFICVKNGNMRCTICI

SEQ ID NO: 10237 - protein, 560 aa, Artificial Sequence
  derived and/or modified protein sequence (wt) from hemagglutinin__InfluenzaA__AGQ81027
MNTQILVFALIAIIPTNADKICLGHHAVSNGTKVNTLTERGVEVVNATETVERTSIPRICSKGKRTVDLGQCGLLGTITGPPQCDQFLEFSADLIIERREGSDVCYPGKFVNEEALRQILRESGGIDKEAMGFTYSGIRTNGVTSACRRSGSSFYAEMKWLLSNTDNAAFPPMTKSYKNTRKAPALIIWGIHHSGSTAEQTKLYGSGNKLVTVRSSNYQQSFVPSPGAGPQVNGQSGRIDFHWLMLNPNDTVTFSFNGAFIAPDRASFLRGKSMGIQSGVQVDANCEGDCYHSGGTIISNLPFQNIDSRVVGKCPRYVKQKSLLLATGMKNVPEIPKGRGLFGAIAGFIENGWEGLIDGWYGFRHQNAQGEGTAADYKSTQSAINQMTGKLNRLIEKTNQQFELIDNEFTEVEKQIGNVINWTRDSITEVWSYNAELLVAMENQHTIDLADSEMNKLYERVKRQLRENAEEDGTGCFEIFHKCDDDCMASIRNNTYDHSKYREEAMQNRIQIDPVKLSSGYKDVILWFSFGASCFILLAIAMGLVFICVKNGNMRCTICI

SEQ ID NO: 10238 - protein, 560 aa, Artificial Sequence
  derived and/or modified protein sequence (wt) from hemagglutinin__InfluenzaA__AGQ81028
MNTQILVFALIAIIPTNADKICLGHHAVSNGTKVNTLTERGVEVVNATETVERTSIPRICSKGKRTVDLGQCGLLGTITGPPQCDQFLEFSADLIIERREGSDVCYPGKFVNEEALRQILRESGGIDKEAMGFTYSGIRTNGATSACRRSGSSFYAEMKWLLSNTDNAAFPPTTKSYKNTRKAPALIIWGIHHSGSTAEQTKLYGSGNKLVTVRSSNYQQSFVPSPGAGPQVNGQSGRIDFHWLMLNPNDTVTFSFNGAFIAPDRASFLRGKSMGIQSGVQVDANCEGDCYHSGGTIISNLPFQNIDSRVVGKCPRYVKQKSLLLATGMKNVPEIPKGRGLFGAIAGFIENGWEGLIDGWYGFRHQNAQGEGTAADYKSTQSAINQMTGKLNRLIEKTNQQFELIDNEFTEVEKQIGNVINWTRDSITEMWSYNAELLVAMENQHTIDLADSEMNKLYERVKRQLRENAEEDGTGCFEIFHKCDDDCMASIRNNTYDHSKYREEAMQNRIQIDPVKLSSGYKDVILWFSFGASCFILLAIAMGLVFICVKNGNMRCTICI

SEQ ID NO: 10239 - protein, 560 aa, Artificial Sequence
  derived and/or modified protein sequence (wt) from hemagglutinin__InfluenzaA__AGQ81029
MNTQILVFALIAIIPTNADKICLGHHAVSNGTKVNTLTERGVEVVNATETVERTSIPRICSKGKRTVDLGQCGLLGTITGPPQCDQFLEFSADLIIERREGSDVCYPGKFVNEEALRQILRESGGIDKEAMGFTYSGIRTNGVTSACRRSGSSFYAEMKWLLSNTDNAAFPPMTKSYKNTRKAPALIIWGIHHSGSTAEQTKLYGSGNKLVTVRSSNYQQSFMPSPGAGPQVNGQSGRIDFHWLMLNPNDTVTFSFNGAFIAPDRASFLRGKSMGIQSGVQVDANCEGDCYHSGGTIISNLPFQNIDSRVVGKCPRYVKQKSLLLATGMKNVPEIPKGRGLFGAIAGFIENGWEGLIDGWYGFRHQNAQGEGTAADYKSTQSAINQMTGKLNRLIEKTNQQFELIDNEFTEVEKQIGNVINWTRDSITEVWSYNAELLVAMENQHTIDLADSEMNKLYERVKRQLRENAEEDGTGCFEIFHKCDDDCMASIRNNTYDHSKYREEAMQNRIQIDPVKLSSGYKDVILWFSFGASCFILLAIAMGLVFICVKNGNMRCTICI

SEQ ID NO: 10240 - protein, 560 aa, Artificial Sequence
  derived and/or modified protein sequence (wt) from hemagglutinin__InfluenzaA__AGQ81031
MNTQILVFALIAIIPTNADKICLGHHAVSNGTKVNTLTERGVEVVNATETVERTSIPRICSKGKRTVDLGQCGLLGTITGPPQCDQFLEFSADLIIERREGSDVCYPGKFVNEEALRQILRESGGINKEAMGFTYSGIRTNGATSACRRSGSSFYAEMKWLLSNTDNAAFPPMTKSYKNTRKAPALIIWGIHHSGSTAEQTKLYGSGNKMVTVRSSNYQQSFVPSPGAGPQVNGQSGRIDFHWLMLNPNDTVTFSFNGAFIAPDRASFLRGKSMGIQSGVQVDANCEGDCYHSGGTIISNLPFQNIDSRVVGKCPRYVKQKSLLLATGMKNVPEIPKGRGLFGAIAGFIENGWEGLIDGWYGFRHQNAQGEGTAADYKSTQSAINQMTGKLNRLIEKTNQQFELIDNEFTEVERQIGNVINWTRDSITEVWSYNAELLVAMENQHTIDLADSEMNKLYERVKRQLRENAEEDGTGCFEIFHKCDDDCMASIRNNTYDHSKYREEAMQNRIQIDPVKLSSGYKDVILWFSFGASCFILLAIAMGLVFICVKNGNMRCTICI

SEQ ID NO: 10241 - protein, 560 aa, Artificial Sequence; identical to SEQ ID NO: 10236
  derived and/or modified protein sequence (wt) from hemagglutinin__InfluenzaA__AGQ81032

SEQ ID NO: 10242 - protein, 560 aa, Artificial Sequence; identical to SEQ ID NO: 10237
  derived and/or modified protein sequence (wt) from hemagglutinin__InfluenzaA__AGQ81033

SEQ ID NO: 10243 - protein, 560 aa, Artificial Sequence; identical to SEQ ID NO: 10236
  derived and/or modified protein sequence (wt) from hemagglutinin__InfluenzaA__AGQ81034

SEQ ID NO: 10244 - protein, 560 aa, Artificial Sequence; identical to SEQ ID NO: 10237
  derived and/or modified protein sequence (wt) from hemagglutinin__InfluenzaA__AGQ81035

SEQ ID NO: 10245 - protein, 560 aa, Artificial Sequence; identical to SEQ ID NO: 10237
  derived and/or modified protein sequence (wt) from hemagglutinin__InfluenzaA__AGQ81036

SEQ ID NO: 10246 - protein, 560 aa, Artificial Sequence; identical to SEQ ID NO: 10237
  derived and/or modified protein sequence (wt) from hemagglutinin__InfluenzaA__AGQ81037

SEQ ID NO: 10247 - protein, 560 aa, Artificial Sequence; identical to SEQ ID NO: 10229
  derived and/or modified protein sequence (wt) from hemagglutinin__InfluenzaA__AGQ81038

SEQ ID NO: 10248 - protein, 560 aa, Artificial Sequence; identical to SEQ ID NO: 10229
  derived and/or modified protein sequence (wt) from hemagglutinin__InfluenzaA__AGQ81039

SEQ ID NO: 10249 - protein, 560 aa, Artificial Sequence
  derived and/or modified protein sequence (wt) from hemagglutinin__InfluenzaA__AGQ81040
MNTQILVFALIAIIPTNADKICLGHHAVSNGTKVNTLTERGVEVVNATETVERTNIPRICSKGKRTVDLGQCGLLGTITGPPQCDQFLEFSADLIIERREGSDVCYPGKFVNEEALRQILRESGGIDKEAMGFTYSGIRTNGATSACRRSGSSFYAEMKWLLSNTDNAAFPQMTKSYKNTRKDPALIIWGIHHSGSTAEQTKLYGSGNKLVTVGSSNYQQSFVPSPGARPQVNGQSGRIDFHWLMLNPNDTVTFSFNGAFIAPDRASFLRGKSMGIQSGVQIDANCEGDCYHSGGTIISNLPFQNIDSRAVGKCPRYVKQKSLLLATGMKNVPEIPKGRGLFGAIAGFIENGWEGLIDGWYGFRHQNAQGEGTAADYKSTQSAIDQITGKLNRLIEKTNQQFELIDNEFTEVEKQIGNVINWTRDSITEVWSYNAELLVAMENQHTIDLADSEMNKLYERVKRQLRENAEEDGTGCFEIFHKCDDDCMASIRNNTYDHSKYREEAMQNRIQIDPVKLSSGYKDVILWFSFGASCFILLAIAMGLVFICVKNGNMRCTICI

SEQ ID NO: 10250 - protein, 560 aa, Artificial Sequence
  derived and/or modified protein sequence (wt) from hemagglutinin__InfluenzaA__AGQ81041
MNTQILVFALIAIIPTNADKICLGHHAVSNGTKVNTLTERGVEVVNATETVERTNIPRICSKGKRTVDLGQCGLLGTITGPPQCDQFLEFSADLIIERREGSDVCYPGKFVNEEALRQILRESGGIDKEAMGFTYSGIRTNGATSACRRSGSSFYAEMKWLLSNTDNAAFPQTTKSYKNTRKDPALIIWGIHHSGSTAEQTKLYGSGNKLVTVGSSNYQQSFVPSPGARPQVNGQSGRIDFHWLMLNPNDTVTFSFNGAFIAPDRASFLRGKSMGIQSGVQVDANCEGDCYHSGGTIISNLPFQNIDSRAVGKCPRYVKQKSLLLATGMKNVPEIPKGRGLFGAIAGFIENGWEGLIDGWYGFRHQNAQGEGTAADYKSTQSAIDQITGKLNRLIEKTNQQFELIDNEFTEVEKQIGNVINWTRDSITEVWSYNAELLVAMENQHTIDLADSEMNKLYERVKRQLRENAEEDGTGCFEIFHKCDDDCMASIRNNTYDHSKYREEAMQNRIQIDPVKLSSGYKDVILWFSFGASCFILLAIAMGLVFICVKNGNMRCTICI

SEQ ID NO: 10251 - protein, 560 aa, Artificial Sequence
  derived and/or modified protein sequence (wt) from hemagglutinin__InfluenzaA__AGQ81042
MNTQILVFALIAIIPTNADKICLGHHAVSNGTKVNTLTERGVEVVNATETVERTNIPRICSKGKRTVDLGQCGLLGTITGPPQCDQFLEFSADLIIERREGSDVCYPGKFVNEEALRQILRESGGIDKEAMGFTYSGIRTNGATSACRRSGSSFYAEMKWLLSNTDNAAFPQMTKSYKNTRKDPALIIWGIHHSGSTAEQTKLYGSGNKLVTVGSSNYQQSFVPSPGARPQVNGQSGRIDFHWLMLNPNDTVTFSFNGAFIAPDRASFLRGKSMGIQSGVQVDANCEGDCYHSGGTIISNLPFQNIDSRAVGKCPRYVKQKSLLLATGMKNVPEIPKGRGLFGAIAGFIENGWEGLIDGWYGFRHQNAQGEGTAADYKSTQSAIDQITGKLNRLIEKTNQQFELIDNEFTEVEKQIGNVINWTRDSITEVWSYNAELLVAMENQHTIDLADSEMNKLYERVKRQLRENAEEDGTGCFEIFHKCDDDCMASIRNNTYDHSKYREEAMQNRIQIDPVKLSSGYKDVILWFSFGASCFILLAIAMGLVFICVKNGNMRCTICI

SEQ ID NO: 10252 - protein, 560 aa, Artificial Sequence
  derived and/or modified protein sequence (wt) from hemagglutinin__InfluenzaA__AGQ81043
MNTQILVFALIAIIPTNADKICLGHHAVSNGTKVNTLTERGVEVVNATETVERTNIPRICSKGKRTVDLGQCGLLGTITGPPQCDQFLEFSADLIIERREGSDVCYPGKFVNEEALRQILRESGGIDKEEMGFTYSGIRTNGATSACRRSGSSFYAEMKWLLSNTDNAAFPQMTKSYKNTRKSPALIVWGIHHSVSTAEQTKLYGSGNKLVTVGSSNYQQSFVPSPGARPQVNGLSGRIDFHWLMLNPNDTVTFSFNGAFIAPDRASFLRGKSMGIQSGVQVDANCEGDCYHSGGTIISNLPFQNIDSRAVGKCPRYVKQRSLLLATGMKNVPEIPKGRGLFGAIAGFIENGWEGLIDGWYGFRHQNAQGEGTAADYKSTQSAIDQITGKLNRLIEKTNQQFELIDNEFNEVEKQIGNVINWTRDSITEVWSYNAELLVAMENQHTIDLADSEMDKLYERVKRQLRENAEEDGTGCFEIFHKCDDDCMASIRNNTYDHSKYREEAMQNRIQIDPVKLSSGYKDVILWFSFGASCFILLAIVMGLVFICVKNGNMRCTICI

SEQ ID NO: 10253 - protein, 560 aa, Artificial Sequence; identical to SEQ ID NO: 9988
  derived and/or modified protein sequence (wt) from hemagglutinin__InfluenzaA__AGQ81044

SEQ ID NO: 10254 - protein, 560 aa, Artificial Sequence; identical to SEQ ID NO: 9988
  derived and/or modified protein sequence (wt) from hemagglutinin__InfluenzaA__AGQ81045

SEQ ID NO: 10255 - protein, 560 aa, Artificial Sequence; identical to SEQ ID NO: 9988
  derived and/or modified protein sequence (wt) from hemagglutinin__InfluenzaA__AGQ81046

SEQ ID NO: 10256 - protein, 560 aa, Artificial Sequence; identical to SEQ ID NO: 10237
  derived and/or modified protein sequence (wt) from hemagglutinin__InfluenzaA__AGQ81047

SEQ ID NO: 10257 - protein, 560 aa, Artificial Sequence; identical to SEQ ID NO: 10236
  derived and/or modified protein sequence (wt) from hemagglutinin__InfluenzaA__AGQ81049

SEQ ID NO: 10258 - protein, 560 aa, Artificial Sequence; identical to SEQ ID NO: 10237
  derived and/or modified protein sequence (wt) from hemagglutinin__InfluenzaA__AGQ81050

SEQ ID NO: 10259 - protein, 560 aa, Artificial Sequence
  derived and/or modified protein sequence (wt) from hemagglutinin__InfluenzaA__AGQ81051
MNTQILVFALIAIIPTNADKICLGHHAVSNGTKVNTLTERGVEVVNATETVERTSIPRICSKGKRTVDLGQCGLLGTITGPPQCDQFLEFSADLIIERREGSDVCYPGKFVNEEALRQILRESGGINKEAMGFTYSGIRTNGATSACRRSGSSFYAEMKWLLSNTDNAAFPPMTKSYKNTRKAPALIIWGIHHSGSTAEQTKLYGSGNKLVTVRSSNYQQSFVPSPGAGPQVNGQSGRIDFHWLMLNPNDTVTFSFNGAFIAPDRASFLRGKSMGIQSGVQVDANCEGDCYHSGGTIISNLPFQNIDSRVVGKCPRYVKQKSLLLATGMKNVPEIPKGRGLFGAIAGFIENGWEGLIDGWYGFRHQNAQGEGTAADYKSTQSAINQMTGKLNRLIEKTNQQFELIDNEFTEVEKQIGNVINWTRDSITEVWSYNAELLVAMENQHTIDLADSEMNKLYERVKRQLRENAEEDGTGCFEIFHKCDDDCMASIRNNTYDHSKYREEAMQNRIQIDPVKLSSGYKDVILWFSFGASCFILLAIAMGLVFICVKNGNMRCTICI

SEQ ID NO: 10260 - protein, 560 aa, Artificial Sequence; identical to SEQ ID NO: 10237
  derived and/or modified protein sequence (wt) from hemagglutinin__InfluenzaA__AGQ81052

SEQ ID NO: 10261 - protein, 560 aa, Artificial Sequence
  derived and/or modified protein sequence (wt) from hemagglutinin__InfluenzaA__AGQ81053
MNTQILVFALIAIIPTNADKICLGHHAVSNGTKVNTLTERGVEVVNATETVERTSIPRICSKGKRTVDLGQCGLLGTITGPPQCDQFLEFSADLIIERREGSDVCYPGKFVNEEALRQILRESGGINKEAMGFTYSGIRTNGATSACRRSGSSFYAEMKWLLSNTDNAAFPPMTKSYKNTRKAPALIIWGIHHSGSTAEQTKLYGSGNKMVTVRSSNYQQSFVPSPGAGPQVNGQSGRIDFHWLMLNPNDTVTFSFNGAFIAPDRASFLRGKSMGIQSGVQVDANCEGDCYHSGGTIISNLPFQNIDSRVVGKCPRYVKQKSLLLATGMKNVPEIPKGRGLFGAIAGFIENGWEGLIDGWYGFRHQNAQGEGTAADYKSTQSAINQMTGKLNRLIEKTNQQFELIDNEFTEVEKQIGNVINWTRDSITEVWSYNAELLVAMENQHTIDLADSEMNKLYERVKRQLRENAEEDGTGCFEIFHKCDDDCMASIRNNTYDHSKYRKEAMQNRIQIDPVKLSSGYKDVILWFSFGASCFILLAIAMGLVFICVKNGNMRCTICI

SEQ ID NO: 10262 - protein, 560 aa, Artificial Sequence; identical to SEQ ID NO: 10237
  derived and/or modified protein sequence (wt) from hemagglutinin__InfluenzaA__AGQ81055

SEQ ID NO: 10263 - protein, 560 aa, Artificial Sequence; identical to SEQ ID NO: 10237
  derived and/or modified protein sequence (wt) from hemagglutinin__InfluenzaA__AGQ81056

SEQ ID NO: 10264 - protein, 560 aa, Artificial Sequence; identical to SEQ ID NO: 10237
  derived and/or modified protein sequence (wt) from hemagglutinin__InfluenzaA__AGQ81057

SEQ ID NO: 10265 - protein, 560 aa, Artificial Sequence; identical to SEQ ID NO: 10237
  derived and/or modified protein sequence (wt) from hemagglutinin__InfluenzaA__AGQ81058

SEQ ID NO: 10266 - protein, 560 aa, Artificial Sequence; identical to SEQ ID NO: 9988
  derived and/or modified protein sequence (wt) from hemagglutinin__InfluenzaA__AGQ81059

SEQ ID NO: 10267 - protein, 560 aa, Artificial Sequence; identical to SEQ ID NO: 9988
  derived and/or modified protein sequence (wt) from hemagglutinin__InfluenzaA__AGQ81060

SEQ ID NO: 10268 - protein, 560 aa, Artificial Sequence; identical to SEQ ID NO: 9988
  derived and/or modified protein sequence (wt) from hemagglutinin__InfluenzaA__AGQ81061

SEQ ID NO: 10269 - protein, 560 aa, Artificial Sequence
  derived and/or modified protein sequence (wt) from hemagglutinin__InfluenzaA__AGQ81081
MEVVSLITILLVITGSNADKICIGYQSTNSTETVDTLTENNVPVTHAKELLHTEHNGMLCATNLGRPLILDTCTIEGLIYGNPSCDILLGGREWSYIVERPSAVNGLCYPGNVENLEELRSLFSSASSYQRIQIFPDTIWNVSYSGTSKACSDSFYRSMRWLTQKNNAYPVQDAQYTNNRGRNILFMWGINHPPTDTAQTNLYTRTDTTTSVATEDINRTFKPLIGPRPLVNGLQGRIDYYWAVLRPGQTLRIRSNGNLIAPWYGHILSGESHGRILKTDLNSGNCVVQCQTERGGLNTTLPFHNVSKYAFGNCPKYVGVKSLKLAVGLRNVPARSSRGLFGAIAGFIEGGWSGLVAGWYGFQHSNDQGTGMAADRDSTQKAIDKITSKVNNIVDKMNKQYEIIDHEFSEIETRLNMINNKIDDQIQDIWAYNAELLVLLENQKTLDEHDANVNNLYNKVKRALGSNAVEDGKGCFELYHKCDNQCMETIRNGTYNRRKYKEESRLERQKIEGVKLESEGTYKILTIYSTVASSLVIAMGFAAFLFWAMSNGSCRCNICI

SEQ ID NO: 10270 - protein, 560 aa, Artificial Sequence
  derived and/or modified protein sequence (wt) from hemagglutinin__InfluenzaA__AGQ81086
MEVVSLITILLVITGSNADKICIGYQSTNSTETVDTLTENNVPVTHAKELLHTEHNGMLCATNLGRPLILDTCTIEGLIYGNPSCDLLLGGREWSYIVERPSAVNGLCYPGNVENLEELRSLFSSASSYQRIQIFPDTIWNVSYSGTSKACSDSFYRSMRWLTQKNNAYPVQDAQYTNNRGRNILFMWGINHPPTDTAQTNLYTRTDTTTSVATEDINRTFKPLIGPRPLVNGLQGRIDYYWAVLRPGQTLRIRSNGNLIAPWYGHILSGESHGRILKTDLNSGNCVVQCQTERGGLNTTLPFHNVSKYAFGNCPKYVGVKSLKLAVGLRNVPARSSRGLFGAIAGFIEGGWSGLVAGWYGFQHSNDQGTGMAADRDSTQKAIDKITSKVNNIVDKMNKQYEIIDHEFSEIETRLNMINNKIDDQIQDIWAYNAELLVLLENQKTLDEHDANVNNLYNKVKRALGSNAVEDGKGCFELYHKCDNQCMETIRNGTYNRRKYKEESRLERQKIEGVKLESEGTYKILTIYSTVASSLVIAMGFAAFLFWAMSNGSCRCNICI

SEQ ID NO: 10271 - protein, 560 aa, Artificial Sequence
  derived and/or modified protein sequence (wt) from hemagglutinin__InfluenzaA__AGQ81087
METVSLITMLLVATVINADKICIGYQSTNSTETVDTLTENNVPVTHAKELLHTEHNGMLCATNLGHPLILDTCTIEGLIYGNPSCDLLLGGREWSYIVERPSAVNGLCYPGNVENLEELRSLFSSASSYQRIQIFPDTIWNVSYSGTSKACSDSFYRSMRWLTQKNNAYPIQDAQYTNNREKNILFMWGINHPPTDTAQTNLYTRTDTTTSVATEEINRTFKPLIGPRPLVNGLQGRIDYYWSVLKPGQTLRIRSNGNLIAPWYGHILSGESHGRVLKTDLKRGSCTVQCQTEKGGLNTTLPFQNVSKYAFGNCSKYVGVKSLKLAVGLRNVPSRSSRGLFGAIAGFIEGGWSGLVAGWYGFQHSNDQGVGMAADRDSTQKAIDKMTSKVNNIVDKMNKQYEIINHEFSEIETRLNMINNKIDDQIQDIWAYNAELLVLLENQKTLDEHDANVNNLYNKVKRALGSNAVEDGKGCFELYHKCDDQCMETIRNGTYNRRRYQEESKLERQKIEGVKLESEGTYKILTIYSTVASSLVIAMGFAAFLFWAMSNGSCRCNICI

SEQ ID NO: 10272 - protein, 560 aa, Artificial Sequence
  derived and/or modified protein sequence (wt) from hemagglutinin__InfluenzaA__AGQ81092
MEVVSLITILLVITGSNADKICIGYQSTNSTETVDTLTENNVPVTHAKELLHTEHNGMLCATNLGRPLILDTCTIEGLIYGNPSCDLLLGGREWSYIVERPSAVNGLCYPGNVENLEELRSLFSSASSYQRIQIFPDTIWNVSYTGTSKACSDSFYRSMRWLTQKNNAYPVQDAQYTNNRGRNILFMWGINHPPTDTTQTNLYTRTDTTTSVATEDINRTFKPLIGPRPLVNGLQGRIDYYWAVLRPGQTLRIRSNGNLIAPWYGHILSGESHGRILKTDLKSGNCVVQCQTERGGLNTTLPFHNVSKYAFGNCPKYVGVKSLKLAVGLRNVPARSSRGLFGAIAGFIEGGWSGLVAGWYGFQHSNDQGTGMAADRDSTQKAIDKITSKVNNIVDKMNKQYEIIDHEFSEIETRLNMINNKIDDQIQDIWAYNAELLVLLENQKTLDEHDANVNNLYNKVKRALGSNAVEDGKGCFELYHKCDNQCMETIRNGTYNRRKYKEESRLERQKIEGVKLESEGTYKILTIYSTVASSLVIAMGFAAFLFWAMSNGSCRCNICI

SEQ ID NO: 10273 - protein, 560 aa, Artificial Sequence
  derived and/or modified protein sequence (wt) from hemagglutinin__InfluenzaA__AGQ81095
MEVVSLITILLVITVSNADKICIGYQSTNSTETVNTLTEDNVPVTHAKELLHTEHNGMLCATNLGRPLILDTCTIEGLIYGNPSCDLLLGGREWSYIVERPSAVNGLCYPGNVENLEELRSLFSSASSYQRIQIFPDTIWNVSYSGTSKACSDSFYRSMRWLTQKNNAYPVQDAQYTNNRGRNILFMWGINHPPTDTAQTNLYTRTDTTTSVATEDINRTFKPLIGPRPLVNGLQGRIDYYWAVLKPGQTLRIRSNGNLIAPWYGHILSGESHGRILKTDLNSGNCVVQCQSERGGLNTTLPFHNVSKYAFGNCPKYVGVKSLKLAVGLRNVPARSSRGLFGAIAGFIEGGWSGLVAGWYGFQHSNDQGTGMAADRDSTQKAIDKITSKVNNIVDKMNKQYEIIDHEFSEIETRLNMINNKIDDQIQDIWAYNAELLVLLENQKTLDEHDANVNNLYNKVKRALGSNAVEDGKGCFELYHKCDNQCMETIRNGTYDRRKYKEESRLERQKIEGVKLESEGTYKILTIYSTVASSLVIAMGFAAFLFWAMSNGSCRRNICI

SEQ ID NO: 10274 - protein, 560 aa, Artificial Sequence
  derived and/or modified protein sequence (wt) from hemagglutinin__InfluenzaA__AGQ81099
METVSLITILLIVTVSNADKICIGYQSTNSTETVDTLTENNVPVTHAKELLHTEHNGMLCATNLGHPLILDTCTIEGLIYGNPSCDLLLGGREWSYIVERPSAVNGLCYPGNVENLEELRSLFSSANSYQRIQIFPDTIWNVSYSGTSKACSDSFYRSMRWLTQKNNAYPTQDAQYTNNREKNILFMWGINHPPTDTAQTNLYTRTDTTTSVATEEINRTFKPLIGPRPLVNGLQGRIDYYWSVLKPGQTLRIRSNGNLIAPWYGHILSGESHGRILKTDLKRGSCTVQCQTEKGGLNTTLPFQNVSKYAFGNCSKYVGVKSLKLAVGLRNVPSRSSRGLFGAIAGFIEGGWSGLVAGWYGFQHSNDQGVGMAADRDSTQKAIDKVTSKVNNIVDKMNKQYEIIDHEFSEVETRLNMINNKIDDQIQDIWAYNAELLVLLENQKTLDEHDANVNNLYNKVKRALGSNAVEDGKGCFELYHKCDDQCMETIRNGTYNRRKYQEESKLERQKIEGVKLESEGTYKILTIYSTVASSLVIAMGFAAFLFWAMSNGSCRRNICI

SEQ ID NO: 10275 - protein, 560 aa, Artificial Sequence
  derived and/or modified protein sequence (wt) from hemagglutinin__InfluenzaA__AGQ81100
METVSLITMLLVATVINADKICIGYQSTNSTETVDTLTENNVPVTHAKELLHTEHNGMLCATNLGHPLILDTCTIEGLIYGNPSCDLLLGGREWSYIVERPSAVNGLCYPGNVENLEELRSLFSSASSYQRIQIFPDTIWNVSYSGTSKACSDSFYRSMRWLTQKNNAYPIQDAQYTNNREKNILFMWGINHPPTDTAQTNLYTRTDTTTSVATEEINRTFKPLIGPRPLVNGLQGRIDYYWSVLKPGQTLRIRSNGNLIAPWYGHILSGESHGRILKTDLKRGSCTVQCQTEKGGLNTTLPFQNVSKYAFGNCSKYVGVKSLKLAVGLRNVPSRSSRGLFGAIAGFIEGGWSGLVAGWYGFQHSNDQGVGMAADRDSTQKAIDKITSKVNNIVDKMNKQYEIIDHEFSEVETRLNMINNKIDDQIQDIWAYNAELLVLLENQKTLDEHDANVNNLYNKVKRALGSNAVEDGKGCFELYHKCDDQCMETIRNGTYNRRRYQEESKLERQKIEGVKLESEGTYKILTIYSTVASSLVIAMGFAAFLFWAMSNGSCRRNICI

SEQ ID NO: 10276 - protein, 560 aa, Artificial Sequence
  derived and/or modified protein sequence (wt) from hemagglutinin__InfluenzaA__AGQ81123
MEVVSLITILLVITVSNADKICIGYQSTNSTETVNTLTEDNVPVTHAKELLHTEHNGMLCATNLGRPLILDTCTIEGLIYGNPSCDLLLGGREWSYIVERPSAVNGLCYPGNVENLEELRSLFSSASSYQRIQIFPDTIWNVSYSGTSKACSDSFYRSMRWLTQKNNAYPVQDAQYTNNKGRNILFMWGINHPPTDTAQTNLYTRTDTTTSVATEDINRTFKPLIGPRPLVNGLQGRIDYYWAVLKPGQTLRIRSNGNLIAPWYGHILLGESHGRILKTDLNSGDCVVQCQSERGGLNTTLPFHNVSKYAFGNCPKYVGVKSLKLAVGLRNVPARSTRGLFGAIAGFIEGGWSGLVAGWYGFQHSNDQGTGMAADRDSTQKAIDKITSKVNNIVDKMNKQYEIIDHEFSEIETRLNMINNKIDDQIQDIWAYNAELLVLLENQKTLDEHDANVNNLYNKVKRALGSNAVEDGKGCFELYHKCDNQCMETIRNGTYDRRKYKEESRLERQKIEGVKLESEGTYKILTIYSTVASSLVIAMGFAAFLFWAMSNGSCRCNICI

SEQ ID NO: 10277 - protein, 560 aa, Artificial Sequence
  derived and/or modified protein sequence (wt) from hemagglutinin__InfluenzaA__AGQ81124
MEVATLITILLVITGSNADKICIGYQSTNSTETVDTLTENNVPVTHAKELLHTEHNGMLCATNLGRPLILDTCTIEGLIYGNPSCDLPLEGREWSYIVERPSAVNGVCYPGNVENLEELRSLFSSASSYQRIQIFPDSIWNVSYSGTSKACSDSFYRNMRWLTQKDNNYPVQDAQYTNNRGKNILFMWGINHPPTDTAQTNLYTRTDTTTSVATEDINRTFKPLIGPRPLVNGLQGRIDYYWAVLKPGQTLRVRSNGNLIAPWYGHILLGESHGRILKTDLKSGNCVVQCQTERGGLNTTLPFHNVSKYAFGNCPKYIGVKSLKLAVGLRNVPARSSRGLFGAIAGFIEGGWSGLVAGWYGFQHSNDQGTGMAADRDSTQKAIDKITSKVNNIVDKMNKQYEIIDHEFSEIETRLNMINDKIDDQIQDIWAYNAELLVLLENQKTLDEHDANVNNLYNKVKRALGSNAVEDGKGCFDLYHKCDNQCMETIRNGTYNRRKYQKESRLERQKIEGVKLESEGTYKILTIYSTVASSLVIAMGFAAFLFWAMSNGSCRCNICI

SEQ ID NO: 10278 - protein, 560 aa, Artificial Sequence
  derived and/or modified protein sequence (wt) from hemagglutinin__InfluenzaA__AGQ81125
MEVATLITILLVITGSNADKICIGYQSTNSTETVDTLTENNVPVTHAKELLHTEHNGMLCATNLGRPLILDTCTIEGLIYGNPSCDLPLEGREWSYIVERPSAVNGVCYPGNVENLEELRSLFSSASSYQRIQIFPDSIWNVSYSGTSKACSDSFYRSMRWLTQKDNNYPVQDAQYTNNRGKNILFMWGINHPPTDTAQTNLYTRTDTTTSVATEDINRTFKPLIGPRPLVNGLQGRIDYYWAVLKPGQTLRVRSNGNLIAPWYGHILLGVSHGRILKTDLKSGNCVVQCQTERGGLNTTLPFHNVSKYAFGNCPKYIGVKSLKLAVGLRNVPARSSRGLFGAIAGFIEGGWSGLVAGWYGFQHSNDQGTGMAADRDSTQKAIDKITSKVNNIVDKMNKQYEIIDHEFSEIETRLNMINDKIDDQIQDIWAYNAELLVLLENQKTLDEHDANVNNLYNKVKRALGSNAVEDGKGCFDLYHKCDNQCMETIRNGTYNRRKYQEESRLERQKIEGVKLESEGTYKILTIYSTVASSLVIAMGFAAFLFWAMSNGSCRCNICI

SEQ ID NO: 10279 - protein, 560 aa, Artificial Sequence
  derived and/or modified protein sequence (wt) from hemagglutinin__InfluenzaA__AGQ81126
METISLMTILLITTASNADKICIGHQSTNSTETVDTLTETNVPVTHAKELLQTEHNGMLCATNLGHPLILDTCTIEGLIYGNPSCDLLLEGREWSYIVERPSAVNGTCYPGNVENLEELRTLFSSASSYQRIQIFPDTIWNVTYTGTSRSCSGSFYRSMRWLTQKSGFYPVQDAKYTNNRGKNILFVWGIHHPHTYTDQTTLYIRNDTTTSVTTEELNRIFKPVIVPRLLVNGQQGRIDYYWSVLKPGQTLRVRSNGNLIAPWYGHVLSGGSHGRILKTDLKGGNCVVQCQTEKGGFNSTLPFHNISKYAFGTCPKYVKVNSLKLAIGLRNVPARSNRGLFGAIAGFIEGGWPGLVAGWYGFQHSNDQGVGMAADRDSTQKAVDKITSKVNNIVDKMNKQYEIIDHEFSEVETRLNMINNKIDDQIQDIWAYNAELLVLLENQKTLDEHDANVNNLYNKVKRALGSNAMEDGKGCFELYHKCDDQCMETIRNGTYNRRKYREESRLEQQRIEGVKLESEGTYKILTIYSTVASSLVLAMGFAAFLFWAMSNGSCRCNICI

SEQ ID NO: 10280 - protein, 560 aa, Artificial Sequence
  derived and/or modified protein sequence (wt) from hemagglutinin__InfluenzaA__AGQ81127
MEVATLITILLLITGSNADKICIGYQSTNSTETVDTLTENNVPVTHAKELLHTEHNGMLCATNLGRPLILDTCTIEGLIYGNPSCDLPLEGREWSYIVERPSAVNGVCYPGNVENLEELRSLFSSASSYQRIQIFPDSIWNVSYSGTSKACSDSFYRSMRWLTQKNNNYPVQDAQYTNNRGKNILFMWGINHPPTDTAQTNLYTRTDTTTSVATEDINRTFKPLIGPRPLVNGLQGRIDYYWAVLKPGQTLRVRSNGNLIAPWYGHILLGESHGRILKTDLKSGNCVVQCQTERGGLNTTLPFHNVSKYAFGNCPKYIGVKSLKLAVGLRNVPARSSRGLFGAIAGFIEGGWSGLVAGWYGFQHSNDQGTGMAADRDSTQKAIDKITSKVNNIVDKMNKQYEIIDHEFSEIETRLNMINDKIDDQIQDIWAYNAELLVLLENQKTLDEHDANVNNLYNKVKRALGSNAVEDGKGCFDLYHKCDNQCMETIRNGTYNRRKYQEESRLERQKIEGVKLESEGTYKILTIYSTVASSLVIAMGFAAFLFWAMSNGSCRCNICI

SEQ ID NO: 10281 - protein, 560 aa, Artificial Sequence
  derived and/or modified protein sequence (wt) from hemagglutinin__InfluenzaA__AGQ81128
MEAATIITILLVITGSNADKICIGYQSTNSTETVDTLTENNVPVTHAKELLHTEHNGMLCATNLGRPLILDTCTIEGLIYGNPSCDLPLEGREWSYIVERPSAVNGVCYPGNVENLEELRSLFSSASSYQRIQIFPDSIWNVSYSGTSKACSDSFYRSMRWLTQKNNNYPVQDAQYTNNRGKNILFMWGINHPPTDTAQTNLYTRTDTTTSVATEDINRTFKPLIGPRPLVNGLQGRIDYYWAVLKPGQTLRVRSNGNLIAPWYGHILLGESHGRILKTDLKSGNCVVQCQTERGGLNTTLPFHNVSKYAFGNCPKYIGVKSLKLAVGLRNVPARSSRGLFGAIAGFIEGGWSGLVAGWYGFQHSNDQGTGMAADRDSTQKAIDKITSKVNNIVDKMNKQYDIIDHEFSEIETRLNMINDKIDDQIQDIWAYNAELLVLLENQKTLDEHDANVNNLYNKVKRALGSNAVEDGKGCFDLYHKCDNQCMETIRNGTYNRRKYQEESRLERQKIEGVKLESEGTYKILTIYSTVASSLVVAMGFAAFLFWAMSNGSCRCNICI

SEQ ID NO: 10282 - protein, 560 aa, Artificial Sequence
  derived and/or modified protein sequence (wt) from hemagglutinin__InfluenzaA__AGQ81130
METVSLITILLVVTIGNADKICIGYQSTNSTETVDTLTENNVPVTHAKELLHTEHNGMLCATSLGHPLILDTCTIEGLIYGNPSCDLLLGGREWSYIVERPSAVNGLCYPGNVENLEELRSLFSSARSYQRIQIFPDTIWNVSYSGTSKACSDSFYRSMRWLTQKNNAYPIQDAQYTNNQEKNILFMWGINHPPTDTVQTNLYTRTDTTTSVATEEINRTFKPLIGPRPLVNGLQGRIDYYWSVLKPGQTLRIRSNGNLIAPWYGHILSGESHGRILKTDLKRGSCTVQCQTEKGGLNTTLPFQNVSKYAFGNCSKYIGMKSLKLAVGLRNVPSRSSRGLFGAIAGFIEGGWSGLVAGWYGFQHSNDQGVGMAADRDSTQKAIDKITSKVNNIVDKMNKQYEIIDHEFSEVETRLNMINNKIDDQIQDIWAYNAELLVLLENQKTLDEHDANVNNLYNKVKRALGFNAVEDGKGCFELYHKCDDQCMETIRNGTYNRRKYQEESKLERQKIEGVKLESEGTYKILTIYSTVASSLVIAMGFAAFLFWAMSNGSCRCNICI

SEQ ID NO: 10283 - protein, 560 aa, Artificial Sequence
  derived and/or modified protein sequence (wt) from hemagglutinin__InfluenzaA__AGQ81132
METISLMTILLITTASNADKICIGHQSTNSTETVDTLTETNVPVTHAKELLQTEHNGMLCATNLGHPLILDTCTIEGLIYGNPSCDLLLEGREWSYIVERPSAVNGTCYPGNVENLEELRTLFSSASSYQRIQIFPDTIWNVTYTGTSRSCSGSFYRSMRWLTQKSGFYPVQDAKYTNNRGKNILFVWGIHHPHTYTDQTTLYIRNDTTTSVTTEELNRIFKPVIVPRLLVNGQQGRIDYYWSVLKPGQTLRVRSNGNLIAPWYGHVLSGGSHGRILKTDLKGGNCVVQCQTEKGGFNSTLPFHNISKYAFGTCPKYVKVNSLKLAIGLRNVPARSNRGLFGAIAGFIEGGWPGLVAGWYGFQHSNDQGVGMAADRDSTQKAVDKITSKVNNIVDKMNRQYEIIDHEFSEVETRLNMINNKIDDQIQDIWAYNAELLVLLENQKTLDEHDANVNNLYNKVKRALGSNAMEDGKGCFELYHKCDDQCMETIRNGTYNRRKYREESRLEQQRIEGVKLESEGTYKILTIYSTVASSLVLAMGFAAFLFWAMSNGSCRCNICI

SEQ ID NO: 10284 - protein, 560 aa, Artificial Sequence
  derived and/or modified protein sequence (wt) from hemagglutinin__InfluenzaA__AGQ81133
METISLMTILLITTASNADKICIGHQSTNSTETVDTLTETNVPVTHAKELLQTEHNGMLCATNLGHPLILDTCTIEGLIYGNPSCDLLLEGREWSYIVERPSAVNGTCYPGNVENLEELRTLFSSASSYQRIQIFPDTIWNVTYTGTSRSCSGSFYRSMRWLTQKSGFYPVQDAKYTNNRGKNILFVWGIHHPHTYTDQTTLYIRNDTTTSVTTEELNRIFKPVIVPRLLVNGQQGRIDYYWSVLKPGQTLRVRSNGNLIAPWYGHILSGGSHGRILKTDLKSGNCVVQCQTEKGGFNSTLPFHNISKYAFGTCPKYVKVNSLKLAIGLRNVPARSNRGLFGAIAGFIEGGWPGLVAGWYGFQHSNDQGVGMAADRDSTQKAVDKITSKVNNIVDKMNKQYEIIDHEFSEVETRLNMINNKIDDQIQDIWAYNAELLVLLENQKTLDEHDANVNNLYNKVKRALGSNAMEDGKGCFELYHKCDDQCMETIRNGTYNRRKYREESRLEQQRIEGVKLESEGTYKILTIYSTVASSLVLAMGFAAFLFWAMSNGSCRCNICI

SEQ ID NO: 10285 - protein, 560 aa, Artificial Sequence
  derived and/or modified protein sequence (wt) from hemagglutinin__InfluenzaA__AGQ81134
METISLMTILLITTASNADKICIGHQSTNSTETVDTLTETNVPVTHAKELLQTEHNGMLCATNLGHPLILDTCTIEGLIYGNPSCDLLLEGREWSYIVERPSAANGTCYPGNVENPEELRTLFSSASSYQRIQIFPDTIWNVTYTGTSRSCSGSFYRSMRWLTQKSGFYPVQDAKYTNNRGKNILFVWGIHHPHTYTDQTTLYIRNDTTTSVTTEELNRIFKPVIVPRLLVNGQQGRIDYYWSVLKPGQTLRVRSNGNLIAPWYGHVLSGGSHGRILKTDLKSGNCVVQCQTEKGGFNSTLPFHNISKYAFGTCPKYVKVNSLKLAIGLRNVPARSNRGLFGAIAGFIEGGWPGLVAGWYGFQHSNDQGVGMAADRDSTQKAVDKITSKVNNIVDKMNKQYEIIDHEFSEVETRLNMINNKIDDQIQDIWAYNAELLVLLENQKTLDEHDANVNNLYNKVKRALGSNAMEDGKGCFELYHKCDDQCMETIRNGTYNRRKYREESRLEQQRIEGVKLESEGTYKILTIYSTVASSLVLAMGFAAFLFWAMSNGSCRCNICI

SEQ ID NO: 10286 - protein, 560 aa, Artificial Sequence
  derived and/or modified protein sequence (wt) from hemagglutinin__InfluenzaA__AGQ81135
MEVATIITILLVITGSNADKICIGYQSTNSTETVDTLTENNVPVTHAKELLHTEHNGMLCATNLGRPLILDTCTIEGLIYGNPSCDLPLEGREWSYIVERPSAVNGVCYPGNVENLEELRSLFSSASSYQRIQIFPDSIWNVSYSGTSKACSDSFYRSMRWLTQKNNNYPVQDAQYTNNRGKNILFMWGINHPPTDNAQTNLYTRTDTTTSVATEDINRTFKPLIGPRPLVNGLQGRIDYYWAVLKPGQTLRVRSNGNLIAPWYGHILLGESHGRILKTDLKSGNCVVQCQTERGGLNTTLPFHNVSKYSFGNCPKYIGVKSLKLAVGLRNVPARSSRGLFGAIAGFIEGGWSGLVAGWYGFQHSNDQGTGMAADRDSTQKAIDKITSKVNNIVDKMNKQYEIIDHEFNEIETRLNMINNKIDDQIQDIWAYNAELLVLLENQKTLDEHDANVNNLYNKVKRALGSNAVEDGKGCFDLYHKCDNQCMETIRNGTYNRRKYQEESRLERQKIEGVKLESEGTYKILTIYSTVASSLVIAMGFAAFLFWAMSNGSCRCNICI

SEQ ID NO: 10287 - protein, 560 aa, Artificial Sequence
  derived and/or modified protein sequence (wt) from hemagglutinin__InfluenzaA__AGQ81136
METISLMTILLITTASNADKICIGHQSTNSTETVDTLTETNVPVTHAKELLQTEHNGMLCATNLGHPLILDTCTIEGLIYGNPSCDLLLEGREWSYIVERPSAVNGTCYPGNVENLEELRTLFSSASSYQRIQIFPDTIWNVTYTGTSRSCSGSFYRSMRWLTQKSGFYPVQDAKYTNNRGKNILFVWGIHHPHTYTDQTTLYIRNDTTTSVTTEELNRIFKPVIVPRLLVNGQQGRIDYYWSVLKPGQTLRVRSNGNLIAPWYGHVLSGGSHGRILKTDLKGGNCVVQCQTEKGGFNSTLPFHNISKYAFGTCPKYVKVNSLKLAIGLRNVPARSNRGLFGAIAGFIEGGWPGLVAGWYGFQHSNDQGVGMAADRDSTQKAVDKITSKVNNIVDKMNRQYEIIDHEFSEVETRLNMINNKIDDQIQDIWTYNAELLVLLENQKTLDEHDANVNNLYNKVKRALGSNAMEDGKGCFELYHKCDDQCMETIRNGTYNRRKYREESRLEQQRIEGVKLESEGTYKILTIYSTVASSLVLAMGFAAFLFWAMSNGSCRCNICI

SEQ ID NO: 10288 - protein, 560 aa, Artificial Sequence; identical to SEQ ID NO: 10283
  derived and/or modified protein sequence (wt) from hemagglutinin__InfluenzaA__AGQ81137

SEQ ID NO: 10289 - protein, 560 aa, Artificial Sequence
  derived and/or modified protein sequence (wt) from hemagglutinin__InfluenzaA__AGQ81138
MEAATIITILLAITGSNADKICIGYQSTNSTETVDTLTENNVPVTHAKELLHTEHNGMLCATNLGRPLILDTCTIEGLIYGNPSCDLPLEGREWSYIVERPSAVNGVCYPGHVENLEELRSLFSSASSYQRVQIFPDSIWNVSYSGTSKACSDSFYRSMRWLTQKNNNYPVQDAQYTNNKGKNILFMWGINHPPTDTAQTNLYTRTDTTTSVATEDINRTFKPLIGPRPLVNGLQGRIDYYWAVLKPGQTLRVRSNGNLIAPWYGHILLGESHGRILKTDLKSGNCVVQCQTERGGLNTTLPFHNVSKYAFGNCPKYIGVKSLKLAVGLRNVHARSSRGLFGAIAGFIEGGWSGLVAGWYGFQHSNDQGTGMAADRDSTQKAIDKITSKVNNIVDKMNKQYEIIDHEFSEIETRLNMINDKIDDQIQDIWAYNAELLVLLENQKTLDEHDANVNNLYNKVKRALGSNAVEDGKGCFDLYHKCDNQCMETIRNGTYNRRKYQEESRLERQKIEGVKLESEGTYKILTIYSTVASSLVIAMGFAAFLFWAMSNGSCRCNICI

SEQ ID NO: 10290 - protein, 560 aa, Artificial Sequence
  derived and/or modified protein sequence (wt) from hemagglutinin__InfluenzaA__AGQ81139
MEVATIITILLVITGGNADKICIGYQSTNSTETVDTLTENNVPVTHAKELLHTEHNGMLCATNLGRPLILDTCTIEGLIYGNPSCDLPLEGREWSYIVERSSAVNGVCYPGNVENLEELRSLFSSASSYQRIQIFPDSIWNVSYSGTSKACSDSFYRSMRWLTQKNNNYPVQDAQYTNNRGKNILFMWGINHPPTDNAQTNLYTRTDTTTSVATEDINRTFKPLIGPRPLVNGLQGRIDYYWAVLKPGQTLRVRSNGNLIAPWYGHILLGESHGRILKTDLKSGNCVVQCQTERGGLNTTLPFHNVSKYSFGNCPKYIGVKSLKLAVGLRNVPARSSRGLFGAIAGFIEGGWSGLVAGWYGFQHSNDQGTGMAADRDSTQKAIDKITSKVNNIVDKMNKQYEIIDHEFSEIETRLNMINNKIDDQIQDIWAYNAELLVLLENQKTLDEHDANVNNLYNKVKRALGSNAVEDGKGCFDLYHKCDNQCMETIRNGTYNRRKYQEESRLERQKIEGVKLESEGTYKILTIYSTVASSLVIAMGFAAFLFWAMSNGSCRCNICI

SEQ ID NO: 10291 - protein, 560 aa, Artificial Sequence
  derived and/or modified protein sequence (wt) from hemagglutinin__InfluenzaA__AGQ81141
MEAATIITILLVITGSNADKICIGYQSTNSTETVDTLTENNVPVTHAKELLHTEHNGMLCATDLGRPLILDTCTIEGLIYGNPSCDLPLEGREWSYIVERPSAVNGVCYPGNVENLEELRSLFSSASSYQRIQIFPDSIWNVSYSGTSKACSDSFYRSMRWLTQKNNNYPVQDAQYTNNRGKNILFMWGINHPPTDTAQTNLYTRTDTTTSVATEDINRTFKPLIGPRPLVNGLQGRIDYYWAVLKPGQTLRVRSNGNLIAPWYGHILLGESHGRILKTDLKSGNCVVQCQTERGGLNTTLPFHNVSKYAFGNCPKYIGVKSLKLAVGLRNVPARSRRGLFGAIAGFIEGGWTGLVAGWYGFQHSNDQGTGMAADRDSTQKAIDKITSKVNNIVDKMNKQYDIIDHEFSEIETRLNMINDKIDDQIQDIWAYNAELLVLLENQKTLDEHDANVNNLYNKVKGALGSNAVEDGKGCFDLYHKCDNQCMETIRNGTYNRRKYQEESRLERQKIEGVKLESEGTYKILTIYSTVASSLVIAMGFAAFLFWAMSNGSCRCNICI

SEQ ID NO: 10292 - protein, 560 aa, Artificial Sequence
  derived and/or modified protein sequence (wt) from hemagglutinin__InfluenzaA__AGQ81143
MEVATIITILLVITGSNADKICIGYQSTNSTETVDTLTENNVPVTHAKELLHTEHNGMLCATNLGRPLILDTCTIEGLIYGNPSCDLPLEGREWSYIVERPSAVNGVCYPGNVENLEELRSLFSSASSYQRIQIFPDSIWNVSYSGTSKACSDSFYRSMRWLTQKNNNYPVQDAQYTNNRGKNILFMWGINHPPTDNAQTNLYTRTDTTTSVATEDINRTFKPLIGPRPLVNGLQGRIDYYWAVLKPGQTLRVRSNGNLIAPWYGHILLGESHGRILKTDLKSGNCVVQCQTERGGLNTTLPFHNVSKYSFGNCPKYIGVKSLKLAVGLRNVPARSSRGLFGAIAGFIEGGWSGLVAGWYGFQHSNDQGTGMAADRDSTQKAIDKITSKVNNIVDKMNKQYEIIDHEFSEIETRLNMINNKIDDQIQDIWAYNAELLVLLENQKTLDEHDANVNNLYNKVKRALGSNAVEDGKGCFDLYHKCDNQCMETIRNGTYNRRKYQEESRLERQKIEGVKLESEGTYKILTIYSTVASSLVIAMGFAAFLFWAMSNGSCRCNICI

SEQ ID NO: 10293 - protein, 560 aa, Artificial Sequence
  derived and/or modified protein sequence (wt) from hemagglutinin__InfluenzaA__AGQ81144
MEAATIITILLVVTGSNADKICIGYQSTNSTETVDTLTENNVPVTHAKELLHTEHNGMLCATNLGRPLILDTCTIEGLIYGNPSCDLPLEGREWSYIVERPSAVNGVCYPGNVENLEELRSLFSSASSYQRIQIFPDSIWNVSYGGTSKACSDSFYRSMRWLTQKNNNYPVQDAQYTNNRGKNILFMWGINHPPTDTAQTNLYTRTDTTTSVATEDINRTFKPLIGPRPLVNGLQGRIDYYWAVLKPGQTLRVRSNGNLIAPWYGHILLGESHGRILKTDLKSGNCVVQCQTERGGLNTTLPFHNVSKYAFGNCPKYIGVKSLKLAVGLRNMPARSSRGLFGAIAGFIEGGWSGLVAGWYGFQHSNDQGTGMAADRDSTQKAIDKITSKVNNIVDKMNKQYEIIDHEFSEIETRLNMINDKIDDQIQDIWAYNAELLVLLENQKTLDEHDANVNNLYNKVKRALGSNAVEDGKGCFDLYHKCDNQCMETIRNGTYNRRKYQEESRLERQKIEGVKLESEGTYKILTIYSTVASSLVIAMGFAAFLFWAMSNGSCRCNICI

SEQ ID NO: 10294 - protein, 560 aa, Artificial Sequence
  derived and/or modified protein sequence (wt) from hemagglutinin__InfluenzaA__AGQ81146
MEAATIITILLVITGSNADKICIGYQSTNSTETVDTLTENNVPVTHAKELLHTEHNGMLCATNLGRPLILDTCTIEGLIYGNPSCDLPLEGKEWSYIVERPSAVNGMCYPGNVENLEELRSLFSSASSYQRIQIFPDSIWNVSYSGTSKACSDSFYRSMRWLTQKNNNYPVQDAQYTNNRGKNILFMWGINHPPTDTAQTNLYTRTDTKTSVATEEINRTFKPLIGPRPLVNGLQGRIDYYWAVLKPGQTLRVRSNGNLIAPWYGHILLGESHGRILKTDLKSGNCVVQCQTERGGLNTTLPFHNVSKYAFGNCPKYIGVKSLKLAVGLRNVPARSSRGLFGAIAGFIEGGWSGLVAGWYGFQHSNDQGTGMAADRDSTQKAIDKITSKVNNIVDKMNKQYEIIDHEFSEIETRLNMINDKIDDQIQDIWAYNAELLVLLENQKTLDEHDSNVNNLYNKVKRALGSNAVEDGKGCFDLYHKCDNQCMETIRNGTYNRRKYQEESRLERQKIEGVKLESEGTYKILTIYSTVASSLVIAMGFAAFLFWAMSNGSCRCNICI

SEQ ID NO: 10295 - protein, 560 aa, Artificial Sequence
  derived and/or modified protein sequence (wt) from hemagglutinin__InfluenzaA__AGQ81147
MEAATIITILLVITGSNADKICIGYQSTNSTETVDTLTENNVPVTHAKELLHTEHNGMLCATNLGRPLILDTCTIEGLIYGNPSCDLPLEGKEWSYIVERPSAVNGMCYPGNVENLEELRSLFSSASSYQRIQIFPDSIWNVSYSGTSKACSDSFYRSMRWLTQKNNNYPVQDAQYTNNRGKNILFMWGINHPPTDTVQTNLYTRTDTKTSVATEEINRTFKPLIGPRPLVNGLQGRIDYYWAVLKPGQTLRVRSNGNLIAPWYGHILLGESHGRILKTDLKSGNCVVQCQTERGGLNTTLPFHNVSKYAFGNCPKYIGVKSLKLAVGLRNVPARSSRGLFGAIAGFIEGGWSGLVAGWYGFQHSNDQGTGMAADRDSTQKAIDKITSKVNNIVDKMNKQYEIIDHEFSEIETRLNMINDKIDDQIQDIWAYNAELLVLLENQKTLDEHDANVNNLYNKVKRALGSNAVEDGKGCFDLYHKCDNQCMETIRNGTYNRRKYQEESRLERQKIEGVKLESEGTYKILTIYSTVASSLVIAMGFAAFLFWAMSNGSCRCNICI

SEQ ID NO: 10296 - protein, 560 aa, Artificial Sequence
  derived and/or modified protein sequence (wt) from hemagglutinin__InfluenzaA__AGQ81148
MEAATIITILLVITGSNADKICIGYQSTNSTETVDTLTENNVPVTHAKELLHTEHNGMLCATNLGRPLILDTCTIEGLIYGNPSCDLPLEGKEWSYIVERPSAVNGMCYPGNVENLEELRSLFSSASSYQRIQIFPDSIWNVSYSGTSKACSDSFYRSMRWLTQKNNNYPVQDAQYTNNRGKNILFMWGINHPPTDTAQTNLYTRTDTKTSVATEEINRTFKPLIGPRPLVNGLQGRIDYYWAVLKPGQTLRVRSNGNLIAPWYGHILLGESHGRILKTDLKSGNCVVQCQTERGGLNTTLPFHNVSKYAFGNCPKYIGVKSLKLAVGLRNVPARSSRGLFGAIAGFIEGGWSGLVAGWYGFQHSNDQGTGMAADRDSTQKAIDKITSKVNNIVDKMNKQYEIIDHEFSEIETRLNMINDKIDDQIQDIWAYNAELLVLLENQKTLDEHDANVNNLYNKVKRALGSNAVEDGKGCFDLYHKCDNQCMETIRNGTYNRRKYQEESRLERQKIEGVKLESEGTYKILTIYSTVASSLVIAMGFAAFLFWAMSNGSCRCNICI

SEQ ID NO: 10297 - protein, 560 aa, Artificial Sequence
  derived and/or modified protein sequence (wt) from hemagglutinin__InfluenzaA__AGQ81149
MEAATIITILLVITGSNADKICIGYQSTNSTETVDTLTENNVPVTHAKELLHTGHNGMLCATNLGRPLILDTCTIEGLIYGNPSCDLPLEGREWSYIVERPSAINGVCYPGNVENLEELRSLFSSASSYQRIQIFPDSIWNVSYSGTSKACSDSFYRSMRWLTQKNNNYPVQDAQYTNNRGKNILFMWGINHPPTDTAQTNLYTRTDTTTSVATEDINRTFKPLIGPRPLVNGLQGRIDYYWAVLKPGQTLRVRSNGNLIAPWYGHILLGESHGRILKTDLKSGNCVVQCQTERGGLNTTLPFHNVSKYAFGNCPKYIGVKSLKLAVGLRNVPARSSRGLFGAIAGFIEGGWSGLVAGWYGFQHSNDQGTGMAADRDSTQKAIDKITSKVNNIVDKMNKQYEIIDHEFSEIETRLNMINDKIDDQIQDIWAYNAELLVLLENQKTLDEHDANVNNLYNKVKRALGSNAVEDGKGCFDLYHKCDNQCMETIRNGTYNRRKYQEESRLERQKIEGVKLESEGTYKILTIYSTVASSLVIAMGFAAFLFWAMSNGSCRCNICI

SEQ ID NO: 10298 - protein, 560 aa, Artificial Sequence
  derived and/or modified protein sequence (wt) from hemagglutinin__InfluenzaA__AGQ81150
MEAATIITILLVITGSNADKICIGYQSTNSTETVDTLTENNVPVTHAKELLHTEHNGMLCATDLGRPLILDTCTIEGLIYGNPSCDLPLEGREWSYIVERPSAVNGVCYPGNVENLEELRSLFSSASSYQRIQIFPDSIWNVSYSGTSKACSDSFYRSMRWLTQKNNNYPVQDAQYTNDRGNNILFMWGINHPPTDTVQTNLYTRTDTTTSVATEDINRTFKPLIGPRPLVNGLQGRIDYYWAVLKPGQTLRVRSNGNLIAPWYGHILLGESHGRILKTDLKSGNCVVQCQTERGGLNTTLPFHNVSKYAFGNCPKYIGVKSLKLAVGLRNVPARSSRGLFGAIAGFIEGGWSGLVAGWYGFQHSNDQGTGMAADRDSTQKAIDKITSKVNNIVDKMNKQYDIIDHEFSEIETRLNMINDKIDDQIQDIWAYNAELLVLLENQKTLDEHDANVNNLYNKVKRALGSNAVEDGKGCFDLYHKCDNQCMETIRNGTYNRRKYQEESRLERQKIEGVKLESEGTYKILTIYSTVASSLVIAMGFAAFLFWAMSNGSCRCNICI

SEQ ID NO: 10299 - protein, 560 aa, Artificial Sequence
  derived and/or modified protein sequence (wt) from hemagglutinin__InfluenzaA__AGQ81152
MEAATIITILLVITGSNADKICIGYQSTNSTETVDTLTENNVPVTHAKELLHTEHNGMLCATNLGRPLILDTCTIEGLIYGNPSCDLPLEGRDWSYIVERPSAVNGVCYPGNVENLEELRSLFSSASSYQKIQIFPDSIWNVSYSGTSKACSDSFYRSMRWLTQKNNNYPVQDAQYTNNRGKNILFMWGINHPPTDTVQTNLYTRTDTTTSVATEDINRTFKPLIGPRPLVNGLQGRIDYYWAVLKPGQTLRVRSNGNLIAPWYGHILLGESHGRILKTDLKSGNCVVQCQTERGGLNTTLPFHNVSKYAFGNCPKYIGVKSLKLAVGLRNVPARSSRGLFGAIAGFIEGGWSGLVAGWYGFQHSNDQGTGMAADRDSTQKAIDKITSKVNNIVDKMNKQYEIIDHEFSEIETRLNMINDKIDDQIQDIWAYNAELLVLLENQKTLDEHDANVNNLYNKVKRALGSNAVEDGKGCFDLYHKCDNQCMETIRNGTYNRRKYQEESRLERQKIEGVKLESEGTYKILTIYSTVASSLVIAMGFAAFLFWAMSNGSCRCNICI

SEQ ID NO: 10300 - protein, 560 aa, Artificial Sequence
  derived and/or modified protein sequence (wt) from hemagglutinin__InfluenzaA__AGQ81153
MEAATIITILLVITGSNADKICIGYQSTNSTETVDTLTENNVPVTHAKELLHTEHNGMLCATNLGRPLILDTCTIEGLIYGNPSCDLPLEGRDWSYIVERPSAVNGVCYPGNVENLEELRSLFSSASSYQKIQIFPDSIWNVSYGGISKACSNSFYRSMRWLTQKNNNYPVQDAQYTNNRGKNILFMWGINHPPTNTTQTDLYTRTDTTTSVATEDIHRTFKPLIGPRPLVNGLQGRIDYYWAVLKPGQTLRVRSNGNLIAPWYGHILLGKSHGRILKTDLKSGNCVVQCQTERGGLNTTLPFHNVSKYAFGNCPKYIGVKSLKLAVGLRNVPARSSRGLFGAIAGFIEGGWSGLVAGWYGFQHSNDQGTGMAADRDSTQKAIDKITSKVNNIVDKMNKQYEIIDHEFSEIETRLNMINDKIDDQIQDIWAYNAELLVLLENQKTLDEHDANVNNLYNKVKRALGSNAVEDGKGCFDLYHKCDNQCMETIRNGTYNRRKYQEESRLERQKIEGVKLESEGTYKILTIYSTVASSLVIAMGFAAFLFWAMSNGSCRCNICI

SEQ ID NO: 10301 - protein, 560 aa, Artificial Sequence
  derived and/or modified protein sequence (wt) from hemagglutinin__InfluenzaA__AGQ81155
MEAATIITILLVITGSNADKICIGYQSTNSTETVDTLTENNVPVTHAKELLHTEHNGMLCATNLGRPLILDTCTIEGLIYGNPSCDLPLEGRDWSYIVERPSAVNGVCYPGNVENLEELRSLFSSASSYQKIQIFPDSIWNVSYNGTSKACSDSFYRSMRWLTQKNNNYPVQDAQYTNNRGKNILFMWGINHPPTDTTQTNLYTRTDTTTSVATEDINRTFKPLIGPRPLVNGLQGRIDYYWAVLKPGQTLRVRSNGNLIAPWYGHILLGESHGRILKTDLKSGNCVVQCQTERGGLNTTLPFHNVSKYAFGDCPKYIGVKSLKLAVGLRNVPARSSRGLFGAIAGFIEGGWSGLVAGWYGFQHSNDQGTGMAADRDSTQKAIDKITSKVNNIVDKMNKQYEIIDHEFSEIETRLNMINDKIDDQIQDIWAYNAELLVLLENQKTLDEHDANVNNLYNKVKRALGSNAVEDGKGCFDLYHKCDNQCMETIRNGTYNRRKYQEESRLERQEIEGVKLESEGTYKILTIYSTVASSLVIAMGFAAFLFWAMSNGSCRCNICI

SEQ ID NO: 10302 - protein, 560 aa, Artificial Sequence
  derived and/or modified protein sequence (wt) from hemagglutinin__InfluenzaA__AGQ81156
MEAATIITILLVITGSNADKICIGYQSTNSTETVDTLTENNVPVTHAKELLHTEHNGMLCATNLGRPLILDTCTIEGLIYGNPSCDLPLEGRDWSYIVERPSAVNGVCYPGNVENLEELRSLFSSASSYQKIQIFPDSIWNVSYGGISKACSNSFYRSMRWLTQKNNNYPVQDAQYTNNRGKNILFMWGINHPPTNTTQTDLYTRTDTTTSVATEDIHRTFKPLIGPRPLVNGLQGRIDYYWAVLKPGQTLRVRSNGNLIAPWYGHILLGESHGRILKTDLKSGNCVVQCQTERGGLNTTLPFHNVSKYAFGNCPKYIGVKSLKLAVGLRNVPARSSRGLFGAIAGFIEGGWSGLVAGWYGFQHSNDQGTGMAADRDSTQKAIDKITSKVNNIVDKMNKQYEIIDHEFSEIETRLNMINDKIDDQIQDIWAYNAELLVLLENQKTLDEHDANVNNLYNKVKRALGSNAVEDGKGCFDLYHKCDNQCMETIRNGTYNRRKYQEESRLERQKIEGVKLESEGTYKILTIYSTVASSLVIAMGFAAFLFWAMSNGSCRCNICI

SEQ ID NO: 10303 - protein, 560 aa, Artificial Sequence
  derived and/or modified protein sequence (wt) from hemagglutinin__InfluenzaA__AGQ81157
MEAATIITILLVITGNNADKICIGYQSTNSTETVDTLTENNVPVTHAKELLHTEHNGMLCATNLGRPLILDTCTIEGLIYGNPSCDLPLEGRDWSYIVERPSAVNGVCYPGNVENLEELRSLFSSASSYQKIQIFPDSIWNVSYNGTSKACSDSFYRSMRWLTQKNNNYPVQDAQYTNNRGKNILFMWGINHPPTDTTQTNLYTRTDTTTSVATEDINRTFKPLIGPRPLVNGLQGRIDYYWAVLKPGQTLRVRSNGNLIAPWYGHILLGESHGRILKTDLKSGNCVVQCQTERGGLNTTLPFHNVSKYAFGDCPKYIGVKSLKLAVGLRNVPARSSRGLFGAIAGFIEGGWSGLVAGWYGFQHSNDQGTGMAADRDSTQKAIDKITSKVNNIVDKMNKQYEIIDHEFSEIETRLNMINDKIDDQIQDIWAYNAELLVLLENQKTLDEHDANVNNLYNKVKRALGSNAVEDGKGCFDLYHKCDNQCMETIRNGTYNRRKYQEESRLERQKIEGVKLESEGTYKILTIYSTVASSLVIAMGFAAFLFWAMSNGSCRCNICI

SEQ ID NO: 10304 - protein, 560 aa, Artificial Sequence
  derived and/or modified protein sequence (wt) from hemagglutinin__InfluenzaA__AGQ81158
MEVVTIITILLVITRSNADKICIGYQSTNSTETVDTLTENNVPVTHAKELLHTEHNGMLCATNLGRPLILDTCTIEGLIYGNPSCDLPLEGREWSYIVERPSAVNGVCYPGNVENLEELRSLFSSASSYQRIQIFPDSIWNVSYSGTSKACSDSFYRSMRWLTQKNNNYPVQDAQYTNNRGKNILFMWGINHPPTDTAQTNLYTRTDTTTSVATEDINRTFKPLIGPRPLVNGLQGRIDYYWAVLKPGQTLRVRSNGNLIAPWYGHILLGESHGRILKTDLKSGSCVVQCQTERGGLNTTLPFHNVSKYAFGNCPKYIGVKSLKLAVGLRNVPARSSRGLFGAIAGFIEGGWSGLVAGWYGFQHSNDQGTGMAADRDSTQKAIDKITSKVNNIVDKMNKQYEIINHEFSEIETRLNMINDKIDDQIQDIWAYNAELLVLLENQKTLDEHDANVNNLYNKVKRALGSNAVEDGKGCFDLYHKCDNQCMETIRNGTYNRRMYQEESRLERQKIEGVKLESEGTYKILTIYSTVASSLVIAMGFAAFLFWAMSNGSCRCNICI

SEQ ID NO: 10305 - protein, 560 aa, Artificial Sequence
  derived and/or modified protein sequence (wt) from hemagglutinin__InfluenzaA__AGQ81159
MEAATIITILLVITGSNADKICIGYQSTNSTETVDTLTENNVPVTHAKELLHTEHNGMLCATNLGRPLILDTCTIEGLIYGNPSCDLPLEGRDWSYIVERPSAVNGVCYPGNVENLEELRSLFSSASSYQKIQIFPDSIWNVSYDGISKACSNSFYRSMRWLTKKNNSYPVQDAQYTNNIGKNILFMWGINHPPTNTTQTDLYTRTDTTTSVATEDIHRTFKPLIGPRPPVNGLLGRIDYYWAVLKPGQTLRVRSNGNLIAPWYGHILLGESHGRILKTDLKSGNCVVQCQTERGGLNTTLPFHNVSKYAFGNCPKYIGVKSLKLAVGLRNVPARSSRGLFGAIAGFIEGGWSGLVAGWYGFQHSNDQGTGMAADRDSTQKAIDKITSKVNNIVDKMNKQYEIIDHEFSEIETRLNMINDKIDDQIQDIWAYNAELLVLLENQKTLDEHDANVNNLYNKVKRALGSNAVEDGKGCFDLYHKCDNQCMETIRNGTYNRRKYQEESRLERQKIEGVKLESEGTYKILTIYSTVASSLVIAMGFAAFLFWAMSNGSCRCNICI

SEQ ID NO: 10306 - protein, 560 aa, Artificial Sequence
  derived and/or modified protein sequence (wt) from hemagglutinin__InfluenzaA__AGQ81161
METVSLITILLVATVSNADKICIGYQSTNSTETVDTLTENNVPVTHAKELLHTEHNGMLCATSLGQPLILDTCTIEGLIYGNPSCDPLLEGREWSYIVERPSAVNGLCYPGNVENLEELRSLFSSARSYQRIQIFPDTIWNVSYDGTSKACSGSFYRNMRWLTQKNSDYPIQDAQYTNNQGKNILFMWGINHPPTDTTQRDLYTRTDTTTSVATEEINRIFKPLIGPRPLVNGLMGRIDYYWSVLKPGQTLRIKSDGNLIAPWYGHILSGESHGRILKTDLKKGSCTVQCQTEKGGLNTTLPFQNVSKYAFGNCSKYIGIKSLKLAVGLRNVPSRSSRGLFGAIAGFIEGGWSGLVAGWYGFQHSNDQGVGMAADRDSTQKAIDKITSKVNNIVDKMNKQYEIIDHEFSEVETRLNMINNKIDDQIQDIWAYNAELLVLLENQKTLDEHDANVNNLYNKVKRALGSNAVEDGKGCFELYHKCDDQCMETIRNGTYNRRKYQEESKLERQKIEGVKLESEGTYKILTIYSTVASSLVIAMGFAAFLFWAMSNGSCRCNICI

SEQ ID NO: 10307 - protein, 560 aa, Artificial Sequence
  derived and/or modified protein sequence (wt) from hemagglutinin__InfluenzaA__AGQ81162
METVSLITILLVATVSNADKICIGYQSTNSTETVDTLTENNVPVTHAKELLHTEHNGMLCATSLGQPLILDTCTIEGLIYGNPSCDLLLEGREWSYIVERPSAVNGLCYPGNVENLEELRSLFSSARSYQRIQIFPDTIWNVSYDGTSKACSGSFYRSMRWLTQKNSDYPIQDAQYTNNQGKNILFMWGINHPPTDTTQRDLYTRTDTTTSVATEEINRIFKPLIGPRPLVNGLMGRIDYYWSVLKPGQTLRIKSDGNLIAPWYGHILSGESHGRILKTDLKKGSCTVQCQTEKGGLNTTLPFQNVSKYAFGNCSKYIGIKSLKLAVGLRNVPSRSSRGLFGAIAGFIEGGWSGLVAGWYGFQHSNDQGVGMAADRDSTQKAIDKITSKVNNIVDKMNKQYEIIDHEFSEVETRLNMINNKIDDQIQDIWAYNAELLVLLENQKTLDEHDANVNNLYNKVKRALGSNAVEDGKGCFELYHKCDDQCMETIRNGTYNRKKYQEESKLERQKIEGVKLESEGTYKILTIYSTVASSLVIAMGFAAFLFWAMSNGSCRCNICI

SEQ ID NO: 10308 - protein, 560 aa, Artificial Sequence
  derived and/or modified protein sequence (wt) from hemagglutinin__InfluenzaA__AGQ81164
METVSLITILLVATVSNADKICIGYQSTNSTETVDTLTENNVPVTHAKELLHTEHNGMLCATSLGQPLILDTCTIEGLIYGNPSCDLLLEGREWSYIVERPSAVNGLCYPGNVENLEELRSLFSSARSYQRIQIFPDTIWNVSYDGTSKACSGSFYRSMRWLTQKNSDYPIQDAQYTNNQGKNILFMWGINHPPTDTTQRDLYTRTDTTTSVATEEINRIFKPLIGPRPLVNGLMGRIDYYWSVLKPGQTLRIKSDGNLIAPWYGHILSGESHGRILKTDLKKGSCTVQCQTEKGGLNTTLPFQNVSKYAFGNCSKYIGIKSLKLAVGLRNVPSRSSRGLFGAIAGFIEGGWSGLVAGWYGFQHSNDQGVGMAADRDSTQKAIDKITSKVNNIVDKMNKQYEIIDHEFSEVETRLNMINNKIDDQIQDIWAYNAELLVLLENQKTLDEHDANVNNLYNKVKRALGSNAVEDGKGCFELYHKCDDQCMETIRNGTYNRRKYQEESKLERQKIEGVKLESEGTYKILTIYSTVASSLVIAMGFAAFLFWAMSNGSCRCNICI

SEQ ID NO: 10309 - protein, 560 aa, Artificial Sequence
  derived and/or modified protein sequence (wt) from hemagglutinin__InfluenzaA__AGQ81167
METVSLITILLVATVSNADKICIGYQSTNSTETVDTLTENNVPVTHAKELLHTEHNGMLCATSLGQPLILDTCTIEGLIYGNPSCDLLLEGREWSYIVERPSAVNGLCYPGNVENLEELRSLFSSARSYQRIQIFPDTIWNVSYNGTSKACSGSFYRSMRWLTQKNSNYPIQDAQYTNNQGKNILFMWGINHPPTDTTQRDLYTRTDTTTSVATEEINRIFKPLIGPRPLVNGLMGRIDYYWSVLKPGQTLRIKSDGNLIAPWYGHILSGESHGRILKTDLKKGSCTVQCQTEKGGLNTTLPFQNVSKYAFGNCSKYIGIKSLKLAVGLRNVPSRSSRGLFGAIAGFIEGGWSGLVAGWYGFQHSNDQGVGMAADRDSTQKAIDKITSKVNNIVDKMNKQYEIIDHEFSEVETRLNMINNKIDDQIQDIWAYNAELLVLLENQKTLDEHDANVNNLYNKVKRALGSNAVEDGKGCFELYHKCDDQCMETIRNGTYNRRKYQEESKLERQKIEGVKLESEGTYKILTIYSTVASSLVIAMGFAAFLFWAMSNGSCRCNICI

SEQ ID NO: 10310 - protein, 560 aa, Artificial Sequence
  derived and/or modified protein sequence (wt) from hemagglutinin__InfluenzaA__AGQ81168
METVSLITILLVVTVSNADKICIGYQSTNSTETVDTLTENNVPVTHARELLHTEHNGMLCATSLGHPLILDTCTIEGLIYGNPSCDLLLGGREWSYIVERPSAVNGLCYPGNVENLEELRSLFSSARSYQRIQIFPDTIWNVSYSGTSKACSDSFYRSMRWLTQKGNAYPIQDAQYTNNQGKNILFMWGINHPPTDTAQTNLYTRTDTTTSVATEEINRTFKPLIGPRPLVNGLMGRINYYWSVLKPGQTLRIKSNGNLIAPWYGHILSGESHGRILKTDLKRGSCTVQCQTEKGGLNTTLPFQNVSKYAFGNCSKYIGMKSLKLAVGLRNVPSRSSRGLFGAIAGFIEGGWSGLVAGWYGFQHSNDQGVGMAADRDSTQKAIDKITSKVNNIVDKMNKQYEIIDHEFSEVETRLNMINNKIDDQIQDIWAYNAELLVLLENQKTLDEHDANVNNLYNKVKRALGSNAVEDGKGCFELYHKCDDQCMETIRNGTYNRRKYQEESKLERQKIEGVKLESEGTYKILTIYSTVASSLVIAMGFAAFLFWAMSNGSCRCNICI

SEQ ID NO: 10311 - protein, 560 aa, Artificial Sequence
  derived and/or modified protein sequence (wt) from hemagglutinin__InfluenzaA__AGQ81169
METVSLITILLVVTVSNADKICIGYQSTNSTETVDTLTENNVPVTHARELLHTEHNGMLCATSLGHPLILDTCTIEGLIYGNPSCDLLLGGREWSYIVERPSAVNGLCYPGNVENLEELRSLFSSARSYQRIQIFPDTIWNVSYSGTSKACSDSFYRSMRWLTQKDNAYPIQDAQYTNNQEKNILFMWGINHPPTDTVQTNLYTRTDTTTSVATEEINRTFKPLIGPRPLVNGLMGRINYYWSVLKPGQTLRIKSNGNLIAPWYGHILSGESHGRILKTDLKRGSCTVQCQTEKGGLNTTLPFQNVSKYAFGNCSKYIGMKSLKLAVGLRNVPSRSSRGLFGAIAGFIEGGWSGLVAGWYGFQHSNDQGVGMAADRDSTQKAIDKITSKVNNIVDKMNKQYEIIDHEFSEVETRLNMINNKIDDQIQDIWAYNAELLVLLENQKTLDEHDANVNNLYNKVKRALGSNAVEDGKGCFELYHKCDDQCMETIRNGTYNRRKYQEESKLERQKIEGVKLESEGTYKILTIYSTVASSLVIAMGFAAFLFWAMSNGSCRCNICI

SEQ ID NO: 10312 - protein, 560 aa, Artificial Sequence
  derived and/or modified protein sequence (wt) from hemagglutinin__InfluenzaA__AGQ81170
METVSLITILLVVTVSNADKICIGYQSTNSTETVDTLTENNVPVTHARELLHTEHNGMLCATSLGHPLILDTCTIEGLIYGNPSCDLLLGGREWSYIVERPSAVNGLCYPGNVENLEELRSLFSSARSYQRIQIFPDTIWNVSYSGTSKACSDSFYRSMRWLTQKDNAYPIQDAQYTNNQGKNILFMWGINHPPTDTAQTNLYTRTDTTTSVATEEINRTFKPLIGPRPLVNGLMGRINYYWSVLKPGQTLRIKSNGNLIAPWYGHILSGESHGRILKTDLKRGSCTVQCQTEKGGLNTTLPFQNVSKYAFGNCSKYIGMKSLKLAVGLRNVPSRSSRGLFGAIAGFIEGGWSGLVAGWYGFQHSNDQGVGMAADRDSTQKAIDKITSKVNNIVDKMNKQYEIIDHEFSEVETRLNMINNKIDDQIQDIWAYNAELLVLLENQKTLDEHDANVNNLYNKVKRALGSNAVEDGKGCFELYHKCDDQCMETIRNGTYNRRKYQEESKLERQKIEGVKLESEGTYKILTIYSTVASSLVIAMGFAAFLFWAMSNGSCRCNICI

SEQ ID NO: 10313 - protein, 560 aa, Artificial Sequence; identical to SEQ ID NO: 10312
  derived and/or modified protein sequence (wt) from hemagglutinin__InfluenzaA__AGQ81171

SEQ ID NO: 10314 - protein, 560 aa, Artificial Sequence; identical to SEQ ID NO: 10312
  derived and/or modified protein sequence (wt) from hemagglutinin__InfluenzaA__AGQ81172

SEQ ID NO: 10315 - protein, 560 aa, Artificial Sequence
  derived and/or modified protein sequence (wt) from hemagglutinin__InfluenzaA__AGQ81173
METASLITILLVVTVSNADKICIGYQSTNSTETVDTLTENNVPVTHAKELLHTEHNGMLCATSLGNPLILDTCTIEGLIYGNPSCDLLLGGREWSYIVERPSAVNGLCYPGNVENLEELRSLFSSARSYQRIQIFPDTIWNVSYSGTSKACSDSFYRSMRWLTQKDNAYPIQDAQYTNNQGKNILFMWGINHPPTDTAQTNLYTRTDTTTSVATEEINRTFKPLIGPRPLVNGLMGRINYYWSVLKPGQTLRIKSNGNLIAPWYGHILSGESHGRILKTDLKRGSCTVQCQTEKGGLNTTLPFQNVSKYAFGNCSKYIGMKSLKLAVGLRNVPSRSSRGLFGAIAGFIEGGWSGLVAGWYGFQHSNDQGVGMAADRDSTQKAIDKITSKVNNIVDKMNKQYEIIDHEFSEVETRLNMINNKIDDQIQDIWAYNAELLVLLENQKTLDEHDANVNNLYNKVKRALGSNAVEDGKGCFELYHKCDDQCMETIRNGTYNRRKYQEESKLERQKIEGVKLESEGTYKILTIYSTVASSLVIAMGFAAFLFWAMSNGSCRCNICI

SEQ ID NO: 10316 - protein, 560 aa, Artificial Sequence; identical to SEQ ID NO: 10312
  derived and/or modified protein sequence (wt) from hemagglutinin__InfluenzaA__AGQ81175

SEQ ID NO: 10317 - protein, 560 aa, Artificial Sequence
  derived and/or modified protein sequence (wt) from hemagglutinin__InfluenzaA__AGQ81177
METVSLITILLVATVSNADKICIGYQSTNSTETVDTLTENNVPVTHAKELLHTEHNGMLCATSLGQPLILDTCTIEGLIYGNPSCDLLLEGREWSYIVERPSAVNGLCYPGNVENLEELRSLFSSARSYQRIQIFPDTIWNVSYNGTSKACSGSFYRSMRWLTRKNGDYPIQDAQYTNNQGKNILFMWGINHPPTDTTQRDLYTRTDTTTSVATEEINRIFKPLIGPRPLVNGLMGRIDYYWSVLKPGQTLRIKSDGNLIAPWYGHILSGESHGRILKTDLKRGSCTVQCQTEKGGLNTTLPFQNVSKYAFGNCSKYIGIKSLKLAVGLRNVPSRSSRGLFGAIAGFIEGGWSGLVAGWYGFQHSNDQGVGMAADRDSTQKAIDKITSKVNNIVDKMNKQYEIIDHEFSEVETRLNMINNKIDDQIQDIWAYNAELLVLLENQKTLDEHDANVNNLYNKVKRALGSNAVEDGKGCFELYHKCDDQCMETIRNGTYNRRKYQEESKLERQKIEGVKLESEGTYKILTIYSTVASSLVIAMGFAAFLFWAMSNGSCRCNICI

SEQ ID NO: 10318 - protein, 560 aa, Artificial Sequence; identical to SEQ ID NO: 10317
  derived and/or modified protein sequence (wt) from hemagglutinin__InfluenzaA__AGQ81178

SEQ ID NO: 10319 - protein, 560 aa, Artificial Sequence; identical to SEQ ID NO: 10309
  derived and/or modified protein sequence (wt) from hemagglutinin__InfluenzaA__AGQ81181

SEQ ID NO: 10320 - protein, 560 aa, Artificial Sequence; identical to SEQ ID NO: 10309
  derived and/or modified protein sequence (wt) from hemagglutinin__InfluenzaA__AGQ81183

SEQ ID NO: 10321 - protein, 560 aa, Artificial Sequence; identical to SEQ ID NO: 10308
  derived and/or modified protein sequence (wt) from hemagglutinin__InfluenzaA__AGQ81184

SEQ ID NO: 10322 - protein, 560 aa, Artificial Sequence
  derived and/or modified protein sequence (wt) from hemagglutinin__InfluenzaA__AGQ81185
METASLITILLVATVSNADKICIGYQSTNSTETVDTLTENNVPVTHAKELLHTEHNGMLCATSLGQPLILDTCTIEGLIYGNPSCDLLLEGREWSYIVERPSAVNGLCYPGNVENLEELRSLFSSARSYQRIQIFPDTTWNVSYNGTSKACSGSFYRSMRWLTQKNSNYPIQDAQYTNNQGKNILFMWGINHPPTDTTQRDLYTRTDTTTSVATEEINRIFKPLIGPRPLVNGLMGRIDYYWSVLKPGQTLRIKSDGNLIAPWYGHILSGESHGRILKTDLKRGSCTVQCQTEKGGLNTTLPFQNVSKYAFGNCSKYIGIKSLKLAVGLRNVPSRSSRGLFGAIAGFIEGGWSGLVAGWYGFQHSNDQGVGMAADRDSTQKAIDKITSKVNNIVDKMNKQYEIIDHEFSEVETRLNMINNKIDDQIQDIWAYNAELLVLLENQKTLDEHDANVNNLYNKVKRALGSNAVEDGKGCFELYHKCDNQCMETIRNGTYNRRKYQEESKLERQKIEGVKLESEGTYKILTIYSTVASSLVIAMGFAAFLFWAMSNGSCRCNICI

SEQ ID NO: 10323 - protein, 560 aa, Artificial Sequence
  derived and/or modified protein sequence (wt) from hemagglutinin__InfluenzaA__AGQ81186
METVSLITILLVATVSNADKICIGYQSTNSTETVDTLTENNVPVTHAKELLHTEHNGMLCATSLGQPLILDTCTIEGLIYGNPSCDLLLEGREWSYIVERPSAVNGLCYPGNVENLEELRSLFSSARSYQRIQIFPDTIWNVSYDGTSKACSGSFYRSMRWLTQKNSDYPIQDAQYTNNQGKNILFMWGINHPPTDTTQRDLYTRTDTTTSVATEEINRIFKPLIGPRPLVNGLMGRIDYYWSVLKPGQTLRIKSDGNLIAPWYGHILSGESHGRILKTDLKKGSCTVQCQTEKGGLNTTLPFQNVSKYAFGNCSKYIGIKSLKLAIGLRNVPSRSSRGLFGAIAGFIEGGWSGLVAGWYGFQHSNDQGVGMAADRDSTQKAIDKITSKVNNIVDKMNKQYEIIDHEFSEVETRLNMINNKIDDQIQDIWAYNAELLVLLENQKTLDEHDANVNNLYNKVKRALGSNAVEDGKGCFELYHKCDDQCMETIRNGTYNRKKYQEESKLERQKIEGVKLESEGTYKILTIYSTVASSLVIAMGFAAFLFWAMSNGSCRCNICI

SEQ ID NO: 10324 - protein, 560 aa, Artificial Sequence; identical to SEQ ID NO: 10312
  derived and/or modified protein sequence (wt) from hemagglutinin__InfluenzaA__AGQ81190

SEQ ID NO: 10325 - protein, 560 aa, Artificial Sequence; identical to SEQ ID NO: 10312
  derived and/or modified protein sequence (wt) from hemagglutinin__InfluenzaA__AGQ81191

SEQ ID NO: 10326 - protein, 560 aa, Artificial Sequence; identical to SEQ ID NO: 10317
  derived and/or modified protein sequence (wt) from hemagglutinin__InfluenzaA__AGQ81192

SEQ ID NO: 10327 - protein, 560 aa, Artificial Sequence
  derived and/or modified protein sequence (wt) from hemagglutinin__InfluenzaA__AGQ81193
METVSLITILLVATVSNADKICIGYQSTNSTETVDTLTENNVPVTHAKELLHTEHNGMLCATSLGQPLILDTCTIEGLIYGNPSCDLLLEGREWSYIVERPSAVNGLCYPGNVENLEELRSLFSSARSYQRIQIFPDTIWNVSYTGTSKACSGSFYRSMRWLTQKNGDYPIQDAQYTNNQGKNILFMWGINHPPTDTTQRDLYTRTDTTTSVATEEINRIFKPLIGPRPLVNGLMGRIDYYWSVLKPGQTLRIKSDGNLIAPWYGHVLSGESHGRILKTDLKRGSCTVQCQTEKGGLNTTLPFQNVSKYAFGNCSKYIGIKSLKLAVGLRNVPSRSSRGLFGAIAGFIEGGWSGLVAGWYGFQHSNDQGVGMAADRDSTQKAIDKITSKVNNIVDKMNKQYEIIDHEFSEVETRLNMINNKIDDQIQDIWAYNAELLVLLENQKTLDEHDANVNNLYNKVKRALGSNAVEDGKGCFELYHKCDDQCMETIRNGTYNRRKYQEESKLERQKIEGVKLESEGTYKILTIYSTVASSLVIAMGFAAFLFWAMSNGSCRCNICI

SEQ ID NO: 10328 - protein, 560 aa, Artificial Sequence; identical to SEQ ID NO: 10312
  derived and/or modified protein sequence (wt) from hemagglutinin__InfluenzaA__AGQ81194

SEQ ID NO: 10329 - protein, 561 aa, Artificial Sequence
  derived and/or modified protein sequence (wt) from hemagglutinin__InfluenzaA__AGQ81195
MYKIVVIITLLGTVKGLDKICLGHHAVANGTIVKTLTNEQEEVTNATETVEGKSLNRLCMKGRNHKDLGNCHPIGMLIGTPACDLHLTGTWDTLIERENAIAYCYPGATINEEALRQKIMESGGISKISTGFTYGSSINSAGTTRACMRNGGNSFYAELKWLVSKSKGQNFPQTTNTYRNTDTSEHLIMWGIHHPSSTQEKNDLYGTQSLSISVGSSTYQNNFVPVVGARPQVNGQSGRIDFHWTLVQPGDNITFSHNGGLIAPSRVSKLIGRGLGIQSDASIDNNCESKCFWRGGSINTRLPFQNLSPRTVGQCPKYVNKRSLMLATGMRNVPEIMQGRGLFGAIAGFIENGWEGMVDGWYGFRHQNAQGTGQAADYKSTQAAIDQITGKLNRLIEKTNTEFESIESEFSEIEHQIGNVINWTKDSITDIWTYQAELLVAMENQHTIDMADSEMLNLYERVRKQLRQNAEEDGKGCFEIYHACDDSCMESIRNNTYDHSQYREEALLNRLNINPVTLSSGYKDIILWFSFGASCFVLLAVVMGLVFFCLKNGNMRCTICI

SEQ ID NO: 10330 - protein, 561 aa, Artificial Sequence
  derived and/or modified protein sequence (wt) from hemagglutinin__InfluenzaA__AGQ81196
MYKIVVIIALLGAVKGLDKICLGHHAVANGTIVKTLTNEQEEVTNATETVESASLNRLCMKGRSHKDLGNCHPIGMLIGTPACDLHLTGTWDTLIERENAIAYCYPGATVNEEALRQKIMESGGISKISTGFTYGSSINSAGTTKACMRNRGNSFYAELKWLVSKSKGQNFPQTTNTYRNTDTAEHLIMWGIHHPSSTQEKNDLYGTQSLSISVGSSTYQNNFVPVVGARPQVNGQSGRIDFHWTLVQPGDNITFSHNGGLIAPSRVSKLVGRGLGIQSDAPIDNNCESKCFWRGGSINTRLPFQNLSPRTVGQCPKYVNKRSLMLATGMRNVPEIMQGRGLFGAIAGFIENGWEGMVDGWYGFRHQNAQGTGQAADYKSTQTAIDQITGKLNRLIEKTNTEFESIESEFSEIEHQIGNVINWTKDSITDIWTYQAELLVAMENQHTIDMADSEMLNLYERVRKQLRQNAEEDGKGCFEIYHACDDSCMESIRNNTYDHSQYREEALLNRLNINPVKLSSGYKDIILWFSFGASCFVLLAVVMGLVFFCLKNGNMRCTICI

SEQ ID NO: 10331 - protein, 561 aa, Artificial Sequence
  derived and/or modified protein sequence (wt) from hemagglutinin__InfluenzaA__AGQ81198
MYKIVVIIALLGAVKGLDKICLGHHAVANGTIVKTLTNEQEEVTNATETVESTSLNRLCMKGRNHKDLGNCHPIGMLIGTPACDLHLTGTWDTLIERENAIAYCYPGATINEEALRQKIMESGGISKISTGFTYGSSINSAGNTKACMRNGGNSFYAELRWLVSKNKGQNFPQTTNTYRNTDTAEHLIIWGIHHPSSTKEKNDLYGTQSLSISVGSSTYQNNFVPVVGARPQVNGQSGRIDFHWTLVQPGDNITFSHNGGLIAPSRVSKLIGRGLGIQSDAPIDNNCESKCFWRGGSINTRLPFQNLSPRTVGQCPKYVNKKSLMLATGMRNVPEIMQGRGLFGAIAGFIENGWEGMVDGWYGFRHQNAQGTGQAADYKSTQAAIDQITGKLNRLIEKTNTEFESIESEFSEIEHQIGNVINWTKDSITDIWTYQAELLVAMENQHTIDMADSEMLNLYERVRKQLRQNAEEDGKGCFEIYHACDDSCMESIRNNTYDHSQYREEALLNRLNINPVTLSSGYKDIILWFSFGASCFVLLAVVMGLVFFCLKNGNMRCTICI

SEQ ID NO: 10332 - protein, 561 aa, Artificial Sequence
  derived and/or modified protein sequence (wt) from hemagglutinin__InfluenzaA__AGQ81199
MYKIVVIIALLGAVKGLDKICLGHHAVANGTIVKTLTNEQEEVTNATETVESASLNRLCMKGRSHKDLGNCHPIGMLIGTPACDLHLTGTWDTLIERENAIAYCYPGATVNEEALRQKIMESGGISKISTGFTYGSSINSAGTTKACMRNGGNSFYAELKWLVSKSKGQNFPQTTNTYRNTDTAEHLIMWGIHHPSSTQEKNDLYGTQSLSISVGSSTYQNNFVPVVGARPQVNGQSGRIDFHWTLVQPGDNITFSHNGGLIAPSRVSKLVGRGLGIQSDAPIDNNCESKCFWRGGSINTRLPFQNLSPRTVGQCPKYVNKRSLMLATGMRNVPEIMQGRGLFGAIAGFIENGWEGMVDGWYGFRHQNAQGTGQAADYKSTQTAIDQITGKLNRLIEKTNTEFESIESEFSEIEHQIGNVINWTKDSITDIWTYQAELLVAMENQHTIDMADSEMLNLYERVRKQLRQNAEEDGKGCFEIYHACDDSCMESIRNNTYDHSQYREEALLNRLNINPVKLSSGYKDIILWFSFGASCFVLLAVVMGLVFFCLKNGNMRCTICI

SEQ ID NO: 10333 - protein, 565 aa, Artificial Sequence
  derived and/or modified protein sequence (wt) from hemagglutinin__InfluenzaA__AGQ81200
MKKTLLFAAIFLYVKADEICIGYLSNNSTDKVDTIIENNVTVTSSVELVETEHTGSFCSINGKQPIGLGDCSFAGWILGNPMCDDLIGKTSWSYIVEKPNPANGICYPGTLENEEELRLKFSGVLEFSKFEAFTSTGWGAVNSGAGVTAACKFGSSNSFFRNMVWLIHQSGTYPVIKRTFNNTKGRDVLVVWGIHHPATLKEHQDLYKKDSSYVAVGSETYNRRFIPEISTRPKVNGQAGRMTFYWTIVKPGESITFESNGAFLAPRYAFEIVSVGNGKLFRSELNIESCSTKCQTEIGGINTNKSFHSVHRNTIGDCPKYVNVKSLKLATGLRNVPAIASRGLFGAIAGFIEGGWPGLINGWYGFQHRNEEGTGIAADKESTQKAIDQITSKVNNIVDKMNTNFESVQHEFSEIEERINQLSKHVDDSVVDIWSYNAQLLVLLENEKTLDLHDSNVRNLHEKVRRMLKDNAKDEGNGCFTFYHKCDNECIERVRNGTYDHKEFEEESKINRQEIEGVKLDSSGNVYKILSIYSCIASSLVLAALIMGFILWACSNGSCRCTICI

SEQ ID NO: 10334 - protein, 565 aa, Artificial Sequence
  derived and/or modified protein sequence (wt) from hemagglutinin__InfluenzaA__AGQ81202
MKKTLLFAAIFLYVKADEICIGYLSNNSTDKVDTIIENNVTVTSSVELVETEHTGSFCSINGKQPISLGDCSFAGWILGNPMCDDLIGKTSWSYIVEKPNPANGICYPGTLENEEELRLKFSGVLEFSKFEAFTSNGWGAVNSGAGVTAACKFGSSNSFFRNTVWLIHQSGTYPVIKRTFNNTKGRDVLVVWGVHHPATLKEHQDLYKKDSSYVAVGSETYNRRFIPEISTRPKVNGQAGRMTFYWTIVKPGESITFESNGAFLAPRYAFEIVSVGNGKLFRSELNIESCSTKCQTEIGGINTNKSFHSVHRNTIGDCPKYVNVKSLKLATGLRNVPAIASRGLFGAIAGFIEGGWPGLINGWYGFQHRNEEGTGIAADKESTQKAIDQITSKVNNIVDRMNTNFESVQHESSEIEERINQLSKHVDDSMVDIWSYNAQLLVLLENEKTLDLHDSNVRNLHEKVRRMLKDNAKDEGNGCFTFYHKCDNKCIERVRNGTYDHKEFEEESKINRQEIEGVKLDSSGNVYKILSIYSCIASSLVLAALIMGFILWACSNGSCRCTICI

SEQ ID NO: 10335 - protein, 565 aa, Artificial Sequence
  derived and/or modified protein sequence (wt) from hemagglutinin__InfluenzaA__AGQ81203
MKKTLLFAAIFLYVKADEICIGYLSNNSTDKVDTIIENNVTVTSSVELVETEHTGSFCSINGKQPISLGDCSFAGWILGNPMCDDLIGKTSWSYIVEKPNPANGICYPGTLENEEELRLKFSGVLEFNKFEAFTSNGWGAVNSGAGVTAACKFGSSNSFFRNMVWLIHQSGTYPVIKRTFNNTKGRDVLVVWGIHHPATLKEHQDLYKKDSSYVAVGSETYNRRFIPEISTRPKVNGQAGRMTFYWTIVKPGESITFESNGAFLAPRYAFEIVSVGNGKLFRSELNIESCSTKCQTEIGGINTNKSFHSVHRNTIGDCPKYVNVKSLKLATGLRNVPAIASRGLFGAIAGFIEGGWPGLINGWYGFQHRNEEGTGIAADKESTQKAIDQITSKVNNIVDRMNTNFESVQHEFSEIEERINQLSKHVDDSVVDIWSYNAQLLVLLENEKTLDLHDSNVRNLHEKVRRMLKDNAKDEGNGCFTFYHKCDNECIERVRNGTYDHKEFEEESKINRQEIEGVKLDSSGNVYKILSIYSCIASSLVLAALIMGFILWACSNGSCRCTICI

SEQ ID NO: 10336 - protein, 565 aa, Artificial Sequence
  derived and/or modified protein sequence (wt) from hemagglutinin__InfluenzaA__AGQ81204
MKKTLLFAAIFLYVKADEICIGYLSNNSTDKVDTIIENNVTVTSSVELVETEHTGSFCSINGKQPISLGDCSFAGWILGNPMCDDLIGKTSWSYIVEKPNPANGICYPGTLENEEELRLKFSGVLEFNKFEAFTSNGWGAVNSGAGVTAACKFGSSNSFFRNMVWLIHQSGTYPVIKRTFNNTKGRDVLVVWGIHHPATLKEHQDLYKKDSSYVAVGSETYNRRFIPEISTRPKVNGQAGRMTFYWTIVKPGESITFESNGAFLAPRYAFEIVSVGNGKLFRSELNIESCSTKCQTEIGGINTNKSFHSVHRNTIGDCPKYVNVKSLKLATGLRNVPAIASRGLFGAIAGFIEGGWPGLINGWYGFQHRNEEGTGIAADKESTQKAIDQITSKVNNIVDRMNTNFGSVQHEFSEIEERINQLSKHVDDSVVDIWSYNAQLLVLLENEKTLDLHDSNVRNLHEKVRRMLKDNAKDEGNGCFTFYHKCDNECIERVRNGTYDHKEFEEESKINRQEIEGVKLDSSGNVYKILSIYSCIASSLVLAALIMGFILWACSNGSCRCTICI

SEQ ID NO: 10337 - protein, 565 aa, Artificial Sequence
  derived and/or modified protein sequence (wt) from hemagglutinin__InfluenzaA__AGQ81205
MKKTLLFAAIFLYVKADEICIGYLSNNSTDKVDTIIENNVTVTSSVELVETEHTGSFCSINGKQPISLGDCSFAGWILGNPMCDDLIGKTSWSYIVEKPNPANGICYPGTLENEEELRLKFSGVLEFNKFEAFTSNGWGAVNSGAGVTATCKFGSSNSFFRNMVWLIHQSGTYPVIKRTFNNTKGRDVLVVWGIHHPATLKEHQDLYKKDSSYVAVGSETYNRRFIPEISTRPKVNGQAGRMTFYWTIVKPGESITFESNGAFLAPRYAFEIVSVGNGKLFRSELNIESCSTKCQTEIGGINTNKSFHSVHRNTIGDCPKYVNVKSLKLATGLRNVPAIASRGLFGAIAGFIEGGWPGLINGWYGFQHRNEEGTGIAADKESTQKAIDQITSKVNNIVDRMNTNFESVQYEFSEIEERINQLSKHVDDSVVDIWSYNAQLLVLLENEKTLDLHDSNVRNLHEKVRRMLKDNAKDEGNGCFTFYHKCDNECIERVRNGTYDHKEFEEESKINRQEIEGVKLDSSGNVYKILSIYSCIASSLVLAALIMGFILWACSNGSCRCTICI

SEQ ID NO: 10338 - protein, 565 aa, Artificial Sequence
  derived and/or modified protein sequence (wt) from hemagglutinin__InfluenzaA__AGQ81206
MKKTLLFAAIFLYAKADEICIGYLSNNSTDKVDTIIENNVTVTSSVELVETEHTGSFCSINGKQPISLGDCSFAGWILGNPMCDDLIGKTSWSYIVEKPNPANGICYPGTLENEEELRSKFSGVLEFSKFEAFTSNGWGAVNSGAGVTAACKFGSSNSFFRNMVWLIHQSGTYPVIKRTFNNTKGRDVLVVWGIHHPATLKEHQDLYKKDSSYVAVGSETYNRRFIPEISTRPKVNGQAGRMTFYWTIVKPEESITFESNGAFLAPRYAFEIVSVGNGKLFRSELNIESCSTKCQTEIGGINTNKSFHSVHRNTIGDCPKYVNVKSLKLATGLRNVPAIASRGLFGAIAGFIEGGWPGLINGWYGFQHRNEEGTGIAADKESTQKAIDQITSKVNNIVDRMNTNFESVQHEFSEIEERINQLSKHVDDSVVDIWSYNAQLLVLLENEKTLDLHDSNVRNLHEKVRRMLKDNAKDEGNGCFTFYHKCDNECIERVRNGTYDHKEFEEESKINRQEIEGVKLDSSGNVYKILSIYSCIASSLILAALIMGFILWACSNGSCRCTICI

SEQ ID NO: 10339 - protein, 565 aa, Artificial Sequence
  derived and/or modified protein sequence (wt) from hemagglutinin__InfluenzaA__AGQ81209
MKKTLLFAAIFLYVKADEICIGYLSNNSTDKVDTIIENNVTVTSSVELVETEHTGSFCSINGKQPISLGDCSFAGWILGNPMCDDLIGKTSWSYIVEKPNPANGICYPGTLENEEELRLKFSGILEFSKFEAFTSNGWGAVNSGAGVTAACKFGSSNSFFRNMVWLIHQSGTYPVIKRTFNNTKGRDVLIVWGIHHPATLKEHQDLYKKDSSYVAVGSETYNRRFIPEISTRPKVNGQAGRMTFYWTIVKPGESITFESNGAFLAPRYAFEIVSVGNGKLFRSELNIESCSTKCQTEIGGINTNKSFHSVHRNTIGDCPKYVNVKSLKLATGLRNVPAIASRGLFGAIAGFIEGGWPGLINGWYGFQHRNEEGTGIAADKESTQKAIDQITSKVNNIVDRMNTNFESVQHEFSEIEERINQLSKHVDDSVVDIWSYNAQLLVLLENEKTLDLHDSNVRNLHEKVRRMLKDNAKDEGNGCFTFYHKCDNECIERVRNGTYDHKEFEEESKINRQEIEGVKLDSSGNVYRILSIYSCIASSLVLAALIMGFILWACSNGSCRCTICI

SEQ ID NO: 10340 - protein, 565 aa, Artificial Sequence
  derived and/or modified protein sequence (wt) from hemagglutinin__InfluenzaA__AGQ81211
MKKTLLFAAIFLYVKADEICIGYLSNNSTDKVDTIIENNVTVTSSVELVETEHTGSFCSINGKQPISLGDCSFAGWILGNPMCDDLIGKTSWSYIVEKPNPANGICYPGTLENEEELRLKFSGVLEFSKFEAFTSNGWGAVNSGAGVTAACKFGSSNSFFRNMVWLIHQSGTYPVIKRTFNNTKGRDVLIVWGIHHPATLKEHQDLYKKDSSYVAVGSETYNRRFIPEISTRPKVNGQAGRMTFYWTIVKPGESITFESNGAFLAPRYAFEIVSVGNGKLFRSELNIESCSTKCQTEIGGINTNKSFHSVHRNTIGDCPKYVNVKSLKLATGLRNVPAIASRGLFGAIAGFIEGGWPGLINGWYGFQHRNEEGTGIAADKESTQKAIDQITSKVNNIVDRMNTNFESVQHEFSEIEERINQLSKHVDDSVVDIWSYNAQLLVLLENEKTLDLHDFNVRNLHEKVRRMLKDNAKDEGNGCFTFYHKCDNECIERVRNGTYDHKEFEEESKINRQEIEGVKLDSSGNVYRILSIYSCIASSLVLAALIMGFILWACSNGSCRCTICI

SEQ ID NO: 10341 - protein, 565 aa, Artificial Sequence
  derived and/or modified protein sequence (wt) from hemagglutinin__InfluenzaA__AGQ81213
MKKTLLFAAIFLYVRADEICIGYLSNNSTDKVDTIIENNVTVTSSVELVETEHTGSFCSINGKQPISLGDCSFAGWILGNPMCDGLIGKTSWSYIVEKPNPANGICYPGTLENEEELRLKFSRVLEFSKFEAFTSNGWGAVNSGAGVTAACKFGSSNSFFRNMVWLIHQSGTYPVIKRTFNNTKGRDVLVVWGIHHPATLKEHQDLYKKDSSYVAVGSETYNRRFIPEISTRPTVNGQAGRMTFYWTIVKPGESITFESNGAFLAPRYAFEIVSVGNGKLFRSELNIESCSTKCQTEIGGINTNKSFHSVHRNTIGDCPKYVNVKSLKLATGLRNVPAIASRGLFGAIAGFIEGGWPGLINGWYGFQHRNEEGTGIAADKESTQKAIDQITSKVNNIVDRMNTNFESVQHEFSEIEERINQLSKHVDDSVVDIWSYNAQLLVLLENEKTLDLHDSNVRNLHEKVRRMLKDNAKDEGNGCFTFYHKCDNECIERVRNGTYDHKEFEEESKINRQEIEGVKLDSSGNVYKILSIYSCIASSLVLAALIMGFILWACSNGSCRCTICI

SEQ ID NO: 10342 - protein, 565 aa, Artificial Sequence
  derived and/or modified protein sequence (wt) from hemagglutinin__InfluenzaA__AGQ81214
MKKTLLFAAIFLYVKADEICIGYLSNNSTDKVDTIIENNVTVTSSVELVETEHTGSFCSINGKQPISLGDCSFAGWILGNPMCDDLIGKTSWSYIVEKPNPANGICYPGTLENEEELRLKFSGVLEFSKFEAFTSNGWGAVNSGAGVTAACKFGSSNSFFRNMVWLIHQSGTYPVIKRTFNNTKGRDVLIVWGIHHPATLKEHQDLYKKDSSYVAVGSETYNRRFIPEISTRPKVNGQAGRMTFYWTIVKPGESITFESNGAFLAPRYAFEIVSVGNGKLFRSELNIESCSTKCQTEIGGINTNKSFHSVHRNTIGDCPKYVNVKSLKLATGLRNVPAITSRGLFGAIAGFIEGGWPGLINGWYGFQHRNEEGTGIAADKESTQKAIDQITSKVNNIVDRMNTNFESVQHEFSEIEGRINQLSKHVDDSVVDIWSYNAQLLVLLENEKTLDLHDSNVRNLHEKVRRMLKDNAKDEGNGCFTFYHKCDNECIERVRNGTYDHKEFEEESKINRQEIEGVKLDSSGNVYKILSIYSCIASSLVLAALIMGFILWACSNGSCRCTICI

SEQ ID NO: 10343 - protein, 565 aa, Artificial Sequence
  derived and/or modified protein sequence (wt) from hemagglutinin__InfluenzaA__AGQ81215
MKKTLLFAAIFLYVKADEICIGYLSNNSTDKVDTIIENNVTVTSSVELVETEHTGSFCSINGKQPISLGDCSFAGWILGNPMCDGLIGKTSWSYIVEKPNPANGICYPGTLENEEELRLKFSGILEFSKFEAFTSNGWGAVNSGAGVTAACKFGSSNSFFRHMVWLIHQSGTYPVIKRTFNNTKGRDVLVVWGIHHPATLKEQQDLYKKDSSYVAVGSETYNRRFIPEISTRPKVNGQAGRMTFYWTIVKPGESITFESNGAFLAPRYAFEIVSVGNGKLFRSELNIESCSTKCQTEIGGINTNKSFHSVHRNTIGDCPKYVNVKSLKLATGLRNVPAIASRGLFGAIAGFIEGGWPGLINGWYGFQHRNEEGTGIAADKESTQKAIDQITSKVNNIVDRMNTNFESVQHEFSEIEERINQLSKHVDDSVVDIWSYNAQLLVLLENEKTLDLHDSNVRNLHEKVRRMLKDNAKDEGNGCFTFYHKCDNECIERVRNGTYDHKEFEEESKINRQEIEGVKLDSSGNVYKILSIYSCIASSLVLAALIMGFILWACSNGSCRCTICI

SEQ ID NO: 10344 - protein, 565 aa, Artificial Sequence
  derived and/or modified protein sequence (wt) from hemagglutinin__InfluenzaA__AGQ81216
MKKTLLFAAIFLYVKADEICIGYLSNNSTDKVDTIIENNVTVTSSVELVETEHTGSFCSINGKQPISLGDCSFAGWILGNPMCDDLIGKTSWSYIVEKPNPANGICYPGTLENEEELRLKFSGVLEFSKFEAFTSNGWGAVNSGAGVTAACKFGSSNSFFRNMVWLIHQSGTYPVTKRTFNNTKGRDVLVVWGIHHPATLKEHQDLYKKDSSYVAVGSETYNRRFTPEISTRPKVNGQAGRMTFYWTIVKPGESITFESNGAFLAPRYAFEIVSVGNGKLFRSELNIESCSTKCQTEIGGINTNKSFHSVHRNTIGDCPKYVNVKSLKLATGLRNVPAIASKGLFGAIAGFIEGGWPGLINGWYGFQHRNEEGTGIAADKESTQKAIDQITSKVNNIVDRMNTNFESVRHEFSEIEERINQLSKHVDDSVVDIWSYNAQLLVLLENEKTLDLHDSNVRNLHERVRRMLKDNAKDEGNGCFTFYHKCDNECIERVRNGTYDHKEFEEESKINRQEIEGVKLDSSGNVYKILSIYSCIASSLVLAALIMGFILWACGNGSCRCTICI

SEQ ID NO: 10345 - protein, 565 aa, Artificial Sequence
  derived and/or modified protein sequence (wt) from hemagglutinin__InfluenzaA__AGQ81217
MKKTLLFAAIFLYAKADEICIGYLSNNSTDKVDTIIENNVTVTSSVELVETEHTGSFCSINGKQPISLGDCSFAGWILGNPMCDDLIGKTSWSYIVEKPNPANGICYPGTLENEEELRLKFSGVLEFSRFEAFTSNGWGAVNSGAGVTAACKFGSSNSFFRNMVWLIHQSGTYPVIKRTFNNTKGRDVLVVWGIHHPATLKEHQDLYKKDSSYVAVGSETYNRRFIPEISTRPKVNGQAGRMTFYWTIVKPEESITFESNGAFLAPRYAFEIVSVGNGKLFRSELNIESCSTKCQTEIGGINTNKSFHSVHRNTIGDCPKYVNVKSLKLATGLRNVPAIASRGLFGAIAGFIEGGWPGLINGWYGFQHRNEEGTGIAADKESTQKAIDQITSKVNNIVDRMNTNFESVQHEFSEIEERINQLSKHVDDSVVDIWSYNAQLLVLLENEKTLDLHDSNVRNLHEKVRRMLKDNAKDEGNGCFTFYHKCDNECIERVRNGTYDHKEFEEESKINRQEIEGVKLDSSGNVYKILSIYSCIASSLILAALIMGFILWACSNGSCRCTICI

SEQ ID NO: 10346 - protein, 567 aa, Artificial Sequence
  derived and/or modified protein sequence (wt) from hemagglutinin__InfluenzaA__AGQ88499
MEKIVLLFATISLVKSDHICIGYHANNSTEQVDTIMEKNVTVTHAQDILEKTHNGKLCDLNGVKPLILKDCSVAGWLLGNPMCDEFINVPEWSYIVEKANPANDLCYPGNFNDYEELKHLLSRINHFEKIQIIPKDSWTDHEASLGVSAACPYQGNSSFFRNVVWLIKKDNAYPTIKKGYNNTNQEDLLVLWGIHHPNNEAEQTRLYQNPTTYISIGTSTLNQRLVPKIATRSKINGQSGRIDFFWTILKPNDAIHFESNGNFIAPEYAYKIVKKGDSTIMKSEVEYGNCNTRCQTPIGAINSSMPFHNIHPLTIGECPKYVKSNKLVLATGLRNSPQRERRRKRGLFGAIAGFIEGGWQGMVDGWYGYHHSNEQGSGYAADKESTQKAIDGVTNKVNSIIDKMNTQFEAVGREFNNLERRIENLNKKMEDGFLDVWTYNAELLVLMENERTLDYHDSNVRNLYDKVRLQLKDNAKELGNGCFEFYHKCNNECMESVRNGTYDYPQYSEEARLKREEISGVKLESIGIYQILSIYSTVASSLVLAIMMAGLSLWMCSNGSLQCRICI

SEQ ID NO: 10347 - protein, 560 aa, Artificial Sequence; identical to SEQ ID NO: 10237
  derived and/or modified protein sequence (wt) from hemagglutinin__InfluenzaA__AGR33888

SEQ ID NO: 10348 - protein, 560 aa, Artificial Sequence; identical to SEQ ID NO: 10237
  derived and/or modified protein sequence (wt) from hemagglutinin__InfluenzaA__AGR33889

SEQ ID NO: 10349 - protein, 560 aa, Artificial Sequence
  derived and/or modified protein sequence (wt) from hemagglutinin__InfluenzaA__AGR33890
MNTQILVFALIAITPTNSDKICLGHHAVSNGTKVNTLTERGVEVVNATETVERTSIPRICSKGKRTVDLGQCGLLGTITGPPQCDQFLEFSADLIIERREGSDVCYPGKFVNEEALRQILRESGGIDKEAMGFTYSGIRTNGATSACRRSGSSFYAEMKWLLSNTDNAAFPPMTKSYKNTRKAPALIIWGIHHSVSTAEQTKLYGSGNKLVTVRSSNYQQSFVPSPGAGPQVNGQSGRIDFHWLMLNPNDTVTFSFNGAFIAPDRASFLRGKSMGIQSGVQVDANCEGDCYHSGGTIISNLPFQNIDSRVVGKCPRYVKQKSLLLATGMKNVPEIPKGRGLFGAIAGFIENGWEGLIDGWYGFRHQNAQGEGTAADYKSTQSAINQMTGKLNRLIEKTNQQFELIDNEFTEVEKQIGNVINWTRDSITEVWSYNAELLVAMENQHTIDLADSEMNKLYERVKRQLRENAEEDGTGCFEIFHKCDDDCMASIRNNTYDHSKYREEAMQNRIQIDPVKLSSGYKDVILWFSFGASCFILLAIAMGLVFICVKNGNMRCTICI

SEQ ID NO: 10350 - protein, 560 aa, Artificial Sequence
  derived and/or modified protein sequence (wt) from hemagglutinin__InfluenzaA__AGR33892
MNTQILVFALIAIIPTNADKICLGHHAVSNGTKVNTLTERGVEVVNATETVERTSIPRICSKGKRTVDLGQCGLLGTITGPPQCDQFLEFSADLIIERREGSDVCYPGKFVNEEALRQILRESGGINKEAMGFTYSGIRTNGATSACRRSGSSFYAEMKWLLSNTDNAAFPPMTKSYKNTRKAPALIIWGIHHSGSTAEQTKLYGSGNKMVTVRSSNYQQSFVPSPGAGPQVNGQSGRIDFHWLMLNPNDTVTFSFNGAFIAPDRASFLRGKSMGIQSGVQVDANCEGDCYHSGGTIISNLPFQNIDSRVVGKCPRYVKQKSLLLATGMKNVPEIPKGRGLFGAIAGFIENGWEGLIDGWYGFRHQNAQGEGTAADYKSTQSAINQMTGKLNRLIEKTNQQFELIDNEFTEVEKQIGNVINWTRDSITEVWSYNAELLVAMENQHTIDLADSEMNKLYERVKRQLRENAEEDGTGCFEIFHKCDDDCMASIRNNTYDHSKYREEAMQNRIQIDPVKLSSGYKDVILWFSFGASCFILLAIAMGLVFICVENGNMRCTICI

SEQ ID NO: 10351 - protein, 560 aa, Artificial Sequence; identical to SEQ ID NO: 10229
  derived and/or modified protein sequence (wt) from hemagglutinin__InfluenzaA__AGR33895

SEQ ID NO: 10352 - protein, 560 aa, Artificial Sequence; identical to SEQ ID NO: 10308
  derived and/or modified protein sequence (wt) from hemagglutinin__InfluenzaA__AGR33897

SEQ ID NO: 10353 - protein, 560 aa, Artificial Sequence
  derived and/or modified protein sequence (wt) from hemagglutinin__InfluenzaA__AGR33899
METVSLITILLVATVSNADKICIGYQSTNSTETVDTLTENNVPVTHAKELLHTEHNGMLCATSLGQPLILDTCTIEGLIYGNPSCDLLLEGREWSYIVERPSAVNGLCYPGNVENLEELRSLFSSARSYQRIQIFPDTIWNVSYNGTSKACSGSFYRSMRWLTQKNSNYPIQDAQYTNNQGKNILFMWGINHPPTDTTQRDLYTRTDTTTSVATEEINRIFKPLIGPRPLVNGLMGRIDYYWSVLKPGQTLRIKSDGNLIAPWYGHILSGESHGRILKTDLKKGSCTVQCQTEKGGLNTTLPFQNVSKYAFGNCSKYIGIKSLKLAVGLRNVPSRSSRGLFGAIAGFIEGGWSGLVAGWYGFQHSNDQGVGMAADRDSTQKAIDKITSKVNNIVDKMNKQYEIIDHEFSEVETRLNMINNKIDDQIQDIWAYNAELLVLLENQKTLDEHDANVNNLYNKVKRALGSNAVEDGKGCFELYHKCDDQCMETIRNGTYNRSKYQEESKLERQKIEGVKLESEGTYKILTIYSTVASSLVIAMGFAAFLFWAMSNGSCRCNICI

SEQ ID NO: 10354 - protein, 560 aa, Artificial Sequence
  derived and/or modified protein sequence (wt) from hemagglutinin__InfluenzaA__AGR33900
METVSLITILLVATVSNADKICIGYQSTNSTETVDTLTENNVPVTHAKELLHTEHNGMLCATSLGQPLILDTCTIEGLIYGNPSCDLLLEGREWSYIVERPSAVNGLCYPGNVENLEELRSLFSSARSYQRIQIFPDTIWNVSYNGTSKACSGSFYRSMRWLTQKNSDYPIQDAQYTNNQGKNILFMWGINHPPTDTTQRDLYTRTDTTTSVATEEINRIFKPLIGPRPLVNGLMGRIDYYWSVLKPGQTLRIKSDGNLIAPWYGHILSGESHGRILKTDLKKGSCTVQCQTEKGGLNTTLPFQNVSKYAFGNCSKYIGIKSLKLAVGLRNVPSRSSRGLFGAIAGFIEGGWSGLVAGWYGFQHSNDQGVGMAADRDSTQKAIDKITSKVNNIVDKMNKQYEIIDHEFSEVETRLNMINNKIDDQIQDIWAYNAELLVLLENQKTLDEHDANVNNLYNKVKRALGSNAVEDGKGCFDLYHKCDDQCMETIRNGTYNRRKYQEESKLERQKIEGVKLESEGTYKILTIYSTVASSLVIAMGFAAFLFWAMSNGSCRCNICI

SEQ ID NO: 10355 - protein, 560 aa, Artificial Sequence
  derived and/or modified protein sequence (wt) from hemagglutinin__InfluenzaA__AGR33902
METASLITILLVATVSNADKICIGYQSTNSTETVDTLTENNVPVTHAKELLHTEHNGMLCATSLGQPLILDTCTIEGLIYGNPSCDLLLEGREWSYIVERPSAVNGLCYPGNVENLEELRSLFSSARSYQRIQIFPDTTWNVSYNGISKACSGSFYRSMRWLTQKNSNYPIQDAQYTNNQGKNILFMWGINHPPTDTTQRDLYTRTDTTTSVATEEINRIFKPLIGPRPLVNGLMGRIDYYWSVLKPGQTLRIKSDGNLIAPWYGHILSGESHGRILKTDLKRGSCTVQCQTEKGGLNTTLPFQNVSKYAFGNCSKYIGIKSLKLAVGLRNVPSRSSRGLFGAIAGFIEGGWSGLVAGWYGFQHSNDQGVGMAADRDSTQKAIDKITSKVNNIVDKMNKQYEIIDHEFSEVETRLNMINNKIDDQIQDIWAYNAELLVLLENQKTLDEHDANVNNLYNKVKRALGSNAVEDGKGCFELYHKCDNQCMETIRNGTYNRRKYQEESKLERQKIEGVKLESEGTYKILTIYSTVASSLVIAMGFAAFLFWAMSNGSCRCNICI

SEQ ID NO: 10356 - protein, 565 aa, Artificial Sequence; identical to SEQ ID NO: 5513
  derived and/or modified protein sequence (wt) from hemagglutinin__InfluenzaA__AGR49817

SEQ ID NO: 10357 - protein, 565 aa, Artificial Sequence
  derived and/or modified protein sequence (wt) from hemagglutinin__InfluenzaA__AGR49841
MKVKLLVLLCTFTATYADTICIGYHANNSTDTVDTVLEKNVTVTHSVNLLENSHNGKLCLLKGIAPLQLGNCSVAGWILGNPECELLISKESWSYIVEKPNPENGTCYPGHFADYEELREQLSSVSSFERFEIFPKESSWPNHTVTGVSASCSHNGESSFYRNLLWLTGKNGLYPNLSKSYANNKEKEVLVLWGVHHPPNIVDQKTLYRTENAYVSVVSSHYSRKFTPEIAKRPKVRDQEGRINYYWTLLEPRDTIIFEANGNLIAPRYAFALSRGFGSGIINSNAPMGKCDAKCQTPQGAINSSLPFQNVHPVTIGECPKYVRSAKLRMVTGLRNIPSIQSRGLFGAIAGFIEGGWTGMVDGWYGYHHQNEQGSGYAADQKSTQNAINGITNKVNSVIEKMNTQFTAVGKEFNKLERRMENLNKKVDDGFIDIWTYNAELLVLLENERTLDFHDSNVKNLYEKVKSQLKNNAKEIGNGCFEFYHKCNDECMESVKNGTYDYPKYSEESKLNREKIDGVKLESIGVYQILAIYSTVASSLVLLVSLGAISFWMCSNGSLQCRICI

SEQ ID NO: 10358 - protein, 565 aa, Artificial Sequence; identical to SEQ ID NO: 5513
  derived and/or modified protein sequence (wt) from hemagglutinin__InfluenzaA__AGR49853

SEQ ID NO: 10359 - protein, 565 aa, Artificial Sequence
  derived and/or modified protein sequence (wt) from hemagglutinin__InfluenzaA__AGR49865
MKVKLLVLLCTFTATYADTICIGYHANNSTDTVDTVLEKNVTVTHSVNLLENNHNGKLCLLKGIAPLQLGNCSVAGWILGNPECELLISKESWSYIVEKPNPENGTCYPGHFADYEELREQLSSVSSFERFEIFPKESSWPNHTVTGVSASCSHNGESSFYRNLLWLTGKNGLYPNLSKSYANNKEKEVLVLWGVHHPPNIVNQKTLYRTENAYVSVVSSHYSRKFTPEIAKRPKVRDQEGRINYYWTLLEPGDTIIFEANGNLIAPRYAFALNRGFGSGIINSNAPMDKCDAKCQTPQGAINSSLPFQNVHPVTIGECPKYVRSAKLRMVTGLRNIPSIQSRGLFGAIAGFIEGGWTGMVDGWYGYHHQNEQGSGYAADQKSTQNAINGITNKVNSVIEKMNTQFTAVGKEFNKLERRMENLNKKVDDGFIDVWTYNAELLVLLENERTLDFHDSNVKNLYEKVKSQLKNNAKEIGNGCFEFYHKCNDECMESVKNGTYDYPKYSEESKLNREKIDGVKLESMGVYQILAIYSTVASSLVLLVSLGAISFWMCSNGSLQCRICI

SEQ ID NO: 10360 - protein, 566 aa, Artificial Sequence; identical to SEQ ID NO: 2656
  derived and/or modified protein sequence (wt) from hemagglutinin__InfluenzaA__AGR49877

SEQ ID NO: 10361 - protein, 566 aa, Artificial Sequence; identical to SEQ ID NO: 2434
  derived and/or modified protein sequence (wt) from hemagglutinin__InfluenzaA__AGR49888

SEQ ID NO: 10362 - protein, 566 aa, Artificial Sequence
  derived and/or modified protein sequence (wt) from hemagglutinin__InfluenzaA__AGR49900
MKTIIALSYILCLVFAQKLPGNDNSTATLCLGHHAVPNGTIVKTITNDQIEVTNATELVQSSSTGEICDSPHQILDGENCTLIDALLGDPQCDGFQNKKWDLFVERSKAYSKCYPYDVPDYASLRSLVASSGTLEFNNESFNWTGVTQNGTSSACIRRSNNSFFSRLNWLTHLKFKYPALNVTMPNNEKFDKLYIWGVHHPGTDNDQIFLYAQASGRITVSTKRSQQTVIPNIGSRPRVRNIPSRISIYWTIVKPGDILLINSTGNLIAPRGYFKIRSGKSSIMRSDAPIGKCNSECITPNGSIPNDKPFQNVNRITYGACPRYVKQNTLKLATGMRNVPEKQTRGIFGAIAGFIENGWEGMVDGWYGFRHQNSEGIGQAADLKSTQAAIDQINGKLNRLIGKTNEKFHQIEKEFSEVEGRIQDLEKYVEDTKIDLWSYNAELLVALENQHTIDLTDSEMNKLFEKTKKQLRENAEDMGNGCFKIYHKCDNACIGSIRNGTYDHDVYRDEALNNRFQIKGVELKSGYKDWILWISFAISCFLLCVALLGFIMWACQKGNIRCNICI

SEQ ID NO: 10363 - protein, 566 aa, Artificial Sequence
  derived and/or modified protein sequence (wt) from hemagglutinin__InfluenzaA__AGR49912
MKTIIALSYILCLVSAQKLPGNDNSTATLCLGHHAVPNGTIVKTITNDQIEVTNATELVQSSSTGEICDSPHQILDGENCTLIDALLGDPQCDGFQNKKWDLFVERSKAYSNCYPYDVPDYASLRSLVASSGTLEFNNESFNWTGVTQNGTSSACIRRSNNSFFSRLNWLTHLKFKYPALNVTMPNNEEFDKLYIWGVHHPGTDNDQIFLYAQASGRITVSTKRSQQTVIPNIGSRPRVRNIPSRISIYWTIVKPGDILLINSTGNLIAPRGYFKIRSGKSSIMRSDAPIGKCNSKCITPNGSIPNDKPFQNVNRITYGACPRYVKQNTLKLATGMRNVPEKQTRGIFGAIAGFIENGWEGMVDGWYGFRHQNSEGIGQAADLKSTQAAIDQINGKLNRLIGKTNEKFHQIEKEFSEVEGRIQDLEKYVEDTKIDLWSYNAELLVALENQHTIDLTDSEMNKLFEKTKKQLRENAEDMGNGCFKIYHKCDNACIGSIRNGTYDHDVYRDEALNNRFQIKGVELKSGYKDWILWISFAISCFLLCVALLGFIMWACQKGNIRCNICI

SEQ ID NO: 10364 - protein, 566 aa, Artificial Sequence
  derived and/or modified protein sequence (wt) from hemagglutinin__InfluenzaA__AGR49924
MKTIIALSYILCLVSAQKLPGNDNSTATLCLGHHAVPNGTIVKTITNDQIEVTNATELVQSSSTGEICDSPHQILDGENCTLIDALLGDPQCDGFQNKKWDLFVERSKAYSNCYPYDVPDYASLRSLVASSGTLEFNNESFNWTGVTQNGTSSACIRRSNNSFFSRLNWLTHLKFKYPALNVTMPNNEEFDKLYIWGVHHPGTDNDQIFLYAQASGRITVSTKRSQQTVIPNIGSRPRVRNIPSRISIYWTIVKPGDILLINSTGNLIAPRGYFKIRSGKSSIMRSDAPIGKCNSKCITPNGSIPNDKPFQNVNRITYGACPRYVKQNTLKLATGMRNVPEKQTRGIFGAIAGFIENGWEGMVDGWYGFRHQNSEGIGQAADLKSTQAAVDQINGKLNRLIGKTNEKFHQIEKEFSEVEGRIQDLEKYVEDTKIDLWSYNAELLVALENQHTIDLTDSEMNKLFEKTKKQLRENAEDMGNGCFKIYHKCDNACIGSIRNGTYDHDVYRDEALNNRFQIKGVELKSGYKDWILWISFAISCFLLCVALLGFIMWACQKGNIRCNICI

SEQ ID NO: 10365 - protein, 566 aa, Artificial Sequence
  derived and/or modified protein sequence (wt) from hemagglutinin__InfluenzaA__AGR49936
MKTIIALSYILCLISAQKFPGNDNSTATLCLGHHAVPNGTIVKTITNDQIEVTNATELVQSSSTGEICDSPHQILDGENCTLIDALLGDPQCDGFQNKKWDLFVERSKAYSNCYPYDVPGYASLRSLVASSGTLEFNNESFNWTGVTQNGTSSACIRRSNNSFFSRLNWLTHLKFKYPALNVTMPNNEEFDKLYIWGVHHPGTDNDQIFLYAQASGRITVSTKRSQQTVIPNIGSRPRVRNIPSRISIYWTIVKPGDILLINSTGNLIAPRGYFKIRSGKSSIMRSDAPIGKCNSECITPNGSIPNDKPFQNVNRITYGACPRYVKQNTLKLATGMRNVPEKQTRGIFGAIAGFIENGWEGMVDGWYGFRHQNSEGIGQAADLKSTQAAIDQINGKLNRLIGKTNEKFHQIEKEFSEVEGRIQDLEKYVEDTKIDLWSYNAELLVALENQHTIDLTDSEMNKLFEKTKKQLRENAEDMGNGCFKIYHKCDNACIGSIRNGTYDHDVYRDEALNNRFQIKGVELKSGYKDWILWISFAISCFLLCVALLGFIMWACQKGNIRCNICI

SEQ ID NO: 10366 - protein, 566 aa, Artificial Sequence; identical to SEQ ID NO: 7694
  derived and/or modified protein sequence (wt) from hemagglutinin__InfluenzaA__AGR49948

SEQ ID NO: 10367 - protein, 566 aa, Artificial Sequence; identical to SEQ ID NO: 2527
  derived and/or modified protein sequence (wt) from hemagglutinin__InfluenzaA__AGR49960

SEQ ID NO: 10368 - protein, 566 aa, Artificial Sequence
  derived and/or modified protein sequence (wt) from hemagglutinin__InfluenzaA__AGR49972
MKAILVVLLYTFATANADTLCIGYHANNSTDTVDTVLEKNVTVTHSVNLLEDKHNGKLCKLRGVAPLHLGKCNIAGWILGNPECESLSTASSWSYIVETSSSDNGTCYPGDFIDYEELREQLSSVSSFERFEIFPKTSSWPNHDSNKGVTAACPHAGAKSFYKNLIWLVKKGNSYPKLSKSYINDKGKEVLVLWGIHHPSTSADQQSLYQNADAYVFVGSSRYSKKFKPEIAIRPKVRDQEGRMNYYWTIVEPGDKITFEATGNLVVPRYAFAMERNAGSGIIISDTPVHDCNTTCQTPKGAINTSLPFQNIHPITIGKCPKYVKSTKLRLATGLRNVPSIQSRGLFGAIAGFIEGGWTGMVDGWYGYHHQNEQGSGYAADLKSTQNAIDEITNKVNSVIEKMNTQFTAVGKEFNHLEKRIENLNKKVDDGFLDIWTYNAELLVLLENERTLDYHDSNVKNLYEKVRSQLKNNAKEIGNGCFEFYHKCDNTCMESVKNGTYDYPKYSEEAKLNREEIDGVKLESTRIYQILAIYSTVASSLVLVVSLGAISFWMCSNGSLQCRICI

SEQ ID NO: 10369 - protein, 565 aa, Artificial Sequence; identical to SEQ ID NO: 6698
  derived and/or modified protein sequence (wt) from hemagglutinin__InfluenzaA__AGR49983

SEQ ID NO: 10370 - protein, 565 aa, Artificial Sequence; identical to SEQ ID NO: 6698
  derived and/or modified protein sequence (wt) from hemagglutinin__InfluenzaA__AGR49995

SEQ ID NO: 10371 - protein, 566 aa, Artificial Sequence; identical to SEQ ID NO: 2656
  derived and/or modified protein sequence (wt) from hemagglutinin__InfluenzaA__AGR50007

SEQ ID NO: 10372 - protein, 566 aa, Artificial Sequence; identical to SEQ ID NO: 2656
  derived and/or modified protein sequence (wt) from hemagglutinin__InfluenzaA__AGR50018

SEQ ID NO: 10373 - protein, 566 aa, Artificial Sequence; identical to SEQ ID NO: 2656
  derived and/or modified protein sequence (wt) from hemagglutinin__InfluenzaA__AGR50029

SEQ ID NO: 10374 - protein, 566 aa, Artificial Sequence
  derived and/or modified protein sequence (wt) from hemagglutinin__InfluenzaA__AGR50040
MKTIIALSYILCLVFAQKLPGNDNSTATLCLGHHAVPNGTIVKTITNDQIEVTNATELVQSSSTGEICDSPHQILDGENCTLIDALLGDPQCDGFQNKKWDLFVERSKAYSNCYPYDVPDYASLRSLVASSGTLEFNNESFNWTGVTQNGTSSACIRRSNNSFFSRLNWLTHLKFKYPALNVTMPNNEQFDKLYIWGVHHPGTDNDQIFLYAQASGRITVSTKRSQQTVIPNIGSRPRVRNIPSRISIYWTIVKPGDILLINSTGNLIAPRGYFKIRSGKSSIMRSDAPIGKCNSECITPNGSIPNDKPFQNVNRITYGACPRYVKQNTLKLATGMRNVPEKQTRGIFGAIAGFIENGWEGMVDGWYGFRHQNSEGRGQAADLKSTQAAIDQINGKLNRLIGKTNEKFHQIEKEFSEVEGRIQDLEKYVEDTKIDLWSYNAELLVALENQHTIDLTDSEMNKLFEKTKKQLRENAEDMGNGCFKIYHKCDNACMGSIRNGTYDHDVYRDEALNNRFQIKGVELKSGYKDWILWISFAISCFLLCVALLGFIMWACQKGNIRCNICI

SEQ ID NO: 10375 - protein, 566 aa, Artificial Sequence; identical to SEQ ID NO: 2656
  derived and/or modified protein sequence (wt) from hemagglutinin__InfluenzaA__AGR50052

SEQ ID NO: 10376 - protein, 566 aa, Artificial Sequence; identical to SEQ ID NO: 2656
  derived and/or modified protein sequence (wt) from hemagglutinin__InfluenzaA__AGR50063

SEQ ID NO: 10377 - protein, 566 aa, Artificial Sequence
  derived and/or modified protein sequence (wt) from hemagglutinin__InfluenzaA__AGR50074
MKAILVVLLYTFATANADTLCIGYHANNSTDTVDTVLEKNVTVTHSVNLLEDKHNGKLCKLRGVAPLHLGKCNIAGWILGNPECESLSTASSWSYIVETSSSDNGTCYPGDFIDYEELREQLSSVSSFERFEIFPKTSSWPNHDSNKGVTAACPHAGAKSFYKNLIWLVKKGNSYPKLSKSYINDKGKEVLVLWGIHHPSTSADQQSLYQNADAYVFVGSSRYSKKFKPEIAIRPKVRNQEGRMNYYWTLVEPGDKITFEATGNLVVPRYAFAMERNAGSGIIISDTPVHDCNTTCQTPKGAINTSLPFQNIHPITIGKCPKYVKSTKLRLATGLRNVPSIQSRGLFGAIAGFIEGGWTGMVDGWYGYHHQNEQGSGYAADLKSTQNAIDEITNKVNSVIEKMNTQFTAVGKEFNHLEKRIENLNKKVDDGFLDIWTYNAELLVLLENERTLDYHDSNVKNLYEKVRSQLKNNAKEIGNGCFEFYHKCDNTCMESVKNGTYDYPKYSEEAKLNREEIDGVKLESTRIYQILAIYSTVASSLVLVVSLGAISFWMCSNGSLQCRICI

SEQ ID NO: 10378 - protein, 566 aa, Artificial Sequence; identical to SEQ ID NO: 2656
  derived and/or modified protein sequence (wt) from hemagglutinin__InfluenzaA__AGR50085

SEQ ID NO: 10379 - protein, 566 aa, Artificial Sequence; identical to SEQ ID NO: 2656
  derived and/or modified protein sequence (wt) from hemagglutinin__InfluenzaA__AGR50096

SEQ ID NO: 10380 - protein, 566 aa, Artificial Sequence; identical to SEQ ID NO: 2656
  derived and/or modified protein sequence (wt) from hemagglutinin__InfluenzaA__AGR50107

SEQ ID NO: 10381 - protein, 566 aa, Artificial Sequence; identical to SEQ ID NO: 2849
  derived and/or modified protein sequence (wt) from hemagglutinin__InfluenzaA__AGR50118

SEQ ID NO: 10382 - protein, 566 aa, Artificial Sequence
  derived and/or modified protein sequence (wt) from hemagglutinin__InfluenzaA__AGR50129
MKAILVVLLYTFATANADTLCIGYHANNSTDTVDTVLEKNVTVTHSVNLLEDKHNGKLCKLRGVAPLHLGKCNIAGWILGNPECESLSTASSWSYIVETSSSDNGTCYPGDFIDYEELREQLSSVSSFERFEIFPKTSSWPNHDSNKGVTAACPHAGAKSFYKNLIWLVKKGNSYPKLSKSYINDKGKEVLVLWGIHHPSTSADQQSLYQNADAYVFVGSSRYSKKFKPEIAIRPKVRDQEGRMNYYWTLVEPGDKITFEATGNLVVPRYAFAMERNAGSGIIISDTPVHDCNTTCQTPKGAINTSLPFQNIHPITIGQCPKYVKSTKLRLATGLRNVPSIQSRGLFGAIAGFIEGGWTGMVDGWYGYHHQNEQGSGYAADLKSTQNAIDEITNKVNSVIEKMNTQFTAVGKEFNHLEKRIENLNKKVDDGFLDIWTYNAELLVLLENERTLDYHDSNVKNLYEKVRSQLKNNAKEIGNGCFEFYHKCDNTCMESVKNGTYDYPKYSEEAKLNREEIDGVKLESTRIYQILAIYSTVASSLVLVVSLGAISFWMCSNGSLQCRICI

SEQ ID NO: 10383 - protein, 566 aa, Artificial Sequence; identical to SEQ ID NO: 2656
  derived and/or modified protein sequence (wt) from hemagglutinin__InfluenzaA__AGR50140

SEQ ID NO: 10384 - protein, 566 aa, Artificial Sequence; identical to SEQ ID NO: 2851
  derived and/or modified protein sequence (wt) from hemagglutinin__InfluenzaA__AGR50151

SEQ ID NO: 10385 - protein, 565 aa, Artificial Sequence; identical to SEQ ID NO: 6698
  derived and/or modified protein sequence (wt) from hemagglutinin__InfluenzaA__AGR50162

SEQ ID NO: 10386 - protein, 566 aa, Artificial Sequence; identical to SEQ ID NO: 2656
  derived and/or modified protein sequence (wt) from hemagglutinin__InfluenzaA__AGR50174

SEQ ID NO: 10387 - protein, 566 aa, Artificial Sequence; identical to SEQ ID NO: 2695
  derived and/or modified protein sequence (wt) from hemagglutinin__InfluenzaA__AGR50185

SEQ ID NO: 10388 - protein, 566 aa, Artificial Sequence; identical to SEQ ID NO: 2656
  derived and/or modified protein sequence (wt) from hemagglutinin__InfluenzaA__AGR50196

SEQ ID NO: 10389 - protein, 566 aa, Artificial Sequence
  derived and/or modified protein sequence (wt) from hemagglutinin__InfluenzaA__AGR50207
MKAILVVLLYTFATANADTLCIGYHANNSTDTVDTVLEKNVTVTHSVNLLEDKHNGKLCKLRGVAPLHLGKCNIAGWILGNPECESLSTASSWSYIVETSSSDNGTCYPGDFIDYEELREQLSSVSSFERFEIFPKTSSWPNHDSNKGVTAACPHAGAKSFYKNLIWLVKKGKSYPKLSKSYINDKGKEVLVLWGIHHPSTSADQQSLYQNADAYVFVGSSRYSKKFKPEIAIRPKVRDQEGRMNYYWTLVEPGDKITFEATGNLVVPRYAFAMERNAGSGIIISDTPVHDCNTTCQTPKGAINTSLPFQNIHPITIGKCPKYVKSTKLRLATGLRNVPSIQSRGLFGAIAGFIEGGWTGMVDGWYGYHHQNEQGSGYAADLKSTQNAIDEITNKVNSVIEKMNTQFTAVGKEFNHLEKRIENLNKKVDDGFLDIWTYNAELLVLLENERTLDYHDSNVKNLYEKVRSQLKNNAKEIGNGCFEFYHKCDNTCMESVKNGTYDYPKYSEEAKLNREEIDGVKLESTRIYQILAIYSTVASSLVLVVSLGAISFWMCSNGSLQCRICI

SEQ ID NO: 10390 - protein, 566 aa, Artificial Sequence; identical to SEQ ID NO: 2656
  derived and/or modified protein sequence (wt) from hemagglutinin__InfluenzaA__AGR50218

SEQ ID NO: 10391 - protein, 566 aa, Artificial Sequence; identical to SEQ ID NO: 2656
  derived and/or modified protein sequence (wt) from hemagglutinin__InfluenzaA__AGR50229

SEQ ID NO: 10392 - protein, 566 aa, Artificial Sequence; identical to SEQ ID NO: 2851
  derived and/or modified protein sequence (wt) from hemagglutinin__InfluenzaA__AGR50240

SEQ ID NO: 10393 - protein, 566 aa, Artificial Sequence; identical to SEQ ID NO: 2709
  derived and/or modified protein sequence (wt) from hemagglutinin__InfluenzaA__AGR50251

SEQ ID NO: 10394 - protein, 566 aa, Artificial Sequence
  derived and/or modified protein sequence (wt) from hemagglutinin__InfluenzaA__AGR50262
MKAILVVLLYTFATANADTLCIGYHANNSTDTVDTVLEKNVTVTHSVNLLEDKHNGKLCKLRGVAPLHLGKCNIAGWILGNPECESLSTASSWSYIVETSSSDNGTCYPGDFIDYEELREQLSSVSSFERFEIFPKTSSWPNHDSNKGVTAACPHAGAKSFYKNLIWLVKKGNSYPKLSKSYINDKGKEVLVLWGIHHPSTSADQQSLYQNADAYVFVGSSRYSKKFKPEIAIRPKVRDQEGRMNYYWTLVEPGDKITFEATGNLVVPRYAFAMERNAGSGIIISDTPVHDCNTTCQTPKGAINTSLPFQNIHPITIGKCPKYVKSTKLRLATGLRNVPSIQSRGLFGAIAGFIEGGWTGMVDGWYGYHHQNEQGSGYAADLKSTQNAIDEITNKVNSVIEKMNTQFTAVGKEFNHLEKRIENLNKKVDDGFLDIWTYNAELLVLLENEKTLDYHDSNVKNLYEKVRSQLKNNAKEIGNGCFEFYHKCDNTCMESVKNGTYDYPKYSEEAKLNREEIDGVKLESTRIYQILAIYSTVASSLVLVVSLGAISFWMCSNGSLQCRICI

SEQ ID NO: 10395 - protein, 566 aa, Artificial Sequence; identical to SEQ ID NO: 2656
  derived and/or modified protein sequence (wt) from hemagglutinin__InfluenzaA__AGR50273

SEQ ID NO: 10396 - protein, 566 aa, Artificial Sequence
  derived and/or modified protein sequence (wt) from hemagglutinin__InfluenzaA__AGR50284
MKAILVVLLYTFATANADTLCIGYHANNSTDTVDTVLEKNVTVTHSVNLLEDKHNGKLCKLRGVAPLHLGKCNIAGWILGNPECESLSTASSWSYIVETSSSDNGTCYPGDFIDYEELREQLSSVSSFERFEIFPKTSSWPNHDSNKGVTAACPHAGAKSFYKNLIWLVKKGNSYPKLSKSYINDKGKEVLVLWGIHHPSTSADQQSLYQNADAYVFVGSSRYSKKFKPEIAIRPKVRDQEGRMNYYWTLVEPGDKITFEATGNLVVPRYAFAMERNAGSGIIISDSPVHDCNTTCQTPKGAINTSLPFQNIHPITIGKCPKYVKSTKLRLATGLRNVPSIQSRGLFGAIAGFIEGGWTGMVDGWYGYHHQNEQGSGYAADLKSTQNAIDEITNKVNSVIEKMNTQFTAVGKEFNHLEKRIENLNKKVDDGFLDIWTYNAELLVLLENERTLDYHDSNVKNLYEKVRSQLKNNAKEIGNGCFEFYHKCDNTCMESVKNGTYDYPKYSEEAKLNREEIDGVKLESTRIYQILAIYSTVASSLVLVVSLGAISFWMCSNGSLQCRICI

SEQ ID NO: 10397 - protein, 566 aa, Artificial Sequence; identical to SEQ ID NO: 3399
  derived and/or modified protein sequence (wt) from hemagglutinin__InfluenzaA__AGR50295

SEQ ID NO: 10398 - protein, 566 aa, Artificial Sequence; identical to SEQ ID NO: 2656
  derived and/or modified protein sequence (wt) from hemagglutinin__InfluenzaA__AGR50306

SEQ ID NO: 10399 - protein, 566 aa, Artificial Sequence; identical to SEQ ID NO: 2656
  derived and/or modified protein sequence (wt) from hemagglutinin__InfluenzaA__AGR50317

SEQ ID NO: 10400 - protein, 566 aa, Artificial Sequence; identical to SEQ ID NO: 10389
  derived and/or modified protein sequence (wt) from hemagglutinin__InfluenzaA__AGR50328

SEQ ID NO: 10401 - protein, 566 aa, Artificial Sequence
  derived and/or modified protein sequence (wt) from hemagglutinin__InfluenzaA__AGR50339
MKAILVVLLYTFATANADTLCIGYHANNSTDTVDTVLEKNVTVTHSVNLLEDKHNGKLCKLRGVAPLHLGKCNIAGWILGNPECESLSTASSWSYIVETSSSDNGTCYPGDFIDYEELREQLSSVSSFERFEIFPKTSSWPNHDSNKGVTAACPHAGAKSFYKNLIWLVKKGNSYPKLSKSYINDKGKEVLVLWGIHHPSTSADQQSLYQNADAYVFVGSSRYSKKFKPEIAIRPKVRDQEGRMNYYWTLVEPGDKITFEATGNLVVPRYAFAMERNAGSGIIISDTPVHDCNTTCQTSKGAINTSLPFQNIHPITIGKCPKYVKSTKLRLATGLRNVPSIQSRGLFGAIAGFIEGGWTGMVDGWYGYHHQNEQGSGYAADLKSTQNAIDEITNKVNSVIEKMNTQFTAVGKEFNHLEKRIENLNKKVDDGFLDIWTYNAELLVLLENERTLDYHDSNVKNLYEKVRSQLKNNAKEIGNGCFEFYHKCDNTCMESVKNGTYDYPKYSEEAKLNREEIDGVKLESTRIYQILAIYSTVASSLVLVVSLGAISFWMCSNGSLQCRICI

SEQ ID NO: 10402 - protein, 566 aa, Artificial Sequence
  derived and/or modified protein sequence (wt) from hemagglutinin__InfluenzaA__AGR50350
MKAILVVLLYTFATANADTLCIGYHANNSTDTVDTVLEKNVTVTHSVNLLEDKHNGKLCKLRGVAPLHLGKCNIAGWIMGNPECESLSTASSWSYIVETSSSDNGTCYPGDFIDYEELREQLSSVSSFERFEIFPKTSSWPNHDSNKGVTAACPHAGAKSFYKNLIWLVKKGNSYPKLSKSYINDKGKEVLVLWGIHHPSTSADQQSLYQNADAYVFVGSSRYSKKFKPEIAIRPKVRDQEGRMNYYWTLVEPGDKITFEATGNLVVPRYAFAMERNAGSGIIISDTPVHDCNTTCQTPKGAINTSLPFQNIHPITIGKCPKYVKSTKLRLATGLRNVPSIQSRGLFGAIAGFIEGGWTGMVDGWYGYHHQNEQGSGYAADLKSTQNAIDEITNKVNSVIEKMNTQFTAVGKEFNHLEKRIENLNKKVDDGFLDIWTYNAELLVLLENERTLDYHDSNVKNLYEKVRSQLKNNAKEIGNGCFEFYHKCDNTCMESVKNGTYDYPKYSEEAKLNREEIDGVKLESTRIYQILAIYSTVASSLVLVVSLGAISFWMCSNGSLQCRICI

SEQ ID NO: 10403 - protein, 565 aa, Artificial Sequence
  derived and/or modified protein sequence (wt) from hemagglutinin__InfluenzaA__AGR50361
MKVQLLVLLCTFTATYADTICIGYHANNSTDTVDTVLEKNVTVTHSVNLLENSHNGKLCLLKGIAPLQLGNCSVAGWILGNPECELLISKESWSYIVEKPNPENGTCYPGHFADYEELREQLSSVSSFERFEIFPKESSWPNHTVTGVSASCSHNGESSFYRNLLWLTGKNGLYPNLSKSYANNKEKEVLVLWGVHHPPNIVDQKTLYRTENAYVSVVSSHYSRKFTPEIAKRPKVRDQEGRINYYWTLLEPGDTIIFEANGNLIAPRYAFALSRGFGSGIINSNAPMGKCDAKCQTPQGAINSSLPFQNVHPVTIGECPKYVRSAKLRMVTGLRNIPSIQSRGLFGAIAGFIEGGWTGMVDGWYGYHHQNEQGSGYAADQKSTQNAINGITNKVNSVIEKMNTQFTAVGKEFNKLERRMENLNKKVDDGFIDIWTYNAELLVLLENERTLDFHDSNVKNLYEKVKSQLKNNAKEIGNGCFEFYHKCNDECMESVKNGTYDYPKYSEESKLNREKIDGVKLESMGVYQILAIYSTVASSLVLLVSLGAISFWMCSNGSLQCRICI

SEQ ID NO: 10404 - protein, 566 aa, Artificial Sequence
  derived and/or modified protein sequence (wt) from hemagglutinin__InfluenzaA__AGT18718
MKVILVVLLYTFATANADTLCIGYHANNSTDTVDTVLEKNVTVTHSVNLLEDKHNGKLCKLRGVAPLHLGKCNIAGWILGNPECESLSTASSWSYIVETSSSDNGTCYPGDFINYEELREQLSSVSSFERFEIFPKTSSWPNHDSNKGVTAACPHAGAKSFYKNLIWLVKKGNSYPKLSKSYINDKGKEVLVLWGIHHPSTTADQQSLYQNADAYVFVGTSRYSKKFKPEIAIRPKVRDQEGRMNYYWTLIEPGDKITFEATGNLVVPRYAFAMERNAGSGIIISDTPVHDCNTTCQTPEGAINTSLPFQNIHPITIGKCPKYVKSTKLRLATGLRNVPSIQSRGLFGAIAGFIEGGWTGMVDGWYGYHHQNEQGSGYAADLKSTQNAIDKITNKVNSVIEKMNTQFTAVGKEFNHLEKRIENLNKKVDDGFLDIWTYNAELLVLLENERTLDYHDSNVKNLYEKVRNQLKNNAKEIGNGCFEFYHKCDNTCMESVKNGTYDYPKYSEEAKLNREKIDGVKLESTRIYQILAIYSTVASSLVLVVSLGAISFWMCSNGSLQCRICI

SEQ ID NO: 10405 - protein, 566 aa, Artificial Sequence
  derived and/or modified protein sequence (wt) from hemagglutinin__InfluenzaA__AGT18720
MKVILVVLLYTFATANADTLCIGYHANNSTDTVDTVLEKNVTVTHSVNLLEDKHNGKLCKLRGVAPLHLGKCNIAGWILGNPECESLSTASSWSYIVETSSSDNGTCYPGDFINYEELREQLSSVSSFERFEIFPKASSWPNHDSNKGVTAACPHAGAKSFYKNLIWLVKKGNSYPKLSKSYINDKGKEVLVLWGIHHPNTTADQQSLYQNADAYVFVGTSRYSKKFKPEIAIRPKVRDQERRMNYYWTLIEPGDKITFEATGNLVVPRYAFAMERNAGSGIIISDTPVHDCNTTCQTPEGAINTSLPFQNIHPITIGKCPKYVKSTKLRLATGLRNVPSIQSRGLFGAIAGFIEGGWTGMVDGWYGYHHQNEQGSGYAADLKSTQNAIDKITNKVNSVIEKMNTQFTAVGKEFNHLEKRIENLNKKVDDGFLDIWTYNAELLVLLENERTLDYHDSNVKNLYEKVRNQLKNNAKEIGNGCFEFYHKCDNTCMESVKNGTYDYPKYSEEAKLNREKIDGVKLESTRIYQILAIYSTVASSLVLVVSLGAISFWMCSNGSLQCRICI

SEQ ID NO: 10406 - protein, 566 aa, Artificial Sequence
  derived and/or modified protein sequence (wt) from hemagglutinin__InfluenzaA__AGT18721
MKAILVVLLYTFATANADTLCIGYHANNSTDTVDTVLEKNVTVTHSVNLLEDKHNGKLCKLRGVAPLHLGKCNIAGWILGNPECESLSTASSWSYIVETSSSDNGTCYPGDFINYEELREQLSSVSSIQRSEICTKTSSWPNHDSNKGVTAACPHAGAKSFYKNLIWLVKKGNSYPKLSKSYINDKGKEVLVLWGIHHQNSRGHQQSLYQNADAYVFVGTSRYSKKFKPEIAIRPKVKEQDGRMDYYWTLIEPGDKITFEATGNLVVPRYAFAMERNAGSGIIISDTPVHDCNTTCQTPEGAINTSLPFQNIHPITIGKCPKYVKSTKLRLATGLRNVPSIQSRGLFGAIAGFIEGGWTGMVDGWYGYHHQNEQGSGYAADLKSTQNAIDKITNKVNSVIEKMNTQFTAVGKEFNHLEKRIENLNKKVDDGFLDIWTYNAELLVLLENERTLDYHDSNVKNLYEKVRNQLKNNAKEIGNGCFEFYHKCDNTCMESVKNGTYDYPKYSEEAKLNREKIDGVKLESTRIYQILAIYSTVASSLVLVVSLGAISFWMCSNGSLQCRICI

SEQ ID NO: 10407 - protein, 566 aa, Artificial Sequence
  derived and/or modified protein sequence (wt) from hemagglutinin__InfluenzaA__AGT18722
MKAILVVLLYTFATANADTLCIGYHANNSTDTVDTVLEKNVTVTHSVNLLEDKHNGKLCKLRGVAPLHLGKCNIAGWILGNPECESLSTASSWSYIVETSKSNNRTCYPGDFINYEELREQLSSVSSFERFEIFPKTSSWPNHDSNKGVTAACPHAGAKSFYKNLIWLVKKGNSYPKLSKSYINDKGKEVLVLWGIHHPSTTADQQSLYQNADAYVFVGTSRYSKKFKPEIAIRPKVRDQEGRMNYYWTLIEPGDKITFEATGNLVVPRYAFAMERNAGSGIIISDTPVHDCNTTCQTPEGAINTSLPFQNIHPITIGKCPKYVKSTKLRLATGLRNVPSIQSRGLFGAIAGFIEGGWTGMVDGWYGYHHQNEQGSGYAADLKSTQNAIDKITNKVNSVIEKMNTQFTAVGKEFNHLEKRIENLNKKVDDGFLDIWTYNAELLVLLENERTLDYHDSNVKNLYEKVRNQLKNNAKEIGNGCFEFYHKCDNTCMESVKNGTYDYPKYSEEAKLNREKIDGVKLESTRIYQILAIYSTVASSLVLVVSLGAISFWMCSNGSLQCRICI

SEQ ID NO: 10408 - protein, 566 aa, Artificial Sequence
  derived and/or modified protein sequence (wt) from hemagglutinin__InfluenzaA__AGT18723
MKAILVVLLYTFATANADTLCIGYHANNSTDTVDTVLEKNVTVTHSVNLLEDKHNGKLCKLRGVAPLHLGKCNIAGWILGNPECESLSTASSWSYIVETSKTNNRTCYPGDFINYEELREQLSSVSSFERFEIFPKTSSWPNHDSNKGVTAACPHAGAKSFYKNLIWLVKKGNSYPKLSKSYINDKGKEVLVLWGIHHQNKKAEQQTPYQNADAYVFVGTSRYSKKFKPEIAIRPKVRDQEGRMDYYWTLIEPGDKITFEATGNLVVPRYAFAMERNAGSGIIISDTPVHDCNTTCQTPEGAINTSLPFQNIHPITIGKCPKYVKSTKLRLATGLRNVPSIQSRGLFGAIAGFIEGGWTGMVDGWYGYHHQNEQGSGYAADLKSTQNAIDKITNKVNSVIEKMNTQFTAVGKEFNHLEKRIENLNKKVDDGFLDIWTYNAELLVLLENERTLDYHDSNVKNLYEKVRNQLKNNAKEIGNGCFEFYHKCDNTCMESVKNGTYDYPKYSEEAKLNREKIDGVKLESTRIYQILAIYSTVASSLVLVVSLGAISFWMCSNGSLQCRICI

SEQ ID NO: 10409 - protein, 566 aa, Artificial Sequence
  derived and/or modified protein sequence (wt) from hemagglutinin__InfluenzaA__AGT18724
MKAILVVLLYTFATANADTLCIGYHANNSTDTVDTVLEKNVTVTHSVNLLEDKHNGKLCKLRGVVPLHLGKCNIAGWILGNPECESLSTASSWSYIVETSKTNNRTCYPGDFINYEELREQLSSVSSFERFEIFPKTSSWPNHDSNKGVTAACPHAGAKSFYKNLIWLVKKGNSYPKLSKSYINDKGKEVLVLWGIHHPSTTADQQTLYQNADAYVFVGTSRYSKKFKPEIAIRPKVRDQEGRMNYYRTLIEPENKITFEATGNLVVPRYAFAMERNAGSGIIISDTPVHDCNTTCQTPEGAINTSLPFQNIHPITIGKCPKYVKSTKLRLATGLRNVPSIQSRGLFGAIAGFIEGGWTGMVDGWYGYHHQNEQGSGYAADLKSTQNAIDKITNKVNSVIEKMNTQFTAVGKEFNHLEKRIENLNKKVDDGFLDIWTYNAELLVLLENERTLDYHDSNVKNLYEKVRNQLKNNAKEIGNGCFEFYHKCDNTCMESVKNGTYDYPKYSEEAKLNREKIDGVKLESTRIYQILAIYSTVASSLVLVVSLGAISFWMCSNGSLQCRICI

SEQ ID NO: 10410 - protein, 566 aa, Artificial Sequence
  derived and/or modified protein sequence (wt) from hemagglutinin__InfluenzaA__AGT18725
MKVILVVLLYTFATANADTLCIGYHANNSTDTVDTVLEKNVTVTHSVNLLEDKHNGKLCKLRGVAPLHLGKCNIAGWILGNPECESLSTASSWSYIVETSSSDNGTCYPGDFINYEELREQLSSVSSFERFEIFPKTSSWPNHDSNKGVTAACPHAGAKSFYKNLIWLVKKGNSYPKLSKSYINDKGKEVLVLWGIHHPSTSADQQSLYQNADAYVFVGTSRYSKKFKPEIAIRPKVRDQEGRMNYYWTLVEPGDKITFEATGNLVVPRYAFAMERNAGSGIIISDTPVHDCNTTCQTPEGAINTSLPFQNIHPITIGKCPKYVKSTKLRLATGLRNVPSIQSRGLFGAIAGFIEGGWTGMVDGWYGYHHQNEQGSGYAADLKSTQNAIDKITNKVNSVIEKMNTQFTAVGKEFNHLEKRIENLNKKVDDGFLDIWTYNAELLVLLENERTLDYHDSNVKNLYEKVRTQLKNNAKEIGNGCFEFYHKCDNTCMESVKNGTYDYPKYSEEAKLNREKIDGVKLESTRIYQILAIYSTVASSLVLVVSLGAISFWMCSNGSLQCRICI

SEQ ID NO: 10411 - protein, 566 aa, Artificial Sequence
  derived and/or modified protein sequence (wt) from hemagglutinin__InfluenzaA__AGT18734
MKAILVVLLYTFATANADTLCIGYHANNSTDTVDTVLEKNVTVTHSVNLLEDKHNGKLCKLRGVAPLHLGKCNIAGWILGNPECESLSTASSWSYIVETSSSDNGTCYPGDFINYEELREQLSSVSSFERFEIFPKTSSWPNHDSNKGVTAACPHAGAKSFYKNLIWLVKKGNSYPKLSKSYINDKGKEVLVLWGIHHPSTTADQQSLYQNADAYVFVGTSRYSKKFKPEIAIRPKVRDQEGRINYYWTLIEPGDKITFEATGNLVVPRYAFAMERNAGSGIIISDTPVHDCNTTCQTPEGAINTSLPFQNIHPITIGKCPKYVKSTKLRLATGLRNVPSIQSRGLFGAIAGFIEGGWTGMVDGWYGYHHQNEQGSGYAADLKSTQNAIDKITNKVNSVIEKMNTQFTAVGKEFNHLEKRIENLNKKVDDGFLDIWTYNAELLVLLENERTLDYHDSNVKNLYEKVRNQLKNNAKEIGNGCFEFYHKCDNTCMESVKNGTYDYPKYSEEAKLNREKIDGVKLESTRIYQILAIYSTVASSLVLVVSLGAISFWMCSNGSLQCRICI

SEQ ID NO: 10412 - protein, 566 aa, Artificial Sequence; identical to SEQ ID NO: 10123
  derived and/or modified protein sequence (wt) from hemagglutinin__InfluenzaA__AGT18735

SEQ ID NO: 10413 - protein, 566 aa, Artificial Sequence
  derived and/or modified protein sequence (wt) from hemagglutinin__InfluenzaA__AGT18748
MKTIIALSYILCLVFAQKLPGNDNSTATLCLGHHAVPNGTIVKTITNDRIEVTNATELVQNSSIGEICDSPHQILDEENCTLIDALLGDPQCDDFQNKKWDLFVERSKAYSNCYPYDVPDYASLRSLVASSGTLEFNNESFNWAGVTQNGTSSACRRGSNSSFFSRLNWLTHLNFKYPALNVTMPNNEQFDKLYIWGVHHPSTDKDQIFLYAQSSGRITVSTKRSQQAVIPNIGSRPRIRNIPSRISIYWTIVKPGDILLINSTGNLIAPRGYFKIRSGKSSIMRSDAPIGKCKSECITPNGSIPNDKPFQNVNRITYGACPRYVKQSTLKLATGMRNVPEKQTRGIFGAIAGFIENGWEGMVDGWYGFRHQNSEGRGQAADLKSTQAAIDQINGKLNRLIGKTNEKFHQIEKEFSEVEGRIQDLEKYVEDTKIDLWSYNAELLVALENQHTIDLTDSEMNKLFEKTKKQLRENAEDMGNGCFKIYHKCDNACIGSIRNGTYDHDVYRDEALNNRFQIKGVELKSGYKDWILWISFAISCFLLCVALLGFIMWACQKGNIRCNICI

SEQ ID NO: 10414 - protein, 566 aa, Artificial Sequence
  derived and/or modified protein sequence (wt) from hemagglutinin__InfluenzaA__AGT18749
MKTIIALSYILCLVFAQKLPENDNSTATLCLGHHAVPNGTIVKTITDDQIEVTNATELVQNSSTGEICDSPHQILDGENCTLIDALLGDPQCDGFQNKKWDLFVERSKAYSNCYPYDVPDYASLRSLVASSGTLEFNNESFNWTGVTQNGTSSACIRRSNNSFFSRLNWLTHLNFKYPALNVTMPNNEQFDKLYIWGVHHPGTDKDQIFLYAQASGRITVSTKRSQQAVIPNIGSRPRVRNIPSRISIYWTIVKPGDILLINSTGNLIAPRGYFRIRSGRSSIMRSDAPIGKCNSECITPNGSIPNDKPFQNVNRITYGACPRYVKQNTLKLATGMRNVPEKQTRGIFGAIAGFIENGWEGMVDGWYGFRHQNSEGRGQAADLKSTQAAIDQINGKLNRLIGKTNEKFHQIEKEFSEVEGRIQDLEKYVEDTKIDLWSYNAELLVALENQHTIDLTDSEMNKLFEKTKKQLRENAEDMGNGCFKIYHKCDNACIGSIRNGTYDHDVYRDEALNNRFQIKGVELKSGYKDWILWISFAISCFLLCVALLGFIMWACQKGNIRCNICI

SEQ ID NO: 10415 - protein, 566 aa, Artificial Sequence
  derived and/or modified protein sequence (wt) from hemagglutinin__InfluenzaA__AGT18751
MKTVIALSYILCLVFAQKLPGNDNSTATLCLGHHAVPNGTIVKTITNDQIEVTNATELVQNSSTGEICDSPHQILDGENCTLIDALLGDPQCDGFQNKKWDLFVERSKAYSNCYPYDVPDYASLRSLVASSGTLEFNNESFNWTGVTQNGTSSACIRRSNNSFFSRLNWLTHLNFKYPALNVTMPNNEQFDKLYIWGVHHPGTDKDQIFLYAQASGRITVSTKRSQQAVIPNIGSRPRVRNIPSRISIYWTIVKPGDILLINSTGNLIAPRGYFKIRSGRSSIMRSDAPIGKCNSECITPNGSIPNDKPFQNVNRITYGACPRYVKQNTLKLATGMRNVPEKQTRGIFGAIAGFIENGWEGMVDGWYGFRHQNSEGRGQAADLKSTQAAIDQINGKLNRLIGKTNEKFHQIEKEFSEVEGRIQDLEKYVEDTKIDLWSYKSELLVALENQHTIDLTDSEMNKLFEKTKKQLRENAEDMGNGCFKIYHKCDNACIGSIRNGTYDHDVYRDEALNNRFQIKGVELKSGYKDWILWISFAISCFLLCVALLGFIMWACQKGNIRCNICI

SEQ ID NO: 10416 - protein, 566 aa, Artificial Sequence
  derived and/or modified protein sequence (wt) from hemagglutinin__InfluenzaA__AGT18752
MKTIIALSYIICLVFAQKLPGNDNSTATLCLGHHAVPNGTIVKTITNDQIEVTNATELVQNSSTGEICNSPHQILDGENCTLIDALLGDPQCDGFQNKKWDLFVERSKAYSNCYPYDVPDYASLRSLVASSGTLEFNNESFNWTGVTQNGTSSACIRRSNNSFFSRLNWLTHLNFKYPALNVTMPNNEQFDKLYIWGVHHPGTDKDQIFLYAQASGRITVSTKRSQQAVIPNIGSRPRVRNIPSRISIYWTIVKPGDILLINSTGNLIAPRGYFKIRSGRSSIMRSDAPIGKCNSECITPNGSIPNDKPFQNVNRITYGACPRYVKQNTLKLATGMRNVPEKQTRGIFGAIAGFIENGWEGMVDGWYGFRHQNSEGRGQAADLKSTQAAIDQINGKLNRLIGKTNEKFHQIEKEFSEVEGRIQDLEKYVEDTKIDLWSYSSELLVALENQHTIDLTDSEMNKLFEKTKKQLRENAEDMGNGCFKIYHKCDNACIGSIRNGTYDHDVYRDEALNNRFQIKGVELKSGYKDWILWISFAISCFLLCVALLGFIMWACQKGNIRCNICI

SEQ ID NO: 10417 - protein, 566 aa, Artificial Sequence
  derived and/or modified protein sequence (wt) from hemagglutinin__InfluenzaA__AGT18753
MKTIIALSYILCLVFAQKLPGNDNSTATLCLGHHAVPNGTIVKTITNDQIEVTNATELVQNSSTGEICNSPHQILDGENCTLIDALLGDPQCDGFQNKKWDLFVERSKAYSNCYPYDVPDYASLRSLVASSGTLEFNNESFNWTGVTQNGTSSACIRRSNNSFFSRLNWLTHLNFKYPALNVTMPNNEQFDKLYIWGVHHPGTDKDQIFLYAQASGRITVSTKRSQQAVIPNIGSRPRVRNIPSRISIYWTIVKPGDILLINSTGNLIAPRGYFKIRSGRSSIMRSDAPIGKCNSECITPNGSIPNDKPFQNVNRITYGACPRYVKQNTLKLATGMRNVPEKQTRGIFGAIAGFIENGWEGMVDGWYGFRHQNSEGRGQAADLKSTQAAIDQINGKLNRLIGKTNEKFHQIEKEFSEVEGRIQDLEKYVEDTKIDLWSYKSELLVALENQHTIDLTDSEMNKLFEKTKKQLRENAEDMGNGCFKIYHKCDNACIGSIRNGTYDHDVYRDEALNNRFQIKGVELKSGYKDWILWISFAISCFLLCVALLGFIMWACQKGNIRCNICI

SEQ ID NO: 10418 - protein, 566 aa, Artificial Sequence
  derived and/or modified protein sequence (wt) from hemagglutinin__InfluenzaA__AGT18754
MKTIIALSYILCLVFAQKLPENDNSTATLCLGHHAVPNGTIVKTITDDQIEVTNATELVQNSSTGEICDSPHQILDGENCTLIDALLGDPQCDGFQNKKWDLFVERGKAYSNCYPYDVPDYASLRSLVATSGTLEFNNESFNWTGVTQNGTSSACIRRSNNSFFSRLNWLTHLNFKYPALNVTMPNNEQFDKLYIWGVHHPGTDKDQIFLYAQASGRITVSTKRSQQAVIPNIGSRPRVRNIPSRISIYWTIVKPGDILLINSTGNLIAPRGYFKIRSGRSSIMRSDAPIGKCNSECITPNGSIPNDKPFQNVNRITYGACPRYVKQNTLKLATGMRNVPEKQTRGIFGAIAGFIENGWEGMVDGWYGFRHQNSEGRGQAADLKSTQAAIDQINGKLNRLIGKTNEKFHQIEKEFSEVEGRIQDLEKYVEDTKIDLWSYNAELLVALENQHTIDLTDSEMNKLFEKTKKQLRENAEDMGNGCFKIYHKCDNACIGSIRNGTYDHDVYRDEALNNRFQIKGVELKSGYKDWILWISFAISCFLLCVALLGFIMWACQKGNIRCNICI

SEQ ID NO: 10419 - protein, 566 aa, Artificial Sequence
  derived and/or modified protein sequence (wt) from hemagglutinin__InfluenzaA__AGT18756
MKTIIALSYVLCLVFAQKLPGNDNSTATLCLGHHAVPNGTIVKTITNDRIEVTNATELVQNSSIGEICDSPHQILDGENCTLIDALLGDPQCDDFQNKKWDLFVERSKAYSNCYPYDVPDYASLRSLVASSGTLEFNNESFNWAGVTQNGTSSACRRGSNSSFFSRLNWLTHLNFKYPALNVTMPNNEQFDKLYIWGVHHPGTDKDQIFLYAQSSGRITVSTKRSQQAVIPNIGSRPRIRNIPSRISIYWTIVKPGDILLINSTGNLIAPRGYFKIRSGKSSIMRSDAPIGKCKSECITPNGSIPNDKPFQNVNRITYGACPRYVKQSTLKLATGMRNVPEKQTRGIFGAIAGFIENGWEGMVDGWYGFRHQNSEGRGQAADLKSTQAAIDQINGKLNRLIGKTNEKFHQIEKEFSEVEGRIQDLEKYVEDTKIDLWSYKSELLVALENQHTIDLTDSEMNKLFEKTKKQLRENAEDMGNGCFKIYHKCDNACIGSIRNGTYDHDVYRDEALNNRFQIKGVELKSGYKDWILWISFAISCFLLCVALLGFIMWACQKGNIRCNICI

SEQ ID NO: 10420 - protein, 566 aa, Artificial Sequence
  derived and/or modified protein sequence (wt) from hemagglutinin__InfluenzaA__AGT18757
MKTIIALSYILCLVFAQKLPGNDNSTATLCLGHHAVPNGTIVKTITNDRIEVTNATELVQNSSIGEICDSPHQILDGENCTLIDALLGDPQCDDFQNKKWDLFVERSKAYSNCYPYDVPDYASLRSLVASSGTLEFNNESFNWAGVTQNGTSSACRRGSNSSFFSRLNWLTHLNFKYPALNVTMPNNEQFDKLYIWGVHHPGTDKDQIFLYAQSSGRITVSTKRSQQAVIPNIGSRPRIRNIPSRISIYWTIVKPGDILLINSTGNLIAPRGYFKIRSGKSSIMRSDAPIGKCKSECITPNGSIPNDKPFQNVNRITYGACPRYVKQSTLKLATGMRNVPEKQTRGIFGAIAGFIENGWEGMVDGWYGFRHQNSEGRGQAADLKSTQAAIDQINGKLNRLIGKTNEKFHQIEKEFSEVEGRIQDLEKYVEDTKIDLWSYNAELLVALENQHTIDLTDSEMNKLFEKTKKQLRENAEDMGNGCFKIYHKCDNACIGSIRNGTYDHDVYRDEALNNRFQIKGVELKSGYKDWILWISFAISCFLLCVALLGFIMWACQKGNIRCNICI

SEQ ID NO: 10421 - protein, 566 aa, Artificial Sequence
  derived and/or modified protein sequence (wt) from hemagglutinin__InfluenzaA__AGT18758
MKTIIALSYILCLVFAQKLPGNDNSTATLCLGHHAVPNGTIVKTITNDRIEVTNATELVQNSSIGEICDSPHQILDGENCTLIDALLGDPQCDDFQNKKWDLFVERSKAYSNCYPYDVPDYASLRSLVASSGTLEFNNESFNWAGVTQNGTSSACRRGSNSSFFSRLNWLTHLNFKYPALNVTMPNNEQFDKLYIWGVHHPGTDKDQIFLYAQSSGRITVSTKRSQQAVIPNIGSRPRIRNIPSRISIYWTIVKPGDILLINSTGNLIAPRGYFKIRSGKSSIMRSDAPIGKCKSECITPNGSIPNDKPFQNVNRITYGACPRYVKQSTLKLATGMRNVPEKQTRGIFGAIAGFIENGWEGMVDGWYGFRHQNSEGRGQAADLKSTQAAIDQINGKLNRLIGKTNEKFHQIEKEFSEVEGRIQDLEKYVEDTKIDLWSYSSELLVALENQHTIDLTDSEMNKLFEKTKKQLRENAEDMGNGCFKIYHKCDNTCIGSIRNGTYDHDVYRDEALNNRFQIKGVELKSGYKDWILWISFAISCFLVCVALLGFIMWACQKGNIRCNICI

SEQ ID NO: 10422 - protein, 566 aa, Artificial Sequence
  derived and/or modified protein sequence (wt) from hemagglutinin__InfluenzaA__AGT18759
MKTIIALSYILCLVFAQKLPGNDNSTATLCLGHHAVPNGTIVKTITNDRIEVTNATELVQNSSIGEICDSPHQILDGENCTLIDALLGDPQCDDFQNKKWDLFVERSKAYSNCYPYDVPDYASLRSLVASSGTLEFNNESFNWAGVTQNGTSSACRRGSNSSFFSRLNWLTHLNFKYPALNVTMPNNEQFDKLYIWGVHHPGTDKDQIFLYAQSSGRITVSTKRSQQAVIPNIGSRPRIRNIPSRISIYWTIVKPGDILLINSTGNLIAPRGYFKIRSGKSSIMRSDAPIGKCKSECITPNGSIPNDKPFQNVNRITYGACPRYVKQSTLKLATGMRNVPEKQTRGIFGAIAGFIENGWEGMVDGWYGFRHQNSEGRGQAADLKSTQAAIDQINGKLNRLIGKTNEKFHQIEKEFSEVEGRIQDLEKYVEDTKIDLWSYSSELLVALENQHTIDLTDSEMNKLFEKTKKQLRENAEDMGNGCFKIYHKCDNACIGSIRNGTYDHDVYRDEALNNRFQIKGVELKSGYKDWILWISFAISCFLVCVALLGFIMWACQKGNIRCNICI

SEQ ID NO: 10423 - protein, 566 aa, Artificial Sequence
  derived and/or modified protein sequence (wt) from hemagglutinin__InfluenzaA__AGT18760
MKTIIALSYILCLVFAQKLPGNDNSTATLCLGHHAVPNGTIVKTITNDRIEVTNATELVQNSSIGEICDSPHQILDGENCTLIDALLGDPQCDDFQNKKWDLFVERNKAYSNCYPYDVPDYASLRSLVASSGTLEFNNESFNWAGVTQNGTSSACRRGSNSSFFSRLNWLTHLNFKYPALNVTMPNNEQFDKLYIWGVHHPGTDKDQIFLYAQSSGRITVSTKRSQQAVIPNIGSRPRIRNIPSRISIYWTIVKPGDILLINSTGNLIAPRGYFKIRSGKSSIMRSDAPIGKCKSECITPNGSIPNDKPFQNVNRITYGACPRYVKQSTLKLATGMRNVPEKQTRGIFGAIAGFIENGWEGMVDGWYGFRHQNSEGRGQAADLKSTQAAIDQINGKLNRLIGKTNEKFHQIEKEFSEVEGRIQDLEKYVEDTKIDLWSYKSELLVALENQHTIDLTDSEMNKLFEKTKKQLRENAEDMGNGCFKIYHKCDNACIGSIRNGTYDHDVYRDEALNNRFQIKGVELKSGYKDWILWISFAISCFLVCVALLGFIMWACQKGNIRCNICI

SEQ ID NO: 10424 - protein, 566 aa, Artificial Sequence
  derived and/or modified protein sequence (wt) from hemagglutinin__InfluenzaA__AGT18761
MKTIIALSYILCLVFAQKLPGNDNSTATLCLGHHAVPNGTIVKTITNDRIEVTNATELVQNSSIGEICDSPHQILDGENCTLIDALLGDPQCDDFQNKKWDLFVERSKAYSNCYPYDVPDYASLRSLVASSGTLEFNNESFNWAGVTQNGTSSACRRGSNSSFFSRLNWLTHLNFKYPALNVTMPNNEQFDKLYIWGVHHPGTDKDQIFLYAQSSGRITVSTKRSQQAVIPNIGSRPRIRNIPSRISIYWTIVKPGDILLINSTGNLIAPRGYFKIRSGKSSIMRSDAPIGKCKSECITPNGSIPNDKPFQNVNRITYGACPRYVKQSTLKLATGMRNVPEKQTRGIFGAIAGFIENGWEGMVDGWYGFRHQNSEGRGQAADLKSTQAAIDQINGKLNRLIGKTNEKFHQIEKEFSEVEGRIQDLEKYVEDTKIDLWSYSSEFLVALENQHTIDLTDSEMNKLFEKTKKQLRENAEDMGNGCFKIYHKCDNACIGSIRNGTYDHDVYRDEALNNRFQIKGVELKSGYKDWILWISFAISCFLVCVALLGFIMWACQKGNIRCNICI

SEQ ID NO: 10425 - protein, 566 aa, Artificial Sequence
  derived and/or modified protein sequence (wt) from hemagglutinin__InfluenzaA__AGT37102
MEAKLVVLFCAFTTLKADIICVGYHANNSTDTVDTIMEKNVTVTHSVNLLENSHNGKLCSLNGKAPLQLGNCNVAGWILGNPECDLLLTANSWSYIIETSSSKNGTCYPGEFSDYEELRELLSTVSSFERFEIFPKATSWPNHETTKGATIACSHSGASSFYRNLLWIVKKGNSYPKISKSYTNNRGKEVLVIWGVHHPPTDSSQQALYQNTHTYISVGSSKYYQRFTPVVAARPKIREQEGRMNYYWTLLEQGDTITFEATGNLIAPWYAFALDMGSSSGIMVSDAPVHNCTTKCQTPHGALKSNLPFQNVHPITIGECPKYVKSTQLRMATGLRNIPSIQSRGLFGAIAGFIEGGWTGMIDGWYGYHHQNEQGSGYAADQKSTQIAIDGISNKVNSIIEKMNVQFTSVGKEFNDLEKRIENLNKKVDDGFLDVWTYNAELLVLLENERTLDFHDFNVKNLYEKVKSQLRNNAKEIGNGCFEFYHKCDNECMENVKNGTYNYPKYSEESKLNREKIDGVKLESIGVHQILAIYSTVASSLVLLVSLGAISFWMCSNGSLQCRICI

SEQ ID NO: 10426 - protein, 566 aa, Artificial Sequence
  derived and/or modified protein sequence (wt) from hemagglutinin__InfluenzaA__AGU01877
MKAILVVLLYTFATANADTLCIGYHANNSTDTVDTVLEKNVTVTHSVNLLEDKHNGKLCKLRGVAPLHLGKCNIAGWILGNPECESLSTASSWSYIVETSSSDNGTCYPGDFINYEELREQLSSVSSFERFEIFPKTSSWPNHDSNKGVTAACPHAGAKSFYKNLIWLVKKGNSYPKLSKSYINDKGKEVLVLWGIHHPSTTTDQQSLYQNADAYVFVGTSRYSKKFKPEIAIRPKVRDQEGRMNYYWTLIEPGDKITFEATGNLVVPRYAFAMERNAGSGIIISDTPVHDCNTTCQTPEGAINTSLPFQNIHPITIGKCPKYVKSTKLRLATGLRNVPSIQSRGLFGAIAGFIEGGWTGMVDGWYGYHHQNEQGSGYAADLKSTQNAIDKITNKVNSVIEKMNTQFTAVGKEFNHLEKRIENLNKKVDDGFLDIWTYNAELLVLLENERTLDYHDSNVKNLYEKVRNQLKNNAKEIGNGCFEFYHKCDNTCMESVKNGTYDYPKYSEEAKLNREKIDGVKLESTRIYQILAIYSTVASSLVLVVSLGAISFWMCSNGSLQCRICI

SEQ ID NO: 10427 - protein, 566 aa, Artificial Sequence
  derived and/or modified protein sequence (wt) from hemagglutinin__InfluenzaA__AGU01878
MKAILVVMLYTLATANADTLCIGYHANNSTDTVDTVLEKNVTVTHSVNLLEDKHDGKLCKLRGVAPLHLGKCNIAGWILGNPECESLSTASSWSYIVETSGSDNGTCYPGDFIDYEELREQLSSVSSFERFEIFPKTSSWPNHDSNKGVTAACPHAGAKGFYKNLIWLVKKGNSYPKLSISYINDKGKEVLVLWGIHHPSTTADQQSLYQNADTYVFVGTSRYSKKFKPEIAIRPKVRDQEGRMNYYWTLVEPGDKITFEATGNLVVPRYAFAMERNAGSGIIISDTPVHDCNTTCQTPKGAINTSLPFQNIHPITIGKCPKYVKSTKLRLATGLRNVPSIQSRGLFGAIAGFIEGGWTGMVDGWYGYHHQNEQGSGYAADLKSTQNAIDKITNKVNSVIEKMNTQFTAVGKEFNHLEKRIENLNKKVDDGFLDIWTYNAELLVLLENERTLDYHDSNVKNLYEKVRNQLKNNAKEIGNGCFEFYHKCDNTCMESVKNGTYDYPKYSEEAKLNREEIDGVKLESTRIYQILAIYSTAASSLVLVVSLGAISFWMCSNGSLQCRICI

SEQ ID NO: 10428 - protein, 566 aa, Artificial Sequence
  derived and/or modified protein sequence (wt) from hemagglutinin__InfluenzaA__AGU01879
MKAILVVMLYTFATANADTLCIGYHANNSTDTVDTVLEKNVTVTHSVNLLEDKHNEKLCKLRGVAPLHLGKCNIAGWILGNPECESLSTASSWSYIVETSGSDNGTCYPGDFIDYEELREQLSSVSSFERFEIFPKTSSWPNHDSNKGVTAACPQAGAKGFYKNLIWLVKKGNSYPKLSKSYINDKGKEVLVLWGIHHPSTTADQQSLYQNADTYVFVGTSRYSKKFKPEIAIRPKVRDQEGRMNYYWTLVEPGDKITFEATGNLVVPRYAFAMERNAGSGIIISDTPVHDCNTTCQTPKGAINTSLPFQNIHPITIGKCPKYVKSTKLRLATGLRNVPSIQSRGLFGAIAGFIEGGWTGMVDGWYGYHHQNEQGSGYAADLKSTQNAIDKITNKVNSVIEKMNTQFTAVGKEFNHLEKRIENLNKKVDDGFLDIWTYNAELLVLLENERTLDYHDSNVKNLYEKVRNQLKNNAKEIGNGCFEFYHKCDNTCMESVKNGTYDYPKYSEEAKLNREEIDGVKLESTRIYQILAIYSTVASSLVLVVSLGAISFWMCSNGSLQCRICI

SEQ ID NO: 10429 - protein, 566 aa, Artificial Sequence
  derived and/or modified protein sequence (wt) from hemagglutinin__InfluenzaA__AGU01881
MKAILVVLLYTFATANADTLCIGYHANNSTDTVDTVLEKNVTVTHSVNLLEDKHNGKLCKLRGVTPLHLGKCNIAGWILGNPECESLSTASSWSYIVETSSSDNGTCYPGDFINYEELREQLSSVSSFERFEMFPKTSSWPNHDSNKGVTAACPQAGAKSFYKNLIWLVKKGNSYPKLSKSYINDKGKEVLVLWGIHHPSTTADQQSLYQNADAYVFVGTSRYSKKFKPEIAIRPKVRDQEGRMNYYWTLIEPGDKITFEATGNLVVPRYAFAMERNAGSGIIISDTPVHDCNTTCQTPEGAINTSLPFQNIHPITIGKCPKYVKSTKLRLATGLRNVPSIQSRGLFGAIAGFIEGGWTGMVDGWYGYHHQNEQGSGYAADLKSTQNAIDKITNKVNSVIEKMNTQFTAVGKEFNHLEKRIENLNKKVDDGFLDIWTYNAELLVLLENERTLDYHDSNVKNLYEKVRNQLKNNAKEIGNGCFEFYHKCDNTCMESVKNGTYDYPKYSEEAKLNREKIDGVKLESTRIYQILAIYSTVASSLVLVVSLGAISFWMCSNGSLQCRICI

SEQ ID NO: 10430 - protein, 566 aa, Artificial Sequence
  derived and/or modified protein sequence (wt) from hemagglutinin__InfluenzaA__AGU01883
MKAILVVMLYTFATANADTLCIGYHANNSTDTVDTVLEKNVTVTHSVNLLEDKHNGKLCKLRGVAPLHLGKCNIAGWILGNPECESLSTASSWSYIVETSGSDNGTCYPGDFIDYEELREQLSSVSSFERFEIFPKTSSWPNHDSNKGVTAACPHAGAKGFYKNLIWLVKKGNSYPKLSISYINNKEKEVLVLWGIHHPSTTADQQSLYQNADTYVFVGTSRYSKKFKPEIAIRPKVRDQEGRMNYYWTLVEPGDKITFEATGNLVVPRYAFAMERNAGSGIIISDTPVHDCNTTCQTPKGAINTSLPFQNIHPITIGKCPKYVKSTKLRLATGLRNVPSIQSRGLFGAIAGFIEGGWTGMVDGWYGYHHQNEQGSGYAADLKSTQNAIDKITNKVNSVIEKMNTQFTAVGKEFNHLEKRIENLNKKVDDGFLDIWTYNAELLVLLENERTLDYHDSNVKNLYEKVRNQLKNNAKEIGNGCFEFYHKCDNTCMESVKNGTYDYPKYSEEAKLNREEIDGVKLESTRIYQILAIYSTAASSLVLVVSLGAISFWMCSNGSLQCRICI

SEQ ID NO: 10431 - protein, 566 aa, Artificial Sequence; identical to SEQ ID NO: 10060
  derived and/or modified protein sequence (wt) from hemagglutinin__InfluenzaA__AGU01884

SEQ ID NO: 10432 - protein, 566 aa, Artificial Sequence
  derived and/or modified protein sequence (wt) from hemagglutinin__InfluenzaA__AGU01885
MKAILVVMLYTFATANADTLCIGYHANNSTDTVDTVLEKNVTVTHSVNLLEDKHNEKLCKLRGVAPLHLGKCNIAGWILGNPECESLSTASSWSYIVETSGSDNGTCYPGDFIDYEELREQLSSVSSFERFEIFPKTSSWPNHDSNKGVTAACPQAGAKGFYKNLIWLVKKGNSYPKLSKSYINDKGKEVLVLWGIHHPSTTADQQSLYQNADTYVFVGTSRYSKKFKPEIAIRPKVRDQEGRMNYYWTLVEPGDKITFEATGNLVVPRYAFAMERNAGSGIIISDTPVHDCNTTCQTPKGAINTSLPFQNVHPITIGKCPKYVKSTKLRLATGLRNVPSIQSRGLFGAIAGFIEGGWTGMVDGWYGYHHQNEQGSGYAADLKSTQNAIDKITNKVNSVIEKMNTQFTAVGKEFNHLEKRIENLNKKVDDGFLDIWTYNAELLVLLENERTLDYHDSNVKNLYEKVRNQLKNNAKEIGNGCFEFYHKCDNTCMESVKNGTYDYPKYSEEAKLNREEIDGVKLESTRIYQILAIYSTVASSLVLVVSLGAISFWMCSNGSLQCRICI

SEQ ID NO: 10433 - protein, 566 aa, Artificial Sequence
  derived and/or modified protein sequence (wt) from hemagglutinin__InfluenzaA__AGU01887
MKAILVVLLYTFATANADTLCIGYHANNSTDTVDTVLEKNVTVTHSVNLLEDKHNGKLCKLRGVAPLHLGKCNIAGWILGNPECESLSTASSWSYIVETSSSDNGTCYPGDFINYEELREQLSSVSSFERFEIFPKTSSWPNHDSNKGVTAACPHAGAKSFYKNLIWLVKKGNSYPKLSKSYINDKGKEVLVLWGIHHPSTTADQQSLYQNADAYVFVGTSRYSKKFKPEIAIRPKVRDQEGRMNYYWTLIEPGDKITFEATGNLVVPRYAFAVERNAGSGIIISDTPVHNCNTTCQTPEGAINTSLPFQNIHPITIGKCPKYVKSTKLRLATGLRNVPSIQSRGLFGAIAGFIEGGWTGMVDGWYGYHHQNEQGSGYAADLKSTQNAIDKITNKVNSVIEKMNTQFTAVGKEFNHLEKRIENLNKKVDDGFLDIWTYNAELLVLLENERTLDYHDSNVKNLYEKVRNQLKNNAKEIGNGCFEFYHKCDNTCMESVKNGTYDYPKYSEEAKLNREKIDGVKLESTRIYQILAIYSTVASSLVLVVSLGAISFWMCSNGSLQCRICI

SEQ ID NO: 10434 - protein, 566 aa, Artificial Sequence
  derived and/or modified protein sequence (wt) from hemagglutinin__InfluenzaA__AGU01888
MKAILVVMLYTFATANADTLCIGYHANNSTDTVDTVLEKNVTVTHSVNLLEDKHNGKLCKLRGVAPLHLGKCNIAGWILGNPECESLSTASSWSYIVETSGSDNGTCYPGDFIDYEELREQLSSVSSFERFEIFPKTSSWPNHDSNKGVTAACPQAGAKGFYKNLIWLVKKGNSYPKLSKSYINDKGKEVLVLWGIHHPSTTADQQSLYQNADTYVFVGTSRYSKKFKPEIAIRPKVRDQEGRMNYYWTLVEPGDKITFEATGNLVVPRYAFAMERNAGSGIIISDTPVHDCNTTCQTPKGAINTSLPFQNIHPITIGKCPKYVKSTKLRLATGLRNVPSIQSRGLFGAIAGFIEGGWTGMVDGWYGYHHQNEQGSGYAADLKSTQNAIDKITNKVNSVIEKMNTRFTAVGKEFNHLEKRIENLNKKVDDGFLDIWTYNAELLVLLENERTLDYHDSNVKNLYEKVRNQLKNNAKEIGNGCFEFYHKCDNTCMESVKNGTYDYPKYSEEAKLNREEIDGVKLESTRIYQILAIYSTVASSLVLVVSLGAISFWMCSNGSLQCRICI

SEQ ID NO: 10435 - protein, 566 aa, Artificial Sequence; identical to SEQ ID NO: 10426
  derived and/or modified protein sequence (wt) from hemagglutinin__InfluenzaA__AGU01889

SEQ ID NO: 10436 - protein, 566 aa, Artificial Sequence
  derived and/or modified protein sequence (wt) from hemagglutinin__InfluenzaA__AGU01890
MKAILVVMLYTFATANADTLCIGYHANNSTDTVDTVLEKNVTVTHSVNLLEDKHNGKLCKLRGVAPLHLGKCNIAGWILGNPECESLSTASSWSYIVETSGSDNGTCYPGDFIDYEELREQLSSVSSFERFEIFPKTSSWPNHDSNKGVTAACPQAGAKGFYKNLIWLVKKGNSYPKLSKSYINDKGKEVLVLWGIHHPSTTADQQSLYQNADTYVFVGTSRYSKKFKPEIAIRPKVRDQEGRMNYYWTLVEPGDKITFEATGNLVVPRYAFAMERNAGSGIIISDTPVHDCNTTCQTPKGAINTSLPFQNIHPITIGKCPKYVKSTKLRLATGLRNVPSIQSRGLFGAIAGFIEGGWTGMVDGWYGYHHQNEQGSGYAADLKSTQNAIDKITNKVNSVIEKMNTQFTAVGKEFNHLEKRIENLNKKVDDGFLDIWTYNAELLVLLENERTLDYHDSNVKNLYEKVRNQLKNNAKEIGNGCFEFYHKCDNTCMESVKNGTYDYPKYSEEAKLNREEIDGVKLESTRIYQILAIYSTVASSLVLVVSLGAISFWMCSNGSLQCRICI

SEQ ID NO: 10437 - protein, 566 aa, Artificial Sequence
  derived and/or modified protein sequence (wt) from hemagglutinin__InfluenzaA__AGU92645
MKAILVVLLYTFATANADTLCIGYHANNSTDTVDTVLEKNVTVTHSVNLLEDKHNGKLCKLRGVAPLHLGKCNIAGWILGNPECETLSTASSWSYIVETSSSDNGTCYPGDFIDYEELREQLSSVSSFERFEIFPKTSSWPNHDSNKGVTAACPHAGAKGFYKNLIWLVKKGNSYPKLSKSYINDKGKEVLVLWGIHHPSTTADQQSLYQNADTYVFVGTSRYSKKFKPEIETRPKVRDQEGRMNYYWTLVEPGDKITFEATGNLVVPRYAFAMERDAGSGIIISDTPVHDCNTTCQTPKGAINTSLPFQNIHPITIGKCPKYVKSTKLRLATGLRNVPSIQSRGLFGAIAGFIEGGWTGMVDGWYGYHHQNEQGSGYAADLKSTQNAIDKITNKVNSVIEKMNTQFTAVGKEFNHLEKRIENLNKKVDDGFLDIWTYNAELLVLLENERTLDYHDSNVKNLYEKVRNQLKNNAKEIGNGCFEFYHKCDNTCMESVKNGTYDYPKYSEEAKLNREEIDGVKLESTRIYQILAIYSTAASSLVLVVSLGAISFWMCSNGSLQCRICI

SEQ ID NO: 10438 - protein, 566 aa, Artificial Sequence
  derived and/or modified protein sequence (wt) from hemagglutinin__InfluenzaA__AGU92667
MKAILVVLLYTFATANADTLCIGYHANNSTDTVDTVLEKNVTVTHSVNLLEDKHNGKLCKLRGVAPLHLGKCNIAGWILGNPECETLSTASSWSYIVETSSSDNGTCYPGDFIDYEELREQLSSVSSFERFEIFPKTSSWPNHDSNKGVTAACPHAGAKGFYKNLIWLVKKGNSYPKLSKSYINDKGKEVLVLWGIHHPSTTADQQSLYQNADTYVFVGTSRYSKKFKPEIATRPKVRDQEGRMNYYWTLVEPGDKITFEATGNLVVPRYAFAMERDAGSGIIISDTPVHDCNTTCQTPKGAINTSLPFQNIHPITIGKCPKYVKSTKLRLATGLRNVPSIQSRGLFGAIAGFIEGGWTGMVDGWYGYHHQNEQGSGYAADLKSTQNAIDKITNKVNSVIEKMNTQFTAVGKEFNHLEKRIENLNKKVDDGFLDIWTYNAELLVLLENERALDYHDSNVKNLYEKVRNQLKNNAKEIGNGCFEFYHKCDNTCMESVKNGTYDYPKYSEEAKLNREEIDGVKLESTRIYQILAIYSTAASSLVLVVSLGAISFWMCSNGSLQCRICI

SEQ ID NO: 10439 - protein, 566 aa, Artificial Sequence
  derived and/or modified protein sequence (wt) from hemagglutinin__InfluenzaA__AGU92678
MKAILVVLLYTFATANADTLCIGHHANNSTDTVDTVLEKNVTVTHSVNLLEDKHNGKLCKLRGVAPLHLGKCNIAGWILGNPECETLSTASSWSYIVETSSSDNGTCYPGDFIDYEELREQLSSVSSFERFEIFPKTSSWPNHDSNKGVTAACPHAGAKGFYKNLIWLVKKGNSYPKLSKSYINDKGKEVLVLWGIHHPSTTADQQSLYQNADTYVFVGTSRYSKKFKPEIATRPKVRDQEGRMNYYWTLVEPGDKITFEATGNLVVPRYAFAMERDAGSGIIISDTPVHDCNTTCQTPKGAINTSLPFQNIHPITIGKCPKYVKSTKLRLATGLRNVPSIQSRGLFGAIAGFIEGGWTGMVDGWYGYHHQNEQGSGYAADLKSTQNAIDKITNKVNSVIEKMNTQFTAVGKEFNHLEKRIENLNKKVDDGFLDIWTYNAELLVLLENERTLDYHDSNVKNLYEKVRNQLKNNAKEIGNGCFEFYHKCDNTCMESVKNGTYDYPKYSEEAKLNREEIDGVKLESTRIYQILAIYSTAASSLVLVVSLGAISFWMCSNGSLQCRICI

SEQ ID NO: 10440 - protein, 566 aa, Artificial Sequence
  derived and/or modified protein sequence (wt) from hemagglutinin__InfluenzaA__AGU92711
MKAILVVLLYTFATANADTLCIGYHANNSTDTVDTVLEKNVTVTHSVNLLEDKHNGKLCKLRGVAPLHLGKCNIAGWILGNPECESLSTASSWSYIVETSSSDNGTCYPGDFIDYEELREQLSSVSSFERFEIFPKTSSWPNHDSNKGVTAACPHAGAKSFYKNLIWLVKQGNSYPKLSKSYINDKGKEVLVLWGIHHPSTSADQQSLYQNADAYVFVGSSRYSKKFKPEIAIRPKVRDQEGRMNYYWTLVEPGDKITFEATGNLVVPRYAFAMERNAGSGIIISDTPVHDCNTTCQTPKGAINTSLPFQNIHPITIGKCPKYVKSTKLRLATGLRNVPSIQSRGLFGAIAGFIEGGWTGMVDGWYGYHHQNEQGSGYAADLKSTQNAIDEITNKVNSVIEKMNTQFTAVGKEFNHLEKRIENLNKKVDDGFLDIWTYNAELLVLLENERTLDYHDSNVKNLYEKVRSQLKNNAKEIGNGCFEFYHKCDNTCMESVKNGTYDYPKYSEEAKLNREEIDGVKLESTRIYQILAIYSTVASSLVLVVSLGAISFWMCSNGSLQCRICI

SEQ ID NO: 10441 - protein, 566 aa, Artificial Sequence
  derived and/or modified protein sequence (wt) from hemagglutinin__InfluenzaA__AGU92722
MKAILVVLLYTFATANADTLCIGYHANNSTDTVDTVLEKNVTVTHSVNLLEDKHNGKLCKLRGVAPLHLGKCNIAGWILGNPECESLSTASSWSYIVETSSSDNGTCYPGDFIDYEELREQLSSVSSFERFEIFPKTSSWPNHDSDKGVTAACPHAGAKSFYKNLIWLVKKGNSYPKLSKSYINDKGKEVLVLWGIHHPSTSADQQSLYQNADAYVFVGSSRYSKKFKPEIAIRPKVRDQEGRMNYYWTLVEPGDKITFEATGNLVVPRYAFAMERNAGSGIIISDTPVHDCNTTCQTPKGAINTSLPFQNIHPITIGKCPKYVKSTKLRLATGLRNVPSIQSRGLFGAIAGFIEGGWTGMVDGWYGYHHQNEQGSGYAADLKSTQNAIDEITNKVNSVIEKMNTQFTAVGKEFNHLEKRIENLNKKVDDGFLDIWTYNAELLVLLENERTLDYHDSNVKNLYEKVRSQLKNNAKEIGNGCFEFYHKCDNTCMESVKNGTYDYPKYSEEAKLNREEIDGVKLESTRIYQILAIYSTVASSLVLVVSLGAISFWMCSNGSLQCRICI

SEQ ID NO: 10442 - protein, 566 aa, Artificial Sequence; identical to SEQ ID NO: 10441
  derived and/or modified protein sequence (wt) from hemagglutinin__InfluenzaA__AGU92733

SEQ ID NO: 10443 - protein, 566 aa, Artificial Sequence
  derived and/or modified protein sequence (wt) from hemagglutinin__InfluenzaA__AGU92744
MKAILVVLLYTFATANADTLCIGYHANNSTDTVDTVLEKNVTVTHSVNLLEDKHNGKLCKLRGVAPLHLGKCNIAGWILGNPECESLSTASSWSYIVETSSSDNGTCYPGDFIDYEELREQLSSVSSFERFEIFPKTSSWPNHDSDKGVTAACPHAGAKSFYKNLIWLVKKGNSYPKLSKSYINDKGKEVLVLWGIHHPSTSADQQSLYQNADAYVFVGSSRYSKKFKPEIAIRPKVRDQEGRMNYYWTLVEPGDKITFEATGNLVVPRYAFAMERNAGSGIIISDTPVHDCNTTCQTPKGAINTSLPFQNIHPITIGKCPKYVKSTKLRLATGLRNVPSIQSRGLFGAIAGFIEGGWTGMVDGWYGYHHQNEQGSGYAADLKSTQNAIDEITNKVNSVIEKMNTQFTAVGKEFNHLEKRIENLNKKVDDGFLDIWTYNAELLVLLENERTLDYHDSNVKNLYEKVRSQLKNNAKEIGNGCFEFYHKCDNTCMESVKNGAYDYPKYSEEAKLNREEIDGVKLESTRIYQILAIYSTVASSLVLVVSLGAISFWMCSNGSLQCRICI

SEQ ID NO: 10444 - protein, 566 aa, Artificial Sequence
  derived and/or modified protein sequence (wt) from hemagglutinin__InfluenzaA__AGU92755
MKAILVVLLYTFATANADTLCIGYHANNSTDTVDTVLEKNVTVTHSVNLLEDKHNGKLCKLRGVAPLHLGKCNIAGWILGNPECESLSTASSWSYIVETSSSDNGTCYPGDFIDYEELREQLSSVSSFERFEIFPKTSSWPNHDSNKGVTAACPHAGAKSFYKNLIWLVKKGNSYPKLSKSYINDKGKEVLVLWGIHHPSTSADQQSLYQNADAYVFVGSSRYSKEFKPEIAIRPKVRDQEGRMNYYWTLVEPGDKITFEATGNLVVPRYAFAMERNAGSGIIISDTPVHDCNTTCQTPKGAINTSLPFQNIHPITIGKCPKYVKSTKLRLATGLRNVPSIQSRGLFGAIAGFIEGGWTGMVDGWYGYHHQNEQGSGYAADLKSTQNAIDEITNKVNSVIEKMNTQFTAVGKEFNHLEKRIENLNKKVDDGFLDIWTYNAELLVLLENERTLDYHDSNVKNLYEKVRSQLKNNAKEIGNGCFEFYHKCDNTCMESVKNGTYDYPKYSEEAKLNREEIDGVKLESTRIYQILAIYSTVASSLVLVVSLGAISFWMCSNGSLQCRICI

SEQ ID NO: 10445 - protein, 566 aa, Artificial Sequence
  derived and/or modified protein sequence (wt) from hemagglutinin__InfluenzaA__AGU92766
MKAILVVLLYTFATANADTLCIGYHANNSTDTVDTVLEKNVTVTHSVNLLEDKHNGKLCKLRGVAPLHLGKCNIAGWILGNPECETLSTASSWSYIVETSSSDNGTCYPGDFIDYEELREQLSSVSSFERFEIFPKTSSWPNHESNKGVTAACPHAGAKGFYKNLIWLVKKGNSYPKLSKSYINDKGKEVLVLWGIHHPSTTADQQSLYQNADAYVFVGTSRYSKKFKPEIATRPKVRDQEGRMNYYWTLVEPGDKITFEATGNLVVPRYAFAMERDAGSGIIISDTPVHDCNTTCQTPKGAINTSLPFQNIHPITIGKCPKYVKSTKLRLATGLRNVPSIQSRGLFGAIAGFIEGGWTGMVDGWYGYHHQNEQGSGYAADLKSTQNAIDKITNKVNSVIEKMNTQFTAVGKEFNHLEKRIENLNKKVDDGFLDIWTYNAELLVLLENERTLDYHDSNVKNLYEKVRNQLKNNAKEIGNGCFEFYHKCDNTCMESVKNGTYDYPKYSEEAKLNREEIDGVKLESTRIYQILAIYSTAASSLVLVVSLGAISFWMCSNGSLQCRICI

SEQ ID NO: 10446 - protein, 566 aa, Artificial Sequence
  derived and/or modified protein sequence (wt) from hemagglutinin__InfluenzaA__AGU92777
MKAILVVLLYTFATANADTLCIGYHANNSTDTVDTVLEKNVTVTHSVNLLEDKHNGKLCKLRGVAPLHLGKCNIAGWILGNPECETLSTASSWSYIVETSSSDNGTCYPGDFIDYEELREQLSSVSSFERFEIFPKTSSWPNHESNKGVTAACPHAGAKGFYKNLIWLVKKGNSYPKLSKSYINDKGKEVLVLWGIHHPSTTADQQSIYQNADTYVFVGTSRYSKKFKPEIATRPKVRDQEGRMNYYWTLVEPGDKITFEATGNLVVPRYAFAMERDAGSGIIISDTPVHDCNTTCQTPKGAINTSLPFQNIHPITIGKCPKYVKSTKLRLATGLRNVPSIQSRGLFGAIAGFIEGGWTGMVDGWYGYHHQNEQGSGYAADLKSTQNAIDKITNKVNSVIEKMNTQFTAVGKEFNHLEKRIENLNKKVDDGFLDIWTYNAELLVLLENERTLDYHDSNVKNLYEKVRNQLKNNAKEIGNGCFEFYHKCDNTCMESVKNGTYDYPKYSEEAKLNREEIDGVKLESTRIYQILAIYSTAASSLVLVVSLGAISFWMCSNGSLQCRICI

SEQ ID NO: 10447 - protein, 566 aa, Artificial Sequence
  derived and/or modified protein sequence (wt) from hemagglutinin__InfluenzaA__AGU92788
MKAILVVLLYTFATANADTLCIGYHANNSTDTVDTVLEKNVTVTHSVNLLEDKHNGKLCKLRGVAPLHLGKCNIAGWILGNPECETLSTASSWSYIVETSSSDNGTCYPGDFIDYEELREQLSSVSSFERFEIFPKTSSWPNHDSDKGVTAACPHAGAKGFYKNLIWLVKKGNSYPKLSKSYINDKGKEVLVLWGIHHPSTTADQQSLYQNADAYVFVGTSRYSKKFKPEIATRPKVRDREGRMNYYWTLVEPGDKITFEATGNLVVPRYAFAMERDAGSGIIISDTPVHDCNTTCQTPKGAINTSLPFQNIHPITIGKCPKYVKSTKLRLATGLRNVPSIQSRGLFGAIAGFIEGGWTGMLDGWYGYHHQNEQGSGYAADLKSTQNAIDKITNKVNSVIEKMNTQFTAVGKEFNHLEKRIENLNKKVDDGFLDIWTYNAELLVLLENERTLDYHDSNVKNLYEKVRNQLKNNAKEIGNGCFEFYHKCDNTCMESVKNGTYDYPKYSEEAKLNREEIDGVKLESTRIYQILAIYSTAASSLVLVVSLGAISFWMCSNGSLQCRICI

SEQ ID NO: 10448 - protein, 566 aa, Artificial Sequence
  derived and/or modified protein sequence (wt) from hemagglutinin__InfluenzaA__AGU92799
MKAILVVLLYTFATANADTLCIGYHANNSTDTVDTVLEKNVTVTHSVNLLEDKHNGKLCKLRGVAPLHLGKCNIAGWILGNPECETLSTASSWSYIVETSSSDNGTCYPGDFIDYEELREQLSSVSSFERFEIFPKTSSWPDHDSNKGVTAACPHAGAKGFYKNLIWLVKKGNSYPKLSKSYINDKGKEVLVLWGIHHPSTTADQQSLYQNADAYVFVGTSRYSKKFKPEIATRPKVRDREGRMNYYWTLVEPGDKITFEATGNLVVPRYAFAMERDAGSGIIISDTPVHDCNTTCQTPKGAINTSLPFQNIHPITIGKCPKYVKSTKLRLATGLRNVPSIQSRGLFGAIAGFIEGGWTGMVDGWYGYHHQNEQGSGYAADLKSTQNAIDKITNKVNSVIEKMNTQFTAVGKEFNHLEKRIENLNKKVDDGFLDIWTYNAELLVLLENERTLDYHDSNVKNLYEKVRNQLKNNAKEIGNGCFEFYHKCDNTCMESVKNGTYDYPKYSEEAKLNREEIDGVKLESTRIYQILAIYSTAASSLVLVVSLGAISFWMCSNGSLQCRICI

SEQ ID NO: 10449 - protein, 566 aa, Artificial Sequence
  derived and/or modified protein sequence (wt) from hemagglutinin__InfluenzaA__AGU92821
MKAILVVLLYTFATANADTLCIGYHANNSTDTVDTVLEKNVTVTHSVNLLEDKHNGKLCKLRGVAPLHLGKCNIAGWILGNPECETLSTASSWSYIVETSSSDNGTCYPGDFIDYEELREQLSSVSSFERFEIFPKTSSWPNHDSNKGVTAACPHAGAKGFYKNLIWLVKKGNSYPKLSKSYINDKGKEVLVLWGIHHPSTTADQQSLYQNADTYVFVGTSRYSKMFKPEIATRPKVRDREGRMNYYWTLVEPGDKITFEATGNLVVPRYAFAMERDAGSGIIISDTPVHDCNTTCQTPKGAINTSLPFQNIHPITIGKCPKYVKSTKLRLATGLRNVPSIQSRGLFGAIAGFIEGGWTGMVDGWYGYHHQNEQGSGYAADLKSTQNAIDKITNKVNSVIEKMNTQFTAVGKEFNHLEKRIENLNKKVDDGFLDIWTYNAELLVLLENERTLDYHDSNVKNLYEKVRNQLKNNAKEIGNGCFEFYHKCDNTCMESVKNGTYDYPKYSEEAKLNREEIDGVKLESTRIYQILAIYSTAASSLVLVVSLGAISFWMCSNGSLQCRICI

SEQ ID NO: 10450 - protein, 566 aa, Artificial Sequence
  derived and/or modified protein sequence (wt) from hemagglutinin__InfluenzaA__AGU92843
MKAILVVLLYTFATANADTLCIGYHANNSTDTVDTVLEKNVTVTHSVNLLEDKHNGKLCKLRGVAPLHLGKCNIAGWILGNPECESLSTASSWSYIVETSSSDNGTCYPGDFIDYEELREQLSSVSSFERFEIFPKTSSWPNHDSNKGVTAACPHAGAKSFYKNLIWLVKKGDSYPKLSKSYINDKGKEVLVLWGIHHPSTSADQQSLYQNADAYVFVGSSRYSKKFKPEIAIRPKVRDREGRMNYYWTLVEPGDKITFEATGNLVVPRYAFAMERNAGSGIIISDTPVHDCNTTCQTPKGAINTSLPFQNIHPITIGKCPKYVKSTKLRLATGLRNVPSIQSRGLFGAIAGFIEGGWTGMVDGWYGYHHQNEQGSGYAADLKSTQNAIDEITNKVNSVIEKMNTQFTAVGKEFNHLEKRIENLNKKVDDGFLDIWTYNAELLVLLENERTLDYHDSNVKNLYEKVRSQLKNNAKEIGNGCFEFYHKCDNTCMESVKNGTYDYPKYSEEAKLNREEIDGVKLESTRIYQILAIYSTVASSLVLVVSLGAISFWMCSNGSLQCRICI

SEQ ID NO: 10451 - protein, 569 aa, Artificial Sequence
  derived and/or modified protein sequence (wt) from hemagglutinin__InfluenzaA__AGU92854
MKAILVVLLYTFATANADTLCIGYHANNSTDTVDTVLEKNVTVTHSVNLLEDKHNGKLCKLRGVAPLHLGKCNIAGWILGNPECESLSTASSWSYIVETSSSDNGTCYPGDFIDYEELREQLSSVSSFERFEIFPKTSSWPNHDSDKGVTAACPHAGAKSFYKNLIWLVKKGNSYPKLSKSYINDKGKEVLVLWGIHHPSTSADQQSLYQNADAYVFVGSSRYSKKFKPEIAIRPKVRDREGRMNYYWTLVEPGDKITFEATGNLVVPRYAFAMERNAGSGIIISDTPVHDCNTTCQTPKGAINTSLTSLPFQNIHPITIGKCPKYVKSTKLRLATGLRNVPSIQSRGLFGAIAGFIEGGWTGMVDGWYGYHHQNEQGSGYAADLKSTQNAIDEITNKVNSVIEKMNTQFTAVGKEFNHLEKRIENLNKKVDDGFLDIWTYNAELLVLLENERTLDYHDSNVKNLYEKVRSQLKNNAKEIGNGCFEFYHKCDNTCMESVKNGTYDYPKYSEEAKLNREEIDGVKLESTRIYQILAIYSTVASSLVLVVSLGAISFWMCSNGSLQCRICI

SEQ ID NO: 10452 - protein, 566 aa, Artificial Sequence
  derived and/or modified protein sequence (wt) from hemagglutinin__InfluenzaA__AGU92887
MKAILVVLLYTFATANADTLCIGYHANNSTDTVDTVLEKNVTVTHSVNLLEDKHNGKLCKLRGVAPLHLGKCNIAGWILGNPECESLSTASSWSYIVETSSSDNGTCYPGDFIDYEELREQLSSVSSFERFEIFPKTSSWPNHDSNKGVTAACPHAGAKSFYKNLIWLVKKGNSYPKLSKSYINDKGKEVLVLWGIHHPSTSDDQQSLYQNADAYVFVGSSRYSKKFKPEIAIRPKVRDREGRMNYYWTLVEPGDKITFEATGNLVVPRYAFAMERNAGSGIIISDTPVHDCNTTCQTPKGAINTSLPFQNIHPITIGKCPKYVKSTKLRLATGLRNVPSIQSRGLFGAIAGFIEGGWTGMVDGWYGYHHQNEQGSGYAADLKSTQNAIDEITNKVNSVIEKMNTQFTAVGKEFNHLEKRIENLNKKVDDGFLDIWTYNAELLVLLENERTLDYHDSNVKNLYEKVRSQLKNNAKEIGNGCFEFYHKCDNTCMESVKNGTYDYPKYSEEAKLNREEIDGVKLESTRIYQILAIYSTVASSLVLVVSLGAISFWMCSNGSLQCRICI

SEQ ID NO: 10453 - protein, 566 aa, Artificial Sequence; identical to SEQ ID NO: 10437
  derived and/or modified protein sequence (wt) from hemagglutinin__InfluenzaA__AGU92898

SEQ ID NO: 10454 - protein, 566 aa, Artificial Sequence; identical to SEQ ID NO: 10438
  derived and/or modified protein sequence (wt) from hemagglutinin__InfluenzaA__AGU92909

SEQ ID NO: 10455 - protein, 566 aa, Artificial Sequence; identical to SEQ ID NO: 10440
  derived and/or modified protein sequence (wt) from hemagglutinin__InfluenzaA__AGU92931

SEQ ID NO: 10456 - protein, 566 aa, Artificial Sequence; identical to SEQ ID NO: 10441
  derived and/or modified protein sequence (wt) from hemagglutinin__InfluenzaA__AGU92942

SEQ ID NO: 10457 - protein, 566 aa, Artificial Sequence; identical to SEQ ID NO: 10441
  derived and/or modified protein sequence (wt) from hemagglutinin__InfluenzaA__AGU92953

SEQ ID NO: 10458 - protein, 566 aa, Artificial Sequence
  derived and/or modified protein sequence (wt) from hemagglutinin__InfluenzaA__AGU92964
MKAILVVLLYTFATANADTLCIGYHANNSTDTVDTVLEKNVTVTHSVNLLEDKHNGKLCKLRGVAPLHLGKCNIAGWILGNPECETLSTASSWSYIVETSSSDNGTCYPGDFIDYEELREQLSSVSSFERFEIFPKTSSWPNHDSNKGVTAACPHAGAKGFYKNLIWLVKKGNSYPKLSKSYINDKGKEVLVLWGIHHPSTTADQQSLYQNADAYVFVGTSRYSKKFKPEIATRPKVRDREGRMNYYWTLVEPGDKITFEATGNLVVPRYAFAMERDAGSGIIISDTPVHDCNTTCQTPKGAINTSLPFQNIHPITIGKCPKYVKSTKLRLATGLRNVPSIQSRGLFGAIAGFIEGGWTGMLDGWYGYHHQNEQGSGYAADLKSTQNAIDKITNKVNSVIEKMNTQFTAVGKEFNHLEKRIENLNKKVDDGFLDIWTYNAELLVLLENERTLDYHDSNVKNLYEKVRNQLKNNAKEIGNGCFEFYHKCDNTCMESVKNGTYDYPKYSEEAKLNREEIDGVKLESTRIYQILAIYSTAASSLVLVVSLGAISFWMCSNGSLQCRICI

SEQ ID NO: 10459 - protein, 566 aa, Artificial Sequence
  derived and/or modified protein sequence (wt) from hemagglutinin__InfluenzaA__AGU92975
MKAILVVLLYTFATANADTLCIGYHANNSTDTVDTVLEKNVTVTHSVNLLEDKHNGKLCKLRGVAPLHLGKCNIAGWILGNPECETLSTASSWSYIVETSSSDNGTCYPGDFIDYEELREQLSSVSSFERFEIFPKTSSWPNHDSNKGVTAACPHAGAKGFYKNLIWLVKKENSYPKLSKSYINDKGKEVLVLWGIHHPSTTADQQSLYQNADTYVFVGTSRYSKKFKPEIATRPKVRDREGRMNYYWTLVEPGDKITFEATGNLVVPRYAFAMERDAGSGIIISDTPVHDCNTTCQTPKGAINTSLPFQNIHPITIGKCPKYVKSTKLRLATGLRNVPSIQSRGLFGAIAGFIEGGWTGMVDGWYGYHHQNEQGSGYAADLKSTQNAIDKITNKVNSVIEKMNTQFTAVGKEFNHLEKRIENLNKKVDDGFLDIWTYNAELLVLLENERTLDYHDSNVKNLYEKVRNQLKNNAKEIGNGCFEFYHKCDNTCMESVKNGTYDYPKYSEEAKLNREEIDGVKLESTRIYQILAIYSTAASSLVLVVSLGAISFWMCSNGSLQCRICI

SEQ ID NO: 10460 - protein, 566 aa, Artificial Sequence; identical to SEQ ID NO: 10450
  derived and/or modified protein sequence (wt) from hemagglutinin__InfluenzaA__AGU92986

SEQ ID NO: 10461 - protein, 566 aa, Artificial Sequence
  derived and/or modified protein sequence (wt) from hemagglutinin__InfluenzaA__AGU92997
MKAILVVLLYTFATANADTLCIGYHANNSTDTVDTVLEKNVTVTHSVNLLEDKHNGKLCKLRGVAPLHLGKCNIAGWILGNPECESLSTASSWSYIVETSSSDNGTCYPGDFIDYEELREQLSSVSSFERFEIFPKTSSWPNHDSNKGVTAACPHAGAKSFYKNLIWLVKKGNSYPKLSKSYINDKGKEVLVLWGIHHPSTSADQQSLYQNADAYVFVGSSRYSKMFKPEIAIRPKVRDREGRMNYYWTLVEPGDKITFEATGNLVVPRYAFAMERNAGSGIIISDTPVHDCNTTCQTPKGAINTSLPFQNIHPITIGKCPKYVKSTKLRLATGLRNVPSIQSRGLFGAIAGFIEGGWTGMVDGWYGYHHQNEQGSGYAADLKSTQNAIDEITNKVNSVIEKMNTQFTAVGKEFNHLEKRIENLNKKVDDGFLDIWTYNAELLVLLENERTLDYHDSNVKNLYEKVRSQLKNNAKEIGNGCFEFYHKCDNTCMESVKNGTYDYPKYSEEAKLNREEIDGVKLESTRIYQILAIYSTVASSLVLVVSLGAISFWMCSNGSLQCRICI

SEQ ID NO: 10462 - protein, 566 aa, Artificial Sequence; identical to SEQ ID NO: 10452
  derived and/or modified protein sequence (wt) from hemagglutinin__InfluenzaA__AGU93008

SEQ ID NO: 10463 - protein, 565 aa, Artificial Sequence; identical to SEQ ID NO: 6554
  derived and/or modified protein sequence (wt) from hemagglutinin__InfluenzaA__AGU93019

SEQ ID NO: 10464 - protein, 566 aa, Artificial Sequence; identical to SEQ ID NO: 7050
  derived and/or modified protein sequence (wt) from hemagglutinin__InfluenzaA__AGU93031

SEQ ID NO: 10465 - protein, 566 aa, Artificial Sequence
  derived and/or modified protein sequence (wt) from hemagglutinin__InfluenzaA__AGU93042
MKAILVVLLYTFATANADTLCIGYHANNSTDTVDTVLEKNVTVTHSVNLLEDKHNGKLCKLRGVAPLHLGKCNIAGWILGNPECETLSTANSWSYIVETSSSDNGTCYPGDFIDYEELREQLSSVSSFERFEIFPKTSSWPNHDSNKGVTAACPHAGAKGFYKNLIWLVKKGNSYPKLSKSYINDKGKEVLVLWGIHHPSTTADQQSLYQNADTYVFVGTSRYSKKFKPEIAIRPKVRDQEGRMNYYWTLVEPGDKITFEATGNLVVPRYAFAMERDAGSGIIISDTPVHDCNTTCQTPKGAINTSLPFQNIHPITIGKCPKYVKSTKLRLATGLRNVPSIQSRGLFGAIAGFIEGGWTGMVDGWYGYHHQNEQGSGYAADLKSTQNAIDKITNKVNSVIEKMNIQFTAVGKEFNHLEKRIENLNKKVDDGFLDIWTYNAELLVLLENERTLDYHDSNVKNLYEKVRNQLKNNAKEIGNGCFEFYHKCDNTCMESVKNGTYDYPKYSEEAKLNREEIDGVKLESTRIYQILAIYSTAASSLVLVVSLGAISFWMCSNGSLQCRICI

SEQ ID NO: 10466 - protein, 566 aa, Artificial Sequence
  derived and/or modified protein sequence (wt) from hemagglutinin__InfluenzaA__AGU93053
MKAILVVLLYTFATANADTLCIGYHANNSTDTVDTVLEKNVTVTHSVNLLEDKHNGKLCKLRGVAPLHLGKCNIAGWILGNPECETLSTASSWSYIVETSSSDNGTCYPGDFIDYEELREQLSSVSSFERFEIFPKTSSWPNHDSNKGVTAACPHAGAKGFYKNLIWLVKKGNSYPKLSKSYINDKGKEVLVLWGIHHPSTTADQQSLYQNADTYVFVGTSRYSKKFKPEIATRPKVRDQEGRMNYYWTLVEPGDKITFEATGNLVVPRYAFAMERDAGSGIIISDTPVHDCNTTCQTPKGAINTSLPFQNIHPITIGKCPKYVKSTKLRLATGLRNVPSIQSRGLFGAIAGFIEGGWTGMVDGWYGYHHQNEQGSGYAADLKSTQNAIDKITNKVNSVIEKMNTQFTAVGKEFNHLEKRIENLNKKVDDGFLDIWTYNAELLVLLENERTLDYHDSNVKNLYEKVRNQLKNNAKEIGNGCFEFYHKCDNTCMESVKNGTYDYPKYSEEAKLNREEIDGVKLESTRIYQILAIYSTAASSLVLVVSLGAISFWMCSNGSLQCRICI

SEQ ID NO: 10467 - protein, 566 aa, Artificial Sequence
  derived and/or modified protein sequence (wt) from hemagglutinin__InfluenzaA__AGV99014
MKTIIALSYILCLVFAQKLPGNDNSTATLCLGHHAVPNGTIVKTITNDRIEVTNATELVQNSSIGEICDSPHQILDGENCTLIDALLGDPQCDGFQNKKWDLFVERSKAYSNCYPYDVPDYASLRSLVASSGTLEFNNESFNWTGVTQNGTSSACIRRSNNSFFSRLNWLTHSNFKYPALNVTMPNNEQFDKLYIWGVHHPGTDKDQIFLYAQSSGRITVSTKRSQQAVIPNIGSRPRIRNIPSRISIYWTIVKPGDILLINSTGNLIAPRGYFKIRSGKSSIMRSDAPIGKCKSECITPNGSIPNDKPFQNVNRITYGACPRYVKQSTLKLATGMRNVPEKQTRGIFGAIAGFIENGWEGMMDGWYGFRHQNSEGRGQAADLKSTQAAIDQINGKLNRLIGKTNEKFHQIEKEFSEVEGRIQDLEKYVEDTKIDLWSYNAELLVALENQHTIDLTDSEMNKLFEKTKKQLRENAEDMGNGCFKIYHKCDNACIGSIRNGTYDHDVYRDEALNNRFQIKGVELKSGYKDWILWISFAISCFLLCVALLGFIMWACQKGNIRCNICI

SEQ ID NO: 10468 - protein, 566 aa, Artificial Sequence; identical to SEQ ID NO: 9994
  derived and/or modified protein sequence (wt) from hemagglutinin__InfluenzaA__AGV99037

SEQ ID NO: 10469 - protein, 566 aa, Artificial Sequence
  derived and/or modified protein sequence (wt) from hemagglutinin__InfluenzaA__AGV99049
MKTIIALSYILCLVFAQKLPGNDNSTATLCLGHHAVPNGTVVKTITNDRIEVTNATELVQNSSIGEICDSPHQILDGENCTLIDALLGDPQCDGFQNKKWDLFVERSKAYSNCYPYDVPDYASLRSLVASSGTLEFNNESFNWTGVTQNGTSSACIRRSNNSFFSRLNWLTHLNFKYPALNVTMPNNEQFDKLYIWGVHHPGTDKDQIFLYAQSSGRITVSTKRSQQAVIPNIGSRPRIRNIPSRISIYWTIVKPGDILLINSTGNLIAPRGYFKIRSGKSSIMRSDAPIGKCKSECITPNGSIPNDKPFQNVNRITYGACPRYVKQSTLKLATGMRNVPEKQTRGIFGAIAGFIENGWEGMVDGWYGFRHQNSEGRGQAADLKSTQAAIDQINGKLNRLIGKTNGKFHQIEKEFSEVEGRIQDLEKYVEDTKIDLWSYNAELLVALENQHTIDLTDSEMNKLFEKTKKQLRENAEDMGNGCFKIYHKCDNACIGSIRNGTYDHDVYRDEALNNRFQIKGVELKSGYKDWILWISFAISCFLLCVVLLGFIMWACQKGNIRCNICI

SEQ ID NO: 10470 - protein, 566 aa, Artificial Sequence
  derived and/or modified protein sequence (wt) from hemagglutinin__InfluenzaA__AGV99073
MKTIIALSYILCLVFAQKIPGNDNSTATLCLGHHAVPNGTIVKTITNDRIEVTNATELVQNSSIGEICDSPHQILDGENCTLIDALLGDPQCDGFQNKKWDLFVERSKAYSNCYPYDVPDYASLRSLVASSGTLEFNNESFNWTGVTQNGTSSACIRGSNSSFFSRLNWLTHLNFKYPALNVTMPNNEQFDKLYIWGVHHPGTDKDQIFLYAQSSGRITVSTKRSQQAVIPNIGSRPRIRNIPSRISIYWTIVKPGDILLINSTGNLIAPRGYFKIRSGKSSIMRSDAPIGKCKSECITPNGSIPNDKPFQNVNRITYGACPRYVKQSTLKLATGMRNVPEKQTRGIFGAIAGFIENGWEGMVDGWYGFRHQNSEGRGQAADLKSTQAAIDQINGKLNRLIGKTNEKFHQIEKEFSEVEGRIQDLEKYVEDTKIDLWSYNAELLVALENQHTIDLTDSEMNKLFEKTKKQLRENAEDMGNGCFKIYHKCDNACIGSIRNGTYDHDVYRDEALNNRFQIKGVELKPGYKDWILWISFAISCFLLCVALLGFIMWACQKGNIRCNICI

SEQ ID NO: 10471 - protein, 566 aa, Artificial Sequence; identical to SEQ ID NO: 9858
  derived and/or modified protein sequence (wt) from hemagglutinin__InfluenzaA__AGV99085

SEQ ID NO: 10472 - protein, 566 aa, Artificial Sequence
  derived and/or modified protein sequence (wt) from hemagglutinin__InfluenzaA__AGV99097
MKTIIALSYILCLVFAQKLPGNDNSTATLCLGHHAVPNGTIVKTITNDRIEVTNATELVQNSSIGEICDSPHQILDGENCTLIDALLGDPQCDGFQNKKWDLFVERSKAYSNCYPYDVPDYASLRSLVASSGTLEFNNESFNWTGVTQNGTSSACIRRSNSSFFSRLNWLTHLNFKYPALNVTMPNNEQFDKLYIWGVHHPGTDKDQIFLYAQSSGRITVSTKRSQQAVIPNIGSRPRIRNIPSRISIYWTIVKPGDILLINSTGNLIAPRGYFKIRSGKSSIMRSDAPIGKCKSECITPNGSIPNDKPFQNVNRITYGACPRYVKQSTLKLATGMRNVPEKQTRGIFGAIAGFIENGWEGMVDGWYGFRHQNSEGRGQAADLKSTQAAIDQINGKLNRLIGKTNEKFHQIEKEFSEVEGRIQDLEKYVEDTKIDLWSYNAEILVALENQHTIDLTDSEMNKLFEKTKKQLRENAEDMGNGCFKIYHKCDNACIGSIRNGTYDHDVYRDEALNNRFQIKGVELKSGYKDWILWISFAISCFLLCVALLGFIMWACQKGNIRCNICI

SEQ ID NO: 10473 - protein, 566 aa, Artificial Sequence
  derived and/or modified protein sequence (wt) from hemagglutinin__InfluenzaA__AGV99121
MKTIIALSYILCLVFAQKLPGNDNSTATLCLGHHAVPNGTIVKTITNDRIEVTNATELVQNSSIGEICDSPHQILDGENCTLIDALLGDPQCDDFQNKKWDLFVERSKAYSNCYPYDVPDYASLRSLVASSGTLEFNNESFNWAGVTQNGTSSACIRGSNSSFFSRLNWLTHLNFKYPALNVTMPNNEQFDKLYIWGVHHPGTDKDQIFLYAQSSGRITVSTKRSQQAVIPNIGSRPRIRNIPSRISIYWTIVKPGDILLINSTGNLIAPRGYFKIRSGKSSIMRSDAPIGKCKSECITPNGSIPNDKPFQNVNRITYGACPRYVKQSTLKLATGMRNVPEKQTRGIFGAIAGFIENGWEGMVDGWYGFRHQNSEGRGQAADLKSTQAAIDQINGKLNRLIGKTNEKFHQIEKEFSEVEGRIQDLEKYVEDTKIDLWSYNAELLVALENQHTIDLTDSEMNKLFEKTKKQLRENAEDMGNGCFKIYHKCDNACIGSIRNGTYDHDVYRDEALNNRFQIKGVELKSGYKDWILWISFAISCFLLCVALLGFIMWACQKGNIRCNICI

SEQ ID NO: 10474 - protein, 566 aa, Artificial Sequence; identical to SEQ ID NO: 10473
  derived and/or modified protein sequence (wt) from hemagglutinin__InfluenzaA__AGV99133

SEQ ID NO: 10475 - protein, 566 aa, Artificial Sequence; identical to SEQ ID NO: 10467
  derived and/or modified protein sequence (wt) from hemagglutinin__InfluenzaA__AGV99145

SEQ ID NO: 10476 - protein, 566 aa, Artificial Sequence
  derived and/or modified protein sequence (wt) from hemagglutinin__InfluenzaA__AGV99157
MKTIIALSYILCLVFAQKLPGNDNSTATLCLGHHAVPNGTIVKTITNDRIEVTNATELVQNSSIGEICDSPHQILDGENCTLIDALLGDPQCDGFQNKKWDLFIERSKAYSNCYPYDVPDYASLRSLVASSGTLEFNNESFNWTGVTQNGTSSACIRRSNNSFFSRLNWLTHSNFKYPALNVTMPNNEQFDKLYIWGVHHPGTDKDQIFLYAQSSGRITVSTKRSQQAVIPNIGSRPRIRNIPSRISIYWTIVKPGDILLINSTGNLIAPRGYFKIRSGKSSIMRSDTPIGKCKSECITPNGSIPNDKPFQNVNRITYGACPRYVKQSTLKLATGMRNVPEKQTRGIFGAIAGFIENGWEGMMDGWYGFRHQNSEGRGQAADLKSTQAAIDQINGKLNRLIGKTNEKFHQIEKEFSEVEGRIQDLEKYVEDTKIDLWSYNAELLVALENQHTIDLTDSEMNKLFEKTKKQLRENAEDMGNGCFKIYHKCDNACIGSIRNGTYDHDVYRDEALNNRFQIKGVELKSGYKDWILWISFAISCFLLCVALLGFIMWACQKGNIRCNICI

SEQ ID NO: 10477 - protein, 566 aa, Artificial Sequence; identical to SEQ ID NO: 9994
  derived and/or modified protein sequence (wt) from hemagglutinin__InfluenzaA__AGV99169

SEQ ID NO: 10478 - protein, 566 aa, Artificial Sequence; identical to SEQ ID NO: 10467
  derived and/or modified protein sequence (wt) from hemagglutinin__InfluenzaA__AGV99181

SEQ ID NO: 10479 - protein, 566 aa, Artificial Sequence
  derived and/or modified protein sequence (wt) from hemagglutinin__InfluenzaA__AGV99193
MKTIIALSYILCLVFAQKLPGNDNSTATLCLGHHAVPNGTIVKTITNDRIEVTNATELVQNSSIGEICDSPHQILDGENCTLIDALLGDPQCDGFQNKKWDLFVERSKAYSNCYPYDVPDYASLRSLVASSGTLEFNNESFNWTGVTQNGTSSACIRRSNNSFFSRLNWLTHSNFKYPALNVTMPNNEQFDKLYIWGVHHPGTDKDQIFLYAQSSGRITVSTKRSQQAVIPNIGSRPRIRNIPSRISIYWTIVKPGDILLINSTGNLIAPRGYFKIRSGKSSIMRSDTPIGKCKSECITPNGSIPNDKPFQNVNRITYGACPRYVKQSTLKLATGMRNVPEKQTRGIFGAIAGFIENGWEGMMDGWYGFRHQNSEGRGQAADLKSTQAAIDQINGKLNRLIGKTNEKFHQIEKEFSEVEGRIQDLEKYVEDTKIDLWSYNAELLVALENQHTIDLTDSEMNKLFEKTKKQLRENAEDMGNGCFKIYHKCDNACIGSIRNGTYDHDVYRDEALNNRFQIKGVELKSGYKDWILWISFAISCFLLCVALLGFIMWACQKGNIRCNICI

SEQ ID NO: 10480 - protein, 566 aa, Artificial Sequence; identical to SEQ ID NO: 9868
  derived and/or modified protein sequence (wt) from hemagglutinin__InfluenzaA__AGV99956

SEQ ID NO: 10481 - protein, 566 aa, Artificial Sequence
  derived and/or modified protein sequence (wt) from hemagglutinin__InfluenzaA__AGV99986
MKTIIALSYILCLVFAQKLPGNDNSTATLCLGHHAVPNGTIVKTITNDRIEVTNATELVQNSSIGEICDSPHQILDGENCTLIDALLGDPQCDGFQNKKWDLFVERSKAYSNCYPYDVPDYASLRSLIASSGTLEFNNESFNWTGVTQNGTSSACIRRSNNSFFSRLNWLTHSNFKYPALNVTMPNNEQFDKLYIWGVHHPGTDKDQIFLYAQSSGRITVSTKRSQQAVIPNIGSRPRIRNIPSRISIYWTIVKPGDILLINSTGNLIAPRGYFKIRSGKSSIMRSDAPIGKCKSECITPNGSIPNDKPFQNVNRITYGACPRYVKQSTLKLATGMRNVPEKQTRGIFGAIAGFIENGWEGMMDGWYGFRHQNSEGRGQAADLKSTQAAIDQINGKLNRLIGKTNEKFHQIEKEFSEVEGRIQDLEKYVEDTKIDLWSYNAELLVALENQHTIDLTDSEMNKLFEKTKKQLRENAEDMGNGCFKIYHKCDNACIGSIRNGTYDHDVYRDEALNNRFQIKGVELKSGYKDWILWISFAISCFLLCVALLGFIMWACQKGNIRCNICI

SEQ ID NO: 10482 - protein, 566 aa, Artificial Sequence
  derived and/or modified protein sequence (wt) from hemagglutinin__InfluenzaA__AGW00065
MKTIIALSYILCLVFAQKLPGNDNSTATLCLGHHAVPNGTIVKTITNDRIEVTNATELVQNSSIGEICDSPHQILDGENCTLIDALLGDPQCDGFQNKKWDLFVERSKAYSNCYPYDVPDYTSLRSLVASSGTLEFNNESFNWTGVTQNGTSSACIRRSNSSFFSRLNWLTHLNFKYPALNVTMPNNEQFDKLYIWGVHHPGTDKDQIFLYAQSSGRITVSTKRSQQAVIPNIGSRPRIRNIPSRISIYWTIVKPGDILLINSTGNLIAPRGYFKIRSGKSSIMRSDAPIGKCKSECITPNGSIPNDKPFQNVNRITYGACPRYVKQSTLKLATGMRNVPEKQTRGIFGAIAGFIENGWEGMVDGWYGFRHQNSEGRGQAADLKSTQAAIDQINGKLNRLIGKTNEKFHQIEKEFSEVEGRIQDLEKYVEDTKIDLWSYNAELLVALENQHTIDLTDSEMNKLFEKTKKQLRENAEDMGNGCFKIYHKCDNACIGSIRNGTYDHDVYRDEALNNRFQIKGVELKSGYKDWILWISFAISCFLLCVALLGFIMWACQKGNIRCNICI

SEQ ID NO: 10483 - protein, 566 aa, Artificial Sequence; identical to SEQ ID NO: 9994
  derived and/or modified protein sequence (wt) from hemagglutinin__InfluenzaA__AGW00077

SEQ ID NO: 10484 - protein, 566 aa, Artificial Sequence; identical to SEQ ID NO: 9858
  derived and/or modified protein sequence (wt) from hemagglutinin__InfluenzaA__AGW00089

SEQ ID NO: 10485 - protein, 566 aa, Artificial Sequence; identical to SEQ ID NO: 9994
  derived and/or modified protein sequence (wt) from hemagglutinin__InfluenzaA__AGW00101

SEQ ID NO: 10486 - protein, 566 aa, Artificial Sequence
  derived and/or modified protein sequence (wt) from hemagglutinin__InfluenzaA__AGW00113
MKTIIALSYILCLVFAQKLPGNDNSTATLCLGHHAVPNGTIVKTITNDRIEVTNATELVQNSSIGEICDSPHQILDGENCTLIDALLGDPQCDGFQNKKWDLFVERSKAYSNCYPYDVPDYASLRSLVASSGTLEFNNESFNWAGVTQNGTSSACIRGSNSSFFSRLNWLTHLNFKYPALNVTMPNNEQFDKLYIWGVHHPGTDKDQTFLYAQSSGRITVSTKRSQQAVIPNIGSRPRIRNIPSRISIYWTIVKPGDILLINSTGNLIAPRGYFKIRSGKSSIMRSDAPIGKCKSECITPNGSIPNDKPFQNVNRITYGACPRYVKQSTLKLATGMRNVPEKQTRGIFGAIAGFIENGWEGMVDGWYGFRHQNSEGRGQAADLKSTQAAIDQINGKLNRLIGKTNEKFHQIEKEFSEVEGRIQDLEKYVEDTKIDLWSYNAELLVALENQHTIDLTDSEMNKLFEKTKKQLRENAEDMGNGCFKIYHKCDNACIGSIRNGTYDHDVYRDEALNNRFQIKGVELKSGYKDWILWISFAISCFLLCVALLGFIMWACQKGNIRCNICI

SEQ ID NO: 10487 - protein, 566 aa, Artificial Sequence; identical to SEQ ID NO: 9994
  derived and/or modified protein sequence (wt) from hemagglutinin__InfluenzaA__AGW00125

SEQ ID NO: 10488 - protein, 566 aa, Artificial Sequence; identical to SEQ ID NO: 9994
  derived and/or modified protein sequence (wt) from hemagglutinin__InfluenzaA__AGW00137

SEQ ID NO: 10489 - protein, 566 aa, Artificial Sequence; identical to SEQ ID NO: 9994
  derived and/or modified protein sequence (wt) from hemagglutinin__InfluenzaA__AGW00149

SEQ ID NO: 10490 - protein, 566 aa, Artificial Sequence; identical to SEQ ID NO: 9994
  derived and/or modified protein sequence (wt) from hemagglutinin__InfluenzaA__AGW00161

SEQ ID NO: 10491 - protein, 566 aa, Artificial Sequence; identical to SEQ ID NO: 9994
  derived and/or modified protein sequence (wt) from hemagglutinin__InfluenzaA__AGW00173

SEQ ID NO: 10492 - protein, 566 aa, Artificial Sequence
  derived and/or modified protein sequence (wt) from hemagglutinin__InfluenzaA__AGW00185
MKTIIALSYILCLVFAQKLPGNDNSTATLCLGHHAVPNGTIVKTITNDRIEVTNATELVQNSSIGEICDSPHQILDGENCTLIDALLGDPQCDGFQNKKWDLFIERSKAYSNCYPYDVPDYASLRSLVASSGTLEFNNESFNWTGVTQNGTSSACIRRSNNSFFSRLNWLTHSNFKYPALNVTMPNNEQFDKLYIWGVHHPGTDKDQIFLYAQSSGRITVSTKRSQQAVIPNIGSRPRIRNIPSRISIYWTIVKPGDILLINSTGNLIAPRGYFKIRSGKSSIMRSDAPIGKCKSECITPNGSIPNDKPFQNVNRITYGACPRYVKQSTLKLATGMRNVPEKQTRGIFGAIAGFIENGWEGMMDGWYGFRHQNSEGRGQAADLKSTQAAIDQINGKLNRLIGKTNEKFHQIEKEFSEVEGRIQDLEKYVEDTKIDLWSYNAELLVALENQHTIDLTDSEMNKLFEKTKKQLRENAEDMGNGCFKIYHKCDNACIGSIRNGTYDHDVYRDEALNNRFQIKGVELKSGYKDWILWISFAISCFLLCVALLGFIMWACQKGNIRCNICI

SEQ ID NO: 10493 - protein, 566 aa, Artificial Sequence; identical to SEQ ID NO: 9994
  derived and/or modified protein sequence (wt) from hemagglutinin__InfluenzaA__AGW00709

SEQ ID NO: 10494 - protein, 566 aa, Artificial Sequence; identical to SEQ ID NO: 9994
  derived and/or modified protein sequence (wt) from hemagglutinin__InfluenzaA__AGW00721

SEQ ID NO: 10495 - protein, 566 aa, Artificial Sequence; identical to SEQ ID NO: 9994
  derived and/or modified protein sequence (wt) from hemagglutinin__InfluenzaA__AGW00733

SEQ ID NO: 10496 - protein, 566 aa, Artificial Sequence; identical to SEQ ID NO: 9994
  derived and/or modified protein sequence (wt) from hemagglutinin__InfluenzaA__AGW00745

SEQ ID NO: 10497 - protein, 566 aa, Artificial Sequence
  derived and/or modified protein sequence (wt) from hemagglutinin__InfluenzaA__AGW00757
MKTIIALSYILCLVFAQKLPGNDNSTATLCLGHHAVPNGTIVKTITNDRIEVTNATELVQNSSIGEICDSPHQILDGENCTLIDALLGDPQCDGFQNKKWDLFVERSKAYSNCYPYDVPDYASLRSLVASSGTLEFNNESFNWAGVTQNGTSSACIRGSNSSFFSRLNWLTHLNFKYPALNVTMPNNEQFDKLYIWGVHHPGTDKDQIFLYAQSSGRITVSTKRSQQAVIPNIGSRPRIRNIPSRISIYWTIVKPGDILLINSTGNLIAPRGYFKIRSGKSSIMRSDAPIGKCKSECITPNGSIPNDKPFQNLNRITYGACPRYVKQSTLKLATGMRNVPEKQTRGIFGAIAGFIENGWEGMVDGWYGFRHQNSEGRGQAADLKSTQAAIDQINGKLNRLIGKTNEKFHQIEKEFSEVEGRIQDLEKYVEDTKIDLWSYNAELLVALENQHTIDLTDSEMNKLFEKTKKQLRENAEDMGNGCFKIYHKCDNACIGSIRNGTYDHDVYRDEALNNRFQIKGVELKSGYKDWILWISFAISCFLLCVALLGFIMWACQKGNIRCNICI

SEQ ID NO: 10498 - protein, 566 aa, Artificial Sequence; identical to SEQ ID NO: 9997
  derived and/or modified protein sequence (wt) from hemagglutinin__InfluenzaA__AGW00769

SEQ ID NO: 10499 - protein, 566 aa, Artificial Sequence; identical to SEQ ID NO: 9883
  derived and/or modified protein sequence (wt) from hemagglutinin__InfluenzaA__AGW00781

SEQ ID NO: 10500 - protein, 566 aa, Artificial Sequence; identical to SEQ ID NO: 10482
  derived and/or modified protein sequence (wt) from hemagglutinin__InfluenzaA__AGW00793

SEQ ID NO: 10501 - protein, 566 aa, Artificial Sequence; identical to SEQ ID NO: 9994
  derived and/or modified protein sequence (wt) from hemagglutinin__InfluenzaA__AGW00805

SEQ ID NO: 10502 - protein, 566 aa, Artificial Sequence; identical to SEQ ID NO: 9835
  derived and/or modified protein sequence (wt) from hemagglutinin__InfluenzaA__AGW00817

SEQ ID NO: 10503 - protein, 566 aa, Artificial Sequence; identical to SEQ ID NO: 10481
  derived and/or modified protein sequence (wt) from hemagglutinin__InfluenzaA__AGW00829

SEQ ID NO: 10504 - protein, 566 aa, Artificial Sequence
  derived and/or modified protein sequence (wt) from hemagglutinin__InfluenzaA__AGW00841
MKTIIALSYILCLVFAQKLPGNDNSTATLCLGHHAVPNGTIVKTITNGRIEVTNATELVQNSSIGEICDSPHQILDGENCTLIDALLGDPQCDGFQNKKWDLFVERSKAYSNCYPYDVPDYASLRSLVASSGTLEFNNESFNWAGVTQNGTSSACIRGSNSSFFSRLNWLTHLNFKYPALNVTMPNNEQFDKLYIWGVHHPGTDKDQIFLYAQSSGRITVSTKRSQQAVIPNIGSRPRIRNIPSRISIYWTIVKPGDILLINSTGNLIAPRGYFKIRSGKSSIMRSDAPIGKCKSECITPNGSIPNDKPFQNVNRITYGACPRYVKQSTLKLATGMRNVPEKQTRGIFGAIAGFIENGWEGMVDGWYGFRHQNSEGRGQAADLKSTQAAIDQINGKLNRLIGKTNEKFHQIEKEFSEVEGRIQDLEKYVEDTKIDLWSYNAELLVALENQHTIDLTDSEMNKLFEKTKKQLRENAEDMGNGCFKIYHKCDNACIGSIRNGTYDHDVYRDEALNNRFQIKGVELKSGYKDWILWISFAISCFLLCVALLGFIMWACQKGNIRCNICI

SEQ ID NO: 10505 - protein, 566 aa, Artificial Sequence
  derived and/or modified protein sequence (wt) from hemagglutinin__InfluenzaA__AGW00853
MKTIIALSYILCLVFAQKLPGNDNSTATLCLGHHAVPNGTIVKTITNDRIEVTNATELVQNSSIGEICDSPHQILDGENCTLIDALLGDPQCDGFQNKKWDLFVERSKAYSNCYPYDVPDYASLRSLVASSGTLEFNNESFNWTGVTQNGTSSACIRRSNSSFFSRLNWLTHLNFKYPALNVTMPNNEQFDKLYIWGVHHPGTDKDQIFLYAQPSGRITVSTKRSQQAVIPNIGSRPRIRNIPSRISIYWTIVKPGDILLINSTGNLIAPRGYFKIRSGKSSIMRSDAPIGKCKSECITPNGSIPNDKPFQNVNRITYGACPRYVKQSTLKLATGMRNVPEKQTRGIFGAIAGFIENGWEGMVDGWYGFRHQNSEGRGQAADLKSTQAAIDQINGKLNRLIGKTNEKFHQIEKEFSEVEGRIQDLEKYVEDTKIDLWSYNAELLVALENQHTIDLTDSEMNKLFEKTKKQLRENAEDMGNGCFKIYHKCDNACIGSIRNGTYDHNVYRDEALNNRFQIKGVELKSGYKDWILWISFAISCFLLCVALLGFIMWACQKGNIRCNICI

SEQ ID NO: 10506 - protein, 566 aa, Artificial Sequence; identical to SEQ ID NO: 9858
  derived and/or modified protein sequence (wt) from hemagglutinin__InfluenzaA__AGW00865

SEQ ID NO: 10507 - protein, 566 aa, Artificial Sequence
  derived and/or modified protein sequence (wt) from hemagglutinin__InfluenzaA__AGW00877
MKTIIALSYILCLVFAQELPGNDDSTATLCLGHHAVPNGTIVKTITNDQIEVTNATELVQSSSTGEICNSPHQILDGENCTLIDALLGDPQCDGFQNKKWDLFVERSKAHSNCYPYDVPDYASLRSLVASSGTLEFNNESFNWTGVTQNGTSSACIRRSNNSFFSRLNWLTHLNFKYPALNVTMPNNEQFDKLYIWGVHHPGTDKDQIFLYAQASGRITVSTKRSQQAVIPNIGFRPRVRNIPSRVSIYWTIVKPGDILLINSTGNLIAPRGYFKIRSGKSSIMRSDAPIGKCNSACITPNGSIPNDKPFQNVNRITYGACPRYVKQNTLKLATGMRNVPEKQTRGIFGAIAGFIENGWEGMVDGWYGFRHQNSEGRGQAADLKSTQAAIDQINGKLNRLIGKTNEKFHQIEKEFSEVEGRIQDLEKYVEDTKIDLWSYNAELLVALENQHTIDLTDSEMNKLFEKTKKQLRENAEDMGNGCFKIYHKCDNACIGSIRNGTYDHDVYRDEALNNRFQIKGVELKSGYKDWILWISFAISCFLLCVALLGFIMWACQKGNIRCNICI

SEQ ID NO: 10508 - protein, 566 aa, Artificial Sequence
  derived and/or modified protein sequence (wt) from hemagglutinin__InfluenzaA__AGW00889
MKTIIALSYILCLVFAQKLPGNDNSTATLCLGHHAVPNGTIVKTITNDRIEVTNATELVQNSSIGEICDSPHQILDGENCTLIDALLGDPQCDGFQNKKWDLFVERSKAYSNCYPYDVPDYASLRSLVASSGTLEFNNESFNWTGVTQNGTSSACIRRSNSSFFSRLNWLTHLNFKYPALNVTMPNNEQFDKLYIWGVHHPGTDKDQIFLYAQSSGRITVSTKRSQQAVIPNIGSRPRIRNIPSRISIYWTIVKPGDILLINSTGNLIAPRGYFKIRSGKSSIMRSDAPIGKCKSECITPNGSIPNDKPFQNVNRITYGACPRYVKQSTLKLATGMRNVPEKQTRGIFGAIAGFIENGWEGMVDGWYGFRHQNSEGRGQAADLKSTQAAIDQINGKLNRLIGKTNEKFHQIEKEFSEVEGRIQDLEKYVEDTKIDLWSYNAELLVALENQHTIDLTDSEMNKLFEKTKKQLRENAEDMGNGCFKIYHKCDNACIGSIRNGTYDHNVYRDEALNNRFQIKGVELKSGYKDWVLWISFAISCFLLCVALLGFIMWACQKGNIRCNICI

SEQ ID NO: 10509 - protein, 566 aa, Artificial Sequence; identical to SEQ ID NO: 9858
  derived and/or modified protein sequence (wt) from hemagglutinin__InfluenzaA__AGW00901

SEQ ID NO: 10510 - protein, 566 aa, Artificial Sequence; identical to SEQ ID NO: 9858
  derived and/or modified protein sequence (wt) from hemagglutinin__InfluenzaA__AGW00913

SEQ ID NO: 10511 - protein, 566 aa, Artificial Sequence; identical to SEQ ID NO: 9994
  derived and/or modified protein sequence (wt) from hemagglutinin__InfluenzaA__AGW00931

SEQ ID NO: 10512 - protein, 566 aa, Artificial Sequence; identical to SEQ ID NO: 9994
  derived and/or modified protein sequence (wt) from hemagglutinin__InfluenzaA__AGW01244

SEQ ID NO: 10513 - protein, 566 aa, Artificial Sequence; identical to SEQ ID NO: 9868
  derived and/or modified protein sequence (wt) from hemagglutinin__InfluenzaA__AGW01256

SEQ ID NO: 10514 - protein, 566 aa, Artificial Sequence
  derived and/or modified protein sequence (wt) from hemagglutinin__InfluenzaA__AGW01295
MKTIIALSYILCLVFAQKLPGNDNSTATLCLGHHAVPNGTIVKTITNDRIEVTNATELVQNSSIGEICDSPHQILDGENCTLIDALLGDPQCDGFQNKKWDLFVERSKAYSNCYPYDVPDYASLRSLVASSGTLEFNNESFNWTGVTQNGTSSACIRRSNSSFFSRLNWLTHLNFKYPALNVTMPNNEQFDKLYIWGVHHPGTDKDQIFLYAQSSGRITVSTKRSQQAVIPNIGSRPRIRNIPSRISIYWTIVKPGDILLINSTGNLIAPRGYFKIRSGKSSIMRSDAPIGKCKSECITPNGSIPNDKPFQNVNRITYGACPRYVKQSTLKLATGMRNVPEKQTRGIFGAIAGFIENGWEGMVDGWYGFRHQNSEGRGQAADLKSTQAAIDQINGKLNRLIGKTNEKFHQIEKEFSEVEGRIQDLEKYVEDTKIDLWSYNAEILVALENQHTIDLTDSEMNKLFEKTKKQLRENAEDMGNGCFKIYHKCDNACIGSIRNGTYDHNVYRDEALNNRFQIKGVELKSGYKDWILWISFAISCFLLCVALLGFIMWACQKGNIRCNICI

SEQ ID NO: 10515 - protein, 566 aa, Artificial Sequence; identical to SEQ ID NO: 9858
  derived and/or modified protein sequence (wt) from hemagglutinin__InfluenzaA__AGW01307

SEQ ID NO: 10516 - protein, 566 aa, Artificial Sequence
  derived and/or modified protein sequence (wt) from hemagglutinin__InfluenzaA__AGW01319
MKTIIALSYILCLVFAQELPGNDDSTATLCLGHHAVPNGTIVKTITNDQIEVTNATELVQSSSTGEICNSPHQILDGENCTLIDALLGDPQCDGFQNKKWDLFVERSKAHSNCYPYDVPDYASLRSLVASSGTLEFNNESFNWTGVTQDGTSSACIRRSNNSFFSRLNWLTHLNFKYPALNVTMPNNEQFDKLYIWGVHHPGTDKDQIFLYAQASGRITVSTKRSQQAVIPNIGSRPRVRNIPSRVSIYWTIVKPGDILLINSTGNLIAPRGYFKIRSGKSSIMRSDAPIGKCNSACITPNGSIPNDKPFQNVNRITYGACPRYVKQNTLKLATGMRNVPEKQTRGIFGAIAGFIENGWEGMVDGWYGFRHQNSEGRGQAADLKSTQAAIDQINGKLNKLIGKTNEKFHQIEKEFSEVEGRIQDLEKYVEDTKIDLWSYNAELLVALENQHTIDLTDSEMNKLFEKTKKQLRENAEDMGNGCFKIYHKCDNACIGSIRNGTYDHDVYRDEALNNRFQIKGVELKSGYKDWILWISFAISCFLLCVALLGFIMWACQKGNIRCNICI

SEQ ID NO: 10517 - protein, 566 aa, Artificial Sequence
  derived and/or modified protein sequence (wt) from hemagglutinin__InfluenzaA__AGW01331
MKTIIALSYILCLVFAQKLPGNDNSTATLCLGHHAVPNGTIVKTITNDRIEVTNATELVQNSSIGEICDSPHQILDGENCTLIDALLGDPQCDGFQNKKWDLFVERSKAYSNCYPYDVPDYASLRSLVASSGTLEFNNESFNWAGVTQNGTSSACIRGSNSSFFSRLNWLTHLNFKYPALNVTMPNNEQFDKLYIWGVHHPGTDKDQIFLYAQSSGRITVSTKRSQQAVIPNIGSRPRIRNIPSRISIYWTIVKPGDILLINSTGNLIAPRGYFKIRSGKSSIMRSDAPIGKCKSECITPNGSIPNDKPFQNVNRITYGACPRYVKQSTLKLATGMRNVPEKQTRGIFGAIAGFIENGWEGMVDGWYGFRHQNSEGRGQAADLKSTQAAIDQINGKLNRLIGKTNEKFHQIEKEFSEVEGRIQDLEKYVEDTKIDLWSYNAELLVALENQHTIDLTDSEMNKLFEKTKKQLRENAEDMGNGCFKIYHKCDNACIGSIRNGTYEHDVYRDEALNNRFQIKGVELKSGYKDWILWISFAISCFLLCVALLGFIMWACQKGNIRCNICI

SEQ ID NO: 10518 - protein, 566 aa, Artificial Sequence; identical to SEQ ID NO: 9994
  derived and/or modified protein sequence (wt) from hemagglutinin__InfluenzaA__AGW01343

SEQ ID NO: 10519 - protein, 566 aa, Artificial Sequence; identical to SEQ ID NO: 9997
  derived and/or modified protein sequence (wt) from hemagglutinin__InfluenzaA__AGW01355

SEQ ID NO: 10520 - protein, 566 aa, Artificial Sequence; identical to SEQ ID NO: 9868
  derived and/or modified protein sequence (wt) from hemagglutinin__InfluenzaA__AGW01367

SEQ ID NO: 10521 - protein, 566 aa, Artificial Sequence; identical to SEQ ID NO: 9994
  derived and/or modified protein sequence (wt) from hemagglutinin__InfluenzaA__AGW01391

SEQ ID NO: 10522 - protein, 566 aa, Artificial Sequence
  derived and/or modified protein sequence (wt) from hemagglutinin__InfluenzaA__AGW01403
MKTIIALSYILCLIFAQKLPGNDNSTATLCLGHHAVPNGTIVKTITNDQIEVTNATELVQSSSTGEICNSPHQILDGENCTLIDALLGDPQCDGFQNKKWDLFVERSKAHSNCYPYDVPDYASLRSLVASSGTLEFNNESFNWTGVTQNGTSSACIRRSNNSFFSRLNWLTHLNFKYPALNVTMPNNEQFDKLYIWGVHHPGTDKDQIFLYAQAAGRITVSTKRSQQAVIPNIGSRPRVRNIPSRVSIYWTIVKPGDILLINSTGNLIAPRGYFKIRSGKSSIMRSDAPIGKCNSACITPNGSIPNDKPFQNVNRITYGACPRYVKQNTLKLATGMRNVPEKQTRGIFGAIAGFIENGWEGMVDGWYGFRHQNSEGRGQAADLKSTQAAIDQINGKLNRLIGKTNEKFHQIEKEFSEVEGRIQDLEKYVEDTKIDLWSYNAELLVALENQHTIDLTDSEMNKLFEKTKKQLRENAEDMGNGCFKIYHKCDNACIGSIRNGTYDHYVYRDEALNNRFQIKGVELKSGYKDWILWISFATSCFLLCVALLGFIMWACQKGNIRCNICI

SEQ ID NO: 10523 - protein, 566 aa, Artificial Sequence; identical to SEQ ID NO: 9858
  derived and/or modified protein sequence (wt) from hemagglutinin__InfluenzaA__AGW01415

SEQ ID NO: 10524 - protein, 566 aa, Artificial Sequence; identical to SEQ ID NO: 9858
  derived and/or modified protein sequence (wt) from hemagglutinin__InfluenzaA__AGW01427

SEQ ID NO: 10525 - protein, 566 aa, Artificial Sequence; identical to SEQ ID NO: 9858
  derived and/or modified protein sequence (wt) from hemagglutinin__InfluenzaA__AGW01439

SEQ ID NO: 10526 - protein, 566 aa, Artificial Sequence
  derived and/or modified protein sequence (wt) from hemagglutinin__InfluenzaA__AGW01451
MKTIIALSYILCLVFAQKLPGNDNSTATLCLGHHAVPNGTIVKTITNDRIEVTNATELVQNSSIGEICDSPHQILDGENCTLIDALLGDPQCDGFQNKKWDLFVERSKAYSNCYPYDVPDYASLRSLVASSGTLEFNNESFNWAGVTQNGTSSACIRGSNSSFFSRLNWLTHLNFKYPALNVTMPNNEQFDKLYIWGVHHPGTDKDQIFLYAQSSGRITVSTKRSQQAVIPNIGSRPRIRNIPSRISIYWTIVKPGDILLINSTGNLIAPRGYFKIRSGKSSIMRSDAPIGKCKSECITPNGSIPNDKPFQNVNRITYGACPRYVKQSTLKLATGMRNVPEKQTRGIFGAIAGFIENGWEGMMDGWYGFRHQNSEGRGQAADLKSTQAAIDQINGKLNRLIGKTNEKFHQIEKEFSEVEGRIQDLEKYVVDTKIDLWSYNAELLVALENQHTIDLTDSEMNKLFEKTKKQLRENAEDMGNGCFKIYHKCDNACIGSIRNGTYDHDVYRDEALNNRFQIKGVELKSGYKDWILWISFAISCFLLCVALLGFIMWACQKGNIRCNICI

SEQ ID NO: 10527 - protein, 566 aa, Artificial Sequence; identical to SEQ ID NO: 9994
  derived and/or modified protein sequence (wt) from hemagglutinin__InfluenzaA__AGW01463

SEQ ID NO: 10528 - protein, 566 aa, Artificial Sequence; identical to SEQ ID NO: 9994
  derived and/or modified protein sequence (wt) from hemagglutinin__InfluenzaA__AGW01475

SEQ ID NO: 10529 - protein, 566 aa, Artificial Sequence
  derived and/or modified protein sequence (wt) from hemagglutinin__InfluenzaA__AGW01487
MKTIIALSYILCLVFAQKLPGNDNSTATLCLGHHAVPNGTIVKTITNDRIEVTNATELVQNSSIGEICDSPHQILDGENCTLIDALLGDPQCDGFQNKKWDLFVERSKAYSNCYPYDVPDYASLRSLVASSGTLEFNNESFNWTGVTQNGTSSACIRRSNNSFFSRLNWLTHSNFKYPALNVTMPNNEQFDKLYIWGVHHPGTGKDQIFLYAQSSGRITVSTKRSQQAVIPNIGSRPRIRNIPSRISIYWTIVKPGDILLINSTGNLIAPRGYFKIRSGKSSIMRSDAPIGKCKSECITPNGSIPNDKPFQNVNRITYGACPRYVKQSTLKLATGMRNVPEKQTRGIFGAIAGFIENGWEGMMDGWYGFRHQNSEGRGQAADLKSTQAAIDQINGKLNRLIGKTNEKFHQIEKEFSEVEGRIQDLEKYVEDTKIDLWSYNAELLVALENQHTIDLTDSEMNKLFEKTKKQLRENAEDMGNGCFKIYHKCDNACIGSIRNGTYDHDVYRDEALNNRFQIKGVELKSGYKDWILWISFAISCFLLCVALLGFIMWACQKGNIRCNICI

SEQ ID NO: 10530 - protein, 566 aa, Artificial Sequence; identical to SEQ ID NO: 9858
  derived and/or modified protein sequence (wt) from hemagglutinin__InfluenzaA__AGW01499

SEQ ID NO: 10531 - protein, 566 aa, Artificial Sequence
  derived and/or modified protein sequence (wt) from hemagglutinin__InfluenzaA__AGW01511
MKTIIALSYILCLVFAQKLPGNDNSTATLCLGHHAVPNGTIVKTITNDRIEVTNATELVQNSSIGEICDSPHQILDGENCTLIDALLGDPQCDGFQNKKWDLFVERSKAYSNCYPYDVPDYASLRSLVASSGTLEFNNESFNWAGVTQNGTSSACIRGSNSSFFSRLNWLTHLNFKYPALNVTMPNNEQFDKLYIWGVHHPGTDKDQIFLYAQSSGRITVSTKRSQQAVIPNIGSRPRIRNIPSRISIYWTIVKPGDILLINSTGNLIAPRGYFKIRSGKSSIMRSDAPIGKCKSECITPNGSIPNDKPFQNVNRITYGACPRYVKQSTLKLATGMRNVPEKQTRGIFGAIAGFIENGWEGMVDGWYGFRHQNSEGRGQAADLKSTQAAIDQINGKLNRLIGKTNEKFHQIEKEFSEVEGRIQDLEKYVEDTKIDLWSYNAELLVALENQHTIDLTDSEMNKLFEKTKKQLRENAEDMGNGCFKIYHKCDNACIGSIRNGTYDHDVYRDEALNNRFQIKGVELKSGYKDWILWISFAISCFLLCAALLGFIMWACQKGNIRCNICI

SEQ ID NO: 10532 - protein, 566 aa, Artificial Sequence
  derived and/or modified protein sequence (wt) from hemagglutinin__InfluenzaA__AGW01535
MKTIIALSYILCLVFAQKLPGNDNSTATLCLGHHAVPNGTIVKTITNDRIEVTNATELVQNSSIGEICDSPHQILDGENCTLIDALLGDPQCDGFQNKKWDLFVERSKAYSNCYPYDVPDYASLRSLVASSGTLEFNKESFNWAGVTQNGTSSACIRGSNSSFFSRLNWLTHLNFKYPALNVTMPNNEQFDKLYIWGVHHPGTDKDQIFLYAQSSGRITVSTKRSQQAVIPNIGSRPRIRNIPSRISIYWTIVKPGDILLINSTGNLIAPRGYFKIRSGKSSIMRSDAPIGKCKSECITPNGSIPNDKPFQNVNRITYGACPRYVKQSTLKLATGMRNVPEKQTRGIFGAIAGFIENGWEGMVDGWYGFRHQNSEGRGQAADLKSTQAAIDQINGKLNRLIGKTNEKFHQIEKEFSEVEGRIQDLEKYVEDTKIDLWSYNAELLVALENQHTIDLTDSEMNKLFEKTKKQLRENAEDMGNGCFKIYHKCDNACIGSIRNGTYDHDVYRDEALNNRFQIKGVELKSGYKDWILWISFAISCFLLCVALLGFIMWACQKGNIRCNICI

SEQ ID NO: 10533 - protein, 566 aa, Artificial Sequence; identical to SEQ ID NO: 9858
  derived and/or modified protein sequence (wt) from hemagglutinin__InfluenzaA__AGW01547

SEQ ID NO: 10534 - protein, 566 aa, Artificial Sequence; identical to SEQ ID NO: 9994
  derived and/or modified protein sequence (wt) from hemagglutinin__InfluenzaA__AGW01559

SEQ ID NO: 10535 - protein, 566 aa, Artificial Sequence; identical to SEQ ID NO: 9994
  derived and/or modified protein sequence (wt) from hemagglutinin__InfluenzaA__AGW01571

SEQ ID NO: 10536 - protein, 566 aa, Artificial Sequence; identical to SEQ ID NO: 9994
  derived and/or modified protein sequence (wt) from hemagglutinin__InfluenzaA__AGW01583

SEQ ID NO: 10537 - protein, 566 aa, Artificial Sequence; identical to SEQ ID NO: 9994
  derived and/or modified protein sequence (wt) from hemagglutinin__InfluenzaA__AGW01595

SEQ ID NO: 10538 - protein, 566 aa, Artificial Sequence
  derived and/or modified protein sequence (wt) from hemagglutinin__InfluenzaA__AGW01607
MKTIIALSYILCLVLAQKLPGNDNSTATLCLGHHAVPNGTIVKTITNDRIEVTNATELVQNSSIGEICDSPHQILDGENCTLIDALLGDPQCDGFQNKKWDLFVERSKAYSNCYPYDVPDYASLRSLVASSGTLEFNNESFNWAGVTQNGTSSACIRGSNSSFFSRLNWLTHLNFKYPALNVTMPNNEQFDKLYIWGVHHPGTDKDQIFLYAQSSGRITVSTKRSQQAVIPNIGSRPRIRNIPSRISIYWTIVKPGDILLINSTGNLIAPRGYFKIRSGKSSIMRSDAPIGKCKSECITPNGSIPNDKPFQNVNRITYGACPRYVKQSTLKLATGMRNVPEKQTRGIFGAIAGFIENGWEGMVDGWYGFRHQNSEGRGQAADLKSTQAAIDQINGKLNRLIGKTNEKFHQIEKEFSEVEGRIQDLEKYVEDTKIDLWSYNAELLVALENQHTIDLTDSEMNKLFEKTKKQLRENAEDMGNGCFKIYHKCDNACIGSIRNGTYDHDVYRDEALNNRFQIKGVELKSGYKDWILWISFAISCFLLCVALLGFIMWACQKGNIRCNICI

SEQ ID NO: 10539 - protein, 566 aa, Artificial Sequence; identical to SEQ ID NO: 9997
  derived and/or modified protein sequence (wt) from hemagglutinin__InfluenzaA__AGW01619

SEQ ID NO: 10540 - protein, 566 aa, Artificial Sequence; identical to SEQ ID NO: 9994
  derived and/or modified protein sequence (wt) from hemagglutinin__InfluenzaA__AGW01631

SEQ ID NO: 10541 - protein, 566 aa, Artificial Sequence
  derived and/or modified protein sequence (wt) from hemagglutinin__InfluenzaA__AGW01643
MKTIIALSYILCLVFAQKLPGNDNSTATLCLGHHAVPNGTIVKTITNDRIEVTNATELVQNSSIGEICDSPHQILDGENCTLIDALLGDPQCDGFQNKKWDLFVERSKAYSNCYPYDVPDYASLRSLVASSGTLEFNNESFNWTGVTQNGTSSACIRGSNSSFFSRLNWLTHLNFKYPALNVTMPNNEQFDKLYIWGVHHPGTDKDQIFLYAQSSGRITVSTKRSQQAVIPNIGSRPRIRNIPSRISIYWTIVKPGDILLINSTGNLIAPRGYFKIRSGKSSIMRSDAPIGKCKSECITPNGSIPNDKPFQNVNRITYGACPRYVKQSTLKLATGMRNVPEKQTRGIFGAIAGFIENGWEGMMDGWYGFRHQNSEGRGQAADLKSTQAAIDQINGKLNRLIGKTNEKFHQIEKEFSEVEGRIQDLEKYVEDTKIDLWSYNAELLVALENQHTIDLTDSEMNKLFEKTKKQLRENAEDMGNGCFKIYHKCDNACIGSIRNGTYDHDVYRDEALNNRFQIKGVELKSGYKDWILWISFAISCFLLCVALLGFIMWACQKGNIRCNICI

SEQ ID NO: 10542 - protein, 566 aa, Artificial Sequence; identical to SEQ ID NO: 9994
  derived and/or modified protein sequence (wt) from hemagglutinin__InfluenzaA__AGW01655

SEQ ID NO: 10543 - protein, 566 aa, Artificial Sequence
  derived and/or modified protein sequence (wt) from hemagglutinin__InfluenzaA__AGW01667
MKTIIALSYILCLVFAQKLPGNDNSTATLCLGHHAVPNGTIVKTITNDRIEVTNATELVQNSSIGEICDSPHQILDGENCTLIDALLGDPQCDGFQNKKWDLFVERSKAYSNCYPYDVPDYASLRSLVASSGTLEFNNESFNWAGVTQNGTSSACIRGSNSSFFSRLNWLTHLNFKYPALNVTMPNNEQFDKLYIWGVHHPGTDKDQIFLYAQSSGRITVSTKRSQQAVIPNIGSRPRIRNIPSRISIYWTIVKPGDILLINSTGNLIAPRGYFKIRSGKSSIMRSDAPIGKCKSECITPNGSIPNDKPFQNVNRITYGACPRYVKQSTLKLATGMRNVPEKQTRGIFGAIAGFIENGWEGMVDGWYGFRHQNSEGRGQAADLKSTQAAIDQINGKLNRLIGKTNEKFHQIEKEFSEVEGRIQDLEKYVEDTKIDLWSYNAELLVALENQHTIDLTDSEMNKLFEKTKKQLRENAEDMGNGCFKIYHKCDNACIGSIRNETYDHDVYRDEALNNRFQIKGVELKSGYKDWILWISFAISCFLLCVALLGFIMWACQKGNIRCNICI

SEQ ID NO: 10544 - protein, 566 aa, Artificial Sequence; identical to SEQ ID NO: 9994
  derived and/or modified protein sequence (wt) from hemagglutinin__InfluenzaA__AGW01679

SEQ ID NO: 10545 - protein, 566 aa, Artificial Sequence
  derived and/or modified protein sequence (wt) from hemagglutinin__InfluenzaA__AGW01691
MKTIIALSYILCLVFAQKLPGNDNSTATLCLGHHAVPNGTIVKTITNDRIEVTNATELVQNSSIGEICDSPHQILDGENCTLIDALLGDPQCDGFQNKKWDLFVERSKAYSNCYPYDVPDYASLRSLVASSGTLEFNNESFNWTGVTQNGTSSACIRRSNSSFFSRLNWLTHLNFKYPALNVTMPNNEQFDKLYIWGVHHPGTDKDQIFLYAQSSGRITVSTKRSQQAVIPNIGSRPRIRNIPSRISIYWTIVKPGDILLINSTGNLIAPRGYFKIRSGKSSIMRSDAPIGKCKSECITPNGSIPNDKPFQNVNRITYGACPRYVKQSTLKLATGMRNVPEKQTRGIFGAIAGFIENGWEGMVDGWYGFRHQNSEGRGQAADLKSTQAAIDQINGKLNRLIGKTNEKFHQIEKEFSEVEGRIQDLEKYVEDTKIDLWSYNAELLVALENQHTIDLTDSEMNKLFEKTKKQLRENAEDMGNGCFKIYHKCDNACIGSIRNGTYDHDVYRDEALNNRFQIKGVELKSGYKDWILWISFAISCFLLCVALLGFVMWACQKGNIRCNICI

SEQ ID NO: 10546 - protein, 566 aa, Artificial Sequence; identical to SEQ ID NO: 9858
  derived and/or modified protein sequence (wt) from hemagglutinin__InfluenzaA__AGW01701

SEQ ID NO: 10547 - protein, 566 aa, Artificial Sequence; identical to SEQ ID NO: 9858
  derived and/or modified protein sequence (wt) from hemagglutinin__InfluenzaA__AGW01713

SEQ ID NO: 10548 - protein, 566 aa, Artificial Sequence
  derived and/or modified protein sequence (wt) from hemagglutinin__InfluenzaA__AGW01725
MKTIIALSYILCLVFAQKLPGNDNSTATLCLGHHAVPNGTIVKTITNDRIEVTNATELVQNSSIGEICDSPHQILDGENCTLIDALLGDPQCDGFQNKKWDLFVERSKAYSNCYPYDVPDYASLRSLVASSGTLEFNNESFNWTGVTQNGTSSACIRRSNSSFFSRLNWLTHLNFKYPALNVTMPNNEQFDKLYIWGVHHPGTDKDQIFLYAQSSGRITVSTKRSQQAVIPNIGSRPRIRNIPSRISIYWTIVKPGDILLINSTGNLIAPRGYFKIRSGKSSIMRSDAPIGKCKSECITPNGSIPNDKPFQNVNRITYGACPRYVKQSTLKLATGMRNVPEKQTRGIFGAIAGFIENGWEGMVDGWYGFRHQNSEGRGQAADLKSTQAAIDQINGKLNRLIGKTNEKFHQIEKEFSEVEGRIQDLEKYVEDTKIDLWSYNAELLVALENQHTIDLTDSEMNKLFEKTKKQLRENAEDMGNGCFKIYHKCDNACIGSIRNGTYDHNVYRDEALNNRFQIKGVELKSGYKDWILWISFAISCFLICVALLGFIMWACQKGNIRCNICI

SEQ ID NO: 10549 - protein, 566 aa, Artificial Sequence; identical to SEQ ID NO: 9858
  derived and/or modified protein sequence (wt) from hemagglutinin__InfluenzaA__AGW01737

SEQ ID NO: 10550 - protein, 566 aa, Artificial Sequence; identical to SEQ ID NO: 9994
  derived and/or modified protein sequence (wt) from hemagglutinin__InfluenzaA__AGW01749

SEQ ID NO: 10551 - protein, 566 aa, Artificial Sequence; identical to SEQ ID NO: 9994
  derived and/or modified protein sequence (wt) from hemagglutinin__InfluenzaA__AGW01761

SEQ ID NO: 10552 - protein, 566 aa, Artificial Sequence; identical to SEQ ID NO: 9858
  derived and/or modified protein sequence (wt) from hemagglutinin__InfluenzaA__AGW01773

SEQ ID NO: 10553 - protein, 566 aa, Artificial Sequence; identical to SEQ ID NO: 9994
  derived and/or modified protein sequence (wt) from hemagglutinin__InfluenzaA__AGW01785

SEQ ID NO: 10554 - protein, 566 aa, Artificial Sequence; identical to SEQ ID NO: 9858
  derived and/or modified protein sequence (wt) from hemagglutinin__InfluenzaA__AGW01797

SEQ ID NO: 10555 - protein, 566 aa, Artificial Sequence; identical to SEQ ID NO: 9994
  derived and/or modified protein sequence (wt) from hemagglutinin__InfluenzaA__AGW01809

SEQ ID NO: 10556 - protein, 566 aa, Artificial Sequence; identical to SEQ ID NO: 9994
  derived and/or modified protein sequence (wt) from hemagglutinin__InfluenzaA__AGW01821

SEQ ID NO: 10557 - protein, 566 aa, Artificial Sequence; identical to SEQ ID NO: 9993
  derived and/or modified protein sequence (wt) from hemagglutinin__InfluenzaA__AGW01833

SEQ ID NO: 10558 - protein, 566 aa, Artificial Sequence
  derived and/or modified protein sequence (wt) from hemagglutinin__InfluenzaA__AGW01845
MKTIIALSYILCLVFAQKLPGNDNSTATLCLGHHAVPNGTIVKTITNDRIEVTNATELVQNSSIGEICDSPHQILDGENCTLIDALLGDPQCDGFQNKKWDLFVERSKAYSNCYPYDVPDYASLRSLVASSGTLEFTNESFNWTGVTQNGTSSACIRRSNSSFFSRLNWLTHLNFKYPALNVTMPNNEQFDKLYIWGVHHPGTDKDQIFLYAQSSGRITVSTKRSQQAVIPNIGSRPRIRNIPSRISIYWTIVKPGDILLINSTGNLIAPRGYFKIRSGKSSIMRSDAPIGKCKSECITPNGSIPNDKPFQNVNRITYGACPRYVKQSTLKLATGMRNVPEKQTRGIFGAIAGFIENGWEGMVDGWYGFRHQNSEGRGQAADLKSTQAAIDQINGKLNRLIGKTNEKFHQIEKEFSEVEGRIQDLEKYVEDTKIDLWSYNAELLVALENQHTIDLTDSEMNKLFEKTKKQLRENAEDMGNGCFKIYHKCDNACIGSIRNGTYDHNVYRDEALNNRFQIKGVELKSGYKDWILWISFAISCFLLCVALLGFIMWACQKGNIRCNICI

SEQ ID NO: 10559 - protein, 566 aa, Artificial Sequence; identical to SEQ ID NO: 9994
  derived and/or modified protein sequence (wt) from hemagglutinin__InfluenzaA__AGW01857

SEQ ID NO: 10560 - protein, 566 aa, Artificial Sequence; identical to SEQ ID NO: 9994
  derived and/or modified protein sequence (wt) from hemagglutinin__InfluenzaA__AGW01869

SEQ ID NO: 10561 - protein, 566 aa, Artificial Sequence; identical to SEQ ID NO: 10545
  derived and/or modified protein sequence (wt) from hemagglutinin__InfluenzaA__AGW01881

SEQ ID NO: 10562 - protein, 566 aa, Artificial Sequence; identical to SEQ ID NO: 9868
  derived and/or modified protein sequence (wt) from hemagglutinin__InfluenzaA__AGW01893

SEQ ID NO: 10563 - protein, 566 aa, Artificial Sequence; identical to SEQ ID NO: 9883
  derived and/or modified protein sequence (wt) from hemagglutinin__InfluenzaA__AGW01905

SEQ ID NO: 10564 - protein, 566 aa, Artificial Sequence; identical to SEQ ID NO: 9994
  derived and/or modified protein sequence (wt) from hemagglutinin__InfluenzaA__AGW01917

SEQ ID NO: 10565 - protein, 566 aa, Artificial Sequence; identical to SEQ ID NO: 9858
  derived and/or modified protein sequence (wt) from hemagglutinin__InfluenzaA__AGW01929

SEQ ID NO: 10566 - protein, 566 aa, Artificial Sequence; identical to SEQ ID NO: 9994
  derived and/or modified protein sequence (wt) from hemagglutinin__InfluenzaA__AGW01941

SEQ ID NO: 10567 - protein, 566 aa, Artificial Sequence; identical to SEQ ID NO: 9858
  derived and/or modified protein sequence (wt) from hemagglutinin__InfluenzaA__AGW01953

SEQ ID NO: 10568 - protein, 566 aa, Artificial Sequence
  derived and/or modified protein sequence (wt) from hemagglutinin__InfluenzaA__AGW01965
MKTIIALSYILCLVFAQELPGNDDSMATLCLGHHAVPNGTIVKTITNDQIEVTNATELVQSSSTGEICNSPHQILDGENCTLIDALLGDPQCDGFQNKKWDLFVERSKAHSNCYPYDVPDYASLRSLVASSGTLEFNNESFNWTGVTQNGTSSACIRRSNNSFFSRLNWLTHLNFKYPALNVTMPNNEQFDKLYIWGVHHPGTDKDQIFLYAQASGRITVSTKRSQQAVIPNIGSRPRVRNIPSRVSIYWTIVKPGDILLINSTGNLIAPRGYFKIRSGKSSIMRSDAPIGKCNSACITPNGSIPNDKPFQNVNRITYGACPRYVKQNTLKLATGMRNVPEKQTRGIFGAIAGFIENGWEGMVDGWYGFRHQNSEGRGQAADLKSTQAAIDQINGKLNRLIGKTNEKFHQIEKEFSEVEGRIQDLEKYVEDTKIDLWSYNAELLVALENQHTIDLTDSEMNKLFEKTKKQLRENAEDMGNGCFKIYHKCDNDCIGSIRNGTYDHNVYRDEALNNRFQIKGIELKSGYKDWILWISFAISCFLLCVALLGFIMWACQKGNIRCNICI

SEQ ID NO: 10569 - protein, 566 aa, Artificial Sequence; identical to SEQ ID NO: 9994
  derived and/or modified protein sequence (wt) from hemagglutinin__InfluenzaA__AGW01977

SEQ ID NO: 10570 - protein, 566 aa, Artificial Sequence; identical to SEQ ID NO: 9994
  derived and/or modified protein sequence (wt) from hemagglutinin__InfluenzaA__AGW01989

SEQ ID NO: 10571 - protein, 566 aa, Artificial Sequence; identical to SEQ ID NO: 9994
  derived and/or modified protein sequence (wt) from hemagglutinin__InfluenzaA__AGW02001

SEQ ID NO: 10572 - protein, 566 aa, Artificial Sequence; identical to SEQ ID NO: 9994
  derived and/or modified protein sequence (wt) from hemagglutinin__InfluenzaA__AGW02013

SEQ ID NO: 10573 - protein, 566 aa, Artificial Sequence; identical to SEQ ID NO: 9858
  derived and/or modified protein sequence (wt) from hemagglutinin__InfluenzaA__AGW02025

SEQ ID NO: 10574 - protein, 566 aa, Artificial Sequence; identical to SEQ ID NO: 9994
  derived and/or modified protein sequence (wt) from hemagglutinin__InfluenzaA__AGW02037

SEQ ID NO: 10575 - protein, 566 aa, Artificial Sequence; identical to SEQ ID NO: 9994
  derived and/or modified protein sequence (wt) from hemagglutinin__InfluenzaA__AGW02061

SEQ ID NO: 10576 - protein, 566 aa, Artificial Sequence; identical to SEQ ID NO: 9994
  derived and/or modified protein sequence (wt) from hemagglutinin__InfluenzaA__AGW02073

SEQ ID NO: 10577 - protein, 566 aa, Artificial Sequence; identical to SEQ ID NO: 9994
  derived and/or modified protein sequence (wt) from hemagglutinin__InfluenzaA__AGW02085

SEQ ID NO: 10578 - protein, 566 aa, Artificial Sequence; identical to SEQ ID NO: 9883
  derived and/or modified protein sequence (wt) from hemagglutinin__InfluenzaA__AGW02097

SEQ ID NO: 10579 - protein, 566 aa, Artificial Sequence; identical to SEQ ID NO: 9858
  derived and/or modified protein sequence (wt) from hemagglutinin__InfluenzaA__AGW02109

SEQ ID NO: 10580 - protein, 566 aa, Artificial Sequence; identical to SEQ ID NO: 9994
  derived and/or modified protein sequence (wt) from hemagglutinin__InfluenzaA__AGW02133

SEQ ID NO: 10581 - protein, 566 aa, Artificial Sequence; identical to SEQ ID NO: 9994
  derived and/or modified protein sequence (wt) from hemagglutinin__InfluenzaA__AGW02157

SEQ ID NO: 10582 - protein, 566 aa, Artificial Sequence; identical to SEQ ID NO: 9858
  derived and/or modified protein sequence (wt) from hemagglutinin__InfluenzaA__AGW02169

SEQ ID NO: 10583 - protein, 566 aa, Artificial Sequence; identical to SEQ ID NO: 9994
  derived and/or modified protein sequence (wt) from hemagglutinin__InfluenzaA__AGW02181

SEQ ID NO: 10584 - protein, 566 aa, Artificial Sequence; identical to SEQ ID NO: 9868
  derived and/or modified protein sequence (wt) from hemagglutinin__InfluenzaA__AGW02193

SEQ ID NO: 10585 - protein, 566 aa, Artificial Sequence; identical to SEQ ID NO: 9835
  derived and/or modified protein sequence (wt) from hemagglutinin__InfluenzaA__AGW04171

SEQ ID NO: 10586 - protein, 568 aa, Artificial Sequence
  derived and/or modified protein sequence (wt) from hemagglutinin__InfluenzaA__AGW27061
MEKIVLLFAIVNLVKSDHICIGYHANNSTEQVDTIMEKNVTVTHAQDILEKTHNGKLCDLNGVKPLILKDCSVAGWLLGNPMCDEFIDVPEWSYIVEKANPANDLCYPGNFNDYEELKHLLSRINHFEKIRIIPKDSWPDHEASLGVSAACSYQGNSSFFRNVVWLLKKNDAYPIIKKSYNNTNKEDLLVLWGIHHPNDEAEQIRLYQNPTTYVSTGTSTLNQRLVPRIATRSKVNGQSGRIDFFWTILKPNDAINFESNGNFIAPEYAYKIVKKGDSTIMRSEVEYGNCSTRCQTPMGAINSSMPFHNIHPLTIGECPKYVKSNKLVLATGLRNSPQIERRRRKRGLFGAIAGFIEGGWQGMVDGWYGYHHSNEQGSGYAADKESTQKAIDGVTNKVNSIIDKMNTQFEAVGREFNNLERRIENLNKKMEDGFLDVWTYNAELLVLMENERTLDFHDSNVKNLYDKVRLQLRDNAKELGNGCFEFYHKCDNECMESVRNGTYDYPQYSEEARLKREEISGVKLESIGTYQILSIYSTVASSLVLSIMVAGLSLWMCSNGSLQCRMCI

SEQ ID NO: 10587 - protein, 565 aa, Artificial Sequence
  derived and/or modified protein sequence (wt) from hemagglutinin__InfluenzaA__AGY14471
MKVKLLILLCTFTATYADTICIGYHANNSTDTVDTILEKNVTVTHSVNLLEDSHNGKLCLLKGIAPLQLGNCSVAGWILGNPECGLLIPKESWSYIVETPNPENGTCYPGYFDDYEELREQLSSVSSFERFEIFPKESSWPNHTVTGVSASCSHNGKSSFYRNLLWLTGKNGLYPNLSKSYANNKEKEVLILWGVHHPSNIGNQRTLYHTENTYVSVVSSHYSRRFTPEITKRPKVRDQEGRINYYWTLLEPGDTIIFEANGNLIAPWYAFALSKGFGSGIITSNAPMDECDAKCQTPQGAINSNLPFQNVHPVTIGECPKYVRSTKLRMVTGLRNIPSIQSRGLFGAIAGFIEGGWTGMVDGWYGYHHQNEQGSGYAADQESTQNAINGITNKVNSVIEKMNTQFTVVGKEFNKLERRMENLNKKVDDGFLDIWTYNAELLVLLENERTLDFHDSNVMNLYEKVKGQLKNNAKEIGNGCFEFYHKCNNECMESVKNGTYDYPKYSEESKLNREKIDGVKLESMGVYQILAIYSTVASSLVLLVSLGAISFWMCSNGSLQCRICI

SEQ ID NO: 10588 - protein, 565 aa, Artificial Sequence; identical to SEQ ID NO: 10587
  derived and/or modified protein sequence (wt) from hemagglutinin__InfluenzaA__AGY14477

SEQ ID NO: 10589 - protein, 566 aa, Artificial Sequence
  derived and/or modified protein sequence (wt) from hemagglutinin__InfluenzaA__AHC57459
MKTIIALSYILCLVFAQKLPGNDNSTATLCLGHHAVPNGTIVKTITNDQIEVTNATELVQSSSTGEICNSPHQILDGENCTLIDALLGDPQCDGFQNKKWDLFVERSKAHSNCYPYDVPDYASLRSLVASSGTLEFNNESFNWTGVTQNGTSSACIRRSNNSFFSRLNWLTHLNFKYPALNVTMPNNEQFDKLYIWGVHHPGTDKDQIFLYAQAAGRITVSTKRSQQAVIPNIGSRPRIRNIPSRVSIYWTIVKPGDILLINSTGNLIAPRGYFKIRSGKSSIMRSDAPIGKCNSACITPNGSIPNDKPFQNVNRITYGACPRYVKQNTLKLATGMRNVPEKQTRGIFGAIAGFIENGWEGMVDGWYGFRHQNSEGRGQAADLKSTQAAIDQINGKLNRLIGKTNEKFHQIEKEFSEVEGRIQDLEKYVEDTKIDLWSYNAELLVALENQHTIDLTDSEMNKLFEKTKKQLRENAEDMGNGCFKIYHKCDNACIGSIRNGTYDHDVYRDEALNNRFQIKGVELKSGYKDWILWISFAISCFLLCVALLGFIMWACQKGNIRCNICI

SEQ ID NO: 10590 - protein, 566 aa, Artificial Sequence; identical to SEQ ID NO: 6982
  derived and/or modified protein sequence (wt) from hemagglutinin__InfluenzaA__AHC57465

SEQ ID NO: 10591 - protein, 566 aa, Artificial Sequence; identical to SEQ ID NO: 6855
  derived and/or modified protein sequence (wt) from hemagglutinin__InfluenzaA__AHC57487

SEQ ID NO: 10592 - protein, 566 aa, Artificial Sequence; identical to SEQ ID NO: 7782
  derived and/or modified protein sequence (wt) from hemagglutinin__InfluenzaA__AHC57499

SEQ ID NO: 10593 - protein, 566 aa, Artificial Sequence; identical to SEQ ID NO: 7782
  derived and/or modified protein sequence (wt) from hemagglutinin__InfluenzaA__AHC57511

SEQ ID NO: 10594 - protein, 566 aa, Artificial Sequence; identical to SEQ ID NO: 7782
  derived and/or modified protein sequence (wt) from hemagglutinin__InfluenzaA__AHC57523

SEQ ID NO: 10595 - protein, 566 aa, Artificial Sequence; identical to SEQ ID NO: 6982
  derived and/or modified protein sequence (wt) from hemagglutinin__InfluenzaA__AHC57675

SEQ ID NO: 10596 - protein, 566 aa, Artificial Sequence; identical to SEQ ID NO: 6982
  derived and/or modified protein sequence (wt) from hemagglutinin__InfluenzaA__AHC57827

SEQ ID NO: 10597 - protein, 566 aa, Artificial Sequence; identical to SEQ ID NO: 6855
  derived and/or modified protein sequence (wt) from hemagglutinin__InfluenzaA__AHC57956

SEQ ID NO: 10598 - protein, 566 aa, Artificial Sequence
  derived and/or modified protein sequence (wt) from hemagglutinin__InfluenzaA__AHC57981
MKTIIALSYILCLVFAQKIPGNDNSTATLCLGHHAVPNGTIVKTITNDQIEVTNATELVQNSSTGEICDSPHQILDGENCTLIDALLGDPQCDGFQNKKWDLFVERSKAYSNCYPYDVPDYASLRSLIASSGTLEFNNESFNWTGVTQNGTSSACIRRSNNSFFSRLNWLTHLNFKYPALNVTMPNNEQFDKLYIWGVHHPGTDKDQIFLYAQASGRITVSTKRSQQAVIPNIGSRPRVRNIPSRISIYWTIVKPGDILLINSTGNLIAPRGYFKIRSGKSSIMRSDAPIGKCNSECITPNGSIPNDKPFQNVNRITYGACPRYVKQNTLKLATGMRNVPEKQTRGIFGAIAGFIENGWEGMVDGWYGFRHQNSEGRGQAADLKSTQAAIDQINGNLNRLIGKTNEKFHQIEKEFSEVEGRIQDLEKYVEDTKIDLWSYNAELLVALENQHTIDLTDSEMNKLFEKTKKQLRENAEDMGNGCFKIYHKCDNACIGSIRNGTYDHDVYRDEALNNRFQIKGVELKSGYKDWILWISFAISCFLLCVALLGFIMWACQKGNIRCNICI

SEQ ID NO: 10599 - protein, 566 aa, Artificial Sequence; identical to SEQ ID NO: 7782
  derived and/or modified protein sequence (wt) from hemagglutinin__InfluenzaA__AHC57993

SEQ ID NO: 10600 - protein, 566 aa, Artificial Sequence; identical to SEQ ID NO: 9074
  derived and/or modified protein sequence (wt) from hemagglutinin__InfluenzaA__AHC58005

SEQ ID NO: 10601 - protein, 566 aa, Artificial Sequence
  derived and/or modified protein sequence (wt) from hemagglutinin__InfluenzaA__AHC58017
MKTIIALSYILCLVFAQKLPGNDNSTATLCLGHHAVPNGTIVKTITNDQIEVTNATELVQSSSTGEICNSPHQILDGENCTLIDALLGDPQCDGFQNKKWDLFVERSKAHSNCYPYDVPDYASLRSLVASSGTLEFNNESFNWTGVTQNGTSSACIRRSNNSFFSRLNWLTHLNFKYPALNVTMPNNEQFDKLYIWGVHHPGTDKDQIFLYAQAAGRITVSTKRSQQAVIPNIGSRPRVRNIPSRVSIYWTIVKPGDILLINSTGNLIAPRGYFKIRSGKSSIMRSDAPIGKCNSACITPNGSIPNDKPFQNVNRITYGACPRYVKQNTLKLATGMRNVPEKQTRGIFGAIAGFIENGWEGMVDGWYGFRHQNSEGRGQAADLKSTQAAIDQINGKLNRLIGKTNEKFHQIEKEFSEVEGRIQDLEKYVEDTKIDLWSYNAELLVALENQHTIDLTDSEMNKLFEKTKKQLRENAEDMGNGCFKIYHKCDNACIVSIRNGTYDHDVYRDEALNNRFQIKGVELKSGYKDWILWISFAISCFLLCVALLGFIMWACQKGNIRCNICI

SEQ ID NO: 10602 - protein, 566 aa, Artificial Sequence
  derived and/or modified protein sequence (wt) from hemagglutinin__InfluenzaA__AHC58029
MKTIIALSYILCLVFAQKLPGNDNSTATLCLGHHAVPNGTIVKTITNDQIEVTNATELVQSSSTGEICNSPHQILDGENCTLIDALLGDPQCDGFQNKKWDLFVERSKAHSNCYPYDVPDYASLRSLVASSGTLEFNNESFNWTGVTQNGTSSACIRGSNNSFFSRLNWLTQLNFKYPALNVTMPNNEQFDKLYIWGVHHPGTDKDQIFLYAQASGRITVSTKRSQQAVIPNIGSRPRVRNIPSRVSIYWTIVKPGDILLINSTGNLIAPRGYFKIRSGKSSIMRSDAPIGKCNSACITPNGSIPNDKPFQNVNRITYGACPRYVKQNTLKLATGMRNVPEKQTRGIFGAIAGFIENGWEGMVDGWYGFRHQNSEGRGQAADLKSTQAAIDQINGKLNRLIGKTNEKFHQIEKEFSEVEGRIQDLEKYVEDTKIDLWSYNAELLVALENQHTIDLTDSEMNKLFEKTKKQLRENAEDMGNGCFKIYHKCDNACIGSIRNGTYDHDVYRDEALNNRFQIKGVELKSGYKDWILWISFAISCFLLCVALLGFIMWACQKGNIRCNICI

SEQ ID NO: 10603 - protein, 566 aa, Artificial Sequence
  derived and/or modified protein sequence (wt) from hemagglutinin__InfluenzaA__AHC58050
MKTIIALSYILCLVFAQKLPGNDNSTATLCLGHHAVPNGTIVKTITNDQIEVTNATELVQSSSTGEICDSPHQILDGENCTLIDALLGDPQCDGFQNKKWDLFVERSKAYSNCYPYDVPDYASLRSLVASSGTLEFNNESFNWTGVTQNGTSSACIRRSNSSFFSRLNWLTHLNFKYPALNVTMPNNEQFDKLYIWGVHHPGTDKDQIFLYAQSSGRITVSTRRSQQAVIPNIGSRPRIRNIPSRISIYWTIVKPGDILLINSTGNLIAPRGYFKIRSGKSSIMRSDAPIGKCNSECITPNGSIPNDKPFQNVNRITYGACPRYVKQSTLKLATGMRNVPEKQTRGIFGAIAGFIENGWEGMVDGWYGFRHQNSEGRGQAADLKSTQAAIDQINGKLNRLIGKTNEKFHQIEKEFSEVEGRIQDLEKYVEDTKIDLWSYNAELLVALENQHTIDLTDSEMNKLFEKTKKQLRENAEDMGNGCFKIYHKCDNACIGSIRNGTYNHDVYRDEALNNRFQIKGVELKSGYKDWILWISFAISCFLLCVALLGFIMWACQKGNIRCNICI

SEQ ID NO: 10604 - protein, 566 aa, Artificial Sequence; identical to SEQ ID NO: 7782
  derived and/or modified protein sequence (wt) from hemagglutinin__InfluenzaA__AHC58074

SEQ ID NO: 10605 - protein, 566 aa, Artificial Sequence; identical to SEQ ID NO: 7782
  derived and/or modified protein sequence (wt) from hemagglutinin__InfluenzaA__AHC58098

SEQ ID NO: 10606 - protein, 566 aa, Artificial Sequence; identical to SEQ ID NO: 7782
  derived and/or modified protein sequence (wt) from hemagglutinin__InfluenzaA__AHC58110

SEQ ID NO: 10607 - protein, 566 aa, Artificial Sequence; identical to SEQ ID NO: 7782
  derived and/or modified protein sequence (wt) from hemagglutinin__InfluenzaA__AHC58126

SEQ ID NO: 10608 - protein, 566 aa, Artificial Sequence; identical to SEQ ID NO: 7782
  derived and/or modified protein sequence (wt) from hemagglutinin__InfluenzaA__AHC58138

SEQ ID NO: 10609 - protein, 566 aa, Artificial Sequence; identical to SEQ ID NO: 7782
  derived and/or modified protein sequence (wt) from hemagglutinin__InfluenzaA__AHC58162

SEQ ID NO: 10610 - protein, 566 aa, Artificial Sequence; identical to SEQ ID NO: 9074
  derived and/or modified protein sequence (wt) from hemagglutinin__InfluenzaA__AHC58186

SEQ ID NO: 10611 - protein, 566 aa, Artificial Sequence
  derived and/or modified protein sequence (wt) from hemagglutinin__InfluenzaA__AHC58198
MKTIIALSYILCLVFAQKLPGNDNSTATLCLGHHAVPNGTIVKTITNDQIEVTNATELVQNSSTGEICDSPHQILDGENCTLIDALLGDPQCDGFQNKKWDLFVERSKAYSNCYPYDVPDYASLRSLVASSGTLEFNNESFNWTGVTQNGTSSACIRRSNNSFFSRLNWLTHLNFKYPALNVTMPNNEQFDKLYIWGVHHPGTDKDQIFLYAQASGRITVSTKRSQQAVIPNIGSRPRVRNIPSRISIYWTIVKPGDILLINSTGNLIAPRGYFKIRSGKSSIMRSDAPIGKCNSECITPNGSIPNDKPFQNVNRITYGACPRYVKQNTLKLATGMRNVPEKQTRGIFGAIAGFIENGWEGMVDGWYGFRHQNSEGRGQAADLKSTQAAIDQINGKLNRLIGKTNEKFHQIEKEFSEVEGRIQNLEKYVEDTKIDLWSYNAELLVALENQHTIDLTDSEMNKLFEKTKKQLRENAEDMGNGCFKIYHKCDNACIGSIRNGTYDHDVYRDEALNNRFQIKGVELKSGYKDWILWISFAISCFLLCVALLGFIMWDCQKGNIRCNICI

SEQ ID NO: 10612 - protein, 566 aa, Artificial Sequence
  derived and/or modified protein sequence (wt) from hemagglutinin__InfluenzaA__AHC58210
MKTIIALSYILCLVFAQKLPGNDNSTATLCLGHHAVPNGTIVKTITNDQIEVTNATELVQNSSTGEICDSPHQILDGENCTLIDALLGDPQCDGFQNKKWDLFVERSKAYSNCYPYDVPDYASLRSLVASSGTLEFNNESFNWAGVTQNGTSSACIRRSNNSFFSRLNWLTHLNFKYPALNVTMPNNEQFDKLYIWGVHHPGTDKDQIFLYAQASGRITVSTKRSQQAVIPNIGSRPRVRNIPSRISIYWTIVKPGDILLINSTGNLIAPRGYFKIRSGKSSIMRSDAPIGKCNSECITPNGSIPNDKPFQNVNRITYGACPRYVKQNTLKLATGMRNVPEKQTRGIFGAIAGFIENGWEGMVDGWYGFRHQNSEGRGQAADLKSTQAAIDQINGKLNRLIGKTNEKFHQIEKEFSEVEGRIQDLEKYVEDTKIDLWSYNAELLVALENQHTIDLTDSEMNKLFEKTKKQLRENAEDMGNGCFKIYHKCDNACIGSIRNGTYDHDVYRDEALNNRFQIKGVELKSGYKDWILWISFAISCFLLCVALLGFIMWACQKGNIRCNICI

SEQ ID NO: 10613 - protein, 566 aa, Artificial Sequence; identical to SEQ ID NO: 6982
  derived and/or modified protein sequence (wt) from hemagglutinin__InfluenzaA__AHC58234

SEQ ID NO: 10614 - protein, 566 aa, Artificial Sequence; identical to SEQ ID NO: 7782
  derived and/or modified protein sequence (wt) from hemagglutinin__InfluenzaA__AHC58246

SEQ ID NO: 10615 - protein, 566 aa, Artificial Sequence; identical to SEQ ID NO: 6982
  derived and/or modified protein sequence (wt) from hemagglutinin__InfluenzaA__AHC58258

SEQ ID NO: 10616 - protein, 566 aa, Artificial Sequence; identical to SEQ ID NO: 6855
  derived and/or modified protein sequence (wt) from hemagglutinin__InfluenzaA__AHC58270

SEQ ID NO: 10617 - protein, 566 aa, Artificial Sequence
  derived and/or modified protein sequence (wt) from hemagglutinin__InfluenzaA__AHC58372
MKTIIALSYILCLVFAQKLPGNDNSTATLCLGHHAVPNGTIVKTITNDQIEVTNATELVQSSSTGEICDSPHQILDGENCTLIDALLGDPQCDGFQNKKWDLFVERSKAYSNCYPYDVPDYASLRSLVASSGTLEFNNESFNWTGVTQNGTSSACIRRSNSSFFSRLNWLTHLNFKYPALNVTMPNNEQFDKLYIWGVHHPGTDKDQIFLYAQSSGRITVSTKRSQQAVTPNIGSRPRIRNIPSRISIYWTIVKPGDILLINSTGNLIAPRGYFKIRSGKSSIMRSDAPIGKCNSECITPNGSIPNDKPFQNVNRITYGACPRYVKQSTLKLATGMRNVPEKQTRGIFGAIAGFIENGWEGMVDGWYGFRHQNSEGRGQAADLKSTQAAIDQINGKLNRLIGKTNEKFHQIEKEFSEVEGRIQDLEKYVEDTKIDLWSYNAELLVALENQHTIDLTDSEMNKLFEKTKKQLRENAEDMGNGCFKIYHKCDNACIGSIRNGTYNHDVYRDEALNNRFQIKGVELKSGYKDWILWISFAISCFLLCVALLGFIMWACQKGNIRCNICI

SEQ ID NO: 10618 - protein, 566 aa, Artificial Sequence
  derived and/or modified protein sequence (wt) from hemagglutinin__InfluenzaA__AHC58396
MKTIIALSYILCLVFAQKLPGNDNSTATLCLGHHAVPNGTIVKTITNDQIEVTNATELVQSSSTGEICNSPHQILDGENCTLIDALLGDPQCDGFQNKKWDLFVERSKAHSNCYPYDVPDYASLRSLVASSGTLEFNNESFNWTGVTQNGTSSACIRGSNNSFFSRLNWLTHLNFKYPALNVTMPNNEQFDKLYIWGVHHPGTDKDQIFLYAQASGRITVSTKRSQQAVIPNIGSRPRVRNIPSRVSIYWTIVKPGDILLINSTGNLIAPRGYFKIRSGKSSIMRSDAPIGKCNSACITPNGSIPNDKPFQNVNRITYGACPRYVKQNTLKLATGMRNVPEKQTRGIFGAIAGFIENGWEGMVDGWYGFRHQNSEGRGQAADLKSTQAAIDQINGKLNRLIGKTNEKFHQIEKEFSEVEGRIQDLEKYVEDTKIDLWSYNAELLVALENQHTIDLTDSEMNKLFEKTKKQLRENAEDMGNGCFKIYHKCDNACIGSIRNGTYDHDVYRDEALNNRFQIKGVELKSGYKDWILWISFAISCFLLCVALLGFIMWACQKGNIRCNICI

SEQ ID NO: 10619 - protein, 566 aa, Artificial Sequence; identical to SEQ ID NO: 7782
  derived and/or modified protein sequence (wt) from hemagglutinin__InfluenzaA__AHC58408

SEQ ID NO: 10620 - protein, 566 aa, Artificial Sequence; identical to SEQ ID NO: 9074
  derived and/or modified protein sequence (wt) from hemagglutinin__InfluenzaA__AHC58420

SEQ ID NO: 10621 - protein, 566 aa, Artificial Sequence; identical to SEQ ID NO: 9074
  derived and/or modified protein sequence (wt) from hemagglutinin__InfluenzaA__AHC58432

SEQ ID NO: 10622 - protein, 566 aa, Artificial Sequence; identical to SEQ ID NO: 6982
  derived and/or modified protein sequence (wt) from hemagglutinin__InfluenzaA__AHC58444

SEQ ID NO: 10623 - protein, 566 aa, Artificial Sequence; identical to SEQ ID NO: 10618
  derived and/or modified protein sequence (wt) from hemagglutinin__InfluenzaA__AHC58456

SEQ ID NO: 10624 - protein, 566 aa, Artificial Sequence
  derived and/or modified protein sequence (wt) from hemagglutinin__InfluenzaA__AHC58468
MKAILVVLLYTFATANADTLCIGYHANNSTDTVDTVLEKNVTVTHSVNLLEDKHNGKLCKLRGVAPLHLGKCNIAGWILGNPECESLSTASSWSYIVETSSSDNGTCYPGDFINYEELREQLSSVSSFERFEIFPKTSSWPNHDSNKGVTAACPQAGAKSFYKNLIWLVKKGNSYPKLSKSYINDKGKEVLVLWGIHHPSTSADQQSLYQNADAYVFVGTSKYSKKFKPEIAVRPKVRDQEGRMNYYWTLVEPGDKITFEATGNLLVPRYAFAMERNAGSGIIISDTPVHDCNTTCQTPKGAINTSLPFQNIHPITIGKCPKYVKSTKLRLATGLRNVPSIQSRGLFGAIAGFIEGGWTGMVDGWYGYHHQNAQGSGYAADLKSTQNAIDKITNKVNSVIEKMNTQFTAVGKEFNHLERRIENLNKKVDDGFLDIWTYNAELLVLLENERTLDYHDSNVKNLYEKVRSQLKNNAKEIGNGCFEFYHKCDNTCMESVKNGTYDYPKYSEEAKLNREEIDGVKLESTRIYQILAIYSTVASSLVLVVSLGAISFWMCSNGSLQCRICI

SEQ ID NO: 10625 - protein, 566 aa, Artificial Sequence
  derived and/or modified protein sequence (wt) from hemagglutinin__InfluenzaA__AHC58479
MKTIIALSYILCLVFAQKLPGNDNSTATLCLGHHAVPNGTIVKTITNDQIEVTNATELVQNSSTGEICDSPHQIIDGENCTLIDALLGDPQCDGFQNKKWDLFVERSKAYSNCYPYDVPDYASLRSLVASSGTLEFNNESFNWTGVTQNGTSSACIRRSNNSFFSRLNWLTHLNFKYPALNVTMPNNEQFDKLYIWGVHHPGTDKDQIFLYAQASGRITVSTKRSQQAVIPNIGSRPRVRNIPSRISIYWTIVKPGDILLINSTGNLIAPRGYFKIRSGKSSIMRSDAPIGKCNSECITPNGSIPNDKPFQNVNRITYGACPRYVKQNTLKLATGMRNVPEKQTRGIFGAIAGFIENGWEGMVDGWYGFRHQNSEGRGQAADLKSTQAAINQINGKLNRLIGKTNEKFHQIEKEFSEVEGRIQDLEKYVEDTKIDLWSYNAELLVALENQHTIDLTDSEMNKLFEKTKKQLRENAEDMGNGCFKIYHKCDNACIGSIRNGTYDHDVYRDEALNNRFKIKGVELKSGYKDWILWISFAISCFLLCVALLGFIMWACQKGNIRCNICI

SEQ ID NO: 10626 - protein, 566 aa, Artificial Sequence; identical to SEQ ID NO: 10618
  derived and/or modified protein sequence (wt) from hemagglutinin__InfluenzaA__AHC58491

SEQ ID NO: 10627 - protein, 566 aa, Artificial Sequence; identical to SEQ ID NO: 6982
  derived and/or modified protein sequence (wt) from hemagglutinin__InfluenzaA__AHC58515

SEQ ID NO: 10628 - protein, 566 aa, Artificial Sequence; identical to SEQ ID NO: 7782
  derived and/or modified protein sequence (wt) from hemagglutinin__InfluenzaA__AHC58527

SEQ ID NO: 10629 - protein, 566 aa, Artificial Sequence
  derived and/or modified protein sequence (wt) from hemagglutinin__InfluenzaA__AHC58563
MKTIIALSYILCLVFAQKLPGNDNSTATLCLGHHAVPNGTIVKTITNDQIEVTNATELVQNSSTGEICDSPHQIIDGENCTLIDALLGDPQCDGFQNKKWDLFVERSKAYSNCYPYDVPDYASLRSLVASSGTLEFNNESFNWTGVTQNGTSSACIRRSNNSFFSRLNWLTHLNFKYPALNVTMPNNEQFDKLYIWGVHHPGTDKDQIFLYAQASGRITVSTKRSQQAVIPNIGSRPRVRNIPSRISIYWTIVKPGDILLINSTGNLIAPRGYFKIRSGKSSIMRSDAPIGKCNSECITPNGSIPNDKPFQNVNRITYGACPRYVKQNTLKLATGMRNVPEKQTRGIFGAIAGFIENGWEGMVDGWYGFRHQNSEGRGQAADLKSTQAAIDQINGKLNRLIGKTNEKFHQIEKEFSEVEGRIQDLEKYVEDTKIDLWSYNAELLVALENQHTIDLTDSEMNKLFEKTKKQLRENAEDMGNGCFKIYHKCDNACIGSIRNGTYDHDVYRDEALNNRFQIKGVELKSGYKDWILWISFAISCFLLCVALLGFIMWACQKGNIRCNICI

SEQ ID NO: 10630 - protein, 566 aa, Artificial Sequence; identical to SEQ ID NO: 7782
  derived and/or modified protein sequence (wt) from hemagglutinin__InfluenzaA__AHC58575

SEQ ID NO: 10631 - protein, 566 aa, Artificial Sequence; identical to SEQ ID NO: 6855
  derived and/or modified protein sequence (wt) from hemagglutinin__InfluenzaA__AHC58587

SEQ ID NO: 10632 - protein, 566 aa, Artificial Sequence; identical to SEQ ID NO: 6982
  derived and/or modified protein sequence (wt) from hemagglutinin__InfluenzaA__AHC58599

SEQ ID NO: 10633 - protein, 566 aa, Artificial Sequence; identical to SEQ ID NO: 7782
  derived and/or modified protein sequence (wt) from hemagglutinin__InfluenzaA__AHC58611

SEQ ID NO: 10634 - protein, 566 aa, Artificial Sequence; identical to SEQ ID NO: 7782
  derived and/or modified protein sequence (wt) from hemagglutinin__InfluenzaA__AHC58623

SEQ ID NO: 10635 - protein, 566 aa, Artificial Sequence; identical to SEQ ID NO: 7782
  derived and/or modified protein sequence (wt) from hemagglutinin__InfluenzaA__AHC58647

SEQ ID NO: 10636 - protein, 566 aa, Artificial Sequence; identical to SEQ ID NO: 6982
  derived and/or modified protein sequence (wt) from hemagglutinin__InfluenzaA__AHC58659

SEQ ID NO: 10637 - protein, 566 aa, Artificial Sequence; identical to SEQ ID NO: 6855
  derived and/or modified protein sequence (wt) from hemagglutinin__InfluenzaA__AHC58671

SEQ ID NO: 10638 - protein, 566 aa, Artificial Sequence; identical to SEQ ID NO: 9074
  derived and/or modified protein sequence (wt) from hemagglutinin__InfluenzaA__AHC58683

SEQ ID NO: 10639 - protein, 566 aa, Artificial Sequence; identical to SEQ ID NO: 6855
  derived and/or modified protein sequence (wt) from hemagglutinin__InfluenzaA__AHC58695

SEQ ID NO: 10640 - protein, 566 aa, Artificial Sequence; identical to SEQ ID NO: 9074
  derived and/or modified protein sequence (wt) from hemagglutinin__InfluenzaA__AHC58707

SEQ ID NO: 10641 - protein, 566 aa, Artificial Sequence; identical to SEQ ID NO: 9074
  derived and/or modified protein sequence (wt) from hemagglutinin__InfluenzaA__AHC58719

SEQ ID NO: 10642 - protein, 566 aa, Artificial Sequence; identical to SEQ ID NO: 10618
  derived and/or modified protein sequence (wt) from hemagglutinin__InfluenzaA__AHC58731

SEQ ID NO: 10643 - protein, 566 aa, Artificial Sequence
  derived and/or modified protein sequence (wt) from hemagglutinin__InfluenzaA__AHC58743
MKTIIAWSYILCLVFAQKLPGNDNSTATLCLGHHAVPNGTIVKTITNDQIEVTNATELVQNSSTGEICDSPHQILDGENCTLIDALLGDPQCDGFQNKKWDLFVERSKAYSNCYPYDVPDYASLRSLVASSGTLEFNNESFNWTGVTQNGTSSACIRRSNNSFFSRLNWLTHLNFKYPALNVTMPNNEQFDKLYIWGVHHPGTDKDQIFLYAQASGRITVSTKRSQQAVIPNIGSRPRVRNIPSRISIYWTIVKPGDILLINSTGNLIAPRGYFKIRSGKSSIMRSDAPIGKCNSECITPNGSIPNDKPFQNVNRITYGACPRYVKQNTLKLATGMRNVPEKQTRGIFGAIAGFIENGWEGMVDGWYGFRHQNSEGRGQAADLKSTQAAIDQINGKLNRLIGKTNEKFHQIEKEFSEVEGRIQDLEKYVEDTKIDLWSYNAELLVALENQHTIDLTDSEMNKLFEKTKKQLRENAEDMGNGCFKIYHKCDNACIGSIRNGTYDHDVYRDEALNNRFQIKGVELKSGYKDWILWISFAISCFLLCVALLGFIMWACQKGNIRCNICI

SEQ ID NO: 10644 - protein, 566 aa, Artificial Sequence; identical to SEQ ID NO: 10618
  derived and/or modified protein sequence (wt) from hemagglutinin__InfluenzaA__AHC58755

SEQ ID NO: 10645 - protein, 566 aa, Artificial Sequence; identical to SEQ ID NO: 6855
  derived and/or modified protein sequence (wt) from hemagglutinin__InfluenzaA__AHC58779

SEQ ID NO: 10646 - protein, 566 aa, Artificial Sequence; identical to SEQ ID NO: 10617
  derived and/or modified protein sequence (wt) from hemagglutinin__InfluenzaA__AHC58791

SEQ ID NO: 10647 - protein, 566 aa, Artificial Sequence
  derived and/or modified protein sequence (wt) from hemagglutinin__InfluenzaA__AHC58803
MKTIIALSYILCLVFAQKLPGNDNSTATLCLGHHAVPNGTIVKTITNDQIEVTNATELVQNSSTGEICDSPHQIIDGENCTLIDALLGDPQCDGFQNKKWDLFVERSKAYSNCYPYDVPDYASLRSLVASSGTLEFNNESFNWTGVTQNGTSSACIRRSNNSFFSRLNWLTHLNFKYPALNVTMPNNEQFDKLYIWGVHHPGTDKDQIFLYAQASGRITVSTKRSQQAVIPNIGSRPRVRNIPSRISIYWTIVKPGDILLINSTGNLIAPRGYFKIRSGKSSIMKSDAPIGKCNSECITPNGSIPNDKPFQNVNRITYGACPRYVKQNTLKLATGMRNVPEKQTRGIFGAIAGFIENGWEGMVDGWYGFRHQNSEGRGQAADLKSTQAAIDQINGKLNRLIGKTNEKFHQIEKEFSEVEGRIQDLEKYVEDTKIDLWSYNAELLVALENQHTIDLTDSEMNKLFEKTKKQLRENAEDMGNGCFKIYHKCDNACIGSIRNGTYDHDVYRDEALNNRFKIKGVELKSGYKDWILWISFAISCFLLCVALLGFIMWACQKGNIRCNICI

SEQ ID NO: 10648 - protein, 566 aa, Artificial Sequence
  derived and/or modified protein sequence (wt) from hemagglutinin__InfluenzaA__AHC58815
MKTIIALSYILCLVFAQKLPGNDNSTATLCLGHHAVPNGTIVKTITNDQIEVTNATELVQSSSTGEICNSPHQILDGGNCTLIDALLGDPQCDGFQNKKWDLFVERSKAYSNCYPYDVPDYASLRSLVASSGTLEFNNESFNWTGVTQNGTSSACIRRSNNSFFSRLNWLTHLNFKYPALNVTMPNNEQFDKLYIWGVHHPGTDKDQIFLYAQASGRITVSTKRSQQAVIPNIGSRPRVRNIPSRISIYWTIVKPGDILLINSTGNLIAPRGYFKIRSGKSSIMRSDAPIGKCNSECITPNGSIPNDKPFQNVNRITYGACPRYVKQNTLKLATGMRNVPEKQTRGIFGAIAGFIENGWEGMVDGWYGFRHQNSEGRGQAADLKSTQAAIDQINGKLNRLIGKTNEKFHQIEKEFSEVEGRIQDLEKYVEDTKIDLWSYNAELLVALENQHTIDLTDSEMNKLFEKTKKQLRENAEDMGNGCFKIYHKCDNACIGSIRNGTYDHNVYRDEALNNRFQIKGVELKSGYKDWILWISFAISCFLLCVALLGFIMWACQKGNIRCNICI

SEQ ID NO: 10649 - protein, 566 aa, Artificial Sequence; identical to SEQ ID NO: 6855
  derived and/or modified protein sequence (wt) from hemagglutinin__InfluenzaA__AHC58827

SEQ ID NO: 10650 - protein, 566 aa, Artificial Sequence; identical to SEQ ID NO: 7782
  derived and/or modified protein sequence (wt) from hemagglutinin__InfluenzaA__AHC58839

SEQ ID NO: 10651 - protein, 566 aa, Artificial Sequence
  derived and/or modified protein sequence (wt) from hemagglutinin__InfluenzaA__AHC58863
MKTIIALSYILCLVFAQKLPGNDNSTATLCLGHHAVSNGTIVKTITNDQIEVTNATELVQSSSTGEICNSPHQILDGENCTLIDALLGDPQCDGFQNKKWDLFVERSKAHSNCYPYDVPDYASLRSLVASSGTLEFNNESFNWTGVTQNGTSSACIRGSNNSFFSRLNWLTHLNFKYPALNVTMPNNEQFDKLYIWGVHHPGTDKDQIFLYAQASGRITVSTKRSQQAVIPNIGSRPRVRNIPSRVSIYWTIVKPGDILLINSTGNLIAPRGYFKIRSGKSSIMRSDAPIGKCNSACITPNGSIPNDKPFQNVNRITYGACPRYVKQNTLKLATGMRNVPEKQTRGIFGAIAGFIENGWEGMMDGWYGFRHQNSEGRGQAADLKSTQAAIDQINGKLNRLIGKTNEKFHQIEKEFSEVEGRIQDLEKYVEDTKIDLWSYNAELLVALENQHTIDLTDSEMNKLFEKTKKQLRENAEDMGNGCFKIYHKCDNACIGSIRNGTYDHDVYRDEALNNRFQIKGVELKSGYKDWILWISFAISCFLLCVALLGFIMWACQKGNIRCNICI

SEQ ID NO: 10652 - protein, 566 aa, Artificial Sequence; identical to SEQ ID NO: 6855
  derived and/or modified protein sequence (wt) from hemagglutinin__InfluenzaA__AHC58875

SEQ ID NO: 10653 - protein, 566 aa, Artificial Sequence; identical to SEQ ID NO: 7782
  derived and/or modified protein sequence (wt) from hemagglutinin__InfluenzaA__AHC58887

SEQ ID NO: 10654 - protein, 566 aa, Artificial Sequence; identical to SEQ ID NO: 10618
  derived and/or modified protein sequence (wt) from hemagglutinin__InfluenzaA__AHC58899

SEQ ID NO: 10655 - protein, 566 aa, Artificial Sequence; identical to SEQ ID NO: 7782
  derived and/or modified protein sequence (wt) from hemagglutinin__InfluenzaA__AHC58981

SEQ ID NO: 10656 - protein, 566 aa, Artificial Sequence; identical to SEQ ID NO: 7782
  derived and/or modified protein sequence (wt) from hemagglutinin__InfluenzaA__AHC58993

SEQ ID NO: 10657 - protein, 566 aa, Artificial Sequence; identical to SEQ ID NO: 7782
  derived and/or modified protein sequence (wt) from hemagglutinin__InfluenzaA__AHC59005

SEQ ID NO: 10658 - protein, 566 aa, Artificial Sequence
  derived and/or modified protein sequence (wt) from hemagglutinin__InfluenzaA__AHC59017
MKTIIALSYILCLVFAQKLPGNDNSTATLCLGHHAVPNGTIVKTITNDQIEVTNATELVQSSSTGEICNSPHQILDGENCTLIDALLGDPQCDGFQNKKWDLFVERSKAHSNCYPYDVPDYASLRSLVASSGTLEFNNESFNWTGVTQNGTSSACIRGSNNSFFSRLNWLTHLNFKYPALNVTMPNNEQFDKLYIWGVHHPGTDKDQIFLYAQASGRITVSTKRSQQAVIPNIGSRPRVRNIPSRVSIYWTIVKPGDILLINSTGNLIAPRGYFKIRSGKSSIMRSDAPIGKCNSACITPNGSIPNDKPFQNVNRITYGACPRYVKQNTLKLATGMRNVPEKQTRGIFGAIAGFIENGWEGMVDGWYGFRHQNSEGRGQAADLKSTQAAIDQINGKLNRLIGKTNEKFHQIEKEFSEVEGRIQDLEKYVEDTKIDLWSYNAELLVALENQHTIDLTDSEMSKLFEKTKKQLRENAEDMGNGCFKIYHKCDNACIGSIRNGTYDHDVYRDEALNNRFQIKGVELKSGYKDWILWISFAISCFLLCVALLGFIMWACQKGNIRCNICI

SEQ ID NO: 10659 - protein, 566 aa, Artificial Sequence; identical to SEQ ID NO: 10618
  derived and/or modified protein sequence (wt) from hemagglutinin__InfluenzaA__AHC59029

SEQ ID NO: 10660 - protein, 566 aa, Artificial Sequence; identical to SEQ ID NO: 6982
  derived and/or modified protein sequence (wt) from hemagglutinin__InfluenzaA__AHC59041

SEQ ID NO: 10661 - protein, 566 aa, Artificial Sequence
  derived and/or modified protein sequence (wt) from hemagglutinin__InfluenzaA__AHC59053
MKTIIALSYILCLVFAQKLPGNDNSTATLCLGHHAVPNGTIVKTITNDQIEVTNATELVQSSSTGEICNSPHQILDGENCTLIDALLGDPQCDGFQNKKWDLFVERSKAHSNCYPYDVPDYASLRSLVASSGTLEFNNESFNWTGVTQNGTSSACIRRSNNSFFSRLNWLTHLNFKYPALNVTMPNNEQFDKLYIWGVHHPGTDKDQIFLYAQAAGRITVSTKRSQQAVIPNIGSRPRVRNIPSRVSIYWTIVKPGDILLINSTGNLIAPRGYFKIQSGKSSIMRSDAPIGKCNSACITPNGSIPNDKPFQNVNRITYGACPRYVKQNTLKLATGMRNVPEKQTRGIFGAIAGFIENGWEGMVDGWYGFRHQNSEGRGQAADLKSTQAAIDQINGKLNRLIGKTNEKFHQIEKEFSEVEGRIQDLEKYVEDTKIDLWSYNAELLVALENQHTIDLTDSEMNKLFEKTKKQLRENAEDMGNGCFKIYHKCDNACIGSIRNGTYDHDVYRDEALNNRFQIKGVELKSGYKDWILWISFAISCFLLCVALLGFIMWTCQKGNIRCNICI

SEQ ID NO: 10662 - protein, 566 aa, Artificial Sequence
  derived and/or modified protein sequence (wt) from hemagglutinin__InfluenzaA__AHC59077
MKTIIALSYILCLVFAQKLPGNDNSTATLCLGHHAVPNGTIVKTITNDQIEVTNATELVQNSSTGEICDSPHQILDGENCTLIDALLGDPQCDGFQNKKWDLFVERSKAYSNCYPYDVPDYASLRSLVASSGTLEFNNESFNWTGVTQNGTSSACIRRSNNSFFSRLNWLTHLNFKYPALNVTMPNNEQFDKLYIWGVHHPGTDKDQIFLYAQASGRITVSTKRSQQAVIPNIGSRPRVRNIPSRISIYWTIVKPGDILLINSTGNLIAPRGYFKIRSGKSSIMRSDAPIGKCNSECITPNGSIPNDKPFQNVNRITYGACPRYVKQNTLKLATGMRNVPEKQTRGIFGAIAGFIENGWEGMVDGWYGFRHQNSEGRGQAADLKSTQAAIDQINGKLNRLIGKTNEKFHQIEKEFSEVEGRIQDLEKYVEDTKIDLWSYNAELLVALENQHTIDLTDSEMNKLFEKTKKQLRENAEDMGNGCFKIYHKCDNACIGSIRNGTYDHDVYRDEALNNRFQIKGVELKSGYKDWILWISFAISCFLLCVVLLGFIMWACQKGNIRCNICI

SEQ ID NO: 10663 - protein, 566 aa, Artificial Sequence; identical to SEQ ID NO: 9074
  derived and/or modified protein sequence (wt) from hemagglutinin__InfluenzaA__AHC59089

SEQ ID NO: 10664 - protein, 566 aa, Artificial Sequence; identical to SEQ ID NO: 7782
  derived and/or modified protein sequence (wt) from hemagglutinin__InfluenzaA__AHC59101

SEQ ID NO: 10665 - protein, 566 aa, Artificial Sequence; identical to SEQ ID NO: 6982
  derived and/or modified protein sequence (wt) from hemagglutinin__InfluenzaA__AHC59113

SEQ ID NO: 10666 - protein, 566 aa, Artificial Sequence; identical to SEQ ID NO: 7782
  derived and/or modified protein sequence (wt) from hemagglutinin__InfluenzaA__AHC59125

SEQ ID NO: 10667 - protein, 566 aa, Artificial Sequence
  derived and/or modified protein sequence (wt) from hemagglutinin__InfluenzaA__AHC59137
MKTIIALSYILCLVFAQKIPGNDNSTATLCLGHHAVSNGTIVKTITNDQIEVTNATELVQSSSTGEICNSPHQILDGENCTLIDALLGDPQCDGFQNKKWDLFVERSKAHSNCYPYDVPDYASLRSLVASSGTLEFNNESFNWTGVTQNGTSSACIRGSNNSFFSRLNWLTHLNFKYPALNVTMPNNEQFDKLYIWGVHHPGTDKDQIFLYAQASGRITVSTKRSQQAVIPNIGSRPRVRNIPSRVSIYWTIVKPGDILLINSTGNLIAPRGYFKIRSGKSSIMRSDAPIGKCNSACITPNGSIPNDKPFQNVNRITYGACPRYVKQNTLKLATGMRNVPEKQTRGIFGAIAGFIENGWEGMMDGWYGFRHQNSEGRGQAADLKSTQAAIDQINGKLNRLIGKTNEKFHQIEKEFSEVEGRIQDLEKYVEDTKIDLWSYNAELLVALENQHTIDLTDSEMNKLFEKTKKQLRENAEDMGNGCFKIYHKCDNACIGSIRNGTYDHDVYRDEALNNRFQIKGVELKSGYKDWILWISFAISCFLLCVALLGFIMWACQKGNIRCNICI

SEQ ID NO: 10668 - protein, 566 aa, Artificial Sequence; identical to SEQ ID NO: 6982
  derived and/or modified protein sequence (wt) from hemagglutinin__InfluenzaA__AHC59149

SEQ ID NO: 10669 - protein, 566 aa, Artificial Sequence
  derived and/or modified protein sequence (wt) from hemagglutinin__InfluenzaA__AHC59185
MKTIIALSYILCLVFAQKLPGNDNSTATLCLGHHAVPNGTIVKTITNDQIEVTNATELVQSSSTGEICDSPHQILDGENCTLIDALLGDPQCDGFQNKKWDLFVERSKAYSNCYPYDVPDYASLRSLVASSGTLEFNNESFNWTGVTQNGTSSACIRRSNSSFFSRLNWLTHLNFKYPALNVTMPNNEQFDKLYIWGVHHPGTDKDQIFLYAQSSGRITVSTKRSQQAVIPNIGSRPRIRNIPSRISIYWTIVKPGDILLINSTGNLIAPRGYFKIRSGKSSIMRSDAPIGKCNSECITPNGSIPNDKPFQNVNRITYGACPRYVKQSTLKLATGMRNVPEKQTRGIFGAIAGFIENGWEGMVDGWYGFRHQNSEGRGQAADLKSTQAAIDQINGKLNRLIGKTNEKFHQIEKEFSEVEGRIQDLEKYVEDTKIDLWSYNAELLVALENQHTIDLTDSEMNKLFEKTKKQLRENAEDMGNGCFKIYHKCDNACIGSIRNGTYDHNVYRDEALNNRFQIKGVELKSGYKDWILWISFAISCFLLCVALLGFIMWACQKGNIRCNICI

SEQ ID NO: 10670 - protein, 566 aa, Artificial Sequence; identical to SEQ ID NO: 6855
  derived and/or modified protein sequence (wt) from hemagglutinin__InfluenzaA__AHC59197

SEQ ID NO: 10671 - protein, 566 aa, Artificial Sequence
  derived and/or modified protein sequence (wt) from hemagglutinin__InfluenzaA__AHC59209
MKTIIALSYILCLVFAQEIPGNDNSTATLCLGHHAVPNGTIVKTITNDQIEVTNATELVQSSSTGEICNSPHQILDGENCTLIDALLGDPQCDDFQNKKWDLFVERSKAHSNCYPYDVPDYASLRSLVASSGTLEFNNESFNWTGVTQNGTSSACIRRSNNSFFSRLNWLTHLNFKYPALNVTMPNNEQFDKLYIWGVHHPGTDKDQIFLYAQASGRITVSTKRSQQAVIPNIGSRPRVRNIPSRVSIYWTIVKPGDILLINSTGNLIAPRGYFKIRSGKSSIMRSDAPIGECNSACITPNGSIPNDKPFQNVNRITYGACPRYVKQNTLKLATGMRNVPEKQTRGIFGAIAGFIENGWEGMVDGWYGFRHQNSEGRGQAADLKSTQAAIDQINGKLNRLIGKTNEKFHQIEKEFSEVEGRIQDLEKYVEDTKIDLWSYNAELLVALENQHTIDLTDSEMNKLFEKTKKQLRENAEDMGNGCFKIYHKCDNACIGSIRNGTYDHAVYRDEALNNRFQIKGVELKSGYKDWILWISFAISCFLLCVALLGFIMWACQKGNIRCNICI

SEQ ID NO: 10672 - protein, 566 aa, Artificial Sequence; identical to SEQ ID NO: 6982
  derived and/or modified protein sequence (wt) from hemagglutinin__InfluenzaA__AHC59221

SEQ ID NO: 10673 - protein, 566 aa, Artificial Sequence; identical to SEQ ID NO: 10651
  derived and/or modified protein sequence (wt) from hemagglutinin__InfluenzaA__AHC59245

SEQ ID NO: 10674 - protein, 566 aa, Artificial Sequence; identical to SEQ ID NO: 10618
  derived and/or modified protein sequence (wt) from hemagglutinin__InfluenzaA__AHC59257

SEQ ID NO: 10675 - protein, 566 aa, Artificial Sequence; identical to SEQ ID NO: 7782
  derived and/or modified protein sequence (wt) from hemagglutinin__InfluenzaA__AHC59269

SEQ ID NO: 10676 - protein, 566 aa, Artificial Sequence; identical to SEQ ID NO: 10618
  derived and/or modified protein sequence (wt) from hemagglutinin__InfluenzaA__AHC59281

SEQ ID NO: 10677 - protein, 566 aa, Artificial Sequence; identical to SEQ ID NO: 6982
  derived and/or modified protein sequence (wt) from hemagglutinin__InfluenzaA__AHC59293

SEQ ID NO: 10678 - protein, 566 aa, Artificial Sequence
  derived and/or modified protein sequence (wt) from hemagglutinin__InfluenzaA__AHC59305
MKTIIALSYILCLVFAQKLPGNDNSTATLCLGHHAVPNGTIVKTITNDQIEVTNATELVQSSSTGEICSSPHQILDGENCTLIDALLGDPQCDGFQNKKWDLFVERSKAHSNCYPYDVPDYASLRSLVASSGTLEFNNESFNWTGVTQNGTSSACIRRSNNSFFSRLNWLTHLNFKYPALNVTMPNNEQFDKLYIWGVHHPGTDKDQIFLYAQASGRITVSTKRSQQAVIPNIGSRPRVRNIPSRVSIYWTIVKPGDILLINSTGNLIAPRGYFKIRSGKSSIMRSDAPIGKCNSACITPNGSIPNDKPFQNVNRITYGACPRYVKQNTLKLATGMRNVPEKQTRGIFGAIAGFIENGWEGMVDGWYGFRHQNSEGRGQAADLKSTQAAIDQINGKLNRLIGKTNEKFHQIEKEFSEVEGRIQDLEKYVEDTKIDLWSYNAELLVALENQHTIDLTDSEMNKLFEKTKKQLRENAEDMGNGCFKIYHKCDNACIGSIRNGTYDHDVYRDEALNNRFQIKGVELKSGYKDWILWISFAISCFLLCVALLGFIMWACQKGNIRCNICI

SEQ ID NO: 10679 - protein, 566 aa, Artificial Sequence
  derived and/or modified protein sequence (wt) from hemagglutinin__InfluenzaA__AHC59329
MKTIIALSYILCLVFAQKLPGNDNSTATLCLGHHAVPNGTIVKTITNDRIEVTNATELVQNSSIGEICDSPHQILDGENCTLIDALLGDPQCDGFQNKKWDLFVERSKAYSNCYPYDVPDYASLRSLVASSGTLEFNNESFNWTGVTQNGTSSACIRRSNNSFFSRLNWLTHLNFKYPALNVTMPNNEQFDKLYIWGVHHPGTEKDQIFLYAQSSGRITVSTKRSQQAVIPNIGSRPRIRNIPSRISIYWTIVKPGDILLINSTGNLIAPRGYFKIRSGKSSIMRSDAPIGKCKSECITPNGSIPNDKPFQNVNRITYGACPRYVKQSTLKLATGMRNVPEKQTRGIFGAIAGFIENGWEGMVDGWYGFRHQNSEGRGQAADLKSTQAAIDQINGKLNRLIGKTNEKFHQIEKEFSEVEGRIQDLEKYVEDTKIDLWSYNAELLVALENQHTIDLTDSEMNKLFEKTKKQLRENAEDMGNGCFKIYHKCDNACIGSIRNGTYDHDVYRDEALNNRFQIKGVELKSGYKDWILWISFAISCFLLCVALLGFIMWACQKGNIRCNICI

SEQ ID NO: 10680 - protein, 566 aa, Artificial Sequence; identical to SEQ ID NO: 9074
  derived and/or modified protein sequence (wt) from hemagglutinin__InfluenzaA__AHC59341

SEQ ID NO: 10681 - protein, 566 aa, Artificial Sequence; identical to SEQ ID NO: 10618
  derived and/or modified protein sequence (wt) from hemagglutinin__InfluenzaA__AHC59365

SEQ ID NO: 10682 - protein, 566 aa, Artificial Sequence
  derived and/or modified protein sequence (wt) from hemagglutinin__InfluenzaA__AHC59377
MKTIIALSYILCLVFAQKLPGNDNSTATLCLGHHAVPNGTVVKTITNDQIEVTNATELVQNSSTGEICDSPHQILDGENCTLIDALLGDPQCDGFQNKKWDLFVERSKAYSNCYPYDVPDYASLRSLVASSGTLEFNNESFNWTGVTQNGTSSACIRRSNNSFFSRLNWLTHLNFKYPALNVTMPNNEQFDKLYIWGVHHPGTDKDQIFLYAQASGRITVSTKRSQQAVIPNIGSRPRVRNIPSRISIYWTIVKPGDILLINSTGNLIAPRGYFKIRSGKSSIMRSDAPIGKCNSECITPNGSIPNDKPFQNVNRITYGACPRYVKQNTLKLATGMRNVPEKQTRGIFGAIAGFIENGWEGMVDGWYGFRHQNSEGRGQAADLKSTQAAIDQINGKLNRLIGKTNEKFHQIEKEFSEVEGRIQNLEKYVEDTKIDLWSYNAELLVALENQHTIDLTDSEMNKLFEKTKKQLRENAEDMGNGCFKIYHKCDNACIGSIRNGTYDHDVYRDEALNNRFQIKGVELKSGYKDWILWISFAISCFLLCVALLGFIMWACQKGNIRCNICI

SEQ ID NO: 10683 - protein, 566 aa, Artificial Sequence; identical to SEQ ID NO: 6982
  derived and/or modified protein sequence (wt) from hemagglutinin__InfluenzaA__AHC59413

SEQ ID NO: 10684 - protein, 566 aa, Artificial Sequence; identical to SEQ ID NO: 7782
  derived and/or modified protein sequence (wt) from hemagglutinin__InfluenzaA__AHC59425

SEQ ID NO: 10685 - protein, 566 aa, Artificial Sequence; identical to SEQ ID NO: 9074
  derived and/or modified protein sequence (wt) from hemagglutinin__InfluenzaA__AHC59437

SEQ ID NO: 10686 - protein, 566 aa, Artificial Sequence
  derived and/or modified protein sequence (wt) from hemagglutinin__InfluenzaA__AHC59449
MKTIIALSYILCLVFAQKLPGNDNSTATLCLGHHAVPNGTIVKTITNDQIEVTNATELVQSSSTGEICNSPHQILDGENCTLIDALLGDPQCDGFQNKKWDLFVERSKAHSNCYPYDVPDYASLRSLVASSGTLEFNNESFNWTGVTQNGTSSACIRGSNNSFFSRLNWLTHLNFKYPALNVTMPNNEQFDKLYIWGVHHPGTDKDQIFLYAQASGRITVSTKRSQQAVIPNIGSRPRVRNIPSRVSIYWTIVKPGDILLINSTGNLIAPRGYFKIRSGKSSIMRSDAPIGKCNSACITPNGSIPNDKPFQNVNRITYGACPRYVKQNTLKLATGMRNVPEKQTRGIFGAIAGFIENGWEGMVDGWYGFRHQNSEGRGQAADLKSTQAAIDQINGKLNRLIGRTNEKFHQIEKEFSEVEGRIQDLEKYVEDTKIDLWSYNAELLVALENQHTIDLTDSEMNKLFEKTKKQLRENAEDMGNGCFKIYHKCDNACIGSIRNGTYDHDVYRDEALNNRFQIKGVELKSGYKDWILWISFAISCFLLCVALLGFIMWACQKGNIRCNICI

SEQ ID NO: 10687 - protein, 566 aa, Artificial Sequence; identical to SEQ ID NO: 6855
  derived and/or modified protein sequence (wt) from hemagglutinin__InfluenzaA__AHC59461

SEQ ID NO: 10688 - protein, 566 aa, Artificial Sequence; identical to SEQ ID NO: 10679
  derived and/or modified protein sequence (wt) from hemagglutinin__InfluenzaA__AHC59473

SEQ ID NO: 10689 - protein, 566 aa, Artificial Sequence; identical to SEQ ID NO: 6982
  derived and/or modified protein sequence (wt) from hemagglutinin__InfluenzaA__AHC59485

SEQ ID NO: 10690 - protein, 566 aa, Artificial Sequence; identical to SEQ ID NO: 6982
  derived and/or modified protein sequence (wt) from hemagglutinin__InfluenzaA__AHC59497

SEQ ID NO: 10691 - protein, 566 aa, Artificial Sequence; identical to SEQ ID NO: 6855
  derived and/or modified protein sequence (wt) from hemagglutinin__InfluenzaA__AHC59509

SEQ ID NO: 10692 - protein, 566 aa, Artificial Sequence; identical to SEQ ID NO: 6855
  derived and/or modified protein sequence (wt) from hemagglutinin__InfluenzaA__AHC59521

SEQ ID NO: 10693 - protein, 566 aa, Artificial Sequence
  derived and/or modified protein sequence (wt) from hemagglutinin__InfluenzaA__AHC59533
MKTIIALSYILCLVFAQKLPGNDNSTATLCLGHHAVPNGTIVKTITNDQIEVTNATELVQSSSTGEICNSPHQILDGENCTLIDALLGDPQCDGFQNKKWDLFVERSKAHSNCYPYDVPDYASLRSLVASSGTLEFKNESFNWTGVTQNGTSSACIRRSNNSFFSRLNWLTHLNFKYPALNVTMPNNEQFDKLYIWGVHHPGTDKDQIFLYAQASGRITVSTKRSQQAVIPNIGSRPRVRNIPSRVSIYWTIVKPGDILLINSTGNLIAPRGYFKIRSGKSSIMRSDAPIGKCNSACITPNGSIPNDKPFQNVNRITYGACPRYVKQNTLKLATGMRNVPEKQTRGIFGAIAGFIENGWEGMVDGWYGFRHQNSEGRGQAADLKSTQAAIDQINGKLNRLIGKTNEKFHQIEKEFSEVEGRIQDLEKYVEDTKIDLWSYNAELLVALENQHTIDLTDSEMNKLFEKTKKQLRENAEDMGNGCFKIYHKCDNACIGSIRNGTYDHDVYRDEALNNRFQIKGVELKSGYKDWILWISFAISCFLLCVALLGFIMWACQKGNIRCNICI

SEQ ID NO: 10694 - protein, 566 aa, Artificial Sequence; identical to SEQ ID NO: 6982
  derived and/or modified protein sequence (wt) from hemagglutinin__InfluenzaA__AHC59545

SEQ ID NO: 10695 - protein, 566 aa, Artificial Sequence; identical to SEQ ID NO: 10618
  derived and/or modified protein sequence (wt) from hemagglutinin__InfluenzaA__AHC59557

SEQ ID NO: 10696 - protein, 566 aa, Artificial Sequence
  derived and/or modified protein sequence (wt) from hemagglutinin__InfluenzaA__AHC59569
MKTIIALSYILCLVFAQKLPGNDNSTATLCLGHHAVPNGTIVKTITNDQIEVTNATELVQNSSTGEICDSPHQILDGENCTLIDALLGDPQCDGFQNKKWDLFVERSKAYSNCYPYDVPDYASLRSLVASSGTLEFNNESFNWTGVTQNGTSSACIRRSNNSFFSRLNWLTHLNFKYPALNVTMPNNEQFDKLYIWGVHHPGTDKDQIFLYAQASGRITVSTKRSQQAVIPNIGSRPRVRNIPSRISIYWTIVKPGDILLINSTGNLIAPRGYFKIRSGKSSIMRSDAPIGKCNSECITPNGSIPNDKPFQNVNRITYGACPRYVKQNTLKLATGMRNVPEKQTRGIFGAIAGFIENGWEGMMDGWYGFRHQNSEGRGQAADLKSTQAAIDQINGKLNRLIGKTNEKFHQIEKEFSEVEGRIQDLEKYVEDTKIDLWSYNAELLVALENQHTIDLTDSEMNKLFEKTKKQLRENAEDMGNGCFKIYHKCDNACIGSIRNGTYDHDVYRDEALNNRFQIKGVELKSGYKDWILWISFAISCFLLCVALLGFIMWACQKGNIRCNICI

SEQ ID NO: 10697 - protein, 566 aa, Artificial Sequence; identical to SEQ ID NO: 6982
  derived and/or modified protein sequence (wt) from hemagglutinin__InfluenzaA__AHC59581

SEQ ID NO: 10698 - protein, 566 aa, Artificial Sequence; identical to SEQ ID NO: 6855
  derived and/or modified protein sequence (wt) from hemagglutinin__InfluenzaA__AHC59593

SEQ ID NO: 10699 - protein, 566 aa, Artificial Sequence; identical to SEQ ID NO: 9074
  derived and/or modified protein sequence (wt) from hemagglutinin__InfluenzaA__AHC59605

SEQ ID NO: 10700 - protein, 566 aa, Artificial Sequence; identical to SEQ ID NO: 6982
  derived and/or modified protein sequence (wt) from hemagglutinin__InfluenzaA__AHC59617

SEQ ID NO: 10701 - protein, 566 aa, Artificial Sequence; identical to SEQ ID NO: 6982
  derived and/or modified protein sequence (wt) from hemagglutinin__InfluenzaA__AHC59629

SEQ ID NO: 10702 - protein, 566 aa, Artificial Sequence; identical to SEQ ID NO: 10618
  derived and/or modified protein sequence (wt) from hemagglutinin__InfluenzaA__AHC59641

SEQ ID NO: 10703 - protein, 566 aa, Artificial Sequence
  derived and/or modified protein sequence (wt) from hemagglutinin__InfluenzaA__AHC59653
MKTIIALSYILCLVFAQKLPGNDNSTATLCLGHHAVPNGTIVKTITNDQIEVTNATELVQSSSTGEICNSPHQILDGENCTLIDALLGDPQCDGFQNKKWDLFVERSKAHSNCYPYDVPDYASLRSLVASSGTLEFNNESFNWTGVTQNGTSSACIRRSNNSFFSRLNWLTHLNFKYPALNVTMPNNEQFDKLYIWGVHHPGTDKDQIFLYAQASGRITVSTQRSQQAVIPNIGSRPRVRNIPSRVSIYWTIVKPGDILLINSTGNLIAPRGYFKIRSGKSSIMRSDAPIGKCNSACITPNGSIPNDKPFQNVNRITYGACPRYVKQNTLKLATGMRNVPEKQTRGIFGAIAGFIENGWEGMVDGWYGFRHQNSEGRGQAADLKSTQAAIDQINGKLNRLIGKTNEKFHQIEKEFSEVEGRIQDLEKYVEDTKIDLWSYNAELLVALENQHTIDLTDSEMNKLFEKTKKQLRENAEDMGNGCFKIYHKCDNACIGSIRNGTYDHDVYRDEALNNRFQIKGVELKSGYKDWILWISFAISCFLLCVALLGFIMWACQKGNIRCNICI

SEQ ID NO: 10704 - protein, 566 aa, Artificial Sequence; identical to SEQ ID NO: 6855
  derived and/or modified protein sequence (wt) from hemagglutinin__InfluenzaA__AHC59665

SEQ ID NO: 10705 - protein, 566 aa, Artificial Sequence; identical to SEQ ID NO: 6982
  derived and/or modified protein sequence (wt) from hemagglutinin__InfluenzaA__AHC59677

SEQ ID NO: 10706 - protein, 566 aa, Artificial Sequence; identical to SEQ ID NO: 10703
  derived and/or modified protein sequence (wt) from hemagglutinin__InfluenzaA__AHC59689

SEQ ID NO: 10707 - protein, 566 aa, Artificial Sequence; identical to SEQ ID NO: 10618
  derived and/or modified protein sequence (wt) from hemagglutinin__InfluenzaA__AHC59701

SEQ ID NO: 10708 - protein, 566 aa, Artificial Sequence; identical to SEQ ID NO: 6855
  derived and/or modified protein sequence (wt) from hemagglutinin__InfluenzaA__AHC59713

SEQ ID NO: 10709 - protein, 566 aa, Artificial Sequence; identical to SEQ ID NO: 10629
  derived and/or modified protein sequence (wt) from hemagglutinin__InfluenzaA__AHC59737

SEQ ID NO: 10710 - protein, 566 aa, Artificial Sequence; identical to SEQ ID NO: 6855
  derived and/or modified protein sequence (wt) from hemagglutinin__InfluenzaA__AHC59749

SEQ ID NO: 10711 - protein, 566 aa, Artificial Sequence; identical to SEQ ID NO: 6982
  derived and/or modified protein sequence (wt) from hemagglutinin__InfluenzaA__AHC59761

SEQ ID NO: 10712 - protein, 566 aa, Artificial Sequence; identical to SEQ ID NO: 6982
  derived and/or modified protein sequence (wt) from hemagglutinin__InfluenzaA__AHC59773

SEQ ID NO: 10713 - protein, 566 aa, Artificial Sequence; identical to SEQ ID NO: 7782
  derived and/or modified protein sequence (wt) from hemagglutinin__InfluenzaA__AHC59785

SEQ ID NO: 10714 - protein, 566 aa, Artificial Sequence; identical to SEQ ID NO: 6982
  derived and/or modified protein sequence (wt) from hemagglutinin__InfluenzaA__AHC59797

SEQ ID NO: 10715 - protein, 566 aa, Artificial Sequence; identical to SEQ ID NO: 9074
  derived and/or modified protein sequence (wt) from hemagglutinin__InfluenzaA__AHC59809

SEQ ID NO: 10716 - protein, 566 aa, Artificial Sequence
  derived and/or modified protein sequence (wt) from hemagglutinin__InfluenzaA__AHC59821
MKTIIALSYILCLVFAQKLPGNDNSTATLCLGHHAVPNGTIVKTITNDQIEVTNATELVQNSSTGEICDSPHQILDGENCTLIDALLGDPQCDGLQNKKWDLFVERSKAYSNCYPYDVPDYASLRSLVASSGTLEFNNESFNWTGVTQNGTSSACIRRSNNSFFSRLNWLTHLNFKYPALNVTMPNNEQFDKLYIWGVHHPGTDKDQIFLYAQASGRITVSTKRSQQAVIPNIGSRPRVRNIPSRISIYWTIVKPGDILLINSTGNLIAPRGYFKIRSGKSSIMRSDAPIGKCNSECITPNGSIPNDKPFQNVNRITYGACPRYVKQNTLKLATGMRNVPEKQTRGIFGAIAGFIENGWEGMVDGWYGFRHQNSEGRGQAADLKSTQAAIDQINGKLNRLIGKTNEKFHQIEKEFSEVEGRIQDLEKYVEDTKIDLWSYNAELLVALENQHTIDLTDSEMNKLVEKTKKQLRENAEDMGNGCFKIYHKCDNACIGSIRNGTYDHDVYRDEALNNRFQIKGVELKSGYKDWILWISFAISCFLLCVALLGFIMWACQKGNIRCNICI

SEQ ID NO: 10717 - protein, 566 aa, Artificial Sequence; identical to SEQ ID NO: 10618
  derived and/or modified protein sequence (wt) from hemagglutinin__InfluenzaA__AHC59833

SEQ ID NO: 10718 - protein, 566 aa, Artificial Sequence; identical to SEQ ID NO: 10617
  derived and/or modified protein sequence (wt) from hemagglutinin__InfluenzaA__AHC59845

SEQ ID NO: 10719 - protein, 566 aa, Artificial Sequence; identical to SEQ ID NO: 7782
  derived and/or modified protein sequence (wt) from hemagglutinin__InfluenzaA__AHC59857

SEQ ID NO: 10720 - protein, 566 aa, Artificial Sequence; identical to SEQ ID NO: 6982
  derived and/or modified protein sequence (wt) from hemagglutinin__InfluenzaA__AHC59869

SEQ ID NO: 10721 - protein, 566 aa, Artificial Sequence; identical to SEQ ID NO: 6982
  derived and/or modified protein sequence (wt) from hemagglutinin__InfluenzaA__AHC59881

SEQ ID NO: 10722 - protein, 566 aa, Artificial Sequence; identical to SEQ ID NO: 6855
  derived and/or modified protein sequence (wt) from hemagglutinin__InfluenzaA__AHC59892

SEQ ID NO: 10723 - protein, 566 aa, Artificial Sequence
  derived and/or modified protein sequence (wt) from hemagglutinin__InfluenzaA__AHC59904
MKTIIALSYILCLVFAQKLPGNDNSTATLCLGHHAVPNGTIVKTITNDQIEVTNATELVQSSSTGEICNSPHQILDGENCTLIDALLGDPQCDGFQNKKWDLFVERSKAHSNCYPYDVPDYASLRSLVASSGTLEFNNESFNWTGVTQNGTSSACIRGSNNSFFSRLNWLTHLNFKYPALNVTMPNNEQFDKLYIWGVHHPGTDKDQIFLYAQASGRITVSTKRSQQAVIPNIGSRPRVRNIPSRVSIYWTIVKPGDILLINSTGNLIAPRGYFKIRSGKSSIMRSDAPIGKCNSACITPNGSIPNDKPFQNVNRITYGACPRYVKQNTLKLATGMRNVPEKQTRGIFGAIAGFIENGWEGMMDGWYGFRHQNSEGRGQAADLKSTQAAIDQINGKLNRLIGKTNEKFHQIEKEFSEVEGRIQDLEKYVEDTKIDLWSYNAELLVALENQHTIDLTDSEMNKLFEKTKKQLRENAEDMGNGCFKIYHKCDNACIGSIRNGTYDHDVYRDEALNNRFQIKGVELKSGYKDWILWISFAISCFLLCVALLGFIMWACQKGNIRCNICI

SEQ ID NO: 10724 - protein, 566 aa, Artificial Sequence
  derived and/or modified protein sequence (wt) from hemagglutinin__InfluenzaA__AHC59915
MKTVIALSYILCLAFAQKLPGNDNSTATLCLGHHAVPNGTIVKTITNDQIEVTNATELVQSSSTGEICDSPHQILDGENCTLIDALLGDPQCDGFQNKKWDLFVERSKAYSNCYPYDVPDYASLRSLVASSGTLEFNNESFNWTGVTQNGTSSACIRRSNNSFFSRLNWLTHLNFKYPALNVTMPNNEQFDKLYIWGVHHPGTDKDQIFLYAQASGRITVSTKRSQQAVIPNIGSRPRVRNIPSRISIYWTIVKPGDILLINSTGNLIAPRGYFKIRSGKSSIMRSDAPIGKCNSECITPNGSIPNDKPFQNVNRITYGACPRYVKQNTLKLATGMRNVPEKQTRGIFGAIAGFIENGWEGMVDGWYGFRHQNSEGRGQAADLKSTQAAIDQINGKLNRLIGKTNEKFHQIEKEFSEVEGRIQDLEKYVEDTKIDLWSYNAELLVALENQHTIDLTDSEMNKLFEKTKKQLRENAEDMGNGCFKIYHKCDNACIGSIRNGTYDHDVYRDEALNNRFQIKGVELKSGYKDWILWISFAISCFLLCVALLGFIMWACQKGNIRCNICI

SEQ ID NO: 10725 - protein, 566 aa, Artificial Sequence; identical to SEQ ID NO: 6982
  derived and/or modified protein sequence (wt) from hemagglutinin__InfluenzaA__AHC59939

SEQ ID NO: 10726 - protein, 566 aa, Artificial Sequence
  derived and/or modified protein sequence (wt) from hemagglutinin__InfluenzaA__AHC59963
MKTIIALSYILCLVFAQKLPGNDNSTATLCLGHHAVPNGTIVKTITNDQIEVTNATELVQSSSTGEICDSPHQILDGENCTLIDALLGDPQCDGFQNKKWDLFVERSKAYSNCYPYDVPDYASLRSLVASSGTLEFNNESFNWTGVTQNGTSSACIRRSNSSFFSRLNWLTHLNFKYPALNVTMPNNEQFDKLYIWGVHHPGTDKDQIFLYAQSSGRITVSTKRSQQAVIPNIGSRPRIRNIPSRISIYWTIVKPGDILLINSTGNLIAPRGYFKIRSGKSSIMRSDAPIGKCNSECITPNGSIPNDKPFQNVNRITYGACPRYIKQSTLKLATGMRNVPEKQTRGIFGAIAGFIENGWEGMVDGWYGFRHQNSEGRGQAADLKSTQAAIDQINGKLNRLIGKTNEKFHQIEKEFSEVEGRIQDLEKYVEDTKIDLWSYNAELLVALENQHTIDLTDSEMNKLFEKTKKQLRENAEDMGNGCFKIYHKCDNACIGSIRNGTYNHDVYRDEALNNRFQIKGVELKSGYKDWILWISFAISCFLLCVALLGFIMWACQKGNIRCNICI

SEQ ID NO: 10727 - protein, 566 aa, Artificial Sequence; identical to SEQ ID NO: 6855
  derived and/or modified protein sequence (wt) from hemagglutinin__InfluenzaA__AHC59987

SEQ ID NO: 10728 - protein, 566 aa, Artificial Sequence; identical to SEQ ID NO: 6855
  derived and/or modified protein sequence (wt) from hemagglutinin__InfluenzaA__AHC59999

SEQ ID NO: 10729 - protein, 566 aa, Artificial Sequence; identical to SEQ ID NO: 6982
  derived and/or modified protein sequence (wt) from hemagglutinin__InfluenzaA__AHC60011

SEQ ID NO: 10730 - protein, 566 aa, Artificial Sequence; identical to SEQ ID NO: 6855
  derived and/or modified protein sequence (wt) from hemagglutinin__InfluenzaA__AHC60023

SEQ ID NO: 10731 - protein, 566 aa, Artificial Sequence; identical to SEQ ID NO: 7782
  derived and/or modified protein sequence (wt) from hemagglutinin__InfluenzaA__AHC60035

SEQ ID NO: 10732 - protein, 566 aa, Artificial Sequence; identical to SEQ ID NO: 7782
  derived and/or modified protein sequence (wt) from hemagglutinin__InfluenzaA__AHC60047

SEQ ID NO: 10733 - protein, 566 aa, Artificial Sequence
  derived and/or modified protein sequence (wt) from hemagglutinin__InfluenzaA__AHC60059
MKTIIALSYILCLVFAQKLPGNDNSTATLCLGHHAVPNGTIVKTITNDQIEVTNATELVQNSSTGEICDSPHQILDGENCTLIDALLGDPQCDGFQNKKWDLFVERSKAYSNCYPYDVPDYASLRSLVASSGTLEFNNESFNWTGVTQNGTSSACIRRSNNSFFSRLNWLTHLNFKYPALNVTMPNNEQFDKLYIWGVHHPGTDKDQIFLYAQASGRITVSTKRSQQAVIPNIGSRPRVRNIPSRISIYWTIVKPGDILLINSTGNLIAPRGYFKIRSGKSSIMRSDAPIGKCNSACITPNGSIPNDKPFQNVNRITYGACPRYVKQNTLKLATGMRNVPEKQTRGIFGAIAGFIENGWEGMVDGWYGFRHQNSEGRGQAADLKSTQAAIDQINGKLNRLIGKTNEKFHQIEKEFSEVEGRIQDLEKYVEDTKIDLWSYNAELLVALENQHTIDLTDSEMNKLFEKTKKQLRENAEDMGNGCFKIYHKCDNACIGSIRNGTYNHDVYRDEALNNRFQIKGVELKSGYKDWILWISFAISCFLLCVALLGFIMWACQKGNIRCNICI

SEQ ID NO: 10734 - protein, 566 aa, Artificial Sequence; identical to SEQ ID NO: 9074
  derived and/or modified protein sequence (wt) from hemagglutinin__InfluenzaA__AHC60071

SEQ ID NO: 10735 - protein, 566 aa, Artificial Sequence; identical to SEQ ID NO: 10618
  derived and/or modified protein sequence (wt) from hemagglutinin__InfluenzaA__AHC60083

SEQ ID NO: 10736 - protein, 566 aa, Artificial Sequence; identical to SEQ ID NO: 7782
  derived and/or modified protein sequence (wt) from hemagglutinin__InfluenzaA__AHC60095

SEQ ID NO: 10737 - protein, 566 aa, Artificial Sequence
  derived and/or modified protein sequence (wt) from hemagglutinin__InfluenzaA__AHC60107
MKTIIALSYILCLVFAQKLPGNDNSTATLCLGHHAVPNGTIVKTITNDQIEVTNATELVQNSSTGEICDSPHQIIDGENCTLIDALLGDPQCDGFQNKKWDLFVERSKAYSNCYPYDVPDYASLRSLVASSGTLEFNNESFNWTGVTQNGTSSACIRRSNNSFFSRLNWLTHLNFKYPALNVTMPNNEQFDKLYIWGVHHPGTDKDQIFLYAQASGRITVSTKRSQQAVIPNIGSRPRVRNIPSRISIYWTIVKPGDILLINSTGNLIAPRGYFKIRSGKSSIMRSDAPIGKCNSECITPNGSIPNDKPFQNVNRITYGACPRYVKQNTLKLATGMRNVPEKQTRGIFGAIAGFIENGWEGMVDGWYGFRHQNSEGRGQAADLKSTQAAIDQINGKLNRLIGKTNEKFHQIEKEFSEVEGRIQDLEKYVEDTKIDLWSYNAELLVALENQHTIDLTDSEMNKLFEKTKKQLRENAEDMGNGCFKIYHKCDNACIGSIRNGTYDHDVYRDEALNNRFKIKGVELKSGYKDWILWISFAISCFLLCVALLGFIMWACQKGNIRCNICI

SEQ ID NO: 10738 - protein, 566 aa, Artificial Sequence; identical to SEQ ID NO: 6982
  derived and/or modified protein sequence (wt) from hemagglutinin__InfluenzaA__AHC60119

SEQ ID NO: 10739 - protein, 566 aa, Artificial Sequence; identical to SEQ ID NO: 6982
  derived and/or modified protein sequence (wt) from hemagglutinin__InfluenzaA__AHC60131

SEQ ID NO: 10740 - protein, 566 aa, Artificial Sequence; identical to SEQ ID NO: 10648
  derived and/or modified protein sequence (wt) from hemagglutinin__InfluenzaA__AHC60143

SEQ ID NO: 10741 - protein, 566 aa, Artificial Sequence
  derived and/or modified protein sequence (wt) from hemagglutinin__InfluenzaA__AHC60155
MKTVIALSYILCLAFAQKLPGNDNSTATLCLGHHAVPNGTIVKTITNDQIEVTNATELVQSSPTGEICDSPHQILDGENCTLIDALLGDPQCDGFQNKKWDLFVERSKAYSNCYPYDVPDYASLRSLVASSGTLEFNNESFNWTGVTQNGTSSACIRRSNNSFFSRLNWLTHLNFKYPALNVTMPNNEQFDKLYIWGVHHPGTDKDQIFLYAQASGRITVSTKRSQQAVIPNIGSRPRVRNIPSRISIYWTIVKPGDILLINSTGNLIAPRGYFKIRSGKSSIMRSDAPIGKCNSECITPNGSIPNDKPFQNVNRITYGACPRYVKQNTLKLATGMRNVPEKQTRGIFGAIAGFIENGWEGMVDGWYGFRHQNSEGRGQAADLKSTQAAIDQINGKLNRLIGKTNEKFHQIEKEFSEVEGRIQDLEKYVEDTKIDLWSYNAELLVALENQHTIDLTDSEMNKLFEKTKKQLRENAEDMGNGCFKIYHKCDNACIGSIRNGTYDHDVYRDEALNNRFQIKGVELKSGYKDWILWISFAISCFLLCVALLGFIMWACQKGNIRCNICI

SEQ ID NO: 10742 - protein, 566 aa, Artificial Sequence; identical to SEQ ID NO: 6855
  derived and/or modified protein sequence (wt) from hemagglutinin__InfluenzaA__AHC60167

SEQ ID NO: 10743 - protein, 566 aa, Artificial Sequence; identical to SEQ ID NO: 7782
  derived and/or modified protein sequence (wt) from hemagglutinin__InfluenzaA__AHC60179

SEQ ID NO: 10744 - protein, 566 aa, Artificial Sequence; identical to SEQ ID NO: 10693
  derived and/or modified protein sequence (wt) from hemagglutinin__InfluenzaA__AHC60191

SEQ ID NO: 10745 - protein, 566 aa, Artificial Sequence; identical to SEQ ID NO: 10693
  derived and/or modified protein sequence (wt) from hemagglutinin__InfluenzaA__AHC60203

SEQ ID NO: 10746 - protein, 566 aa, Artificial Sequence; identical to SEQ ID NO: 9074
  derived and/or modified protein sequence (wt) from hemagglutinin__InfluenzaA__AHC60215

SEQ ID NO: 10747 - protein, 566 aa, Artificial Sequence; identical to SEQ ID NO: 7782
  derived and/or modified protein sequence (wt) from hemagglutinin__InfluenzaA__AHC60239

SEQ ID NO: 10748 - protein, 566 aa, Artificial Sequence; identical to SEQ ID NO: 7782
  derived and/or modified protein sequence (wt) from hemagglutinin__InfluenzaA__AHC60251

SEQ ID NO: 10749 - protein, 566 aa, Artificial Sequence
  derived and/or modified protein sequence (wt) from hemagglutinin__InfluenzaA__AHC60263
MKTIIALSYILCLVFAQKLPGNENSTATLCLGHHAVPNGTIVKTITNDQIEVTNATELVQNSSTGEICDSPHQILDGENCTLIDALLGDPQCDGFQNKKWDLFVERSKAYSNCYPYDVPDYASLRSLVASSGTLEFNNESFNWTGVTQNGTSSACIRRSNNSFFSRLNWLTHLNFKYPALNVTMPNNEQFDKLYIWGVHHPGTDKDQIFLYAQASGRITVSTKRSQQAVIPNIGSRPRVRNIPSRISIYWTIVKPGDILLINSTGNLIAPRGYFKIRSGKSSIMRSDAPIGKCNSECITPNGSIPNDKPFQNVNRITYGACPRYVKQNTLKLATGMRNVPEKQTRGIFGAIAGFIENGWEGMVDGWYGFRHQNSEGRGQAADLKSTQAAIDQINGKLNRLIGKTNEKFHQIEKEFSEVEGRIQDLEKYVEDTKIDLWSYNAELLVALENQHTIDLTDSEMNKLFEKTKKQLRENAEDMGNGCFKIYHKCDNACIGSIRNGTYDHDVYRDEALNNRFQIKGVELKSGYKDWILWISFAISCFLLCVALLGFIMWACQKGNIRCNICI

SEQ ID NO: 10750 - protein, 566 aa, Artificial Sequence; identical to SEQ ID NO: 6855
  derived and/or modified protein sequence (wt) from hemagglutinin__InfluenzaA__AHC60275

SEQ ID NO: 10751 - protein, 566 aa, Artificial Sequence; identical to SEQ ID NO: 10737
  derived and/or modified protein sequence (wt) from hemagglutinin__InfluenzaA__AHC60287

SEQ ID NO: 10752 - protein, 566 aa, Artificial Sequence; identical to SEQ ID NO: 10618
  derived and/or modified protein sequence (wt) from hemagglutinin__InfluenzaA__AHC60299

SEQ ID NO: 10753 - protein, 566 aa, Artificial Sequence
  derived and/or modified protein sequence (wt) from hemagglutinin__InfluenzaA__AHC60311
MKTIIALSYILCLVFAQKLPGNDNSTATLCLGHHAVPNGTIVKTITNDQIEVTNATELVQNSSTGEICDSPHQILDGENCTLIDALLGDPQCDGFQNKKWDLFVERSKAYSNCYPYDVPDYASLRSLVASSGTLEFDNESFNWTGVTQNGTSSACIRRSNNSFFSRLNWLTHLNFKYPALNVTMPNNEQFDKLYIWGVHHPGTDKDQIFLYAQASGRITVSTKRSQQAVIPNIGSRPRVRNIPSRISIYWTIVKPGDILLINSTGNLIAPRGYFKIRSGKSSIMRSDAPIGKCNSECITPNGSIPNDKPFQNVNRITYGACPRYVKQNTLKLATGMRNVPEKQTRGIFGAIAGFIENGWEGMVDGWYGFRHQNSEGRGQAADLKSTQAAIDQINGKLNRLIGKTNEKFHQIEKEFSEVEGRIQDLEKYVEDTKIDLWSYNAELLVALENQHTIDLTDSEMNKLFEKTKKQLRENAEDMGNGCFKIYHKCDNACIGSIRNGTYDHDVYRDEALNNRFQIKGVELKSGYKDWILWISFAISCFLLCVALLGFIMWACQKGNIRCNICI

SEQ ID NO: 10754 - protein, 566 aa, Artificial Sequence; identical to SEQ ID NO: 7782
  derived and/or modified protein sequence (wt) from hemagglutinin__InfluenzaA__AHC60323

SEQ ID NO: 10755 - protein, 566 aa, Artificial Sequence; identical to SEQ ID NO: 9074
  derived and/or modified protein sequence (wt) from hemagglutinin__InfluenzaA__AHC60335

SEQ ID NO: 10756 - protein, 566 aa, Artificial Sequence; identical to SEQ ID NO: 6855
  derived and/or modified protein sequence (wt) from hemagglutinin__InfluenzaA__AHC60347

SEQ ID NO: 10757 - protein, 566 aa, Artificial Sequence; identical to SEQ ID NO: 6982
  derived and/or modified protein sequence (wt) from hemagglutinin__InfluenzaA__AHC60359

SEQ ID NO: 10758 - protein, 566 aa, Artificial Sequence; identical to SEQ ID NO: 10679
  derived and/or modified protein sequence (wt) from hemagglutinin__InfluenzaA__AHC60371

SEQ ID NO: 10759 - protein, 566 aa, Artificial Sequence; identical to SEQ ID NO: 6855
  derived and/or modified protein sequence (wt) from hemagglutinin__InfluenzaA__AHC60383

SEQ ID NO: 10760 - protein, 566 aa, Artificial Sequence; identical to SEQ ID NO: 6982
  derived and/or modified protein sequence (wt) from hemagglutinin__InfluenzaA__AHC60395

SEQ ID NO: 10761 - protein, 566 aa, Artificial Sequence; identical to SEQ ID NO: 10693
  derived and/or modified protein sequence (wt) from hemagglutinin__InfluenzaA__AHC60407

SEQ ID NO: 10762 - protein, 566 aa, Artificial Sequence; identical to SEQ ID NO: 6855
  derived and/or modified protein sequence (wt) from hemagglutinin__InfluenzaA__AHC60419

SEQ ID NO: 10763 - protein, 566 aa, Artificial Sequence; identical to SEQ ID NO: 6982
  derived and/or modified protein sequence (wt) from hemagglutinin__InfluenzaA__AHC60431

SEQ ID NO: 10764 - protein, 566 aa, Artificial Sequence; identical to SEQ ID NO: 6855
  derived and/or modified protein sequence (wt) from hemagglutinin__InfluenzaA__AHC60455

SEQ ID NO: 10765 - protein, 566 aa, Artificial Sequence; identical to SEQ ID NO: 6855
  derived and/or modified protein sequence (wt) from hemagglutinin__InfluenzaA__AHC60467

SEQ ID NO: 10766 - protein, 566 aa, Artificial Sequence; identical to SEQ ID NO: 10617
  derived and/or modified protein sequence (wt) from hemagglutinin__InfluenzaA__AHC60479

SEQ ID NO: 10767 - protein, 566 aa, Artificial Sequence; identical to SEQ ID NO: 7782
  derived and/or modified protein sequence (wt) from hemagglutinin__InfluenzaA__AHC60491

SEQ ID NO: 10768 - protein, 566 aa, Artificial Sequence
  derived and/or modified protein sequence (wt) from hemagglutinin__InfluenzaA__AHC60503
MKTIIALSYILCLVFAQKLPGNDNSTATLCLGHHAVPNGTIVKTITNDQIEVTNATELVQSSSTGEICNSPHQILDGENCTLIDALLGDPQCDGFQNKKWDLFVERSKAYSNCYPYDVPDYASLRSLVASSGTLEFNNESFNWTGVTQNGTSSACIRRSNNSFFSRLNWLTHLNFKYPALNVTMPNNEQFDKLYIWGVHHPGTDKDQIFLYAQASGRITVSTKRSQQAVIPNIGSRPRVRNIPSRISIYWTIVKPGDILLINSTGNLIAPRGYFKIRSGKSSIMRSDAPIGKCNSACITPNGSIPNDKPFQNVNRITYGACPRYVKQNTLKLATGMRNVPEKQTRGIFGAIAGFIENGWEGMVDGWYGFRHQNSEGRGQAADLKSTQAAIDQINGKLNRLIGKTNEKFHQIEKEFSEVEGRIQDLEKYVEDTKIDLWSYNAELLVALENQHTIDLTDSEMNKLFEKTKKQLRENAEDMGNGCFKIYHKCDNACIGSIRNGTYDHDVYRDEALNNRFQIKGVELKSGYKDWILWISFAISCFLLCVVLLGFIMWACQKGNIRCNICI

SEQ ID NO: 10769 - protein, 566 aa, Artificial Sequence; identical to SEQ ID NO: 6982
  derived and/or modified protein sequence (wt) from hemagglutinin__InfluenzaA__AHC60515

SEQ ID NO: 10770 - protein, 566 aa, Artificial Sequence; identical to SEQ ID NO: 7782
  derived and/or modified protein sequence (wt) from hemagglutinin__InfluenzaA__AHC60527

SEQ ID NO: 10771 - protein, 566 aa, Artificial Sequence; identical to SEQ ID NO: 6982
  derived and/or modified protein sequence (wt) from hemagglutinin__InfluenzaA__AHC60539

SEQ ID NO: 10772 - protein, 566 aa, Artificial Sequence; identical to SEQ ID NO: 10629
  derived and/or modified protein sequence (wt) from hemagglutinin__InfluenzaA__AHC60551

SEQ ID NO: 10773 - protein, 566 aa, Artificial Sequence; identical to SEQ ID NO: 9074
  derived and/or modified protein sequence (wt) from hemagglutinin__InfluenzaA__AHC60563

SEQ ID NO: 10774 - protein, 566 aa, Artificial Sequence; identical to SEQ ID NO: 9074
  derived and/or modified protein sequence (wt) from hemagglutinin__InfluenzaA__AHC60575

SEQ ID NO: 10775 - protein, 566 aa, Artificial Sequence
  derived and/or modified protein sequence (wt) from hemagglutinin__InfluenzaA__AHC60587
MKTIIALSYILCLVFAQKLPGNDNSTATLCLGHHAVPNGTIVKTITNDQIEVTNATELVQNSSTGEICDSPHQILDGENCTLIDALLGDPQCDGFQNKKWDLFVERSKAYSNCYPYDVPDYASLRSLVASSGTLEFNNESFNWTGVTQNGTSSACIRRSNNSFFSRLNWLTHLNFKYPALNVTMPNNEQFDKLYIWGVHHPGTDKDQIFLYAQASGRITVSTKRSQQAVIPNIGSRPRVRNIPSRISIYWTIVKPGDILLINSTGNLIAPRGYFKIRSGKSSIMRSDAPIGKCNSECITPNGSIPNDKPFQNVNRITYGACPRYVKQNTLKLATGMRNVPEKQTRGIFGAIAGFIENGWEGMVDGWYGFRHQNSEGRGQAADLKSTQAAIDQINGKLNRLIGKTNEKFHQIEKEFSEVEGRIQNLEKYVEDTKIDLWSYNAELLVALENQHTIDLTDSEMNKLFEKTKKQLRENAEDMGNGCFKIYHKCDNACIGSIRNGTYDHDVYRDEALNNRFQIKGVELKSGYKDWILWISFAISCFLLCVALLGFIMWACQKGNIRCNICI

SEQ ID NO: 10776 - protein, 566 aa, Artificial Sequence; identical to SEQ ID NO: 9074
  derived and/or modified protein sequence (wt) from hemagglutinin__InfluenzaA__AHC60599

SEQ ID NO: 10777 - protein, 566 aa, Artificial Sequence; identical to SEQ ID NO: 6855
  derived and/or modified protein sequence (wt) from hemagglutinin__InfluenzaA__AHC60611

SEQ ID NO: 10778 - protein, 566 aa, Artificial Sequence
  derived and/or modified protein sequence (wt) from hemagglutinin__InfluenzaA__AHC60623
MKTIIALSYILCLVFAQKLPGNDNSTATLCLGHHAVPNGTIVKTITNDQIEVTNATELVQSSSTGEICDSPHQILDGENCTLIDALLGDPQCDGFQNKKWDLFVERSKAYSNCYPYDVPDYASLRSLVASSGTLEFNNESFNWTGVTQNGTSSACIRRSNSSFFSRLNWLTHLNFKYPALNVTMPNNEQFDKLYIWGVHHPGTDKDQIFLYAQSSGRITVSTKRSQQAVIPNIGSRPRIRNIPSRISIYWTIVKPGDILLINSTGNLIAPRGYFKIRNGKSSIMRSDAPIGKCNSECITPNGSIPNDKPFQNVNRITYGACPRYVKQSTLKLATGMRNVPEKQTRGIFGAIAGFIENGWEGMVDGWYGFRHQNSEGRGQAADLKSTQAAIDQINGKLNRLIGKTNEKFHQIEKEFSEVEGRIQDLEKYVEDTKIDLWSYNAELLVALENQHTIDLTDSEMNKLFEKTKKQLRENAEDMGNGCFKIYHKCDNACIGSIRNGTYNHDVYRDEALNNRFQIKGVELKSGYKDWILWISFAISCFLLCVALLGFIMWACQKGNIRCNICI

SEQ ID NO: 10779 - protein, 566 aa, Artificial Sequence; identical to SEQ ID NO: 9074
  derived and/or modified protein sequence (wt) from hemagglutinin__InfluenzaA__AHC60635

SEQ ID NO: 10780 - protein, 566 aa, Artificial Sequence
  derived and/or modified protein sequence (wt) from hemagglutinin__InfluenzaA__AHC60647
MKTIIALSYILCLVFTQKLPGNDNSTATLCLGHHAVPNGTIVKTITNDQIEVTNATELVQNSSTGEICDSPHQILDGENCTLIDALLGDPQCDGFQNKKWDLFVERSKAYSNCYPYDVPDYASLRSLVASSGTLEFNNESFNWTGVTQNGTSSACIRRSNNSFFSRLNWLTHLNFKYPALNVTMPNNEQFDKLYIWGVHHPGTDKDQIFLYAQASGRITVSTKRSQQAVIPNIGSRPRVRNIPSRISIYWTIVKPGDILLINSTGNLIAPRGYFKIRSGKSSIMRSDAPIGKCNSECITPNGSIPNDKPFQNVNRITYGACPRYVKQNTLKLATGMRNVPEKQTRGIFGAIAGFIENGWEGMVDGWYGFRHQNSEGRGQAADLKSTQAAIDQINGKLNRLIGKTNEKFHQIEKEFSEVEGRIQDLEKYVEDTKIDLWSYNAELLVALENQHTIDLTDSEMNKLFEKTKKQLRENAEDMGNGCFKIYHKCDNACIGSIRNGTYDHDVYRDEALNNRFQIKGVELKSGYKDWILWISFAISCFLLCVALLGFIMWACQKGNIRCNICI

SEQ ID NO: 10781 - protein, 566 aa, Artificial Sequence
  derived and/or modified protein sequence (wt) from hemagglutinin__InfluenzaA__AHC60659
MKTIIALSYILCLVFTQKLPGNDNSTATLCLGHHAVPNGTIVKTITNDQIEVTNATELVQSSSTGEICNSPHQILDGENCTLIDALLGDPQCDGFQNKKWDLFVERSKAHSNCYPYDVPDYASLRSLVASSGTLEFNNESFNWTGVTQNGTSSACIRRSNNSFFSRLNWLTHLNFKYPALNVTMPNNEQFDKLYIWGVHHPGTDKDQIFLYAQAAGRITVSTKRSQQAVIPNIGSRPRVRNIPSRVSIYWTIVKPGDILLINSTGNLIAPRGYFKIRSGKSSIMRSDAPIGKCNSACITPNGSIPNDKPFQNVNRITYGACPRYVKQNTLKLATGMRNVPEKQTRGIFGAIAGFIENGWEGMVDGWYGFRHQNSEGRGQAADLKSTQAAIDQINGKLNRLIGKTNEKFHQIEKEFSEVEGRIQDLEKYVEDTKIDLWSYNAELLVALENQHTIDLTDSEMNKLFEKTKKQLRENAEDMGNGCFKIYHKCDNACIGSIRNGTYDHDVYRDEALNNRFQIKGVELKSGYKDWILWISFAISCFLLCVALLGFIMWACQKGNIRCNICI

SEQ ID NO: 10782 - protein, 566 aa, Artificial Sequence
  derived and/or modified protein sequence (wt) from hemagglutinin__InfluenzaA__AHC60671
MKTIIALSYILCLVFAQKLPGNDNSTATLCLGHHAVPNGTIVKTITNDQIEVTNATELVQSSSTGEICNSPHQILDGENCTLIDALLGDPQCDGFQNKEWDLFVERSKAHSNCYPYDVPDYASLRSLVASSGTLEFNNESFNWTGVTQNGTSSACIRRSNNSFFSRLNWLTHLNFKYPALNVTMPNNEQFDKLYIWGVHHPGTDKDQIFLYAQASGRITVSTKRSQQAVIPNIGSRPRVRNIPSRVSIYWTIVKPGDILLINSTGNLIAPRGYFKIRSGKSSIMRSDAPIGKCNSACITPNGSIPNDKPFQNVNRITYGACPRYVKQNTLKLATGMRNVPEKQTRGIFGAIAGFIENGWEGMVDGWYGFRHQNSEGRGQAADLKSTQAAIDQINGKLNRLIGKTNEKFHQIEKEFSEVEGRIQDLEKYVEDTKIDLWSYNAELLVALENQHTIDLTDSEMNKLFEKTKKQLRENAEDMGNGCFKIYHKCDNACIGSIRNGTYDHDVYRDEALNNRFQIKGVELKSGYKDWILWISFAISCFLLCVALLGFIMWACQKGNIRCNICI

SEQ ID NO: 10783 - protein, 566 aa, Artificial Sequence
  derived and/or modified protein sequence (wt) from hemagglutinin__InfluenzaA__AHC60683
MKTIIALSYILCLVFAQKLPGNDNSTATLCLGHHAVPNGTIVKTITNDQIEVTNATELVQSSSTGEICNSPHQILDGENCTLIDALLGDPQCDGFQNKKWDLFVERSKAHSNCYPYDVPDYASLRSLVASSGTLEFNNESFNWTGVTQNGTSSACIRRSNNSFFSRLNWLTHLNFKYPALNVTMPNNEQFDKLYIWGVHHPGTDKDQIFLYAQAAGRITVSTKRSQQAVIPNIGSRPRVRNIPSRVSIYWTIVKPGDILLINSTGNLIAPRGYFKIRSGKSSIIRSDAPIGKCNSACITPNGSIPNDKPFQNVNRITYGACPRYVKQNTLKLATGMRNVPEKQTRGIFGAIAGFIENGWEGMVDGWYGFRHQNSEGRGQAADLKSTQAAIDQINGKLNRLIGKTNEKFHQIEKEFSEVEGRIQDLEKYVEDTKIDLWSYNAELLVALENQHTIDLTDSEMNKLFEKTKKQLRENAEDMGNGCFKIYHKCDNACIGSIRNGTYDHDVYRDEALNNRFQIKGVELKSGYKDWILWISFAISCFLLCVALLGFIMWACQKGNIRCNICI

SEQ ID NO: 10784 - protein, 566 aa, Artificial Sequence
  derived and/or modified protein sequence (wt) from hemagglutinin__InfluenzaA__AHC60695
MKTIIALSYILCLVFAQKLPGNDNSTATLCLGHHAVPNGTIVKTITNDQIEVTNATELVQSSSTGEICNSPHQILDGENCTLIDALLGDPQCDGFQNKKWDLFVERSKAHSNCYPYDVPDYASLRSLVASSGTLEFNNESFNWTGVTQNGTSSACMRGSNNSFFSRLNWLTHLNFKYPALNVTMPNNEQFDKLYIWGVHHPGTDKDQIFLYAQASGRITVSTKRSQQAVIPNIGSRPRVRNIPSRVSIYWTIVKPGDILLINSTGNLIAPRGYFKIRSGKSSIMRSDAPIGKCNSACITPNGSIPNDKPFQNVNRITYGACPRYVKQNTLKLATGMRNVPEKQTRGIFGAIAGFIENGWEGMVDGWYGFRHQNSEGRGQAADLKSTQAAIDQINGKLNRLIGKTNEKFHQIEKEFSEVEGRIQDLEKYVEDTKIDLWSYNAELLVALENQHTIDLTDSEMNKLFEKTKKQLRENAEDMGNGCFKIYHKCDNACIGSIRNGTYDHDVYRDEALNNRFQIKGVELKSGYKDWILWISFAISCFLLCVALLGFIMWACQKGNIRCNICI

SEQ ID NO: 10785 - protein, 566 aa, Artificial Sequence
  derived and/or modified protein sequence (wt) from hemagglutinin__InfluenzaA__AHC60707
MKTIIALSYILCLVFAQKLPGNDNSTATLCLGHHAVPNGTIVKTITDDQIEVTNATELVQNSSTGEICDSPHQILDGENCTLIDALLGDPQCDGFQNKKWDLFVERSKAYSNCYPYDVPDYASLRSLVASSGTLEFNNESFNWTGVTQNGTSSACIRRSNNSFFSRLNWLTHLNFKYPALNVTMPNNEQFDKLYIWGVHHPGTDKDQIFLYAQASGRITVSTKRSQQAVIPNIGSRPRVRNIPSRISIYWTIVKPGDILLINSTGNLIAPRGYFKIRSGKSSIMRSDAPIGKCNSECITPNGSIPNDKPFQNVNRITYGACPRYVKQNTLKLATGMRNVPEKQTRGIFGAIAGFIENGWEGMVDGWYGFRHQNSEGRGQAADLKSTQAAIDQINGKLNRLIGKTNEKFHQIEKEFSEVEGRIQDLEKYVEDTKIDLWSYNAELLVALENQHTIDLTDSEMNKLFEKTKKQLRENAEDMGNGCFKIYHKCDNACIGSIRNGTYDHDVYRDEALNNRFQIKGVELKSGYKDWIIWISFAISCFLLCVALLGFIMWACQKGNIRCNICI

SEQ ID NO: 10786 - protein, 566 aa, Artificial Sequence; identical to SEQ ID NO: 6855
  derived and/or modified protein sequence (wt) from hemagglutinin__InfluenzaA__AHC60719

SEQ ID NO: 10787 - protein, 566 aa, Artificial Sequence; identical to SEQ ID NO: 6982
  derived and/or modified protein sequence (wt) from hemagglutinin__InfluenzaA__AHC60731

SEQ ID NO: 10788 - protein, 566 aa, Artificial Sequence; identical to SEQ ID NO: 10693
  derived and/or modified protein sequence (wt) from hemagglutinin__InfluenzaA__AHC60743

SEQ ID NO: 10789 - protein, 566 aa, Artificial Sequence; identical to SEQ ID NO: 3411
  derived and/or modified protein sequence (wt) from hemagglutinin__InfluenzaA__AHC60767

SEQ ID NO: 10790 - protein, 566 aa, Artificial Sequence
  derived and/or modified protein sequence (wt) from hemagglutinin__InfluenzaA__AHC60779
MKTIIALSYILCLVFAQKLPGNDNSTATLCLGHHAVPNGTIVKTITNDQIEVTNATELVQSSSTGEICNSPHQILDGENCTLIDALLGDPQCDGFQNKKWDLFVERSKAHSNCYPYDVPDYASLRSLVASSGTLEFNNERFNWTGVTQNGTSSACIRRSNNSFFSRLNWLTHLNFKYPALNVTMPNNEQFDKLYIWGVHHPGTDKDQIFLYAQAAGRITVSTKRSQQAVIPNIGSRPRVRNIPSRVSIYWTIVKPGDILLINSTGNLIAPRGYFKIRSGKSSIMRSDAPIGKCNSACITPNGSIPNDKPFQNVNRITYGACPRYVKQNTLKLATGMRNVPEKQTRGIFGAIAGFIENGWEGMVDGWYGFRHQNSEGRGQAADLKSTQAAIDQINGKLNRLIGKTNEKFHQIEKEFSEVEGRIQDLEKYVEDTKIDLWSYNAELLVALENQHTIDLTDSEMNKLFEKTKKQLRENAEDMGNGCFKIYHKCDNACIGSIRNGTYDHDVYRDEALNNRFQIKGVELKSGYKDWILWISFAISCFLLCVALLGFIMWACQKGNIRCNICI

SEQ ID NO: 10791 - protein, 566 aa, Artificial Sequence; identical to SEQ ID NO: 6982
  derived and/or modified protein sequence (wt) from hemagglutinin__InfluenzaA__AHC60791

SEQ ID NO: 10792 - protein, 566 aa, Artificial Sequence; identical to SEQ ID NO: 10651
  derived and/or modified protein sequence (wt) from hemagglutinin__InfluenzaA__AHC60803

SEQ ID NO: 10793 - protein, 566 aa, Artificial Sequence; identical to SEQ ID NO: 6855
  derived and/or modified protein sequence (wt) from hemagglutinin__InfluenzaA__AHC60815

SEQ ID NO: 10794 - protein, 566 aa, Artificial Sequence
  derived and/or modified protein sequence (wt) from hemagglutinin__InfluenzaA__AHC60827
MKTIIALSYILCLVFAQKLPGNDNSTATLCLGHHAVPNGTIVKTITNDQIEVTNATELVQSSSTDEICNSPHQILDGENCTLIDALLGDPQCDGFQNKKWDLFVERSKAHSNCYPYDVPDYASLRSLVASSGTLEFNNESFNWTGVTQNGTSSACIRGSNNSFFSRLNWLTHLNFKYPALNVTMPNNEQFDKLYIWGVHHPGTDKDQIFLYAQASGRITVSTKRSQQAVIPNIGSRPRVRNIPSRVSIYWTIVKPGDILLINSTGNLIAPRGYFKIRSGKSSIMRSDAPIGKCNSACITPNGSIPNDKPFQNVNRITYGACPRYVKQNTLKLATGMRNVPEKQTRGIFGAIAGFIENGWEGMVDGWYGFRHQNSEGRGQAADLKSTQAAIDQINGKLNRLIGKTNEKFHQIEKEFSEVEGRIQDLEKYVEDTKIDLWSYNAELLVALENQHTIDLTDSEMNKLFEKTKKQLRENAEDMGNGCFKIYHKCDNACIGSIRNGTYDHDVYRDEALNNRFQIKGVELKSGYKDWILWISFAISCFLLCVALLGFIMWACQKGNIRCNICI

SEQ ID NO: 10795 - protein, 566 aa, Artificial Sequence; identical to SEQ ID NO: 10629
  derived and/or modified protein sequence (wt) from hemagglutinin__InfluenzaA__AHC60839

SEQ ID NO: 10796 - protein, 566 aa, Artificial Sequence; identical to SEQ ID NO: 6982
  derived and/or modified protein sequence (wt) from hemagglutinin__InfluenzaA__AHC60851

SEQ ID NO: 10797 - protein, 566 aa, Artificial Sequence
  derived and/or modified protein sequence (wt) from hemagglutinin__InfluenzaA__AHC60863
MKTIIALSYILCLVFAQKLPGNDNSTATLCLGHHAVPNGTIVKTITNDQIEVTNATELVQSSSTGEICNSPHQILDGENCTLIDALLGDPQCDGFQNKKWDLFVERSKAHSNCYPYDVPDYASLRSLVASSGTLEFNNESFNWTGVTQNGTSSACIRRSNNSFFSRLNWLTHLNFKYPALNVTMPNNEQFDKLYIWGVHHPGTDKDQIFLYAQAAGRITVSTKRSQQAVIPNIGSRPRVRNIPSRVSIYWTIVKPGDILLINSTGNLIAPRGYFKIRSGKSSIMRSDAPIGKCNSACITPNGSIPNDKPFQNVNRITYGACPRYVKQNTLKLATGMRNVPEKQTRGIFGAIAGFIENGWEGMVDGWYGFRHQNSEGRGQAADLKSTQAAIDQINGKLNRLIGKTNEKFHQIEKEFSEVEGRIQDLEKYVEDTKIDLWSYNAELLVALENQHTIDLTDSEMNKLFEKTKKQLRENAEDMGNGCFKIYHKCDNACIGSIRNGTYDHDVYRDEALNNRFQIKGVELKAGYKDWILWISFAISCFLLCVALLGFIMWACQKGNIRCNICI

SEQ ID NO: 10798 - protein, 566 aa, Artificial Sequence; identical to SEQ ID NO: 6982
  derived and/or modified protein sequence (wt) from hemagglutinin__InfluenzaA__AHC60875

SEQ ID NO: 10799 - protein, 566 aa, Artificial Sequence; identical to SEQ ID NO: 6982
  derived and/or modified protein sequence (wt) from hemagglutinin__InfluenzaA__AHC60887

SEQ ID NO: 10800 - protein, 566 aa, Artificial Sequence; identical to SEQ ID NO: 3411
  derived and/or modified protein sequence (wt) from hemagglutinin__InfluenzaA__AHC60899

SEQ ID NO: 10801 - protein, 566 aa, Artificial Sequence; identical to SEQ ID NO: 7782
  derived and/or modified protein sequence (wt) from hemagglutinin__InfluenzaA__AHC60911

SEQ ID NO: 10802 - protein, 566 aa, Artificial Sequence; identical to SEQ ID NO: 10618
  derived and/or modified protein sequence (wt) from hemagglutinin__InfluenzaA__AHC60923

SEQ ID NO: 10803 - protein, 566 aa, Artificial Sequence; identical to SEQ ID NO: 7782
  derived and/or modified protein sequence (wt) from hemagglutinin__InfluenzaA__AHC60935

SEQ ID NO: 10804 - protein, 566 aa, Artificial Sequence; identical to SEQ ID NO: 6982
  derived and/or modified protein sequence (wt) from hemagglutinin__InfluenzaA__AHC60947

SEQ ID NO: 10805 - protein, 566 aa, Artificial Sequence; identical to SEQ ID NO: 7782
  derived and/or modified protein sequence (wt) from hemagglutinin__InfluenzaA__AHC60959

SEQ ID NO: 10806 - protein, 566 aa, Artificial Sequence; identical to SEQ ID NO: 6855
  derived and/or modified protein sequence (wt) from hemagglutinin__InfluenzaA__AHC60971

SEQ ID NO: 10807 - protein, 566 aa, Artificial Sequence; identical to SEQ ID NO: 7782
  derived and/or modified protein sequence (wt) from hemagglutinin__InfluenzaA__AHC60983

SEQ ID NO: 10808 - protein, 566 aa, Artificial Sequence; identical to SEQ ID NO: 6982
  derived and/or modified protein sequence (wt) from hemagglutinin__InfluenzaA__AHC61007

SEQ ID NO: 10809 - protein, 566 aa, Artificial Sequence; identical to SEQ ID NO: 6855
  derived and/or modified protein sequence (wt) from hemagglutinin__InfluenzaA__AHC61019

SEQ ID NO: 10810 - protein, 566 aa, Artificial Sequence
  derived and/or modified protein sequence (wt) from hemagglutinin__InfluenzaA__AHC61031
MKTIIALSYILCLVFAQKLPGNDNSTATLCLGHHAVPNGTIVKTITNDQIEVTNATELVQSSSTGEICNSPHQILDGENCTLIDALLGDPQCDGFQNKKWDLFVERSKAHSNCYPYDVPDYASLRSLVASSGTLEFNNESFNWTGVTQNGTSSACIRRSNNSFFSRLNWLTHLNFKYPALNVTMPNNEQFDKLYIWGVHHPGTDKDQIFLYAQAAGRITVSTKRSQQAVIPNIGSRPRVRNIPSRVSIYWTIVKPGDILLINSTGNLIAPRGYFKIRSGKSSIMRSDAPIGKCNSACITPNGSIPNDKPFQNVNRITYGACPRYVKQNTLKLATGMRNVPEKQTRGIFGAIAGFIENGWEGMVDGWYGFRHQNSEGRGQAADLKSTQAAIDQINGKLNRLIGKTNEKFHQIEKEFSEVEGRIQDLEKYVEDTKIDLWSYNAELLVALENQHTIDLTDSEMNKLFEKTKKQLRENAEDMGNGCFKIYHKCDNACIGSIRNGTYDHDVYRDEALNNRFQIKGVELKSGYKDWILWISFAISCFLLCVVLLGFIMWACQKGNIRCNICI

SEQ ID NO: 10811 - protein, 566 aa, Artificial Sequence; identical to SEQ ID NO: 7782
  derived and/or modified protein sequence (wt) from hemagglutinin__InfluenzaA__AHC61043

SEQ ID NO: 10812 - protein, 566 aa, Artificial Sequence
  derived and/or modified protein sequence (wt) from hemagglutinin__InfluenzaA__AHC61055
MKTIIALSYILCLVFAQKLPGNDNSTATLCLGHHAVPNGTIVKTITNDQIEVTNATELVQSSSTGEICNSPHQILDGENCTLIDALLGDPQCDGFQNKKWDLFVERSKAHSNCYPYDVPDYASLRSLVASSGTLEFNNESFNWTGVTQNGTSSACIRRSNNSFFSRLNWLTHLNFKYPALNVTMPNNEQFDKLYIWGVHHPGTDKDQIFLYAQAAGRITVSTKRSQQAVIPNIGSRPRVRNIPSRVSIYWTIVKPGDILLINSTGNLIAPRGYFKIRSGKSSIMRSDAPIGKCNSACITPNGSIPNDKPFQNVNRITYGACPRYVKQNTLKLATGMRNVPEKQTRGIFGAIAGFIENGWEGMVDGWYGFRHQNSEGRGQAADLKSTQAAIDQINGKLNRLIGKTNEKFHQIEKEFSEVEGRIQNLEKYVEDTKIDLWSYNAELLVALENQHTIDLTDSEMNKLFEKTKKQLRENAEDMGNGCFKIYHKCDNACIGSIRNGTYDHDVYRDEALNNRFQIKGVELKSGYKDWILWISFAISCFLLCVALLGFIMWACQKGNIRCNICI

SEQ ID NO: 10813 - protein, 566 aa, Artificial Sequence; identical to SEQ ID NO: 10679
  derived and/or modified protein sequence (wt) from hemagglutinin__InfluenzaA__AHC61067

SEQ ID NO: 10814 - protein, 566 aa, Artificial Sequence; identical to SEQ ID NO: 9074
  derived and/or modified protein sequence (wt) from hemagglutinin__InfluenzaA__AHC61079

SEQ ID NO: 10815 - protein, 566 aa, Artificial Sequence; identical to SEQ ID NO: 6982
  derived and/or modified protein sequence (wt) from hemagglutinin__InfluenzaA__AHC61103

SEQ ID NO: 10816 - protein, 566 aa, Artificial Sequence; identical to SEQ ID NO: 6982
  derived and/or modified protein sequence (wt) from hemagglutinin__InfluenzaA__AHC61115

SEQ ID NO: 10817 - protein, 566 aa, Artificial Sequence; identical to SEQ ID NO: 7782
  derived and/or modified protein sequence (wt) from hemagglutinin__InfluenzaA__AHC61127

SEQ ID NO: 10818 - protein, 566 aa, Artificial Sequence
  derived and/or modified protein sequence (wt) from hemagglutinin__InfluenzaA__AHC61139
MKTIIALSYILCLVFAQKLPGNDNSTATLCLGHHAVPNGTIVKTITNDQIEVTNATELVQSSSTGEICNSPHQILDGENCTLIDALLGDPQCDGFQNKKWDLFVERSKAHSNCYPYDVPDYASLRSLVASSGTLEFNNESFNWTGVTQNGTSSACIRRSNNSFFSRLNWLTHLNFKYPALNVTMPNNEQFDKLYIWGVHHPGTDKDQIFLYAQASGRITVSTQRSQQAVIPNIGSRPRVRNIPSRVSIYWTIVKPGDILLINSTGNLIAPRGYFKIRSGKSSIMRSDAPIGKCNSACITPNGSIPNDKPFQNVNRITYGACPRYVKQNTLKLATGMRNVPEKQTRGIFGAIAGFIENGWEGMVDGWYGFRHQNSEGRGQAADLKSTQAAIDQINGKLNRLIGKTNEKFHQIEKEFSEVEGRIQDLEKYVEDTKIDLWSYNAELLVALENQHTIDLTDSEMNKLFEKTKKQLRENAEDMGNGCFKIYHKCDNACIGSIRNGTYNHDVYRDEALNNRFQIKGVELKSGYKDWILWISFAISCFLLCVALLGFIMWACQKGNIRCNICI

SEQ ID NO: 10819 - protein, 566 aa, Artificial Sequence; identical to SEQ ID NO: 6982
  derived and/or modified protein sequence (wt) from hemagglutinin__InfluenzaA__AHC61151

SEQ ID NO: 10820 - protein, 566 aa, Artificial Sequence
  derived and/or modified protein sequence (wt) from hemagglutinin__InfluenzaA__AHC61163
MKTIIALSYILCLVFAQKLPGNDNSTATLCLGHHAVPNGTIVKTITNDQIEVTNATELVQSSSTGEICNSPHQILDGENCTLIDALLGDPQCDGFQNKKWDLFVERSKAHSNCYPYDVPDYASLRSLVASSGTLEFKNESFNWTGVTQNGTSSACIRRSNNSFFSRLNWLTHLNFKYPALNVTMPNNEQFDKLYIWGVHHPGTDKDQIFLYAQASGRITVSTKRSQQAVVPNIGSRPRVRNIPSRVSIYWTIVKPGDILLINSTGNLIAPRGYFKIRSGKSSIMRSDAPIGKCNSACITPNGSIPNDKPFQNVNRITYGACPRYVKQNTLKLATGMRNVPEKQTRGIFGAIAGFIENGWEGMVDGWYGFRHQNSEGRGQAADLKSTQAAIDQINGKLNRLIGKTNEKFHQIEKEFSEVEGRIQDLEKYVEDTKIDLWSYNAELLVALENQHTIDLTDSEMNKLFEKTKKQLRENAEDMGNGCFKIYHKCDNACIGSIRNGTYDHDVYRDEALNNRFQIKGVELKSGYKDWILWISFAISCFLLCVALLGFIMWACQKGNIRCNICI

SEQ ID NO: 10821 - protein, 566 aa, Artificial Sequence; identical to SEQ ID NO: 7782
  derived and/or modified protein sequence (wt) from hemagglutinin__InfluenzaA__AHC61175

SEQ ID NO: 10822 - protein, 566 aa, Artificial Sequence; identical to SEQ ID NO: 6982
  derived and/or modified protein sequence (wt) from hemagglutinin__InfluenzaA__AHC61187

SEQ ID NO: 10823 - protein, 566 aa, Artificial Sequence; identical to SEQ ID NO: 6855
  derived and/or modified protein sequence (wt) from hemagglutinin__InfluenzaA__AHC61199

SEQ ID NO: 10824 - protein, 566 aa, Artificial Sequence; identical to SEQ ID NO: 10618
  derived and/or modified protein sequence (wt) from hemagglutinin__InfluenzaA__AHC61211

SEQ ID NO: 10825 - protein, 566 aa, Artificial Sequence; identical to SEQ ID NO: 6855
  derived and/or modified protein sequence (wt) from hemagglutinin__InfluenzaA__AHC61223

SEQ ID NO: 10826 - protein, 566 aa, Artificial Sequence; identical to SEQ ID NO: 6982
  derived and/or modified protein sequence (wt) from hemagglutinin__InfluenzaA__AHC61235

SEQ ID NO: 10827 - protein, 566 aa, Artificial Sequence; identical to SEQ ID NO: 7782
  derived and/or modified protein sequence (wt) from hemagglutinin__InfluenzaA__AHC61247

SEQ ID NO: 10828 - protein, 566 aa, Artificial Sequence; identical to SEQ ID NO: 7782
  derived and/or modified protein sequence (wt) from hemagglutinin__InfluenzaA__AHC61259

SEQ ID NO: 10829 - protein, 566 aa, Artificial Sequence; identical to SEQ ID NO: 6982
  derived and/or modified protein sequence (wt) from hemagglutinin__InfluenzaA__AHC61271

SEQ ID NO: 10830 - protein, 566 aa, Artificial Sequence; identical to SEQ ID NO: 6855
  derived and/or modified protein sequence (wt) from hemagglutinin__InfluenzaA__AHC61283

SEQ ID NO: 10831 - protein, 566 aa, Artificial Sequence; identical to SEQ ID NO: 9074
  derived and/or modified protein sequence (wt) from hemagglutinin__InfluenzaA__AHC61295

SEQ ID NO: 10832 - protein, 566 aa, Artificial Sequence; identical to SEQ ID NO: 10686
  derived and/or modified protein sequence (wt) from hemagglutinin__InfluenzaA__AHC61307

SEQ ID NO: 10833 - protein, 566 aa, Artificial Sequence; identical to SEQ ID NO: 6982
  derived and/or modified protein sequence (wt) from hemagglutinin__InfluenzaA__AHC61319

SEQ ID NO: 10834 - protein, 566 aa, Artificial Sequence; identical to SEQ ID NO: 10618
  derived and/or modified protein sequence (wt) from hemagglutinin__InfluenzaA__AHC61331

SEQ ID NO: 10835 - protein, 566 aa, Artificial Sequence
  derived and/or modified protein sequence (wt) from hemagglutinin__InfluenzaA__AHC61343
MKTIIALSYILCLVFAQKLPGNDNSTATLCLGHHAVPNGTIVKTITNDQIEVTNATELVQSSSTGEICNSPHQILDGENCTLIDALLGDPQCDGFQNKKWDLFVERSKAHSNCYPYDVPDYASLRSLVASSGTLEFNNESFNWTGVTQNGTSSACIRGSNNSFFSRLNWLTHLNFKYPALNVTMPNNEQFDKLYIWGVHHPGTDKDQIFLYAQASGRITVSTKRSQQAVIPNIGSRPRVRNIPSRISIYWTIVKPGDILLINSTGNLIAPRGYFKIRSGKSSIMRSDAPIGKCNSACITPNGSIPNDKPFQNVNRITYGACPRYVKQNTLKLATGMRNVPEKQTRGIFGAIAGFIENGWEGMVDGWYGFRHQNSEGRGQAADLKSTQAAIDQINGKLNRLIGKTNEKFHQIEKEFSEVEGRIQDLEKYVEDTKIDLWSYNAELLVALENQHTIDLTDSEMNKLFEKTKKQLRENAEDMGNGCFKIYHKCDNACIGSIRNGTYDHDVYRDEALNNRFQIKGVELKSGYKDWILWISFAISCFLLCVALLGFIMWACQKGNIRCNICI

SEQ ID NO: 10836 - protein, 566 aa, Artificial Sequence; identical to SEQ ID NO: 6855
  derived and/or modified protein sequence (wt) from hemagglutinin__InfluenzaA__AHC61355

SEQ ID NO: 10837 - protein, 566 aa, Artificial Sequence; identical to SEQ ID NO: 6855
  derived and/or modified protein sequence (wt) from hemagglutinin__InfluenzaA__AHC61367

SEQ ID NO: 10838 - protein, 566 aa, Artificial Sequence; identical to SEQ ID NO: 6982
  derived and/or modified protein sequence (wt) from hemagglutinin__InfluenzaA__AHC61379

SEQ ID NO: 10839 - protein, 566 aa, Artificial Sequence; identical to SEQ ID NO: 6855
  derived and/or modified protein sequence (wt) from hemagglutinin__InfluenzaA__AHC61391

SEQ ID NO: 10840 - protein, 566 aa, Artificial Sequence
  derived and/or modified protein sequence (wt) from hemagglutinin__InfluenzaA__AHC61403
MKTIIALSYILCLVFAQKLPGNDNSTATLCLGHHAVPNGTIVKTITNDQIEVTNATELVQSSSTGEICNSPHQILDGENCTLIDALLGDPQCDGFQNKKWDLFVERSKAHSNCYPYDVPDYASLRSLVASSGTLEFNNESFNWTGVTQNGTSSACIRRSNNSFFSRLNWLTHLNFKYPALNVTMPNNEQFDKLYIWGVHHPGTDKDQIFLYAQASGRITVSTKRSQQAVIPNIGSRPRVRNIPSRVSIYWTIVKPGDILLINSTGNLIAPRGYFKIRSGKSSIMRSDAPIGKCNSACITPNGSIPNDKPFQNVNRITYGACSRYVKQNTLKLATGMRNVPEKQTRGIFGAIAGFIENGWEGMVDGWYGFRHQNSEGRGQAADLKSTQAAIDQINGKLNRLIGKTNEKFHQIEKEFSEVEGRIQDLEKYVEDTKIDLWSYNAELLVALENQHTIDLTDSEMNKLFEKTKKQLRENAEDMGNGCFKIYHKCDNACIGSIRNGTYDHDVYRDEALNNRFQIKGVELKSGYKDWILWISFAISCFLLCVALLGFIMWACQKGNIRCNICI

SEQ ID NO: 10841 - protein, 566 aa, Artificial Sequence; identical to SEQ ID NO: 6982
  derived and/or modified protein sequence (wt) from hemagglutinin__InfluenzaA__AHC61415

SEQ ID NO: 10842 - protein, 566 aa, Artificial Sequence
  derived and/or modified protein sequence (wt) from hemagglutinin__InfluenzaA__AHC61427
MKTIIALSYILCLVFAQKLPGNDNSTATLCLGHHAVPNGTIVKTITNDQIEVTNATELVQSSSTGEICNSPHQILDGENCTLIDALLGDPQCDGFQNNKWDLFVERSKAHSNCYPYDVPDYASLRSLVASSGTLEFNNESFNWTGVTQNGTSSACIRRSNNSFFSRLNWLTHLNFKYPALNVTMPNNEQFDKLYIWGVHHPGTDKDQIFLYAQAAGRITVSTKRSQQAVIPNIGSRPRVRNIPSRVSIYWTIVKPGDILLINSTGNLIAPRGYFKIRSGKSSIIRSDAPIGKCNSACITPNGSIPNDKPFQNVNRITYGACPRYVKQNTLKLATGMRNVPEKQTRGIFGAIAGFIENGWEGMVDGWYGFRHQNSEGRGQAADLKSTQAAIDQINGKLNRLIGKTNEKFHQIEKEFSEVEGRIQDLEKYVEDTKIDLWSYNAELLVALENQHTIDLTDSEMNKLFEKTKKQLRENAEDMGNGCFKIYHKCDNACIGSIRNGTYDHDVYRDEALNNRFQIKGVELKSGYKDWILWISFAISCFLLCVALLGFIMWACQKGNIRCNICI

SEQ ID NO: 10843 - protein, 566 aa, Artificial Sequence
  derived and/or modified protein sequence (wt) from hemagglutinin__InfluenzaA__AHC61439
MKTIIALSYILCLVFAQKLPGNDNSTATLCLGHHAVPNGTIVKTITNDQIEVTNATELVQSSSTGEICNSPHQILDGENCTLIDALLGDPQCDGFQNKKWDLFVERSKAHSNCYPYDVPDYASLRSLVASSGTLEFNNESFNWTGVTQNGTSSACIRRSNNSFFSRLNWLTHLNFKYPALNVTMPNNEQFDKLYIWGVHHPGTDKDQIFLYAQAAGRITVSTKRSQQAVIPNIGSRPRVRNIPSRVSIYWTIVKPGDILLINSTGNLIAPRGYFKIRSGKSSIMRSDAPIGKCNSTCITPNGSIPNDKPFQNVNRITYGACPRYVKQNTLKLATGMRNVPEKQTRGIFGAIAGFIENGWEGMVDGWYGFRHQNSEGRGQAADLKSTQAAIDQINGKLNRLIGKTNEKFHQIEKEFSEVEGRIQDLEKYVEDTKIDLWSYNAELLVALENQHTIDLTDSEMNKLFEKTKKQLRENAEDMGNGCFKIYHKCDNACIGSIRNGTYDHDVYRDEALNNRFQIKGVELKSGYKDWILWISFAISCFLLCVALLGFIMWACQKGNIRCNICI

SEQ ID NO: 10844 - protein, 566 aa, Artificial Sequence; identical to SEQ ID NO: 6855
  derived and/or modified protein sequence (wt) from hemagglutinin__InfluenzaA__AHC61451

SEQ ID NO: 10845 - protein, 566 aa, Artificial Sequence; identical to SEQ ID NO: 6855
  derived and/or modified protein sequence (wt) from hemagglutinin__InfluenzaA__AHC61463

SEQ ID NO: 10846 - protein, 566 aa, Artificial Sequence; identical to SEQ ID NO: 7782
  derived and/or modified protein sequence (wt) from hemagglutinin__InfluenzaA__AHC61475

SEQ ID NO: 10847 - protein, 566 aa, Artificial Sequence; identical to SEQ ID NO: 6982
  derived and/or modified protein sequence (wt) from hemagglutinin__InfluenzaA__AHC61487

SEQ ID NO: 10848 - protein, 566 aa, Artificial Sequence; identical to SEQ ID NO: 7782
  derived and/or modified protein sequence (wt) from hemagglutinin__InfluenzaA__AHC61499

SEQ ID NO: 10849 - protein, 566 aa, Artificial Sequence; identical to SEQ ID NO: 6855
  derived and/or modified protein sequence (wt) from hemagglutinin__InfluenzaA__AHC61511

SEQ ID NO: 10850 - protein, 566 aa, Artificial Sequence; identical to SEQ ID NO: 9074
  derived and/or modified protein sequence (wt) from hemagglutinin__InfluenzaA__AHC61523

SEQ ID NO: 10851 - protein, 566 aa, Artificial Sequence
  derived and/or modified protein sequence (wt) from hemagglutinin__InfluenzaA__AHC61535
MKTIIALSYILCLVFAQKLPGNDNSTATLCLGHHAVPNGTIVKTITNDQIEVTNATELVQSSSTGEICNSPHQILDGENCTLIDALLGDPQCDGFQNKKWDLFVERSKAHSNCYPYDVPDYASLRSLVASSGTLEFNNESFNWTGVTQNGTSSACIRRSNNSFFSRLNWLTHLNFKYPALNVTMPNNEQFDKLYIWGVHHPGTDKDQIFLYAQASGRITVSTKRSQQAVIPNIGSRPRVRNIPSRVSIYWTIVKPGDILLINSTGNLIAPRGYFKIRSGKSSIMRSDAPIGKCNSACITPNGSIPNDKPFQNVNRITYGACPRYVKQNTLKLATGMRNVPEKQTRGIFGAIAGFIENGWEGMVDGWYGFRHQNSEGRGQAADLKSTQAAIDQINGKLNRLIGKTNEKFHQIEKEFSEVEGRIQDLEKYVEDTKIDLWSYNAELLVALENQHTIDLTDSEMTKLFEKTKKQLRENAEDMGNGCFKIYHKCDNACIGSIRNGTYDHDVYRDEALNNRFQIKGVELKSGYKDWILWISFAISCFLLCVALLGFIMWACQKGNIRCNICI

SEQ ID NO: 10852 - protein, 566 aa, Artificial Sequence; identical to SEQ ID NO: 6855
  derived and/or modified protein sequence (wt) from hemagglutinin__InfluenzaA__AHC61547

SEQ ID NO: 10853 - protein, 566 aa, Artificial Sequence
  derived and/or modified protein sequence (wt) from hemagglutinin__InfluenzaA__AHC61559
MKTIIALSYILCLVFAQKLPGNDNSTATLCLGHHAVPNGTIVKTITNDQIEVTNATELVQNSSTGEICDSPHQIIDGENCTLIDALLGDPQCDGFQNKKWDLFVERSKAYSNCYPYDVPDYASLRSLVASSGTLEFNNESFNWTGVTQNGTSSACIRRSNNSFFSRLNWLTHLNFKYPALNVTMPNNEQFDKLYIWGVHHPGTDKDQIFLYAQASGRITVSTKRSQQAVIPNIGSRPRVRNIPSRISIYWTIVKPGDILLINSTGNLIAPRGYFKIRSGKSSIMRSDAPIGKCNSECITPNGSIPNDKPFQNVNRITYGACPRYVKQNTLKLATGMRNVPEKQTRGIFGAIAGFIENGWEGMVDGWYGFRHQNSEGRGQAADLKSTQAAIDQINGKLNRLIRKTNEKFHQIEKEFSEVEGRIQDLEKYVEDTKIDLWSYNAELLVALENQHTIDLTDSEMNKLFEKTKKQLRENAEDMGNGCFKIYHKCDNACIGSIRNGTYDHDVYRDEALNNRFQIKGVELKSGHKDWILWISFAISCFLLCVALLGFIMWACQKGNIRCNICI

SEQ ID NO: 10854 - protein, 566 aa, Artificial Sequence; identical to SEQ ID NO: 9074
  derived and/or modified protein sequence (wt) from hemagglutinin__InfluenzaA__AHC61571

SEQ ID NO: 10855 - protein, 566 aa, Artificial Sequence; identical to SEQ ID NO: 6855
  derived and/or modified protein sequence (wt) from hemagglutinin__InfluenzaA__AHC61583

SEQ ID NO: 10856 - protein, 566 aa, Artificial Sequence; identical to SEQ ID NO: 9074
  derived and/or modified protein sequence (wt) from hemagglutinin__InfluenzaA__AHC61595

SEQ ID NO: 10857 - protein, 566 aa, Artificial Sequence
  derived and/or modified protein sequence (wt) from hemagglutinin__InfluenzaA__AHC61607
MKTIIALSYILCLVFAQKLPGNDNSTATLCLGHHAVPNGTIVKTITNDQIEVTNATELVQNSSTGEICDSPHQILDGENCTLIDALLGDPQCDGFQNKKWDLFVERSKAYSNCYPYDVPDYASLRSLVASSGTLEFNNESFNWTGVTQNGTSSACIRRSNNSFFSRLNWLTHLNFKYPALNVTMPNNEQFDKLYIWGVHHPGTDKDQIFLYAQASGRITVSTKRSQQAVIPNIGSRPRVRNIPSRISIYWTIVKPGDILLINSTGNLIAPRGYFKIRSGKSSIMRSDAPIGKCNSECITPNGSIPNDKPFQNVNRITYGACPRYVKQHTLKLATGMRNVPEKQTRGIFGAIAGFIENGWEGMVDGWYGFRHQNSEGRGQAADLKSTQAAIDQINGKLNRLIGKTNEKFHQIEKEFSEVEGRIQDLEKYVEDTKIDLWSYNAELLVALENQHTIDLTDSEMNKLFEKTKKQLRENAEDMGNGCFKIYHKCDNACIGSIRNGTYDHDVYRDEALNNRFQIKGVELKSGYKDWILWISFAISCFLLCVALLGFIMWACQKGNIRCNICI

SEQ ID NO: 10858 - protein, 566 aa, Artificial Sequence; identical to SEQ ID NO: 9074
  derived and/or modified protein sequence (wt) from hemagglutinin__InfluenzaA__AHC61619

SEQ ID NO: 10859 - protein, 566 aa, Artificial Sequence
  derived and/or modified protein sequence (wt) from hemagglutinin__InfluenzaA__AHC61631
MKTIIALSYILCLVFAQKLPGNDNSTATLCLGHHAVPNGTIVKTITNDQIEVTNATELVQSSSTGEICNSPHQILDGENCTIIDALLGDPQCDGFQNKKWDLFVERSKAHSNCYPYDVPDYASLRSLVASSGTLEFNNESFNWTGVTQNGTSSACIRRSNNSFFSRLNWLTHLNFKYPALNVTMPNNEQFDKLYIWGVHHPGTDKDQIFLYAQAAGRITVSTKRSQQAVIPNIGSRPRVRNIPSRVSIYWTIVKPGDILLINSTGNLIAPRGYFKIRSGKSSIMRSDAPIGKCNSACITPNGSIPNDKPFQNVNRITYGACPRYVKQNTLKLATGMRNVPEKQTRGIFGAIAGFIENGWEGMVDGWYGFRHQNSEGRGQAADLKSTQAAIDQINGKLNRLIGKTNEKFHQIEKEFSEVEGRIQDLEKYVEDTKIDLWSYNAELLVALENQHTIDLTDSEMNKLFEKTKKQLRENAEDMGNGCFKIYHKCDNACIGSIRNGTYDHDVYRDEALNNRFQIKGVELKSGYKDWILWISFAISCFLLCVALLGFIMWACQKGNIRCNICI

SEQ ID NO: 10860 - protein, 566 aa, Artificial Sequence
  derived and/or modified protein sequence (wt) from hemagglutinin__InfluenzaA__AHC61643
MKTIIALSYVLCLVFAQKLPGNDNSTATLCLGHHAVPNGTIVKTITNDQIEVTNATELVQSSSTGEICNSPHQILDGENCTLIDALLGDPQCDGFQNKKWDLFVERSKAHSNCYPYDVPDYASLRSLVASSGTLEFNNESFNWTGVTQNGTSSACIRRSNNSFFSRLNWLTHLNFKYPALNVTMPNNEQFDKLYIWGVHHPGTDKDQIFLYAQAAGRITVSTKRSQQAVIPNIGSRPRVRNIPSRVSIYWTIVKPGDILLINSTGNLIAPRGYFKIRSGKSSIMRSDAPIGKCNSACITPNGSIPNDKPFQNVNRITYGACPRYVKQNTLKLATGMRNVPEKQTRGIFGAIAGFIENGWEGMVDGWYGFRHQNSEGRGQAADLKSTQAAIDQINGKLNRLIGKTNEKFHQIEKEFSEVEGRIQDLEKYVEDTKIDLWSYNAELLVALENQHTIDLTDSEMNKLFEKTKKQLRENAEDMGNGCFKIYHKCDNACIGSIRNGTYDHDVYRDEALNNRFQIKGVELKSGYKDWILWISFAISCFLLCVALLGFIMWACQKGNIRCNICI

SEQ ID NO: 10861 - protein, 566 aa, Artificial Sequence
  derived and/or modified protein sequence (wt) from hemagglutinin__InfluenzaA__AHC61655
MKTIIALSYILCLVFTQKLPGNDNSTATLCLGHHAVPNGTIVKTITNDQIEVTNATELVQSSSTGEICNSPHQILDGENCTLIDALLGDPQCDGFQNNKWDLFVERSKAHSNCYPYDVPDYASLRSLVASSGTLEFNNESFNWTGVTQNGTSSACIRRSNNSFFSRLNWLTHLNFKYPALNVTMPNNEQFDKLYIWGVHHPGTDKDQIFLYAQAAGRITVSTKRSQQAVIPNIGSRPRVRNIPSRVSIYWTIVKPGDILLINSTGNLIAPRGYFKIRSGKSSIIRSDAPIGKCNSACITPNGSIPNDKPFQNVNRITYGACPRYVKQNTLKLATGMRNVPEKQTRGIFGAIAGFIENGWEGMVDGWYGFRHQNSEGRGQAADLKSTQAAIDQINGKLNRLIGKTNEKFHQIEKEFSEVEGRIQDLEKYVEDTKIDLWSYNAELLVALENQHTIDLTDSEMNKLFEKTKKQLRENAEDMGNGCFKIYHKCDNACIGSIRNGTYDHDVYRDEALNNRFQIKGVELKSGYKDWILWISFAISCFLLCVALLGFIMWACQKGNIRCNICI

SEQ ID NO: 10862 - protein, 566 aa, Artificial Sequence
  derived and/or modified protein sequence (wt) from hemagglutinin__InfluenzaA__AHC61667
MKTIIALSYILCLVFAQKLPGNDNSTATLCLGHHAVPNGTIVKTITNDQIEVTNATELVQSSSTGEICDSPHQILDGENCTLIDALLGDPQCDGFQNKKWDLFVERSKAYSNCYPYDVPDYASLRSLVASSGTLEFNNESFNWTGVTQNGTSSACIRRSNNSFFSRLNWLTHLNFKYPALNVTMPNNEQFDKLYIWGVHHPGTDKDQIFLYAQSSGRITVSTKRSQQAVIPNIGSRPRIRNIPSRISIYWTIVKPGDILLINSTGNLIAPRGYFKIRSGKSSIMRSDAPIGKCNSECITPNGSIPNDKPFQNVNRITYGACPRYVKQSTLKLATGMRNVPEKQTRGIFGAIAGFIENGWEGMVDGWYGFRHQNSEGRGQAADLKSTQAAIDQINGKLNRLIGKTNEKFHQIEKEFSEVEGRIQDLEKYVEDTKIDLWSYNAELLVALENQHTIDLTDSEMNKLFEKTKKQLRENAEDMGNGCFKIYHKCDNACIGSIRNGTYNHDVYRDEALNNRFQIKGVELKSGYKDWILWISFAISCFLLCVALLGFIMWACQKGNIRCNICI

SEQ ID NO: 10863 - protein, 566 aa, Artificial Sequence; identical to SEQ ID NO: 10618
  derived and/or modified protein sequence (wt) from hemagglutinin__InfluenzaA__AHC61679

SEQ ID NO: 10864 - protein, 566 aa, Artificial Sequence; identical to SEQ ID NO: 9074
  derived and/or modified protein sequence (wt) from hemagglutinin__InfluenzaA__AHC61691

SEQ ID NO: 10865 - protein, 566 aa, Artificial Sequence; identical to SEQ ID NO: 6855
  derived and/or modified protein sequence (wt) from hemagglutinin__InfluenzaA__AHC61703

SEQ ID NO: 10866 - protein, 566 aa, Artificial Sequence; identical to SEQ ID NO: 10651
  derived and/or modified protein sequence (wt) from hemagglutinin__InfluenzaA__AHC61715

SEQ ID NO: 10867 - protein, 566 aa, Artificial Sequence; identical to SEQ ID NO: 7782
  derived and/or modified protein sequence (wt) from hemagglutinin__InfluenzaA__AHC61727

SEQ ID NO: 10868 - protein, 566 aa, Artificial Sequence; identical to SEQ ID NO: 6855
  derived and/or modified protein sequence (wt) from hemagglutinin__InfluenzaA__AHC61739

SEQ ID NO: 10869 - protein, 566 aa, Artificial Sequence
  derived and/or modified protein sequence (wt) from hemagglutinin__InfluenzaA__AHC61751
MKTIIALSYILCLVFAQKLPGNDNSTATLCLGHHAVPNGTIVKTITNDQIEVTNATELVQNSSTGEICDSPHQILDGENCTLIDALLGDPQCDGFQNKKWDLFVERSKAYSNCYPYDVPDYASLRSLVASSGTLEFNNESFNWTGVTQNGTSSACIRRSNNSFFSRLNWLTHLNFKYPALNVTMPNNEQFDKLYIWGVHHPGTDKDQIFLYAQASGRITVSTKRSQQAVIPNVGSRPRVRNIPSRISIYWTIVKPGDILLINSTGNLIAPRGYFKIRSGKSSIMRSDAPIGKCNSECITPNGSIPNDKPFQNVNRITYGACPRYVKQNTLKLATGMRNVPEKQTRGIFGAIAGFIENGWEGMVDGWYGFRHQNSEGRGQAADLKSTQAAIDQINGKLNRLIGKTNEKFHQIEKEFSEVEGRIQDLEKYVEDTKIDLWSYNAELLVALENQHTIDLTDSEMNKLFEKTKKQLRENAEDMGNGCFKIYHKCDNACIGSIRNGTYDHDVYRDEALNNRFQIKGVELKSGYKDWILWISFAISCFLLCVALLGFIMWACQKGNIRCNICI

SEQ ID NO: 10870 - protein, 566 aa, Artificial Sequence
  derived and/or modified protein sequence (wt) from hemagglutinin__InfluenzaA__AHC61763
MKTIIALSYILCLVFAQKLPGNDNSTATLCLGHHAVPNGTIVKTITNDQIEVTNATELVQSSSTGEICNSPHQILDGENCTLIDALLGDPQCDGFQNKKWDLFVERSKAHSNCYPYDVPDYASLRSLVASSGTLEFNNESFNWTGVTQNGTSSACIRRSNNSFFSRLNWLTHLNFKYPALNVTMPNNEQFDKLYIWGVHHPGTDKDQIFLYAQAAGRITVSTKRSQQTVIPNIGSRPRVRNIPSRVSIYWTIVKPGDILLINSTGNLIAPRGYFKIRSGKSSIMRSDAPIGKCNSACITPNGSIPNDKPFQNVNRITYGACPRYVKQNTLKLATGMRNVPEKQTRGIFGAIAGFIENGWEGMVDGWYGFRHQNSEGRGQAADLKSTQAAIDQINGKLNRLIGKTNEKFHQIEKEFSEVEGRIQDLEKYVEDTKIDLWSYNAELLVALENQHTIDLTDSEMNKLFEKTKKQLRENAEDMGNGCFKIYHKCDNACIGSIRNGTYDHDVYRDEALNNRFQIKGVELKSGYKDWILWISFAISCFLLCVALLGFIMWACQKGNIRCNICI

SEQ ID NO: 10871 - protein, 566 aa, Artificial Sequence; identical to SEQ ID NO: 6982
  derived and/or modified protein sequence (wt) from hemagglutinin__InfluenzaA__AHC61775

SEQ ID NO: 10872 - protein, 566 aa, Artificial Sequence; identical to SEQ ID NO: 7782
  derived and/or modified protein sequence (wt) from hemagglutinin__InfluenzaA__AHC61787

SEQ ID NO: 10873 - protein, 566 aa, Artificial Sequence; identical to SEQ ID NO: 10618
  derived and/or modified protein sequence (wt) from hemagglutinin__InfluenzaA__AHC61799

SEQ ID NO: 10874 - protein, 566 aa, Artificial Sequence
  derived and/or modified protein sequence (wt) from hemagglutinin__InfluenzaA__AHC61823
MKTIIALSYILCLVFAQKLPGNDNSTATLCLGHHAVPNGTIVKTITNDQIEVTNATELVQSSSTGEICDSPHQILDGENCTLIDALLGDPQCDGFQNKKWDLFVERSKAYSNCYPYDVPDYASLRSLVASSGTLEFNNESFNWTGVTQNGTSSACIRRSNSSFFSRLNWLTHLNFKYPALNVTMPNNEQFDKLYIWGVHHPGTDKDQIFLYAQSSGRITVSTKRSQQAVIPNIGSRPRIRNIPSRISIYWTIVKPGDILLINSTGNLIAPRGYFKIRSGKSSIMKSDAPIDKCNSECITPNGSIPNDKPFQNVNRITYGACPRYVKQSTLKLATGMRNVPEKQTRGIFGAIAGFIENGWEGMVDGWYGFRHQNSEGRGQAADLKSTQAAIDQINGKLNRLIGKTNEKFHQIEKEFSEVEGRIQDLEKYVEDTKIDLWSYNAELLVALENQHTIDLTDSEMNKLFEKTKKQLRENAEDMGNGCFKIYHKCDNACIGSIRNGTYNHDVYRDEALNNRFQIKGVELKSGYKDWILWISFAISCFLLCVALLGFIMWACQKGNIRCNICI

SEQ ID NO: 10875 - protein, 566 aa, Artificial Sequence; identical to SEQ ID NO: 7782
  derived and/or modified protein sequence (wt) from hemagglutinin__InfluenzaA__AHC61835

SEQ ID NO: 10876 - protein, 566 aa, Artificial Sequence; identical to SEQ ID NO: 6982
  derived and/or modified protein sequence (wt) from hemagglutinin__InfluenzaA__AHC61847

SEQ ID NO: 10877 - protein, 566 aa, Artificial Sequence; identical to SEQ ID NO: 6855
  derived and/or modified protein sequence (wt) from hemagglutinin__InfluenzaA__AHC61859

SEQ ID NO: 10878 - protein, 566 aa, Artificial Sequence; identical to SEQ ID NO: 7782
  derived and/or modified protein sequence (wt) from hemagglutinin__InfluenzaA__AHC61871

SEQ ID NO: 10879 - protein, 566 aa, Artificial Sequence
  derived and/or modified protein sequence (wt) from hemagglutinin__InfluenzaA__AHC61883
MKTIIALSYILCLVFAQKLPGNDNSTATLCLGHHAVPNGTIVKTITNDQIEVTNATELVQSSSTGEICDSPHQILDGENCTLIDALLGDPQCDGFQNKKWDLFVERSKAYSNCYPYDVPDYASLRSLVASSGTLEFNNESFNWTGVTQNGTSSACIRRSNSSFFSRLNWLTHLNFKYPALNVTMPNNEQFDKLYIWGVHHPGTDKDQIFLYAQSSGRITVSTKRSQQAVIPNIGSRPRIRNIPSRISIYWTIVKPGDILLINSTGNLIAPRGYFKIRSGKSSIMRSDAPIGKCNSECITPNGSIPNDKPFQNVNRITYGACPRYVKQSTLKLATGMRNVPEKQTRGIFGAIAGFIENGWEGMVDGWYGFRHQNSEGRGQAADLKSTQAAIDQINGKLNRLIGKTNEKFHQIEKEFSEVEGRIQDLEKYVEDTKIDLWSYNAELLVALENQHTIDLADSEMNKLFEKTKKQLRENAEDMGNGCFKIYHKCDNACIGSIRNGTYNHDVYRDEALNNRFQIKGVELKSGYKDWILWISFAISCFLLCVALLGFIMWACQKGNIRCNICI

SEQ ID NO: 10880 - protein, 566 aa, Artificial Sequence; identical to SEQ ID NO: 6982
  derived and/or modified protein sequence (wt) from hemagglutinin__InfluenzaA__AHC61895

SEQ ID NO: 10881 - protein, 566 aa, Artificial Sequence; identical to SEQ ID NO: 6982
  derived and/or modified protein sequence (wt) from hemagglutinin__InfluenzaA__AHC61907

SEQ ID NO: 10882 - protein, 566 aa, Artificial Sequence
  derived and/or modified protein sequence (wt) from hemagglutinin__InfluenzaA__AHC61931
MKTIIALSYILCLVFAQKLPGNDNSTATLCLGHHAVPNGTIVKTITNDQIEVTNATELVQSSSTGEICNSPHQILDGENCTLIDALLGDPQCDGFQNKKWDLFVERSKAHSNCYPYDVPDYASLRSLVASSGTLEFNNESFNWTGVTQNGTSSACIRRSNNSFFSRLNWLTHLNFKYPALNVTMPNNEQFDKLYIWGVHHPGTDKDQIFLYAQAAGRITVSTKRSQQAVIPNIGSRPRVRNIPSRVSIYWTIVKPGDILLINSTGNLIAPRGYFKIRSGKSSIMRSDAPIGKCNSACITPNGSIPNDKPFQNVNRITYGACPRYVKQNTLKLATGMRNVPEKQTRGIFGAIAGFIENGWEGMVDGWYGFRHQNSEGRGQAADLKSTQAAIDQINGKLNRLIGKTNEKFHQIEKEFSEVEGRIQDLEKYVEDTKIDLWSYNAELLVALENQHTIDLTDSEMNKLFEKTKKQLRENAEDMGNGCFKIYHKCDNACIGSIRNGTYDHDVYRDEALNNRFQIKGVELKSGYKGWILWISFAISCFLLCVALLGFIMWACQKGNIRCNICI

SEQ ID NO: 10883 - protein, 566 aa, Artificial Sequence; identical to SEQ ID NO: 7782
  derived and/or modified protein sequence (wt) from hemagglutinin__InfluenzaA__AHC61943

SEQ ID NO: 10884 - protein, 566 aa, Artificial Sequence; identical to SEQ ID NO: 9074
  derived and/or modified protein sequence (wt) from hemagglutinin__InfluenzaA__AHC61955

SEQ ID NO: 10885 - protein, 566 aa, Artificial Sequence; identical to SEQ ID NO: 7782
  derived and/or modified protein sequence (wt) from hemagglutinin__InfluenzaA__AHC61967

SEQ ID NO: 10886 - protein, 566 aa, Artificial Sequence; identical to SEQ ID NO: 6855
  derived and/or modified protein sequence (wt) from hemagglutinin__InfluenzaA__AHC61979

SEQ ID NO: 10887 - protein, 566 aa, Artificial Sequence; identical to SEQ ID NO: 6982
  derived and/or modified protein sequence (wt) from hemagglutinin__InfluenzaA__AHC61991

SEQ ID NO: 10888 - protein, 566 aa, Artificial Sequence; identical to SEQ ID NO: 10693
  derived and/or modified protein sequence (wt) from hemagglutinin__InfluenzaA__AHC62003

SEQ ID NO: 10889 - protein, 566 aa, Artificial Sequence; identical to SEQ ID NO: 7782
  derived and/or modified protein sequence (wt) from hemagglutinin__InfluenzaA__AHC62015

SEQ ID NO: 10890 - protein, 566 aa, Artificial Sequence; identical to SEQ ID NO: 9074
  derived and/or modified protein sequence (wt) from hemagglutinin__InfluenzaA__AHC62027

SEQ ID NO: 10891 - protein, 566 aa, Artificial Sequence
  derived and/or modified protein sequence (wt) from hemagglutinin__InfluenzaA__AHC62039
MKTIIALSYILCLVFAQKLPGNDNSTATLCLGHHAVPNGTIVKTITNDQIEVTNATELVQSSSTGEICNSPHQILDGENCTLIDALLGDPQCDGFQNKKWDLFVERSKAHSNCYPYDVPDYASLRSLVASSGTLEFNNESFNWTGVTQNGTSSACIRGSNNSFFSRLNWLTHLNFKYPALNVTMPNNEQFDKLYIWGVHHPGTDKDQIFLYAQASGRITVSTKRSQQAVIPNIGSRPRVRNIPSRVSIYWTIVKPGDILLINSTGNLIAPRGYFKIRSGKSSIMKSDAPIGKCNSACITPNGSIPNDKPFQNVNRITYGACPRYVKQNTLKLATGMRNVPEKQTRGIFGAIAGFIENGWEGMMDGWYGFRHQNSEGRGQAADLKSTQAAIDQINGKLNRLIGKTNEKFHQIEKEFSEVEGRIQDLEKYVEDTKIDLWSYNAELLVALENQHTIDLTDSEMNKLFEKTKKQLRENAEDMGNGCFKIYHKCDNACIGSIRNGTYDHDVYRDEALNNRFQIKGVELKSGYKDWILWISFAISCFLLCVALLGFIMWACQKGNIRCNICI

SEQ ID NO: 10892 - protein, 566 aa, Artificial Sequence
  derived and/or modified protein sequence (wt) from hemagglutinin__InfluenzaA__AHC62050
MKTIIALSYILCLVFAQKLPGNDNSTATLCLGHHAVPNGTIVKTITNDQIEVTNATELVQSSSTGEICNSPHQILDGENCTLIDALLGDPQCDGFQNKKWDLFVERSKAHSNCYPYDVPDYASLRSLVASSGTLEFNNESFNWTGVTQNGTSSACIRRSNNSFFSRLNWLTHLNFKYPALNVTMPNNEQFDKLYIWGVHHPGTDKDQIFLYAQASGRITVSTKRSQQAVIPNIGSRPRVRNVPSRVSIYWTIVKPGDILLINSTGNLIAPRGYFKIRSGKSSIMRSDAPIGKCNSACITPNGSIPNDKPFQNVNRITYGACPRYVKQNTLKLATGMRNVPEKQTRGIFGAIAGFIENGWEGMVDGWYGFRHQNSEGRGQAADLKSTQAAIDQINGKLNRLIGKTNEKFHQIEKEFSEVEGRIQDLEKYVEDTKIDLWSYNAELLVALENQHTIDLTDSEMNKLFEKTKKQLRENAEDMGNGCFKIYHKCDNACIGSIRNGTYDHDVYRDEALNNRFQIKGVELKSGYKDWILWISFAISCFLLCVALLGFIMWACQKGNIRCNICI

SEQ ID NO: 10893 - protein, 566 aa, Artificial Sequence; identical to SEQ ID NO: 9074
  derived and/or modified protein sequence (wt) from hemagglutinin__InfluenzaA__AHC62062

SEQ ID NO: 10894 - protein, 566 aa, Artificial Sequence
  derived and/or modified protein sequence (wt) from hemagglutinin__InfluenzaA__AHC62074
MKTIIALSYILCLVFAQKLPGNDNSTATLCLGHHAVPNGTIVKTITNDQIEVTNATELVQSSSTGEICDSPHQILDGENCTLIDALLGDPQCDGFQNKKWDLFVERSKAYSNCYPYDVPDYASLRSLVASSGTLEFNNESFNWTGVTQNGTSSACIRRSNNSFFSRLNWLTHLNFKYPALNVTMPNNEQFDKLYIWGVHHPGTDKDQIFLYAQASGRITVSTKRNQQAVIPNIGSRPRVRNIPSRISIYWTIVKPGDILLINSTGNLIAPRGYFKIRSGKSSIMRSDAPIGKCNSECITPNGSIPNDKPFQNVNRITYGACPRYVKQNTLKLATGMRNVPEKQTRGIFGAIAGFIENGWEGMVDGWYGFRHQNSEGRGQAADLKSTQAAIDQINGKLNRLIGKTNEKFHQIEKEFSEVEGRIQDLEKYVEDTKIDLWSYNAELLVALENQHTIDLTDSEMNKLFEKTKKQLRENAEDMGNGCFKIYHKCDNACIGSIRNGTYNHDVYRDEALNNRFQIKGVELKSGYKDWILWISFAISCFLLCVALLGFIMWACQKGNIRCNICI

SEQ ID NO: 10895 - protein, 566 aa, Artificial Sequence; identical to SEQ ID NO: 6855
  derived and/or modified protein sequence (wt) from hemagglutinin__InfluenzaA__AHC62086

SEQ ID NO: 10896 - protein, 566 aa, Artificial Sequence; identical to SEQ ID NO: 7782
  derived and/or modified protein sequence (wt) from hemagglutinin__InfluenzaA__AHC62098

SEQ ID NO: 10897 - protein, 566 aa, Artificial Sequence; identical to SEQ ID NO: 6855
  derived and/or modified protein sequence (wt) from hemagglutinin__InfluenzaA__AHC62110

SEQ ID NO: 10898 - protein, 566 aa, Artificial Sequence
  derived and/or modified protein sequence (wt) from hemagglutinin__InfluenzaA__AHC62122
MKTIIALSYILCLVFAQKLPGNDNSTATLCLGHHAVPNGTIVKTITNDQIEVTNATEMVQSSSTGEICNSPHQILDGENCTLIDALLGDPQCDGFQNKKWDLFVERSKAHSNCYPYDVPDYASLRSLVASSGTLEFNNESFNWTGVTQNGTSSACIRGSNNSFFSRLNWLTHSNFKYPALNVTMPNNEQFDKLYIWGVHHPGTDKDQIFLYAQASGRITVSTKRSQQAVIPNIGSRPRVRNIPSRVSIYWTIVKPGDILLINSTGNLIAPRGYFKIRSGKSSIMRSDAPIGKCNSACITPNGSIPNDKPFQNVNRITYGACPRYVKQNTLKLATGMRNVPEKQTRGIFGAIAGFIENGWEGMVDGWYGFRHQNSEGRGQAADLKSTQAAIDQINGKLNRLIGKTNEKFHQIEKEFSEVEGRIQDLEKYVEDTKIDLWSYNAELLVALENQHTIDLTDSEMNKLFEKTKKQLRENAEDMGNGCFKIYHKCDNACIGSIRNGTYDHDVYRDEALNNRFRIKGVELKSGYKDWILWISFAISCFLLCVALLGFIMWACQKGNIRCNICI

SEQ ID NO: 10899 - protein, 566 aa, Artificial Sequence; identical to SEQ ID NO: 6855
  derived and/or modified protein sequence (wt) from hemagglutinin__InfluenzaA__AHC62134

SEQ ID NO: 10900 - protein, 566 aa, Artificial Sequence
  derived and/or modified protein sequence (wt) from hemagglutinin__InfluenzaA__AHC62146
MKTIIALSYILCLVFAQKLPGNDNSTATLCLGHHAVPNGTIVKTITNDQIEVTNATELVQSSSTGEICNSPHQILDGENCTLIDALLGDPQCDGFQNKKWDLFVERSKAYSNCYPYDVPDYASLRSLVASSGTLEFNNESFNWTGVTQNGTSSACIRRSNSSFFSRLNWLTHLNFKYPALNVTMPNNEQFDKLYIWGVHHPGTDKDQIFLYAQSSGRITVSTKRSQQAVIPNIGSRPRIRNIPSRISIYWTIVKPGDILLINSTGNLIAPRGYFKIRSGKSSIMRSDAPIGKCNSECITPNGSIPNDKPFQNVNRITYGACPRYVKQSTLKLATGMRNVPEKQTRGIFGAIAGFIENGWEGMVDGWYGFRHQNYEGRGQAADLKSTQAAIDQINGKLNRLIGKTNEKFHQIEKEFSEVEGRIQDLEKYVEDTKIDLWSYNAELLVALENQHTIDLTDSEMNKLFEKTKKQLRENAEDMGNGCFKIYHKCDNACIGSIRNGTYNHDVYRDEALNNRFQIKGVELKSGYKDWILWISFAISCFLLCVALLGFIMWACQKGNIRCNICI

SEQ ID NO: 10901 - protein, 566 aa, Artificial Sequence; identical to SEQ ID NO: 6982
  derived and/or modified protein sequence (wt) from hemagglutinin__InfluenzaA__AHC62158

SEQ ID NO: 10902 - protein, 566 aa, Artificial Sequence
  derived and/or modified protein sequence (wt) from hemagglutinin__InfluenzaA__AHC62170
MKTIIALSYILCLVFAQKLPGNDNSTATLCLGHHAVPNGTIVKTITNDQIEVTNATELVQSSSTGEICNSPHQILDGENCTLIDALLGDPQCDGFQNKKWDLFVERSKAHSNCYPYDVPDYASLRSLVASSGTLEFNNESFNWTGVTQNGTSSACIRGSNNSFFSRLNWLTHLNFKYPALNVTMPNNEQFDKLYIWGVHHPGTDKDQIFLYAQASGRITVSTKRSQQAVIPNIGSRPRVRNIPSRVSIYWTIVKPGDILLINSTGNLIAPRGYFKIRSGKSSIMRSDAPIGKCNSACITPNGSIPNDKPFQNVNRITYGACPRYVKQNTLKLATGMRNVPEKQTRGIFGAIAGFIENGWEGMMDGWYGFRHQNSEGRGQAADLKSTQAAIDQINGKLNRLIGKTNEKFHQIEKEFSEVEGRIQDLEKYVEDTKIDLWSYNAELLVALENQHTIDLTDSEMNKLFEKTKKQLRENAEDMGNGCFKIYHKCDNACIGSIRNGTYDHNVYRDEALNNRFQIKGVELKSGYKDWILWISFAISCFLLCVALLGFIMWACQKGNIRCNICI

SEQ ID NO: 10903 - protein, 566 aa, Artificial Sequence; identical to SEQ ID NO: 6855
  derived and/or modified protein sequence (wt) from hemagglutinin__InfluenzaA__AHC62182

SEQ ID NO: 10904 - protein, 566 aa, Artificial Sequence; identical to SEQ ID NO: 9074
  derived and/or modified protein sequence (wt) from hemagglutinin__InfluenzaA__AHC62194

SEQ ID NO: 10905 - protein, 566 aa, Artificial Sequence
  derived and/or modified protein sequence (wt) from hemagglutinin__InfluenzaA__AHC62206
MKTIIALSYILCLVFAQKLPGNDNSTATLCLGHHAVPNGTIVKTITNDQIEVTNATELVQSSSTGEICDSPHQILDGENCTLIDALLGDPQCDGFQNKKWDLFVERSKAYSNCYPYDVPDYASLRSLVASSGTLEFNNESFIWTGVTQNGTSSACIRRSNSSFFSRLNWLTHLNFKYPALNVTMPNNEQFDKLYIWGVHHPGTDKDQIFLYAQSSGRITVSTKRSQQAVIPNIGSRPRIRNIPSRISIYWTIVKPGDILLINSTGNLIAPRGYFKIRSGKSSIMRSDAPIGKCNSECITPNGSIPNDKPFQNVNRITYGACPRYVKQSTLKLATGMRNVPEKQTRGIFGAIAGFIENGWEGMVDGWYGFRHQNSEGRGQAADLKSTQAAIDQINGKLNRLIGKTNEKFHQIEKEFSEVEGRIQDLEKYVEDTKIDLWSYNAELLVALENQHTIDLTDSEMNKLFEKTKKQLRENAEDMGNGCFKIYHKCDNACIGSIRNGTYNHDVYRDEALNNRFQIKGVELKSGYKDWILWISFAISCFLLCVALLGFIMWACQKGNIRCNICI

SEQ ID NO: 10906 - protein, 566 aa, Artificial Sequence; identical to SEQ ID NO: 6982
  derived and/or modified protein sequence (wt) from hemagglutinin__InfluenzaA__AHC62218

SEQ ID NO: 10907 - protein, 566 aa, Artificial Sequence
  derived and/or modified protein sequence (wt) from hemagglutinin__InfluenzaA__AHC62242
MKTIIALSYILCLVFAQKIPGNDNSTATLCLGHHAVPNGTIVKTITNDQIEVTNATELVQNSSTGEICDSPHQILDGENCTLIDALLGDPQCDGFQNKKWDLFVERSKAYSNCYPYDVPDYASLRSLVASSGTLEFNNESFNWTGVTQNGTSSACIRRSNNSFFSRLNWLTHLNFKYPALNVTMPNNEQFDKLYIWGVHHPGTDKDQIFLYAQASGRITVSTKRSQQAVIPNIGSRPRVRNIPSRISIYWTIVKPGDILLINSTGNLIAPRGYFKIRSGKSSIMRSDAPIGKCNSECITPNGSIPNDKPFQNVNRITYGACPRYVKQNTLKLATGMRNVPEKQTRGIFGAIAGFIENGWEGMVDGWYGFRHQNSEGRGQAADLKSTQAAIDQINGKLNRLIGKTNEKFHQIEKEFSEVEGRIQDLEKYVEDTKIDLWSYNAELLIALENQHTIDLTDSEMNKLFEKTKKQLRENAEDMGNGCFKIYHKCDNACIGSIRNGTYDHDVYRDEALNNRFQIKGVELKSGYKDWILWISFAISCFLLCVALLGFIMWACQKGNIRCNICI

SEQ ID NO: 10908 - protein, 566 aa, Artificial Sequence; identical to SEQ ID NO: 10617
  derived and/or modified protein sequence (wt) from hemagglutinin__InfluenzaA__AHC62254

SEQ ID NO: 10909 - protein, 566 aa, Artificial Sequence; identical to SEQ ID NO: 6982
  derived and/or modified protein sequence (wt) from hemagglutinin__InfluenzaA__AHC62266

SEQ ID NO: 10910 - protein, 566 aa, Artificial Sequence; identical to SEQ ID NO: 10781
  derived and/or modified protein sequence (wt) from hemagglutinin__InfluenzaA__AHC62278

SEQ ID NO: 10911 - protein, 566 aa, Artificial Sequence
  derived and/or modified protein sequence (wt) from hemagglutinin__InfluenzaA__AHC62290
MKTIIALSYILCLIFAQKLPGNDNSTATLCLGHHAVPNGTIVKTITNDQIEVTNATELVQSSSTGEICNSPHQILDGENCTLIDALLGDPQCDGFQNKKWDLFVERSKAHSNCYPYDVPDYASLRSLVASSGTLEFNNESFNWTGVTQNGTSSACIRRSNNSFFSRLNWLTHLNFKYPALNVTMPNNEQFDKLYIWGVHHPGTDKDQIFLYAQASGRITVSTKRSQQAVIPNIGSRPRVRNIPSRVSIYWTIVKPGDILLINSTGNLIAPRGYFKIRSGKSSIMRSDAPIGKCNSACITPNGSIPNDKPFQNVNRITYGACPRYVKQNTLKLATGMRNVPEKQTRGIFGAIAGFIENGWEGMVDGWYGFRHQNSEGRGQAADLKSTQAAIDQINGKLNRLIGKTNEKFHQIEKEFSEVEGRIQDLEKYVEDTKIDLWSYNAELLVALENQHTIDLTDSEMNKLFEKTKKQLRENAEDMGNGCFKIYHKCDNACIGSIRNGTYDHDVYRDEALNNRFQIKGVELKSGYKDWILWISFAISCFLLCVALLGFIMWACQKGNIRCNICI

SEQ ID NO: 10912 - protein, 566 aa, Artificial Sequence
  derived and/or modified protein sequence (wt) from hemagglutinin__InfluenzaA__AHC62302
MKTIIALSYILCLVFAQKLPGNDNSTATLCLGHHAVPNGTIVKTITNDQIEVTNATELVQSSSTGEICNSPHQILDGENCTLIDALLGDPQCDGFQNKKWDLFVERSKAHSNCYPYDVPDYASLRSLVASSGTLEFNNESFNWTGVTQNGTSSACIRRSNNSFFSRLNWLTHLNFKYPALNVTMPNNEQFDKLYIWGVHHPGTDKDQIFLYAQAAGRITVSTKRSQQAVIPNIGSRPRVRNIPSRVSIYWTIVKPGDILLINSTGNLIAPRGYFKIRNGKSSIMRSDAPIGKCNSACITPNGSIPNDKPFQNVNRITYGACPRYVKQNTLKLATGMRNVPEKQTRGIFGAIAGFIENGWEGMVDGWYGFRHQNSEGRGQAADLKSTQAAIDQINGKLNRLIGKTNEKFHQIEKEFSEVEGRIQDLEKYVEDTKIDLWSYNAELLVALENQHTIDLTDSEMNKLFEKTKKQLRENAEDMGNGCFKIYHKCDNACIGSIRNGTYDHDVYRDEALNNRFQIKGVELKSGYKDWILWISFAISCFLLCVALLGFIMWACQKGNIRCNICI

SEQ ID NO: 10913 - protein, 566 aa, Artificial Sequence
  derived and/or modified protein sequence (wt) from hemagglutinin__InfluenzaA__AHC62314
MKTIIALSYILCLVFAQKLPGNDNSTATLCLGHHAVPNGTIVKTITNDQIEVTNATELVQNSSTGEICDSPHQILDGENCTLIDALLGDPQCDGFQNKKWDLFVERSKAYSNCYPYDVPDYASLRSLVASSGTLEFNNESFNWTGVTQNGTSSACIRRSNNSFFSRLNWLTHLNFKYPALNVTMPNNEQFDKLYIWGVHHPGTDKDQIFLYAQASGRITVSTKRSQQAVIPNIGSRPRVRNIPSRISIYWTIVKPGDILLINSTGNLIAPRGYFKIRSGKSSIMRSDAPIGKCNSECITPNGSIPNDKPFQNVNRITYGACPRYVKQNTLKLATGMRNVPEKQTRGIFGAIAGFIENGWEGMVDGWYGFRHQNSEGRGQAADLKSTQAAIDQINGKLNRLIGKTNEKFHQIEKEFSEVEGRIQDLEKYVEDTKIDLWSYNAELLVALENQHTIDLTDSEMNKLFEKTKKQLRENAEDMGNGCFKIYHKCDNACIGSIRNGTYDHDVYRDEALNNRFQIRGVELKSGYKDWILWISFAISCFLLCVALLGFIMWACQKGNIRCNICI

SEQ ID NO: 10914 - protein, 566 aa, Artificial Sequence; identical to SEQ ID NO: 10778
  derived and/or modified protein sequence (wt) from hemagglutinin__InfluenzaA__AHC62326

SEQ ID NO: 10915 - protein, 566 aa, Artificial Sequence; identical to SEQ ID NO: 7782
  derived and/or modified protein sequence (wt) from hemagglutinin__InfluenzaA__AHC62338

SEQ ID NO: 10916 - protein, 566 aa, Artificial Sequence; identical to SEQ ID NO: 6855
  derived and/or modified protein sequence (wt) from hemagglutinin__InfluenzaA__AHC62350

SEQ ID NO: 10917 - protein, 566 aa, Artificial Sequence; identical to SEQ ID NO: 7782
  derived and/or modified protein sequence (wt) from hemagglutinin__InfluenzaA__AHC62362

SEQ ID NO: 10918 - protein, 566 aa, Artificial Sequence; identical to SEQ ID NO: 7782
  derived and/or modified protein sequence (wt) from hemagglutinin__InfluenzaA__AHC62374

SEQ ID NO: 10919 - protein, 566 aa, Artificial Sequence; identical to SEQ ID NO: 10781
  derived and/or modified protein sequence (wt) from hemagglutinin__InfluenzaA__AHC62386

SEQ ID NO: 10920 - protein, 566 aa, Artificial Sequence; identical to SEQ ID NO: 6855
  derived and/or modified protein sequence (wt) from hemagglutinin__InfluenzaA__AHC62398

SEQ ID NO: 10921 - protein, 566 aa, Artificial Sequence
  derived and/or modified protein sequence (wt) from hemagglutinin__InfluenzaA__AHC62410
MKTIIALSYILCLVFAQKLPGNDNSTATLCLGHHAVPNGTIVKTITNDQIEVTNATELVQSSSTGEICNSPHQILDGENCTLIDALLGDPQCDGFQNKKWDLFVERSKAHSNCYPYDVPDYASLRSLVASSGTLEFNNESFNWTGVTQNGTSSACIRRSNNSFFSRLNWLTHLNFKYPALNVTMPNNEQFDKLYIWGVHHPGTDKDQIFLYAQASGRITVSTKRSQQAVIPNIGSRPRVRNIPSRVSIYWTIVKPGDILLINSTGNLIAPRGYFKIRSGKSSIIRSDAPIGKCNSACITPNGSIPNDKPFQNVNRITYGACPRYVKQNTLKLATGMRNVPEKQTRGIFGAIAGFIENGWEGMVDGWYGFRHQNSEGRGQAADLKSTQAAIDQINGKLNRLIGKTNEKFHQIEKEFSEVEGRIQDLEKYVEDTKIDLWSYNAELLVALENQHTIDLTDSEMNKLFEKTKKQLRENAEDMGNGCFKIYHKCDNACIGSIRNGTYDHDVYRDEALNNRFQIKGVELKSGYKDWILWISFAISCFLLCVALLGFIMWACQKGNIRCNICI

SEQ ID NO: 10922 - protein, 566 aa, Artificial Sequence; identical to SEQ ID NO: 10724
  derived and/or modified protein sequence (wt) from hemagglutinin__InfluenzaA__AHC62422

SEQ ID NO: 10923 - protein, 566 aa, Artificial Sequence
  derived and/or modified protein sequence (wt) from hemagglutinin__InfluenzaA__AHC62434
MKTIIALSYILCLVFAQKLPGNDNSTATLCLGHHAVPNGTIVKTITNDQIEVTNATELVQSSSTGEICNSPHQILDGENCTLIDALLGDPQCDGFQNKKWDLFVERSKAHSNCYPYDVPDYASLRSLVASSGTLEFNNESFNWTGVTQNGTSSACIRRSNNSFFSRLNWLTHLNFKYPALNVTMPNNEQFDKLYIWGVHHPGTDKDQIFLYAQAAGRITVSTKRSQQAVIPNIGSRPRVRNIPSRVSIYWTIVKPGDILLINSTGNLIAPRGYFKIQSGKSSIMRSDAPIGKCNSACITPNGSIPNDKPFQNVNRITYGACPRYVKQNTLKLATGMRNVPEKQTRGIFGAIAGFIENGWEGMVDGWYGFRHQNSEGRGQAADLKSTQAAIDQINGKLNRLIGKTNEKFHQIEKEFSEVEGRIQDLEKYVEDTKIDLWSYNAELLVALENQHTIDLTDSEMNKLFEKTKKQLRENAEDMGNGCFKIYHKCDNACIGSIRNGTYDHDVYRDEALNNRFQIKGVELKSGYKDWILWISFAISCFLLCVALLGFIMWACQKGNIRCNICI

SEQ ID NO: 10924 - protein, 566 aa, Artificial Sequence; identical to SEQ ID NO: 6855
  derived and/or modified protein sequence (wt) from hemagglutinin__InfluenzaA__AHC62446

SEQ ID NO: 10925 - protein, 566 aa, Artificial Sequence; identical to SEQ ID NO: 6982
  derived and/or modified protein sequence (wt) from hemagglutinin__InfluenzaA__AHC62458

SEQ ID NO: 10926 - protein, 566 aa, Artificial Sequence
  derived and/or modified protein sequence (wt) from hemagglutinin__InfluenzaA__AHC62470
MKTIIALSYILCLVFAQKLPGNDNSTATLCLGHHAVPNGTIVKTITNDQIEVTNATELVQNSSTGEICDSPHQILDGENCTLIDALLGDPQCDGFQNKKWDLFVERSKAYSNCYPYDVPDYASLRSLVASSGTLEFNNESFNWTGVTQNGTSSACIRRSNNSFFSRLNWLTHLNFKYPALNVTMPNNEQFDKLYIWGVHHPGTDKDQIFLYAQASGRITVSTKRSQQAVIPNIGSRPRVRNIPSRISIYWTIVKPGDILLINSTGNLIAPRGYFKIRSGKSSIMRSDAPIGKCNSECITPNGSIPNGKPFQNVNRITYGACPRYVKQNTLKLATGMRNVPEKQTRGIFGAIAGFIENGWEGMVDGWYGFRHQNSEGRGQAADLKSTQAAIDQINGKLNRLIGKTNEKFHQIEKEFSEVEGRIQDLEKYVEDTKIDLWSYNAELLVALENQHTIDLTDSEMNKLFEKTKKQLRENAEDMGNGCFKIYHKCDNACIGSIRNGTYDHDVYRDEALNNRFQIKGVELKSGYKDWILWISFAISCFLLCVALLGFIMWACQKGNIRCNICI

SEQ ID NO: 10927 - protein, 566 aa, Artificial Sequence; identical to SEQ ID NO: 10679
  derived and/or modified protein sequence (wt) from hemagglutinin__InfluenzaA__AHC62482

SEQ ID NO: 10928 - protein, 566 aa, Artificial Sequence; identical to SEQ ID NO: 6855
  derived and/or modified protein sequence (wt) from hemagglutinin__InfluenzaA__AHC62506

SEQ ID NO: 10929 - protein, 566 aa, Artificial Sequence; identical to SEQ ID NO: 6982
  derived and/or modified protein sequence (wt) from hemagglutinin__InfluenzaA__AHC62518

SEQ ID NO: 10930 - protein, 566 aa, Artificial Sequence
  derived and/or modified protein sequence (wt) from hemagglutinin__InfluenzaA__AHC62530
MKTIIALSYILCLVFAQKIPGNDNSTATLCLGHHAVPNGTIVKTITNDQIEVTNATELVQSSSTGEICNSPHQILDGENCTLIDALLGDPQCDGFQNKKWDLFVERSKAHSNCYPYDVPDYASLRSLVASSGTLEFNNESFNWTGVTQNGTSSACIRRSNNSFFSRLNWLTHLNFKYPALNVTMPNNEQFDKLYIWGVHHPGTDKDQIFLYAQASGRITVSTKRSQQAVIPNIGSRPRVRNIPSRVSIYWTIVKPGDILLINSTGNLIAPRGYFKIRSGKSSIMRSDAPIGKCNSACITPNGSIPNDKPFQNVNRITYGACPRYVKQNTLKLATGMRNVPEKQTRGIFGAIAGFIENGWEGMVDGWYGFRHQNSEGRGQAADLKSTQAAIDQINGKLNRLIGKTNEKFHQIEKEFSEVEGRIQDLEKYVEDTKIDLWSYNAELLVALENQHTIDLTDSEMNKLFEKTKKQLRENAEDMGNGCFKIYHKCDNACIGSIRNGTYDHDVYRDEALNNRFQIKGVELKSGYKDWILWISFAISCFLLCVALLGFIMWACQKGNIRCNICI

SEQ ID NO: 10931 - protein, 566 aa, Artificial Sequence; identical to SEQ ID NO: 10651
  derived and/or modified protein sequence (wt) from hemagglutinin__InfluenzaA__AHC62542

SEQ ID NO: 10932 - protein, 566 aa, Artificial Sequence; identical to SEQ ID NO: 6855
  derived and/or modified protein sequence (wt) from hemagglutinin__InfluenzaA__AHC62554

SEQ ID NO: 10933 - protein, 566 aa, Artificial Sequence
  derived and/or modified protein sequence (wt) from hemagglutinin__InfluenzaA__AHC62566
MKTIIALSYILCLVFAQKLPGNDNSTATLCLGHHAVPNGTMVKTITNDQIEVTNATELVQNSSTGEICDSPHQILDGENCTLIDALLGDPQCDGFQNKKWDLFVERSKAYSNCYPYDVPDYASLRSLVASSGTLEFNNESFNWTGVTQNGTSSACIRRSNNSFFSRLNWLTHLNFKYPALNVTMPNNEQFDKLYIWGVHHPGTDKDQIFLYAQASGRITVSTKRSQQAVIPNIGSRPRVRNIPSRISIYWTIVKPGDILLINSTGNLIAPRGYFKIRSGKSSIMRSDAPIGKCNSECITPNGSIPNDKPFQNVNRITYGACPRYVKQNTLKLATGMRNVPEKQTRGIFGAIAGFIENGWEGMVDGWYGFRHQNSEGRGQAADLKSTQAAIDQINGKLNRLIGKTNEKFHQIEKEFSEVEGRIQDLEKYVEDTKIDLWSYNAELLVALENQHTIDLTDSEMNKLFEKTKKQLRENAEDMGNGCFKIYHKCDNACIGSIRNGTYDHDVYRDEALNNRFQIKGVELKSGYKDWILWISFAISCFLLCVALLGFIMWACQKGNIRCNICI

SEQ ID NO: 10934 - protein, 566 aa, Artificial Sequence; identical to SEQ ID NO: 6855
  derived and/or modified protein sequence (wt) from hemagglutinin__InfluenzaA__AHC62578

SEQ ID NO: 10935 - protein, 566 aa, Artificial Sequence; identical to SEQ ID NO: 6855
  derived and/or modified protein sequence (wt) from hemagglutinin__InfluenzaA__AHC62590

SEQ ID NO: 10936 - protein, 566 aa, Artificial Sequence; identical to SEQ ID NO: 6982
  derived and/or modified protein sequence (wt) from hemagglutinin__InfluenzaA__AHC62602

SEQ ID NO: 10937 - protein, 566 aa, Artificial Sequence
  derived and/or modified protein sequence (wt) from hemagglutinin__InfluenzaA__AHC62614
MKTIIALSYILCLVFAQKLPGNDNSTATLCLGHHAVPNGTIVKTITNDQIEVTNATELVQSSSTGEICNSPHQIIDGENCTLIDALLGDPQCDGFQNKKWDLFVERSKAHSNCYPYDVPDYASLRSLVASSGTLEFNNESFNWTGVTQNGTSSACIRGSNNSFFSRLNWLTHLNFKYPALNVTMPNNEQFDKLYIWGVHHPGTDKDQIFLYAQASGRITVSTKRSQQAVIPNIGSRPRVRNIPSRVSIYWTIVKPGDILLINSTGNLIAPRGYFKIRSGKSSIMRSDAPIGKCNSACITPNGSIPNDKPFQNVNRITYGACPRYVKQNTLKLATGMRNVPEKQTRGIFGAIAGFIENGWEGMVDGWYGFRHQNSEGRGQAADLKSTQAAIDQINGKLNRLIGKTNEKFHQIEKEFSEVEGRIQDLEKYVEDTKIDLWSYNAELLVALENQHTIDLTDSEMNKLFEKTKKQLRENAEDMGNGCFKIYHKCDNACIGSIRNGTYDHDVYRDEALNNRFQIKGVELKSGYKDWILWISFAISCFLLCVALLGFIMWACQKGNIRCNICI

SEQ ID NO: 10938 - protein, 566 aa, Artificial Sequence; identical to SEQ ID NO: 10618
  derived and/or modified protein sequence (wt) from hemagglutinin__InfluenzaA__AHC62626

SEQ ID NO: 10939 - protein, 566 aa, Artificial Sequence; identical to SEQ ID NO: 6982
  derived and/or modified protein sequence (wt) from hemagglutinin__InfluenzaA__AHC62638

SEQ ID NO: 10940 - protein, 566 aa, Artificial Sequence; identical to SEQ ID NO: 10782
  derived and/or modified protein sequence (wt) from hemagglutinin__InfluenzaA__AHC62650

SEQ ID NO: 10941 - protein, 566 aa, Artificial Sequence
  derived and/or modified protein sequence (wt) from hemagglutinin__InfluenzaA__AHC62662
MKTIIALSYILCLVFAQKLPGNDNSTATLCLGHHAVPNGTIVKTITNDQIEVTNATELVQSSSTGEICNSPHQILDGENCTLIDALLGDPQCDGFQNKKWDLFVERSKAHSSCYPYDVPDYASLRSLVASSGTLEFNNESFNWTGVTQNGTSSACIRGSNNSFFSRLNWLTHLNFKYPALNVTMPNNEQFDKLYIWGVHHPGTDKDQIFLYAQASGRITVSTKRSQQAVIPNIGSRPRVRNIPSRVSIYWTIVKPGDILLINSTGNLIAPRGYFKIRSGKSSIMRSDAPIGKCNSACITPNGSIPNDKPFQNVNRITYGACPRYVKQNTLKLATGMRNVPEKQTRGIFGAIAGFIENGWEGMVDGWYGFRHQNSEGRGQAADLKSTQAAIDQINGKLNRLIGKTNEKFHQIEKEFSEVEGRIQDLEKYVEDTKIDLWSYNAELLVALENQHTIDLTDSEMNKLFEKTKKQLRENAEDMGNGCFKIYHKCDNACIGSIRNGTYDHDVYRDEALNNRFQIKGVELKSGYKDWILWISFAISCFLLCVALLGFIMWACQKGNIRCNICI

SEQ ID NO: 10942 - protein, 566 aa, Artificial Sequence
  derived and/or modified protein sequence (wt) from hemagglutinin__InfluenzaA__AHC62674
MKTIIALSYILCLVFAQKLPGNDNSTATLCLGHHAVPNGTIVKTITNDQIEVTNATELVQSSSTGEICNSPHQILDGENCTLIDALLGDPQCDGFQNKKWDLFVERSKAHSNCYPYDVPDYASLRSLIASSGTLEFNNESFNWTGVTQNGTSSACIRGSNNSFFSRLNWLTHLNFKYPALNVTMPNNEQFDKLYIWGVHHPGTDKDQIFLYAQASGRITVSTKRSQQAVIPNIGSRPRVRNIPSRVSIYWTIVKPGDILLINSTGNLIAPRGYFKIRSGKSSIMRSDAPIGKCNSACITPNGSIPNDKPFQNVNRITYGACPRYVKQNTLKLATGMRNVPEKQTRGIFGAIAGFIENGWEGMVDGWYGFRHQNSEGRGQAADLKSTQAAIDQINGKLNRLIGKTNEKFHQIEKEFSEVEGRIQDLEKYVEDTKIDLWSYNAELLVALENQHTIDLTDSEMNKLFEKTKKQLRENAEDMGNGCFKIYHKCDNTCIESIRNGTYDHDVYRDEALNNRFQIKGVELKSGYKDWILWISFAISCFLLCVALLGFIMWACQKGNIRCNICI

SEQ ID NO: 10943 - protein, 566 aa, Artificial Sequence; identical to SEQ ID NO: 10060
  derived and/or modified protein sequence (wt) from hemagglutinin__InfluenzaA__AHE37972

SEQ ID NO: 10944 - protein, 566 aa, Artificial Sequence
  derived and/or modified protein sequence (wt) from hemagglutinin__InfluenzaA__AHE37973
MKAILVVLLYTFATANADTLCIGYHANNSTDTVDTVLEKNVTVTHSVNLLEDKHNGKLCKLRGVAPLHLGKCNIAGWILGNPECESLSTASSWSYIVETSSSDNGTCYPGDFINYEELREQLSSVSSFERFEIFPKTSSWPNHDSNKGVTAACPHAGTKSFYKNLIWLVKKGNSYPKLSKSYINDKGKEVLVLWGIHHPSTTADQQSLYQNADAYVFVGTSRYSKKFKPEIAIRPKVRDQEGRINYYWTLIEPGDKITFEATGNLVVPRYAFAMERNAGSGIIISDTPVHDCNTTCQTPEGAINTSLPFQNIHPITIGKCPKYVKSTKLRLATGLRNVPSIQSRGLFGAIAGFIEGGWTGMVDGWYGYHHQNEQGSGYAADLKSTQNAIDKITNKVNSVIEKMNTQFTAVGKEFNHLEKRIENLNKKVDDGFLDIWTYNAELLVLLENERTLDYHDSNVKNLYEKVRNQLKNNAKEIGNGCFEFYHKCDNTCMESVKNGTYDYPKYSEEAKLNREKIDGVKLESTRIYQILAIYSTVASSLVLVVSLGAISFWMCSNGSLQCRICI

SEQ ID NO: 10945 - protein, 566 aa, Artificial Sequence
  derived and/or modified protein sequence (wt) from hemagglutinin__InfluenzaA__AHE37974
MKAILVVLLYTFATANADTLCIGYHANNSTDTVDTVLEKNVTVTHSVNLLEDKHNGKLCKLRGVAPLHLGKCNIAGWILGNPECESLSTASSWSYIVETSSSDNGTCYPGDFINYEELREQLSSVSSFERFEMFPKTSSWPNHDSNKGVTAACPHAGAKSFYKNLIWLVKKGNSYPKLSKSYINDKGKEVLVLWGIHHPSTTADQQSLYQNADAYVFVGTSKYSKKFKPEIAIRPKVRDQEGRMNYYWTLIEPGDKITFEATGNLVVPRYAFAMERNAGSGIIISDTPVHDCNTTCQTPEGAINTSLPFQNIHPITIGKCPKYVKSTKLRLATGLRNVPSIQSRGLFGAIAGFIEGGWTGMVDGWYGYHHQNEQGSGYAADLKSTQNAIDKITNKVNSVIEKMNTQFTAVGKEFNHLEKRIENLNKKVDDGFLDIWTYNAELLVLLENERTLDYHDSNVKNLYEKVRNQLKNNAKEIGNGCFEFYHKCDNTCMESVKNGTYDYPKYSEEAKLNREKIDGVKLESTRIYQILAIYSTVASSLVLVVSLGAISFWMCSNGSLQCRICI

SEQ ID NO: 10946 - protein, 566 aa, Artificial Sequence; identical to SEQ ID NO: 10040
  derived and/or modified protein sequence (wt) from hemagglutinin__InfluenzaA__AHE37975

SEQ ID NO: 10947 - protein, 566 aa, Artificial Sequence
  derived and/or modified protein sequence (wt) from hemagglutinin__InfluenzaA__AHE37976
MKAILVVLLYTFATANADTLCIGYHANNSTDTVDTVLEKNVTVTHSVNLLEDKHNGKLCKLRGVAPLHLGKCNIAGWILGNPECESLSAASSWSYIVETSSSNNGTCYPGDFINYEELREQLSSVSSFERFEIFPKTSSWPNHDSNKGVTAACPHAGAKSFYKNLIWLVKKGNSYPKLSKSYINDKGKEILVLWGIHHPSTTTDQQSLYQNADAYVFVGTSRYSKKFKPEIAIRPKVRDQEGRMNYYWTLIEPGDKITFEATGNLVVPRYAFAMERNAGSGIIISDTPVHDCNTTCQTPEGAINTSLPFQNIHPITIGKCPKYVKSTKLRLATGLRNVPSIQSRGLFGAIAGFIEGGWTGMVDGWYGYHHQNEQGSGYAADLKSTQNAIDKITNKVNSVIEKMNTQFTAVGKEFNHLEKRIENLNKKVDDGFLDIWTYNAELLVLLENERTLDYHDSNVKNLYEKVRNQLKNNAKEIGNGCFEFYHKCDNTCMESVKNGTYDYPKYSEEAKLNRGKIDGVKLESTRIYQILAIYSTVASSLVLVVSLGAISFWMCSNGSLQCRICI

SEQ ID NO: 10948 - protein, 566 aa, Artificial Sequence; identical to SEQ ID NO: 10040
  derived and/or modified protein sequence (wt) from hemagglutinin__InfluenzaA__AHE37977

SEQ ID NO: 10949 - protein, 566 aa, Artificial Sequence; identical to SEQ ID NO: 10060
  derived and/or modified protein sequence (wt) from hemagglutinin__InfluenzaA__AHE37978

SEQ ID NO: 10950 - protein, 566 aa, Artificial Sequence; identical to SEQ ID NO: 10040
  derived and/or modified protein sequence (wt) from hemagglutinin__InfluenzaA__AHE37979

SEQ ID NO: 10951 - protein, 566 aa, Artificial Sequence
  derived and/or modified protein sequence (wt) from hemagglutinin__InfluenzaA__AHE37980
MKAILVVLLYTFATANADTLCIGYHANNSTDTVDTVLEKNVTVTHSVNLLEDKHNGKLCKLRGVTPLHLGKCNIAGWILGNPECESLSTASSWSYIVETSSSDNGTCYPGDFINYEELREQLSSVSSFERFEIFPKTSSWPNHDSNKGVTAACPHAGAKSFYKNLIWLVKKGNSYPKLSKSYINDKGKEVLVLWGIHHPSTTADQQSLYQNADAYVFVGTSRYSKKFKPEIAIRPKVRDQEGRMNYYWTLIEPGDKITFEATGNLVVPRYAFAMERNAGSGIIISDTPVHDCNTTCQTPEGAINTSLPFQNIHPITIGKCPKYVKSTKLRLATGLRNVPSIQSRGLFGAIAGFIEGGWTGMVDGWYGYHHQNEQGSGYAADLKSTQNAIDKITNKVNSVIEKMNTQFTAVGKEFNHLEKRIENLNKKVDDGFLDIWTYNAELLVLLENERTLDYHDSNVKNLYEKVRNQLKNNAKEIGNGCFEFYHKCDNTCMESVKNGTYDYPKYSEEAKLNREKIDGVKLESTRIYQILAIYSTVASSLVLVVSLGAISFWMCSNGSLQCRICI

SEQ ID NO: 10952 - protein, 566 aa, Artificial Sequence
  derived and/or modified protein sequence (wt) from hemagglutinin__InfluenzaA__AHE37981
MKAILVVLLYTFATANADTLCIGYHANNSTDTVDTVLEKNVTVTHSVNLLEDKHNGKLCKLRGVAPLHLGKCNIAGWILGNPECESLSTASSWSYIVETSSSDNGTCYPGDFINYEELREQLSSVSSFERFEMFPKTSSWPNHDSNKGVTAACPHAGAKSFYKNLIWLVKKGNSYPKLSKSYINDKGKEVLVLWGIHHPSTTADQQSLYQNADAYVFVGTSKYSKKFKPEIAIRPKVRDQEGRMNYYWTLIEPGDKITFEATGNLVVPRYAFAMERNAGSGIIISDTPVHDCNTTCQTPEGAINTSLPFQNIHPITIGKCPKYVKSTKLRLATGLRNVPSIQSRGLFGAIAGFIEGGWTGMVDGWYGYHHQNEQGSGYAADLKSTQNAIDKITNKVNSVIEKMNIQFTAVGKEFNHLEKRIENLNKKVDDGFLDIWTYNAELLVLLENERTLDYHDSNVKNLYEKVRNQLKNNAKEIGNGCFEFYHKCDNTCMESVKNGTYDYPKYSEEAKLNREKIDGVKLESTRIYQILAIYSTVASSLVLVVSLGAISFWMCSNGSLQCRICI

SEQ ID NO: 10953 - protein, 566 aa, Artificial Sequence; identical to SEQ ID NO: 10040
  derived and/or modified protein sequence (wt) from hemagglutinin__InfluenzaA__AHE37982

SEQ ID NO: 10954 - protein, 566 aa, Artificial Sequence
  derived and/or modified protein sequence (wt) from hemagglutinin__InfluenzaA__AHE37983
MKAILVVLLYTFATANADTLCIGYHANNSTDTVDTVLEKNVTVTHSVNLLEDKHNGKLCKLRGVAPLHLGKCNIAGWILGNPECESLSTASSWSYIVETSSSDNGTCYPGDFINYEELREQLSSVSSFERFEIFPKTSSWPNHDSNKGVTAACPHAGAKSFYKNLIWLVKKGNSYPKLSESYINDKGKEVLVLWGIHHPSTTADQQSLYQNADAYVFVGTSRYSKKFKPEIAIRPKVRDQEGRMNYYWTLIEPGDKITFEATGNLVVPRYAFAMERNAGSGIIISDTPVHDCNTTCQTPEGAINTSLPFQNIHPITIGKCPKYVKSTKLRLATGLRNVPSIQSRGLFGAIAGFIEGGWTGMVDGWYGYHHQNEQGSGYAADLKSTQNAIDKITNKVNSVIEKMNTQFTAVGKEFNHLEKRIENLNKKVDDGFLDIWTYNAELLVLLENERTLDYHDSNVKNLYEKVRNQLKNNAKEIGNGCFEFYHKCDNTCMESVKNGTYDYPKYSEEAKLNREKIDGVKLESTRIYQILAIYSTVASSLVLVVSLGAISFWMCSNGSLQCRICI

SEQ ID NO: 10955 - protein, 566 aa, Artificial Sequence
  derived and/or modified protein sequence (wt) from hemagglutinin__InfluenzaA__AHE37984
MEAILVVLLYTFATANADTLCIGYHANNSTDTVDTVLEKNVTVTHSVNLLEDKHNGKLCKLRGVAPLHLGKCNIAGWILGNPECESLSTASSWSYIVETSSSDNGTCYPGDFINYEELREQLSSVSSFERFEIFPKTSSWPNHDSNKGVTAACPHAGAKSFYKNLIWLVKKGNSYPKLSKSYINDKGKEVLVLWGIHHPSTTADQQSLYQNADAYVFVGTSRYSKKFKPEIAIRPKVRDQEGRMNYYWTLIEPGDKITFEATGNLVVPRYAFAMERNAGSGIIISDTPVHDCNTTCQTPEGAINTSLPFQNIHPITIGKCPKYVKSTKLRLATGLRNVPSIQSRGLFGAIAGFIEGGWTGMVDGWYGYHHQNEQGSGYAADLKSTQNAIDKITNKVNSVIEKMNTQFTAVGKEFNHLEKRIENLNKKVDDGFLDIWTYNAELLVLLENERTLDYHDSNVKNLYEKVRNQLKNNAKEIGNGCFEFYHKCDNTCMESVKNGTYDYPKYSEEAKLNREKIDGVKLESTRIYQILAIYSTVASSLVLVVSLGAISFWMCSNGSLQCRICI

SEQ ID NO: 10956 - protein, 566 aa, Artificial Sequence
  derived and/or modified protein sequence (wt) from hemagglutinin__InfluenzaA__AHE37985
MKTIIALSYILCLVFAQELPGNDDSTATLCLGHHAVPNGTIVKTITNDQIEVTNATELVQSSSTGEICNSPHQILDGENCTLIDALLGDPQCDGFQNKKWDLFVERSKAHSNCYPYDVPDYASLRSLVASSGTLEFNNESFNWTGVTQNGTSSACIRRSNNSFFSRLNWLTHLNFKYPALNVTMPNNEQFDKLYIWGVHHPGTDKDQIFLYAQASGRITVSTKRSQQAVIPNIGSRPRVRNIPSRVSIYWTIVKPGDILLINSTGNLIAPRGYFKIRSGKSSIMKSDAPIGKCNSACITPNGSIPNDKPFQNVNRITYGACPRYVKQNTLKLATGMRNVPEKQTRGIFGAIAGFIENGWEGMVDGWYGFRHQNSEGRGQAADLKSTQAAIDQINGKLNRLIGKTNEKFHQIEKEFSEVEGRIQDLEKYVEDTKIDLWSYNAELLVALENQHTIDLTDSEMNKLFEKTKKQLRENAEDMGNGCFKIYHKCDNACIGSIRNGTYDHDVYRDEALNNRFQIKGVELKSGYKDWILWISFAISCFLLCVALLGFIMWACQKGNIRCNICI

SEQ ID NO: 10957 - protein, 566 aa, Artificial Sequence; identical to SEQ ID NO: 9922
  derived and/or modified protein sequence (wt) from hemagglutinin__InfluenzaA__AHE37986

SEQ ID NO: 10958 - protein, 566 aa, Artificial Sequence; identical to SEQ ID NO: 9858
  derived and/or modified protein sequence (wt) from hemagglutinin__InfluenzaA__AHE37987

SEQ ID NO: 10959 - protein, 566 aa, Artificial Sequence
  derived and/or modified protein sequence (wt) from hemagglutinin__InfluenzaA__AHE37988
MKTIIALSYILCLVFAQKLPGNDNSTATLCLGHHAVPNGTIVKTITNDRIEVTNATELVQNSSIGEICDSPHQILDGENCTLIDALLGDPQCDGFQNKKWDLFVERSKAYSNCYPYDVPDYASLRSLVASSGTLEFNNESFNWTGVTQNGTSSACIRRSNSSFFSRLNWLTHLNFKYPALNVTMPNNEQFDKLYIWGVHHPGTDKDQIFLYAQSSGRITVSTKRSQQAVIPNIGSRPRIRNIPSRISIYWTIVKPGDILLINSTGNLIAPRGYFKIRSGKSSIMRSDAPIGKCKSECITPNGSIPNDKPFQNVNRITYGACPRYVKQSTLKLATGMRNVPEKQTRGIFGAIAGFIENGWEGMMDGWYGFRHQNSEGRGQAADLKSTQAAIDQINGKLNRLIGKTNEKFHQIEKEFSEVEGRIQNLEKYVEDTKIDLWSYNAELLVALENQHTIDLTDSEMNKLFEKTKKQLRENAEDMGNGCFKIYHKCDNACIGSIRNGTYDHNVYRDEALNNRFQIKGVELKSGYKDWILWISFAISCFLLCVALLGFIMWACQKGNIRCNICI

SEQ ID NO: 10960 - protein, 566 aa, Artificial Sequence; identical to SEQ ID NO: 9994
  derived and/or modified protein sequence (wt) from hemagglutinin__InfluenzaA__AHE37989

SEQ ID NO: 10961 - protein, 566 aa, Artificial Sequence; identical to SEQ ID NO: 9858
  derived and/or modified protein sequence (wt) from hemagglutinin__InfluenzaA__AHE37990

SEQ ID NO: 10962 - protein, 566 aa, Artificial Sequence; identical to SEQ ID NO: 9858
  derived and/or modified protein sequence (wt) from hemagglutinin__InfluenzaA__AHE37991

SEQ ID NO: 10963 - protein, 566 aa, Artificial Sequence
  derived and/or modified protein sequence (wt) from hemagglutinin__InfluenzaA__AHE37992
MKTIIALSYILCLVFAQELPGNDDSTATLCLGHHAVPNGTIVKTITNDQIEVTNATELVQSSSTGEICNSPHQILDGENCTLIDALLGDPQCDGFQNKKWDLFVERSKAHSNCYPYDVPDYASLRSLVASSGTLEFDNESFNWTGVTQNGTSSACIRRSNNSFFSRLNWLTHLNFKYPALNVTMPNNEQFDKLYIWGVHHPGTDKDQIFLYAQASGRITVSTKRSQQAVIPNIGSRPRVRNIPSRVSIYWTIVKPGDILLINSTGNLIAPRGYFKIRSGKSSIMRSDAPIGKCNSACITPNGSIPNDKPFQNVNRITYGACPRYVKQNTLKLATGMRNVPEKQTRGIFGAIAGFIENGWEGMVDGWYGFRHQNSEGRGQAADLKSTQAAIDQINGKLNRLIGKTNEKFHQIEKEFSEVEGRIQDLEKYVEDTKIDLWSYNAELLVALENQHTIDLTDSEMNKLFEKTKKQLRENAEDMGNGCFKIYHKCDNACIGSIRNGTYDHDVYRDEALNNRFQIKGVELKSGYKDWILWISFAISCFLLCVALLGFIMWACQKGNIRCNICI

SEQ ID NO: 10964 - protein, 566 aa, Artificial Sequence; identical to SEQ ID NO: 10040
  derived and/or modified protein sequence (wt) from hemagglutinin__InfluenzaA__AHE38023

SEQ ID NO: 10965 - protein, 566 aa, Artificial Sequence
  derived and/or modified protein sequence (wt) from hemagglutinin__InfluenzaA__AHE38024
MKAILVVLLYTFATANADTLCIGYHANNSTDTVDTVLEKNVTVTHSVNLLEDKHNGKLCKLRGVAPLHLGKCNIAGWILGNPECESLSTASSWSYIVETSSSDNGTCYPGDFINYEELREQLSSVSSFERFEIFPKTSSWPNHDSNKGVTAACPHAGAKSFYKNLIWLVKKGNSYPKLSQSYINDKGKEVLVLWGIHHPSTTADQQSLYQNADAYVFVGTSRYSKKFKPEIATRPKVRDQEGRMNYYWTLVEPGDKITFEATGNLVVPRYAFTMERNAGSGIIISDTPVHDCNTTCQTPEGAINTSLPFQNIHPITIGKCPKYVKSTKLRLATGLRNVPSIQSRGLFGAIAGFIEGGWTGMVDGWYGYHHQNEQGSGYAADLKSTQNAIDKITNKVNSVIEKMNTQFTAVGKEFNHLEKRIENLNKKVDDGFLDIWTYNAELLVLLENERTLDYHDSNVKNLYEKVRNQLKNNAKEIGNGCFEFYHKCDNTCMESVKNGTYDYPKYSEEAKLNREKIDGVKLESTRIYQILAIYSTVASSLVLVVSLGAISFWMCSNGSLQCRICI

SEQ ID NO: 10966 - protein, 566 aa, Artificial Sequence
  derived and/or modified protein sequence (wt) from hemagglutinin__InfluenzaA__AHE38026
MKAILVVLLYTFATANADTLCIGYHANNSTDTVDTVLEKNVTVTHSVNLLEDKHNGKLCKLRGVAPLHLGKCNIAGWILGNPECESLSTASSWSYIVETSSSDNGTCYPGDFINYEELREQLSSVSSFERFEIFPKTSSWPNHDSNKGVTAACPHAGAKSFYKNLIWLVKKGNSYPKLSQSYINEKGKEVLVLWGIHHPSTTADQQSLYQNADAYVFVGTSRYSKKFKPEIAIRPKVRDQEGRMNYYWTLVEPGDKITFEATGNLVVPRYAFTMERNAGSGIIISDTPVHDCNTTCQTPEGAINTSLPFQNIHPITIGKCPKYVKSTKLRLATGLRNVPSIQSRGLFGAIAGFIEGGWTGMVDGWYGYHHQNEQGSGYAADLKSTQNAIDKITNKVNSVIEKMNTQFTAVGKEFNHLEKRIENLNKKVDDGFLDIWTYNAELLVLLENERTLDYHDSNVKNLYEKVRNQLKNNAKEIGNGCFEFYHKCDNTCMESVKNGTYDYPKYSEEAKLNREKIDGVKLESTRIYQILAIYSTVASSLVLVVSLGAISFWMCSNGSLQCRICI

SEQ ID NO: 10967 - protein, 566 aa, Artificial Sequence; identical to SEQ ID NO: 9883
  derived and/or modified protein sequence (wt) from hemagglutinin__InfluenzaA__AHE38027

SEQ ID NO: 10968 - protein, 560 aa, Artificial Sequence
  derived and/or modified protein sequence (wt) from hemagglutinin__InfluenzaA__AHF20558
MNTQILVFALIAIIPTNADKICLGHHAVSNGTKVNTLTERGVEVVNATETVERTNIPRICSKGKRTVDLGQCGLLGTITGPPQCDQFLEFSADLIIERREGSDVCYPGKFVNEEALRQILRESGGIDKEAMGFTYSGIRTNGATSACRRSGSSFYAEMKWLLSNTDNAAFPQMTKSYKNTRKSPALIVWGIHHSVSTAEQTKLYGSGNKLVTVGSSNYQQSFVPSPGARPQVNGLSGRIDFHWLMLNPNDTVTFSFNGAFIAPDRASFLRGKSMGIQSGVQVDANCEGDCYHSGGTIISNLPFQNIDSRAVGKCPRYVKQRSLLLATGMKNVPEIPKGRGLFGAIAGFIENGWEGLIDGWYGFRHQNAQGEGTAADYKSTQSAIDQITGKLNRLIEKTNQQFELIDNEFNEVEKQIGNVINWTRDSITEVWSYNAELLVAMENQHTIDLADSEMDKLYERVKRQLRENAEEDGTGCFEIFHKCDDDCMASIRNNTYDHSKYREEAMQNRIQIDPVKLSSGYKDVILWFSFGASCFILLAIVMGLVFICVQNGNMRCTIGI

SEQ ID NO: 10969 - protein, 560 aa, Artificial Sequence
  derived and/or modified protein sequence (wt) from hemagglutinin__InfluenzaA__AHF20568
MNTQILVFALIAIIPTNADKICLGHHAVSNGTKVNTLTERGVEVVNATETVERTNIPRICSKGKRTVDLGQCGLLGTITGPPQCDQFLEFSADLIIERREGSDVCYPGKFVNEEALRQILRESGGIDKEAMGFTYSGIRTNGATSACRRSGSSFYAEMKWLLSNTDNAAFPQMTKSYKNTRKSPALIVWGIHHSVSTAEQTKLYGSGNKLVTVGSSNYQQSFVPSPGARPQVNGLSGRIDFHWLMLNPNDTVTFSFNGAFIAPDRASFLRGKSMGIQSGVQVDANCEGDCYHSGGTIMSNLPFQNIDSRAVGKCPRYVKQRSLLLATGMKNVPEIPKGRGLFGAIAGFIENGWEGLIDGWYGFRHQNAQGEGTAADYKSTQSAIDQITGKLNRLIEKTNQQFELIDNEFNEVEKQIGNVINWTRDSITEVWSYNAELLVAMENQHTIDLADSEMDKLYERVKRQLRENAEEDGTGCFEIFHKCDDDCMASIRNNTYDHSKYREEAMQNRIQIDPVKLSSGYKDVILWFSFGASCFILLAIVMGLVFICVKNGNMRCTICI

SEQ ID NO: 10970 - protein, 565 aa, Artificial Sequence; identical to SEQ ID NO: 7793
  derived and/or modified protein sequence (wt) from hemagglutinin__InfluenzaA__AHG96108

SEQ ID NO: 10971 - protein, 565 aa, Artificial Sequence; identical to SEQ ID NO: 7793
  derived and/or modified protein sequence (wt) from hemagglutinin__InfluenzaA__AHG96120

SEQ ID NO: 10972 - protein, 565 aa, Artificial Sequence; identical to SEQ ID NO: 7793
  derived and/or modified protein sequence (wt) from hemagglutinin__InfluenzaA__AHG96132

SEQ ID NO: 10973 - protein, 565 aa, Artificial Sequence
  derived and/or modified protein sequence (wt) from hemagglutinin__InfluenzaA__AHG96144
MKVKLLVLLCTFTATYADTICIGYHANNSTDTVDTVLEKNVTVTHSVNLLENSHNGKLCLLKGIAPLQLGNCSVAGWILGNPECELLISKESWSYIVEKPNPENGTCYPGHFADYEELREQLSSVSSFERFEIFPKESSWPNHTVTGVSASCSHNGESSFYRNLLWLTGKNGLYPNLSKSYANNKEKEVLVLWGVHHPPNIGVQKALYHTENAYVSVVSSHYSRKFTPEIAKRPKVRDQEGRINYYWTLLEPGDTIIFEANGNLIAPRYAFALSRGFGSGIINSNAPMDKCDAKCQTPQGAINSSLPFQNVHPVTIGECPKYVRSAKLRMVTGLRNIPSIQSRGLFGAIAGFIEGGWTGMVDGWYGYHHQNEQGSGYAADQKSTQNAINGITNKVNSVIEKMNTQFTAVGKEFNKLERRMENLNKKVDDGFIDIWTYNAELLVLLENERTLDFHDSNVKNLYEKVKSQLKNNAKEIGNGCFEFYHKCNDECMESVKNGTYDYPKYSEESKLNREKIDGVKLESMGVYQILAIYSTVASSLVLLVSLGAISFWMCSNGSLQCRICI

SEQ ID NO: 10974 - protein, 565 aa, Artificial Sequence; identical to SEQ ID NO: 7793
  derived and/or modified protein sequence (wt) from hemagglutinin__InfluenzaA__AHG96156

SEQ ID NO: 10975 - protein, 565 aa, Artificial Sequence; identical to SEQ ID NO: 7793
  derived and/or modified protein sequence (wt) from hemagglutinin__InfluenzaA__AHG96168

SEQ ID NO: 10976 - protein, 565 aa, Artificial Sequence; identical to SEQ ID NO: 7793
  derived and/or modified protein sequence (wt) from hemagglutinin__InfluenzaA__AHG96180

SEQ ID NO: 10977 - protein, 565 aa, Artificial Sequence; identical to SEQ ID NO: 7793
  derived and/or modified protein sequence (wt) from hemagglutinin__InfluenzaA__AHG96192

SEQ ID NO: 10978 - protein, 565 aa, Artificial Sequence; identical to SEQ ID NO: 7793
  derived and/or modified protein sequence (wt) from hemagglutinin__InfluenzaA__AHG96204

SEQ ID NO: 10979 - protein, 565 aa, Artificial Sequence; identical to SEQ ID NO: 7793
  derived and/or modified protein sequence (wt) from hemagglutinin__InfluenzaA__AHG96216

SEQ ID NO: 10980 - protein, 565 aa, Artificial Sequence; identical to SEQ ID NO: 7793
  derived and/or modified protein sequence (wt) from hemagglutinin__InfluenzaA__AHG96228

SEQ ID NO: 10981 - protein, 565 aa, Artificial Sequence; identical to SEQ ID NO: 10973
  derived and/or modified protein sequence (wt) from hemagglutinin__InfluenzaA__AHG96240

SEQ ID NO: 10982 - protein, 565 aa, Artificial Sequence; identical to SEQ ID NO: 7793
  derived and/or modified protein sequence (wt) from hemagglutinin__InfluenzaA__AHG96252

SEQ ID NO: 10983 - protein, 565 aa, Artificial Sequence; identical to SEQ ID NO: 7793
  derived and/or modified protein sequence (wt) from hemagglutinin__InfluenzaA__AHG96264

SEQ ID NO: 10984 - protein, 565 aa, Artificial Sequence; identical to SEQ ID NO: 7793
  derived and/or modified protein sequence (wt) from hemagglutinin__InfluenzaA__AHG96276

SEQ ID NO: 10985 - protein, 565 aa, Artificial Sequence; identical to SEQ ID NO: 7793
  derived and/or modified protein sequence (wt) from hemagglutinin__InfluenzaA__AHG96288

SEQ ID NO: 10986 - protein, 565 aa, Artificial Sequence; identical to SEQ ID NO: 7793
  derived and/or modified protein sequence (wt) from hemagglutinin__InfluenzaA__AHG96300

SEQ ID NO: 10987 - protein, 566 aa, Artificial Sequence
  derived and/or modified protein sequence (wt) from hemagglutinin__InfluenzaA__AHG96312
MKAILVVLLYTFATANADTLCIGYHANNSTDTVDTVLEKNVTVTHSVNLLEDKHNGKLCKLRGVVPLHLGKCNIAGWILGNPECESLSTASSWSYIVETSSSDNGTCYPGDFINYEELREQLSSVSSFERFEIFPKTSSWPNHDSNKGVTAACPHAGAKSFYKNLIWLVKKGNSYPKLSQSYINDKGKEVLVLWGIHHPSTTADQQSLYQNADAYVFVGTSRYSKKFKPEIAIRPKVRDQEGRMNYYWTLVEPGDKITFEATGNLVVPRYAFTMERNAGSGIIISDTPVHDCNTTCQTPEGAINTSLPFQNIHPITIGKCPKYVKSTKLRLATGLRNVPSIQSRGLFGAIAGFIEGGWTGMVDGWYGYHHQNEQGSGYAADLKSTQNAIDKITNKVNSVIEKMNTQFTAVGKEFNHLEKRIENLNKKVDDGFLDIWTYNAELLVLLENERTLDYHDSNVKNLYEKVRNQLKNNAKEIGNGCFEFYHKCDNTCMESVKNGTYDYPKYSEEAKLNREKIDGVKLESTRIYQILAIYSTVASSLVLVVSLGAISFWMCSNGSLQCRICI

SEQ ID NO: 10988 - protein, 566 aa, Artificial Sequence; identical to SEQ ID NO: 10040
  derived and/or modified protein sequence (wt) from hemagglutinin__InfluenzaA__AHG96313

SEQ ID NO: 10989 - protein, 566 aa, Artificial Sequence
  derived and/or modified protein sequence (wt) from hemagglutinin__InfluenzaA__AHG96314
MKAILVVLLYTFATANADTLCIGYHANNSTDTVDTVLEKNVTVTHSVNLLEDKHNGKLCKLRGVAPLHLGKCNIAGWILGNPECESLSTASSWSYIVETSSSDNGTCYPGDFINYEELREQLSSVSSFERFEIFPKTSSWPNHDSNKGVTAACPHAGAKSFYKNLIWLVKKGNSYPKLSQSYINDKGKEVLVLWGIHHPSTTADQQSLYQNADAYVFVGTSRYSKKFKPEIAIRPKVRDQEGRMNYYWTLVEPGDKITFEATGNLVVPRYAFTMERNAGSGIIISDTPVHDCNTTCQTPEGAINTSLPFQNIHPITIGKCPKYVKSTKLRLATGLRNVPSIQSRGLFGAIAGFIEGGWTGMVDGWYGYHHQNEQGSGYAADLKSTQNAIDKITNKVNSVIEKMNTQYTAVGKEFNHLEKRIENLNKKVDDGFLDIWTYNAELLVLLENERTLDYHDSNVKNLYEKVRNQLKNNAKEIGNGCFEFYHKCDNTCMESVKNGTYDYPKYSEEAKLNREKIDGVKLESTRIYQILAIYSTVASSLVLVVSLGAISFWMCSNGSLQCRICI

SEQ ID NO: 10990 - protein, 566 aa, Artificial Sequence; identical to SEQ ID NO: 10040
  derived and/or modified protein sequence (wt) from hemagglutinin__InfluenzaA__AHG96315

SEQ ID NO: 10991 - protein, 566 aa, Artificial Sequence; identical to SEQ ID NO: 10040
  derived and/or modified protein sequence (wt) from hemagglutinin__InfluenzaA__AHG96316

SEQ ID NO: 10992 - protein, 566 aa, Artificial Sequence; identical to SEQ ID NO: 10040
  derived and/or modified protein sequence (wt) from hemagglutinin__InfluenzaA__AHG96317

SEQ ID NO: 10993 - protein, 566 aa, Artificial Sequence; identical to SEQ ID NO: 10040
  derived and/or modified protein sequence (wt) from hemagglutinin__InfluenzaA__AHG96320

SEQ ID NO: 10994 - protein, 566 aa, Artificial Sequence; identical to SEQ ID NO: 10040
  derived and/or modified protein sequence (wt) from hemagglutinin__InfluenzaA__AHG96321

SEQ ID NO: 10995 - protein, 566 aa, Artificial Sequence; identical to SEQ ID NO: 10040
  derived and/or modified protein sequence (wt) from hemagglutinin__InfluenzaA__AHG96322

SEQ ID NO: 10996 - protein, 566 aa, Artificial Sequence; identical to SEQ ID NO: 10040
  derived and/or modified protein sequence (wt) from hemagglutinin__InfluenzaA__AHG96324

SEQ ID NO: 10997 - protein, 566 aa, Artificial Sequence; identical to SEQ ID NO: 10040
  derived and/or modified protein sequence (wt) from hemagglutinin__InfluenzaA__AHG96325

SEQ ID NO: 10998 - protein, 566 aa, Artificial Sequence
  derived and/or modified protein sequence (wt) from hemagglutinin__InfluenzaA__AHG96326
MKAILVVLLYTFATANADTLCIGYHANNSTDTVDTVLEKNVTVTHSVNLLEDKHNGKLCKLRGVAPLHLGKCNIAGWILGNPECESLSTASSWSYIVETSNSDNGTCYPGDFINYEELREQLSSVSSFERFEIFPKTSSWPNHDSNKGVTAACPHAGAKSFYKNLIWLVKKGNSYPKLSQSYINDKGKEVLVLWGIHHPSTTADQQSLYQNADAYVFVGTSRYSKKFKPEIAIRPKVRDQEGRMNYYWTLVEPGDKITFEATGNLVVPRYAFTMERNAGSGIIISDTPVHDCNTTCQTPEGAINTSLPFQNIHPITIGKCPKYVKSTKLRLATGLRNVPSIQSRGLFGAIAGFIEGGWTGMVDGWYGYHHQNEQGSGYAADLKSTQNAIDKITNKVNSVIEKMNTQFTAVGKEFNHLEKRIENLNKKVDDGFLDIWTYNAELLVLLENERTLDYHDSNVKNLYEKVRNQLKNNAKEIGNGCFEFYHKCDNTCMESVKNGTYDYPKYSEEAKLNREKIDGVKLESTRIYQILAIYSTVASSLVLVVSLGAISFWMCSNGSLQCRICI

SEQ ID NO: 10999 - protein, 566 aa, Artificial Sequence; identical to SEQ ID NO: 10040
  derived and/or modified protein sequence (wt) from hemagglutinin__InfluenzaA__AHG96327

SEQ ID NO: 11000 - protein, 566 aa, Artificial Sequence
  derived and/or modified protein sequence (wt) from hemagglutinin__InfluenzaA__AHG96329
MKAILVVLLYTFTTANADTLCIGYHANNSTDTVDTVLEKNVTVTHSVNLLEDKHNGKLCKLRGVAPLHLGKCNIAGWILGNPECESLSTASSWSYIVETSSSDNGTCYPGDFINYEELREQLSSVSSFERFEIFPKTSSWPNHDSNKGVTAACPHAGAKSFYKNLIWLVKKGNSYPKLSQSYINDKGKEVLVLWGIHHPSTTADQQSLYQNADAYVFVGTSRYSKKFKPEIAIRPKVRDQEGRMNYYWTLVEPGDKITFEATGNLVVPRYAFTMERNAGSGIIISDTPVHDCNTTCQTPEGAINTSLPFQNIHPITIGKCPKYVKSTKLRLATGLRNVPSIQSRGLFGAIAGFIEGGWTGMVDGWYGYHHQNEQGSGYAADLKSTQNAIDKITNKVNSVIEKMNTQFTAVGKEFNHLEKRIENLNKKVDDGFLDIWTYNAELLVLLENERTLDYHDSNVKNLYEKIRNQLKNNAKEIGNGCFEFYHKCDNTCMESVKNGTYEYPKYSEEAKLNREKIDGVKLESTKIYQILAIYSTVASSLVLVVSLGAISFWMCSNGSLQCRICI

SEQ ID NO: 11001 - protein, 566 aa, Artificial Sequence
  derived and/or modified protein sequence (wt) from hemagglutinin__InfluenzaA__AHG96330
MKAILVVLLYTFATATADTLCIGYHANNSTDTVDTVLEKNVTVTHSVNLLEDKHNGKLCKLRGVAPLHLGKCNIAGWILGNPECESLSTASSWSYIVETSSSDNGTCYPGDFINYEELREQLSSVSSFERFEIFPKTSSWPNHDSNKGVTAACPHAGAKSFYKNLIWLVKKGNSYPKLSQSYINDKGKEVLVLWGIHHPSTTADQQSLYQNADAYVFVGTSRYSKKFKPEIAIRPKVRDQEGRMNYYWTLVEPGDKITFEATGNLVVPRYAFTMERNAGSGIIISDTPVHDCNTTCQTPEGAINTSLPFQNIHPITIGKCPKYVKSTKLSLATGLRNVPSIQSRGLFGAIAGFIEGGWTGMVDGWYGYHHQNEQGSGYAADLKSTQNAIDKITNKVNSVIEKMNTQFTAVGKEFNHLEKRIENLNKKVDDGFLDIWTYNAELLVLLENERTLDYHDSNVKNLYEKIRNQLKNNAKEIGNGCFEFYHKCDNTCMESVKNGTYDYPKYSEEAKLNREKIDGVKLESTRIYQILAIYSTVASSLVLVVSLGAISFWMCSNGSLQCRICI

SEQ ID NO: 11002 - protein, 566 aa, Artificial Sequence; identical to SEQ ID NO: 10040
  derived and/or modified protein sequence (wt) from hemagglutinin__InfluenzaA__AHG96332

SEQ ID NO: 11003 - protein, 566 aa, Artificial Sequence
  derived and/or modified protein sequence (wt) from hemagglutinin__InfluenzaA__AHG96334
MKAILVVLLYTLATANADTLCIGYHANNSTDTVDTVLEKNVTVTHSVNLLEDKHNGKLCKLRGVAPLHLGKCNIAGWILGNPECESLSTASSWSYIVETSSSDNGTCYPGDFINYEELREQLSSVSSFERFEIFPKTSSWPNHDSNKGVTAACPHAGAKSFYKNLIWLVKKGNSYPKLSQSYINDKGKEVLVLWGIHHPSTTADQQSLYQNADAYVFVGTSRYSKKFKPEIAIRPKVRDQEGRMNYYWTLVEPGDKITFEATGNLVVPRYAFTMERNAGSGIIISDTPVHDCNTTCQTPEGAINTSLPFQNIHPITIGKCPKYVKSTKLRLATGLRNVPSIQSRGLFGAIAGFIEGGWTGMVDGWYGYHHQNEQGSGYAADLKSTQNAIDKITNKVNSVIEKMNTQFTAVGKEFNHLEKRIENLNKKVDDGFLDIWTYNAELLVLLENERTLDYHDSNVKNLYEKVRNQLKNNAKEIGNGCFEFYHKCDNTCMESVKNGTYDYPKYSEEAKLNREKIDGVKLESTRIYQILAIYSTVASSLVLVVSLGAISFWMCSNGSLQCRICI

SEQ ID NO: 11004 - protein, 566 aa, Artificial Sequence
  derived and/or modified protein sequence (wt) from hemagglutinin__InfluenzaA__AHG96335
MKAILVVLLYTFETANADTLCIGYHANNSTDTVDTVLEKNVTVTHSVNLLEDKHNGKLCKLKGVAPLHLGKCNIAGWILGNPECESLSTASSWSYIVETSSSDNGTCYPGDFINYEELREQLSSVSSFERFEIFPKTSSWPNHDSNKGVTAACPHAGAKSFYKNLIWLVKKGNSYPKLSQSYINDKGKEVLVLWGIHHPSTTADQQSLYQNADAYVFVGTSRYSKKFKPEIAIRPKVRDQEGRMNYYWTLVEPGDKITFEATGNLVVPRYAFTMERNAGSGIIISDTPVHDCNTTCQTPEGAINTSLPFQNIHPITIGKCPKYVKSTKLRLATGLRNVPSIQSRGLFGAIAGFIEGGWTGMVDGWYGYHHQNEQGSGYAADLKSTQNAIDKITNKVNSVIEKMNTQFTAVGKEFNHLEKRIENLNKKVDDGFLDIWTYNAELLVLLENERTLDYHDSNVKNLYEKVRNQLKNNAKEIGNGCFEFYHKCDNTCMESVKNGTYDYPKYSEEAKLNREKIDGVKLESTRIYQILAIYSTVASSLVLVVSLGAISFWMCSNGSLQCRICI

SEQ ID NO: 11005 - protein, 566 aa, Artificial Sequence
  derived and/or modified protein sequence (wt) from hemagglutinin__InfluenzaA__AHG96336
MKAILVVLLYTFATANADTLCIGYHANNSTDTVDTVLEKNVTVTHSVNLLEDKHNGKLCKLRGVAPLHLGKCNIAGWILGNPECESLSTASSWSYIVETSSSDNGTCYPGDFINYEELREQLSSVSSFERFEIFPKTSSWPNHDSNKGVTAACPHAGAKSFYKNLIWLVKKGNSYPKLSQSYINDKGKEVLVLWGIHHPSTTADQQSLYQNADAYVFVGTSRYSKKFKPEIAIRPKVRDQEGRMNYYWTLVEPGDKITFEATGNLVVPRYAFTMERNAGSGIIISDTPVRDCNTTCQTPEGAINTSLPFQNIHPITIGKCPKYVKSTKLRLATGLRNVPSIQSRGLFGAIAGFIEGGWTGMVDGWYGYHHQNEQGSGYAADLKSTQNAIDKITNKVNSVIEKMNTQFTAVGKEFNHLEKRIENLNKKVDDGFLDIWTYNAELLVLLENERTLDYHDSNVKNLYEKVRNQLKNNAKEIGNGCFEFYHKCDNTCMESVKNGTYDYPKYSEEAKLNREKIDGVKLESTRIYQILAIYSTVASSLVLVVSLGAISFWMCSNGSLQCRICI

SEQ ID NO: 11006 - protein, 566 aa, Artificial Sequence
  derived and/or modified protein sequence (wt) from hemagglutinin__InfluenzaA__AHG96338
MKAILVVLLYTFATANADTLCIGYHANNSTDTVDTVLEKNVTVTHSVNLLEDKHNGKLCKLRGVAPLHLGKCNIAGWILGNPECESLSTASSWSYIVETSSSDNGTCYPGDFINYEELREQLSSVSSFERFEIFPKTSSWPNHDSNKGVTAACSHAGAKSFYKNLIWLVKKGNSYPKLSQSYINDKGKEVLVLWGIHHPSTTADQQSLYQNADAYVFVGTSRYSKKFKPEIAIRPKVRDQEGRMNYYWTLVEPGDKITFEATGNLVVPRYAFTMERNAGSGIIISDTPVHDCNTTCQTPEGAINTSLPFQNIHPITIGKCPKYVKSTKLRLATGLRNVPSIQSRGLFGAIAGFIEGGWTGMVDGWYGYHHQNEQGSGYAADLKSTQNAIDKITNKVNSVIEKMNTQFTAVGKEFNHLEKRIENLNKKVDDGFLDIWTYNAELLVLLENERTLDYHDSNVKNLYEKVRNQLKNNAKEIGNGCFEFYHKCDNTCMESVKNGTYDYPKYSEEAKLNREKIDGVKLESTRIYQILAIYSTVASSLVLVVSLGAISFWMCSNGSLQCRICI

SEQ ID NO: 11007 - protein, 566 aa, Artificial Sequence
  derived and/or modified protein sequence (wt) from hemagglutinin__InfluenzaA__AHG96339
MKAILVVLLYTFATANADTLCIGYHANNSTDTVDTVLEKNVTVTHSVNLLEDKHNGKLCKLRGVAPLHLGKCNIAGWILGNPECESLSTASSWSYIVETSSSDNGTCYPGDFINYEELREQLSSVSSFERFEIFPKTSSWPNHDSNKGVTAACPHAGAKSFYKNLIWLVKKGNSYPKLSQSYINDKGKEILVLWGIHHPSTTADQQSLYQNADAYVFVGTSRYSKKFKPEIAIRPKVRDQEGRMNYYWTLVEPGDKITFEATGNLVVPRYAFTMERNAGSGIIISDTPVHDCNTTCQTPEGAINTSLPFQNIHPITIGKCPKYVKSTKLRLATGLRNVPSIQSRGLFGAIAGFIEGGWTGMVDGWYGYHHQNEQGSGYAADLKSTQNAIDKITNKVNSVIEKMNTQFTAVGKEFNHLEKRIENLNKKVDDGFLDIWTYNAELLVLLENERTLDYHDSNVKNLYEKVRNQLKNNAKEIGNGCFEFYHKCDNTCMESVKNGTYDYPKYSEEAKLNREKIDGVKLESTRIYQILAIYSTVASSLVLVVSLGAISFWMCSNGSLQCRICI

SEQ ID NO: 11008 - protein, 566 aa, Artificial Sequence; identical to SEQ ID NO: 10040
  derived and/or modified protein sequence (wt) from hemagglutinin__InfluenzaA__AHG96340

SEQ ID NO: 11009 - protein, 566 aa, Artificial Sequence
  derived and/or modified protein sequence (wt) from hemagglutinin__InfluenzaA__AHG96341
MKAILVVLLYTFATANADTLCIGYHANNSTDTVDTVLEKNVTVTHSVNLLEDKHNGKLCKLRGVAPLHLGKCNIAGWILGNPECESLSTASSWSYIVETSSSDNGTCYPGDFINYEELREQLSSVSSFERFEIFPKTSSWPNHDSNKGVTAACPHAGAKSFYKNLIWLVKKGNSYPKLSQSYINDKGKEVLVLWGIHHPSTTADQQSLYQNADAYVFVGTSKYSKKFKPEIAIRPKVRDQEGRMNYYWTLVEPGDKITFEATGNLVVPRYAFTMERNAGSGIIISDTPVHDCNTTCQTPEGAINTSLPFQNIHPITIGKCPKYVKSTKLRLATGLRNIPSIQSRGLFGAIAGFIEGGWTGMVDGWYGYHHQNEQGSGYAADLKSTQNAIDKITNKVNSVIEKMNTQFTAVGKEFNHLEKRIENLNKKVDDGFLDIWTYNAELLVLLENERTLDYHDSNVKNLYEKVRNQLKNNAKEIGNGCFEFYHKCDNTCMESVKNGTYDYPKYSEEAKLNREKIDGVKLESTRIYQILAIYSTVASSLVLVVSLGAISFWMCSNGSLQCRICI

SEQ ID NO: 11010 - protein, 566 aa, Artificial Sequence
  derived and/or modified protein sequence (wt) from hemagglutinin__InfluenzaA__AHG96342
MKAILVVLLYTFATANADTLCIGYHANNSTDTVDTVLEKNVTVTHSVNLLEDKHNGKLCKLRGVAPLHLGKCNIAGWILGNPECESLSTASSWSYIVETSSSDNGTCYPGDFINYEELREQLSSVSSFERFEIFPKTSSWPNHDSNKGVTAACPHAGAKSFYKNLIWLVKKGNSYPKLSQSYINDKGKEVLVLWGIHHPSTTADQQSLYQNADAYVFVGTSRYSKKFKPEIAIRPKVRDQEGRMNYYWTLVEPGDKITFEATGNLVVPRYAFTMERNAGSGIIISDTPVHDCNTTCQTPEGAINTSLPFQNIHPITIGKCPKYVKSTKLRLATGLRNIPSIQSRGLFGAIAGFIEGGWTGMVDGWYGYHHQNEQGSGYAADLKSTQNAIDKITNKVNSVIEKMNTQFTAVGKEFNHLEKRIENLNKKVDDGFLDIWTYNAELLVLLENERTLDYHDSNVKNLYEKVRNQLKNNAKEIGNGCFEFYHKCDNMCMESVKNGTYDYPKYSEEAKLNREKIDGVKLESTRIYQILAIYSTVASSLVLVVSLGAISFWMCSNGSLQCRICI

SEQ ID NO: 11011 - protein, 566 aa, Artificial Sequence
  derived and/or modified protein sequence (wt) from hemagglutinin__InfluenzaA__AHG96343
MKAILVVLLYTFATATADTLCIGYHANNSTDTVDTVLEKNVTVTHSVNLLEDKHNGKLCKLRGVAPLHLGKCNIAGWILGNPECESLSTASSWSYIVETSNSDNGTCYPGDFINYEELREQLSSVSSFERFEIFPKTSSWPNHDSNKGVTAACPHAGAKSFYKNLIWLVKKGNSYPKLSQSYINDKGKEVLVLWGIHHPSTTADQQSLYQNADAYVFVGTSRYSKKFKPEIAIRPKVRDQEGRMNYYWTLVEPGDKITFEATGNLVVPRYAFTMERNAGSGIIISDTPVHDCNTTCQTPEGAINTSLPFQNIHPITIGKCPKYVKSTKLRLATGLRNVPSIQSRGLFGAIAGFIEGGWTGMVDGWYGYHHQNEQGSGYAADLKSTQNAIDKITNKVNSVIEKMNTQFTAVGKEFNHLEKRIENLNKKVDDGFLDIWTYNAELLVLLENERTLDYHDSNVKNLYEKVRNQLKNNAKEIGNGCFEFYHKCDNTCMESVKNGTYDYPKYSEEAKLNREKIDGVKLESTRIYQILAIYSTVASSLVLVVSLGAISFWMCSNGSLQCRICI

SEQ ID NO: 11012 - protein, 566 aa, Artificial Sequence; identical to SEQ ID NO: 10040
  derived and/or modified protein sequence (wt) from hemagglutinin__InfluenzaA__AHG96344

SEQ ID NO: 11013 - protein, 566 aa, Artificial Sequence; identical to SEQ ID NO: 11003
  derived and/or modified protein sequence (wt) from hemagglutinin__InfluenzaA__AHG96345

SEQ ID NO: 11014 - protein, 566 aa, Artificial Sequence; identical to SEQ ID NO: 10040
  derived and/or modified protein sequence (wt) from hemagglutinin__InfluenzaA__AHG96346

SEQ ID NO: 11015 - protein, 566 aa, Artificial Sequence; identical to SEQ ID NO: 10040
  derived and/or modified protein sequence (wt) from hemagglutinin__InfluenzaA__AHG96347

SEQ ID NO: 11016 - protein, 566 aa, Artificial Sequence; identical to SEQ ID NO: 10040
  derived and/or modified protein sequence (wt) from hemagglutinin__InfluenzaA__AHG96348

SEQ ID NO: 11017 - protein, 566 aa, Artificial Sequence; identical to SEQ ID NO: 10040
  derived and/or modified protein sequence (wt) from hemagglutinin__InfluenzaA__AHG96349

SEQ ID NO: 11018 - protein, 566 aa, Artificial Sequence; identical to SEQ ID NO: 10040
  derived and/or modified protein sequence (wt) from hemagglutinin__InfluenzaA__AHG96350

SEQ ID NO: 11019 - protein, 566 aa, Artificial Sequence; identical to SEQ ID NO: 10040
  derived and/or modified protein sequence (wt) from hemagglutinin__InfluenzaA__AHG96351

SEQ ID NO: 11020 - protein, 566 aa, Artificial Sequence; identical to SEQ ID NO: 10040
  derived and/or modified protein sequence (wt) from hemagglutinin__InfluenzaA__AHG96352

SEQ ID NO: 11021 - protein, 566 aa, Artificial Sequence
  derived and/or modified protein sequence (wt) from hemagglutinin__InfluenzaA__AHG96353
MKAILVVLLYTFATTNADTLCIGYHANNSTDTVDTVLEKNVTVTHSVNLLEDKHNGKLCKLRGVAPLHLGKCNIAGWILGNPECESLSTASSWSYIVETSSSDNGTCYPGDFINYEELREQLSSVSSFERFEIFPKTSSWPNHDSNKGVTAACPHAGAKSFYKNLIWLVKKGNSYPKLSQSYINDKGKEVLVLWGIHHPSTTADQQSLYQNADAYVFVGTSRYSKKFKPEIAIRPKVRDQEGRMNYYWTLVEPGDKITFEATGNLVVPRYAFTMERNAGSGIIISDTPVHDCNTTCQTPEGAINTSLPFQNIHPITIGKCPKYVKSTKLRLATGLRNVPSIQSRGLFGAIAGFIEGGWTGMVDGWYGYHHQNEQGSGYAADLKSTQNAIDKITNKVNSVIEKMNTQFTAVGKEFNHLEKRIENLNKKVDDGFLDIWTYNAELLVLLENERTLDYHDSNVKNLYEKVRNQLKNNAKEIGNGCFEFYHKCDNTCMESVKNGTYDYPKYSEEAKLNREKIDGVKLESTRIYQILAIYSTVASSLVLVVSLGAISFWMCSNGSLQCRICI

SEQ ID NO: 11022 - protein, 566 aa, Artificial Sequence; identical to SEQ ID NO: 10040
  derived and/or modified protein sequence (wt) from hemagglutinin__InfluenzaA__AHG96354

SEQ ID NO: 11023 - protein, 566 aa, Artificial Sequence
  derived and/or modified protein sequence (wt) from hemagglutinin__InfluenzaA__AHG96355
MKAILVVLLYTLATANADTLCIGYHANNSTDTVDTVLEKNVTVTHSVNLLEDKHNGKLCKLRGVAPLHLGKCNIAGWILGNPECESLSTASSWSYIVETSSSDNGTCYPGDFINYEELREQLSSVSSFERFEIFPKTSSWPNHDSNKGVTAACPHAGAKSFYKNLIWLVKKGNSYPKLSQSYINDKGKEVLVLWGIHHPSTTADQQSLYQNADAYVFVGTSRYSKKFKPEIAIRPKVRDQEGRMNYYWTLVEPGDKITFEATGNLVVPRYAFTMERNAGSGIIISDTPVHDCNTTCQTPEGAINTSLPFQNIHPITIGKCPKYVKSTKLRLATGLRNVPSIQSRGLFGAIAGFIEGGWTGMVDGWYGYHHQNEQGSGYAADLKSTQNAIDKITNKVNSVIEKMNTQFTAVGKEFNQLEKRIENLNKKVDDGFLDIWTYNAELLVLLENERTLDYHDSNVKNLYEKVRNQLKNNAKEIGNGCFEFYHKCDNTCMESVKNGTYDYPKYSEEAKLNREKIDGVKLESTRIYQILAIYSTVASSLVLVVSLGAISFWMCSNGSLQCRICI

SEQ ID NO: 11024 - protein, 566 aa, Artificial Sequence; identical to SEQ ID NO: 9858
  derived and/or modified protein sequence (wt) from hemagglutinin__InfluenzaA__AHG96356

SEQ ID NO: 11025 - protein, 566 aa, Artificial Sequence
  derived and/or modified protein sequence (wt) from hemagglutinin__InfluenzaA__AHG96359
MKTIIALSYILCLVFAQKLPGNDNSTATLCLGHHAVPNGTIVKTITNDQIEVTNATELVQSSSTGGICDSPHQILDGENCTLIDALLGDPQCDGFQNKKWDLFVERSKAYSNCYPYDVPDYASLRSLVASSGTLEFNDESFNWTGVTQNGTSSSCKRRSNNSFFSRLNWLTHLKFKYPALNVTMPNNEKFDKLYIWGVHHPVTDNDQIFLYAQASGRITVSTKRSQQTVIPNIGSRPRIRNIPSRISIYWTIVKPGDILLINSTGNLIAPRGYFKIRSGKSSIMRSDAPIGKCNSECITPNGSIPNDKPFQNVNRITYGACPRYVKQNTLKLATGMRNVPEKQTRGIFGAIAGFIENGWEGMVDGWYGFRHQNSEGIGQAADLKSTQAAINQINGKLNRLIGKTNEKFHQIEKEFSEVEGRIQDLEKYVEDTKIDLWSYNAELLVALENQHTIDLTDSEMNKLFERTKKQLRENAEDMGNGCFKIYHKCDNACIGSIRNGTYDHDVYRDEALNNRFQIKGVELKSGYKDWILWISFAISCFLLCVALLGFIMWACQKGNIRCNICI

SEQ ID NO: 11026 - protein, 566 aa, Artificial Sequence; identical to SEQ ID NO: 11025
  derived and/or modified protein sequence (wt) from hemagglutinin__InfluenzaA__AHG96371

SEQ ID NO: 11027 - protein, 566 aa, Artificial Sequence; identical to SEQ ID NO: 11025
  derived and/or modified protein sequence (wt) from hemagglutinin__InfluenzaA__AHG96383

SEQ ID NO: 11028 - protein, 565 aa, Artificial Sequence; identical to SEQ ID NO: 7793
  derived and/or modified protein sequence (wt) from hemagglutinin__InfluenzaA__AHG96395

SEQ ID NO: 11029 - protein, 566 aa, Artificial Sequence; identical to SEQ ID NO: 11025
  derived and/or modified protein sequence (wt) from hemagglutinin__InfluenzaA__AHG96407

SEQ ID NO: 11030 - protein, 566 aa, Artificial Sequence; identical to SEQ ID NO: 11025
  derived and/or modified protein sequence (wt) from hemagglutinin__InfluenzaA__AHG96419

SEQ ID NO: 11031 - protein, 566 aa, Artificial Sequence; identical to SEQ ID NO: 11025
  derived and/or modified protein sequence (wt) from hemagglutinin__InfluenzaA__AHG96431

SEQ ID NO: 11032 - protein, 566 aa, Artificial Sequence; identical to SEQ ID NO: 11025
  derived and/or modified protein sequence (wt) from hemagglutinin__InfluenzaA__AHG96443

SEQ ID NO: 11033 - protein, 566 aa, Artificial Sequence; identical to SEQ ID NO: 11025
  derived and/or modified protein sequence (wt) from hemagglutinin__InfluenzaA__AHG96455

SEQ ID NO: 11034 - protein, 566 aa, Artificial Sequence; identical to SEQ ID NO: 11025
  derived and/or modified protein sequence (wt) from hemagglutinin__InfluenzaA__AHG96467

SEQ ID NO: 11035 - protein, 566 aa, Artificial Sequence; identical to SEQ ID NO: 11025
  derived and/or modified protein sequence (wt) from hemagglutinin__InfluenzaA__AHG96479

SEQ ID NO: 11036 - protein, 566 aa, Artificial Sequence; identical to SEQ ID NO: 11025
  derived and/or modified protein sequence (wt) from hemagglutinin__InfluenzaA__AHG96491

SEQ ID NO: 11037 - protein, 566 aa, Artificial Sequence; identical to SEQ ID NO: 2356
  derived and/or modified protein sequence (wt) from hemagglutinin__InfluenzaA__AHG96503

SEQ ID NO: 11038 - protein, 565 aa, Artificial Sequence; identical to SEQ ID NO: 7793
  derived and/or modified protein sequence (wt) from hemagglutinin__InfluenzaA__AHG96515

SEQ ID NO: 11039 - protein, 565 aa, Artificial Sequence; identical to SEQ ID NO: 7793
  derived and/or modified protein sequence (wt) from hemagglutinin__InfluenzaA__AHG96527

SEQ ID NO: 11040 - protein, 565 aa, Artificial Sequence; identical to SEQ ID NO: 7793
  derived and/or modified protein sequence (wt) from hemagglutinin__InfluenzaA__AHG96539

SEQ ID NO: 11041 - protein, 565 aa, Artificial Sequence; identical to SEQ ID NO: 7793
  derived and/or modified protein sequence (wt) from hemagglutinin__InfluenzaA__AHG96551

SEQ ID NO: 11042 - protein, 565 aa, Artificial Sequence; identical to SEQ ID NO: 10973
  derived and/or modified protein sequence (wt) from hemagglutinin__InfluenzaA__AHG96563

SEQ ID NO: 11043 - protein, 565 aa, Artificial Sequence; identical to SEQ ID NO: 7793
  derived and/or modified protein sequence (wt) from hemagglutinin__InfluenzaA__AHG96575

SEQ ID NO: 11044 - protein, 565 aa, Artificial Sequence; identical to SEQ ID NO: 7793
  derived and/or modified protein sequence (wt) from hemagglutinin__InfluenzaA__AHG96587

SEQ ID NO: 11045 - protein, 565 aa, Artificial Sequence; identical to SEQ ID NO: 7793
  derived and/or modified protein sequence (wt) from hemagglutinin__InfluenzaA__AHG96599

SEQ ID NO: 11046 - protein, 565 aa, Artificial Sequence; identical to SEQ ID NO: 7793
  derived and/or modified protein sequence (wt) from hemagglutinin__InfluenzaA__AHG96611

SEQ ID NO: 11047 - protein, 565 aa, Artificial Sequence; identical to SEQ ID NO: 7793
  derived and/or modified protein sequence (wt) from hemagglutinin__InfluenzaA__AHG96623

SEQ ID NO: 11048 - protein, 565 aa, Artificial Sequence; identical to SEQ ID NO: 7793
  derived and/or modified protein sequence (wt) from hemagglutinin__InfluenzaA__AHG96635

SEQ ID NO: 11049 - protein, 565 aa, Artificial Sequence; identical to SEQ ID NO: 7793
  derived and/or modified protein sequence (wt) from hemagglutinin__InfluenzaA__AHG96647

SEQ ID NO: 11050 - protein, 565 aa, Artificial Sequence; identical to SEQ ID NO: 7793
  derived and/or modified protein sequence (wt) from hemagglutinin__InfluenzaA__AHG96659

SEQ ID NO: 11051 - protein, 565 aa, Artificial Sequence; identical to SEQ ID NO: 7793
  derived and/or modified protein sequence (wt) from hemagglutinin__InfluenzaA__AHG96671

SEQ ID NO: 11052 - protein, 565 aa, Artificial Sequence; identical to SEQ ID NO: 7793
  derived and/or modified protein sequence (wt) from hemagglutinin__InfluenzaA__AHG96683

SEQ ID NO: 11053 - protein, 566 aa, Artificial Sequence; identical to SEQ ID NO: 11025
  derived and/or modified protein sequence (wt) from hemagglutinin__InfluenzaA__AHG96695

SEQ ID NO: 11054 - protein, 566 aa, Artificial Sequence; identical to SEQ ID NO: 11025
  derived and/or modified protein sequence (wt) from hemagglutinin__InfluenzaA__AHG96707

SEQ ID NO: 11055 - protein, 566 aa, Artificial Sequence; identical to SEQ ID NO: 11025
  derived and/or modified protein sequence (wt) from hemagglutinin__InfluenzaA__AHG96719

SEQ ID NO: 11056 - protein, 566 aa, Artificial Sequence; identical to SEQ ID NO: 11025
  derived and/or modified protein sequence (wt) from hemagglutinin__InfluenzaA__AHG96731

SEQ ID NO: 11057 - protein, 566 aa, Artificial Sequence; identical to SEQ ID NO: 11025
  derived and/or modified protein sequence (wt) from hemagglutinin__InfluenzaA__AHG96743

SEQ ID NO: 11058 - protein, 566 aa, Artificial Sequence; identical to SEQ ID NO: 11025
  derived and/or modified protein sequence (wt) from hemagglutinin__InfluenzaA__AHG96755

SEQ ID NO: 11059 - protein, 566 aa, Artificial Sequence; identical to SEQ ID NO: 11025
  derived and/or modified protein sequence (wt) from hemagglutinin__InfluenzaA__AHG96767

SEQ ID NO: 11060 - protein, 566 aa, Artificial Sequence; identical to SEQ ID NO: 11025
  derived and/or modified protein sequence (wt) from hemagglutinin__InfluenzaA__AHG96779

SEQ ID NO: 11061 - protein, 566 aa, Artificial Sequence
  derived and/or modified protein sequence (wt) from hemagglutinin__InfluenzaA__AHG96791
MKTIIALSYILCLVFAQKLPGNDNSTATLCLGHHAVPNGTIVKTITNDQIEVTNATELVQSSSTGGICDSPHQILDGENCTLIDALLGDPQCDGFQNKKWDLFVERSKAYSNCYPYDVPDYASLRSLVASSGTLEFNDESFNWTGVTQNGTSSSCKRRSNNSFFSRLNWLTQLKFKYPALNVTMPNNEKFDKLYIWGVHHPVTDNDQIFLYAQASGRITVSTKRSQQTVIPNIGSRPRIRNIPSRISIYWTIVKPGDILLINSTGNLIAPRGYFKIRSGKSSIMRSDAPIGKCNSECITPNGSIPNDKPFQNVNRITYGACPRYVKQNTLKLATGMRNVPEKQTRGIFGAIAGFIENGWEGMVDGWYGFRHQNSEGIGQAADLKSTQAAINQINGKLNRLIGKTNEKFHQIEKEFSEVERRIQDLEKYVEDTKIDLWSYNAELLVALENQHTIDLTDSEMNKLFERTKKQLRENAEDMGNGCFKIYHKCDNACIGSIRNGTYDHDVYRDEALNNRFQIKGVELKSGYKDWILWISFAISCFLLCVALLGFIMWACQKGNIRCNICI

SEQ ID NO: 11062 - protein, 566 aa, Artificial Sequence; identical to SEQ ID NO: 11025
  derived and/or modified protein sequence (wt) from hemagglutinin__InfluenzaA__AHG96803

SEQ ID NO: 11063 - protein, 566 aa, Artificial Sequence; identical to SEQ ID NO: 11025
  derived and/or modified protein sequence (wt) from hemagglutinin__InfluenzaA__AHG96815

SEQ ID NO: 11064 - protein, 566 aa, Artificial Sequence; identical to SEQ ID NO: 11025
  derived and/or modified protein sequence (wt) from hemagglutinin__InfluenzaA__AHG96827

SEQ ID NO: 11065 - protein, 566 aa, Artificial Sequence; identical to SEQ ID NO: 11025
  derived and/or modified protein sequence (wt) from hemagglutinin__InfluenzaA__AHG96839

SEQ ID NO: 11066 - protein, 566 aa, Artificial Sequence; identical to SEQ ID NO: 11025
  derived and/or modified protein sequence (wt) from hemagglutinin__InfluenzaA__AHG96851

SEQ ID NO: 11067 - protein, 566 aa, Artificial Sequence; identical to SEQ ID NO: 11025
  derived and/or modified protein sequence (wt) from hemagglutinin__InfluenzaA__AHG96863

SEQ ID NO: 11068 - protein, 566 aa, Artificial Sequence; identical to SEQ ID NO: 11025
  derived and/or modified protein sequence (wt) from hemagglutinin__InfluenzaA__AHG96875

SEQ ID NO: 11069 - protein, 566 aa, Artificial Sequence; identical to SEQ ID NO: 11025
  derived and/or modified protein sequence (wt) from hemagglutinin__InfluenzaA__AHG96887

SEQ ID NO: 11070 - protein, 566 aa, Artificial Sequence; identical to SEQ ID NO: 11025
  derived and/or modified protein sequence (wt) from hemagglutinin__InfluenzaA__AHG96899

SEQ ID NO: 11071 - protein, 566 aa, Artificial Sequence; identical to SEQ ID NO: 11025
  derived and/or modified protein sequence (wt) from hemagglutinin__InfluenzaA__AHG96911

SEQ ID NO: 11072 - protein, 566 aa, Artificial Sequence; identical to SEQ ID NO: 11025
  derived and/or modified protein sequence (wt) from hemagglutinin__InfluenzaA__AHG96923

SEQ ID NO: 11073 - protein, 566 aa, Artificial Sequence; identical to SEQ ID NO: 11025
  derived and/or modified protein sequence (wt) from hemagglutinin__InfluenzaA__AHG96935

SEQ ID NO: 11074 - protein, 566 aa, Artificial Sequence; identical to SEQ ID NO: 11025
  derived and/or modified protein sequence (wt) from hemagglutinin__InfluenzaA__AHG96947

SEQ ID NO: 11075 - protein, 566 aa, Artificial Sequence; identical to SEQ ID NO: 11025
  derived and/or modified protein sequence (wt) from hemagglutinin__InfluenzaA__AHG96959

SEQ ID NO: 11076 - protein, 566 aa, Artificial Sequence; identical to SEQ ID NO: 11025
  derived and/or modified protein sequence (wt) from hemagglutinin__InfluenzaA__AHG96971

SEQ ID NO: 11077 - protein, 566 aa, Artificial Sequence; identical to SEQ ID NO: 11025
  derived and/or modified protein sequence (wt) from hemagglutinin__InfluenzaA__AHG96983

SEQ ID NO: 11078 - protein, 566 aa, Artificial Sequence; identical to SEQ ID NO: 11025
  derived and/or modified protein sequence (wt) from hemagglutinin__InfluenzaA__AHG96995

SEQ ID NO: 11079 - protein, 566 aa, Artificial Sequence; identical to SEQ ID NO: 11025
  derived and/or modified protein sequence (wt) from hemagglutinin__InfluenzaA__AHG97007

SEQ ID NO: 11080 - protein, 566 aa, Artificial Sequence; identical to SEQ ID NO: 11025
  derived and/or modified protein sequence (wt) from hemagglutinin__InfluenzaA__AHG97019

SEQ ID NO: 11081 - protein, 566 aa, Artificial Sequence; identical to SEQ ID NO: 11025
  derived and/or modified protein sequence (wt) from hemagglutinin__InfluenzaA__AHG97031

SEQ ID NO: 11082 - protein, 566 aa, Artificial Sequence; identical to SEQ ID NO: 11025
  derived and/or modified protein sequence (wt) from hemagglutinin__InfluenzaA__AHG97043

SEQ ID NO: 11083 - protein, 566 aa, Artificial Sequence
  derived and/or modified protein sequence (wt) from hemagglutinin__InfluenzaA__AHH00866
MKTIIALSYILCLAFAQKLPGNDNSTATLCLGHHAVPNGTLVKTITNDQIEVTNATELVQSSSTGRICDSPHQILDGENCTLIDALLGDPHCDGFQNKEWDLFVERSKAYSNCYPYDVPDYASLRSLVASSGTLEFNNESFNWTGVAQNGTSSACKRRSIKSFFSRLNWLHQLENRYPALNVTMPNNDKFDKLYIWGVHHPSTDSDQISVYAQASGRVTVSTKRSQQTVIPNIGSRPWVRGISSRISIYWTIVNPGDILLINSTGNLIAPRGYFKIRSGKSSIMRSDAPIGKCNSECITPNGSIPNDKPFQNVNRITYGACPRYVKQNTLKLATGMRNVPEKQTRGIFGAIAGFIENGWEGMMDGWYGFRHQNSEGTGQAADLKSTQAAINQINGKLNKLIEKTNEKFHQIEKEFSEVEGRIQDLEKYVEDTKIDLWSYNAELLVALENQHTIDLTDSEMNKLFERTRKQLRENAEDMGNGCFKIYHKCDNACIGSIRNGTYDHDVYRDEALNNRFQIKGVELKSGYKDWILWISFAISCFLLCVVLLGFIMWACQKGNIRCNICI

SEQ ID NO: 11084 - protein, 566 aa, Artificial Sequence
  derived and/or modified protein sequence (wt) from hemagglutinin__InfluenzaA__AHH00870
MKTIIALSYILCLAFAQKLPGNDNSTATLCLGHHAVPNGTLVKTITNDQIEVTNATELVQSSSTGRICDSPHQILDGENCTLIDALLGDPHCDGFQNKEWDLFVERSKAYSNCYPYDVPDYASLRSLVASSGTLEFNNESFNWTGVAQNGTSSACKRRSIKSFFSRLNWLHQLENRYPALNVTMPNNDKFDKLYIWGVHHPSTDSDQISVYAQASGRVTVSTKRSQQTVIPNIGSRPWVRGISSRISIYWTIVKPGDILLINSTGNLIAPRGYFKIRSGKSSIMRSDAPIGKCNSECITPNGSIPNDKPFQNVNRITYGACPRYVKQNTLKLATGMRNVPEKQTRGIFGAIAGFIENGWEGMMDGWYGFRHQNSEGTGQAADLKSTQAAINQINGKLNKLIEKTNEKFHQIEKEFSEVEGRIQDLEKYVEDTKIDLWSYNAELLVALENQHTIDLTDSEMNKLFERTRKQLRENAEDMGNGCFKIYHKCDNACIGSIRNGTYDHDVYRDEALNNRFQIKGVELKSGYKDWILWISFAISCFLLCVVLLGFIMWACQKGNIRCNICI

SEQ ID NO: 11085 - protein, 566 aa, Artificial Sequence
  derived and/or modified protein sequence (wt) from hemagglutinin__InfluenzaA__AHJ57430
MKAILVVLLYTFATANADTLCIGYHANNSTDTVDTVLEKNVTVTHSVNLLEDKHNGKLCRLRGVAPLHLGKCNIAGWILGNPECESLSTASSWSYIVETSSSDNGTCYPGDFINYEELREQLSSVSSFERFEISPKTSSWPNHDSNKGVRAACPHAGAKSFYKNLIWLVKKGNSYPKLSKSYINDKGKEVLVLWGIHHPSTSADQQSLYQNADAYVFVGTSRYSKKFKPEIAIRPKVRGQEGRMNYYWTLVEPGDKITFEATGNLVVPRYAFAMERNAASGIIISDTPVHDCNTTCQTPKGAVNTSLPFQNIHPITIGKCPKYVKSTKLRLATGLRNIPSIQSRGLFGAIAGFIEGGWTGMVDGWYGYHHQNEQGSGYAADLKSTQNAIDEITNKVNSVIEKMNTQFTAVGKEFNHLEKRIENLNKKVDDGFLDIWTYNAELLVLLENERTLDYHDSNVKNLYEKVRSQLKNNAKEIGNGCFEFYHKCNNTCMESVKNGTYDYPKYSEEAKLNREKIDGVKLESTRIYQILAIYSTVASSLVLVVSLGAISFWMCSNGSLQCRICI

SEQ ID NO: 11086 - protein, 566 aa, Artificial Sequence
  derived and/or modified protein sequence (wt) from hemagglutinin__InfluenzaA__AHJ57431
MKAILVVLLYTFATANADTLCIGYHANNSTDTVDTVLEKNVTVTHSVNLLEDKHNGKLCKLRGVAPLHLGKCNIAGWILGNPECESLSTASSWSYIVETSSSDNGTCYPGDFIDYEELREQLSSVSSFERFEIFPKTSSWPNHDSNKGVRAACPHAGAKSFYKNLIWLVKKGNSYPKLSQSYINDKGKEVLVLWGIHHPSTSADQQSLYQNADAYVFVGTSRYSKKFKPEIAIRPKVRDQEGRMNYYWTLVEPGDKITFEATGNLVVPRYAFAMERNAGSGIIISDTPVHDCNTTCQTPKGAINTSLPFQNIHPITIGKCPKYVKSTKLRLATGLRNIPSIQSRGLFGAIAGFIEGGWTGMVDGWYGYHHQNEQGSGYAADLKSTQNAIDKITNKVNSVIEKMNTQFTAVGKEFNHLEKRIENLNKKVDDGFLDIWTYNAELLVLLENERTLDYHDSNVKNLYEKVRNQLKNNAKEIGNGCFEFYHKCDNTCMESVKNGTYDYPKYSEEAKLNREKIDGVKLESTRIYQILAIYSTVASSLVLVVSLGAISFWMCSNGSLQCRICI

SEQ ID NO: 11087 - protein, 566 aa, Artificial Sequence
  derived and/or modified protein sequence (wt) from hemagglutinin__InfluenzaA__AHJ57432
MKAILVVLLYTFATANADTLCIGYHANNSTDTVDTVLEKNVTVTHSVNLLEDKHNGKLCKLRGVAPLHLGKCNIAGWILGNPECESLSTASSWSYIVETSSSDNGTCYPGDFIDYEELREQLSSVSSFERFEIFPKTSSWPNHDSNKGVTAACPHAGAKSFYKNLIWLVKKGNSYPKLSKSYINDKGKEVLVLWGIHHPSTTADQQSLYQNADAYVFVGTSRYSKKFKPQIAIRPKVRDQEGRMNYYWTLVEPGDKITFEATGNLVVPRYAFALERNAGSGIIISDTPVHDCNTTCQTPKGAINTSLPFQNIHPITIGKCPKYVKSTKLRLATGLRNVPSIQSRGLFGAIAGFIEGGWTGMVEGWYGYHHQNEQGSGYAADLKSTQNAIDKITNKVNSVIEKMNTQFTAVGKEFNHLEKRIENLNKKVDDGFLDIWTYNAELLVLLENERTLDYHDSNVKNLYEKVRNQLKNNAKEIGNGCFEFYHKCDNTCMESVKNGTYDYPKYSEEAKLNREKIDGVKLESTRIYQILAIYSTVASSLVLVVSLGAISFWMCSNGSLQCRICI

SEQ ID NO: 11088 - protein, 566 aa, Artificial Sequence
  derived and/or modified protein sequence (wt) from hemagglutinin__InfluenzaA__AHJ57433
MKAILVVLLYTFATANADTLCIGYHANNSTDTVDTVLEKNVTVTHSVNLLEDKHNGKLCKLRGVAPLHLGKCNIAGWILGNPECESLSTASSWSYIVETSSSDNGTCYPGDFINYEELREQLSSVSSFERFEIFPKTSSWPNHDSNKGVTAACPHAGAKSFYKNLIWLVKEGNSYPKLSKSYINDKGKEVLVLWGIHHPSTTADQQSLYQNADAYVFVGTSRYSKKFKPEIAIRPKVRDQEGRMNYYWTLIEPGDKITFEATGNLVVPRYAFAMERNAGSGIIISDTPVHDCNTTCQTPEGAINTSLPFQNIHPITIGKCPKYVKSTKLRLATGLRNVPSIQSRGLFGAIAGFIEGGWTGMVDGWYGYHHQNEQGSGYAADLKSTQNAIDKITNKVNSVIEKMNTQFTAVGKEFNHLEKRIENLNKKVDDGFLDIWTYNAELLVLLENERTLDYHDSNVKNLYEKVRNQLKNNAKEIGNGCFEFYHKCDNTCMESVKNGTYDYPKYSEEAKLNREKIDGVKLESTRIYQILAIYSTVASSLVLVVSLGAISFWMCSNGSLQCRICI

SEQ ID NO: 11089 - protein, 566 aa, Artificial Sequence
  derived and/or modified protein sequence (wt) from hemagglutinin__InfluenzaA__AHJ57434
MKAILVVLLYTFATANADTLCIGYHANNSTDTVDTVLEKNVTVTHSVNPLEDKHNGKLCKLRGVAPLHLGKCNIAGWILGNPECESLSTASSWSYIVETSSSDNGTCYPGDFIDYEELREQLSSVSSFERFEIFPKTSSWPNHDSNKGVTAACPHAGAKSFYKNLIWLVKEGNSYPKLSKSYINDKGKEVLVLWGIHHPSTTADQQSLYQNADAYVFVGTSRYSKKFKPEIAIRPKVRDQEGRMNYYWTLVEPGDKITFEATGNLVVPRYAFAMERNAGSGIIISDTPVHDCNTTCQTPEGAINTSLPFQNIHPITIGKCPKYVKSTKLRLATGLRNVPSIQSRGLFGAIAGFIEGGWTGMVDGWYGYHHQNEQGSGYAADLKSTQNAIDKITNKVNSVIEKMNTQFTAVGKEFNHLEKRIENLNKKVDDGFLDIWTYNAELLVLLENERTLDYHDSNVKNLYEKVRNQLKNNAKEIGNGCFEFYHKCDNTCMESVKNGTYDYPKYSEEAKLNREKIDGVKLESTRIYQILAIYSTVASSLVLVVSLGAISFWMCSNGSLQCRICI

SEQ ID NO: 11090 - protein, 566 aa, Artificial Sequence
  derived and/or modified protein sequence (wt) from hemagglutinin__InfluenzaA__AHJ57435
MKAILVVLLYTFATANADTLCIGYHANNSTDTVDTVLEKNVTVTHSVNLLEDKHNGKLCKLRGVAPLHLGKCNIAGWILGNPECESLSTASSWSYIVETSSSDNGTCYPGDFINYEELREQLSSVSSFERFEIFPKTSSWPNHDSNRGVTAACPHAGAKSFYKNLIWLVKKGNSYPKLSQSYINDKGKEVLVLWGIHHPSTTADQQSLYQNADAYVFVGTSRYSKKFKPEIAIRPKVRDQEGRMNYYWTLVEPGDKITFEATGNLVVPRYAFAMERNAGSGIIISDTPVHDCNTTCQTPEGAINTSLPFQNIHPITIGKCPKYVKSTKLRLATGLRNVPSIQSRGLFGAIAGFIEGGWTGMVDGWYGYHHQNEQGSGYAADLKSTQNAIDKITNKVNSVIEKMNTQFTAVGKEFNHLEKRIENLNKKVDDGFLDIWTYNAELLVLLENERTLDYHDSNVKNLYEKVRNQLKNNAKEIGNGCFEFYHKCDNTCMESVKNGTYDYPKYSEEAKLNREKIDGVKLESTRIYQILAIYSTVASSLVLVVSLGAISFWMCSNGSLQCRICI

SEQ ID NO: 11091 - protein, 566 aa, Artificial Sequence
  derived and/or modified protein sequence (wt) from hemagglutinin__InfluenzaA__AHJ57436
MKTIIALSYILCLVFAQKLPGNDNSTATLCLGHHAVPNGTIVKTITNDQIEVTNATELVQSSSTGEICDSPHQILDGENCTLIDALLGDPQCDGFQNKKWDLFVERSKAYSNCYPYDVPDYASLRSLVASSGTLEFNNESFNWTGVTQNGTSSACIRRSNSSFFSRLNWLTHLNFKYPALNVTIPNNEQFDKLYIWGVHHPGTDKDQIFLYAQASGRITVSTKRSQQTVIPNIGSRPRVRNIPSRISIYWTIVKPGDILLINSTGNLIAPRGYFKIRSGKSSIMRSDAPIGKCNSECITPNGSIPNDKPFQNVNRITYGACPRYVKQNTLKLATGMRNVPEKQTRGIFGAIAGFIENGWEGMVDGWYGFRHQNSEGRGQAADLKSTQAAIDQINGKLNRLIGKTNEKFHQIEKEFSEVEGRIQDLEKYVEDTKIDLWSYNAELLVALENQHTIDLTDSELNKLFEKTKKQLRENAEDMGNGCFKIYHKCDNACIGSIRNGTYDHDVYRDEALNNRFQIKGVELKSGYKDWILWISFAISCFLLCVALLGFIMWACQKGNIRCNICI

SEQ ID NO: 11092 - protein, 566 aa, Artificial Sequence
  derived and/or modified protein sequence (wt) from hemagglutinin__InfluenzaA__AHJ57437
MKTIIALSYILCLVFAQKLPGNDNSTATLCLGHHAVPNGTIVKTITNDQIEVTNATELVQNSSTGEICDSPHQILDGENCTLIDALLGDPQCDGFQNKKWDLFVERSKAYSNCYPYDVPDYASLRSLVASSGTLEFNNESFNWTGVTQNGTSSACIRRSNSSFFSRLNWLTHLNFKYPALNVTMPNNEQFDKLYIWGVHHPGTDKDQIFLYAQSSGRITVSTKRSQQTVIPNIGSRPRVRNIPSRISIYWTIVKPGDILLINSTGNLIAPRGYFKIRSGKSSIMRSDAPIGKCNSECITPNGSIPNDKPFQNVNRITYGACPRYVKQSTLKLATGMRNVPEKQTRGIFGAIAGFIENGWEGMVDGWYGFRHQNSEGRGQAADLKSTQAAIDQINGKLNRLIGKTNEKFHQIEKEFSEVEGRIQDLEKYVEDTKIDLWSYNAELLVALENQHTIDLTDSEMNKLFEKTKKQLKENAEDMGNGCFKIYHKCDNACIGSIRNGTYDHDVYRDEALNNRFQIKGVELKSGYKDWILWISFAISCFLLCVALLGFIMWACQKGNIRCNICI

SEQ ID NO: 11093 - protein, 566 aa, Artificial Sequence
  derived and/or modified protein sequence (wt) from hemagglutinin__InfluenzaA__AHJ57438
MKTIIALSYILCLVFAQKLPGNDNSTATLCLGHHAVPNGTIVKTITNDQIEVTNATELVQNSSTGEICDSPHQILDGENCTLIDALLGDPQCDGFQNKKWDLFVERSKAYSNCYPYDVPDYASLRSLVASSGTLEFNNESFNWTGVTQNGTSSACIRRSNSSFFSRLKWLTHLNFKYPALNVTMPNNEQFDKLYIWGVHHPGTDKDQIFLYAQASGRITVSTKRSQQAVIPNIGSRPRIRNIPSRISIYWTIVKPGDILLINSTGNLIAPRGYFKIRSGKSSIMRSDAPIGKCNSECITPNGSIPNDKPFQNVNRITYGDCPRYVKQSTLKLATGMRNVPEKQTRGIFGAIAGFIENGWEGMVDGWYGFRHQNSEGRGQAADLKSTQAAIDQINGKLNRLIGKTNEKFHQIEKEFSEVEGRIQDLEKYVEDTKIDLWSYNAELLVALENQHTIDLTDSEMNKLFEKTKKQLRENAEDMGNGCFKIYHKCDNACTGSIRNGTYDHDVYRDEALNNRFQIKGVEVKSGYKDWILWISFAISCFLLCVALLGFIMWACQKGNIRCNICI

SEQ ID NO: 11094 - protein, 566 aa, Artificial Sequence
  derived and/or modified protein sequence (wt) from hemagglutinin__InfluenzaA__AHJ57651
MIAFIVIAILAATGKSDKICIGYHANNSTTKVDTILEKNVTVTHSVELLENQKEERFCKISNKAPLDLRDCTLEGWILGNPRCGILLADQSWSYIVERPNARNGICYPGTLNEVEELKALIGSGERVERFEMFPKSTWAGVDTDSGVSSACPLGNGPSFYRNLLWIIKLKSSEYPVIRGTFNNTGDKSILYFWGVHHPPVTTEQEALYGSGDRYVRMGTESMNFARSPEIAARPAVNGQRGRIDYFWSILKPGETLNVESNGNLIAPWYAYRFVNKDSKGAIFRSTLPIENCDATCQTTEGVIRTNKTFQNVSPLWIGECPKYVKSKSLRLATGLRNVPQIETRGLFGAIAGFIEGGWTGMIDGWYGYHHENSQGSGYAADRESTQKAIDGITNKVNSIIDKMNTQFEAVGHEFSNLERRIDNLNKRMEDGFLDVWTYNAELLVLLENERTLDMHDANVKILYEKVRSQLRDNAKDLGNGCFEFWHKCDNECIESVKNGTYNYPKYQSESRLNRQTIESVKLENLGVYQILAIYSTVSSSLVLVGLILAMGLWMCSNGSMQCRICI

SEQ ID NO: 11095 - protein, 566 aa, Artificial Sequence
  derived and/or modified protein sequence (wt) from hemagglutinin__InfluenzaA__AHJ57663
MIAFIVIATLVATGKSDKICIGYHANNSTTKVDTILEKNVTVTHSVELLENQKEERFCKISNKAPLDLRDCTLEGWILGNPRCGILLADQSWSYIVERPNARNGICYPGTLNEAEELKALIGSGERVERFEMFPKSTWTGVDTESGVSSACPLGNGPSFYRNLLWIIKLKSSEYPVIRGTFNNTGDKSILYFWGVHHPPVTTEQNALYGSGDRYVRMGTESMNFARSPEIAARPAVNGQRGRIDYFWSILKPGETLNVESNGNLIAPWYAYRFVNKDSKGAIFRSNLPIENCDATCQTTEGVIRTNKTFQNVSPLWIGECPKYVKSKSLRLATGLRNVPQIETRGLFGAIAGFIEGGWTGMIDGWYGYHHENSQGSGYAADKESTQKAIDGITNKVNSIIDKMNTQFEAVGHEFSNLERRIDNLNKRMEDGFLDVWTYNAELLVLLENERTLDLHDANVKNLHERVKSQLRDNANDLGNGCFEFWHKCDNECMESVKNGTYNYPKYQAESRLNKQKIESVKLEEFGVYQILAIYSTVSSSLVLVGLIMAMGLWMCPNGSMQCRICI

SEQ ID NO: 11096 - protein, 566 aa, Artificial Sequence
  derived and/or modified protein sequence (wt) from hemagglutinin__InfluenzaA__AHJ57674
MIAFIVIAILVTTGKSDKICIGYHANNSTTKVDTILEKNVTVTHSVELLENQKEERFCKISNKAPLDLRDCTLEGWILGNPRCGILLADQSWSYIVERPNARNGICYPGTLNEVEELKALIGSGERVERFEMFPKSTWAGVDTNSGVSSACPLGEGPSFYRNLLWIIKHTTSGYPVIKGTYRNTGDKSVLYFWGVHHPPDTTEQNVLYGSGNRYVRMGTESMNFARSPEIAARPAVNGQRGRIDYFWSILKPGETLNVESNGNLIAPWYAYRFVNKDSKGAIFRSNLPIENCDATCQTTEGVIRTNKTFQNVSPLWIGECPKYVKSKSLRLATGLRNVPQIETRGLFGAIAGFIEGGWTGMIDGWYGYHHENSQGSGYAADRESTQKAIDGITNKVNSIIDKMNTQFEAVGHEFSNLERRIDNLNKRMEDGFLDVWTYNAELLVLLENERTLDLHDANVKNLHERVRSQLRDNANDLGNGCFEFWHKCDNECMESVKNGTYNYPKYQAESRLNRQKIESVKLEEFGVYQILAIYSTVSSSLVLVGLIMAMGLWMCSNGSMQCRICI

SEQ ID NO: 11097 - protein, 566 aa, Artificial Sequence
  derived and/or modified protein sequence (wt) from hemagglutinin__InfluenzaA__AHJ57686
MIAFIVIAILAATGKSDKICIGYHANNSTTKVDTILEKNVTVTHSVELLENQKEGRFCKISNKAPLDLRDCTLEGWILGNPRCGILLADQSWSYIVERPNARNGICYPGILNEAEELKALIGSGERVERFEMFPKSTWAGVDTNSGVSSACPLGNGPSFYRNLLWIIKLKSSAYPVIRGTFNNTGDKSILYFWGVHHPPVATEQEALYGSGNRYVRMGTESMNFARNPEIAARPAVNGQRGRIDYFWSILKPGETLNVESNGNLIAPWYAYRFVNKDSKGAIFRSNLPIENCEATCQTTEGVIRTNKTFQNVSPLWIGECPKYVKSKSLRLATGLRNVPQIETRGLFGAIAGFIEGGWTGMIDGWYGYHHENSQGSGYAADRESTQKAIDGITNKVNSIIDKMNTQFEAVGHEFSNLERRIDNLNKRMEDGFLDVWTYNAELLVLLENERTLDLHDANVKNLHEKVRSQLRDNANDLGNGCFEFWHKCDNECMESVKNGTYDYPKYQAESRLNRQKIESVKLENFDVYQILAIYSTVSSSLVLVGLIMAMGLWMCSNGSMQCRICI

SEQ ID NO: 11098 - protein, 566 aa, Artificial Sequence
  derived and/or modified protein sequence (wt) from hemagglutinin__InfluenzaA__AHJ57697
MIAFIVIAILAATGKSDKICIGYHANNSTTKVDTILEKNVTVTHSVELLENQKEERFCKISNKAPLDLRDCTLEGWILGNPRCGILLADQSWSYIVERPNARNGICYPGTLNEVEELKALIGSGERVERFEMFPKSTWAGVDTNSGVSSACPLGNGPSFYRNLLWIIKLKSSEYPVIRGTFNNTGDKSILYFWGVHHPPVTTEQEALYGSGDRYVRMGTESMNFARSPEIAARPAVNGQRGRIDYFWSILKPGETLNVESNGNLIAPWYAYRFVNKDSKGAIFRSNLPIENCDATCQTTEGVIRTNKTFQNVSPLWIGECPKYVKSKSLRLATGLRNVPQIETRGLFGAIAGFIEGGWTGMIDGWYGYHHENSQGSGYAADRESTQKAIDGITNKVNSIIDKMNTQFEAVGHEFSNLERRIDNLNKRMEDGFLDVWTYNAELLVLLENERTLDLHDANVKNLHEKVKSQLRDNANDLGNGCFEFWHKCDNECMESVKNGTYDYPKYQAESRLNRQKIESVKLENFDVYQILAIYSTVSSSLVLVGLIMAMGLWMCSNGSMQCRICI

SEQ ID NO: 11099 - protein, 566 aa, Artificial Sequence
  derived and/or modified protein sequence (wt) from hemagglutinin__InfluenzaA__AHJ57707
MIAFIVIAILVTTGKSDKICVGYHANNSTTKVDTILEKNVTVTHSVELLENQKEERFCKISNKAPLDLRDCTLEGWILGNPRCGILLADQSWSYIVERPNARNGICYPGTLNEVEELKALIGSGERVERFEMFPKSTWTGVDTNSGVSSACPLGEGPSFYRNLLWIIKHTTSGYPVIKGTYRNTGDKSVLYFWGVHHPPDTTEQNVLYGSGNRYVRMGTESMNFARSPEIAARPAVNGQRGRIDYFWSILKPGETLNVESNGNLIAPWYAYRFVNKDSKGAIFRSNLPIENCDATCQTTEGVIRTNKTFQNVSPLWIGECPKYVKSKSLRLATGLRNVPQIETRGLFGAIAGFIEGGWTGMIDGWYGYHHENSQGSGYAADRESTQKAIDGITNKVNSIIDKMNTQFEAVGHEFSNLERRIDNLNKRMEDGFLDVWTYNAELLVLLENERTLDLHDANVKNLHERVRSQLRDNANDLGNGCFEFWHKCDNECMESVKNGTYNYPKYQAESRLNKQKIESVKLEEFGVYQILAIYSTVSSSLVLVGLIMAMGLWMCSNGSMQCRICI

SEQ ID NO: 11100 - protein, 566 aa, Artificial Sequence
  derived and/or modified protein sequence (wt) from hemagglutinin__InfluenzaA__AHJ57719
MIAFIVIAILAATGKSDKICIGYHANNSTTKVDTILEKNVTVTHSVELLENQKEERFCKISNKAPLDLRDCTLEGWILGNPRCGILLSDQSWSYIVERPNARNGICYPGILNEAEELKALIGSGERVERFEMFPKSTWAGVDTNSGVSSACPLGNGPSFFRNLLWIIKLKSSTYPVIRGTFNNTGDKSILYFWGVHHPSVTTEQEALYGSGNRYVRMGTESMNFARSPEIAARPAVNGQRGRIDYFWSILKPGETLNVESNGNLIAPWYAYRFVNKDSKGAIFRSNLPIENCDATCQTIEGVIRTNKTFQNVSPLWIGECPKYVKSKSLRLATGLRNVPQIETRGLFGAIAGFIEGGWTGMIDGWYGYHHENSQGSGYADDKESTQKAIDGITNKVNSIIDKMNTQFEAVGHEFSNLERRIDNLNKRMEDGFLDVWTYNAELLVLLENERTLDLHDANVKNLHEKVRSQLRDNANDLGNGCFEFWHKCDNECMESVKNGTYDYPKYQAESRLNRQKIESVKLENFDVYQILAIYSTVSSSLVLVGLIMAMGLWMCSNGSMQCRICI

SEQ ID NO: 11101 - protein, 566 aa, Artificial Sequence
  derived and/or modified protein sequence (wt) from hemagglutinin__InfluenzaA__AHJ57731
MIAFIVIAILAATGKSDKICIGYHANNSTTKVDTILEKNVTVTHSVELLENQKEERFCKISNKAPLDLRDCTLEGWILGNPRCGILLADQSWSYIVERPNARNGICYPGILNEAEELKALIGSGERVERFEMFPKSTWAGVDTDSGVSSACPLGNGPSFYRNLLWIIKLKSSEYPVIRGTFNNTGDKSILYFWGVHHPPVTTEQEALYGSGNRYVRMGTESMNFARSPEIAARPAVNGQRGRIDYFWSILKPGETLNVESNGNLIAPWYAYRFVNKDSKGAIFRSNLPIENCDATCQTTEGVIRTNKTFQNVSPLWIGECPKYVKSKSLRLATGLRNVPQIETRGLFGAIAGFIEGGWTGMIDGWYGYHHENSQGSGYAADRESTQKAIDGITNKVNSIIDKMNTQFEAVGHEFSNLERRIDNLNKRMEDGFLDVWTYNAELLVLLENERTLDLHDANVKNLHEKVRSQLRDNANDLGNGCFEFWHKCDNECMESVKNGTYDYPKYQTESRLNRQKIESVKLENFDVYQILAIYSTVSSSLVLVGLIMAMGLWMCSNGSMQCRICI

SEQ ID NO: 11102 - protein, 566 aa, Artificial Sequence
  derived and/or modified protein sequence (wt) from hemagglutinin__InfluenzaA__AHJ57743
MIAFIVIAILVATGKSDKICIGYHANNSTTKVDTILEKNVTVTHSVELLENQKEERFCKISNKAPLDLRDCTIEGWILGNPRCGILLADQSWSYIVERPDARNGICYPGTLNEAEELKALIGSGEKVERFEMFPKSTWAGVDTSSGVSSACPLGNGPSFYRNLLWIIKLKSSEYPVIRGTFNNTGDKSVLYFWGVHHPPVTTEQNALYGSGNRYVRMGTESMNFARSPEIAARPAVNGQRGRIDYFWSILKPGETLNVESNGNLIAPWYAYRFVNKDSKGAIFRSNLPIENCDATCQTIEGVIRTNKTFQNVSPLWIGECPKYVKSKSLRLATGLRNVPQIETRGLFGAIAGFIEGGWTGMIDGWYGYHHENSQGSGYAADRESTQKAIDGITNKVNSIIDKMNTQFEAAGHEFSNLERRIDNLNKRMEDGFLDVWTYNAELLVLLENERTLDLHDANVKNLHEKVKSQLRDNANDLGNGCFEFWHKCDNECMESVKNGTYDYPKYQKESRLNRQKIESVKLENFDVYQILAIYSTVSSSLVLVGLIMAMGLWMCSNGSMQCRICI

SEQ ID NO: 11103 - protein, 566 aa, Artificial Sequence
  derived and/or modified protein sequence (wt) from hemagglutinin__InfluenzaA__AHJ57755
MIAFIVIAILVATGKSDKICIGYHANNSTTKVDTILEKNVTVTHSVELLENQKEERFCKISNKAPLDLRDCTIEGWILGNPRCDILLADQSWSYIVERPNARNGICYPGTLNEAEELKALIGSGEGVERFEMFPKSTWVGVDTSSGVSSACPLGNGPSFYRNLLWIIKLKSSEYPVIRGTFNNTGDKSVLYFWGVHHPPVTTEQNALYGSGNRYVRMGTESMNFARSPEIAARPAVNGQRGRIDYFWSILKPGETLNVESNGNLIAPWYAYRFVNKDNKGAIFRSNLPIENCDATCQTTEGVIRTNKTFQNVSPLWIGECPKYVKSKSLRLATGLRNVPQIETRGLFGAIAGFIEGGWTGMIDGWYGYHHENSQGSGYAADRESTQKAIDGITNKVNSIIDKMNTQFEAAGHEFSNLERRIDNLNKRMEDGFLDVWTYNAELLVLLENERTLDLHDANVKNLHEKVKSQLRDNANDLGNGCFEFWHKCDNECMESVKNGTYDYPKYQKESRLNRQKIESVKLENFDVYQILAIYSTVSSSLVVVGLIMAMGLWMCSNGSMQCRICI

SEQ ID NO: 11104 - protein, 566 aa, Artificial Sequence
  derived and/or modified protein sequence (wt) from hemagglutinin__InfluenzaA__AHJ57767
MIAFIVIAILAATGKSDKICIGYHANNSTTKVDTILEKNVTVTHSVELLENQKEERFCKISNKAPLDLRDCTLEGWILGNPRCGILLADQSWSYIVERPNARNGICYPGTLNEVEELKALIGSGERVERFEMFPKSTWAGVDTNSGVSSACPLGNGPSFYRNLLWIIKLKSSEYPVIRGTFNNTGDKSILYFWGVHHPPVTTEQEALYGSGDRYVRMGTESMNFARSPEIAARPAVNGQRGRIDYFWSILKPGETLNVESNGNLIAPWYAYRFVNKDSKGAIFRSNLPIENCDATCQTTEGVIRTNKTFQNVSPLWIGECPKYVKSKSLRLATGLRNVPQIETRGLFGAIAGFIEGGWTGMIDGWYGYHHESSQGSGYAADKESTQKAIDGITNKVNSIIDKMNTQFEAVGHEFSNLERRIDNLNKRMEDGFLDVWTYNAELLVLLENERTLDLHDANVKNLHEKVRSQLRDNANDLGNGCFEFWHKCNNECMESVKNGTYDYPKYQKESRLNRQKIESVKLENFDVYQILAIYSTVSSSLVLVGLILAMGLWMCSNGSMQCRICI

SEQ ID NO: 11105 - protein, 566 aa, Artificial Sequence
  derived and/or modified protein sequence (wt) from hemagglutinin__InfluenzaA__AHJ57779
MIAIIIIAILVATGKSDKICIGYHANNSTTKVDTILEKNVTVTHSVELLEDQKEERFCKISNKAPLDLRDCTIEGWILGNPRCGILLADQSWSYIVERPNARNGICYPGTLNEAEELKALIGSGEGVERFEMFPKSTWAGVDTNSGVSSACPLGNGPSFYRNLLWIIKLKSSEYPVIRGTFNNTGDKSVLYFWGVHHPPVTTEQNALYGSGNRYVRMGTESMNFARSPEIAARPAVNGQRGRIDYFWSILKPGETLNVESNGNLIAPWYAYRFVNKDSKGAIFRSNLPIENCDATCQTTEGVIRTNKTFQNVSPLWIGECPKYVKSKSLRLATGLRNVPQIETRGLFGAIAGFIEGGWTGMIDGWYGYHHENSQGSGYAADRESTQKAIDGITNKVNSIIDKMNTQFEAAGHEFSNLERRIDNLNKRMEDGFLDVWTYNAELLVLLENERTLDLHDANVKNLHEKVKSQLRDNANDLGNGCFEFWHKCDNECMESVKNGTYDYPKYQKESRLNRQKIESVKLENFDVYQILAIYSTVSSSLVLVGLIMAMGLWMCSNGSMQCMICI

SEQ ID NO: 11106 - protein, 566 aa, Artificial Sequence
  derived and/or modified protein sequence (wt) from hemagglutinin__InfluenzaA__AHJ57791
MIAIIIIAILVTTGKSDKICIGYHANNSTTKVDTILEKNVTVTHSVELLENKKEERFCKISNKAPLDLRDCTLEGWILGNPRCGILLADQSWSYIVERPNARNGICYPGTLNEVKELKALIGSGERVKRFEMFPKSTWAGVDTNSGVSSSCPLGNGPSFYRNLLWIIKHTTSGYPVIKGTYTNTGDKSVLYFWGIHHPPDTTEQNVLYGSGNRYVRMGTESMNFARSPEIAARPAVNGQRGRIDYFWSILKPGETLNVESNGNLIAPWYAYRFVNKDSKGAIFRSNLPIEDCDATCQTTEGVIRTNKTFQNVSPLWIGECPKYVKSKSLRLATGLRNVPQIETRGLFGAIAGFIEGGWTGMIDGWYGYHHENSQGSGYAADRESTQKAIDGITNKVNSIIDKMNTQFEAVGHEFSNLERRIDTLNKRMEDGFLDVWTYNAELLVLLENERTLDLHDANVKNLHERVKSQLRDNANDLGNGCFEFWHKCDNECMESVKNGTYNYPKYQAESRLNKQKIESVKLEEFGVYQILAIYSTVSSSLVLVGLIMAMVLWMCSNGSMQCRVCI

SEQ ID NO: 11107 - protein, 566 aa, Artificial Sequence
  derived and/or modified protein sequence (wt) from hemagglutinin__InfluenzaA__AHJ57815
MIAFIIITILVTTGKSDKICIGYHANNSTTKVDTILEKNVTVTHSVELLENQKEERFCRISNKAPLDLKECTLEGWILGNPQCDLLLGDQSWSYIVERPNARNGICYPGTLNEVEELRALIGSGEGVERFEMFPKSTWAGVDTNRGVTSSCPFGSGSSFYRNLLWIVKHTTSSYPVIKGTFRNTGDKSVLYFWGVHHPFDTNEQNVLYGSGNRYVRMGTESMNFARGPEVAARPVVNGQRGRIDYFWSILKPGETLNIESNGNLIAPWYAYRFVNKDSKGAIFRSNLPIEDCDATCQTIEGVIRTNKTFQNVSPLWIGECPKYVKSESLRLATGLRNVPQIETRGLFGAIAGFIEGGWTGMIDGWYGYHHENSQGSGYAADRESTQKAIDGITTKVNSIIDKMNTQFEAVGHEFSNLERRIDNLNKRLEDGFLDVWTYNAELLVLLENERTLDLHDANVKNLHERVRSQLRDNANDLGNGCFEFWHKCDNECMESVKNGTYNYPKYQAESRLNKQRIESVKLENFDVYQILAIYSTVSSSLVLVGLILAMGLWMCSNGSMQCRICI

SEQ ID NO: 11108 - protein, 566 aa, Artificial Sequence
  derived and/or modified protein sequence (wt) from hemagglutinin__InfluenzaA__AHJ57827
MIAFIVIAILVATGKSDKICIGYHANNSTTKVDTILEKNVTVTHSVELLENQKEERFCKISNKAPLDLRDCTIEGWILGNPRCGILLADQSWSYIVERPNARNGICYPGTLNEVEELKALIGSGERVERFEMFPKSTWAGVDTNSGVSSACPLGNGPSFYRNLLWIIKTKSSEYPVIKGTFNNTGDKSVLYFWGVHHPPSRNEQNVLYGSGDRYVRMGTESMNFARSPEIAARPAVNGQRGRIDYFWSILKPGETLNVESNGNLIAPWYAYRFVNKDSRGAIFRSNLPIENCDATCQTAEGVIRTNKTFQNVSPLWIGECPKYVKSKSLRLATGLRNVPQIETRGLFGAIAGFIEGGWTGMIDGWYGYHHENSQGSGYAADRESTQKAIDGITNKVNSIIDKMNTQFEAVGHEFSNLERRIDNLNKRMEDGFLDVWTYNAELLVLLENERTLDLHDANVKNLHERVKSQLRDNANDLGNGCFEFWHKCDNECMESVKNGTYDYPKYQKESRLNRQKIESVKLENFDVYQILAIYSTVSSSLVLVGLIMAMGLWMCSNGSMQCRICI

SEQ ID NO: 11109 - protein, 566 aa, Artificial Sequence
  derived and/or modified protein sequence (wt) from hemagglutinin__InfluenzaA__AHJ57850
MIAFIVIAILATTGKSDKICIGYHANNSTTKVDTILEKNVTVTHSVELLENQKEERFCKISNKAPLDLRDCTLEGWILGNPRCGILLADQSWSYIVERPNARNGICYPGILNEAEELKALIGSGERVERFEMFPKSTWAGVDTDSGVSSACPLGNGPSFYRNLLWIIKLKSSEYPVIRGTFNNTGDKSILYFWGVHHPPVTTEQEALYGSGNRYVRMGTESMNFARTPEIAARPAVNGQRGRIDYFWSILKPGETLNVESNGNLIAPWYAYRFVNKDSKGAIFRSNLPIENCDATCQTTEGVIRTNKTFQNVSPLWIGECPKYVKSKSLRLATGLRNVPQIETRGLFGAIAGFIEGGWTGMIDGWYGYHHENSQGSGYAADRESTQKAIDGITNKVNSIIDKMNTQFEAVGHEFSNLERRIDNLNKRMEDGFLDVWTYNAELLVLLENERTLDLHDANVKNLHEKVRSQLRDNANDLGNGCFEFWHKCDNECMESVKNGTYDYPKYQAESRLNRQKIESVKLENFDVYQILAIYSTVSSSLVLVGLIMAMGLWMCSNGSMQCRICI

SEQ ID NO: 11110 - protein, 566 aa, Artificial Sequence
  derived and/or modified protein sequence (wt) from hemagglutinin__InfluenzaA__AHJ57862
MIAFIVIAILAATGKSDKICIGYHANNSTTKVDTILEKNVTVTHSVELLENQKEERFCKISNKAPLDLRDCTLEGWILGNPRCGILLADQSWSYIVERPNARNGICYPGILNEAEELKALIGSGERVERFEMFPKSTWAGVDTNSGVSSACPLGNGPSFYRNLLWIIKLKSSEYPVIRGTFNNTGDKSILYFWGVHHPPVTTEQEALYGSGNRYVRMGTESMNFARSPEIAARPAVNGQRGRIDYFWSILKPGETLNVESNGNLIAPWYAYRFVNKDSKGAIFRSNLPIENCDATCQTTEGVIRTNKTFQNVSPLWIGECPKYVKSKSLRLATGLRNVPQIETRGLFGAIAGFIEGGWTGMIDGWYGYHHENSQGSGYAADRESTQKAIDGITNKVNSIIDKMNTQFEAVGHEFSNLERRIDNLNKRMEDGFLDVWTYNAELLVLLENERTLDLHDANVKNLHEKVRSQLRDNANDLGNGCFEFWHKCDNECMESVKNGTYDYPKYQAESRLNRQKIESVKLENFDVYQILAIYSTVSSSLVLVGLIMAMGLWMCSNGSMQCRICI

SEQ ID NO: 11111 - protein, 566 aa, Artificial Sequence
  derived and/or modified protein sequence (wt) from hemagglutinin__InfluenzaA__AHJ57873
MIAFIVIATLVATGKSDKICMGYHANNSTTKVDTILEKNVTVTHSVELLENQKEERFCKISNKAPLDLRDCTLEGWILGNPRCGILLADQSWSYIVERPNARNGICYPGTLNEAEELKALIGSGERVERFEMFPKSTWTGVDTESGVSSACPLGNGPSFYRNLLWIIKLKSSEYPVIRGTFNNTGDKSILYFWGVHHPPVTTEQNALYGSGDRYVRMGTESMNFARSPEIAARPAVNGQRGRIDYFWSILTPGETLNVESNGNLIAPWYAYRFVNKDSKGAIFRSNLPIENCDATCQTTEGVIRTNKTFQNVSPLWIGECPKYVKSKSLRLATGLRNVPQIETRGLFGAIAGFIEGGWTGMIDGWYGYHHENSQGSGYAADKESTQKAIDGITNKVNSIIDKMNTQFEAVGHEFSNLERRIDNLNKRMEDGFLDVWTYNAELLVLLENERTLDLHDANVKNLHEKVRSQLRDNANDLGNGCFEFWHKCDNECMESVKNGTYDYPKYQKESRLNRQKIESVKLENFDVYQILAIYSTVSSSLVLVGLILAMGLWMCSNGSMHCRICI

SEQ ID NO: 11112 - protein, 566 aa, Artificial Sequence
  derived and/or modified protein sequence (wt) from hemagglutinin__InfluenzaA__AHJ57885
MIAFIVMAILAATGKSDKICIGYHANNSTTKVDTILEKNVTVTHSVELLENQKEERFCKISNKAPLDLRDCTLEGWILGNPRCGILLADQSWSYIVERPNARNGICYPGILNEAEELKALIGSGERVERFEMFPKSTWAGVDTDSGVSSACPLGNGPSFYRNLLWIIKRKSSAYPVIRGTFNNTGDKSILYFWGVHHPPVTTEQEALYGSGNRYVRMGTESMNFARNPEIAARPAVNGQRGRIDYFWSILKPGETLNIESNGNLIAPWYAYRFVNKDSKGAIFRSNLPIEDCDASCQTTEGVIRTNKTFQNVSPLWIGECPKYVKSKSLRLATGLRNVPQIETRGLFGAIAGFIEGGWTGMIDGWYGYHHENSQGSGYAADRESTQKAIDGITNKVNSIIDKMNTQFEAVGHEFSNLERRIDNLDKRMEDGFLDVWTYNAELLVLLENERTLDLHDANVKNLHEKVRSQLRDNANDLGNGCFEFWHKCDNECMESVKNGTYDYPKYQAESRLNRQKIESVKLENFDVYQILAIYSTVSSSLVLVGLIMAMGLWMCSNGSMQCRICI

SEQ ID NO: 11113 - protein, 566 aa, Artificial Sequence
  derived and/or modified protein sequence (wt) from hemagglutinin__InfluenzaA__AHJ57897
MIAFIVIAILAATGKSDKICIGYHANNSTTKVDTILEKNVTVTHSVELLENQKEERFCKISNKAPLDLRDCTLEGWILGNPRCGILLADQSWSYIVERPNARNGICYPGILNEAEELKALIGSGERVERFEMFPKSTWAGVDTDSGVSSACPLGNGPSFYRNLLWIIKRKSSAYPVIRGTFNNTGDKSILYFWGVHHPPVTTEQEALYGSGNRYVRMGTESMNFARNPEIAARPAVNGQRGRIDYFWSILKPGETLNIESNGNLIAPWYAYRFVNKDSKGAIFRSNLPIEDCDASCQTTEGVIRTNKTFQNVSPLWIGECPKYVKSKSLRLATGLRNVPQIETRGLFGAIAGFIEGGWTGMIDGWYGYHHENSQGSGYAADRESTQKAIDGITNKVNSIIDKMNTQFEAVGHEFSNLERRIDNLNKRMEDGFLDVWTYNAELLVLLENERTLDLHDANVKNLHEKVRSQLRDNANDLGNGCFEFWHKCDNECMESVKNGTYDYPKYQAESRLNRQKIESVKLENFDVYQILAIYSTVSSSLVLVGLIMAMGLWMCSNGSMQCRICI

SEQ ID NO: 11114 - protein, 566 aa, Artificial Sequence
  derived and/or modified protein sequence (wt) from hemagglutinin__InfluenzaA__AHJ57908
MIAFIVIAILVATGKSDKICIGYHANNSTTKVDTILEKNVTVTHSVELLENQKEERFCKISNKAPLDLRDCTVEGWILGNPRCGILIADQSWSYIVERPNARNGICYPGTLNEAEELKALIGSGEGVERFEMFPKSTWAGVDTSSGVSSACPLGNGPSFYRNLLWIIKLKSSEYPVIRGTFNNTGDKSVLYFWGVHHPPVTTEQDALYGSGNRYVRMGTESMNFARSPEIAARPAVNGQRGRIDYFWSVLKPGETLNVESNGNLIAPWYAYRFVNKDNKGAIFRSNLPIENCDATCQTTEGVIRTNKTFQNVSPLWIGECPKYVKSKSLRLATGLRNVPQIETRGLFGAIAGFIEGGWTGMIDGWYGYHHENSQGSGYAADRESTQKAIDGITNKVNSIIDKMNTQFEAAGHEFSNLERRIDNLNKRMEDGFLDVWTYNAELLVLLENERTLDLHDANVKNLHEKVKSQLRDNANDLGNGCFEFWHKCDNECMESVKNGTYDYPKYQKESRLNRQRIESVKLENFDVYQILAIYSTVSSSLVVVGLIMAMGLWMCSNGSMQCMICI

SEQ ID NO: 11115 - protein, 566 aa, Artificial Sequence
  derived and/or modified protein sequence (wt) from hemagglutinin__InfluenzaA__AHJ57920
MIAIIIIAILVATGKSDKICIGYHANNSTTKVDTILEKNVTVTHSVELLENQKEERFCKISNKAPLDLRDCTIEGWILGNPWCGILLADQSWSYIVERPNARNGICYPGTLNEVEELKALIGSGERVERFEMFPKSTWAGVDTNSGVSSACPLGNGPSFYRNLLWIIKTKSSEYPVIKGTFNNTGDKSVLYFWGVHHPPSRNEQNVLYGSGDRYVRMGTESMNFARSPEIAARPAVNGQRGRIDYFWSILKPGETLNVESNGNLIAPWYAYRFVNKDSRGAIFRSNLPIENCDATCQTAEGVIRTNKTFQNVSPLWIGECPKYVKSKSLRLATGLRNVPQIETRGLFGAIAGFIEGGWTGMIDGWYGYHHENSQGSGYAADRESTQKATDGITNKVNSIIDKMNTQFEAVGHEFSNLERRIDNLNKRMEDGFLDVWTYNAELLVLLENERTLDLHDANVKNLHERVKSQLRDNANDLGNGCFEFWHKCDNECMESVKNDTYDYPKYQKESRLNRQKIESVRLENFDVYQILAIYSTVSSSLVLVGLIMAMGLWMCSNGSMQCRICI

SEQ ID NO: 11116 - protein, 566 aa, Artificial Sequence
  derived and/or modified protein sequence (wt) from hemagglutinin__InfluenzaA__AHJ57932
MIALIIITILVTTGKSDKICIGYHANNSTTKVDTILEKNVTVTHSVELLENQKEERFCRISNKAPLDLKECTLEGWILGNPQCDLLLGDQSWSYIVERPNARNGICYPGTLNEVEELRALIGSGEGVERFEMFPKSTWAGVDTNRGVTSSCPFGSGSSFYRNLLWIVKHTTSSYPVIKGTFRNTGDKSVLYFWGVHHPFDTNEQNVLYGSGNRYVRMGTESMNFARGPEVAARPVVNGQRGRIDYFWSILKPGETLNIESNGNLIAPWYAYRFVNKDSKGAIFRSNLPIEDCDATCQTIEGVIRTNKTFQNVSPLWIGECPKYVKSESLRLATGLRNVPQIETRGLFGAIAGFIEGGWTGMIDGWYGYHHENSQGSGYAADRESTQKAIDGITTKVNSIIDKMNTQFEAVGHEFSNLERRIDNLNKRLEDGFLDVWTYNAELLVLLENERTLDLHDANVKNLHERVRSQLRDNANDLGNGCFEFWHKCDNECMESVRNGTYNYPKYQAESRLNKQRIESVKLENFDVYQILAIYSTVSSSLVLVGLILAMGLWMCSNGSMQCRICI

SEQ ID NO: 11117 - protein, 566 aa, Artificial Sequence
  derived and/or modified protein sequence (wt) from hemagglutinin__InfluenzaA__AHJ57943
MIAFIVIATLVATGKSDKICIGYHANNSTTKVDTILEKNVTVTHSVELLENQKEERFCKISNKAPLDLRDCTLEGWILGNPRCGILLADQSWSYIVERPNARNGICYPGTLNEAEELKALIGSGERVERFEMFPKSTWTGVDTESGVSSACPLGNGPSFYRNLLWIIKLKSSEYPVIRGTFNNTGDKSILYFWGVHHPPVTTEQNALYGSGDRYVRMGTESMNFARSPEIAARPAVNGQRGRIDYFWSILKPGETLNVESNGNLIAPWYAYRFVNKDSKGAIFRSNLPIENCDATCQTTEGVIRTNKTFQNVSPLWIGECPKYVKSKSLRLATGLRNVPQIETRGLFGAIAGFIEGGWTGMIDGWYGYHHENSQGSGYAADKESTQKAIDGITNKVNSIIDKMNTQFETVGHEFSNLERRIDNLNKRMEDGFLDVWTYNAELLVLLENERTLDLHDANVKNLHEKVRSQLRDNANDLGNGCFEFWHKCNNECMESVKNGTYDYPKYQKESRLNRQKIESVKLENFDVYQILAIYSTVSSSLVLVGLILAMGLWMCSNGSMQCRICI

SEQ ID NO: 11118 - protein, 566 aa, Artificial Sequence
  derived and/or modified protein sequence (wt) from hemagglutinin__InfluenzaA__AHJ57954
MIAFIVIAILAATGKSDKICIGYHANNSTTKVDTILEKNVTVTHSVELLENQKEERFCKISNKAPLDLRDCTLEGWILGNPRCGILLADQSWSYIVERPNARNGICYPGILNEAEELKALIGSGERVERFEMFPKSTWAGVDTNSGVSSACPLGNGPSFYRNLLWIIKQKSSAYPVIRGTFNNTGDKSILYFWGVHHPPVTTEQEALYGSGNRYVRMGTESMNFARNPEIAARPAVNGQRGRIDYFWSILKPGETLNVESNGNLIAPWYAYRFVNKDSKGAIFRSNLPIENCDATCQTTEGVIRTNKTFQNVSPLWIGECPKYVKSKSLRLATGLRNVPQIETRGLFGAIAGFIEGGWTGMIDGWYGYHHENSQGSGYAADRESTQKAIDGITNKVNSIIDKMNTQFEAVGHEFSNLERRIDNLNKRMEDGFLDVWTYNAELLVLLENERTLDLHDANVKNLHEKVRSQLRDNANDLGNGCFEFWHKCDNECMESVKNGTYDYPKYQAESRLNRQKIESVKLENFDVYQILAIYSTVSSSLVLVGLIMAMGLWMCSNGSMQCRICI

SEQ ID NO: 11119 - protein, 566 aa, Artificial Sequence
  derived and/or modified protein sequence (wt) from hemagglutinin__InfluenzaA__AHJ57965
MIAFIIITILVTTGKSDKICIGYHANNSTTKVDTILEKNVTVTHSVELLENQKEERFCKISNKAPLDLKECTLEGWILGNPQCDLLLGDQSWSYIVERPNARNGICYPGTLNEVEELKALIGSGERVERFEMFPKSTWAGVDTNSGVTSSCSFGSGSSFYRNLLWIIKHTTSSYPVIKGTFRNTGDKSVLYFWGVHHPIDTTEQNVLYGSGNRYVRMGTESMNFARSPEIAARPVVNGQRGRIDYFWSILKPGETLNIESNGNLIAPWYAYRFVNKDSKGAIFRSNLPIENCDATCQTIEGVIRTNKTFQNVSPLWIGECPKYVKSESLRLATGLRNVPQIETRGLFGAIAGFIEGGWTGMIDGWYGYHHENSQGSGYAADRESTQRAIDGITTKVNSIIDKMNTQFEAVGHEFSNLERRIDNLNKRMEDGFLDVWTYNAELLVLLENERTLDLHDANVKNLHERVRSQLRDNANDGGNGCFEFWHKCDNECMESVKNGTYDYPKYQAESRSNRQRIESVKLENFDVYQILAIYSTVSSSLVVVWLILAMGLWMCANGSMQCRICI

SEQ ID NO: 11120 - protein, 566 aa, Artificial Sequence
  derived and/or modified protein sequence (wt) from hemagglutinin__InfluenzaA__AHJ57977
MIAFIVIAILAATGKSDKICIGYHANNSTTKVDTILEKNVTVTHSVELLENQKEERFCKISNKAPLDLRDCTIEGWILGNPRCGILLADQSWSYIVERPNARNGICYPGTLNEVEELKALIGSGERVERFEMFPKSTWAGVDTNSGVSSACPLGNGPSFYRNLLWIIKLKSSEYPVIRGTFNNTGDKSILYFWGVHHPPVTTEQEALYGSGDRYVRMGTESMNFARSPEIAARPAVNGQRGRIDYFWSILKPGETLNVESNGNLIAPWYAYRFVNKDSKGAIFRSNLPIENCDATCQTTEGVIRTNKTFQNVSPLWIGECPKYVKSKSLRLATGLRNVPQIETRGLFGAIAGFIEGGWTGMIDGWYGYHHENSQGSGYAADKESTQKAIDGITNKVNSIIDKMNTQFEAVGHEFSNLERRIDNLNKRMEDGFLDVWTYNAELLVLLENERTLDLHDANVKNLHEKVRSQLRDNANDLGNGCFEFWHKCNNECMESVKNGTYDYPKYQKESRLNRQKIESVKLENFDVYQILAIYSTVSSSLVLVGLILAMGLWMCSNGSMQCRICI

SEQ ID NO: 11121 - protein, 566 aa, Artificial Sequence
  derived and/or modified protein sequence (wt) from hemagglutinin__InfluenzaA__AHJ57989
MIAFIVIAILVTTGKSDKICIGYHANNSTTKVDTILEKNVTVTHSVELLENQKEERFCKISNKAPLDLRDCTLEGWILGNPRCGILLADQSWSYIVERPNARNGICYPGTLNEVEELKALIGSGERVERFEMFPKSTWARVDTDRGVSSACPLGNGPSFYRNLLWIVKHTTSEYPVIKGTYTNTGDKSVLYFWGVHHPPDTTEQNVLYGSGNRYVRMGTESMNFARSPEIAARPAVNGQRGRIDYFWSILKPGETLNVESNGNLIAPWYAYRFVNKDSKGAIFRSNLPIENCDATCQTTEGVIRTNKTFQNVSPMWIGECPKYVKSKSLRLATGLRNVPQIETRGLFGAIAGFIEGGWTGMIDGWYGYHHENSQGSGYAADRESTQKAIDGITNKVNSIIDKMNTQFEAVGHEFSNLERRIDNLNKRMEDGFLDVWTYNAELLVLLENERTLDLHDSNVKNLHERVKSQLRDNANDLGNGCFEFWHKCDNECMESVKNGTYNYPKYQAESRLNRQKIESVKLEEFGVYQILAIYSTVSSSLVLVGLIMAMGLWMCSNGSMQCRICI

SEQ ID NO: 11122 - protein, 566 aa, Artificial Sequence
  derived and/or modified protein sequence (wt) from hemagglutinin__InfluenzaA__AHJ58001
MIAFIVIAILAATGKSDKICIGYHANNSTTKVDTILEKNVTVTHSVELLENQKEERFCKISNKAPLDLRDCTLEGWILGNPRCGILLADQSWSYIVERPNARNGICYPGILNEAEELKALIGSGERVERFEMFPKSTWAGVDTDSGVSSACPLGNGPSFYRNLLWIIKLKSSEYPVIRGTFNNTGDKSILYFWGVHHPPVTTEQEALYGSGNRYVRMGTESMNFARSPEIAARPAVNGQRGRIDYFWSILKPGETLNVESNGNLIAPWYAYRFVNKDSKGAIFRSNLPIENCDATCQTTEGVIRTNKTFQNVSPMWIGECPKYVKSKSLRLATGLRNVPQIETRGLFGAIAGFIEGGWTGMIDGWYGYHHENSQGSGYAADRESTQKAIDGITNKVNSIIDKMNTQFEAVGHEFSNLERRIDNLNKRMEDGFLDVWTYNAELLVLLENERTLDLHDANVKNLHEKVRSQLRDNANDLGNGCFEFWHKCDNECMESVKNGTYDYPKYQTESRLNRQKIESVKLENFDVYQILAIYSTVSSSLVLVGLIMAMGLWMCSNGSMQCRICI

SEQ ID NO: 11123 - protein, 566 aa, Artificial Sequence
  derived and/or modified protein sequence (wt) from hemagglutinin__InfluenzaA__AHJ58013
MIAFIVIAILVTTGKSDKICIGYHANNSTTKVDTILEKNVTVTHSVELLENQKEERFCKISSKAPLDLRDCSLEGWILGNPRCGILLADQSWSYIVERPNARNGICYPGTLNEVEELKALIGSGERVERFEMFPKSTWAGVDTNSGVSSACPLGEGPSFYRNLLWIIKRTTSEYPVIKGTYRNTGDKSVLYFWGVHHPPDTTEQNVLYGSGNRYVRMGTESMNFARSPEIAARPAVNGQRGRIDYFWSILKPGETLDVESNGNLIAPWYAYRFVNKESKGAIFRSNLPIENCDATCQTTEGVIRTNKTFQNVSPLWIGECPKYVKSKSLRLATGLRNVPQIETRGLFGAIAGFIEGGWTGMIDGWYGYHHENSQGSGYAADKESTQKAIDGITNKVNSIIDKMNTQFEAVGHEFSTLERRIDNLNKRMEDGFLDVWTYNAELLVLLENERTLDLHDANVKNLHERVRSQLRDNANDLGNGCFEFWHKCDNECMESVKNGTYNYPKYQAESRLNKQKIESVKLEEFGVYQILAIYSTVSSSLVLVGLIMAMGLWMCSNGSMQCRICI

SEQ ID NO: 11124 - protein, 566 aa, Artificial Sequence
  derived and/or modified protein sequence (wt) from hemagglutinin__InfluenzaA__AHJ58025
MIAFIVIAILVTTGESDKICIGYHANNSTTKVDTILEKNVTVTHSVELLENQKEERFCKISNKAPLDLRDCTIEGWILGNPRCGILLADQSWSYIVERPNARNGICYPGTLNEAEELKALIGSGEGVERFEMFPKSTWAGVDTNSGVSSACPLGNGPSFYRNLLWIIKLKSSEYPVIRGTFNNTGDKSVLYFWGVHHPPVTTEQNDLYGSGNRYVRMGTESMNFARNPEIALRPAVNGQRGRIDYFWSILKPGETLNVESNGNLIAPWYAYRFVNKDSKGAIFRSSLPIENCDATCQTAEGVIRTNKTFQNVSPLWIGECPKYVKSKSLRLATGLRNVPQIETRGLFGAIAGFIEGGWTGMVDGWYGYHHENSQGSGYAADRESTQKAIDGITNKVNSIIDKMNTQFEAVDHEFSNLERRIDNLNKRMEDGFLDVWTYNAELLVLLENERTLDLHDANVKNLHEKVKSQLRDNANDLGNGCFEFWHKCDNECMESVKNGTYNYPKYQKESRLNRQKIESVKLENFDVYQILAIYSTVSSSLVLVGLIMAMGLWMCSNGSMQCRICI

SEQ ID NO: 11125 - protein, 566 aa, Artificial Sequence
  derived and/or modified protein sequence (wt) from hemagglutinin__InfluenzaA__AHJ58037
MIAFIIITILVTTGESDKICIGYHANNSTTKVDTILEKNVTVTHSVELLENQKEERFCKISNKAPLDLKECTLEGWILGNPQCDLLLGDQSWSYIVERPNARNGICYPGTLNEVEELKALIGSGERVERFEMFPKSTWAGVDTNSGVTRSCPFGSGSSFYRNLLWIIKHTTSSYPVIKGTFRNTGDKSVLYFWGVHHPIDTTEQNVLYGSGNRYVRMGTESMNFARSPEIAARPVVNGQRGRIDYFWSILKPGETLNIESNGNLIAPWYAYRFVNKDSKGAIFRSNLPIENCDATCQTIEGVIRTNKTFQNVSPLWIGECPKYVKSESLRLATGLRNVPQIETRGLFGAIAGFIEGGWTGMIDGWYGYHHENSQGSGYAADRESTQRAIDGITTKVNSIIDKMNTQFEAVGHEFSNLERRIDNLNKRMEDGFLDVWTYNAELLVLLENERTLDLHDANVKNLHERVKSQLRDNANDLGNGCFEFWHKCDNECMESVKNGTYDYPKYQAESRLNKQRIESVKLENFDVYQILAIYSTVSSSLVLVGLIMAIGLWMCSNGSMQCRICI

SEQ ID NO: 11126 - protein, 566 aa, Artificial Sequence
  derived and/or modified protein sequence (wt) from hemagglutinin__InfluenzaA__AHJ58049
MIAFIVIAILAATGKSDKICIGYHANNSTTKVDTILEKNVTVTHSVELLENQKEERFCKISNKAPLDLRDCTLEGWILGNPRCGILLADQSWSYIVERPNARNGICYPGILNEAEELKALIGSGERVERFEMFPKSTWAGVDTDSGVSSACPLGNGPSFYRNLLWIIKLKSSEYPVIRGTFNNTGDKSILYFWGVHHPPVTTEQEALYGSGNRYVRMGTESMNFARTPEIAARPAVNGQRGRIDYFWSILKPGETLNVESNGNLIAPWYAYRFVNKDSKGAIFRSNLPIENCDATCQTTEGVIRTNKTFQNVSPLWIGECPKYVKSKSLRLATGLRNVPQIETRGLFGAIAGFIEGGWTGMIDGWYGYHHENSQGSGYAADRESTQKAIDGITNKVNSIIDKMNTQFEAVGHEFSNLERRIDNLNKRMEDGFLDVWTYNAELLVLLENERTLDLHDANVKNLHEKVRSQLRDNANDLGNGCFEFWHKCDNECMESVKNGTYDYPKYQAESRLNRQKIESVKLENFDVYQILAIYSTVSSSLVLVGLIMAMGLWMCSNGSMQCRICI

SEQ ID NO: 11127 - protein, 566 aa, Artificial Sequence
  derived and/or modified protein sequence (wt) from hemagglutinin__InfluenzaA__AHJ58061
MIAFIVIATLVATGKSDKICIGYHANNSTTKVDTILEKNVTVTHSVELLENQKEERFCKISNKAPLDLRDCTLEGWILGNPRCGILLADQSWSYIVERPNARNGICYPGTLNEAEELKALIGSGERVERFEMFPKSTWTGVDTESGVSSACPLGNGPSFYRNLLWIIKLKSSEYPVIRGTFNNTGDKSILYFWGVHHPPVTTEQNALYGSGDRYVRMGTESMNFARSPEIAARPAVNGQRGRIDYFWSILKPGETLNVESNGNLIAPWYAYRFVNKDSKGAIFRSNLPIENCDATCQTTEGVIRTNKTFQNVSPLWIGECPKYVKSKSLRLATGLRNVPQIETRGLFGAIAGFIEGGWTGMIDGWYGYHHENSQGSGYAADKESTQKAIDGITNKVNSIIDKMNTQFEAVGHEFSNLERRIDNLNKRMEDGFLDVWTYNAELLVLLENERTLDLHDANVKNLHEKVRSQLRDNANDLGNGCFEFWHKCNNECMESVKNGTYDYPKYQKESRLNRQKIESVKLENFDVYQILAIYSTVSSSLVLVGLILAMGLWMCSNGSMQCRICI

SEQ ID NO: 11128 - protein, 566 aa, Artificial Sequence
  derived and/or modified protein sequence (wt) from hemagglutinin__InfluenzaA__AHJ58084
MIAFIVIATLVATGKSDKICIGYHANNSTTKVDTILEKNVTVTHSVELLENQKEERFCKISNKAPLDLRDCTLEGWILGNPRCGILLADQSWSYIVERPNARNGICYPGTLNEAEELKALIGSGERVERFEMFPKSTWTGVNTESGVSSACPLGNGPSFYRNLLWIIKLKSSEYPVIRGTFNNTGDKSILYFWGVHHPPVTTEQNALYGSGDRYVRMGTESMNFARSPEIAARPAVNGQRGRIDYFWSILKPGETLNVESNGNLIAPWYAYRFVNKDSKGAIFRSNLPIENCDATCQTTEGVIRTNKTFQNVSPLWIGECPKYVKSKSLRLATGLRNVPQIETRGLFGAIAGFIEGGWTGMIDGWYGYHHENSQGSGYAADKESTQKAIDGITNKVNSIIDKMNTQFEAVGHEFSNLERRIDNLNKRMEDGFLDVWTYNAELLVLLENERTLDLHDANVKNLHEKVRSQLRDNANDLGNGCFEFWHKCNNECMESVKNGTYDYPKYQKESRLNRQKIESVKLENFDVYQILAIYSTVSSSLVLVGLILAMGLWMCSNGSMQCRICI

SEQ ID NO: 11129 - protein, 566 aa, Artificial Sequence; identical to SEQ ID NO: 6855
  derived and/or modified protein sequence (wt) from hemagglutinin__InfluenzaA__AHL80708

SEQ ID NO: 11130 - protein, 566 aa, Artificial Sequence
  derived and/or modified protein sequence (wt) from hemagglutinin__InfluenzaA__AHL80718
MKAILVVLLYTFATANADTLCIGYHANNSTDTVDTVLEKNVTVTHSVNLLEDKHNGKLCKLRGVAPLHLGKCNIAGWILGNPECESLSTASSWSYIVETSSSDNGTCYPGDFINYEELREQLSSVSSFERFEIFPKISSWPNHDSNKGVTAACPHAGAKSFYKNLIWLVKKGNSYPKLSKSYINDKGKEVLVLWGIHHPSTTADQQSLYQNADAYVFVGTSRYSKKFKPEIAIRPKVRDQEGRMNYYWTLVEPGDKITFEATGNLVVPRYAFAMERNAGSGIIISDTSVHDCNTTCQTPKGAINTSLPFQNIHPITIGKCPKYVKSTKLRLATGLRNVPSIQSRGLFGAIAGFIEGGWTGMVDGWYGYHHQNEQGSGYAADLKSTQNAIDKITNKVNSVIEKMNTQFTAVGKEFNHLEKRIENLNKKVDDGFLDIWTYNAELLVLLENERTLDYHDSNVKNLYEKVRSQLKNNAKEIGNGCFEFYHKCDNTCMESVKNGTYDYPKYSEEAKLNREEIDGVKLESTRIYQILAIYSTVASSLVLVVSLGAISFWMCSNGSLQCRICI

SEQ ID NO: 11131 - protein, 569 aa, Artificial Sequence
  derived and/or modified protein sequence (wt) from hemagglutinin__InfluenzaA__AHL80729
MKAILVVLLYTFATANADTLCIGYHANNSTDTVDTVLEKNVTVTHSVNLLEDKHNGKLCKLRGVAPLHLGECNIAGWILGNPECESLSTASSWSYIVETSSSDNGTCYPGDFIDYEELREQLSSVSSFERFEIFPKTSSWPNHDSNKGVTAACPHAGAKSFYKNLIWLVKKGNSYPKLSKSYINDKGKEVLVLWGIHHPSTSADQQSLYQNADAYVFVGTSRYSKKFKPEIAIRPKVRDQEGRMNYYWTLVEPGDKITFEATGNLVVPRYAFAMERNAGSGIIISDTPVHDCNTTCQTPKGAINTSLTSLPFQNVHPITIGKCPKYVKSTKLRLATGLRNVPSIQSRGLFGAIAGFIEGGWTGMVDGWYGYHHQNEQGSGYAADLKSTQNAIDEITNKVNSVIEKMNTQFTAVGKEFNHLEKRIENLNKKVDDGFLDIWTYNAELLVLLENERTLDYHDSNVKNLYEKVRSQLKNNAKEIGNGCFEFYHKCDNTCMESVKNGTYDYPKYSEEAKLNREEIDGVKLESTRIYQILAIYSTVASSLVLVVSLGAISFWMCSNGSLQCRICI

SEQ ID NO: 11132 - protein, 566 aa, Artificial Sequence
  derived and/or modified protein sequence (wt) from hemagglutinin__InfluenzaA__AHL80740
MKAILVVLLYTFATANADTLCIGYHANNSTDTVDTVLEKNVTVTHSVNLLEDKHNGKLCKLRGVAPLHLGKCNIAGWILGNPECELLSTASSWSYIVETSSSDNGTCYPGDFINYEELREQLSSVSSFERFEIFPKTSSWPNHDSNKGVTAACPHAGAKSFYKNLIWLVKKGNSYPKLSKSYINDKGKEVLVLWGVHHPSTSADQQSLYQNADAYVFVGTSRYSKKFKPEIAIRPKVRDQEGRMNYYWTLVEPGDKITFEATGNLVVPRYAFAMERNAGSGIIISDTPVHDCNTTCQTPKGAINTSLPFQNIHPITIGKCPKYVKSTKLRLATGLRNVPSIQSRGLFGAIAGFIEGGWTGMVDGWYGYHHQNEQGSGYAADLKSTQNAIDKITNKVNSVIEKMNTQFTAVGKEFNHLEKRIENLNKKVDDGFLDIWTYNAELLVLLENERTLDYHDSNVKNLYEKVRSQLKNNAKEIGNGCFEFYHKCDNTCMESVKNGTYDYPKYSEEAKLNREKIDGVKLESTRIYQILAIYSTVASSLVLVVSLGAISFWMCSNGSLQCRICI

SEQ ID NO: 11133 - protein, 566 aa, Artificial Sequence
  derived and/or modified protein sequence (wt) from hemagglutinin__InfluenzaA__AHL80751
MKAILVVLLYTFATANADTLCIGYHANNSTDTVDTILEKNVTVTHSVNLLEDKHNGKLCKLRGVAPLHLGKCNIAGWILGNPECESLSTASSWSYIVETSSSDNGTCYPGDFIDYEELREQLSSVSSFERFEIFPKTSSWPNHDSNKGVTAACPHAGAKSFYKNLIWLVKKGNSYPKLSKSYINDKGKEILVLWGIHHPSTSADQQSLYQNADAYVFVGTSRYSKKFKPEIAIRPKVRDQEGRMNYYWTLVEPGDKITFEATGNLVVPRYAFAMEKNAGSGIIISDTPVHDCNTTCQTPKGAINTSLPFQNIHPITIGKCPKYVKSTKLRLATGLRNVPSIQSRGLFGAIAGFIEGGWTGMVDGWYGYHHQNEQGSGYAADLKSTQNAIDEITNKVNSVIEKMNTQFTAVGKEFNHLEKRIENLNKKVDDGFLDIWTYNAELLVLLENERTLDYHDSNVKNLYEKVRSQLKNNAKEVGNGCFEFYHKCDNTCMESVKNGTYDYPKYSEEAKLNREEIDGVKLESTRIYQILAIYSTVASSLVLVVSLGAISFWMCSNGSLQCRICI

SEQ ID NO: 11134 - protein, 566 aa, Artificial Sequence
  derived and/or modified protein sequence (wt) from hemagglutinin__InfluenzaA__AHL80762
MKAILVVLLYTFATANADTLCIGYHANNSTDTVDTVLEKNVTVTHSVNLLEDKHNGKLCKLRGVAPLHLGKCNIAGWILGNPECESLSTASSWSYIVETSSSDNGTCYPGDFINYEELREQLSSVSSFERFEIFPKTSSWPNHDSNKGVTAACPHAGAKSFYKNLIWLVKKGNSYPKLSKSYINDKGKEVLVLWGIHHPSTSADQQSLYQNADAYVFVGTSRYSKKFKPEIAIRPKVRDQEGRMNYYWILVEPGDKITFEATGNLVVPRYAFAMERNAGSGIIISDTPVHDCNTTCQTPKGAINTSLPFQNIHPITIGKCPKYVKSTKLRLATGLRNVPSIQSRGLFGAIAGFIEGGWTGMVDGWYGYHHQNEQGSGYAADLKSTQNAIDKITNKVNSVIEKMNTQFTAVGKEFNHLEKRIENLNKKVDDGFLDIWTYNAELLVLLENERTLDYHDSNVKNLYEKVRSQLKDNAKEIGNGCFEFYHKCDNTCMESVKNGTYDYPKYSEEAKLNREEIDGVKLESTRIYQILAIYSTVASSLVLVVSLGAISFWMCSNGSLQCRICI

SEQ ID NO: 11135 - protein, 566 aa, Artificial Sequence
  derived and/or modified protein sequence (wt) from hemagglutinin__InfluenzaA__AHL80784
MKAILVVLLYTFATANADTLCIGYHANNSTDTVDTVLEKNVTVTHSVNLLEDKHNGKLCKLRGVAPLHLGKCNIAGWILGNPECESLSTASSWSYIVETSSSDNGTCYPGDFIDYEELREQLSSVSSFERFEIFPKTSSWPNHDSNKGITAACPHAGAKSFYKNLIWLVKKGNSYPKLSKSYINDKGKEVLVLWGIHHPSTSADQQSLYQNADAYVFVGTSRYSKKFKPEIAIRPKVRDQEGRMNYYWTLVEPGDKITFEATGNLVVPRYAFAMERNAGSGIIISDTPVHDCNTTCQTPKGAINTSLPFQNIHPITIGKCPKYVKSTKLRLATGLRNVPSIQSRGLFGAIAGFIEGGWTGMVDGWYGYHHQNEQGSGYAADLKSTQNAIDKITNKVNSVIEKMNTQFTAVGKEFNHLEKRIENLNKKVDDGFLDIWTYNAELLVLLENERTLDYHDSNVKNLYEKVRSQLKNNAKEIGNGCFEFYHKCDNTCMESVKNGTYDYPKYSEEAKLNREEIDGVKLESTRIYQILAIYSTVASSLVLVVSLGAISFWMCSNGSLQCRICI

SEQ ID NO: 11136 - protein, 566 aa, Artificial Sequence; identical to SEQ ID NO: 3833
  derived and/or modified protein sequence (wt) from hemagglutinin__InfluenzaA__AHL80795

SEQ ID NO: 11137 - protein, 566 aa, Artificial Sequence
  derived and/or modified protein sequence (wt) from hemagglutinin__InfluenzaA__AHL80817
MKAILVVLLYTFATANADTLCIGYHANNSTDTVDTVLEKNVTVTHSVNLLEDKHNGKLCKLRGVAPLHLGNCNIAGWILGNPECESLSTASSWSYIVEASSSDNGTCYPGDFIDYEELREQLSSVSSFERFEIFPKTSSWPNHDSNKGVTAACPHAGAKSFYKNLIWLVKKGNSYPKLSKSYINDKGKEVLVLWGIHHPSTSADQQSLYQNADAYVFVGTSRYSKKFKPEIAIRPKVRDQEGRMNYYWTLVEPGDKITFEATGNLVVPRYAFAMERNAGSGIIISDTPVHDCNTTCQTPKGAINTSLPFQNIHPITIGKCPKYVKSTKLRLATGLRNVPSIQSRGLFGAIAGFIEGGWTGMVDGWYGYHHQNEQGSGYAADLKSTQNAIDKITNKVNSVIEKMNTQFTAVGKEFNHLEKRIENLNKKVDDGFLDIWTYNAELLVLLENERTLDYHDSNVKNLYEKVRSQLKNNAKEIGNGCFEFYHKCDNTCMESVKNGTYDYPKYSEEAKLNREEIDGVKLESTRIYQILAIYSTVASSLVLVVSLGAISFWMCSNGSLQCRICI

SEQ ID NO: 11138 - protein, 566 aa, Artificial Sequence; identical to SEQ ID NO: 11137
  derived and/or modified protein sequence (wt) from hemagglutinin__InfluenzaA__AHL80828

SEQ ID NO: 11139 - protein, 566 aa, Artificial Sequence
  derived and/or modified protein sequence (wt) from hemagglutinin__InfluenzaA__AHL80839
MKAILVVLLYTFATANADTLCIGYHANNSTDTVDTVLEKNVTVTHSVNLLEDKHNGKLCKLRGVAPLHLGKCNIAGWILGNPECESLSTASSWSYIVETSSSDNGTCYPGDFIDYEELREQLSSVSSFERFEIFPKTSSWPNHDSNKGITAACPHAGAKSFYKNLIWLVKKGNSYPKLSRSYINDKGKEVLVLWGIHHPSTSADQQSLYQNADAYVFVGTSRYSKKFKPEIAIRPKVRDQEGRMNYYWTLVEPGDKITFEATGNLVVPRYAFAMERNAGSGIIISDTPVHDCNTTCQTPKGAINTSLPFQNIHPITIGKCPKYVKSTKLRLATGLRNVPSIQSRGLFGAIAGFIEGGWTGMVDGWYGYHHQNEQGSGYAADLKSTQNAIDKITNKVNSVIEKMNTQFTAVGKEFNHLEKRIENLNKKVDDGFLDIWTYNAELLVLLENERTLDYHDSNVKNLYEKVRSQLKNNAKEIGNGCFEFYHKCDNTCMESVKNGTYDYPKYSEEAKLNREEIDGVKLESTRIYQILAIYSTVASSLVLVVSLGAISFWMCSNGSLQCRICI

SEQ ID NO: 11140 - protein, 566 aa, Artificial Sequence
  derived and/or modified protein sequence (wt) from hemagglutinin__InfluenzaA__AHL80861
MKAILVVLLYTFATANADTLCIGYHANNSTDTVDTVLEKNVTVTHSVNLLEDKHNGKLCKLRGVAPLHLGKCNIAGWILGNPECESLSTASSWSYIVETSSSDNGTCYPGDFIDYEELREQLSSVSSFERFEIFPKTSSWPNHDSNKGVTAACPHAGAKSFYKNLIWLVKKGNSYPKLSKSYINDKGKEVLVLWGIHHPSTSADQQSLYQNADAYVFVGTSRYSKKFKPEIAIRPKVRDQEGRMNYYWTLVEPGDKITFEATGNLVVPRYAFAMERNAGSGIIISDTPVHDCNTTCQTPKGAINTSLPFQNIHPITIGKCPKYVKSTKLRLATGLRNVPSIQSRGLFGAIAGFIEGGWTGMVDGWYGYHHQNEQGSGYAADLKSTQNAIDKITNKVNSVIEKMNTQFTAVGKEFNHLEKRIGNLNKKVDDGFLDIWTYNAELLVLLENERTLDYHDSNVKNLYEKVRSQLKNNAKEIGNGCFEFYHKCDNTCMESVKNGTYDYPKYSEEAKLNREEIDGVKLESTRIYQILAIYSTVASSLVLVVSLGAISFWMCSNGSLQCRICI

SEQ ID NO: 11141 - protein, 566 aa, Artificial Sequence
  derived and/or modified protein sequence (wt) from hemagglutinin__InfluenzaA__AHL80872
MKAILVVLLYTFATANADTLCIGYHANNSTDTVDTVLEKNVTVTHSVNLLEDKHNGKLCKLRGVAPLHLGKCNIAGWILGNPECESLSTASSWSYIVETSSSDNGTCYPGDFIDYEELREQLSSVSSFERFEIFPKTSSWPNHDSNKGVTAACPHAGAKSFYKNLIWLVKKGNSYPKLSKSYINDKGKEVLVLWGIHHPSTNADQQSLYQNADAYVFVGTSRYSKKFKPEIAIRPKVRDQEGRMNYYWTLVEPGDKITFEATGNLVVPRYAFAMERNAGSGIIISDTPVHDCNTTCQTPKGAINTSLPFQNIHPITIGKCPKYVKSTKLRLATGLRNVPSIQSRGLFGAIAGFIEGGWTGMVDGWYGYHHQNEQGSGYAADLKSTQNAIDKITNKVNSVIEKMNTQFTAVGKEFNHLEKRIENLNKKVDDGFLDIWTYNAELLVLLENERTLDYHDSNVKNLYEKVRSQLKNNAKEIGNGCFEFYHKCDNTCMESVKNGTYDYPKYSEEAKLNREEIDGVKLESTRIYQILAIYSTVASSLVLVVSLGAISFWMCSNGSLQCRICI

SEQ ID NO: 11142 - protein, 566 aa, Artificial Sequence; identical to SEQ ID NO: 3833
  derived and/or modified protein sequence (wt) from hemagglutinin__InfluenzaA__AHL80883

SEQ ID NO: 11143 - protein, 566 aa, Artificial Sequence; identical to SEQ ID NO: 3833
  derived and/or modified protein sequence (wt) from hemagglutinin__InfluenzaA__AHL80894

SEQ ID NO: 11144 - protein, 566 aa, Artificial Sequence; identical to SEQ ID NO: 3833
  derived and/or modified protein sequence (wt) from hemagglutinin__InfluenzaA__AHL80905

SEQ ID NO: 11145 - protein, 566 aa, Artificial Sequence; identical to SEQ ID NO: 6454
  derived and/or modified protein sequence (wt) from hemagglutinin__InfluenzaA__AHL80916

SEQ ID NO: 11146 - protein, 566 aa, Artificial Sequence; identical to SEQ ID NO: 6855
  derived and/or modified protein sequence (wt) from hemagglutinin__InfluenzaA__AHL80927

SEQ ID NO: 11147 - protein, 566 aa, Artificial Sequence; identical to SEQ ID NO: 6855
  derived and/or modified protein sequence (wt) from hemagglutinin__InfluenzaA__AHL80946

SEQ ID NO: 11148 - protein, 566 aa, Artificial Sequence
  derived and/or modified protein sequence (wt) from hemagglutinin__InfluenzaA__AHL80958
MKAILVVLLYTFATANADTLCIGYHANNSTDTVDTVLEKNVTVTHSVNLLEDKHNGKLCKLRGVAPLHLGKCNIAGWILGNPECESLSTASSWSYIVETSSSDNGTCYPGDFINYEELREQLSSVSSFERFEIFPKISSWPNHDSNKGVTAACPHAGAKSFYKNLIWLVKKGNSYPKLSKSYINDKGKEVLVLWGIHHPSTTADQQSLYQNADAYVFVGTSRYSKKFKPEIAIRPKVRDQEGRMNYYWTLVEPGDKITFEATGNLVVPRYAFAMERNAGSGIIISDTSVHDCNTTCQTPKGAINTSLPFQNIHPITIGKCPKYVKSTKLRLATGLRNVPSIQSRGLFGAIAGFIEGGWTGMVDGWYGYHHQNEQGSGYAADLKSTQNAIDKITNKVNSVIEKMNTQFTAVGKEFNHLEKRIENLNKKVDDGFLDIWTYNAELLVLLENERTLDYHDSNVKNLYEKVRNQLKNNAKEIGNGCFEFYHKCDNTCMESVKNGTYDYPKYSEEAKLNREEIDGVKLESTRIYQILAIYSTVASSLVLVVSLGAISFWMCSNGSLQCRICI

SEQ ID NO: 11149 - protein, 566 aa, Artificial Sequence
  derived and/or modified protein sequence (wt) from hemagglutinin__InfluenzaA__AHL81001
MKTIIALSYILCLIFAQKLPGNDNSTATLCLGHHAVPNGTIVKTITNDQIEVTNATELVQSSSTGEICNSPHQILDGENCTLIDALLGDPQCDGFQNKKWDLFVERSKAHSNCYPYDVPDYASLRSLVASSGTLEFNNESFNWTGVTQNGTSSACIRRSNNSFFSRLNWLTHLNFKYPALNVTMPNNEQFDKLYIWGVHHPGTDKDQIFLYAQAAGRITVSTKRSQQAVIPNIGSRPRVRNIPSRVSIYWTIVKPGDILLINSTGNLIAPRGYFKIRSGKSSIMRSDAPIGKCNSACITPNGSIPNDKPFQNVNRITYGACPRYVKQNTLKLATGMRNVPEKQTRGIFGAIAGFIENGWEGMVDGWYGFRHQNSEGRGQAADLKSTQAAIDQINGKLNRLIGKTNEKFHQIEKEFSEVEGRIQDLEKYVEDTKIDLWSYNAELLVALENQHTIDLTDSEMNKLFEKTKKQLRENAEDMGNGCFKIYHKCDNACIGSIRNGTYDHDVYRDEALNNRFQIKGVELKSGYKDWILWISFAISCFLLCVALLGFIMWACQKGNIRCNICI

SEQ ID NO: 11150 - protein, 566 aa, Artificial Sequence; identical to SEQ ID NO: 6855
  derived and/or modified protein sequence (wt) from hemagglutinin__InfluenzaA__AHL81013

SEQ ID NO: 11151 - protein, 566 aa, Artificial Sequence; identical to SEQ ID NO: 6855
  derived and/or modified protein sequence (wt) from hemagglutinin__InfluenzaA__AHL81025

SEQ ID NO: 11152 - protein, 566 aa, Artificial Sequence; identical to SEQ ID NO: 6855
  derived and/or modified protein sequence (wt) from hemagglutinin__InfluenzaA__AHL81037

SEQ ID NO: 11153 - protein, 566 aa, Artificial Sequence; identical to SEQ ID NO: 6855
  derived and/or modified protein sequence (wt) from hemagglutinin__InfluenzaA__AHL81049

SEQ ID NO: 11154 - protein, 566 aa, Artificial Sequence; identical to SEQ ID NO: 11148
  derived and/or modified protein sequence (wt) from hemagglutinin__InfluenzaA__AHL81061

SEQ ID NO: 11155 - protein, 566 aa, Artificial Sequence; identical to SEQ ID NO: 11148
  derived and/or modified protein sequence (wt) from hemagglutinin__InfluenzaA__AHL81072

SEQ ID NO: 11156 - protein, 566 aa, Artificial Sequence; identical to SEQ ID NO: 8361
  derived and/or modified protein sequence (wt) from hemagglutinin__InfluenzaA__AHL81083

SEQ ID NO: 11157 - protein, 566 aa, Artificial Sequence; identical to SEQ ID NO: 6855
  derived and/or modified protein sequence (wt) from hemagglutinin__InfluenzaA__AHL81095

SEQ ID NO: 11158 - protein, 566 aa, Artificial Sequence
  derived and/or modified protein sequence (wt) from hemagglutinin__InfluenzaA__AHL81118
MKAILVVLLYTFATANADTLCIGYHANNSTDTVDTVLEKNVTVTHSVNLLEDKHNGKLCKLRGVAPLHLGKCNIAGWILGNPECESLSTASSWSYIVETSSSDNGTCYPGDFINYEELREQLSSVSSFERFEIFPKTNSWPNHDSNKGVTAACPHAGAKSFYKNLIWLVKKGNSYPKLSKSYINDKGKEVLVLWGIHHPSTTADQQSLYQNADAYVFVGTSRYSKKFKPEIAIRPKVRDQEGRMNYYWTLVEPGDKITFEATGNLVVPRYAFAMERNAGSGIIISDTPVHDCNTTCQTPKGAINTSLPFQNIHPITIGKCPKYVKSTKLRLATGLRNVPSIQSRGLFGAIAGFIEGGWTGMVDGWYGYHHQNEQGSGYAADLKSTQNAIDKITNKVNSVIEKMNTQFTAVGKEFNHLEKRIENLNKKVDDGFLDIWTYNAELLVLLENERTLDYHDSNVKNLYEKVRNQLKNNAKEIGNGCFEFYHKCDNTCMESVKNGTYDYPKYSEEAKLNREEIDGVKLESTRIYQILAIYSTVASSLVLVVSLGAISFWMCSNGSLQCRICI

SEQ ID NO: 11159 - protein, 566 aa, Artificial Sequence; identical to SEQ ID NO: 6855
  derived and/or modified protein sequence (wt) from hemagglutinin__InfluenzaA__AHL81129

SEQ ID NO: 11160 - protein, 566 aa, Artificial Sequence; identical to SEQ ID NO: 6855
  derived and/or modified protein sequence (wt) from hemagglutinin__InfluenzaA__AHL81141

SEQ ID NO: 11161 - protein, 566 aa, Artificial Sequence; identical to SEQ ID NO: 6855
  derived and/or modified protein sequence (wt) from hemagglutinin__InfluenzaA__AHL81153

SEQ ID NO: 11162 - protein, 566 aa, Artificial Sequence
  derived and/or modified protein sequence (wt) from hemagglutinin__InfluenzaA__AHL81165
MKTIIALSYILCLVFAQKLPGNDNSTATLCLGHHAVPNGTIVKTITNDQIEVTNATELVQSSSAGEICDSPHQILDGENCTLIDALLGDPQCDGFQNKKWDLFVERSRAYSNCYPYDVPDYASLRSLVASSGTLEFNNESFNWTGVTQNGTSSACIRRSNNSFFSRLNWLTHLNFKYPALNVTMPNNEQFDKLYIWGVHHPGTDKDQIFLYAQASGRITVSTKRSQQAVIPNIGSRPRVRNIPSRISIYWTIVKPGDILLINSTGNLIAPRGYFKIRSGKSSIMRSDAPIGKCNSECITPNGSIPNDKPFQNVNRITYGACPRYVKQSTLKLATGMRNVPEKQTRGIFGAIAGFIENGWEGMMDGWYGFRHQNSEGRGQAADLKSTQAAIDQINGKLNRLIGKTNEKFHQIEKEFSEVEGRIQDLEKYVEDTKIDLWSYNAELLVALENQHTIDLTDSEMNKLFEKTKKQLRENAEDMGNGCFKIYHKCDNACIGSIRNGTYDHDVYRDEALNNRFQIKGVELKSGYKDWILWISFAISCFLLCVALLGFIMWACQKGNIRCNICI

SEQ ID NO: 11163 - protein, 566 aa, Artificial Sequence; identical to SEQ ID NO: 11162
  derived and/or modified protein sequence (wt) from hemagglutinin__InfluenzaA__AHL81177

SEQ ID NO: 11164 - protein, 566 aa, Artificial Sequence; identical to SEQ ID NO: 11149
  derived and/or modified protein sequence (wt) from hemagglutinin__InfluenzaA__AHL81189

SEQ ID NO: 11165 - protein, 566 aa, Artificial Sequence
  derived and/or modified protein sequence (wt) from hemagglutinin__InfluenzaA__AHL81212
MKTIIALSYILCLVFAQKLPGNDNSTATLCLGHHAVPNGTIVKTITNDQIEVTNATELVQSSSTGEICNSPHQILDGENCTLIDALLGDPQCDGFQNKKWDLFVERSKAHSNCYPYDVPDYASLRSLVASSGTLEFKNESFNWTGVTQNGTSSACIRRSNNSFFSRLNWLTHLNFKYPALNVTMPNNEQFDKLYIWGVHHPGTDKDQIFLYAQAAGRITVSTKRSQQAVIPNIGSRPRVRNIPSRVSIYWTIVKPGDILLINSTGNLIAPRGYFKIRSGKSSIMRSDAPIGKCNSACITPNGSIPNDKPFQNVNRITYGACPRYVKQNTLKLATGMRNVPEKQTRGIFGAIAGFIENGWEGMVDGWYGFRHQNSEGRGQAADLKSTQAAIDQINGKLNRLIGKTNEKFHQIEKEFSEVEGRIQDLEKYVEDTKIDLWSYNAELLVALENQHTIDLTDSEMNKLFEKTKKQLRENAEDMGNGCFKIYHKCDNACIGSIRNGTYDHDVYRDEALNNRFQIKGVELKSGYKDWILWISFAISCFLLCVALLGFIMWACQKGNIRCNICI

SEQ ID NO: 11166 - protein, 566 aa, Artificial Sequence
  derived and/or modified protein sequence (wt) from hemagglutinin__InfluenzaA__AHL81224
MKAILVVLLYTFATANADTLCIGYHANNSTDTVDTVLEKNVTVTHSVNLLEDKHNGKLCKLRGVAPLHLGKCNIAGWILGNPECESLSTASSWSYIVETSSSDNGTCYPGDFIDYEELREQLSSVSSFERFEIFPKTSSWPNHDSNKGVTAACPHAGAKGFYKNLIWLVKKGNSYPKLSKSYINDKGKEVLVLWGIHHPSTTADQQSLYQNADTYVFVGTSRYSKKFKPEIAIRPKVRDQEGRMNYYWTLVEPGDKITFEATGNLVVPRYAFAMERTAGSGIIISDTPVHDCNTTCQTPKGAINTSLPFQNIHPITIGKCPKYVKSTKLRLATGLRNVPSIQSRGLFGAIAGFIEGGWTGMVDGWYGYHHQNEQGSGYAADLKSTQNAIDKITNKVNSVIEKMNTQFTAVGKEFNHLEKRIENLNKKVDDGFLDIWTYNAELLVLLENERTLDYHDSNVKNLYEKVRNQLKNNAKEIGNGCFEFYHKCDNTCMESVKNGTYDYPKYSEEAKLNREEIDGVKLESTRIYQILAIYSTVASSLVLVVSLGAISFWMCSNGSLQCRICI

SEQ ID NO: 11167 - protein, 566 aa, Artificial Sequence; identical to SEQ ID NO: 6855
  derived and/or modified protein sequence (wt) from hemagglutinin__InfluenzaA__AHL81235

SEQ ID NO: 11168 - protein, 566 aa, Artificial Sequence; identical to SEQ ID NO: 6855
  derived and/or modified protein sequence (wt) from hemagglutinin__InfluenzaA__AHL81247

SEQ ID NO: 11169 - protein, 566 aa, Artificial Sequence; identical to SEQ ID NO: 6855
  derived and/or modified protein sequence (wt) from hemagglutinin__InfluenzaA__AHL81259

SEQ ID NO: 11170 - protein, 566 aa, Artificial Sequence; identical to SEQ ID NO: 6855
  derived and/or modified protein sequence (wt) from hemagglutinin__InfluenzaA__AHL81271

SEQ ID NO: 11171 - protein, 566 aa, Artificial Sequence; identical to SEQ ID NO: 6855
  derived and/or modified protein sequence (wt) from hemagglutinin__InfluenzaA__AHL81283

SEQ ID NO: 11172 - protein, 566 aa, Artificial Sequence; identical to SEQ ID NO: 6855
  derived and/or modified protein sequence (wt) from hemagglutinin__InfluenzaA__AHL81295

SEQ ID NO: 11173 - protein, 566 aa, Artificial Sequence; identical to SEQ ID NO: 11148
  derived and/or modified protein sequence (wt) from hemagglutinin__InfluenzaA__AHL81307

SEQ ID NO: 11174 - protein, 566 aa, Artificial Sequence; identical to SEQ ID NO: 6867
  derived and/or modified protein sequence (wt) from hemagglutinin__InfluenzaA__AHL81329

SEQ ID NO: 11175 - protein, 566 aa, Artificial Sequence
  derived and/or modified protein sequence (wt) from hemagglutinin__InfluenzaA__AHL81340
MKTIIALSYILCLVFAQKLPGNDNSTATLCLGHHAVPNGTIVKTITNDQIEVTNATELVQSSSTGEICDSPHQILDGKNCTLIDALLGDPQCDGFQNKKWDLFVERSKAYSNCYPYDVPDYASLRSLVASSGTLEFNNESFNWTGVTQDGTSSACIRGSKNSFFSRLNWLTHLNFKYPALNVTMPNNEQFDKLYIWGVHHPGTDKDQIFLYAQASGRITVSTKRSQQAAIPNIGSRPRVRNIPSRISIYWTIVKPGDILLINSTGNLIAPRGYFKIRSGKSSIMRSDAPIGKCNSECITPNGSIPNDKPFQNVNRITYGACPRYVKQNTLKLATGMRNVPEKQTRGIFGAIAGFIENGWEGMVDGWYGFRHQNSEGRGQAADLKSTQAAIDQINGKLNRLIGKTNEKFHQIEKEFSEVEGRIQDLEKYVEDTKIDLWSYNAELLVALENQHTIDLTDSEMNKLFEKTKKQLRENAEDMGNGCFKIYHKCDNACIGSIRNGTYNHDVYRDEALNKRFQIKGIELKSGYKDWILWISFAISCFLLCVALLGFIMWACQKGNIRCNICI

SEQ ID NO: 11176 - protein, 566 aa, Artificial Sequence; identical to SEQ ID NO: 6855
  derived and/or modified protein sequence (wt) from hemagglutinin__InfluenzaA__AHL81352

SEQ ID NO: 11177 - protein, 566 aa, Artificial Sequence
  derived and/or modified protein sequence (wt) from hemagglutinin__InfluenzaA__AHL81364
MKAILVVLLYTFATANADTLCIGYHANNSTDTVDTVLEKNVTVTHSVNLLEDKHNGKLCKLRGVAPLHLGKCNIAGWILGNPECESLSTASSWSYIVETSSSDNGACYPGDFINYEELREQLSSVSSFERFEIFPKTNSWPNHDSNKGVTAACPHAGAKSFYKNLIWLVKKGNSYPKLSKSYINDKGKEVLVLWGIHHPSTTADQQSLYQNADAYVFVGTSRYSKKFKPEIAIRPKVRDQEGRMNYYWTLVEPGDKITFEATGNLVVPRYAFAMERNAGSGIIISDTPVHDCNTTCQTPKGAINTSLPFQNIHPITIGKCPKYVKSTKLRLATGLRNVPSIQSRGLFGAIAGFIEGGWTGMVDGWYGYHHQNEQGSGYAADLKSTQNAIDKITNKVNSVIEKMNTQFTAVGKEFNHLEKRIENLNKKVDDGFLDIWTYNAELLVLLENERTLDYHDSNVKNLYEKVRNQLKNNAKEIGNGCFEFYHKCDNTCMESVKNGTYDYPKYSEEAKLNREEIDGVKLESTRIYQILAIYSTVASSLVLVVSLGAISFWMCSNGSLQCRICI

SEQ ID NO: 11178 - protein, 566 aa, Artificial Sequence
  derived and/or modified protein sequence (wt) from hemagglutinin__InfluenzaA__AHL81386
MKAILVVLLYTFATANADTLCIGYHANNSTDTVDTVLEKNVTVTHSVNLLEDKHNGKLCKLRGVAPLHLGKCNIAGWILGNPECESLSTASSWSYIVETSSSDNGTCYPGDFINYEELREQLSSVSSFERFEIFPKTNSWPNHDSNKGVTAACPHAGVKSFYKNLIWLVKKGNSYPKLSKSYINDKGKEVLVLWGIHHPSTTADQQSLYQNADAYVFVGTSRYSKKFKPEIAIRPKVRDQEGRMNYYWTLVEPGDKITFEATGNLVVPRYAFAMERNAGSGIIISDTPVHDCNTTCQTPKGAINTSLPFQNIHPITIGKCPKYVKSTKLRLATGLRNVPSIQSRGLFGAIAGFIEGGWTGMVDGWYGYHHQNEQGSGYAADLKSTQNAIDKITNKVNSVIEKMNTQFTAVGKEFNHLEKRIENLNKKVDDGFLDIWTYNAELLVLLENERTLDYHDSNVKNLYEKVRNQLKNNAKEIGNGCFEFYHKCDNTCMESVKNGTYDYPKYSEEAKLNREEIDGVKLESTRIYQILAIYSTVASSLVLVVSLGAISFWMCSNGSLQCRICI

SEQ ID NO: 11179 - protein, 566 aa, Artificial Sequence; identical to SEQ ID NO: 6855
  derived and/or modified protein sequence (wt) from hemagglutinin__InfluenzaA__AHL81397

SEQ ID NO: 11180 - protein, 566 aa, Artificial Sequence; identical to SEQ ID NO: 11165
  derived and/or modified protein sequence (wt) from hemagglutinin__InfluenzaA__AHL81409

SEQ ID NO: 11181 - protein, 566 aa, Artificial Sequence; identical to SEQ ID NO: 11135
  derived and/or modified protein sequence (wt) from hemagglutinin__InfluenzaA__AHL81419

SEQ ID NO: 11182 - protein, 566 aa, Artificial Sequence; identical to SEQ ID NO: 3833
  derived and/or modified protein sequence (wt) from hemagglutinin__InfluenzaA__AHL81430

SEQ ID NO: 11183 - protein, 566 aa, Artificial Sequence; identical to SEQ ID NO: 630
  derived and/or modified protein sequence (wt) from hemagglutinin__InfluenzaA__AHL88951

SEQ ID NO: 11184 - protein, 566 aa, Artificial Sequence; identical to SEQ ID NO: 630
  derived and/or modified protein sequence (wt) from hemagglutinin__InfluenzaA__AHL89030

SEQ ID NO: 11185 - protein, 566 aa, Artificial Sequence
  derived and/or modified protein sequence (wt) from hemagglutinin__InfluenzaA__AHL89042
MKTIIALSYILCLVFAQKLPGNDNSTATLCLGHHAVPNGTIVKTITNDQIEVTNATELVQSSSTGEICDSPHQILDGENCTLIDALLGDPQCDGFQNKKWDLFVERSKAYSNCYPYDVPDYASLRSLVASSGTLEFNNENFNWTGVTQNGTSSACKRRSNNSFFSRLNWLTHLKFKYPALNVTMPNNEKFDKLYIWGVHHPGTDNDQIFLYAQASGRITVSTKRSQQTVIPNIGSRPRVRNIPSRISIYWTIVKPGDILLINSTGNLIAPRGYFKIRSGKSSIMRSDAPIGKCNSECITPNGSIPNDKPFQNVNRITYGACPRYVKQNTLKLATGMRNVPEKQTRGIFGAIAGFIENGWEGMVDGWYGFRHQNSEGIGQAADLKSTQAAINQINGKLNRLIGKTNEKFHQIEKEFSEVEGRIQDLEKYVEDTKIDLWSYNAELLVALENQHTIDLTDSEMNKLFERTKKQLRENAEDMGNGCFKIYHKCDNACIGSIRNGTYDHDVYRDEALNNRFQIKGVELKSGYKDWILWISFAISCFLLCVALVGFIMWACQKGNIRCNICI

SEQ ID NO: 11186 - protein, 566 aa, Artificial Sequence
  derived and/or modified protein sequence (wt) from hemagglutinin__InfluenzaA__AHL89054
MKTIIALSYILCLVFAQKLPGNDNSTATLCLGHHAVPNGTIVKTITNDQIEVTNATELVQSSSTGGICDSPHQILDGENCTLIDALLGDPQCDGFQNKKWDLFVERSKAYSNCYPYDVPDYASLRSLVASSGTLEFNNESFNWTGVTQNGTSSACKRRSNNSFFSRLNWLTHLKFKYPALNVTMPNNEKFDKLYIWGVHHPGTDNDQIFLYAQASGRITVSTKRSQQTVIPNIGSRPRVRNIPSRISIYWTIVKPGDILLINSTGNLIAPRGYFKIRSGKSSIMRSDAPIGKCNSECITPNGSIPNDKPFQNVNRITYGACPRYVKQNTLKLATGMRNVPEKQTRGIFGAIAGFIENGWEGMVDGWYGFRHQNSEGIGQAADLKSTQAAINQINGKLNRLIGKTNEKFHQIEKEFSEVEGRIQDLEKYVEDTKIDLWSYNAELLVALENQHTIDLTDSEMNKLFERTKKQLRENAEDMGNGCFKIYHKCDNACIGSIRNGTYDHDVYRDEALNNRFQIKGVELKSGYKDWILWISFAMSCFLLCVALLGFIMWACQKGNIRCNICI

SEQ ID NO: 11187 - protein, 566 aa, Artificial Sequence; identical to SEQ ID NO: 1581
  derived and/or modified protein sequence (wt) from hemagglutinin__InfluenzaA__AHL89066

SEQ ID NO: 11188 - protein, 566 aa, Artificial Sequence
  derived and/or modified protein sequence (wt) from hemagglutinin__InfluenzaA__AHL89078
MKTIIALSYILCLVFAQKLPGDDNSTATLCLGHHAVPNGTVVKTITNDQIEVTNATELVQSSSTGGICDSPHQILDGENCTLIDALLGDPQCDGFQNKKWDLFVERSKAYSNCYPYDVPDYASLRSLVASSGTLEFNNESFNWTGVTQNGTSSACKRRSNNSFFSRLNWLTHLKFKYPALNVTMPNNEKFDKLYIWGVHHPGTDNDQIFLYAQASGRITVSTKRSQQTVIPNIGSRPRVRNIPSRISIYWTIVKPGDILLINSTGNLIAPRGYFKIRSGKSSIMRSDAPIGKCNSECITPNGSIPNDKPFQNVNRITYGACPRYVKQNTLKLATGMRNVPEKQTRGIFGAIAGFIENGWEGMVDGWYGFRHQNSEGIGQAADLKSTQAAINQINGKLNRLIGKTNEKFHQIEKEFSEVEGRIQDLEKYVEDTKIDLWSYNAELLVALENQHTIDLTDSEMNKLFERTKKQLRENAEDMGNGCFKIYHKCDNACIGSIRNGTYDHDVYRDEALNNRFQIKGVELKSGYKDWILWISFAISCFLLCVALLGFIMWACQKGNIRCNICI

SEQ ID NO: 11189 - protein, 566 aa, Artificial Sequence
  derived and/or modified protein sequence (wt) from hemagglutinin__InfluenzaA__AHL89090
MKTIIALSYILCLVFAQKLPGNDNSTATLCLGHHAVPNGTIVKTITNDQIEVTNATELVQSSSTGGICDSPYQILDGENCTLIDALLGDPQCDGFQNKKWDLFVERSKAYSNCYPYDVPDYASLRSLVASSGTLEFNNESFNWTGVTQNGTSSACKRRSNNSFFSRLNWLTHLKFKYPALNVTMPNNEKFDKLYIWGVHHPGTDNDQIFLYAQASGRITVSTKRSQQTVIPNIGSRPRVRNIPSRISIYWTIVKPGDILLINSTGNLIAPRGYFKIRSGKSSIMRSDAPIGKCNSECITPNGSIPNDKPFQNVNRITYGACPRYVKQNTLKLATGMRNVPEKQTRGIFGAIAGFIENGWEGMVDGWYGFRHQNSEGIGQAADLKSTQAAINQINGKLNRLIGKTNEKFHQIEKEFSEVEGRIQDLEKYVEDTKIDLWSYNAELLVALENQHTIDLTDSEMNKLFERTKKQLRENAEDMGNGCFKIYHKCDNACIGSIRNGTYDHDVYRDEALNNRFQIKGVELKSGYKDWILWISFAISCFLLCVALLGFIMWACQKGNIRCNICI

SEQ ID NO: 11190 - protein, 566 aa, Artificial Sequence; identical to SEQ ID NO: 630
  derived and/or modified protein sequence (wt) from hemagglutinin__InfluenzaA__AHL89102

SEQ ID NO: 11191 - protein, 566 aa, Artificial Sequence; identical to SEQ ID NO: 630
  derived and/or modified protein sequence (wt) from hemagglutinin__InfluenzaA__AHL89114

SEQ ID NO: 11192 - protein, 566 aa, Artificial Sequence
  derived and/or modified protein sequence (wt) from hemagglutinin__InfluenzaA__AHL89126
MKTIIALSYILCLVFAQKLPGNDNSTATLCLGHHAVPNGTIVKTITNDQIEVTNATELVQSSSTGGICDSPHQILDGENCTLIDALLGDPQCDGFQNKKWDLFVERSKAYSNCYPYDVPDYASLRSLVASSGTLEFNNENFNWTGVTQNGTSSACKRRSNNSFFSRLNWLTHLKFKYPALNVTMPNNEKFDKLYIWGVHHPGTDNDQIFLYAQASGRITVSTKRSQQTVIPNIGSRPRVRNIPSRISIYWTIVKPGDILLINSTGNLIAPRGYFKIRSGKSSIMRSDAPIGKCNSECITPNGSIPNDKPFQNVNRITYGACPRYVKQNTLKLATGMRNVPEKQTRGIFGAIAGFIENGWEGMVDGWYGFRHQNSEGIGQAADLKSTQAAINQINGKLNRLIGKTNEKFHQIEKEFSEVEGRIQDLEKYVEDTKIDLWSYNAELLVALENQHTIDLTDSEMNKLFERTKKQLRENAEDMGNGCFKIYHKCDNACIGSIRNGTYDHDVYRDEALNNRFQIKGVELKSGYKDWILWISFAISCFLLCVALLGFIMWACQKGNIRCNICI

SEQ ID NO: 11193 - protein, 566 aa, Artificial Sequence
  derived and/or modified protein sequence (wt) from hemagglutinin__InfluenzaA__AHL89138
MKTIIALSYILCLVFAQKLPGNDNSTATLCLGHHAVPNGTIVKTITNDQIEVTNATELVQSSSTGEICDSPHQILDGENCTLIDALLGDPQCDGFQNKKWDLFVERSKAYSNCYPYDVPDYASLRSLVASSGTLEFNNESFNWTGVTQNGTSSACKRRSNNSFFSRLNWLTHLKFKYPALNVTMPNNEKFDKLYIWGVHHPGTDNDQIFLYAQSSGRITVSTKRSQQTVIPNIGSRPRVRNIPSRISIYWTIVKPGDILLINSTGNLIAPRGYFKIRSGKSSIMRSDAPIGKCNSECITPNGSIPNDKPFQNVNRITYGACPRYVKQNTLKLATGMRNVPEKQTRGIFGAIAGFIENGWEGMVDGWYGFRHQNSEGIGQAADLKSTQAAINQINGKLNRLIGKTNEKFHQIEKEFSEVEGRIQDLEKYVEDTKIDLWSYNAELLVALENQHTIDLTDSEMNKLFERTKKQLRENAEDMGNGCFKIYHKCDNACIGSIRNGTYDHDVYRDEALNNRFQIKGVELKSGYKDWILWISFAISCFLLCVALLGFIMWACQKGNIRCNICI

SEQ ID NO: 11194 - protein, 566 aa, Artificial Sequence
  derived and/or modified protein sequence (wt) from hemagglutinin__InfluenzaA__AHL89150
MKTIIALSYILCLVFAQKLPGNDNSTATLCLGHHAVPNGTIVKTITNDQIEVTNATELVQSSSTGGICDSPHQILDGENCTLIDALLGDPQCDGFQNKKWDLFVERSKAYSNCYPYDVPDYASLRSLVASSGTLEFNNESFNWTGVTQNGTSSACKRRSNNSFFSRLNWLTHLKFKYPALNVTMPNNEKFDKLYIWGVHHPGTDNDQIFLYAQASGRITVSTKRSQQTVIPNIGSRPRVRNIPSRISIYWTIVKPGDILLINSTGNLIAPRGYFKIRSGKSSIMRSDAPIGKCNSECITPNGSIPNDKPFQNVNRITYGACPRYVKQNTLKLATGMRNVPEKQTRGIFGAIAGFIENGWEGMVDGWYGFRHQNSEGIGQAADLKSTQAAINQINGKLNRLIGKTNEKFHQIEKEFSEVEGRIQDLEKYVEDTKIDLWSYNAELLVALENQHTIDLTDSEMNKLFERTKKQLRENAEDMGNGCFKIYHKCDNACIGSIRNGTYDHDVYRDEALNNRFQIKGVELKSGYKDWILWISFAISCFLLCVALLVFIMWACQKGNIRCNICI

SEQ ID NO: 11195 - protein, 566 aa, Artificial Sequence
  derived and/or modified protein sequence (wt) from hemagglutinin__InfluenzaA__AHL89162
MKTIIALSYILCLVFAQKLPGNDNSTATLCLGHHAVPNGTIVKTITNDQIEVTNATELVQSSSTGGICDSPHQILDGENCTLIDALLGDPQCDGFQNKKWDLFVERSKAYSNCYPYDVPDYASLRSLVASSGTLEFNNESFNWTGVTQNGTSSACKRRSNNSFFSRLNWLTHLKFKYPALNVTMPNNEKFDKLYIWGVHHPGTDNDQIFLYAQASGRITVSTKRSQQTVIPNIGSRPRVRNIPSRISIYWTIVKPGDILLINSTGNLIAPRGYFKIRSGKSSIMRSDAPIGKCNSECITPNGSIPNDKPFQNVNRITYGACPRYVKQNTLKLATGMRNVPEKQTRGIFGAIAGFIENGWEGMVDGWYGFRHQNSEGTGQAADLKSTQAATNQINGKLNRLIGKTNEKFHQIEKEFSEVEGRIQDLEKYVEDTKIDLWSYNAELLVALENQHTIDLTDSEMNKLFERTKKQLRENAEDMGNGCFKIYHKCDNACIGSIRNGTYDHDVYRDEALNNRFQIKGVELKSGYKDWILWISFAISCFLLCVALLGFIMWACQKGNIRCNICI

SEQ ID NO: 11196 - protein, 566 aa, Artificial Sequence
  derived and/or modified protein sequence (wt) from hemagglutinin__InfluenzaA__AHL89174
MKTIIALSYTLCLVFAQKLPGNDNSTATLCLGHHAVPNGTIVKTITNDQIEVTNATELVQSSSTGGICDSPHQILDGENCTLIDALLGDPQCDGFQNKKWDLFVERSKAYSNCYPYDVPDYASLRSLVASSGTLEFNNESFNWTGVTQNGTSSACKRRSNNSFFSRLNWLTHLKFKYPALNVTMPNNEKFDKLYIWGVHHPGTDNDQIFLYAQASGRITVSTKRSQQTVIPNIGSRPRVRNIPSRISIYWTIVKPGDILLINSTGNLIAPRGYFKIRSGKSSIMRSDAPIGKCNSECITPNGSIPNDKPFQNVNRITYGACPRYVKQNTLKLATGMRNVPEKQTRGIFGAIAGFIENGWEGMVDGWYGFRHQNSEGIGQAADLKSTQAAINQINGKLNRLIGKTNEKFHQIEKEFSEVEGRIQDLEKYVEDTKIDLWSYNAELLVALENQHTIDLTDSEMNKLFERTKKQLRENAEDMGNGCFKIYHKCDNACIGSIRNGTYDHDVYRDEALNNRFQIKGVELKSGYKDWILWISFAISCFLLCVALLGFIMWACQKGNIRCNICI

SEQ ID NO: 11197 - protein, 566 aa, Artificial Sequence
  derived and/or modified protein sequence (wt) from hemagglutinin__InfluenzaA__AHL89210
MKTIIALSYILCLVFAQKLPGNDNSTATLCLGHHAVPNGTIVKTITNDQIEVTNATELVQSSSTGEICDSPHQILDGENCTLIDALLGDPQCDGFQNKKWDLFVERSKAYSNCYPYDVPDYASLRSLVASSGTLEFNNESFNWTGVTQNGTSSACKRRSNNSFFSRLNWLTHLKFKYPALNVTMPNNEKFDKLYIWGVHHPGTDNDQIFLYAQASGRITVSTKRSQQTVIPNIGSRPRVRNIPSRISIYWTIVKPGDILLINSTGNLIAPRGYFKIRSGKSSIMRSDAPIGKCNSECITPNGSIPNDKPFQNVNRITYGACPRYVKQNTLKLATGMRNVPEKQTRGIFGAIAGFIENGWEGMVDGWYGFRHQNSEGIGQAADLKSTQAAINQINGKLNRLIGKTNEKFHQIEKEFSEVEGRIQDLEKYVEDTKIDLWSYNAELLVALENQHTIDLTDSEMNKLFERTKKQLRENAEDMGNGCFKIYHKCDNACIGSIRNGTYDHDVYRDEALNNRFQIKGVELKSGYKDWILWISFAISCFLLCVALLGFIMWACQKGNIRCNICI

SEQ ID NO: 11198 - protein, 566 aa, Artificial Sequence; identical to SEQ ID NO: 11197
  derived and/or modified protein sequence (wt) from hemagglutinin__InfluenzaA__AHL89222

SEQ ID NO: 11199 - protein, 566 aa, Artificial Sequence
  derived and/or modified protein sequence (wt) from hemagglutinin__InfluenzaA__AHL89234
MKTIIALSYILCLVFAQKLPGNDNSTATLCLGHHAVPNGTIVKTITNDQIEVTNATELVQSSSTGEICDSPHQILDGENCTLIDALLGDPQCDGFQNKKWDLFVERSKAYSNCYPYDVPDYASLRSLVASSGTLEFNNESFNWTGVTQNGTSSACKRRSNNSFFSRLNWLTHLKFKYPALNVTMPNNEKFDKLYIWGVHHPGTDNDQIFLYAQASGRITVSTKRSQQTVIPNIGSRPRVRNIPSRISIYWTIVKPGDILLINSTGNLIAPRGYFKIRSGKSSIMRSDAPIGKCNSECITPNGSIPNDKPFQNVNRITYGACPRYVKQNTLKLATGMRNVPEKQTRGIFGAIAGFIENGWEGMVDGWYGFRHQNSEGMGQAADLKSTQAAINQINGKLNRLIGKTNEKFHQIEKEFSEVEGRIQDLEKYVEDTKIDLWSYNAELLVALENQHTIDLTDSEMNKLFERTKKQLRENAEDMGNGCFKIYHKCDNACIGSIRNGTYDHDVYRDEALNNRFQIKGVELKSGYKDWILWISFAISCFLLCVALLGFIMWACQKGNIRCNICI

SEQ ID NO: 11200 - protein, 566 aa, Artificial Sequence
  derived and/or modified protein sequence (wt) from hemagglutinin__InfluenzaA__AHL89246
MKTIIALSYILCLVFAQKLPGNDNSTATLCLGHHAVPNGTIVKTITNDQIEVTNATELVQSSSTGEICDSPHQILDGENCTLIDALLGDPQCDGFQNKKWDLFVERSKAYSNCYPYDVPDYASLRSLVASSGTLEFNNESFNWTGVTQNGTSSACKRRSNNSFFSRLNWLTHLKFKYPALNVTMPNNEKFDKLYIWGVHHPGTDNDQIFLYAQASGRITVSTKRSQQTVIPNIGSRPRVRNIPSRISIYWTIVKPGDILLINSTGNLIAPRGYFKIRSGKSSIMRSDAPIGKCNSECITPNGSIPNDKPFQNVNRITYGACPRYVKQNTLKLATGMRNVPEKQTRGIFGAIAGFIENGWEGMVDGWYGFRHQNSEGIGQAADLKSTQAAINQINGKLNRLIGKTNEKFHQIEKEFSEVEGRIQDLEKYVEDTKIDLWSYNAELLVALENQHTIDLTDSEMNKLFERTKKQLRENAEDMGNGCFKIYHKCGNACIGSIRNGTYDHDVYRDEALNNRFQIKGVELKSGYKDWILWISFAISCFLLCVALLGFIMWACQKGNIRCNICI

SEQ ID NO: 11201 - protein, 566 aa, Artificial Sequence
  derived and/or modified protein sequence (wt) from hemagglutinin__InfluenzaA__AHL89258
MKTIIALSYILCLVFAQKLPGNDNSTATLCLGHHAVPNGTIVKTITNDQIEVTNATELVQSSSTGEICDSPHQILDGENCTLIDALLGDPQCDGFQNKKWDLFVERSKAYSNCYPYDVPDYASLRSLVASSGTLEFNNESFNWTGVTQNGTSSACKRRSNNSFFSRLNWLTHLKFKYQALNVTMPNNEKFDKLYIWGVHHPGTDNDQIFLYAQASGRITVSTKRSQQTVIPNIGSRPRVRNIPSRISIYWTIVKPGDILLINSTGNLIAPRGYFKIRSGKSSIMRSDAPIGKCNSECITPNGSIPNDKPFQNVNRITYGACPRYVKQNTLKLATGMRNVPEKQTRGIFGAIAGFIENGWEGMVDGWYGFRHQNSEGIGQAADLKSTQAAINQINGKLNRLIGKTNEKFHQIEKEFSEVEGRIQDLEKYVEDTKIDLWSYNAELLVALENQHTIDLTDSEMNKLFERTKKQLRENAEDMGNGCFKIYHKCDNACIGSIRNGTYDHDVYRDEALNNRFQIKGVELKSGYKDWILWISFAISCFLLCVVLLGFIMWACQKGNIRCNICI

SEQ ID NO: 11202 - protein, 566 aa, Artificial Sequence; identical to SEQ ID NO: 11197
  derived and/or modified protein sequence (wt) from hemagglutinin__InfluenzaA__AHL89270

SEQ ID NO: 11203 - protein, 566 aa, Artificial Sequence; identical to SEQ ID NO: 11197
  derived and/or modified protein sequence (wt) from hemagglutinin__InfluenzaA__AHL89282

SEQ ID NO: 11204 - protein, 566 aa, Artificial Sequence; identical to SEQ ID NO: 11197
  derived and/or modified protein sequence (wt) from hemagglutinin__InfluenzaA__AHL89294

SEQ ID NO: 11205 - protein, 566 aa, Artificial Sequence; identical to SEQ ID NO: 11197
  derived and/or modified protein sequence (wt) from hemagglutinin__InfluenzaA__AHL89306

SEQ ID NO: 11206 - protein, 566 aa, Artificial Sequence; identical to SEQ ID NO: 1581
  derived and/or modified protein sequence (wt) from hemagglutinin__InfluenzaA__AHL89318

SEQ ID NO: 11207 - protein, 566 aa, Artificial Sequence
  derived and/or modified protein sequence (wt) from hemagglutinin__InfluenzaA__AHL89330
MKTIIALSYILCLVFAQKLPGNDNSTATLCLGHHAVPNGTIVKTITNDQIEVTNATELVQSSSTGEICDSPHQILDGKNCTLIDALLGDPQCDGFQNKKWDLFVERSKAYSNCYPYDVPDYASLRSLVASSGTLEFNNESFNWTGVTQNGTSSACKRRSNNSFFSRLNWLTHLKFKYPALNVTMPNNEKFDKLYIWGVHHPGTDNDQIFLYAQASGRITVSTKRSQQTVIPNIGSRPRVRNIPSRISIYWTIVKPGDILLINSTGNLIAPRGYFKIRSGKSSIMRSDAPIGKCNSECITPNGSIPNDKPFQNVNRITYGACPRYVKQNTLKLATGMRNVPEKQTRGIFGAIAGFIENGWEGMVDGWYGFRHQNSEGIGQAADLKSTQAAINQINGKLNRLIGKTNEKFHQIEKEFSEVEGRIQDLEKYVEDTKIDLWSYNAELLVALENQHTIDLTDSEMNKLFERTKKQLRENAEDMGNGCFKIYHKCDNACIGSIRNGTYDHDVYRDEALNNRFQIKGVELKSGYKDWILWISFAISCFLLCVALLGFIMWACQKGNIRCNICI

SEQ ID NO: 11208 - protein, 566 aa, Artificial Sequence; identical to SEQ ID NO: 630
  derived and/or modified protein sequence (wt) from hemagglutinin__InfluenzaA__AHL89342

SEQ ID NO: 11209 - protein, 566 aa, Artificial Sequence; identical to SEQ ID NO: 1561
  derived and/or modified protein sequence (wt) from hemagglutinin__InfluenzaA__AHL89354

SEQ ID NO: 11210 - protein, 566 aa, Artificial Sequence
  derived and/or modified protein sequence (wt) from hemagglutinin__InfluenzaA__AHL89366
MKTIIALSYILCLVFAQKLPGNDNSTATLCLGHHAVPNGTIVKTITNDQIEVTNATELVQSSSTGEICDSPHQILDGENCTLIDALLGDPQCDGFQNKKWDLFVERSKAYSNCYPYDVPDYASLRSLVASSGTLEFNNESFNWTGVTQNGTSSACKRRSNNSFFSRLNWLTHLKFKYPALNVTMPNNEKFDKLYIWGVHHPGTDNDQIFLYAQASGRITVSTKRSQQTVIPNIGSRPRVRNIPSRISIYWTIVKPGDILLINSTGNLIAPRGYFKIRSGKSSIMKSDAPIGKCNSECITPNGSIPNDKPFQNVNRITYGACPRYVKQNTLKLATGMRNVPEKQTRGIFGAIAGFIENGWEGMVDGWYGFRHQNSEGIGQAADLKSTQAAINQINGKLNRLIGKTNEKFHQIEKEFSEVEGRIQDLEKYVEDTKIDLWSYNAELLVALENQHTIDLTDSEMNKLFERTKKQLRENAEDMGNGCFKIYHKCDNACIGSIRNGTYDHDVYRDEALNNRFQIKGIELKSGYKDWILWISFAISCFLLCVVLLGFIMWACQKGNIRCNICI

SEQ ID NO: 11211 - protein, 566 aa, Artificial Sequence; identical to SEQ ID NO: 11197
  derived and/or modified protein sequence (wt) from hemagglutinin__InfluenzaA__AHL89378

SEQ ID NO: 11212 - protein, 566 aa, Artificial Sequence; identical to SEQ ID NO: 1828
  derived and/or modified protein sequence (wt) from hemagglutinin__InfluenzaA__AHL89390

SEQ ID NO: 11213 - protein, 566 aa, Artificial Sequence; identical to SEQ ID NO: 11197
  derived and/or modified protein sequence (wt) from hemagglutinin__InfluenzaA__AHL89402

SEQ ID NO: 11214 - protein, 566 aa, Artificial Sequence; identical to SEQ ID NO: 1581
  derived and/or modified protein sequence (wt) from hemagglutinin__InfluenzaA__AHL89414

SEQ ID NO: 11215 - protein, 566 aa, Artificial Sequence
  derived and/or modified protein sequence (wt) from hemagglutinin__InfluenzaA__AHL89426
MKTIIALSYILCLVFAQKLPGNDNSTATLCLGHHAVPNGTIVKTITNDQIEVTNATELVQSSSTGEICDSPHQILDGENCTLIDALLGDPQCDGFQNKKWDLFVERSKAYSNCYPYDVPDYASLRSLVASSGTLEFNNESFNWTGVTQNGTSSACKRRSNNSFFSRLNWLTHLKFKYPALNVTMPNNEKFDKLYIWGVHHPGTDNDQIFLYAQASGRITVSTKRSQQTVIPNIGSRPRVRNIPSRISIYWTIVKPGDILFINSTGNLIAPRGYFKIRSGKSSIMRSDAPIGKCNSECITPNGSIPNDKPFQNVNRITYGACPRYVKQNTLKLATGMRNVPEKQTRGIFGAIAGFIENGWEGMVDGWYGFRHQNSEGIGQAADLKSTQAAINQINGKLNRLIGKTNEKFHQIEKEFSEVEGRIQDLEKYVEDTKIDLWSYNAELLVALENQHTIDLTDSEMNKLFERTKKQLRENAEDMGNGCFKIYHKCDNACIGSIRNGTYDHDVYRDEALNNRFQIKGVELKSGYKDWILWISFAISCFLLCVVLLGFIMWACQKGNIRCNICI

SEQ ID NO: 11216 - protein, 566 aa, Artificial Sequence; identical to SEQ ID NO: 11197
  derived and/or modified protein sequence (wt) from hemagglutinin__InfluenzaA__AHL89438

SEQ ID NO: 11217 - protein, 566 aa, Artificial Sequence; identical to SEQ ID NO: 11197
  derived and/or modified protein sequence (wt) from hemagglutinin__InfluenzaA__AHL89450

SEQ ID NO: 11218 - protein, 566 aa, Artificial Sequence; identical to SEQ ID NO: 11197
  derived and/or modified protein sequence (wt) from hemagglutinin__InfluenzaA__AHL89462

SEQ ID NO: 11219 - protein, 566 aa, Artificial Sequence; identical to SEQ ID NO: 11197
  derived and/or modified protein sequence (wt) from hemagglutinin__InfluenzaA__AHL89474

SEQ ID NO: 11220 - protein, 566 aa, Artificial Sequence; identical to SEQ ID NO: 1828
  derived and/or modified protein sequence (wt) from hemagglutinin__InfluenzaA__AHL89486

SEQ ID NO: 11221 - protein, 566 aa, Artificial Sequence; identical to SEQ ID NO: 1581
  derived and/or modified protein sequence (wt) from hemagglutinin__InfluenzaA__AHL89498

SEQ ID NO: 11222 - protein, 566 aa, Artificial Sequence; identical to SEQ ID NO: 1581
  derived and/or modified protein sequence (wt) from hemagglutinin__InfluenzaA__AHL89510

SEQ ID NO: 11223 - protein, 566 aa, Artificial Sequence; identical to SEQ ID NO: 1581
  derived and/or modified protein sequence (wt) from hemagglutinin__InfluenzaA__AHL89522

SEQ ID NO: 11224 - protein, 566 aa, Artificial Sequence
  derived and/or modified protein sequence (wt) from hemagglutinin__InfluenzaA__AHL89534
MKTIIALSYILCLVFAQKLPGNDNSTATLCLGHHAVPNGTIVKTITNDQIEVTNATELVQSSSTGEICDSPHQILDGENCTLIDALLGDPQCDGFQNKKWDLFVERSKAYSNCYPYDVPDYASLRSLVASSGTLEFNNESFNWTGVTQNGTSSACKRRSNNSFFSRLNWLTHLKFKYPALNVTMPNNEKFDKLYIWGVHHPGTDNDQIFLYAQASGRITVSTKRSQQTVIPNIGSRPRVRNIPSRISIYWTIVKPGDILLINSTGNLIAPRGYFKIRSGKSSIMRSDAPIGKCNSECITPNGSIPNDKPFQNVNRITYGACPRYVKQNTLKLATGMRNVPEKQTRGIFGAIAGFIENGWEGMVDGWYGFRHQNSEGIGQAADLKSTQAAINQINGKLNRLIGKTNEKFHQIEKEFSEVEGRIQDLEKYVEDTKIDLWSYNAELLVALENQHTIDLTDSEMNKLFERTKKQLRENAEDMGNGCFKIYHKCDNACIGSIRNGTYDHDVYRDEALNNRFQIKGIELKSGYKDWILWISFAISCFLLCVVLLGFIMWACQKGNIRCNICI

SEQ ID NO: 11225 - protein, 565 aa, Artificial Sequence
  derived and/or modified protein sequence (wt) from hemagglutinin__InfluenzaA__AHL89546
MKVKLLVLLCTFTATYADTICIGYHANNSTDTVDTVLEKNVTVTHSVNLLEDSHNGKLCLLKGIAPLQLGNCSVAGWILGNPECELLISKESWSYIVETPNPENGTCYPGYFADYEELREQLSSVSSFERFEIFPKESSWPNHTVTGVSASCSHNGKSSFYRNLLWLTGKNGLYPNLSKSYANNKEKEVLVLWGVHHPPNIGDQRALYHTESAYVSVVSSHYSRRFTPEIAKRPKVRDQEGRINYYWTLLEPGDTIIFEANGNLIAPRFAFALSRGFGSGIITSNAPMDECDAKCQTPQGAINSSLPFQNVHPVTIGECPKYVRSAKLRMVTGLRNIPSIQSRGLFGAIAGFIEGGWTGMVDGWYGYHHQNEQGSGYAADQKSTQNAINGITNKVNSVIEKMNTQFTAVGKEFNKLERRMENLNKKVDDGFLDIWTYNAELLVLLENERTLDFHDSNVKNLYEKVKSQLKNNAKEIGNGCFEFYHKCNDECMESVKNGTYDYPKYSEESKLNRERIDGVKLESMGVYQILAIYSTVASSLVLLVSLGAISFWMCSNGSLQCRICI

SEQ ID NO: 11226 - protein, 565 aa, Artificial Sequence; identical to SEQ ID NO: 1914
  derived and/or modified protein sequence (wt) from hemagglutinin__InfluenzaA__AHL89558

SEQ ID NO: 11227 - protein, 565 aa, Artificial Sequence; identical to SEQ ID NO: 1914
  derived and/or modified protein sequence (wt) from hemagglutinin__InfluenzaA__AHL89570

SEQ ID NO: 11228 - protein, 565 aa, Artificial Sequence; identical to SEQ ID NO: 1930
  derived and/or modified protein sequence (wt) from hemagglutinin__InfluenzaA__AHL89582

SEQ ID NO: 11229 - protein, 565 aa, Artificial Sequence; identical to SEQ ID NO: 1930
  derived and/or modified protein sequence (wt) from hemagglutinin__InfluenzaA__AHL89594

SEQ ID NO: 11230 - protein, 565 aa, Artificial Sequence; identical to SEQ ID NO: 1930
  derived and/or modified protein sequence (wt) from hemagglutinin__InfluenzaA__AHL89606

SEQ ID NO: 11231 - protein, 565 aa, Artificial Sequence; identical to SEQ ID NO: 1914
  derived and/or modified protein sequence (wt) from hemagglutinin__InfluenzaA__AHL89618

SEQ ID NO: 11232 - protein, 565 aa, Artificial Sequence; identical to SEQ ID NO: 1930
  derived and/or modified protein sequence (wt) from hemagglutinin__InfluenzaA__AHL89630

SEQ ID NO: 11233 - protein, 565 aa, Artificial Sequence
  derived and/or modified protein sequence (wt) from hemagglutinin__InfluenzaA__AHL89642
MKVKLLVLLCTFTATYADTICIGYHANNSTDTVDTVLEKNVTVTHSVNLLEDNHNGKLCLLKGIAPLQLGNCSVAGWILGNPECELLISKESWSYIVETPNPENGTCYPGYFADYEELREQLSSVSSFERFEIFPKESSWPNHTVTGVSASCSHNGKSSFYRNLLWLTGKNGLYPNLSKSYANNKEKEVLVLWGVHHPPNIGDQRALYHTENAYVSVVSSHYSRRFTPEIAKRPKVRDQEGRINYYWTLLEPGDTIIFEANGNLIAPRFAFALSRGFGSGIITSNAPMGECDAKCQTPQGAINSSLPFQNVHPVTIGECPKYVRSAKLRMVTGLRNIPSIQSRGLFGAIAGFIEGGWTGMVDGWYGYHHQNEQGSGYAADQKSTQNAINGITNKVNSVIEKMNTQFTAVGKEFNKLERRMENLNKKVDDGFLDIWTYNAELLVLLENERTLDFHDSNVKNLYEKVKSQLKNNAKEIGNGCFEFYHKCNDECMESVKNGTYDYPKYSEESKLNREKIDGVKLESMGVYQILAIYSTVASSLVLLVSLGAISFWMCSNGSLQCRICI

SEQ ID NO: 11234 - protein, 565 aa, Artificial Sequence; identical to SEQ ID NO: 1945
  derived and/or modified protein sequence (wt) from hemagglutinin__InfluenzaA__AHL89654

SEQ ID NO: 11235 - protein, 565 aa, Artificial Sequence
  derived and/or modified protein sequence (wt) from hemagglutinin__InfluenzaA__AHL89666
MKVKLLVLLCTFTATYADTICIGYHANNSTDTVDTVLEKNVTVTHSVNLLEDNHNGKLCLLKGIAPLQLGNCSVAGWILGNPECELLISKESWSYIVETPNPENGTCYPGYFADYEELREQLSSVSSFERFEIFPKESSWPNHTVTGVSASCSHNGKSSFYRNLLWLTGKNGLYPNLSKSYANNKEKEVLVLWGVHHPPNIGDQRALYHTENAYVSVVSSHYSRRFTPEIAKRPKVRDQEGRINYYWTLLEPGDTIIFEANGNLIAPRFAFALSRGFGSGIITSNAPMGECDAKCQTPQGAINSSLPFQNVHPVTIGECPKYVRSAKLRMVTGLRNIPSIQSRGLFGAIAGFIEGGWTGMVDGWYGYHHQNEQGSGYAADQKSTQNAINGITNKVNSVIEKMNTQFTAVGKEFNKLERRMENLNKKVDDGFLDIWTYNAELLVLLENERTLDFHDSNVKNLYEKVKSQLKNNAEEIGNGCFEFYHKCNDECMESVKNGTYDYPKYSEESKLNREKIDGVKLESMGVYQILAIYSTVASSLVLLVSLGAISFWMCSNGSLQCRICI

SEQ ID NO: 11236 - protein, 565 aa, Artificial Sequence
  derived and/or modified protein sequence (wt) from hemagglutinin__InfluenzaA__AHL89678
MKVKLLVLLCTFTATYADTICIGYHANNSTDTVDTVLEKNVTVTHSVNLLEDSHNGKLCLLKGIAPLQLGNCSVAGWILGNPECELLISKESWSYIVETPNPENGTCYPGYFADYEELREQLSSVSSFERFEIFPKESSWPNHTVTGVSASCSHNGKSSFYRNLLWLTGKNGLYPNLSKSYANNKEKEVLVLWGVHHPPNIGDQRALYHTENAYVSVVSSHYSRRFTPEIAKRPKVRDQEGRINYYWTLLEPGDTIIFEANGNLIAPRFAFALSRGFGSGIITSNAPMGECDAKCQTPQGAINSSLPFQNVHPVTIGECPKYVRSAKLRMVTGLRNIPSIQSRGLFGAIAGFIEGGWTGMVDGWYGYHHQNEQGSGYAADQKSTQNAINGITNKVNSVIEKMNTQFTAVGKEFNKLERRMENLNKKVDDGFLDIWTYNAELLVLLENERTLDFHDSNVKNLYEKVKSQLKNNAKEIGNGCFEFYHKCNDECMESVKNGTYDYPKYSEESKLNRKKIDGVKLESMGVYQILAIYSTVASSLVLLVSLGAISFWMCSNGSLQCRICI

SEQ ID NO: 11237 - protein, 565 aa, Artificial Sequence
  derived and/or modified protein sequence (wt) from hemagglutinin__InfluenzaA__AHL89690
MKVKLLVLLCTFTATYADTICIGYHANNSTDTVDTVLEKNVTVTHSVNLLEDSHNGKLCLLKGIAPLQLGNCSVAGWILGNPECELLISKESWSYIVEKPDPENGTCYPGHFADYEELREQLSSVSSFERFEIFPKESSWPNHTVTGVSASCSHNGKSSFYKNLLWLTGKNGLYPNLSKSYANNKEKEVLVLWGVHHPPNIGDQKALYHTENAYVSVVSSHYSRKFTPEIAKRPKVRDQEGRINYYWTLLEPGDTIIFEANGNLIAPRYAFALSRGFGSGIINSNAPMDKCDAKCQTPQGAINSSLPFQNVHPVTIGECPKYVRSAKLRMVTGLRNIPSIQSRGLFGAIAGFIEGGWTGMVDGWYGYHHQNEQGSGYAADQKSTQNAINGITNKVNSVIEKMNTQFTAVGKEFNKLERRMENLNKKVDDGFIDIWTYNAELLVLLENERTLDFHDSNVKNLYEKVKSQLKNNAKEIGNGCFEFYHKCNDECMESVKNGTYDYPKYSEESKLNREKIDGVKLESMGVYQILAIYSTVASSLVLLVSLGAISFWMCSNGSLQCRICI

SEQ ID NO: 11238 - protein, 565 aa, Artificial Sequence; identical to SEQ ID NO: 1945
  derived and/or modified protein sequence (wt) from hemagglutinin__InfluenzaA__AHL89702

SEQ ID NO: 11239 - protein, 565 aa, Artificial Sequence; identical to SEQ ID NO: 1914
  derived and/or modified protein sequence (wt) from hemagglutinin__InfluenzaA__AHL89714

SEQ ID NO: 11240 - protein, 565 aa, Artificial Sequence
  derived and/or modified protein sequence (wt) from hemagglutinin__InfluenzaA__AHL89726
MKVKLLVLLCTFTATYADTICIGYHANNSTDTVDTVLEKNVTVTHSVNLLEDSHNGKLCLLKGIAPLQLGNCSVAGWILGNPECELLISKESWSYIVETPNPENGTCYPGYFADYEELREQLSSVSSFERFEIFPKESSWPNHTVTGVSASCSHNGKSSFYRNLLWLTGKNGLYPNLSKSYANNKEKEVLVLWGVHHPPNIGDQKALYHTENAYVSVVSSHYSRRFTPEIAKRPKVRDQEGRINYYWTLLEPGDTIIFEANGNLIAPRFAFALSRGFGSGIITSNAPMDECDAKCQTPQGAINSSLPFQNVHPVTIGECPKYVRSTKLRMVTGLRNIPSIQSRGLFGAIAGFIEGGWTGMVDGWYGYHHQNEQGSGYAADQKSTQNAINGITNKVNSVIEKMNTQFTAVGKEFNKLERRMENLNKKVDDGFLDIWTYNAELLVLLENERTLDFHDSNVKNLYEKVKSQLKNNAKEIGNGCFEFYHKCNDECMESVKNGTYDYPKYSEESKLNREKIDGVKLESMGVYQILAIYSTVASSLVLLVSLGAISFWMCSNGSLQCRICI

SEQ ID NO: 11241 - protein, 565 aa, Artificial Sequence
  derived and/or modified protein sequence (wt) from hemagglutinin__InfluenzaA__AHL89750
MKVKLLVLLCTFTATYADTICIGYHANNSTDTVDTVLEKNVTVTHSVNLLEDSHNGKLCLLKGIAPLQLGNCSVAGWILGNPECELLISKESWSYIVETPNPENGTCYPGYFADYEELREQLSSVSSFERFEIFPKESSWPNHTVTGVSASCSHNGKSSFYRNLLWLTGKNGLYPNLSKSYANNKEKEVLVLWGVHHPPNIGDQRALYHTENAYVSVVSSHYSRRFTPEIAKRPKVRDQEGRINYYWTLLEPGDTIIFEANGNLIAPRFAFALSRGFGSGIITSNAPMDGCDAKCQTPQGAINSSLPFQNVHPVTIGECPKYVRSTKLRMVTGLRNIPSIQSRGLFGAIAGFIEGGWTGMVDGWYGYHHQNEQGSGYAADQKSTQNAINGITNKVNSVIEKMNTQFTAVGKEFNKLERRMENLNKKVDDGFLDIWTYNAELLVLLENERTLDFHDSNVKNLYEKVKSQLKNNAKEIGNGCFEFYHKCNDECMESVKNGTYDYPKYSEESKLNREKIDGVKLESMGVYQILAIYSTVASSLVLLVSLGAISFWMCSNGSLQCRICI

SEQ ID NO: 11242 - protein, 565 aa, Artificial Sequence; identical to SEQ ID NO: 1910
  derived and/or modified protein sequence (wt) from hemagglutinin__InfluenzaA__AHL89762

SEQ ID NO: 11243 - protein, 565 aa, Artificial Sequence; identical to SEQ ID NO: 1956
  derived and/or modified protein sequence (wt) from hemagglutinin__InfluenzaA__AHL89774

SEQ ID NO: 11244 - protein, 565 aa, Artificial Sequence; identical to SEQ ID NO: 1945
  derived and/or modified protein sequence (wt) from hemagglutinin__InfluenzaA__AHL89786

SEQ ID NO: 11245 - protein, 565 aa, Artificial Sequence
  derived and/or modified protein sequence (wt) from hemagglutinin__InfluenzaA__AHL89798
MKVKLLVLLCTFTATYADTICIGYHANNSTDTVDTVLEKNVTVTHSVNLLEDRHNGKLCLLKGIAPLQLGNCSVAGWILGNPECELLISKESWSYIVETPNPENGTCYPGYFADYEELREQLSSVSSFERFEIFPKESSWPNHTVTGVSASCSHNGKSSFYRNLLWLTGKNGLYPNLSRSYANNKEKEVLVLWGVHHPPSIGDQRALYHTENAYVSVVSSHYSRRFTPEIAKRPKVRDQEGRINYYWTLLEPGDTIIFEANGNLIAPRFAFALSRGFGSGIITSNAPMDECDAKCQTPQGAINSSLPFQNVHPVTIGECPKYVRSAKLRMVTGLRNIPSIQSRGLFGAIAGFIEGGWTGMVDGWYGYHHQNEQGSGYAADQKSTQNAINGITNKVNSVIEKMNTQFTAVGKEFNKLERRMENLNKKVDDGFLDIWTYNAELLVLLENERTLDFHDSNVKNLYEKVKSQLKNNAKEIGNGCFEFYHKCNDECMESVKNGTYDYPKYSEESKLNREKIDGVKLESMGVYQILAIYSTVASSLVLLVSLGAISFWMCSNGSLQCRICI

SEQ ID NO: 11246 - protein, 565 aa, Artificial Sequence
  derived and/or modified protein sequence (wt) from hemagglutinin__InfluenzaA__AHL89810
MKVKLLVLLCTFTATYADTICIGYHANNSTDTVDTVLEKNVTVTHSVNLLEDSHNGKLCLLKGIAPLQLGNCSVAGWILGNPECELLISKESWSYIVETPNPENGTCYPGYFADYEELREQLSSVSSFERFEIFPKESSWPNHTVTGVSASCSHNGKSSFYRNLLWLTGKNGLYPNLSKSYANNKEKEVLVLWGVHHPPNIGDQRALYHTENAYVSVVSSHYSRRFTPEIAKRPKVRDQEGRINYYWTLLEPGDTIIFEANGNLIAPRFAFALSRGFGSGIITSNAPMGECDAECQTPQGAINSSLPFQNVHPVTIGECPKYVRSAKLRMVTGLRNIPSIQSRGLFGAIAGFIEGGWTGMVDGWYGYHHQNEQGSGYAADQKSTQNAINGITNKVNSVIEKMNTQFTAVGKEFNKLERRMENLNKKVDDGFLDIWTYNAELLVLLENERTLDFHDSNVKNLYEKVKSQLKNNAKEIGNGCFEFYHKCNDECMESVKNGTYDYPKYSEESKLNREKIDGVKLESMGVYQILAIYSTVASSLVLLVSLGAISFWMCSNGSLQCRICI

SEQ ID NO: 11247 - protein, 565 aa, Artificial Sequence
  derived and/or modified protein sequence (wt) from hemagglutinin__InfluenzaA__AHL89822
MKVKLLVLLCTFTATYADTICIGYHANNSTDTVDTVLEKNVTVTHSVNLLEDRHNGKLCLLKGIAPLQLGNCSVAGWILGNPECELLISKESWSYIVETPNPENGTCYPGYFADYEELREQLSSVSSFERFEIFPKESSWPNHTVTGVSASCSHNGKSSFYRNLLWLTGKNGLYPNLSKSYANNKEKEVLVLWGVHHPPNIGDQRALYHTENAYVSVVSSHYSRRFTPEIAKRPKVRDQEGRINYYWTLLEPGDTIIFEANGNLIAPRFAFALSRGFGSGIITSNAPMDECDAKCQTPQGAINSSLPFQNVHPVTIGECPKYVRSAKLRMVTGLRNIPSIQSRGLFGAIAGFIEGGWTGMVDGWYGYHHQNEQGSGYAADQKSTQNAINGITNKVNSVIEKMNTQFTAVGKEFNKLERRMENLNKKVDDGFLDIWTYNAELLVLLENERTLDFHDSNVKNLYEKVKSQLKNNAKEIGNGCFEFYHKCNDECMESVKNGTYDYPKYSEESKLNREKIDGVKLESMGVYQILAIYSTVASSLVLLVSLGAISFWMCSNGSLQCRICI

SEQ ID NO: 11248 - protein, 565 aa, Artificial Sequence
  derived and/or modified protein sequence (wt) from hemagglutinin__InfluenzaA__AHL89834
MKVKLLVLLCTFTATYADTICIGYHANNSTDTVDTVLEKNVTVTHSVNLLEDSHNGKLCLLKGIAPLQLGNCSVAGWILGNPECELLISKESWSYIVETPNPENGTCYPGNFADYEELREQLSSVSSFERFEIFPKESSWPNHTVTGVSASCSHNGKSSFYRNLLWLTGKNGLYPNLSKSYANNKEKEVLVLWGVHHPPNIGDQRALYHTENAYVSVVSSHYSRRFTPEIAKRPKVRDQEGRINYYWTLLEPGDTIIFEANGNLIAPRFAFALSRGFGSGIITSNAPMDECDAKCQTPQGAINSSLPFQNVHPVTIGECPKYVRSAKLRMVTGLRNIPSIQSRGLFGAIAGFIEGGWTGMVDGWYGYHHQNEQGSGYAADQKSTQNAINGITNKVNSVIEKMNTQFTAVGKEFNKLERRMENLNKKVDDGFLDIWTYNAELLVLLENERTLDFHDSNVKNLYEKVKSQLKNNAKEIGDGCFEFYHKCNDECMESVKNGTYDYPKYSEESKLNREKIDGVKLESMGVYQILAIYSTVASSLVLLVSLGAISFWMCSNGSLQCRICI

SEQ ID NO: 11249 - protein, 565 aa, Artificial Sequence; identical to SEQ ID NO: 1956
  derived and/or modified protein sequence (wt) from hemagglutinin__InfluenzaA__AHL89846

SEQ ID NO: 11250 - protein, 566 aa, Artificial Sequence; identical to SEQ ID NO: 1928
  derived and/or modified protein sequence (wt) from hemagglutinin__InfluenzaA__AHL89858

SEQ ID NO: 11251 - protein, 566 aa, Artificial Sequence; identical to SEQ ID NO: 1928
  derived and/or modified protein sequence (wt) from hemagglutinin__InfluenzaA__AHL89870

SEQ ID NO: 11252 - protein, 566 aa, Artificial Sequence
  derived and/or modified protein sequence (wt) from hemagglutinin__InfluenzaA__AHL89882
MKTIIALSYILCLVFAQKLPGNDNSTATLCLGHHAVPNGTIVKTITNDQIEVTNATELVQSSSTGGICDSPHQILDGENCTLIDALLGDPQCDGFQNKKWDLFVERSKAYSNCYPYDVPDYASLRSLVASSGTLEFNNESFNWTGVTQNGTSSACKRGSDNSFFSRLNWLTHLKFKYPALNVTMPNNEKFDKLYIWGVHHPGTDNDQIFLYAQASGRITVSTKRSQQTVIPNIGSRPRVRNIPSRISIYWTIVKPGDILLINSTGNLIAPRGYFKIRSGKSSIMRSDAPIGKCNSECITPNGSIPNDKPFQNVNRITYGACPRYVKQNTLKLATGMRNVPEKQTRGIFGAIAGFIENGWEGMVDGWYGFRHQNSEGIGQAADLKSTQAAINQINGKLNRLIGKTNEKFHQIEKEFSEVEGRIQDLEKYVEDTKIDLWSYNAELLVALENQHTIDLTDSEMNKLFERTKKQLRENAEDMGNGCFKIYHKCDNACIGSIRNGTYDHDVYRDEALNNRFQIKGVELKSGYKDWILWISFAISCFLLCVALLGFIMWACQKGNIRCNICI

SEQ ID NO: 11253 - protein, 566 aa, Artificial Sequence; identical to SEQ ID NO: 1928
  derived and/or modified protein sequence (wt) from hemagglutinin__InfluenzaA__AHL89894

SEQ ID NO: 11254 - protein, 566 aa, Artificial Sequence
  derived and/or modified protein sequence (wt) from hemagglutinin__InfluenzaA__AHL89906
MKTIIALSYILCLVYAQKLPGIDNSTATLCLGHHAVPNGTIVKTITNDQIEVTNATELVQSSSTGEICDSPHQILDGENCTLIDALLGDPQCDGFQNKKWDLFVERSKAYSNCYPYDVPDYASLRSLVASSGTLEFNNESFNWAGVTQNGTSSACKRGSNNSFFSRLNWLTHSKFKYPALNVTMPNNEEFDKLYIWGVHHPGTDNDQIFLYAQASGRITVSTKRSQQTVIPNIGSRPRVRNIPSRISIYWTIVKPGDILLINSTGNLIAPRGYFKIRSGKSSIMRSDAPIGKCNSECITPNGSIPNDKPFQNVNRITYGACPRYVRQNTLKLATGMRNVPEKQTRGIFGAIAGFIENGWEGMVDGWYGFRHQNSEGIGQAADLKSTQAAIDQINGKLNRLIGKTNEKFHQIEKEFSEVEGRIQDLEKYVEDTKIDLWSYNAELLVALENQHTIDLTDSEMNKLFEKTKKQLRENAEDMGNGCFKIYHKCDNACIGSIRNGTYDHDVYRDEALNNRFQIKGVELKSGYKDWILWISFAISCFLLCVALLGFIMWACQKGNIRCNICI

SEQ ID NO: 11255 - protein, 566 aa, Artificial Sequence
  derived and/or modified protein sequence (wt) from hemagglutinin__InfluenzaA__AHL89918
MKTIIALSYILCLVFAQKLPGNDNSTATLCLGHHAVPNGTIVKTITNDQIEVTNATELVQSSSTGEICDSPHQILDGENCTLIDALLGDPQCDGFQNKKWDLFVERSKAYSNCYPYDVPDYASLRSLVASSGTLEFNNESFNWTGVTQNGTSSACIRRSNNSFFSRLNWLTHLKFKYPALNVTMPNNEKFDKLYIWGVHHPGTDNDQTFLYAQASGRITVSTKRSQQTVIPNIGSRPRVRNIPSRISIYWTIVKPGDILLINSTGNLIAPRGYFKIQSGKSSIMRSDAPIGKCNSECITPNGSIPNDKPFQNVNRITYGACPRYVKQNTLKLATGMRNVPEKQTRGIFGAIAGFIENGWEGMVDGWYGFRHQNSEGIGQAADLKSTQAAIDQINGKLNRLIGKTNEKFHQIEKEFSEVEGRIQDLEKYVEDTKIDLWSYNAELLVALENQHTIDLTDSEMNKLFEKTKKQLRENAEDMGNGCFKIYHKCDNACIGSIRNGTYDHDVYRDEALNNRFQIKGVELKSGYKDWILWISFAISCFLLCVALLGFIMWACQKGNIRCNICI

SEQ ID NO: 11256 - protein, 566 aa, Artificial Sequence
  derived and/or modified protein sequence (wt) from hemagglutinin__InfluenzaA__AHL89930
MKTIIALSYILCLVFAQKLPGIDNSTATLCLGHHAVPNGTIVKTITNDQIEVTNATELVQSSSTGGICDSPHQILDGENCTLIDALLGDPQCDGFQNKKWDLFVERSKAYSNCYPYDVPDYASLRSLVASSGTLEFNNESFNWAGVTQNGTSSACKRGSNNSFFSRLNWLTHSKFKYPALNVTMPNNEEFDKLYIWGVHHPGTDNDQIFLYAQASGRITVSTKRSQQTVIPNIGSRPRVRNIPSRISIYWTIVKPGDILLINSTGNLIAPRGYFKIRSGKSSIMRSDAPISKCNSECITPNGSIPNDKPFQNVNRITYGACPRYVKQNTLKLATGMRNVPEKQTRGIFGAIAGFIENGWEGMVDGWYGFRHQNSEGMGQAADLKSTQAAIDQINGKLNRLIGKTNEKFHQIEKEFSEVEGRIQDLEKYVEDTKIDLWSYNAELLVALENQHTIDLTDSEMNKLFEKTKKQLRENAEDMGNGCFKIYHKCDNACIGSIRNGTYDHDVYRDEALNNRFQIKGVELKSGYKDWILWISFAISCFLLCVALLGFIMWACQKGNIRCNICI

SEQ ID NO: 11257 - protein, 566 aa, Artificial Sequence; identical to SEQ ID NO: 1915
  derived and/or modified protein sequence (wt) from hemagglutinin__InfluenzaA__AHL89942

SEQ ID NO: 11258 - protein, 566 aa, Artificial Sequence
  derived and/or modified protein sequence (wt) from hemagglutinin__InfluenzaA__AHL89954
MKTIIALSYILCLVFAQKLPGNDNSTATLCLGHHAVPNGTIVKTITNDQIEVTNATELVQSSSTGEICDSPHQILDGENCTLIDALLGDPQCDGFQNKKWDLFVERSKAYSNCYPYDVPDHASLRSLVASSGTLEFNNESFNWTGVTQNGTSSACIRRSNNSFFSRLNWLTHLKFKYPALNVTMPNNEKFDKLYIWGVHHPGTDNDQIFLYAQASGRITVSTKRSQQTVIPNIGSRPRVRNIPSRISIYWTIVKPGDILLINSTGNLIAPRGYFKIRSGKSSIMRSDAPIGKCNSECITPNGSIPNDKPFQNVNRITYGACPRYVKQNTLKLATGMRNVPEKQTRGIFGAIAGFIENGWEGMVDGWYGFRHQNSEGIGQAADLKSTQAAIDQINGKLNRLIGKTNEKFHQIEKEFSEVEGRIQDLEKYVEDTKIDLWSYNAELLVALENQHTIDLTDSEMNKLFEKTKKQLRENAEDMGNGCFKIYHKCDNACIGSIRNGTYDHDVYRDEALNNRFQIKGVELKSGYKDWILWISFAISCFLLCVALLGFIMWACQKGNIRCNICI

SEQ ID NO: 11259 - protein, 566 aa, Artificial Sequence; identical to SEQ ID NO: 1928
  derived and/or modified protein sequence (wt) from hemagglutinin__InfluenzaA__AHL89966

SEQ ID NO: 11260 - protein, 566 aa, Artificial Sequence; identical to SEQ ID NO: 1928
  derived and/or modified protein sequence (wt) from hemagglutinin__InfluenzaA__AHL89978

SEQ ID NO: 11261 - protein, 566 aa, Artificial Sequence; identical to SEQ ID NO: 1987
  derived and/or modified protein sequence (wt) from hemagglutinin__InfluenzaA__AHL89990

SEQ ID NO: 11262 - protein, 566 aa, Artificial Sequence
  derived and/or modified protein sequence (wt) from hemagglutinin__InfluenzaA__AHL90002
MKTIIALSYILCLVFAQKLPGIDNSTATLCLGHHAVPNGTIVKTITNDQIEVTNATELVQSSSTGGICDSPHQILDGENCTLIDALLGDPQCDGFQNKKWDLFVERSKAYSNCYPYDVPDYASLRSLVASSGTLEFNNESFNWAGVTQNGTSSACKRGSNNSFFSRLNWLTHSKFKYPALNVTMPNNEEFDKLYIWGVHHPGTDNDQIFLYAQASGRITVSTKRSQQTVIPNIGSRPRVRNIPSRISIYWTIVKPGDILLINSTGNLIAPRGYFKIRSGKSSIMRSDAPIGKCNSECITPNGSIPNDKPFQNVNRITYGACPRYVKQNTLKLATGMRNVPEKQTRGIFGAIAGFIENGWEGMVDGWYGFRHQNSEGMGQAADLKSTQAAIDQINGKLNRLIGKTNEKFHQIEKEFSEVEGRIQDLEKYVEDTKIDLWSYNAELLVALENQHTIDLTDSEMNKLFEKTKKQLRENAEDMGNGCFKIYHKCDNACIGSIRNGTYDHDVYRDEALNNRFQIKGVELKSGYKDWILWISFAISCFLLCVALLGFIMWACQKGNIRCNICI

SEQ ID NO: 11263 - protein, 566 aa, Artificial Sequence
  derived and/or modified protein sequence (wt) from hemagglutinin__InfluenzaA__AHL90014
MKTIIALSYILCLVFAQKLPGNDNSTATLCLGHHAVPNGTIVKTITNDQVEVTNATELVQSSSTGEICDSPHQILDGENCTLIDALLGDPQCDGFQNKKWDLFVERSKAYSNCYPYDVPDYASLRSLVASSGTLEFNNESFNWTGVTQNGTSSACIRRSNNSFFSRLNWLTHLKFKYPALNVTMPNNEKFDKLYIWGVHHPGTDNDQIFLYAQASGRITVSTKRSQQTVIPNIGSRPRVRNIPSRISIYWTIVKPGDILLINSTGNLIAPRGYFKIRSGKSSIMRSDAPIGKCNSECITPNGSIPNDKPFQNVNRITYGACPRYVKQNTLKLATGMRNVPEKQTRGIFGAIAGFIENGWEGMVDGWYGFRHQNSEGIGQAADLKSTQAAIDQINGKLNRLIGKTNEKFHQIEKEFSEVEGRIQDLEKYVEDTKIDLWSYNAELLVALENQHTIDLTDSEMNKLFEKTKKQLRENAEDMGNGCFKIYHKCDNACIGSIRNGTYDHDVYRDEALNNRFQIKGVELKSGYKDWILWISFAISCFLLCVALLGFIMWACQKGNIRCNICI

SEQ ID NO: 11264 - protein, 566 aa, Artificial Sequence; identical to SEQ ID NO: 11263
  derived and/or modified protein sequence (wt) from hemagglutinin__InfluenzaA__AHL90026

SEQ ID NO: 11265 - protein, 566 aa, Artificial Sequence
  derived and/or modified protein sequence (wt) from hemagglutinin__InfluenzaA__AHL90050
MKTIIALSYILCLVFAQKLPGNDNSTATLCLGHHAVPNGTIVKTITNDQIEVTNATELVQSSSTGEICDSPHQILDGENCTLIDALLGDPQCDGFQNKKWDLFVERSKAYSNCYPYDVPDYASLRSLVASSGTLEFNNESFNWTGVTQNGTSSACIRRSNNSFFSRLNWLTHLKFKYPALNVTMPNNEKFDKLYIWGVHHPGTDNDQIFLYAQASGRITVSTKRSQQTVIPNIGSRPRVRNIPSRISIYWTIVKPGDILLINSTGNLIAPRGYFKIRSGKSSIMRSDAPIGKCNSECITPNGSIPNDKPFQNVNRITYGACPRYVKQNTLKLATGMRNVPEKQTRGIFGAIAGFIENGWEGMVDGWYGFRHQNSEGIGQAADLKSTQAAIDQINGKLNRLIGKTNEKFHQIEKEFSEVEGRIQDLEKYVEDTKIDLWSYNAELLVALENQHTIDLTDAEMNKLFEKTKKQLRENAEDMGNGCFKIYHKCDNACIGSIRNGTYDHDVYRDEALNNRFQIKGVELKSGYKDWILWISFAISCFLLCVALLGFIMWACQKGNIRCNICI

SEQ ID NO: 11266 - protein, 566 aa, Artificial Sequence
  derived and/or modified protein sequence (wt) from hemagglutinin__InfluenzaA__AHL90062
MKTIIALSYILCLVFAQKLPENDNSTATLCLGHHAVPNGTIVKTITNDQIEVTNATELVQSSSTGEICDSPHQILDGENCTLIDALLGDPQCDGFQNKKWDLFVERSKAYSNCYPYDVPDYASLRSLVASSGTLEFNNESFNWTGVTQNGTSSACIRRSNNSFFSRLNWLTHLKFKYPALNVTMPNNEKFDKLYIWGVHHPGTDNDQIFLYAQASGRITVSTKRSQQTVIPNIGSRPRVRNIPSRISIYWTIVKPGDILLINSTGNLIAPRGYFKIRSGKSSIMRSDAPIGKCNSECITPNGSIPNYKPFQNVNRITYGACPRYVKQNTLKLATGMRNVPEKQTRGIFGAIAGFIENGWEGMVDGWYGFRHQNSEGIGQAADLKSTQAAIDQINGKLNRLIGKTNEKFHQIEKEFSEVEGRIQDLEKYVEDTKIDLWSYNAELLVALENQHTIDLTDSEMNKLFEKTKKQLRENAEDMGNGCFKIYHKCDNACIGSIRNGTYDHDVYRDEALNNRFQIKGVELKSGYKDWILWISFAISCFLLCVALLGFIMWACQKGNIRCNICI

SEQ ID NO: 11267 - protein, 566 aa, Artificial Sequence; identical to SEQ ID NO: 1928
  derived and/or modified protein sequence (wt) from hemagglutinin__InfluenzaA__AHL90074

SEQ ID NO: 11268 - protein, 566 aa, Artificial Sequence
  derived and/or modified protein sequence (wt) from hemagglutinin__InfluenzaA__AHL90086
MKTIIALSYILCLVFAQKLPGNDNSTATLCLGHHAVPNGTIVKTITNDQIEVTNATELVQSSSTGEICDSPHQILDGENCTLIDALLGDPQCDGFQNKKWDLFVERSKAYSNCYPYDVPDYASLRSLVASSGTLEFNNESFNWTGVTQNGTSSACIRRYNNSFFSRLNWLTHLKFKYPALNVTMPNNEKFDKLYIWGVHHPGTDNDQIFLYAQASGRITVSTKRSQQTVIPNIGSRPRVRNIPSRISIYWTIVKPGDILLINSTGNLIAPRGYFKIRSGKSSIMRSDAPIGKCNSECITPNGSIPNDKPFQNVNRITYGACPRYVKQNTLKLATGMRNVPEKQTRGIFGAIAGFIENGWEGMVDGWYGFRHQNSEGIGQAADLKSTQAAIDQINGKLNRLIGKTNEKFHQIEKEFSEVEGRIQDLEKYVEDTKIDLWSYNAELLVALENQHTIDLTDSEMNKLFEKTKKQLRENAEDMGNGCFKIYHKCDNACIGSIRNGTYDHDVYRDEALNNRFQIKGVELKSGYKDWILWISFAISCFLLCVALLGFIMWACQKGNIRCNICI

SEQ ID NO: 11269 - protein, 566 aa, Artificial Sequence
  derived and/or modified protein sequence (wt) from hemagglutinin__InfluenzaA__AHL90098
MKTIIALSYILCLVFAQKLPGNDNSTATLCLGHHAVPNGTIVKTITNDQIEVTNATELVQSSSTGGICDSPHQILDGENCTLIDALLGDPQCDGFQNKKWDLFVERSKAYSNCYPYDVPDYASLRSLVASSGTLEFNNESFNWTGVTQNGTSSACKRGSDNSFFSRLNWLTHLKFKYPALNVTMPNNEKFDKLYIWGVHHPGTDNDQIFLYAQASGRITVSTKRSQQTVIPNIGSRPRVRNIPSRISIYWTIVKPGDILLINSTGNLIAPRGYFKIRSGKSSIMRSDAPIDKCNSECITPNGSIPNDKPFQNVNRITYGACPRYVKQNTLKLATGMRNVPEKQTRGIFGAIAGFIENGWEGMVDGWYGFRHQNSEGIGQAADLKSTQAAINQINGKLNRLIGKTNEKFHQIEKEFSEVEGRIQDLEKYVEDTKIDLWSYNAELLVALENQHTIDLTDSEMNKLFERTKKQLRENAEDMGNGCFKIYHKCDNACIGSIRNGTYDHDVYRDEALNNRFQIKGVELKSGYKDWILWISFAISCFLLCVALLGFIMWACQKGNIRCNICI

SEQ ID NO: 11270 - protein, 566 aa, Artificial Sequence
  derived and/or modified protein sequence (wt) from hemagglutinin__InfluenzaA__AHL90110
MKTIIALSYILCLVFAQKLPGNDNSTATLCLGHHAVPNGTIVKTITNDQIEVTNATELVQSSSTGEICDSPHQILDGENCTLIDALLGDPQCDGFQNKKWDLFVERSKAYSNCYPYDVPDYASLRSLVASSGTLEFNNESFNWTGVTQNGTSSACIRRSNNSFFSRLNWLTHLKFKYPALNVTMPNNEKFDKLYIWGVHHPGTDNDQIFLYAQASGRITVSTKRSQQTVIPNIGSRPRVRNIPSRISIYWTIVKPGDILLINSTGNLIAPRGYFKIQSGKSSVMRSDAPIGKCNSECITPNGSIPNDKPFQNVNRITYGACPRYVKQNTLKLATGMRNVPEKQTRGIFGAIAGFIENGWEGMVDGWYGFRHQNSEGIGQAADLKSTQAAIDQINGKLNRLIGKTNEKFHQIEKEFSEVEGRIQDLEKYVEDTKIDLWSYNAELLVALENQHTIDLTDSEMNKLFEKTKKQLRENAEDMGNGCFKIYHKCDNACIGSIRNGTYDHDVYRDEALNNRFQIKGVELKSGYKDWILWISFAISCFLLCVALLGFIMWACQKGNIRCNICI

SEQ ID NO: 11271 - protein, 565 aa, Artificial Sequence; identical to SEQ ID NO: 4095
  derived and/or modified protein sequence (wt) from hemagglutinin__InfluenzaA__AHL90122

SEQ ID NO: 11272 - protein, 565 aa, Artificial Sequence; identical to SEQ ID NO: 2488
  derived and/or modified protein sequence (wt) from hemagglutinin__InfluenzaA__AHL90133

SEQ ID NO: 11273 - protein, 565 aa, Artificial Sequence; identical to SEQ ID NO: 4095
  derived and/or modified protein sequence (wt) from hemagglutinin__InfluenzaA__AHL90145

SEQ ID NO: 11274 - protein, 565 aa, Artificial Sequence
  derived and/or modified protein sequence (wt) from hemagglutinin__InfluenzaA__AHL90157
MKVKLLVLLCTFTATYADTICIGYHANNSTDTVDTVLEKNVTVTHSVNLLENSHNGKLCLLKGIAPLQLGNCSVAGWILGNPECELLISKESWSYIVEKPNPENGTCYPGHFADYEELREQLSSVSSFERFEIFPKESSWPNHTVTGVSASCSHNGESSFYRNLLWLTGKNGLYPNLSKSYANNKEKEVLVLWGVHHPPNIGDQKALYHTENAYVSVVSSHYSRKFTPEIAKRPKVRDQEGRINYYWTLLEPGDTIIFEANGNLIAPRYAFALSRGFGSGIINSNAPMDKCDAKCQTPQGAINSSLPFQNVHPVTIGECPKYVRSAKLRMVTGLRNIPSIQSRGLFGAIAGFIEGGWTGMVDGWYGYHHQNEQGSGYAADQKSTQNAINGITNKVNSVIEKMNTQFTAVGKEFNKLERRMENLNKKVDDGFIDIWTYNAELLVLLENERTLDFHDSNVKNLYEKVKIQLKNNAKEIGNGCFEFYHKCNDECMESVKNGTYDYPKYSEESKLNREKIDGVKLESMGVYQILAIYSTIASSLVLLVSLGAISFWMCSNGSLQCRICI

SEQ ID NO: 11275 - protein, 565 aa, Artificial Sequence; identical to SEQ ID NO: 4095
  derived and/or modified protein sequence (wt) from hemagglutinin__InfluenzaA__AHL90169

SEQ ID NO: 11276 - protein, 565 aa, Artificial Sequence
  derived and/or modified protein sequence (wt) from hemagglutinin__InfluenzaA__AHL90181
MKVKLLVLLCTFAATYADTICIGYHANNSTDTVDTVLEKNVTVTHSVNLLENSHNGKLCLLKGIAPLQLGNCSVAGWILGNPECELLISKESWSYIVEKPNPKNGTCYPGHFADYEELREQLSSVSSFERFEIFPKESSWPNHTVTGVSASCSHNGESSFYRNLLWLTGKNGLYPNLSKSYANNKEKEVLVLWGVHHPPNIGDQKALYHTENAYVSVVSSHYSRKFTPEIAKRPKVRDQEGRINYYWTLLEPGDTIIFEANGNLIAPRYAFALSRGFGSGIINSNAPMDKCDAKCQTPQGAINSSLPFQNVHPVTIGECPKYVRSAKLRMVTGLRNIPSIQSRGLFGAIAGFIEGGWTGMVDGWYGYHHQNEQGSGYAADQKSTQNAINGITNKVNSVIEKMNTQFTAVGKEFNKLERRMENLNKKVDDGFIDIWTYNAELLVLLENERTLDFHDSNVKNLYEKVKSQLKNNAKEIGNGCFEFYHKCNDECMESVKNGTYDYPKYSEESKLNREKIDGVKLESMGVYQILAIYSTVASSLVLLVSLGAISFWMCSNGSLQCRICI

SEQ ID NO: 11277 - protein, 565 aa, Artificial Sequence; identical to SEQ ID NO: 3170
  derived and/or modified protein sequence (wt) from hemagglutinin__InfluenzaA__AHL90217

SEQ ID NO: 11278 - protein, 565 aa, Artificial Sequence; identical to SEQ ID NO: 3170
  derived and/or modified protein sequence (wt) from hemagglutinin__InfluenzaA__AHL90229

SEQ ID NO: 11279 - protein, 565 aa, Artificial Sequence
  derived and/or modified protein sequence (wt) from hemagglutinin__InfluenzaA__AHL90241
MKVKLLVLLCTFTATYADTICIGYHANNSTDTVDTVLEKNVTVTHSVNLLENSHNGKLCLLKGIAPLQLGNCSVAGWILGNPECELLIPKESWSYIVEKPNPENGTCYPGHFADYEELREQLSSVSSFERFEIFPKESSWPNHTVTGVSASCSHNGESSFYRNLLWLTGKNGLYPNLSKSYANNKEKEVLVLWGVHHPPNIGDQKALYHTENAYVSVVSSHYSRKFTPEIAKRPKVRDQEGRINYYWTLLEPGDTIIFEANGNLIAPRYAFALSRGFGSGIINSNAPMDKCDAKCQTPQGAINSSLPFQNVHPVTIGECPKYVRSAKLRMVTGLRNIPSIQSRGLFGAIAGFIEGGWTGMVDGWYGYHHQNEQGSGYAADQKSTQNAINGITNKVNSVIEKMNTQFTAVGKEFNKLERRMENLNKKVDDGFIDIWTYNAELLVLLENERTLDFHDSNVKNLYEKVKSQLKNNAKEIGNGCFEFYHKCNDECMESVKNGTYDYPKYSEESKLNREKIDGVKLESMGVYQILAIYSTVASSLVLLVSLGAISFWMCSNGSLQCRICI

SEQ ID NO: 11280 - protein, 565 aa, Artificial Sequence
  derived and/or modified protein sequence (wt) from hemagglutinin__InfluenzaA__AHL90253
MKVKLLVLLCTFTATYADTICIGYHANNSTDTVDTVLEKNVTVTHSVNLLENSHNGKLCLLKGIAPLQLGNCSVAGWILGNPECELLISKESWSYIVEKPNPENGTCYPGHFADYEELREQLSSVSSFERFEIFPKGSSWPNHTVTGVSASCSHNGESSFYRNLLWLTGKNGLYPNLSKSYANNKEKEVLVLWGVHHPPNIGDQKTLYHTENAYVSVVSSHYSRKFTPEIAKRPKVRDQEGRINYYWTLLEPGDTIIFEANGNLIAPRYAFALSRGFGSGIINSNAPMDKCDAKCQTPQGAINSSLPFQNVHPVTIGECPKYVRSAKLRMVTGLRNIPSIQSRGLFGAIAGFIEGGWTGMVDGWYGYHHQNEQGSGYAADQKSTQNAINGITNKVNSVIEKMNTQFTAVGKEFNKLERRMENLNKKVDDGFIDIWTYNAELLVLLENERTLDFHDSNVKNLYEKVKSQLKNNAKEIGNGCFEFYHKCNDECMESVKNGTYDYPKYSEVSKLNREKIDGVKLESMGVYQILAIYSTVASSLVLLVSLGAISFWMCSNGSLQCRICI

SEQ ID NO: 11281 - protein, 565 aa, Artificial Sequence; identical to SEQ ID NO: 2488
  derived and/or modified protein sequence (wt) from hemagglutinin__InfluenzaA__AHL90265

SEQ ID NO: 11282 - protein, 565 aa, Artificial Sequence
  derived and/or modified protein sequence (wt) from hemagglutinin__InfluenzaA__AHL90277
MKVKLLVLLCTFTATYADTICIGYHANNSTDTVDTVLEKNVTVTHSVNLLENSHNGKLCLLKGIAPLQLGNCSVAGWILGNPECELLISKESWSYIVEKPNPENGTCYPGHFADYEELREQLSSVSSFERFEIFPKESSWPNHTVTGVSASCSHNGESSFYRNLLWLTGKNGLYPNLSKSYANNKEKEVLVLWGVHHPPNIVDQKTLYHTENAYVSVVSSHYSRKFTPEIAKRPKVRDQEGRINYYWTLLEPGDTIIFEANGNLIAPRYAFALSRGFGSGIINSNAPMDKCDAKCQTPQGAINSSLPFQNVHPVTIGECPKYVRSAKLRMVTGLRNIPSIQSRGLFGAIAGFIEGGWTGMVDGWYGYHHQNEQGSGYAADQKSTQNAINGITNKVNSVIEKMNTQFTAVGKEFNKLERRMENLNKKVDDGFIDIWTYNAELLVLLENERTLDFHDSNVKNLYEKVKSQLKNNAKEIGNGCFEFYHKCNDECMESVKNGTYDYPKYSEESKLNREKIDGVKLESMGVYQILAIYSTVASSLVLLVSLGAISFWMCSNGSLQCRICI

SEQ ID NO: 11283 - protein, 565 aa, Artificial Sequence
  derived and/or modified protein sequence (wt) from hemagglutinin__InfluenzaA__AHL90289
MKVKLLVLLCTFTATYADTICIGYHANNSTDTVDTVLEKNVTVTHSVNLLENSHNGKLCLLKGIAPLQLGNCSVAGWILGNPECELLISKESWSYIVEKPNPENGTCYPGHFADYEELREQLSSVSSFERFEIFPKESSWPNHTVTGVSASCSHNGESSFYRNLLWLTGKNGLYPNLSKSYANNKEKEVLVLWGVHHPPNIGDQKALYHTENAYVSVVSSHYSRKFTPEIAKRPKVRDQEGRINYYWTLLEPRDTIIFEANGNLIAPRYAFALSRGFGSGIINSNAPMDKCDAKCQTPQGAINSSLPFQNVHPVTIGECPKYVRSAKLRMVTGLRNIPSIQSRGLFGAIAGFIEGGWTGMVDGWYGYHHQNEQGSGYAADQKSTQNAINGITNKVNSVIEKMNTQFTAVGKEFNKLERRMENLNKKVDDGFIDIWTYNAELLVLLENERTLDFHDSNVKNLYEKVKSQLKNNAKEIGNGCFEFYHKCNDECMESVKNGTYDYPKYSEESKLNREKIDGVKLESMGVYQILAIYSTVASSLVLLVSLGAISFWMCSNGSLQCRICI

SEQ ID NO: 11284 - protein, 565 aa, Artificial Sequence; identical to SEQ ID NO: 11283
  derived and/or modified protein sequence (wt) from hemagglutinin__InfluenzaA__AHL90301

SEQ ID NO: 11285 - protein, 565 aa, Artificial Sequence
  derived and/or modified protein sequence (wt) from hemagglutinin__InfluenzaA__AHL90325
MKVKLLVLLCTFTATYADTICIGYHANNSTDTVDTVLEKNVTVTHSVNLLENSHNGKLCLLKGIAPLQLGNCSVAGWILGNPECELLISKESWSYIVEKPNPENGTCYPGHFADYEELREQLSSVSSFERFEIFPKESSWPNHTVTGVSASCSHNGESSFYRNLLWLTGKNGLYPNLSKSYANNKEKEVLVLWGVHHPPNIGDQKALYHTENAYVSVVSSHYSRKFTPEIAKRPKVRDQEGRINYYWTLLEPGDTIIFEANGNLIAPRYAFALSRGFGSGIINSNAPMDKCDAKCQTPQGAINSSLPFQNVHPVTIGECPKYVRSAKLRMVTGLRNIPSIQSRGLFGAIAGFIEGGWTGMVDGWYGYHHQNEQGSGYAADQKSTQNAINGITNKVNSVIEKMNTQFTAVGKEFNKLERRMENLNKKVDDGFIDIWTYNAELLVLLENERTLDFHDSNVKNLYEKVKSQLKNNAKEMGNGCFEFYHKCNDECMESVKNGTYDYPKYSEESKLNREKIDGVKLESMGVYQILAIYSTVASSLVLLVSLGAISFWMCSNGSLQCRICI

SEQ ID NO: 11286 - protein, 565 aa, Artificial Sequence; identical to SEQ ID NO: 11285
  derived and/or modified protein sequence (wt) from hemagglutinin__InfluenzaA__AHL90337

SEQ ID NO: 11287 - protein, 565 aa, Artificial Sequence; identical to SEQ ID NO: 2488
  derived and/or modified protein sequence (wt) from hemagglutinin__InfluenzaA__AHL90349

SEQ ID NO: 11288 - protein, 565 aa, Artificial Sequence; identical to SEQ ID NO: 2488
  derived and/or modified protein sequence (wt) from hemagglutinin__InfluenzaA__AHL90361

SEQ ID NO: 11289 - protein, 565 aa, Artificial Sequence; identical to SEQ ID NO: 11282
  derived and/or modified protein sequence (wt) from hemagglutinin__InfluenzaA__AHL90373

SEQ ID NO: 11290 - protein, 566 aa, Artificial Sequence
  derived and/or modified protein sequence (wt) from hemagglutinin__InfluenzaA__AHL90385
MKTIIALSYIQCLVFAQKFPGNDNSTATLCLGHHAVPNGTIVKTITNDQIEVTNATELVQSSSTGEICDSPHQILDGENCTLIDALLGDPQCDGFQNKNWDLFVERSKAYSNCYPYDVPDYASLRSLVASSGTLEFNNESFNWTGVTQNGTSSACIRRSNNSFFSRLNWLTHSKFKYPALNVTMPNNENFDKLYIWGVHHPGTDNDQIFLYAQASGRITVSTKRSQQTVIPNIGSRPRVRNIPSRISIYWTIVKPGDILLINSTGNLIAPRGYFKIRSGKSSIMRSDAPIGKCNSECITPNGSIPNDKPFQNVNRITYGACPRYVKQNTLKLATGMRNVPEKQTRGIFGAIAGFIENGWEGMVDGWYGFRHQNSEGIGQAADLKSTQAAIDQINGKLNRLIGRTNEKFHQIEKEFSEVEGRIQDLEKYVEDTKIDLWSYNAELLVALENQHTIDLTDSEMNKLFEKTKKQLRENAEDMGNGCFKIYHKCDNACIGSIRNGTYDHDVYRDEALNNRFQIKGVELKSGYKDWILWISFAISCFLLCIALLGFIMWACQKGNIRCNICI

SEQ ID NO: 11291 - protein, 566 aa, Artificial Sequence
  derived and/or modified protein sequence (wt) from hemagglutinin__InfluenzaA__AHL90397
MKTIIALSYILCLVFAQKLPGNDNSTATLCLGHHAVPNGTIVKTITNDQIEVTNATELVQSSSTGEICDSPHQILDGENCTLIDALLGDPQCDGFQNKKWDLFVERSKAYSNCYPYDVPDYASLRSLVASSGTLEFNNESFNWTGVTQNGTSSACIRRSNNSFFSRLNWLTHLKFKYPALNVTMPNNEQFDKLYIWGVHHPGTDNDQIFLYAQASGRITVSTKRSQQTVIPNIGSRPRVRNIPSRISIYWTIVKPGDILLINSTGNLIAPRGYFKIRSGKSSIMRSDAPIGKCSSECITPNGSIPNDKPFQNVNRITYGACPRYVKQNTLKLATGMRNVPEKQTRGIFGAIAGFIENGWEGMVDGWYGFRHQNSEGRGQAADLKSTQAAIDQINGKLNRLIGKTNEKFHQIEKEFSEVEGRIQDLEKYVEDTKIDLWSYNAELLVALENQHTIDLTDSEMNKLFEKTKKQLRENAEDMGNGCFKIYHKCDNACIGSIRNGTYDHDVYRDEALNNRFQIKGVELKSGYKDWILWISFAISCFLLCVALLGFIMWACQKGNIRCNICI

SEQ ID NO: 11292 - protein, 566 aa, Artificial Sequence; identical to SEQ ID NO: 2434
  derived and/or modified protein sequence (wt) from hemagglutinin__InfluenzaA__AHL90410

SEQ ID NO: 11293 - protein, 566 aa, Artificial Sequence
  derived and/or modified protein sequence (wt) from hemagglutinin__InfluenzaA__AHL90422
MKTIIALSYILCLVFAQKLPGNDNSTATLCLGHHAVPNGTIVKTITNDQIEVTNATELVQSSSTGEICDSPHQILDGENCTLIDALLGDPQCDGFQNKKWDLFVERSKAYSNCYPYDVPDYASLRSLVASSGTLEFNNESFNWTGVTQNGTSSACIRRSNNSFFSRLNWLTHSKFKYPALNVTMPNNEEFDKLYIWGVHHPGTDNDQIFLYAQASGRITVSTKRSQQTVIPNIGSRPRVRNIPSRISIYWTIVKPGDILLINSTGNLIAPRGYFKIRSGKSSIMRSDAPIGKCNSECITPNGSIPNDKPFQNVNRITYGACPRYVKQNTLKLATGMRNVPEKQTRGIFGAIAGFIENGWEGMVDGWYGFRHQNSEGIGQAADLKSTQAAIDQINGKLNRLIGKTNEKFHQIEKEFSEVEGRIQDLEKYVEDTKIDLWSYNAELLVALENQHTIDLTDSEMSKLFEKTKKQLRENAEDMGNGCFKIYHKCDNTCIGSIRNGTYDHNVYRDEALNNRFQIKGVELKSGYKDWILWISFAISCFLLCVALLGFIMWACQKGNIRCNICI

SEQ ID NO: 11294 - protein, 566 aa, Artificial Sequence; identical to SEQ ID NO: 2434
  derived and/or modified protein sequence (wt) from hemagglutinin__InfluenzaA__AHL90434

SEQ ID NO: 11295 - protein, 566 aa, Artificial Sequence; identical to SEQ ID NO: 2434
  derived and/or modified protein sequence (wt) from hemagglutinin__InfluenzaA__AHL90446

SEQ ID NO: 11296 - protein, 566 aa, Artificial Sequence
  derived and/or modified protein sequence (wt) from hemagglutinin__InfluenzaA__AHL90458
MKTIIALSYILCLVFAQKLPGNDNSTATLCLGHHAVPNGTIVKTITNDQIEVTNATELVQSSSTGEICDSPHQILDGENCALIDALLGDPQCDGFQNKKWDLFVERSKAYSNCYPYDVPDYASLRSLVASSGTLEFNNESFNWTGVTQNGTSSACIRRSNNSFFSRLNWLTHLKFKYPALNVTMPNNEQFDKLYIWGVHHPGTDNDQIFLYAQASGRITVSTKRSQQTVIPNIGSRPRVRNIPSRISIYWTIVKPGDILLINSTGNLIAPRGYFKIRSGKSSIMRSDAPIGKCNSECITPNGSIPNDKPFQNVNRITYGACPRYVKQNTLKLATGMRNVPEKQTRGIFGAIAGFIENGWEGMVDGWYGFRHQNSEGRGQAADLKSTQAAIDQINGKLNRLIGKTNEKFHQIEKEFSEVEGRIQDLEKYVEDTKIDLWSYNAELLVALENQHTIDLTDSEMNKLFEKTKKQLRENAEDMGNGCFKIYHKCDNACIGSIRNGTYDHDVYRDEALNNRFQIKGVELKSGYKDWILWISFAISCFLLCVALLGFIMWACQKGNIRCNICI

SEQ ID NO: 11297 - protein, 566 aa, Artificial Sequence; identical to SEQ ID NO: 2434
  derived and/or modified protein sequence (wt) from hemagglutinin__InfluenzaA__AHL90470

SEQ ID NO: 11298 - protein, 566 aa, Artificial Sequence; identical to SEQ ID NO: 2434
  derived and/or modified protein sequence (wt) from hemagglutinin__InfluenzaA__AHL90482

SEQ ID NO: 11299 - protein, 566 aa, Artificial Sequence; identical to SEQ ID NO: 2537
  derived and/or modified protein sequence (wt) from hemagglutinin__InfluenzaA__AHL90494

SEQ ID NO: 11300 - protein, 566 aa, Artificial Sequence; identical to SEQ ID NO: 2537
  derived and/or modified protein sequence (wt) from hemagglutinin__InfluenzaA__AHL90506

SEQ ID NO: 11301 - protein, 566 aa, Artificial Sequence
  derived and/or modified protein sequence (wt) from hemagglutinin__InfluenzaA__AHL90518
MKTIIALSYILCLVFAQKLPGNDNSTATLCLGHHAVPNGTIVKTITNDQIEVTNATELVQSSSTGEICDSPHQILDGENCTLIDALLGDPQCDGFQNKKWDLFVERSKAYSNCYPYDVPDYASLRSLVASSGTLEFKNESFNWTGVTQNGTSSACIRRSNNSFFSRLNWLTHLKFKYPALNVTMPNKEKFDKLYIWGVHHPGTDNDQIFLYAQASGRITVSTKRSQQTVIPNIGSRPRVRNIPSRISIYWTIVKPGDILLINSTGNLIAPRGYFKIRSGKSSIMRSDAPIGKCNSECITPNGSIPNDKPFQNVNRITYGACPRYVKQNTLKLATGMRNVPEKQTRGIFGAIAGFIENGWEGMVDGWYGFRHQNSEGTGQAADLKSTQAAIDQINGKLNRLIGKTNEKFHQIEKEFSEVEGRIQDLEKYVEDTKIDLWSYNAELLVALENQHTIDLTDSEMNKLFEKTKKQLRENAEDMGNGCFKIYHKCDNACIGSIRNGTYDHDVYRDEALNNRFQIKGVELKSGYKDWILWISFAISCFLLCVALLGFIMWACQKGNIRCNICI

SEQ ID NO: 11302 - protein, 566 aa, Artificial Sequence; identical to SEQ ID NO: 3213
  derived and/or modified protein sequence (wt) from hemagglutinin__InfluenzaA__AHL90530

SEQ ID NO: 11303 - protein, 566 aa, Artificial Sequence; identical to SEQ ID NO: 2434
  derived and/or modified protein sequence (wt) from hemagglutinin__InfluenzaA__AHL90542

SEQ ID NO: 11304 - protein, 566 aa, Artificial Sequence; identical to SEQ ID NO: 2434
  derived and/or modified protein sequence (wt) from hemagglutinin__InfluenzaA__AHL90554

SEQ ID NO: 11305 - protein, 566 aa, Artificial Sequence; identical to SEQ ID NO: 2434
  derived and/or modified protein sequence (wt) from hemagglutinin__InfluenzaA__AHL90566

SEQ ID NO: 11306 - protein, 566 aa, Artificial Sequence; identical to SEQ ID NO: 2434
  derived and/or modified protein sequence (wt) from hemagglutinin__InfluenzaA__AHL90578

SEQ ID NO: 11307 - protein, 566 aa, Artificial Sequence; identical to SEQ ID NO: 2537
  derived and/or modified protein sequence (wt) from hemagglutinin__InfluenzaA__AHL90590

SEQ ID NO: 11308 - protein, 566 aa, Artificial Sequence; identical to SEQ ID NO: 2434
  derived and/or modified protein sequence (wt) from hemagglutinin__InfluenzaA__AHL90602

SEQ ID NO: 11309 - protein, 566 aa, Artificial Sequence; identical to SEQ ID NO: 2434
  derived and/or modified protein sequence (wt) from hemagglutinin__InfluenzaA__AHL90614

SEQ ID NO: 11310 - protein, 566 aa, Artificial Sequence
  derived and/or modified protein sequence (wt) from hemagglutinin__InfluenzaA__AHL90638
MKTIIALSYILCLVFAQKLPGNDNSTATLCLGHHAVPNGTIVKTITNDQIEVTNATELVQSSSTGEICDSPHQILDGENCTLIDALLGDPQCDGFQNKKWDLFVERSKAYSNCYPYDVPDYASLRSLVASSGTLEFNNESFNWTGVTQNGTSSACIRRSNNSFFSRLNWLTHLKFKYPALNVTMPNNEQFDKLYIWGVHHPGTDNDQIFLYAQASGRITVSTKRSQQTVIPNIGSRPRVRNIPSRISIYWTIVKPGDILLINSTGNLIAPRGYFKIRSRKSSIMRSDAPIGKCNSECITPNGSIPNDKPFQNVNRITYGACPRYVKQNTLKLATGMRNVPEKQTRGIFGAIAGFIENGWEGMVDGWYGFRHQNSEGRGQAADLKSTQAAIDQINGKLNRLIGKTNEKFHQIEKEFSEVEGRIQDLEKYVEDTKIDLWSYNAELLVALENQHTIDLTDSEMNKLFEKTKKQLRENAEDMGNGCFKIYHKCDNACIGSIRNGTYDHDVYRDEALNNRFQIKGVELKSGYKDWILWISFAISCFLLCVALLGFIMWACQKGNIRCNICI

SEQ ID NO: 11311 - protein, 566 aa, Artificial Sequence
  derived and/or modified protein sequence (wt) from hemagglutinin__InfluenzaA__AHL90650
MKTIIALSYILCLVFAQKLPGNDNSTATLCLGHHAVPNGTIVKTITNDQIEVTNATELVQSSSTGEICDSPHQILDGENCTLIDALLGDPQCDGFQNKKWDLFVERSKAYSNCYPYDVPDYASLRSLVASSGTLEFNNESFNWTGVTQNGTSSACIRRSNNSFFSRLNWLTHLKFKYPALNVTMPNNEQFDKLYIWGVHHPGTDNDQTFLYAQASGRITVSTKRSQQTVIPNIGSRPRVRNIPSRISIYWTIVKPGDILLINSTGNLIAPRGYFKIRSGKSSIMRSDAPIGKCNSECITPNGSIPNDKPFQNVNRITYGACPRYVKQNTLKLATGMRNVPEKQTRGIFGAIAGFIENGWEGMVDGWYGFRHQNSEGRGQAADLKSTQAAIDQINGKLNRLIGKTNEKFHQIEKEFSEVEGRIQDLEKYVEDTKIDLWSYNAELLVALENQHTIDLTDSEMNKLFEKTKKQLRENAEDMGNGCFKIYHKCDNACIGSIRNGTYDHDVYRDEALNNRFQIKGVELKSGYKDWILWISFAISCFLLCVALLGFIMWACQKGNIRCNICI

SEQ ID NO: 11312 - protein, 566 aa, Artificial Sequence; identical to SEQ ID NO: 2434
  derived and/or modified protein sequence (wt) from hemagglutinin__InfluenzaA__AHL90662

SEQ ID NO: 11313 - protein, 566 aa, Artificial Sequence
  derived and/or modified protein sequence (wt) from hemagglutinin__InfluenzaA__AHL90674
MKTIIALSYILCLVFAQKLPGNDNSTATLCLGHHAVPNGTIVKTITNDQIEVTNATELVQSSSTGEICDSPHQILDGENCTLIDALLGDPQCDGFQNKKWDLFVERSKAYSNCYPYDVPDYASLRSLVASSGTLEFNNESFNWTGVTQNGTSSACIRRSNNSFFSRLNWLTHLKFKYPALNVTMPNNEKFDKLYIWGVHHPGTDNDQIFLYAQASGRITVSTKRSQQTVIPNIGSRPRVRNIPSRISIYWTIVKPGDILLINSTGNLIAPRGYFKIRSGKSSIMRSDAPIGKCNSECITPNGSIPNDKPFQNVNRITYGACPRYVKQNTLKLATGMRNVPEKQTRGIFGAIAGFIENGWEGMVDGWYGFRHQNSEGIGQAADLKSTQAAIDQINGKLNRLIGKTNEKFHQIEKEFSEVEGRIQDLEKYVEDTKIDLWSYNAELLVALENQHTIDLTDSEMNKLFEKTKKQLRENAEDMGNGCFKIYHKCDNVCIGSIRNGTYDHDVYRDEALNNRFQIKGVELKSGYKDWILWISFAISCFLLCVALLGFIMWACQKGNIRCNICI

SEQ ID NO: 11314 - protein, 566 aa, Artificial Sequence
  derived and/or modified protein sequence (wt) from hemagglutinin__InfluenzaA__AHL90686
MKTIIALSYILCLVFAQKLPGNDNSTATLCLGHHAVPNGTIVKTITNDQIEVTNATELVQSSSTGEICDSPHQILDGENCTLIDALLGDPQCDGFQNKKWDLFVERSKAYSNCYPYDVPDYASLRSLVASSGTLEFNNESFNWTGVTQNGTSSACIRRSNNSFFSRLNWLTHLKFKYPALNVTMPNNEQFDKLYIWGVHHPGTDNDQIFLYAQASGRITVSTKRSQQTVIPNIGSRPRVRNIPSRISIYWTIVKPGDILLINSTGNLIAPRGYFKIRSGKSSIMRSDAPIGKCNSECITPNGSIPNDKPFQNVNRITYGACPRYVKQNTLKLATGMRNVPEKQTRGIFGAIAGFIENGWEGMVDGWYGFRHQNSEGRGQAADLKSTQAAIDQINGKLNRLIGKTNEKFHQIEKEFSEVEGRIQDLEKYVEDTKIDLWSYNAELLVAMENQHTIDLTDSEMNKLFEKTKKQLRENAEDMGNGCFKIYHKCDNACIGSIRNGTYDHDVYRDEALNNRFQIKGVELKSGYKDWILWISFAISCFLLCVALLGFIMWACQKGNIRCNICI

SEQ ID NO: 11315 - protein, 566 aa, Artificial Sequence; identical to SEQ ID NO: 2434
  derived and/or modified protein sequence (wt) from hemagglutinin__InfluenzaA__AHL90698

SEQ ID NO: 11316 - protein, 566 aa, Artificial Sequence; identical to SEQ ID NO: 2434
  derived and/or modified protein sequence (wt) from hemagglutinin__InfluenzaA__AHL90710

SEQ ID NO: 11317 - protein, 565 aa, Artificial Sequence; identical to SEQ ID NO: 5972
  derived and/or modified protein sequence (wt) from hemagglutinin__InfluenzaA__AHL90722

SEQ ID NO: 11318 - protein, 565 aa, Artificial Sequence
  derived and/or modified protein sequence (wt) from hemagglutinin__InfluenzaA__AHL90746
MKVKLLVLLCTFTATYADTICIGYHANNSTDTVDTVLEKNVTVTHSVNLLENSHNGKLCLLKGIAPLQLGNCSVAGWILGNPECELLISKESWSYIVEKPNPENGTCYPGHFADYEELREQLSSVSSFKRFEIFPKESSWPNHTVTGVSASCSHNGESSFYRNLLWLTGKNGLYPNLSKSYANNKEKEVLVLWGVHHPPNIVDQKTLYRTENAYVSVVSSHYSRKFTPEIAKRPKVRDQEGRINYYWTLLEPGDTIIFEANGNLIAPRYAFALSRGFGSGIINSNAPMGKCDAKCQTPQGAINSSLPFQNVHPVTIGECPKYVRSAKLRMVTGLRNIPSIQSRGLFGAIAGFIEGGWTGMVDGWYGYHHQNEQGSGYAADQKSTQNAINGITNKVNSVIEKMNTQFTAVGKEFNKLERRMENLNKKVDDGFIDIWTYNAELLVLLENERTLDFHDSNVKNLYEKVKSQLKNNAKEIGNGCFEFYHKCNDECMESVKNGTYDYPKYSEESKLNREKIDGVKLESMGVYQILAIYSTVASSLVLLVSLGAISFWMCSNGSLQCRICI

SEQ ID NO: 11319 - protein, 565 aa, Artificial Sequence; identical to SEQ ID NO: 3131
  derived and/or modified protein sequence (wt) from hemagglutinin__InfluenzaA__AHL90758

SEQ ID NO: 11320 - protein, 565 aa, Artificial Sequence
  derived and/or modified protein sequence (wt) from hemagglutinin__InfluenzaA__AHL90770
MKVKLLVLLCTFTATYADTICIGYHANNSTDTVDTVLEKNVTVTHSVNLLENSHNGKLCLLKGIAPLQLGNCSVAGWILGNPECELLISKESWSYIVEKPNPENGTCYPGHFADYEELREQLSSVSSFERFEIFPKDSSWPNHTVTGVSASCSHNGESSFYRNLLWLTGKNGLYPNLSKSYANNKEKEVLVLWGVHHPPSINDQKTLYHTENAYVSVVSSHHSRKFTPEIAKRPKVRDQEGRINYYWTLLEPGDTIIFEANGNLIAPRYAFALSRGFGSGIINSNAPMDKCDAKCQTPQGAINSSLPFQNVHPVTIGECPKYVRSAKLRMVTGLRNIPSIQSRGLFGAIAGFIEGGWTGMVDGWYGYHHQNEQGSGYAADQKSTQNAINGITNKVNSVIEKMNTQFTAVGKEFNKLERRMENLNKKVDDGFIDIWTYNAELLVLLENERTLDFHDSNVKNLYEKVKSQLKNNAKEIGNGCFEFYHKCNDECMESVKNGTYDYPKYSEESKLNREKIDGVKLESMGVYQILTIYSTVASSLVLLVSLGAISFWMCSNGSLQCRICI

SEQ ID NO: 11321 - protein, 565 aa, Artificial Sequence; identical to SEQ ID NO: 3616
  derived and/or modified protein sequence (wt) from hemagglutinin__InfluenzaA__AHL90782

SEQ ID NO: 11322 - protein, 565 aa, Artificial Sequence
  derived and/or modified protein sequence (wt) from hemagglutinin__InfluenzaA__AHL90794
MKVKLLVLLCTFTATYADTICIGYHANNSTDTVDTVLEKNVTVTHSVNLLENSHNGKLCLLKGIAPLQLGNCSVAGWILGNPECELLISKESWSYIVEKPNPENGTCYPGHFADYEELREQLSSVSSFERFEIFPKESSWPNHTVTGVSASCSHNGESSFYRNLLWLTGKNGLYPNLSKSYANNKEKEVLVLWGVHHPPNIGDQNTLYHTENAYVSVVSSHYSRKFTPEIAKRPKVRDQEGRINYYWTLLEPGDTIIFEANGNLIAPRYAFALSRGFGSGIINSNAPMDKCDAKCQTPQGAINSSLPFQNVHPVTIGECPKYVRSAKLRMVTGLRNIPSIQSRGLFGAIAGFIEGGWTGMVDGWYGYHHQNEQGSGYAADQKSTQNAINGITNKVNSVIEKMNTQFTAVGKEFNKLERRMENLNKKVDDGFIDIWTYNAELLVLLENERTLDFHDSNVKNLYEKVKSQLKNNAKEIGNGCFEFYHKCNDECMESVKNGTYDYPKYSEESKLNREKIDGVKLESMGVYQILAIYSTVASSLVLLVSLGAISFWMCSNGSLQCRICI

SEQ ID NO: 11323 - protein, 565 aa, Artificial Sequence
  derived and/or modified protein sequence (wt) from hemagglutinin__InfluenzaA__AHL90806
MKVKLLVLLCTFTATYADTICIGYHANNSTDTVDTVLEKNVTVTHSVNLLENSHNGKLCLLKGIAPLQLGNCSVAGWILGNPECELLISKESWSYIVEKPNPENGTCYPGHFADYEELREQLSSVSSFERFEIFPKESSWPNHTVTGVSASCSHNGESSFYRNLLWLTGKNGLYPNLSKSYANNKEKEVLVLWGVHHPPNIVDQKTLYRTENAYVSVVSSHYSRKFTPEIAKRPKVRDQEGRINYYWTLLEPGDTIIFEANGNLIAPRYAFALSRGFGSGIINSNAPMDKCDAKCQTPQGAINSSLPFQNVHPVTIGECPKYVRSAKLRMVTGLRNIPSIQSRGLFGAIAGFIEGGWTGMVDGWYGYHHQNEQGSGYAADQKSTQNAINGITNKVNSVIEKMNTQFTAVGKEFNKLERRMENLNKKVDDGFIDIWTYNAELLVLLENERTLDFHDSNVKNLYEKVKSQLKNNAKEIGNGCFEFYHKCNDECMESVKNGTYDYPKYSEESKLNREKIDGVKLESMGVYQILAIYSTVASSLVLLISLGAISFWMCSNGSLQCRICI

SEQ ID NO: 11324 - protein, 565 aa, Artificial Sequence; identical to SEQ ID NO: 5972
  derived and/or modified protein sequence (wt) from hemagglutinin__InfluenzaA__AHL90818

SEQ ID NO: 11325 - protein, 565 aa, Artificial Sequence; identical to SEQ ID NO: 5972
  derived and/or modified protein sequence (wt) from hemagglutinin__InfluenzaA__AHL90830

SEQ ID NO: 11326 - protein, 565 aa, Artificial Sequence; identical to SEQ ID NO: 3131
  derived and/or modified protein sequence (wt) from hemagglutinin__InfluenzaA__AHL90842

SEQ ID NO: 11327 - protein, 565 aa, Artificial Sequence; identical to SEQ ID NO: 5513
  derived and/or modified protein sequence (wt) from hemagglutinin__InfluenzaA__AHL90854

SEQ ID NO: 11328 - protein, 565 aa, Artificial Sequence; identical to SEQ ID NO: 3131
  derived and/or modified protein sequence (wt) from hemagglutinin__InfluenzaA__AHL90866

SEQ ID NO: 11329 - protein, 565 aa, Artificial Sequence; identical to SEQ ID NO: 5513
  derived and/or modified protein sequence (wt) from hemagglutinin__InfluenzaA__AHL90878

SEQ ID NO: 11330 - protein, 565 aa, Artificial Sequence; identical to SEQ ID NO: 5972
  derived and/or modified protein sequence (wt) from hemagglutinin__InfluenzaA__AHL90890

SEQ ID NO: 11331 - protein, 565 aa, Artificial Sequence; identical to SEQ ID NO: 5513
  derived and/or modified protein sequence (wt) from hemagglutinin__InfluenzaA__AHL90902

SEQ ID NO: 11332 - protein, 565 aa, Artificial Sequence; identical to SEQ ID NO: 3131
  derived and/or modified protein sequence (wt) from hemagglutinin__InfluenzaA__AHL90914

SEQ ID NO: 11333 - protein, 565 aa, Artificial Sequence; identical to SEQ ID NO: 5513
  derived and/or modified protein sequence (wt) from hemagglutinin__InfluenzaA__AHL90938

SEQ ID NO: 11334 - protein, 565 aa, Artificial Sequence; identical to SEQ ID NO: 5513
  derived and/or modified protein sequence (wt) from hemagglutinin__InfluenzaA__AHL90950

SEQ ID NO: 11335 - protein, 565 aa, Artificial Sequence; identical to SEQ ID NO: 5513
  derived and/or modified protein sequence (wt) from hemagglutinin__InfluenzaA__AHL90962

SEQ ID NO: 11336 - protein, 565 aa, Artificial Sequence
  derived and/or modified protein sequence (wt) from hemagglutinin__InfluenzaA__AHL90974
MKVKLLVLLCTFTATYADTICIGYHANNSTDTVDTVLEKNVTVTHSVNLLENSHNGKLCLLKGIAPLQLGNCSVAGWILGNPECELLISKESWSYIVEKPNPENGTCYPGHFADYEELREQLSSVSSFERFEIFPKESSWPNHTVTGVSASCSHNGESSFYRNLLWLTGKNGLYPNLSKSYANNKEKEVLVLWGVHHPPSISDQKTLYHTENAYVSVVSSHYSRKFTPEVAKRPKVRDQEGRINYYWTLLEPGDTIIFEANGNLIAPRYAFALSRGFGSGIINSNAPMDKCDAKCQTPQGAINSSLPFQNVHPVTIGECPKYVRSAKLRMVTGLRNIPSIQSRGLFGAIAGFIEGGWTGMVDGWYGYHHQNEQGSGYAADQKSTQNAINGITNKVNSVIEKMNTQFTAVGKEFNKLERRMENLNKKVDDGFIDIWTYNAELLVLLENERTLDFHDSNVKNLYEKVKGQLKNNAKEIGNGCFEFYHKCNDECMESVKNGTYDYPKYSEESKLNREKIDGVKLESMGVYQILAIYSTVASSLVLLVSLGAISFWMCSNGSLQCRICI

SEQ ID NO: 11337 - protein, 565 aa, Artificial Sequence
  derived and/or modified protein sequence (wt) from hemagglutinin__InfluenzaA__AHL90986
MKVKLLVLLCTFTATYADTICIGYHANNSTDTVDTVLEKNVTVTHSVNLLENSHNGKLCLLKGIAPLQLGNCSVAGWILGNPECELLISKESWSYIVEKPNPENGTCYPGHFADYEELREQLSSVSSFERFEIFPKESSWPNHTVTGVSASCSHNGESSFYRNLLWLTVKNGLYPNLSKSYANNKEKEVLVLWGVHHPPNIVDQKTLYRTENAYVSVVSSHYSRKFTPEIAKRPKVRDQEGRINYYWTLLEPGDTIIFEANGNLIAPRYAFALSKGFGSGIINSNAPMDKCDAKCQTPRGAINSSLPFQNVHPVTIGECPKYVRSAKLRMVTGLRNIPSIQSRGLFGAIAGFIEGGWTGMVDGWYGYHHQNEQGSGYAADQKSTQNAINGITNKVNSVIEKMNTQFTAVGKEFNKLERRMENLNKKVDDGFIDIWTYNAELLVLLENERTLDFHDSNVKNLYEKVKSQLKNNAKEIGNGCFEFYHKCNDECMESVKNGTYDYPKYSEESKLNREKIDGVKLESMGVYQILAIYSTVASSLVLLVSLGAISFWMCSNGSLQCRICI

SEQ ID NO: 11338 - protein, 565 aa, Artificial Sequence
  derived and/or modified protein sequence (wt) from hemagglutinin__InfluenzaA__AHL91010
MKVKLLVLLCTFTATYADTICIGYHANNSTDTVDTVLEKNVTVTHSVNLLENSHNGKLCLLKGIAPLQLGNCSVAGWILGNPECELLISKESWSYIVEKPNPENGTCYPGHFADYEELREQLSSVSSFERFEIFPKDSSWPNHTVTGVSASCSHNGESSFYRNLLWLTGKNGLYPNLSKSYANNKEKEVLVLWGVHHPPSINDQKTLYHTENAYVSVVSSHYSRKFTPEIAKRPKVRDQEGRINYYWTLLEPGDTIIFEANGNLIAPRYAFALSRGFGSGIINSNAPMDKCDAKCQTPQGAINSSLPFQNVHPVTIGECPKYVRSAKLRMVTGLRNIPSIQSRGLFGAIAGFIEGGWTGMVDGWYGYHHQNEQGSGYAADQKSTQNAINGITNKVNSVIEKMNTQFTAVGKEFNKLERRMENLNKKVDDGFIDIWTYNAELLVLLENERTLDFHDSNVKNLYEKVKSQLKNNAKEIGNGCFEFYHKCNDECMESVKNGTYDYPKYSEESKLNREKIDGVKLESMGVYQILTIYSTVASSLVLLVSLGAISFWMCSNGSLQCRICI

SEQ ID NO: 11339 - protein, 565 aa, Artificial Sequence
  derived and/or modified protein sequence (wt) from hemagglutinin__InfluenzaA__AHL91022
MKVKLLVLLCTFTATYADTICIGYHANNSTDTVDTVLEKNVTVTHSVNLLENSHNGKLCLLKGIAPLQLGNCSVAGWILGNPECELLISKESWSYIVEKPNPENGTCYPGHFADYEELREQLSSVSSFERFEIFPKDSSWPNHTVTGVSASCSHNGENSFYRNLLWLTGKNGLYPNLSKSYANNKEKEVLVLWGVHHPPSINDQKTLYHTENAYVSVVSSHYSRKFTPEIAKRPKVRDQEGRINYYWTLLEPGDTIIFEANGNLIAPRYAFALSRGFGSGIINSNAPMDKCDAKCQTPQGAINSSLPFQNVHPVTIGECPKYVRSAKLRMVTGLRNIPSIQSRGLFGAIAGFIEGGWTGMVDGWYGYHHQNEQGSGYAADQKSTQNAINGITNKVNSVIEKMNTQFTAVGKEFNKLERRMENLNKKVDDGFIDIWTYNAELLVLLENERTLDFHDSNVKNLYEKVKSQLKNNAKEIGNGCFEFYHKCNDECMESVKNGTYDYPKYSEESKLNREKIDGVKLESMGVYQILTIYSTVASSLVLLVSLGAISFWMCSNGSLQCRICI

SEQ ID NO: 11340 - protein, 566 aa, Artificial Sequence; identical to SEQ ID NO: 2434
  derived and/or modified protein sequence (wt) from hemagglutinin__InfluenzaA__AHL91034

SEQ ID NO: 11341 - protein, 566 aa, Artificial Sequence; identical to SEQ ID NO: 5500
  derived and/or modified protein sequence (wt) from hemagglutinin__InfluenzaA__AHL91046

SEQ ID NO: 11342 - protein, 566 aa, Artificial Sequence; identical to SEQ ID NO: 11314
  derived and/or modified protein sequence (wt) from hemagglutinin__InfluenzaA__AHL91058

SEQ ID NO: 11343 - protein, 566 aa, Artificial Sequence
  derived and/or modified protein sequence (wt) from hemagglutinin__InfluenzaA__AHL91070
MKTIIALSYILCLVFAQKLPGNDNSMATLCLGHHAVPNGTIVKTITNDQIEVTNATELVQSSSTGEICDSPHQILDGENCTLIDALLGDPQCDGFQNKKWDLFVERSKAYSNCYPYDVPDYASLRSLVASSGTLEFNNESFNWTGVTQNGTSSACMRRSNNSFFSRLNWLTHLKFKYPALNVTMPNNEQFDKLYIWGVHHPGTDNDQIFLYAQASGRITVSTKRSQQTVIPNIGSRPRVRNIPSRISIYWTIVKPGDILLINSTGNLIAPRGYFKIRSGKSSIMRSDAPIGKCNSECITPNGSIPNDKPFQNVNRITYGACPRYVKQNTLKLATGMRNVPEKQTRGIFGAIAGFIENGWEGMVDGWYGFRHQNSEGRGQAADLKSTQAAIDQINGKLNRLIGKTNEKFHQIEKEFSEVEGRIQDLEKYVEDTKIDLWSYNAELLVALENQHTIDLTDSEMNKLFEKTKKQLRENAEDMGNGCFKIYHKCDNACIGSIRNGTYDHDVYRDEALNNRFQIKGVELKSGYKDWILWISFAISCFLLCVALLGFIMWACQKGNIRCNICI

SEQ ID NO: 11344 - protein, 566 aa, Artificial Sequence
  derived and/or modified protein sequence (wt) from hemagglutinin__InfluenzaA__AHL91082
MKTIIALSYILCLVFAQKLPGNDNSTATLCLGHHAVPNGTIVKTITNDQIEVTNATELVQSSSTGEICDSPHQILDGENCTLIDALLGDPQCDGFQNKKWDLFVERSKAYSNCYPYDVPDYASLRSLVASSGTLEFNNESFNWTGVTQNGTSSACIRRSNNSFFSRLNWLTHLKFKYPALNVTMPNNEQFDKLYIWGVHHPGTDNDQIFLYAQASGRITVSTKRSQQTVIPNIGSRPRVRNIPSRISIYWTIVKPGDILLINSTGNLIAPRGYFKIRSGKSSIMRSDAPIGKCNSECITPNGSIPNDKPFQNVNRITYGACPIYVKQNTLKLATGMRNVPEKQTRGIFGAIAGFIENGWEGMVDGWYGFRHQNSEGRGQAADLKSTQAAIDQINGKLNRLIGKTNEKFHQIEKEFSEVEGRIQDLEKYVEDTKIDLWSYNAELLVALENQHTIDLTDSEMNKLFEKTKKQLRENAEDMGNGCFKIYHKCDNACIGSIRNGTYDHDVYRDEALNNRFQIKGVELKSGYKDWILWISFAISCFLLCVALLGFIMWACQKGNIRCNICI

SEQ ID NO: 11345 - protein, 566 aa, Artificial Sequence; identical to SEQ ID NO: 5419
  derived and/or modified protein sequence (wt) from hemagglutinin__InfluenzaA__AHL91094

SEQ ID NO: 11346 - protein, 566 aa, Artificial Sequence
  derived and/or modified protein sequence (wt) from hemagglutinin__InfluenzaA__AHL91106
MKTIIALSYILCLVFAQKLPGNDNSTATLCLGHHAVPNGTIVKTITNDQIEVTNATELVQSSSKGEICDSPHQILDGENCTLIDALLGDPQCDGFQNKKWDLFVERSKAYSNCYPYDVPDYASLRSLVASSGTLEFNNESFNWTGVTQNGTSSACIRRSNNSFFSRLNWLTHLKFKYPALNVTMPNNEQFDKLYIWGVHHPGTDNDQIFLYAQASGRITVSTKRSQQTVIPNIGSRPRVRNIPSRISIYWTIVKPGDILLINSTGNLIAPRGYFKIRSGKSSIMRSDAPIGKCNSECITPNGSIPNDKPFQNVNRITYGACPRYVKQNTLKLATGMRNVPEKQTRGIFGAIAGFIENGWEGMVDGWYGFRHQNSEGRGQAADLKSTQAAIDQINGKLNRLIGKTNEKFHQIEKEFSEVEGRIQDLEKYVEDTKIDLWSYNAELLVALENQHTIDLTDSEMNKLFEKTKKQLRENAEDMGNGCFKIYHKCDNACIGSIRNGTYDHDVYRDEALNNRFQIKGVELKSGYKDWILWISFAISCFLLCVALLGFIMWACQKGNIRCNICI

SEQ ID NO: 11347 - protein, 566 aa, Artificial Sequence
  derived and/or modified protein sequence (wt) from hemagglutinin__InfluenzaA__AHL91118
MKTIIALSYILCLVFAQKLPGNDNSTATLCLGHHAVPNGTIVKTITNDQIEVTNATELVQSSSTGEICDSPHQILDGENCTLIDALLGDPQCDGFQNKKWDLFVERSKAYSNCYPYDVPDYASLRSLVASSGTLEFNNESFNWTGVTQNGTSSACIRRSNNSFFSKLNWLTHLKFKYPALNVTMPNNEQFDKLYIWGVHHPGTDNDQIFLYAQASGRITVSTKRSQQTVIPNIGSRPRVRNIPSRISIYWTIVKPGDILLINSTGNLIAPRGYFKIRSGKSSIMRSDAPIGKCNSECITPNGSIPNDKPFQNVNRITYGACPRYVKQNTLKLATGMRNVPEKQTRGIFGAIAGFIENGWEGMVDGWYGFRHQNSEGRGQAADLKSTQAAIDQINGKLNRLIGKTNEKFHQIEKEFSEVEGRIQDLEKYVEDTKIDLWSYNAELLVTLENQHTIDLTDSEMNKLFEKTKKQLRENAEDMGNGCFKIYHKCDNACIGSIRNGTYDHDVYRDEALNNRFQIKGVELKSGYKDWILWISFAISCFLLCVALLGFIMWACQKGNIRCNICI

SEQ ID NO: 11348 - protein, 566 aa, Artificial Sequence
  derived and/or modified protein sequence (wt) from hemagglutinin__InfluenzaA__AHL91130
MKTIIALSYILCLVFAQKLPGNDNSTATLCLGHHAVPNGTIVKTITNDQIEVTNATELVQSSSTGEICDSPHQILDGENCTLIDALLGDPQCDGFQNKKWDLFVERSKAYSNCYPYDVPDYASLRSLIASSGTLEFNNESFNWTGVTQNGTSSACIRRSNNSFFSRLNWLTHLKFKYPALNVTMPNNEQFDKLYIWGVHHPGTDNDQIFLYAQASGRITVSTKRSQQTVIPNIGSRPRVRNIPSRISIYWTIVKPGDILLINSTGNLIAPRGYFKIRSGKSSIMRSDAPIGKCNSECITPNGSIPNDKPFQNVNRITYGACPRYVKQNTLKLATGMRNVPEKQTRGIFGAIAGFIENGWEGMVDGWYGFRHQNSEGRGQAADLKSTQAAIDQINGKLNRLIGKTNEKFHQIEKEFSEVEGRIQDLEKYVEDTKIDLWSYNAELLVALENQHTIDLTDSEMNKLFEKTKKQLRENAEDMGNGCFKIYHKCDNACIGSIRNGTYDHNVYRDEALNNRFQIKGVELKSGYKDWILWISFAISCFLLCVALLGFIMWACQKGNIRCNICI

SEQ ID NO: 11349 - protein, 566 aa, Artificial Sequence; identical to SEQ ID NO: 2434
  derived and/or modified protein sequence (wt) from hemagglutinin__InfluenzaA__AHL91142

SEQ ID NO: 11350 - protein, 566 aa, Artificial Sequence; identical to SEQ ID NO: 2434
  derived and/or modified protein sequence (wt) from hemagglutinin__InfluenzaA__AHL91154

SEQ ID NO: 11351 - protein, 566 aa, Artificial Sequence; identical to SEQ ID NO: 630
  derived and/or modified protein sequence (wt) from hemagglutinin__InfluenzaA__AHL91166

SEQ ID NO: 11352 - protein, 566 aa, Artificial Sequence; identical to SEQ ID NO: 10467
  derived and/or modified protein sequence (wt) from hemagglutinin__InfluenzaA__AHL94984

SEQ ID NO: 11353 - protein, 566 aa, Artificial Sequence; identical to SEQ ID NO: 10467
  derived and/or modified protein sequence (wt) from hemagglutinin__InfluenzaA__AHL94996

SEQ ID NO: 11354 - protein, 566 aa, Artificial Sequence; identical to SEQ ID NO: 9835
  derived and/or modified protein sequence (wt) from hemagglutinin__InfluenzaA__AHL95008

SEQ ID NO: 11355 - protein, 566 aa, Artificial Sequence; identical to SEQ ID NO: 9997
  derived and/or modified protein sequence (wt) from hemagglutinin__InfluenzaA__AHL95020

SEQ ID NO: 11356 - protein, 566 aa, Artificial Sequence; identical to SEQ ID NO: 9994
  derived and/or modified protein sequence (wt) from hemagglutinin__InfluenzaA__AHL95032

SEQ ID NO: 11357 - protein, 566 aa, Artificial Sequence; identical to SEQ ID NO: 9868
  derived and/or modified protein sequence (wt) from hemagglutinin__InfluenzaA__AHL95044

SEQ ID NO: 11358 - protein, 566 aa, Artificial Sequence; identical to SEQ ID NO: 9858
  derived and/or modified protein sequence (wt) from hemagglutinin__InfluenzaA__AHL95056

SEQ ID NO: 11359 - protein, 566 aa, Artificial Sequence; identical to SEQ ID NO: 9997
  derived and/or modified protein sequence (wt) from hemagglutinin__InfluenzaA__AHL95068

SEQ ID NO: 11360 - protein, 566 aa, Artificial Sequence; identical to SEQ ID NO: 10545
  derived and/or modified protein sequence (wt) from hemagglutinin__InfluenzaA__AHL95080

SEQ ID NO: 11361 - protein, 566 aa, Artificial Sequence; identical to SEQ ID NO: 9868
  derived and/or modified protein sequence (wt) from hemagglutinin__InfluenzaA__AHL95092

SEQ ID NO: 11362 - protein, 566 aa, Artificial Sequence
  derived and/or modified protein sequence (wt) from hemagglutinin__InfluenzaA__AHL95104
MKTIIALSYILCLVFAQKLPGNDNSTATLCLGHHAVPNGTIVKTITNDRIEVTNATELVQNSSIGEICDSPHQILDGENCTLIDALLGDPQCDGFQNKKWDLFVERSKAYSNCYPYDVPDYASLRSLVASSGTLEFNNESFNWAGVTQNGTSSACMRGSNSSFFSRLNWLTHLNFKYPALNVTMPNNEQFDKLYIWGVHHPGTDKDQIFLYAQSSGRITVSTKRSQQAVIPNIGSRPRIRNIPSRISIYWTIVKPGDILLINSTGNLIAPRGYFKIRSGKSSIMRSDAPIGKCKSECITPNGSIPNDKPFQNVNRITYGACPRYVKQSTLKLATGMRNVPEKQTRGIFGAIAGFIENGWEGMMDGWYGFRHQNSEGRGQAADLKSTQAAIDQINGKLNRLIGKTNEKFHQIEKEFSEVEGRIQDLEKYVEDTKIDLWSYNAELLVALENQHTIDLTDSEMNKLFEKTKKQLRENAEDMGNGCFKIYHKCDNACIGSIRNGTYDHDVYRDEALNNRFQIKGVELKSGYKDWILWISFAISCFLLCVALLGFIMWACQKGNIRCNICI

SEQ ID NO: 11363 - protein, 566 aa, Artificial Sequence
  derived and/or modified protein sequence (wt) from hemagglutinin__InfluenzaA__AHL95116
MKTIIALSYILCLVFAQELPGNDDSTATLCLGHYAVPNGTIVKTITNDQIEVTNATELVQSSSTGEICNSPHQILDGENCTLIDALLGDPQCDGFQNKKWDLFVERSKAHSNCYPYDVPDYASLRSLVASSGTLEFNNESFNWTGVTQNGTSSACIRRSNNSFFSRLNWLTHLNFKYPALNVTMPNNEQFDKLYIWGVHHPGTDKDQIFLYAKASGRITVSTKRSQQAVIPNIGSRPRVRNIPSRVSIYWTIVKPGDILLINSTGNLIAPRGYFKIRSGKSSIMRSDAPIGKCNSACITPNGSIPNDKPFQNVNRITYGACPRYVKQNTLKLATGMRNVPEKQTRGIFGAIAGFIENGWEGMVDGWYGFRHQNSEGRGQAADLKSTQAAIDQINGKLNRLIGKTNEKFHQIEKEFSEVEGRIQDLEKYVEDTKIDLWSYNAELLVALENQHTIDLTDSEMNKLFEKTKKQLRENAEDMGNGCFKIYHKCDNACIGSIRNGTYDHDVYRDEALNNRFQIKGVELKSGYKDWILWISFAISCFLLCVALLGFIMWACQKGNIRCNICI

SEQ ID NO: 11364 - protein, 566 aa, Artificial Sequence; identical to SEQ ID NO: 9835
  derived and/or modified protein sequence (wt) from hemagglutinin__InfluenzaA__AHL95128

SEQ ID NO: 11365 - protein, 566 aa, Artificial Sequence; identical to SEQ ID NO: 9858
  derived and/or modified protein sequence (wt) from hemagglutinin__InfluenzaA__AHL95140

SEQ ID NO: 11366 - protein, 566 aa, Artificial Sequence; identical to SEQ ID NO: 9868
  derived and/or modified protein sequence (wt) from hemagglutinin__InfluenzaA__AHL95152

SEQ ID NO: 11367 - protein, 566 aa, Artificial Sequence; identical to SEQ ID NO: 9835
  derived and/or modified protein sequence (wt) from hemagglutinin__InfluenzaA__AHL95164

SEQ ID NO: 11368 - protein, 566 aa, Artificial Sequence; identical to SEQ ID NO: 9868
  derived and/or modified protein sequence (wt) from hemagglutinin__InfluenzaA__AHL95176

SEQ ID NO: 11369 - protein, 566 aa, Artificial Sequence; identical to SEQ ID NO: 9868
  derived and/or modified protein sequence (wt) from hemagglutinin__InfluenzaA__AHL95188

SEQ ID NO: 11370 - protein, 566 aa, Artificial Sequence; identical to SEQ ID NO: 9994
  derived and/or modified protein sequence (wt) from hemagglutinin__InfluenzaA__AHL95200

SEQ ID NO: 11371 - protein, 566 aa, Artificial Sequence; identical to SEQ ID NO: 9868
  derived and/or modified protein sequence (wt) from hemagglutinin__InfluenzaA__AHL95212

SEQ ID NO: 11372 - protein, 566 aa, Artificial Sequence; identical to SEQ ID NO: 9858
  derived and/or modified protein sequence (wt) from hemagglutinin__InfluenzaA__AHL95224

SEQ ID NO: 11373 - protein, 566 aa, Artificial Sequence; identical to SEQ ID NO: 9858
  derived and/or modified protein sequence (wt) from hemagglutinin__InfluenzaA__AHL95236

SEQ ID NO: 11374 - protein, 566 aa, Artificial Sequence; identical to SEQ ID NO: 9883
  derived and/or modified protein sequence (wt) from hemagglutinin__InfluenzaA__AHL95248

SEQ ID NO: 11375 - protein, 566 aa, Artificial Sequence
  derived and/or modified protein sequence (wt) from hemagglutinin__InfluenzaA__AHL95260
MKTIIALSYILCLVFAQKLPGNDNSTATLCLGHHAVPNGTIVKTITNDRIEVTNATELVQNSSISEICDSPHQILDGENCTLIDALLGDPQCDGFQNKKWDLFVERSKAYSNCYPYDVPDYASLRSLVASSGTLEFNNESFNWAGVTQNGTSSACIRGSNSSFFSRLNWLTHLNFKYPALNVTMPNNEQFDKLYIWGVHHPGTDKDQIFLYAQSSGRITVSTKRSQQAVIPNIGSRPRIRNIPSRISIYWTIVKPGDILLINSTGNLIAPRGYFKIRSGKSSIMRSDAPIGKCKSECITPNGSIPNDKPFQNVNRITYGACPRYVKQSTLKLATGMRNVPEKQTRGIFGAIAGFIENGWEGMVDGWYGFRHQNSEGRGQAADLKSTQAAIDQINGKLNRLIGKTNEKFHQIEKEFSEVEGRIQDLEKYVEDTKIDLWSYNAELLVALENQHTIDLTDSEMNKLFEKTKKQLRENAEDMGNGCFKIYHKCDNACIGSIRNGTYDHDVYRDEALNNRFQIKGVELKSGYKDWILWISFAISCFLLCVALLGFIMWACQKGNIRCNICI

SEQ ID NO: 11376 - protein, 566 aa, Artificial Sequence; identical to SEQ ID NO: 9868
  derived and/or modified protein sequence (wt) from hemagglutinin__InfluenzaA__AHL95272

SEQ ID NO: 11377 - protein, 566 aa, Artificial Sequence; identical to SEQ ID NO: 9994
  derived and/or modified protein sequence (wt) from hemagglutinin__InfluenzaA__AHL95284

SEQ ID NO: 11378 - protein, 566 aa, Artificial Sequence
  derived and/or modified protein sequence (wt) from hemagglutinin__InfluenzaA__AHL95296
MKAILVVLLYTFATANADTLCIGYHANNSTDTVDTVLEKNVTVTHSVNLLEDKHNGKLCKLRGVAPLHLGKCNIAGWILGNPECESLSTASSWSYIVETSSSDNGTCYPGDFINYEELREQLSSVSSFERFEMFPKTSSWPNHDSNKGVTAACPHAGAKSFYKNLIWLVKKGNSYPKLSKSYINDKGKEVLVLWGIHHPSTTADQQSLYQNADAYVFVGTSKYSKKFKPEIAIRPKVRDQEGRMNYYWTLIEPGDKITFEATGNLVVPRYAFAMERNAGSGIIISDTPVHDCNTTCQTPEGAINTSLPFQNIHPITIGKCPKYVKSTKLRLATGLRNVPSIQSRGLFGAIAGFIEGGWTGMVDGWYGYHHQNEQGSGYAADLKSTQNAIDKITNKVNSVIEKMNTQFTAVGKEFNHLEKRIENLNKKVDDGFLDIWTYNAELLVLLENERTLDYHDSNVKNLYEKVRNQLKDNAKEIGNGCFEFYHKCDNTCMESVKNGTYDYPKYSEEAKLNREKIDGVKLESTRIYQILAIYSTVASSLVLVVSLGAISFWMCSNGSLQCRICI

SEQ ID NO: 11379 - protein, 566 aa, Artificial Sequence; identical to SEQ ID NO: 9835
  derived and/or modified protein sequence (wt) from hemagglutinin__InfluenzaA__AHL95307

SEQ ID NO: 11380 - protein, 566 aa, Artificial Sequence; identical to SEQ ID NO: 9858
  derived and/or modified protein sequence (wt) from hemagglutinin__InfluenzaA__AHL95319

SEQ ID NO: 11381 - protein, 566 aa, Artificial Sequence
  derived and/or modified protein sequence (wt) from hemagglutinin__InfluenzaA__AHL95331
MKTIIALSYILCLVFAQKLPGDDNSTATLCLGHHAVPNGTIVKTITNDRIEVTNATELVQNSSIGEICDSPHQILDGENCTLIDALLGDPQCDGFQNKKWDLFVERSKAYSNCYPYDVPDYASLRSLVASSGTLEFNNESFNWAGVTQNGTSSACIRGSNSSFFSRLNWLTHLNFKYPALNVTMPNNEQFDKLYIWGVHHPGTDKDQIFLYAQSSGRITVSTKRSQQAVIPNIGSRPRIRNIPSRISIYWTIVKPGDILLINSTGNLIAPRGYFKIRSGKSSIMRSDAPIGKCKSECITPNGSIPNDKPFQNVNRITYGACPRYVKQSTLKLATGMRNVPEKQTRGIFGAIAGFIENGWEGMVDGWYGFRHQNSEGRGQAADLKSTQAAIDQINGKLNRLIGKTNEKFHQIEKEFSEVEGRIQDLEKYVEDTKIDLWSYNAELLVALENQHTIDLTDSEMNKLFEKTKKQLRENAEDMGNGCFKIYHKCDNACIGSIRNGTYDHDVYRDEALNNRFQIKGVELKSGYKDWILWISFAISCFLLCVALLGFIMWACQKGNIRCNICI

SEQ ID NO: 11382 - protein, 566 aa, Artificial Sequence
  derived and/or modified protein sequence (wt) from hemagglutinin__InfluenzaA__AHL95343
MKTIIALSYILCLVFAQKLPGNDNSTATLCLGHHAVPNGTIVKTITNDRIEVTNATELVQNSSIGEICDSPHQILDGENCTLIDALLGDPQCDGFQNKKWDLFVERSKAYSNCYPYDVPDYASLRSLVASSGTLEFNNESFNWAGVTQNGTSSACIRGSNSSFFSRLNWLTHLNFKYPALNVTMPNNEQFDKLYIWGVHHPGTDKDQIFLYAQSSGRITVSTKRSQQAVIPNIGSRPRIRNIPSRISIYWTIVKPGDILLINSTGNLIAPRGYFKIRSGKSSIMRSDAPIGKCKSECITPNGSIPNDKPFQNVNRITYGACPRYVKQSTLKLATGMRNVPEKQTRGIFGAIAGFIENGWEGMVDGWYGFRHQNSEGRGQAADLKSTQAAIDQINGKLNRLIGKTNEKFHQIEKEFSEVEGRIQDLEKYVEDTKIDLWSYNAELLVALENQHTIDLTDSEMNKLFEKTKKQLRENAEDMGNGCFKIYHKCDNACIGSIRNGTYDHDVYRDEALNNRFQIRGVELKSGYKDWILWISFAISCFLLCVALLGFIMWACQKGNIRCNICI

SEQ ID NO: 11383 - protein, 566 aa, Artificial Sequence; identical to SEQ ID NO: 9858
  derived and/or modified protein sequence (wt) from hemagglutinin__InfluenzaA__AHL95432

SEQ ID NO: 11384 - protein, 566 aa, Artificial Sequence; identical to SEQ ID NO: 9994
  derived and/or modified protein sequence (wt) from hemagglutinin__InfluenzaA__AHL95444

SEQ ID NO: 11385 - protein, 566 aa, Artificial Sequence; identical to SEQ ID NO: 9858
  derived and/or modified protein sequence (wt) from hemagglutinin__InfluenzaA__AHL95457

SEQ ID NO: 11386 - protein, 566 aa, Artificial Sequence
  derived and/or modified protein sequence (wt) from hemagglutinin__InfluenzaA__AHL95470
MKTIIALSYILCLVFAQKLPGNDNSTATLCLGHHAVPNGTIVKTITNDQIEVTNATELVQSSSTGEICNSPHQILDGENCTLIDALLGDPQCDGFQNKKWDLFVERSKAYSNCYPYDVPDYASLRSLVASSGTLEFNNESFNWTGVKQNGTSSACIRRSNSSFFSRLNWLTHLNFKYPALNVTMPNNEQFDKLYIWGVHHPGTDKDQIFLYAQSSGRITVSTKRSQQAVIPNIGSRPRIRNIPSRISIYWTIVRPGDILLINSTGNLIAPRGYFKIRSGKSSIMRSDAPIGKCNSECITPNGSIPNDKPFQNVNRITYGACPRYVKQSTLKLATGMRNVPEKQTRGIFGAIAGFIENGWEGMVDGWYGFRHQNSEGRGQAADLKSTQAAIDQINGKLNRLIGKTNEKFHQIEKEFSEVEGRIQDLEKYVEDTKIDLWSYNAELLVALENQHTIDLTDSEMNKLFEKTKKQLRENAEDMGNGCFKIYHKCDNACIGSIRNGTYNHDVYRDEALNNRFQIKGVELKSGYKDWILWISFAISCFLLCVALLGFIMWACQKGNIRCNICI

SEQ ID NO: 11387 - protein, 566 aa, Artificial Sequence; identical to SEQ ID NO: 9994
  derived and/or modified protein sequence (wt) from hemagglutinin__InfluenzaA__AHL95482

SEQ ID NO: 11388 - protein, 566 aa, Artificial Sequence; identical to SEQ ID NO: 9994
  derived and/or modified protein sequence (wt) from hemagglutinin__InfluenzaA__AHL95494

SEQ ID NO: 11389 - protein, 566 aa, Artificial Sequence
  derived and/or modified protein sequence (wt) from hemagglutinin__InfluenzaA__AHL95506
MKTIIALSYILCLVFAQKLPGNDNSTATLCLGHHAVPNGTIVRTITNDRIEVTNATELVQNSSIGEICDSPHQILDGENCTLIDALLGDPQCDGFQNKKWDLFVERSKAYSNCYPYDVPDYASLRSLVASSGTLEFNNESFNWAGVTQNGTSSACIRGSNSSFFSRLNWLTHLNFKYPALNVTMPNNEQFDKLYIWGVHHPGTDKDQIFLYAQSSGRITVSTKRSQQAVIPNIGSRPRIRNIPSRISIYWTIVKPGDILLINSTGNLIAPRGYFKIRSGKSSIMRSDAPIGKCKSECITPNGSIPNDKPFQNVNRITYGACPRYVKQSTLKLATGMRNVPEKQTRGIFGAIAGFIENGWEGMVDGWYGFRHQNSEGRGQAADLKSTQAAIDQINGKLNRLIGKTNEKFHQIEKEFSEVEGRIQDLEKYVEDTKIDLWSYNAELLVALENQHTIDLTDSEMNKLFEKTKKQLRENAEDMGNGCFKIYHKCDNACIGSIRNGTYDHDVYRDEALNNRFQIKGVELKSGYKDWILWISFAISCFLLCVALLGFIMWACQKGNIRCNICI

SEQ ID NO: 11390 - protein, 566 aa, Artificial Sequence
  derived and/or modified protein sequence (wt) from hemagglutinin__InfluenzaA__AHL95518
MKTIIALSYILCLVFAQKLPGNDNSTATLCLGHHAVPNGTIVKTITNDRIEVTNATELVQNSSIGEICDSPHQILDGENCTLIDALLGDPQCDGFQNKKWDLFVERSKAYSNCYPYDVPDYASLRSLVASSGTLEFNNESFNWAGVTQNGTSSACIRGSNSSFFSRLNWLTHLNFKYPALNVTMPNNEQFDKLYIWGVHHPGTDKDQIFLYAQSSGRITVSTKRSQQAVIPNIGSRPRIRNVPSRISIYWTIVKPGDILLINSTGNLIAPRGYFKIRSGKSSIMRSDAPIGKCKSECITPNGSIPNDKPFQNVNRITYGACPRYVKQSTLKLATGMRNVPEKQTRGIFGAIAGFIENGWEGMMDGWYGFRHQNSEGRGQAADLKSTQAAIDQINGKLNRLIGKTNEKFHQIEKEFSEVEGRIQDLEKYVEDTKIDLWSYNAELLVALENQHTIDLTDSEMNKLFEKTKKQLRENAEDMGNGCFKIYHKCDNACIGSIRNGTYDHDVYRDEALNNRFQIKGVELKSGYKDWILWISFAISCFLLCVALLGFIMWACQKGNIRCNICI

SEQ ID NO: 11391 - protein, 566 aa, Artificial Sequence; identical to SEQ ID NO: 9868
  derived and/or modified protein sequence (wt) from hemagglutinin__InfluenzaA__AHL95530

SEQ ID NO: 11392 - protein, 566 aa, Artificial Sequence; identical to SEQ ID NO: 9868
  derived and/or modified protein sequence (wt) from hemagglutinin__InfluenzaA__AHL95542

SEQ ID NO: 11393 - protein, 566 aa, Artificial Sequence
  derived and/or modified protein sequence (wt) from hemagglutinin__InfluenzaA__AHL95554
MKTIIALSYILCLVFAQKLPGNDNSMATLCLGHHAVPNGTIVKTITNDRIEVTNATELVQNSSIGEICDSPHQILDGENCTLIDALLGDPQCDGFQNKKWDLFVERSKAYSNCYPYDVPDYASLRSLVASSGTLEFNNESFNWTGVTQNGTSSACIRRSNSSFFSRLNWLTHLNFKYPALNVTMPNNEQFDKLYIWGVHHPGTDKDQIFLYAQSSGRITVSTKRSQQAVIPNIGSRPRIRNIPSRISIYWTIVKPGDILLINSTGNLIAPRGYFKIRSGKSSIMRSDAPIGKCKSECITPNGSIPNDKPFQNVNRITYGACPRYVKQSTLKLATGMRNVPEKQTRGIFGAIAGFIENGWEGMVDGWYGFRHQNSEGRGQAADLKSTQAAIDQINGKLNRLIGKTNEKFHQIEKEFSEVEGRIQDLEKYVEDTKIDLWSYNAELLVALENQHTIDLTDSEMNKLFEKTKKQLRENAEDMGNGCFKIYHKCDNACIGSIRNGTYDHNVYRDEALNNRFQIKGVELKSGYKDWILWISFAISCFLLCVALLGFIMWACQKGNIRCNICI

SEQ ID NO: 11394 - protein, 566 aa, Artificial Sequence
  derived and/or modified protein sequence (wt) from hemagglutinin__InfluenzaA__AHL95566
MKTIIALSYILCLVFAQKLPGNDNSTATLCLGHHAVPNGTIVKTITNDRIEVTNATELVQNSSIGEICDSPHQILDGENCTLIDALLGDPQCDGFQNKKWDLFVERSKAYSNCYPYDVPDYASLRSLVASSGTLEFNNESFNWAGVTQNGTSSACIRGSNSSFFSRLNWLTHLNFKYPALNVTMPNNEQFDKLYIWGVHHPGTDKDQIFLYARSSGRITVSTKRSQQAVIPNIGSRPRIRNIPSRISIYWTIVKPGDILLINSTGNLIAPRGYFKIRSGKSSIMRSDAPIGKCKSECITPNGSIPNDKPFQNVNRITYGACPRYVKQSTLKLATGMRNVPEKQTRGIFGAIAGFIENGWEGMVDGWYGFRHQNSEGRGQAADLKSTQAAIDQINGKLNRLIGKTNEKFHQIEKEFSEVEGRIQDLEKYVEDTKIDLWSYNAELLVALENQHTIDLTDSEMNKLFEKTKKQLRENAEDMGNGCFKIYHKCDNACIGSIRNGTYDHDVYRDEALNNRFQIKGVELKSGYKDWILWISFAISCFLLCVALLGFIMWACQKGNIRCNICI

SEQ ID NO: 11395 - protein, 566 aa, Artificial Sequence
  derived and/or modified protein sequence (wt) from hemagglutinin__InfluenzaA__AHL95578
MKTIIALSYILCLVFAQKLPGNDDSTATLCLGHHAVPNGTIVKTITNDRIEVTNATELVQNSSIGEICDSPHQILDGENCTLIDALLGDPQCDGFQNKKWDLFVERSKAYSNCYPYDVPDYASLRSLVASSGTLEFNNESFNWAGVTQNGTSSACIRGSNSSFFSRLNWLTHLNFKYPALNVTMPNNEQFDKLYIWGVHHPGTDKDQIFLYAQSSGRITVSTKRSQQAVIPNIGSRPRIRNIPSRISIYWTIVKPGDILLINSTGNLIAPRGYFKIRSGKSSIMRSDAPIGKCKSECITPNGSIPNDKPFQNVNRITYGACPRYVKQSTLKLATGMRNVPEKQTRGIFGAIAGFIENGWEGMMDGWYGFRHQNSEGRGQAADLKSTQAAIDQINGKLNRLIGKTNEKFHQIEKEFSEVEGRIQDLEKYVEDTKIDLWSYNAELLVALENQHTIDLTDSEMNKLFEKTKKQLRENAEDMGNGCFKIYHKCDNACIGSIRNGTYDHDVYRDEALNNRFQIKGVELKSGYKDWILWISFAISCFLLCVALLGFIMWACQKGNIRCNICI

SEQ ID NO: 11396 - protein, 566 aa, Artificial Sequence
  derived and/or modified protein sequence (wt) from hemagglutinin__InfluenzaA__AHL95590
MKTIIALSYILCLVFAQKLPGNDNSTATLCLGHHAVPNGTIVKTITNDRIEVTNATELVQNSSIGEICDSPHQILDGENCTLIDALLGDPQCDGFQNKKWDLFVERSKAYSNCYPYDVPDYASLRSLVASSGTLEFNNESFNWTGVTQNGTSSSCIRRSNSSFFSRLNWLTHLNFKYPALNVTMPNNEQFDKLYIWGVHHPGTDKDQIFLYAQSSGRITVSTKRSQQAVIPNIGSRPRIRNIPSRISIYWTIVKPGDILLINSTGNLIAPRGYFKIRSGKSSIMRSDAPIGKCKSECITPNGSIPNDKPFQNVNRITYGACPRYVKQSTLKLATGMRNVPEKQTRGIFGAIAGFIENGWEGMVDGWYGFRHQNSEGRGQAADLKSTQAAIDQINGKLNRLIGKTNEKFHQIEKEFSEVEGRIQDLEKYVEDTKIDLWSYNAELLVALENQHTIDLTDSEMNKLFEKTKKQLRENAEDMGNGCFKIYHKCDNACIGSIRNGTYDHNVYRDEALNNRFQIKGVELKSGYKDWILWISFAISCFLLCVALLGFIMWACQKGNIRCNICI

SEQ ID NO: 11397 - protein, 566 aa, Artificial Sequence; identical to SEQ ID NO: 9868
  derived and/or modified protein sequence (wt) from hemagglutinin__InfluenzaA__AHL95602

SEQ ID NO: 11398 - protein, 566 aa, Artificial Sequence; identical to SEQ ID NO: 9868
  derived and/or modified protein sequence (wt) from hemagglutinin__InfluenzaA__AHL95614

SEQ ID NO: 11399 - protein, 566 aa, Artificial Sequence
  derived and/or modified protein sequence (wt) from hemagglutinin__InfluenzaA__AHL95626
MKTIIALSYVLCLVFAQKLPGNDNSTATLCLGHHAVPNGTIVKTITNDRIEVTNATELVQNSSIGEICDSPHQILDGENCTLIDALLGDPQCDGFQNKKWDLFVERSKAYSNCYPYDVPDYASLRSLVASSGTLEFNNESFNWAGVTQNGTSSACIRGSNSSFFSRLNWLTHLNFKYPALNVTMPNNEQFDKLYIWGVHHPGTDKDQIFLYAQSSGRITVSTKRSQQAVIPNIGSRPRIRNIPSRISIYWTIVKPGDILLINSTGNLIAPRGYFKIRSGKSSIMRSDAPIGKCKSECITPNGSIPNDKPFQNVNRITYGACPRYVKQSTLKLATGMRNVPEKQTRGIFGAIAGFIENGWEGMVDGWYGFRHQNSEGRGQAADLKSTQAAIDQINGKLNRLIGKTNEKFHQIEKEFSEVEGRIQDLEKYVEDTKIDLWSYNAELLVALENQHTIDLTDSEMNKLFEKTKKQLRENAEDMGNGCFKIYHKCDNACIGSIRNGTYDHDVYRDEALNNRFQIKGVELKSGYKDWILWISFAISCFLLCVALLGFIMWACQKGNIRCNICI

SEQ ID NO: 11400 - protein, 566 aa, Artificial Sequence; identical to SEQ ID NO: 9868
  derived and/or modified protein sequence (wt) from hemagglutinin__InfluenzaA__AHL95638

SEQ ID NO: 11401 - protein, 566 aa, Artificial Sequence; identical to SEQ ID NO: 9868
  derived and/or modified protein sequence (wt) from hemagglutinin__InfluenzaA__AHL95650

SEQ ID NO: 11402 - protein, 566 aa, Artificial Sequence
  derived and/or modified protein sequence (wt) from hemagglutinin__InfluenzaA__AHL95662
MKTIIALSYILCLVFAQKLPGNDNSTATLCLGHHAVPNGTIVKTITNDRIEVTNATELVQNSSIGEICDSPHQILDGENCTLIDALLGDPQCDGFQNKKWDLFVERSKAYSNCYPYDVPDYASLRSLVASSGTLEFNNESFNWAGVTQNGTSSACIRGSNSSFFSRLNWLTHLNFKYPALNVTMPNNEQFDKLYIWGVHHPGTDKDQIFLYAQSSGRITVSTKRSQQAVIPNIGSRPRIRNIPSRISIYWTIVKPGDILLINSTGNLIAPRGYFKIRSGKSSIMRSDAPIGKCKSECITPNGSIPNDKPFQNVNRITYGACPRYVKQSTLKLATGMRNVPEKQTRGIFGAIAGFIENGWEGMMDGWYGFRHQNSEGRGQAADLKSTQAAIDQINGKLNRLIGKTNEKFHQIEKEFSEVEGRIQDLEKYVEDTKIDLWSYNAELLVTLENQHTIDLTDSEMNKLFEKTKKQLRENAEDMGNGCFKIYHKCDNACIGSIRNGTYDHDVYRDEALNNRFQIKGVELKSGYKDWILWISFAISCFLLCVALLGFIMWACQKGNIRCNICI

SEQ ID NO: 11403 - protein, 566 aa, Artificial Sequence; identical to SEQ ID NO: 9994
  derived and/or modified protein sequence (wt) from hemagglutinin__InfluenzaA__AHL95686

SEQ ID NO: 11404 - protein, 566 aa, Artificial Sequence; identical to SEQ ID NO: 9994
  derived and/or modified protein sequence (wt) from hemagglutinin__InfluenzaA__AHL95698

SEQ ID NO: 11405 - protein, 566 aa, Artificial Sequence; identical to SEQ ID NO: 9868
  derived and/or modified protein sequence (wt) from hemagglutinin__InfluenzaA__AHL95710

SEQ ID NO: 11406 - protein, 566 aa, Artificial Sequence; identical to SEQ ID NO: 11382
  derived and/or modified protein sequence (wt) from hemagglutinin__InfluenzaA__AHL95722

SEQ ID NO: 11407 - protein, 566 aa, Artificial Sequence; identical to SEQ ID NO: 9858
  derived and/or modified protein sequence (wt) from hemagglutinin__InfluenzaA__AHL95734

SEQ ID NO: 11408 - protein, 566 aa, Artificial Sequence; identical to SEQ ID NO: 9858
  derived and/or modified protein sequence (wt) from hemagglutinin__InfluenzaA__AHL95746

SEQ ID NO: 11409 - protein, 566 aa, Artificial Sequence; identical to SEQ ID NO: 9997
  derived and/or modified protein sequence (wt) from hemagglutinin__InfluenzaA__AHL95758

SEQ ID NO: 11410 - protein, 566 aa, Artificial Sequence; identical to SEQ ID NO: 9868
  derived and/or modified protein sequence (wt) from hemagglutinin__InfluenzaA__AHL95770

SEQ ID NO: 11411 - protein, 566 aa, Artificial Sequence
  derived and/or modified protein sequence (wt) from hemagglutinin__InfluenzaA__AHL95782
MKTIIALSYILCLVFAQKLPGNDNSTATLCLGHHAVPNGTIVKTITNDRIEVTNATELVQNSSIGEICNSPHQILDGENCTLIDALLGDPQCDGFQNKKWDLFVERSKAYSNCYPYDVPDYASLRSLVASSGTLEFNNESFNWTGVTQNGTSSACIRRSNSSFFSRLNWLTHLNFKYPALNVTMPNNEQFDKLYIWGVHHPGTDKDQIFLYAQSSGRITVSTKRSQQAVIPNIGSRPRIRNIPSRISIYWTIVKPGDILLINSTGNLIAPRGYFKIRSGKSSIMRSDAPIGKCKSECITPNGSIPNDKPFQNVNRITYGACPRYVKQSTLKLATGMRNVPEKQTRGIFGAIAGFIENGWEGMVDGWYGFRHQNSEGRGQAADLKSTQAAIDQINGKLNRLIGKTNEKFHQIEKEFSEVEGRIQDLEKYVEDTKIDLWSYNAELLVALENQHTIDLTDSEMNKLFEKTKKQLRENAEDMGNGCFKIYHKCDNACIGSIRNGTYDHDVYRDEALNNRFQIKGVELKSGYKDWILWISFAISCFLLCVALLGFIMWACQKGNIRCNICI

SEQ ID NO: 11412 - protein, 566 aa, Artificial Sequence
  derived and/or modified protein sequence (wt) from hemagglutinin__InfluenzaA__AHL95794
MKTIIALSYILCLVFAQKLPGNDNSTATLCLGHHAVPNGTIVKTITNDRIEVTNATELVQNSSIGEICDSPHQILDGENCTLIDALLGDPQCDGFQNKKWDLFVERNKAYSNCYPYDVPDYASLRSLVASSGTLEFNNESFNWAGVTQNGTSSACIRGSNSSFFSRLNWLTHLNFKYPALNVTMPNNEQFDKLYIWGVHHPGTDKDQIFLYAQSSGRITVSTKRSQQAVIPNIGSRPRIRNIPSRISIYWTIVKPGDILLINSTGNLIAPRGYFKIRSGKSSIMRSDAPIGKCKSECITPNGSIPNDKPFQNVNRITYGACPRYVKQSTLKLATGMRNVPEKQTRGIFGAIAGFIENGWEGMVDGWYGFRHQNSEGRGQAADLKSTQAAIDQINGKLNRLIGKTNEKFHQIEKEFSEVEGRIQDLEKYVEDTKIDLWSYNAELLVALENQHTIDLTDSEMNKLFEKTKKQLRENAEDMGNGCFKIYHKCDNACIGSIRNGTYDHDVYRDEALNNRFQIKGVELKSGYKDWILWISFAISCFLLCVALLGFIMWACQKGNIRCNICI

SEQ ID NO: 11413 - protein, 566 aa, Artificial Sequence
  derived and/or modified protein sequence (wt) from hemagglutinin__InfluenzaA__AHL95806
MKTIIALSYILCLVFAQKLPGNDNSTATLCLGHHAVPNGTIVKTITNDRIEVTNATELVQNSSIGEICDSPHQILDGENCTLIDALLGDPQCDGFQNKKWDLFVERSKAYSNCYPYDVPDYASLRSLVASSGTLEFNNESFNWAGVTQNGTSSACIRGSNSSFFSRLNWLTHLNFKYPALNVTMPNNEQFDKLYIWGVHHPGTDKDQIFLYAQSSGRITVSTKRSQQAVIPNIGSRPRIRNIPSRISIYWTIVKPGDILLINSTGNLIAPRGYFKIRSGKSSIMRSDAPIGKCKSECITPNGSIPNDKPFQNVNRITYGACPRYVKQSTLKLATGMRNVPEKQTRGIFGAIAGFIENGWEGMVDGWYGFRHQNSEGRGQAADLKSTQAAIDQINGKLNRLIGKTNEKFHQIEKEFSEVEGRIQDLEKYVEDTKIDLWSYNAELLVALENQHTIDLTDSEMNKLFEKTKKQLRENAEDMGNGCFKIYHKCDNACIGSIRNGTYDHDVYRDEALNNRFQIKGVELKSGYKDWILWISFAISCFLLCVALLGSIMWACQKGNIRCNICI

SEQ ID NO: 11414 - protein, 566 aa, Artificial Sequence; identical to SEQ ID NO: 9994
  derived and/or modified protein sequence (wt) from hemagglutinin__InfluenzaA__AHL95818

SEQ ID NO: 11415 - protein, 566 aa, Artificial Sequence; identical to SEQ ID NO: 9858
  derived and/or modified protein sequence (wt) from hemagglutinin__InfluenzaA__AHL95830

SEQ ID NO: 11416 - protein, 566 aa, Artificial Sequence; identical to SEQ ID NO: 9994
  derived and/or modified protein sequence (wt) from hemagglutinin__InfluenzaA__AHL95842

SEQ ID NO: 11417 - protein, 566 aa, Artificial Sequence; identical to SEQ ID NO: 9858
  derived and/or modified protein sequence (wt) from hemagglutinin__InfluenzaA__AHL95854

SEQ ID NO: 11418 - protein, 566 aa, Artificial Sequence; identical to SEQ ID NO: 9868
  derived and/or modified protein sequence (wt) from hemagglutinin__InfluenzaA__AHL95866

SEQ ID NO: 11419 - protein, 566 aa, Artificial Sequence
  derived and/or modified protein sequence (wt) from hemagglutinin__InfluenzaA__AHL95878
MKAILVIMLYTFATANADTLCIGYHANNSTDTVDTVLEKNVTVTHSVNLLEDKHNGKLCKLRGVSPLHLGKCNIAGWILGNPECESLSTASSWSYIVETSGSDNGTCYPGDFIDYEELREQLSSVSSFERFEIFPKTSSWPNHDSNKGVTAACPHAGAKGFYKNLIWLVKKGNSYPKLSISYINDKGKEVLVLWGIHHPSTTADQQSLYQNADTYVFVGTSRYSKKFKPEIAIRPKVRDQEGRMNYYWTLVEPGDKITFEATGNLVVPRYAFAMERNAGSGIIISDTPVHDCNTTCQTPKGAINTSLPFQNIHPITIGKCPKYVKSTKLRLATGLRNVPSIQSRGLFGAIAGFIEGGWTGMVDGWYGYHHQNEQGSGYAADLKSTQNAIDKITNKVNSVIEKMNTQFTAVGKEFNHLEKRIENLNKKVDDGFLDIWTYNAELLVLLENERTLDYHDSNVKNLYEKVRNQLKNNAKEIGNGCFEFYHKCDNTCMESVKNGTYDYPKYSEEAKLNREEIDGVKLESTRIYQILAIYSTAASSLVLVVSLGAISFWMCSNGSLQCRICI

SEQ ID NO: 11420 - protein, 566 aa, Artificial Sequence; identical to SEQ ID NO: 9868
  derived and/or modified protein sequence (wt) from hemagglutinin__InfluenzaA__AHL95889

SEQ ID NO: 11421 - protein, 566 aa, Artificial Sequence; identical to SEQ ID NO: 9994
  derived and/or modified protein sequence (wt) from hemagglutinin__InfluenzaA__AHL95901

SEQ ID NO: 11422 - protein, 566 aa, Artificial Sequence; identical to SEQ ID NO: 9994
  derived and/or modified protein sequence (wt) from hemagglutinin__InfluenzaA__AHL95913

SEQ ID NO: 11423 - protein, 566 aa, Artificial Sequence
  derived and/or modified protein sequence (wt) from hemagglutinin__InfluenzaA__AHL95937
MKTIIALSYILCLVFAQKLPGNDNSTATLCLGHHAVPNGTIVKTITNDRIEVTNATELVQNSSIGEICDSPHQILDGENCTLIDALLGDPQCDGFQNKKWDLFVERSKAYSNCYPYDVPDYASLRSLVASSGTLEFNNESFNWAGVTQNGTSSACIRGSNSSFFSRLNWLTHLNFKYPALNVTMPNNEQFDKLYIWGVHHPGTDKDQIFLYAQSSGRITVSTKRSQQAVIPNIGSRPRIRNIPSRISIYWTIVKPGDILLINSTGNLIAPRGYFKIRSGKSSIMRSDAPIGKCKSECITPNGSIPNDKPFQNVNRITYGACPRYVKQSTLKLATGMRNVPEKQTRGIFGAIAGFIENGWEGMVDGWYGFRHQNSEGRGQAADLKSTQAAIDQINGKLNRLIGKTNEKFHQIEKEFSEVEGRIQDLEKYVEDTKTDLWSYNAELLVALENQHTIDLTDSEMNKLFEKTKKQLRENAEDMGNGCFKIYHKCDNACIGSIRNGTYDHDVYRDEALNNRFQIKGVELKSGYKDWILWISFAISCFLLCVALLGFIMWACQKGNIRCNICI

SEQ ID NO: 11424 - protein, 566 aa, Artificial Sequence
  derived and/or modified protein sequence (wt) from hemagglutinin__InfluenzaA__AHL95949
MKTIIALSYILCLVFAQKLPGNDNSTATLCLGHHAVPNGTIVKTITNDRIEVTNATELVQNSSIGEICDSPHQILDGENCTLIDALLGDPQCDGFQNKKWDLFVERSKAYSNCYPYDVPDYASLRSLVASSGTLEFNNESFNWTGVTQNGTSSACIRRSNNSFFSRLNWLTHSNFKYPALNMTMPNNEQFDKLYIWGVHHPGTDKDQIFLYAQSSGRITVSTKRSQQAVIPNIGSRPRIRNIPSRISIYWTIVKPGDILLINSTGNLIAPRGYFKIRSGKSSIMRSDAPIGKCKSECITPNGSIPNDKPFQNVNRITYGACPRYVKQSTLKLATGMRNVPEKQTRGIFGAIAGFIENGWEGMMDGWYGFRHQNSEGRGQAADLKSTQAAIDQINGKLNRLIGKTNEKFHQIEKEFSEVEGRIQDLEKYVEDTKIDLWSYNAELLVALENQHTIDLTDSEMNKLFEKTKKQLRENAEDMGNGCFKIYHKCDNACIGSIRNGTYDHDVYRDEALNNRFQIKGVELKSGYKDWILWISFAISCFLLCVALLGFIMWACQKGNIRCNICI

SEQ ID NO: 11425 - protein, 566 aa, Artificial Sequence; identical to SEQ ID NO: 9868
  derived and/or modified protein sequence (wt) from hemagglutinin__InfluenzaA__AHL95961

SEQ ID NO: 11426 - protein, 566 aa, Artificial Sequence; identical to SEQ ID NO: 9868
  derived and/or modified protein sequence (wt) from hemagglutinin__InfluenzaA__AHL95973

SEQ ID NO: 11427 - protein, 566 aa, Artificial Sequence; identical to SEQ ID NO: 9868
  derived and/or modified protein sequence (wt) from hemagglutinin__InfluenzaA__AHL95985

SEQ ID NO: 11428 - protein, 566 aa, Artificial Sequence
  derived and/or modified protein sequence (wt) from hemagglutinin__InfluenzaA__AHL95997
MKTIIALSYILCLVFAQKLPGNDNSTATLCLGHHAVPNGTIVKTITNDRIEVTNATELVQNSSIGEICDSPHQILDGENCTLIDALLGDPQCDGFQNKKWDLFVERSKAYSNCYPYDVPDYASLRSLVASSGTLEFNNESFNWAGVTQNGTSSSCIRGSKSSFFSRLNWLTHLNFKYPALNVTMPNNEQFDKLYIWGVHHPGTDKDQIFLYAQSSGRITVSTKRSQQAVIPNIGSRPRIRNIPSRISIYWTIVKPGDILLINSTGNLIAPRGYFKIRSGKSSIMRSDAPIGKCKSECITPNGSIPNDKPFQNVNRITYGACPRYVKQSTLKLATGMRNVPEKQTRGIFGAIAGFIENGWEGMMDGWYGFRHQNSEGRGQAADLKSTQAAIDQINGKLNRLIGKTNEKFHQIEKEFSEVEGRIQDLEKYVEDTKIDLWSYNAELLVALENQHTIDLTDSEMNKLFEKTKKQLRENAEDMGNGCFKIYHKCDNACIGSIRNGTYDHDVYRDEALNNRFQIKGVELKSGYKDWILWISFAISCFLLCVALLGFIMWACQKGNIRCNICI

SEQ ID NO: 11429 - protein, 566 aa, Artificial Sequence
  derived and/or modified protein sequence (wt) from hemagglutinin__InfluenzaA__AHL96021
MKTIIALSYILCLVFAQKLPGNDNSTATLCLGHHAVPNGTIVKTITNDRIEVTNATELVQNSSIGEICDSPHQILDGENCTLIDALLGDPQCDGFQNKKWDLFVERSKAYSNCYPYDVPDYASLRSLVASSGTLEFNNESFNWAGVTQNGTSSACIRGSKSSFFSRLNWLTHLNFKYPALNVTMPNNEQFDKLYIWGVHHPGTDKDQIFLYAQSSGRITVSTKRSQQAVIPNIGSRPRIRNIPSRISIYWTIVKPGDILLINSTGNLIAPRGYFKIRSGKSSIMRSDAPIGKCKSECITPNGSIPNDKPFQNVNRITYGACPRYVKQSTLKLATGMRNVPEKQTRGIFGAIAGFIENGWEGMMDGWYGFRHQNSEGRGQAADLKSTQAAIDQINGKLNRLIGKTNEKFHQIEKEFSEVEGRIQDLEKYVEDTKIDLWSYNAELLVALENQHTIDLTDSEMNKLFEKTKKQLRENAEDMGNGCFKIYHKCDNACIGSIRNGTYDHDVYRDEALNNRFQIKGVELKSGYKDWILWISFAISCFLLCVALLGFIMWACQKGNIRCNICI

SEQ ID NO: 11430 - protein, 566 aa, Artificial Sequence; identical to SEQ ID NO: 9868
  derived and/or modified protein sequence (wt) from hemagglutinin__InfluenzaA__AHL96033

SEQ ID NO: 11431 - protein, 566 aa, Artificial Sequence; identical to SEQ ID NO: 10123
  derived and/or modified protein sequence (wt) from hemagglutinin__InfluenzaA__AHL96045

SEQ ID NO: 11432 - protein, 566 aa, Artificial Sequence; identical to SEQ ID NO: 9994
  derived and/or modified protein sequence (wt) from hemagglutinin__InfluenzaA__AHL96056

SEQ ID NO: 11433 - protein, 566 aa, Artificial Sequence; identical to SEQ ID NO: 9858
  derived and/or modified protein sequence (wt) from hemagglutinin__InfluenzaA__AHL96068

SEQ ID NO: 11434 - protein, 566 aa, Artificial Sequence; identical to SEQ ID NO: 9868
  derived and/or modified protein sequence (wt) from hemagglutinin__InfluenzaA__AHL96080

SEQ ID NO: 11435 - protein, 566 aa, Artificial Sequence
  derived and/or modified protein sequence (wt) from hemagglutinin__InfluenzaA__AHL96092
MKTIIALSYILCLVFAQKLPGNDNSTATLCLGHHAVPNGTIVKTITNDRIEVTNATELVQNSSIGEICDSPHQILDGENCTLIDALLGDPQCDGFQNKKWDLFIERSKAYSNCYPYDVPDYASLRSLVASSGTLEFNNESFNWAGVTQNGTSSACIRGSNSSFFSRLNWLTHLNFKYPALNVTMPNNEQFDKLYIWGVHHPGTDKDQIFLYAQSSGRITVSTKRSQQAVIPNIGSRPRIRNIPSRISIYWTIVKPGDILLINSTGNLIAPRGYFKIRSGKSSIMRSDAPIGKCKSECITPNGSIPNDKPFQNVNRITYGACPRYVKQSTLKLATGMRNVPEKQTRGIFGAIAGFIENGWEGMVDGWYGFRHQNSEGRGQAADLKSTQAAIDQINGKLNRLIGKTNEKFHQIEKEFSEVEGRIQDLEKYVEDTKIDLWSYNAELLVALENQHTIDLTDSEMNKLFEKTKKQLRENAEDMGNGCFKIYHKCDNACIGSIRNGTYDHDVYRDEALNNRFQIKGVELKSGYKDWILWISFAISCFLLCVALLGFIMWACQKGNIRCNICI

SEQ ID NO: 11436 - protein, 566 aa, Artificial Sequence
  derived and/or modified protein sequence (wt) from hemagglutinin__InfluenzaA__AHL96104
MKTIIALSYILCLVFAQKLPGNDNSTATLCLGHHAVPNGTIVKTITNDRIEVTNATELVQNSSIGEICDSPHQILDGENCTLIDALLGDPQCDGFQNKKWDLFVERSKAYSNCYPYDVPDYASLRSLVASSGTLEFNNESFNWTGVTQNGTSSACIRRSNSSFFSRLNWLTHLNFKYPALNVTMPNNEQFDKLYIWGVHHPGTDKDQIFLYAQSSGRITVSTKRSQQAVIPNIGSRPRIRNIPSRISIYWTIVKPGDILLINSTGNLIAPRGYFKIRSGKSSIMRSDAPIGKCKSECITPNGSIPNDKPFQNVNRITYGACPRYVKQSTLKLATGMRNVPERQTRGIFGAIAGFIENGWEGMVDGWYGFRHQNSEGRGQAADLKSTQAAIDQINGKLNRLIGKTNEKFHQIEKEFSEVEGRIQDLEKYVEDTKIDLWSYNAELLVALENQHTIDLTDSEMNKLFEKTKKQLRENAEDMGNGCFKIYHKCDNACIGSIRNGTYDHNVYRDEALNNRFQIKGVELKSGYKDWILWISFAISCFLLCVALLGFIMWACQKGNIRCNICI

SEQ ID NO: 11437 - protein, 566 aa, Artificial Sequence; identical to SEQ ID NO: 10482
  derived and/or modified protein sequence (wt) from hemagglutinin__InfluenzaA__AHL96116

SEQ ID NO: 11438 - protein, 566 aa, Artificial Sequence; identical to SEQ ID NO: 9858
  derived and/or modified protein sequence (wt) from hemagglutinin__InfluenzaA__AHL96128

SEQ ID NO: 11439 - protein, 566 aa, Artificial Sequence; identical to SEQ ID NO: 9994
  derived and/or modified protein sequence (wt) from hemagglutinin__InfluenzaA__AHL96152

SEQ ID NO: 11440 - protein, 566 aa, Artificial Sequence
  derived and/or modified protein sequence (wt) from hemagglutinin__InfluenzaA__AHL96164
MKTIIALSYILCLVFAQKLPGNDNSTATLCLGHHAVPNGTIVKTITNDRIEVTNATELVQNSSIGEICDSPHQILDGENCTLIDALLGDPQCDGFQNKKWDLFVERSKAYSNCYPYDVPDYASLRSLVASSGTLEFNNESFNWAGVTQNGTSSACIRGSNSSFFSRLNWLTHLNFKYPALNVTMPNNEQFDKLYIWGVHHPGTDKDQIFLYAQSSGRITVSTKRSQQAVIPNIGSRPRIRNIPSRISIYWTIVKPGDILLINSTGNLIAPRGYFKIRSGKSSIMRSDAPIGKCKSECITPNGSIPNDKPFQNVNRITYGACPRYVKQSTLKLATGMRNVPEKQTRGIFGAIAGFIENGWEGMVDGWYGFRHQNSEGRGQAADLKSTQAAIDQINGKLNRLIGKTNEKFHQIEKEFSEVEGRIQDLEKYVEDTKIDLWSYNAELLVALENQHTIDLTDSEMNKLFEKTKKQLRENAEDMGNGCFKIYHKCDNACIGSIRNGTYDHDVYRDEALNNRFQIKGVELKSGYKNWILWISFAISCFLLCVALLGFIMWACQKGNIRCNICI

SEQ ID NO: 11441 - protein, 566 aa, Artificial Sequence; identical to SEQ ID NO: 9994
  derived and/or modified protein sequence (wt) from hemagglutinin__InfluenzaA__AHL96176

SEQ ID NO: 11442 - protein, 566 aa, Artificial Sequence; identical to SEQ ID NO: 9994
  derived and/or modified protein sequence (wt) from hemagglutinin__InfluenzaA__AHL96188

SEQ ID NO: 11443 - protein, 566 aa, Artificial Sequence
  derived and/or modified protein sequence (wt) from hemagglutinin__InfluenzaA__AHL96200
MKTIIALSYILCLVFAQKLPGNDNSTATLCLGHHAVPNGTIVKTITNDRIEVTNATELVQNSSIGEICDSPHQVLDGENCTLIDALLGDPQCDGFQNKKWDLFVERSKAYSNCYPYDVPDYASLRSLVASSGTLEFNNESFNWAGVTQNGTSSACIRGSNSSFFSRLNWLTHLNFKYPALNVTMPNNEQFDKLYIWGVHHPGTDKDQIFLYAQSSGRITVSTKRSQQAVIPNIGSRPRIRNIPSRISIYWTIVKPGDILLINSTGNLIAPRGYFKIRSGKSSIMRSDAPIGKCKSECITPNGSIPNDKPFQNVNRITYGACPRYVKQSTLKLATGMRNVPEKQTRGIFGAIAGFIENGWEGMVDGWYGFRHQNSEGRGQAADLKSTQAAIDQINGKLNRLIGKTNEKFHQIEKEFSEVEGRIQDLEKYVEDTKIDLWSYNAELLVALENQHTIDLTDSEMNKLFEKTKKQLRENAEDMGNGCFKIYHKCDNACIGSIRNGTYDHDVYRDEALNNRFQIKGVELKSGYKDWILWISFAISCFLLCVALLGFIMWACQKGNIRCNICI

SEQ ID NO: 11444 - protein, 566 aa, Artificial Sequence; identical to SEQ ID NO: 9858
  derived and/or modified protein sequence (wt) from hemagglutinin__InfluenzaA__AHL96212

SEQ ID NO: 11445 - protein, 566 aa, Artificial Sequence; identical to SEQ ID NO: 10467
  derived and/or modified protein sequence (wt) from hemagglutinin__InfluenzaA__AHL96224

SEQ ID NO: 11446 - protein, 566 aa, Artificial Sequence
  derived and/or modified protein sequence (wt) from hemagglutinin__InfluenzaA__AHL96236
MKTIIALSYILCLVFAQKLPGNDNSTATLCLGHHAVPNGTIVKTITNDRIEVTNATELVQNSSMGEICDSPHQILDGENCTLIDALLGDPQCDGFQNKKWDLFVERSKAYSNCYPYDVPDYASLRSLVASSGTLEFNNESFNWTGVTQNGTSSACIRRSNSSFFSRLNWLTHLNFKYPALNVTMPNNEQFDKLYIWGVHHPGTDKDQIFLYAQSSGRITVSTKRSQQAVIPNIGSRPRIRNIPSRISIYWTIVKPGDILLINSTGNLIAPRGYFKIRSGKSSIMRSDAPIGKCKSECITPNGSIPNDKPFQNVNRITYGACPRYVKQSTLKLATGMRNVPEKQTRGIFGAIAGFIENGWEGMVDGWYGFRHQNSEGRGQAADLKSTQAAIDQINGKLNRLIGKTNEKFHQIEKEFSEVEGRIQDLEKYVEDTKIDLWSYNAELLVALENQHTIDLTDSEMNKLFEKTKKQLRENAEDMGNGCFKIYHKCDNACIESIRNGTYDHDVYRDEALNNRFQIKGVELKSGYKNWILWISFAISCFLLCVALLGFIMWACQKGNIRCNICI

SEQ ID NO: 11447 - protein, 566 aa, Artificial Sequence
  derived and/or modified protein sequence (wt) from hemagglutinin__InfluenzaA__AHL96248
MKTIIALGYILCLVFAQKLPGNDNSTATLCLGHHAVPNGTIVKTITNDRIEVTNATELVQNSSIGEICDSPHQILDGENCTLIDALLGDPQCDGFQNKKWDLFIERSKAYSNCYPYDVPDYASLRSLVASSGTLEFNNESFNWTGVTQNGTSSACIRRSNSSFFSRLNWLTHLNFKYPALNVTMPNNEQFDKLYIWGVHHPGTDKDQIFLYAQSSGRITVSTKRSQQAVIPNIGSRPRIRNIPSRISIYWTIVKPGDILLINSTGNLIAPRGYFKIRSGKSSIMRSDAPIGKCKSECITPNGSIPNDKPFQNVNRITYGACPRYVKQSTLKLATGMRNVPEKQTRGIFGAIAGFIENGWEGMVDGWYGFRHQNSEGRGQAADLKSTQAAIDQINGKLNRLIGKTNEKFHQIEKEFSEVEGRIQDLEKYVEDTKIDLWSYNAELLVALENQHTIDLTDSEMNKLFEKTKKQLRENAEDMGNGCFKIYHKCDNACIGSIRNGTYDHDVYRDEALNNRFQIKGVELKSGYKDWILWISFAISCFLLCVALLGFIMWACQKGNIRCNICI

SEQ ID NO: 11448 - protein, 566 aa, Artificial Sequence; identical to SEQ ID NO: 9994
  derived and/or modified protein sequence (wt) from hemagglutinin__InfluenzaA__AHL96260

SEQ ID NO: 11449 - protein, 566 aa, Artificial Sequence; identical to SEQ ID NO: 9858
  derived and/or modified protein sequence (wt) from hemagglutinin__InfluenzaA__AHL96274

SEQ ID NO: 11450 - protein, 566 aa, Artificial Sequence; identical to SEQ ID NO: 9994
  derived and/or modified protein sequence (wt) from hemagglutinin__InfluenzaA__AHL96304

SEQ ID NO: 11451 - protein, 566 aa, Artificial Sequence; identical to SEQ ID NO: 9835
  derived and/or modified protein sequence (wt) from hemagglutinin__InfluenzaA__AHL96318

SEQ ID NO: 11452 - protein, 566 aa, Artificial Sequence; identical to SEQ ID NO: 9994
  derived and/or modified protein sequence (wt) from hemagglutinin__InfluenzaA__AHL96330

SEQ ID NO: 11453 - protein, 566 aa, Artificial Sequence; identical to SEQ ID NO: 9997
  derived and/or modified protein sequence (wt) from hemagglutinin__InfluenzaA__AHL96342

SEQ ID NO: 11454 - protein, 566 aa, Artificial Sequence
  derived and/or modified protein sequence (wt) from hemagglutinin__InfluenzaA__AHL96354
MKTIIALSYILCLVFAQKLPGNDNSTATLCLGHHAVPNGTIVKTITNDRIEVTNATELVQNSSIGEICDSPHQILDGENCTLIDALLGDPQCDGFQNKKWDLFVERSKAYSNCYPYDVPDYASLRSLVASSGTLEFNNESFNWAGVTQNGTSSACIRGSNSSFFSRLNWLTHLNFKYPALNVTMPNNEQFDKLYIWGVHHPGTDKDQIFLYAQSSGRITVSTKRSQQAVIPNIGSRPRIRNIPSRISIYWTIVKPGDILLINSTGNLIAPRGYFKIRSGKSSIMRSDAPIGKCKSECITPNGSIPNDKPFQNVNRITYGACPRYVKQSTLKLATGMRNVPEKQTRGIFGAIAGFIENGWEGMVDGWYGFRHLNSEGRGQAADLKSTQAAIDQINGKLNRLIGKTNEKFHQIEKEFSEVEGRIQDLEKYVEDTKIDLWSYNAELLVALENQHTIDLTDSEMNKLFEKTKKQLRENAEDMGNGCFKIYHKCDNACIGSIRNGTYDHDVYRDEALNNRFQIKGVELKSGYKDWILWISFAISCFLLCVALLGFIMWACQKGNIRCNICI

SEQ ID NO: 11455 - protein, 566 aa, Artificial Sequence
  derived and/or modified protein sequence (wt) from hemagglutinin__InfluenzaA__AHL96366
MKTIIALSYILCLVFAQKLPENDNSTATLCLGHHAVPNGTIVKTITNDRIEVTNATELVQNSSIGEICDSPHQILDGENCTLIDALLGDPQCDGFQNKKWDLFVERSKAYSNCYPYDVPDYASLRSLVASSGTLEFNNESFNWAGVTQNGTSSACIRGSNSSFFSRLNWLTHLNFKYPALNVTMPNNEQFDKLYIWGVHHPGTDKDQIFLYAQSSGRITVSTKRSQQAVIPNIGSRPRIRNIPSRISIYWTIVKPGDILLINSTGNLIAPRGYFKIRSGKSSIMRSDAPIGKCKSECITPNGSIPNDKPFQNVNRITYGACPRYVKQSTLKLATGMRNVPEKQTRGIFGAIAGFIENGWEGMVDGWYGFRHQNSEGRGQAADLKSTQAAIDQINGKLNRLIGKTNEKFHQIEKEFSEVEGRIQDLEKYVEDTKIDLWSYNAELLVALENQHTIDLTDSEMNKLFEKTKKQLRENAEDMGNGCFKIYHKCDNACIGSIRNGTYDHDVYRDEALNNRFQIKGVELKSGYKDWILWISFAISCFLLCVALLGFIMWACQKGNIRCNICI

SEQ ID NO: 11456 - protein, 566 aa, Artificial Sequence; identical to SEQ ID NO: 9868
  derived and/or modified protein sequence (wt) from hemagglutinin__InfluenzaA__AHL96378

SEQ ID NO: 11457 - protein, 566 aa, Artificial Sequence; identical to SEQ ID NO: 9858
  derived and/or modified protein sequence (wt) from hemagglutinin__InfluenzaA__AHL96390

SEQ ID NO: 11458 - protein, 566 aa, Artificial Sequence
  derived and/or modified protein sequence (wt) from hemagglutinin__InfluenzaA__AHL96402
MKTIIALSYILCLVFAQKIPGNDNSTATLCLGHHAVPNGTIVKTITNDRIEVTNATELVQNSSIGEICDSPHQILDGENCTLIDALLGDPQCDGFQNKKWDLFVERSKAYSNCYPYDVPDYASLRSLVASSGTLEFNNESFNWTGVTQNGTSSACIRGSNSSFFSRLNWLTHLNFKYPALNVTMPNNEQFDKLYIWGVHHPGTDKDQIFLYAQSSGRITVSTKRSQQAVIPNIGSRPRIRNIPSRISIYWTIVKPGDILLINSTGNLIAPRGYFKIRSGKSSIMRSDAPIGKCKSECITPNGSIPNDKPFQNVNRITYGACPRYVKQSTLKLATGMRNVPEKQTRGIFGAIAGFIENGWEGMVDGWYGFRHQNSEGRGQAADLKSTQAAIDQINGKLNRLIGKTNKKFHQIEKEFSEVEGRIQDLEKYVEDTKIDLWSYNAELLVALENQHTIDLTDSEMNKLFEKTKKQLRENAEDMGNGCFKIYHKCDNACIGSIRNGTYDHDVYRDEALNNRFQIKGVELKSGYKDWILWISFAISCFLLCVALLGFIMWACQKGNIRCNICI

SEQ ID NO: 11459 - protein, 566 aa, Artificial Sequence; identical to SEQ ID NO: 9868
  derived and/or modified protein sequence (wt) from hemagglutinin__InfluenzaA__AHL96414

SEQ ID NO: 11460 - protein, 566 aa, Artificial Sequence; identical to SEQ ID NO: 9994
  derived and/or modified protein sequence (wt) from hemagglutinin__InfluenzaA__AHL96426

SEQ ID NO: 11461 - protein, 566 aa, Artificial Sequence
  derived and/or modified protein sequence (wt) from hemagglutinin__InfluenzaA__AHL96438
MKTIIALSYILCLVFAQELPGNDDSTATLCLGHHAVPNGTIVKTITNDQIEVTNATELVQSSSTGEICNSPHQILDGENCTLIDALLGDPQCDGFQNKKWDLFVERSKAHSNCYPYDVPDYASLRSLVASSGTLEFNNESFNWTGVTQNGTSSACIRRSNNSFFSRLNWLTHLNFKYPALNVTMPNNEQFDKLYIWGVHHPGTDKDQIFLYAQASGRITVSTKRSQQAVIPNIGSRPRVRNIPSRVSIYWTIVKPGDILLINSTGNLIAPRGYFKIRSGKSSIMRSDAPIGKCSSACITPNGSIPNDKPFQNVNRITYGACPRYVKQNTLKLATGMRNVPEKQTRGIFGAIAGFIENGWEGMVDGWYGFRHQNSEGRGQAADLKSTQAAIDQINGKLNRLIGKTNEKFHQIEKEFSEVEGRIQDLEKYVEDTKIDLWSYNAELLVALENQHTIDLTDSEMNKLFEKTKKQLRENAEDMGNGCFKIYHKCDNACIGSIRNGTYDHDVYRDEALNNRFQIKGVELKSGYKDWILWISFAISCFLLCVALLGFIMWACQKGNIRCNICI

SEQ ID NO: 11462 - protein, 566 aa, Artificial Sequence; identical to SEQ ID NO: 9868
  derived and/or modified protein sequence (wt) from hemagglutinin__InfluenzaA__AHL96450

SEQ ID NO: 11463 - protein, 566 aa, Artificial Sequence; identical to SEQ ID NO: 9994
  derived and/or modified protein sequence (wt) from hemagglutinin__InfluenzaA__AHL96462

SEQ ID NO: 11464 - protein, 566 aa, Artificial Sequence
  derived and/or modified protein sequence (wt) from hemagglutinin__InfluenzaA__AHL96474
MKAILVVMLYTFATANADTLCIGYHANNSTDTVDTVLEKNVTVTHSVNLLEDKHNGKLCKLRGVSPLHLGKCNIAGWILGNPECESLSTASSWSYIVETSGSDNGTCYPGDFIDYEELREQLSSVSSFERFEIFPKTSSWPNHDSNKGVTAACPHAGAKGFYKNLIWLVKKGNSYPKLSISYINDKGKEVLVLWGIHHPSTTADQQSLYQNADTYVFVGTSRYSKKFKPEIAIRPKVRDQEGRMNYYWTLVEPGDKITFEATGNLVVPRYAFAMERNAGSGIIISDTPVHDCNTTCQTPKGAINTSLPFQNIHPITIGKCPKYVKSTKLRLATGLRNVPSIQSRGLFGAIAGFIEGGWTGMVDGWYGYHHQNEQGSGYAADLKSTQNAIDKITNKVNSVIEKMNTQFTAVGKEFNHLEKRIENLNKKVDDGFLDIWTYNAELLVLLENERTLDYHDSNVKNLYEKVRNQLKNNAKEIGNGCFEFYHKCDNTCMESVKNGTYDYPKYSEEAKLNREEIDGVKLESTRIYQILAIYSTAASSLVLVVSLGAISFWMCSNGSLQCRICI

SEQ ID NO: 11465 - protein, 566 aa, Artificial Sequence
  derived and/or modified protein sequence (wt) from hemagglutinin__InfluenzaA__AHL96485
MKTIIALSYILCLVFAQKLPGNDNSTATLCLGHHAVPNGTIVKTITNDRIEVTNATELVQNSSIGEICDSPHQILDGENCTLIDALLGDPQCDGFQNKKWDLFVERSKAYSNCYPYDVPDYASLRSLVASSGTLEFNNESFNWTGVTQNGTSSACIRRSNSSFFSRLNWLTHLNFKYPALNVTMPNNEQFDKLYIWGVHHPGTDKDQIFLYAQSSGRITVSTKRSQQAVIPNIGSRPRIRNIPSRISIYWTIVKPGDILLINSTGNLIAPRGYFKIRSGKSSIMKSDAPIGKCKSECITPNGSIPNDKPFQNVNRITYGACPRYVKQSTLKLATGMRNVPEKQTRGIFGAIAGFIENGWEGMVDGWYGFRHQNSEGRGQAADLKSTQAAIDQINGKLNRLIGKTNEKFHQIEKEFSEVEGRIQDLEKYVEDTKIDLWSYNAELLVALENQHTIDLTDSEMNKLFEKTKKQLRENAEDMGNGCFKIYHKCDNACIGSIRNGTYDHNVYRDEALNNRFQIKGVELKSGYKDWILWISFAISCFLLCVALLGFIMWACQKGNIRCNICI

SEQ ID NO: 11466 - protein, 566 aa, Artificial Sequence; identical to SEQ ID NO: 9994
  derived and/or modified protein sequence (wt) from hemagglutinin__InfluenzaA__AHL96497

SEQ ID NO: 11467 - protein, 566 aa, Artificial Sequence; identical to SEQ ID NO: 9868
  derived and/or modified protein sequence (wt) from hemagglutinin__InfluenzaA__AHL96509

SEQ ID NO: 11468 - protein, 566 aa, Artificial Sequence; identical to SEQ ID NO: 9835
  derived and/or modified protein sequence (wt) from hemagglutinin__InfluenzaA__AHL96521
